United States Patent Application Publication US 2007/0067865 A1 - sequence listing, part 57

SEQ ID NO: 366077 - DNA, 328 bp, Zea mays
acggggtgatttaaacatcattttttgggttcttacaggaaaagaaaagcgggctacacttgcatttcaataatacccggattcaataaaaaatattaggggtaataacaatttacatctacaagttttaagcctacacaggttatgaaccgaggaaaccaacaatcttccattatggaactgaactctgagtaataacactagatttccaaaaaaaaatactggatgtgaactgcatctctatggaatgcgaacgaaatgctgctgcaccaatcatttttcttttcatgaagcttcggcaaacaccgttattataaaatttgcaatg

SEQ ID NO: 366078 - DNA, 352 bp, Zea mays
gtgttggttttatgcatttatgagaatgtgcataacactagtttagtttttatgcatttatgagaatgtgcataacactaccgtactactttttatgcatttatgagaaattgagaatgtgcatagtgttgattgcatactttctagtgtctccaaatgctaagcaatattatctatatcaggtaccactgctcagaacttttcgttggaacctgcataatcctgtgtggtttctatgacctgctttttgcaaataagggatactacatttttctcttccttcaaggcacggcgtttcttgttgttggtcttggctatgtcggtacacttctctcccttgcactgcatatgc

SEQ ID NO: 366079 - DNA, 523 bp, Zea mays
ccctcgcgttcgatgaggctcaatcaccatcacatatggataatttagtctggcttccacctggtgctgtaattcagcaaaatgcaggtttccctggtgatttgagcaagcacaataaatttttggatgggaacagtggatgtgatcactgtggttcactattccacaagggtcagggttcggtgactgatcctatctatatgaatcctcgctggactcggccagtccaacaacattttgaccaaccaagcatgattaatgattatcccggtcaccatgctaattcttgtccagattactgccgccctggtgagcattatgcgggaggtcaagatgttagattggaaaatgggttttatgttaaagagcaaaatggtggtcatactcccatgctttataatgagtcacgtcctcacgatagagtctggtatgcgcataccaaccaaagtcatcagcggtatgaggatccaaggctgcattatcctactaatgatagagtgatcgagccatacattgtcgatgc

SEQ ID NO: 366080 - DNA, 352 bp, Zea mays
tctctctttccaacaagctaattaaggccggtcatccctcttctagctcgtttcattatccatggcggaggagaagcaccaccaccaccacctgttccaccacaagaaggacgaggagcagctcgccgccggcgggtacggcgagtccgccgagtacacggaggccacggtgacggaggtggtgtccacgggcgagaacgagtacgacgagtacaagaaggaggagaaggagcacaagcacaagcagcacctcgtcgaggccggcgccatcgccgccggcgccttcgcactttacgagaagcacgaggcgaagaaggacccggagcacgcgcaccgccccaagattgaggag

SEQ ID NO: 366081 - DNA, 296 bp, Zea mays
gggtcccaacaaatcctttttgccatcaaacaaccattgttttgtttggcaagatgtttttgattggtgggtgaggtgatggtggggataggatgttatcatcatatcatataacacagaaggatgtacaccccagcagaacacatatttttgcctggaagcccccccgttttttccgtgatacataaatccatttagtcttctacgaggctcctaactagcctacctagtcatatgcagtgggcccacgagaaagatggcgtcattactaggtgggcctgttttccaaaccctga

SEQ ID NO: 366082 - DNA, 366 bp, Zea mays
aaccaaaaacttatgggcatgcatatatatattggggtcggagtagcacgtacgtagcacacactagtactgtactgtacatatatatacggcacgcacacatgaccttcgcctcatgatctctctcagtgctacagaatgaagaaacaaacaggaagagagctgctagcagcacgtatgcaagaggagaataaaggaagagagggccggggaaaagctctccattccgtcatgatgcatgtcttatattatatccatgaacgatggacggtcttgatcacatttcagtacgtatatatatgtgtagtagttcgaattcccctcactactgctgcttcagcaaattaagggttgttgttggcgtgg

SEQ ID NO: 366083 - DNA, 194 bp, Zea mays
ggggcctggcactgcaatttttttgcaggagaaaaaaatttgcccggcaatttgttgatttgcattgggaaagcgcaaattggctaggggctagggcacaggcaaactggctagcttggactacactactactacacaaaccggttgcccttcctatttactacacaatccctttttgctagaattactatctt

SEQ ID NO: 366084 - DNA, 184 bp, Zea mays
gcgtgtgttgcagcaccgagtcgtcgtcgtcgtcgtcgtcatgggacgacggccacccgccaccgccgctgcctacggcgccgtcgtcgctcggcctgggcctcgggctcttcccggcgacggtggccacccagccgtgcctgttcctggacccggcgccggtggagagggaggaaggggagcg

SEQ ID NO: 366085 - DNA, 180 bp, Zea mays
caggctctcaggcgcacttatttaatttaaagccggctacaaccaatttgttagacatacaaatcaaaactattctcactctacagaatatatcattggcagtattaaattgctctatgcactgatctaccgattcatatcctattggactgctaacccctggagatggcccattaaaac

SEQ ID NO: 366086 - DNA, 357 bp, Zea mays
ggaggccatcgagtttgattaggccaggctgtaagtctcctctccttcaacctcgtttactagccattactggttactgctgctgcgctgcagcattgtatggtgtgatgttttggttctgattggtctagtgcagtaccgatgaactgagtagaggctacttccaagactttgccgagatccgcgagaacgctggcaagattgcgacagcgagtaaggtcatcatcccagaggtagatgctgtgaagtttcctgatcttgatgtggattcccctgatggaggggcactgcatctgccttttgttgcaccaactctgcaagctgatgatggtgaggctggagaccataagattcctg

SEQ ID NO: 366087 - DNA, 349 bp, Zea mays
cccacgcgtccggtttatcttagggtcagttggcacaccacgccatttgaacaaagactgctgaaggtgttgtctgatgaggaccgttgccctccaaggaaagtcgtccgggggaagctgttccatcttgaggagacagctgagtagcgggcagggttatcatattagcccaactgtgatgaggctgccagcgacctgttatgaaactgagctcagaagctggtaccgtcatgcatgctgctgaaggtgccgtgtacaaatagcataatttctgttggggtgtgatgctgtgtataaatgacagtttgagctgggttgtgaatatgagttactgtaccgtcatgcatgc

SEQ ID NO: 366088 - DNA, 204 bp, Zea mays
cggacgcgttttctttaaaatgtcattgaaagaaggaatgaactggcaagaactactgcagatgatttcttcctacaattgcaaagtggaagtctggacaccggtccaggtttgactggttcggcagtgagcaaatcaggaaataacagcagtaaaaatttagatgctgtggaaggggatggttaaaaggggaaacttggaaaa

SEQ ID NO: 366089 - DNA, 133 bp, Zea mays
gtgtcttattttttctttcttttttattttttgagcccaggcgaattacaacgctcagttgcttataatttaagatacccagtgcacaaaatccagaccgaccgggacttttgacttggaaccaaaataaaac

SEQ ID NO: 366090 - DNA, 232 bp, Zea mays
cgaaaaccgccatagttcatttcacaagccgaatgaaagtacatagggagattcatcgatagctaagtattaggagtaatttatgtcattagggcatggaattaacagatttgacaacagccactccactcacacacattgcgtggagcagctattttcttttcatctagctaacctagcaactgatcggattacaccacggcgcggggggctaggctagtttggttggaaa

SEQ ID NO: 366091 - DNA, 328 bp, Zea mays
ctcacggtctcacctacctcgcgtcctcgccggaaccctaacggtgaccgcctgccgtgcccatcggcggcgatcgcgttgctgcgcccccgatgagttacctctgcgcgggcagttcgtcgttcgatgaccccgacgtggttgaggtgtctttcggccaccgccgcggctgcggggtgggcctccggccaccacaagaggaagcggagccaggttgtccctcaagaagtaattgaaattgatgatgatgatcctgatggagtcataattattggtgataaagcaccattggacaagaataagcaaactgttgtatgccctatggatt

SEQ ID NO: 366092 - DNA, 269 bp, Zea mays
gggccaagaacaattttttcacgaaagaataaacgattgcagctacatacaactatactgtgtcaaacttagatacatcaatcacgcggaagtcagctttacaaacgcagcaacagaaagcatcagaagtaaaaagagcaaaaacagagagggagggaattcgctcacgaggctccgctgtatccggagctgtagccgctgtagccaccttttttcactgcacccgactcctccatctcctgcgtctggcggccctcgctgcttgatcc

SEQ ID NO: 366093 - DNA, 128 bp, Zea mays
actcgaacccaaacataaacaaaaataattttaaaacacttgttacgaataacctttgggtttagagtttagggcagggacagaaaaaaacatgtcgccagacaattttatgaagttcgggtaataag

SEQ ID NO: 366094 - DNA, 184 bp, Zea mays
  unsure (1)..(184): unsure at all n locations
cttatgactcgatctacataaaattgtctggcgacatgttttcttctgtccctgccctaaactctaaacccaaaggttattcgtaacaagtgttttaagattatttttgtttatgtttgggttcgagtnaaatataatattccttatttattttattttacataaacaaaaaaaaaaataaaag

SEQ ID NO: 366095 - DNA, 480 bp, Zea mays
ctagatcgcgggcggccgttcgcgatctagaggagcatgttgaattgaagatgaagagaggatcaaggagatgttctaccccatctcttcttgcagatcttcttggggaaaccctaggtggctacactctggatcattcctagtacacttttcttcttcgataaaggcaagtgaatgtagcggtggttgctaccgttttgacttgttgtttttttatcgcctacactttaatattcagaattatggaattctttcataattgaactctatggtgatgctttacttgcttgtattatactaatgctcaaccatatattgatgatgattatgattcgagtatgacccaggagattaattcacacccctgaaggtaaacaaaatattatttgaggtttgtattgtatgtgaaggaagtgaagcatattgttaaatgcagcatgccatatacattgcatgattcacttgcatctgaaatttgtc

SEQ ID NO: 366096 - DNA, 100 bp, Zea mays
tcgcggacgctttggctgtcgcgtgggcggcggtccaaggcgcgaaaatgtgtggcgcatccaagatcatcggcgttgatctcaaccctgacaaggagga

SEQ ID NO: 366097 - DNA, 410 bp, Zea mays
cccacgcgttcgcccacgcgtccgcccacgcgtccggcctggcgtcgtcgccctctccggtggcggcggcggcggcggcggccagcaggcggaggggcgtcgtgtcctccccccgctcccggctccagcgccacatgcggctgccgaggatcagctgcagcgccaccgaggaggccagcggcgccgtgtcggccgtcaccgtggagaagatgctgacggtgacggcctcggtgcaggcggcgccggccatcggtcagatgtacttccagcgcgccctcgacgacgccggcgacttcttcggcaagacgctgctgatggaactcgtcagctccgaggtcgacgcaaagacggcgacttcttcggctgcaactcctgggtgcactccaagttcgacaacccggagaagcgca

SEQ ID NO: 366098 - DNA, 416 bp, Zea mays
cggacgcgtgggtagaaggtggagcagtgttagcgacatgagtattgacctcagcaacaatgagagtagtagcttaaatgacaaaaaggataatggaactcctgccgggactccaacatctactgatttggaggccgactctaaagtaagagctaatgaggactctaatggacagaaggattcaatcacgtcacactcttggccttgtcaaaaggataatgtaccaatggatctggccaccacagatttgtgcccaccctcaattttaagtaatacacttgctcctcataaagagagtatatatggtgatggtgcagaaaacgacatggttatgaactctagcattgaaagtgaagcatcctttgggaaagaaccgggggttattcaaggacacacagggatgtcaaatcatgcta

SEQ ID NO: 366099 - DNA, 218 bp, Zea mays
aaaaaagggcgataaccagggctggacttccattttagccttggtttaacacccacataattaaacaggttttgtttatatagaggataaactccatcccaagacccacgagccgaattagttttgggtggggcaatgaatacaagcttccgcccattaagttatccaagggggggggccttgggggtgacaaattttcccccttacagccaaattcc

SEQ ID NO: 366100 - DNA, 330 bp, Zea mays
  unsure (1)..(330): unsure at all n locations
gcaacgtcatcgttgaggattgcccgtacgaggacctcgccggcgatagcggcctctcccgccgctgccagatcatactcggcttcctcaccttcgtcctcctcttcaccgtcttctgcctcatcatctggggcgccgcccgggcgtacgagcccgaggtcatcgtcaaggtatacacaattagttccacgtccacccctaaattggagtctgagcaacctcagttcacttcttcttcttcttcagnttatgggataatagtcgttcctcttcctctctgtttggttgtttcctatctaatccctaaaccgagtaattgaccgctagtta

SEQ ID NO: 366101 - DNA, 208 bp, Zea mays
gggggcccatattaaaacatcactttttattttaaatttaacggcttttggtggccattgcaatttataaaaaatattttccaccggtttacttcaccacggtggggggggttcttagcaaaattttccaacaacttgggacattttttttaaaagggggaaggctgatttaaaatatgccccatggcccctaaatttatttttgccc

SEQ ID NO: 366102 - DNA, 292 bp, Zea mays
aaacgaacaagttttattcagtttgcatttgcactaacgggccaaattacaggggtcccaaacagtttccccctttgaggggaaactggcaaaaaaggaaaatgccccccctgaaagatttttttacaaaaaaataagaccccagtccacagttttaagccatttttttacaatccacagtccaccgtttaaagtttccctaaccatttataaccccttttaatccggaaccaaattttttggggttgggggagaaaaatataccgggcctgcctttacctgaagggctccc

SEQ ID NO: 366103 - DNA, 161 bp, Zea mays
ggagggaaaacacattttttttcgtctcgatttattagggccgcatgttcacaagatgcttcattgtccgattcccgcttaaatgcggggaaatagttcaacatttgcatccccctgggattgctacaagggtttcaggaccagaacttcacttttttggg

SEQ ID NO: 366104 - DNA, 279 bp, Zea mays
cagcaatgctacttgatataaattttgaaaactcctggagtgttccttttgtgggaaagattggacatgctccactggcattttaaagagagactgggtgcctatatatcatatatgtatgtggagcatctgagctggaaatgtcattaacccctgtataatatatggtattgcattcatctttgctggaatatctaagaataatgctctatgcagcatatcttcaatcattcagatttgcatggggagctgtagttattggcttattgcaagatacta

SEQ ID NO: 366105 - DNA, 188 bp, Zea mays
cgggggggcaaaacgaaacacgaatgcctgggggcaaaaaaaaaatgttgacaaatgtcaaaggataggggcgggcccaagggaaatatttgaaccacggcctgtacaaactactgggatgggggggggttttcaggggggcaaccccacataccacccgaaccttgcctttgttttgggcccagggc

SEQ ID NO: 366106 - DNA, 223 bp, Zea mays
aaaacaaaaaggtaacttttttttttttggaagaacaccaccgtccttacaaagaaaataaaggaaacggttttttatgggggggggaacaaaacttcataatgaaaaacaggccccaaccatatgcacaatgggggggacgagttttggatttacattttgcaaaagggtgaacccaaatgggggccttttacactaaaagggccttaataaaaaatttggg

SEQ ID NO: 366107 - DNA, 388 bp, Zea mays
ctcgcctctccgtcgcctctcgccgcctgcctcgcttcttcttcgctcacaccacgtacgatacgagcctcaccagcgccggcgctgtagtgtgcagccctcctcctggatctctgcacccttcggcggccacgcctcgcgcgcgcgcgcggacatggaggtcgaataccacgaggtgagaggagttcgatcggtctgctccgcgcaatgcggcgggcgaagacttatcttctccttattttccggcgccggccgggccttggatcgtccttgctgatcatttccgtttcggtgcgcttcttcttgttcctcctcctcctccttcggtcgcggaaacgccatggatggatggattggggacgggctagcaggagttcgtgcggagctc

SEQ ID NO: 366108 - DNA, 206 bp, Zea mays
gatatttaaaaagagagagagagaggatcgagtgatggagggtctggggcacctgctgctgttcgccttcctcttctggttctccaccttcatggtcgcaccggtgatgaccgacgtcaccatggcggcgctctgacccggccgcgacgagtgctccctcgccatctacctcaccggtctccagcaggcggtttcagggctggggg

SEQ ID NO: 366109 - DNA, 211 bp, Zea mays
gctaacaccgtacactctcattcagttctggtgcgtacagtacatatcgttcaagcaaacatagtccacttggtagagcagaaactaagcttttaatagtctgtgcacccactgattattcacgaacaaaaacttacaggtccaacacaagcactaatacagattcagtgtgtaacgccgtaacatatatatatattggtaacgagaactc

SEQ ID NO: 366110 - DNA, 109 bp, Zea mays
acagggcaacagttccctagattaacatcagtgtataagccgaattcagcaaatgcagcacaatcgggtcctgggtccatctggtttacatccacccaagacttatatt

SEQ ID NO: 366111 - DNA, 440 bp, Zea mays
cacgatgcagcagcagcagcagcaggcagccgcctcgccacgcgcccgagcaacgccgccgagagagcaacccgcccgcccgccggtgggcagtgagggcaattcgtcttcggctggtccccgtcccgctcccgcccgccaaccccaattgctcccctcccgaggtcagctcaattcctgctgtttctcggattcgattcggttccgccgggcgcgccatctccctcgccggagatccagcagttacgagctcgccggggcccgggatcatgcctccattgctctagggtttgggcgggtaatccaattggctcgcctggcccgcggcttccatgctcgattcaggcctgccgcgccgctccctgggcggctccttgatcccgcggcggttggtgtggcgccagcggagatgagatcccctccatggccggcgagctggg

SEQ ID NO: 366112 - DNA, 430 bp, Zea mays
gcattctgattcattcgttcattcattcattctatacagagcagaggatacaaggggttcgttccgttcctctccttcctacgtctacggccccggcccctcaaatcaacgaacaaaagccacggggggactcatcatcggtcgaaaccccggttaggatctcagagcagacaatctcatctacctaaattaaaagactagggctattggagcctctgaaataatgcttggtgcatcagcagtctcctgtcgtcggtgcccaggggggctcttgcaccgttgctggccttttgcgctgcttgctccttcctgatcaggcgcaccacggggagagcgagcagctgccacccgacgaccatctgtgcaggagctcgcccaggcacagcgcggcgtacgccagcacgacgagcttgagcaggagcggcaggta

SEQ ID NO: 366113 - DNA, 464 bp, Zea mays
cgttcttcgtgggcacagctaggctggctgggccaattggtccagatcagtaacacaaagacgacgatatgaacaaagcaagcacatgacatgattccatggtattgttgcaatttctggcgaatacatttacagacaaatcgtgctagtacgtgccacagcgtgcggtcatttctaaatatcaccctcagcaaggaaatgctagacacaacacaagagagttatgcactctacaagcagcgccgccgtagatcctcactggattttctccatcccgtaggtatcttcagctccactggctacatttcttcttctctctgctatcatctcggtgtatgcctgagagaaggcaccacagggtcagttgttaagaacagggtgaggcggttgccggttaggccaaaggtatttgacatggaagaaatgcttcattggcaggtatgctgcagttagaggttggagct

SEQ ID NO: 366114 - DNA, 276 bp, Zea mays
gtttttatcactgtttgaccagaaaccccataactagcttcatatgattaattacttaatattaatcctaaaggaatagctaactagaaaaaccttagtgaatggtctgtaccgtgaaggaaagttatattcaagatgcaacttactatatttctattatgtaactgcatattcatgaaataacataagcattcatgtacaagcattcatgaaataacataagcattcatgtatatgtattatcatgtataaaacacgaggaagaaaccgtagtag

SEQ ID NO: 366115 - DNA, 338 bp, Zea mays
ctcgatcgatctcactctcagctggtcgctcactcttgcagctccacccttcactcagtcttaggctcttagctctaggctctagctagccgcgccactccttcgtgtagccatcagccttctcatcgccaccaatggccactgccgaggtccagaccccgaccgtcgtggcggccgaggaagcgcccgtggtggagaccccgccgccggccgtcgtgcccgaggagtctgcccccgccgaggccgaggccgaggccgaggctgaggctgctgctcctgctgatcccgaggagcttcccgcggccgagcagcaggcagccgccgagcccgaggccgct

SEQ ID NO: 366116 - DNA, 60 bp, Zea mays
gcatcatgaaaatacacatcaatatatcgaccgaaatgaacagacaataactgtctgtat

SEQ ID NO: 366117 - DNA, 61 bp, Zea mays
atacagacagttattgtctgttcatttcggtcgatatattgatgtgtattttcatgatgca

SEQ ID NO: 366118 - DNA, 151 bp, Zea mays
ccgttctctagcatgccatatagacaaagcaaagggggctttattaaggggtcggaaatcactcgatttggattagacccatcaaggggcagccgatgtcagtatgccagctatgtgaatccaatggagtgaagagcgaaactgatgaggc

SEQ ID NO: 366119 - DNA, 318 bp, Zea mays
ccctcgcttccgcccacgcgtccgcccacgcgtccgattattacacaataccatatatgacgttgttcccctttctagcaaggttaggtttatttcttgcaagccagcacttctctttagactatgtgtataatcggatttcatatgaacatttcagttaacagttttggacactcagcttcctgttaaacaagcatttaaaataatgcatgatgaggtatgtatgttactgtgcttgctagagttgcttcaaatagttcactttccctctatggtgcttgtttgcttttatttcaactatgctttttttttaatttc

SEQ ID NO: 366120 - DNA, 173 bp, Zea mays
ctcctcgcgtccgacatatgagtatatgacatatccccactctagccaagtagccagtcctctctccactctcctctcgcaccaccaaaaaaaccggccccaccgttcgccatgagctccgaagcagaatgcgcagctccagccgccgccgcgccggatggggcggtcggcgg

SEQ ID NO: 366121 - DNA, 105 bp, Zea mays
aaatgattcagcacgccgcccgttgggaagggagcttcgagtcggcccttggggcgcgaactccctaacgtgagtcggaccagcaaaaaaaccgagcaccaccga

SEQ ID NO: 366122 - DNA, 73 bp, Zea mays
agacctccaaattgaccatctgtgaaggagaagatggcactgaatcatcaaatggagatgtgtcccccccccc

SEQ ID NO: 366123 - DNA, 157 bp, Zea mays
tcgtcccatccagactccaactaaacgccattggtgaatggatcccaaggaggtcaaactgatgcagagcaagttggacttttcagtcagtggcctggccttgcagatcgctcccgcgaggctggccgaagaggcagggggcttgttagtagtccag

SEQ ID NO: 366124 - DNA, 80 bp, Zea mays
gttttgtccaatccttccaagactctcttcttgctgcaggctgcctcaagcccaggctcaatacagctggacgaggagac

SEQ ID NO: 366125 - DNA, 254 bp, Zea mays
ccctctcgtccgcccacgcgtccgctagccgccacaaaacagccggccaccaggttgtctcctggccgaccgcgctctgctgctcaaaacttcctctctccctatctgttatgcctcggccaaaatagctcttggcaaacggcttggcaagcagctgtctgctggcttcttgccttagccaaatgaagatcatatttttcacgacctctcttttatttgttttagttcttttttctgcttgactgaatctcatc

SEQ ID NO: 366126 - DNA, 90 bp, Zea mays
acgcgtcctcgtggccgcaaacttgccaccttcgctgatcagatccagctgcagctgcagctccatctctcgtcgacaccagtgtccccg

SEQ ID NO: 366127 - DNA, 84 bp, Zea mays
ctcctgcagctaccgctccatacttccctgttccacccacgcctccgtcttctgttactctaaacccaataatactagtaggat

SEQ ID NO: 366128 - DNA, 52 bp, Zea mays
ggatgcggaccacagggcgaaggcgttaacgactctgcccgatacccgaaaa

SEQ ID NO: 366129 - DNA, 269 bp, Zea mays
  unsure (1)..(269): unsure at all n locations
acctatctaccgccacgaagcgaccccgacccgttcctcgtcgtcgtcctcttcggatcttcgcttcatccacacaacatcgcatccctttttttctctctcaggggaggggcggcgcgcanaggcacgccgccgagctncgggcatcccatctgacgcgaccgggcttcgggcacgccgccgatcgagctatggacgcgtcgagctccctgtccctcctcgcactggtgaccatgctcagcctcctccactccgccacgaccgacgcc

SEQ ID NO: 366130 - DNA, 172 bp, Zea mays
cacttctcacgcagagccgcagagatccgtcacactgcaagttttgaaaactgaactgtaagatggcatcagcagagctttcccgtgaggaaaatgtgtacatggcgaagctcgccgagcaggcagagaggtacgaggaaatggttgagttcatggagaatggttgcgaaaa

SEQ ID NO: 366131 - DNA, 124 bp, Zea mays
cgcggggtcccacgcagtccgacttactcctcgtcacgaagcgaccccgacccgttcctcgtcgttgtcctcttcggatcctttcttcatccacacaacatcgcatccctttttttctcttctc

SEQ ID NO: 366132 - DNA, 102 bp, Zea mays
tcttaccctctgaattccttgttcggttgcacctcttgccacttaccctctctctctctcgtgcgtgagtactacttctgaggccgaaaggccagaagagag

SEQ ID NO: 366133 - DNA, 73 bp, Zea mays
atggtcccgagctgggagagagaaccgaccaagggggtatttttaaggccgatactagaagccaaccagagag

SEQ ID NO: 366134 - DNA, 341 bp, Zea mays
  unsure (1)..(341): unsure at all n locations
ccctcgcgtccggcggcctcctcgcagcacgtggtggttggcgagccggccatctactccacgcctcccacgccaccggcgctgcccgcgccgcgccaccaggtcctctcgggcggccgaggcgacctaggtgcgctggcgcgcctcgaggacagcgtcaagcgcctcaagtcgcccgtcgggtcaccggggtcgatgctgccgcgccaccaggccgacgcggcgctcgcgctgctcgcggactggttcctcgagtcgtccgggagcgtctccctggccgctgtacgcgcaagcggtgcaagtccggcagcccgacccggcgacgntgaagatgaaagatc

SEQ ID NO: 366135 - DNA, 517 bp, Zea mays
  unsure (1)..(517): unsure at all n locations
gtgttgcagccttgcaggagctaggaacatgcaagagtaagctaagctaggaatcagatatgtctactggccttctttttatacttactgtgactcatatagtcatatatagcagttatatacgtatatatagttatatacataatatatataatttatggctatattgctaaaacgcctagaaaagcgcctagaaacgcctaagaccgagtactcccgactaggcgctaggcaatgggtcaccgcctagattccgcctagcgcctagctgaaccttggttctcgttgcccatagattgatacctcaccaccaaaaaaatgactttttttttgattctgtctacacgaagctacggnttatgtccttgctcatatttccacatagcncctgatgttcttgactttgccggtacgacccttatagctaatgcatgaatgtggaaggactatatcaaaagcttatggatatgagcccgaaaaagaaattactgagaaccttctttagcagatcttatgg

SEQ ID NO: 366136 - DNA, 67 bp, Zea mays
cccatgcgtccgcggacgcgtgggcgcagtcggagtggcgcaggcgacgctgtccttttgttacacc

SEQ ID NO: 366137 - DNA, 278 bp, Zea mays
ttttctcgtccgtaaatatataaaaaaagaagctagacttcatcaccaatttctttatctaacacccaaaaaccaaaaaaacgaatgggggcggcccgtctagggggtccatcgctacctcccgcgggcttgccccgttgttgtccttttatggggtcgcccaaaaccaagcgactgggcttgattgatctccgttgcgacggggagatcatcagccggctgcggcaccgtaccctggtgcagcttatcggctggtgcctgggcagctgcatcatgct

SEQ ID NO: 366138 - DNA, 258 bp, Zea mays
ttgatgacgtatagcagaaccaccaggcatttgaggggcatggcaggtgtgggaatcaaggtccggaaacggaagccagttgtttccagggttttctcgagaaatcttcacctgccaagcctgaagacctgaactcggatgcactgggttttgatttgaaatttaatgtatgctatgttgccttctcatcttcaaagaggtgatcattattctattgctgcaccgtaacctgttgcatctaattcggtggggcccgtg

SEQ ID NO: 366139 - DNA, 172 bp, Zea mays
cctcgccctctcctcctcctcctcctcctcgtcccccttcctcgggttggaaattggaatggaggcggcgacgatggcgtggacggcggcggcggtcggggccgaggttgttgctctggtaagcgtggctaccacccctctgggccgccatcacctgcgggcaggtgagctc

SEQ ID NO: 366140 - DNA, 684 bp, Zea mays
cggtcgcgtgggttcattattttactacattaacgggggtcttttttgacttttccttttattcacaacccccaaccattattgtcccttcctttctctcttccgctgcccgttccctctacccgcctacccaatcttctcctggggggggggcctttttgggggccccggttttccccccggggggtgggcccctttttttttttttttgggggccctttttttttttttgggggggggtttttcccccgggggggggggggaaccccgggggttcccccctttttttcccttgggggccccccccttttttcccggtggggttttttccaatgggccccccccagttcccccttccccagattttccccccctttttggtttggggccccccccttttggggggccttttggcggggggggggggggtgttccccccccggggtccctttcctttgccggcccctttgcccccccttttgtttttttcccttttttttccccgttgggggtttccccgggggttttttggggggccccctttgggcccctttgggttttgggcccccccccccaaattttttgggggggccccgggggcccccccccttggggttttccccttgcggggccccgttttttgggccttttccacgggccccccccctttgggctttttttttt

SEQ ID NO: 366141 - DNA, 328 bp, Zea mays
ccctctcttccgcgcgcctccgagctccatagccccgggccgccggcgccgggccatcgtgatctcgtccggctaccaggatcgagcggacctgcccgcagtccgcgcccaggccatcgcgccgccgacccgagcttcgccaggcgcctaggccgctcgcccgcccggccggcaggacgactgggcgagctcctccccgcggaggcggggacggcggacccgcccccaggccgagtcgccgagctccgtcccgcgcgggcgcccccctgcccagtgccagccgccccgctcctgtcccggccaggctcagctccggcctgttccggtc

SEQ ID NO: 366142 - DNA, 151 bp, Zea mays
cattcatgcgtgcgtgcgtgcccaccgcacgaccacgagggggcatgcaacatatactttacaaaattcattcggttgttgacttggtttcaattcattgggttgtgaagacataactaacatggatgcgatgcgtactcacaggatggtg

SEQ ID NO: 366143 - DNA, 104 bp, Zea mays
gcatccagggggatatataaaagaattgcaggtcgtactatcctctatggcagctcagagacgaaggcccacgcaaccgcgtctgacggccccacccatgtgag

SEQ ID NO: 366144 - DNA, 77 bp, Zea mays
actgagcacaaggtggtgaggctcattgttcagaacatttatagatggcttcaattgcacaagcggtgtctagcatg

SEQ ID NO: 366145 - DNA, 402 bp, Zea mays
gtctcaataatgttatagaaacactggaagtaaacatgtccaaacacttaaaacaccatatctggttgttatgttcagaactcttgaccagataaagcaaatgcttacattacataaacaagccagaacgtcctcagaactactgctcgaaccaaatggatggtctggcttcgttgaaatgtcttattggaaaacattgcctcacttgggtgcttggcacttcttttacagatctgtgtggcttaaatggaggggctacataaaatgcagggccttagtaatatgaactggaaccgcttcctccatagtagccaccactgctggtacccaaattgcgacccgagttaagcgaagaatttgaactcccaccaacattagatccacgagacccatagttaccac

SEQ ID NO: 366146 - DNA, 404 bp, Zea mays
cttctcccacagccgtttctatttttactaataaccatgaagaatctctcacatccacaaccagtaccgcgtatacacagacaatcagaacgccggtgctaggaacatgaagctactacttaccaatgcaatagggaaggaatgggcggacgcaaacaacataaacacaatatacaggcacaaaagaatcgtgaaatcatgtatcggggctcgtaaagagaactctgatgcgctgcgcagcgctgtgctgcaggggagcagccattcacagcgctcatagtcctaaggcgtcgatggacagcagcctcctgttcatggcgggaggtgccagccccggaatatctctgatgttcttgttatgtgggttgacgatctgacgaccaatctctttcaccatttgactg

SEQ ID NO: 366147 - DNA, 267 bp, Zea mays
acggaacataaaacttccatgtacccacatattgatccactgcacatgttccagtattctgaactggtgattatgcggtttatatactgactggagacttcctatggggcatactggtaacttccatcaggaaaaaaaaagttacaagaccttccaaaaacaaggtttttcatttttcaacaagatatgagcttatggaagtaagaggattggagagcatttgcctttttagatgctactgaagcatttgcgcttttgccagccaat

SEQ ID NO: 366148 - DNA, 186 bp, Zea mays
gaatccccacagctcacaaacaaaaacgatgtccagtaaaacagttcttagccagttgaagaacaggactacttgaggcgcgaaacaagaacgctaacatgggaatcaccatgaaaagggttgaactaatcagagagaaaccatattcccttcctaactgaggctaactaacacacgcacacacac

SEQ ID NO: 366149 - DNA, 340 bp, Zea mays
  unsure (1)..(340): unsure at all n locations
ttactcgaccgggtcgtcctacaagcnagaggacttcacatgcggggggggtcttttgagggacgcagccggaggccgaaacacgacaatgaggaaagcgaaactgatcaaggaggataccaagagccagaaacgaagcaacgggacgaatgactgataacgctgaaaacgaccggtgtgaaggaggaacataaagcaaagtgtaaggagaaaacagaagcatccgcggctgcaggaacaaacacggcagcaaacagcacggactacgcgaaggacaaggcaaactagtatgtcccagaactagaagaggggcaagaaagccaggctgaaaggaaacaaa

SEQ ID NO: 366150 - DNA, 257 bp, Zea mays
gggagggatttttttttcgattttattacttataattatttaaaaatgcatatgactccagtctccacgtataaacagcaaagagtttttttctgggatataagttgacctatatggcacattcatgtttattttatcaatagtctgcagactcttcaaacttgagatgatgggcaataatgggttattctgaccactaccaaggctccgttccagagttccacctttctcccatgaccttcgatcaaagcttggac

SEQ ID NO: 366151 - DNA, 597 bp, Zea mays
cgttcttttgggtcttagtggaatcgtcatgggtggaggtgctgtcgtttctttacatggaaggtttagagttgccactgataacacggtatatgctatagactgaaatcaagtgcaatttactaaggctgttactttttacttatcaattcaagatggactgtagttgggaagcacataaaactgtgtgttatgatgcagcttgggatcttctttcttaagtactgcttaatgttgtcccatgctgggaattctaggtgcactcttttttttaatatgtgctagtattgcatgacagtgcaaaaatgttgcatagttctagaagctagctttcttgtcgggtaaacatggcaggtgtactgcctttcaatatatttgtcaggacaagtcatatataaaacttgaaaatacagaagtaacaacatttgaacataacacacccatattgctgctttaggattgaacatcaatgcatccacatgctagatttgtgttattacctatcactttttactgcgatttgtgatggatattgcgcgagaaagtttttgagaataggttcagttatggacttatgtaggagctccctttatgagc

SEQ ID NO: 366152 - DNA, 213 bp, Zea mays
gttggaaaaaaggagtctccttttaaatacatgcatagaaacatttgtttacaagcgaacagctttgttttgttttgttttggggcattaaacaattggacaaagaatttcctgcctttaatcgataggttatcctgtaacgccaacaccccttgcactgggcactggtttggcctgaggttttatacattttgcagcatttttcaggggggg

SEQ ID NO: 366153 - DNA, 219 bp, Zea mays
ctactagcacacaaggggggattttagaactttacgggggaaaagaaagcatgcaaatccaagggaacggcttccactgaacaacatggaaagactttggtgcctaaactcgggactctgtacgggccgctgaaaaattctgagccctagctagacagagacttgcagattagacacttcaaatgaagaacgcccaaagcataacaatctagggtcagt

SEQ ID NO: 366154 - DNA, 244 bp, Zea mays
gcgatatgacaggggggggttttatcacattgtgggggtactaagagaattccccagagacacaactactacggtgcaaccaaacacttagaagaatgcggcagaaattttattaaaacctgcgcagcctaaaaaacaggatctaggtccttcgaacctaaacatctaaggtcccttttggttcacaacggccgggaatgcctacttgggactacatgcattccatgcctagggaggaatatgg

SEQ ID NO: 366155 - DNA, 107 bp, Zea mays
ggatgcgtgggcggaccggggaaatatggggggctatataggtattctgaagagaccaaaagggccaaaggagctggacgaaaactaataccgggacaaggataaga

SEQ ID NO: 366156 - DNA, 213 bp, Zea mays
tgaatagctagatcgggtatgagggcgtccttgggggatcttctccgaggagtccagcatcgggctttgcaataatcttggaaatgaacactgaggatcaagctgaggaggatggtgctaacattgatttaaactcacaaggaaaggaaactgagtcgttctaaaaaccttcacaagacatctattagcttggaacttgagagatgcactcat

SEQ ID NO: 366157 - DNA, 82 bp, Zea mays
gctgcgggggcgaagacagagcagacagcaggggggacatctaaaagctagccgccagccaacacacaaccgagcaaccccc

SEQ ID NO: 366158 - DNA, 381 bp, Zea mays
tttattctgtcgtgcacacattggcatatggagttgcttgtagagagagctgagaggcctcacctggaactcaatctatcattacaacagacacccatacagcaaaggaaaccaacccacacatctaccggatgttcatatgggtcaacaagcaggacttctagcatacctggtacatgctatgggaggaaccagccagactacactcatgatgattacaacaatcaaagactcgagtggaatccatgccacaagacaacatctgcaaatggtactacagcttattgatcacatgcgcttgtataaacagatactgaagcatgtcgagagcttcaggtacaactatgctgatagcggaacacacatgatcatgagaaagct

SEQ ID NO: 366159 - DNA, 544 bp, Zea mays
tggtagtcttgcgctatgagcgcccaggcgagggggggctctctgagcctgtgcgcatactattgaatcacataccagctaaatttaggacgcaggcttattgaacggatctttcgacttaagtgattattacttctgaatccatttgatagcttattcattcagattatgacccataactatattgtcgagcatgcttgaattcgggcaaacaaactgagaaaagaggacatcctctagaagaatgagtgaaaaaaatgacagacaagtccctagatttaccccaatttcacttgctctatagatttataggtctataatatgtgctttcttatcaatctttgttacttaattatgctagataatcacttgaccttaatctaattaacagtgttgtcaatatagatgaagctgacaacctagttgattccttgtataagatatataagtcaaagcttacatcttctaaggtacctctacctttcataacctttccatacagtctggcaaatagtatttggcttgtgcaatggcatttacttag

SEQ ID NO: 366160 - DNA, 218 bp, Zea mays
gcttttcttccggctcagctactggagcaggcaaggggggtctcaaaagagaggtgaggaaagaggggcgctgatggagacccagagtgagagcaagtcatactggttggcatacatggatcaccagtcggatccccggactaggccgcggaatagggtgctgtagaggggactcatgttaggccactttgaacagcattttctaacactgtttctga

SEQ ID NO: 366161 - DNA, 152 bp, Zea mays
ctgtcttagcgctgaccggcacggtaaaccgaggggggatttttaagcggcagagccgcaactcgccacacagccatttcgccagggggagcccacggtgctgtcgatccgaagactagtgagagaccccaggacgcagatagactgggtga

SEQ ID NO: 366162 - DNA, 288 bp, Zea mays
atttcgtgttcaccgacccgttgagtatactgggggggttttttaagtgggagtgctgggactcaccactctgtcatgacgccatggggggcttactgtttgtggtttactactactagtgggaaacactaccagttagttaagctggagcaactcgtcatatagccagccgtacaggagtgccctagtattgtgtctcaaggcaaggtattgactttcaatactaaaacactgacgagtaggggagataaaaatggtactgcaaggtaatctgcttcaaagagacgc

SEQ ID NO: 366163 - DNA, 122 bp, Zea mays
agcccgagcgctgcaaggacggccgggataatgcccatgggagacctttttgaaaagagcctccgctaaggccgcgccaggatctccgaaaacagccgacactacttcttcacagaccaaat

SEQ ID NO: 366164 - DNA, 243 bp, Zea mays
tgtttctacgtgggcagggaggggccaacaagggggggcattttataggagcaactcacatatacaaccaacagaaaggaggggcccactagatacaaggctggagggaatagctgcaaacgaacatcctcaagaggttggcgtaggggaggatgaaaaggaccggagcaccaccgctcaccacaggatcaagacatcaacaaaggatactagagcggagaacaccgcaaaccgtaaagccaa

SEQ ID NO: 366165 - DNA, 267 bp, Zea mays
gtacacaaccgaaggagagaccaaaaagggggagcattataaaagaaccgggcggaaaaacaaccaacagaacaaacacacaaacaagaaagaagatggaaagaaacacaaacaaacgaacaaaacacaaaacacataacaacacaacaaaaaaaaaaaccaaaaaaacaacgaacaaaacataaaaaaaaacaacaaagaggcccacagaacaatgcaaaaaaacaaaaaacacaaaacaaaaaaacaaaaaataacgaacaaaaa

SEQ ID NO: 366166 - DNA, 305 bp, Zea mays
ggacggaagtcattctgatgaacatgtacgagattcatcagttttttccgcaactgaaattccgacaggacggaagctatcaccgacagagttaacaaagtcctcaaggtttctctccgccggcccacctgctcgtgccgcctgctgcgccatgtctctcaaagcctttactctctcccttatcgccgttgcttttgtaccttgacccatgaccagcttaacgcattttgccagctccgtcgcagctaacacgcccttaccgttacgcttccctttgacgccgaccccccacttcttcaccacca

SEQ ID NO: 366167 - DNA, 215 bp, Zea mays
tgtgctcgcgtgcggtgagaggccacacccacgggggccatttctcgaacggttaccgtgagaccgtcgcaaaaagcggcccatgacacgagatgagcgggtctgggctagcgcgcccaatcggggtacgggactagccgggctagccgccgatgaagacggggagaccgccggggcggaccgccgacggaacatcccgagagcggttaaggagg

SEQ ID NO: 366168 - DNA, 281 bp, Zea mays
tctcatccgtccgatttgtgttcgatcttcttccggtctacctgggggattttattgagggaggcgactccttccccggggatgaccgcagcggccgccgtcgcatttcctttgtacaccataatccgcatcccgcacgcagcgtgcatcggtactgctgacctacgagtgtggtggcgcacactgttgctagcttgtcggcctaaggttggggttgcggtggtttaccgccccttctcgtttgatagggacaggttccgtgcacgctatcgtaggctctc

SEQ ID NO: 366169 - DNA, 90 bp, Zea mays
ctacacctgcgaaagagagcacacccaggggggaattataaaaaagctgaccgcaaaaaccccccaaacaccaactatggacacaagaaa

SEQ ID NO: 366170 - DNA, 204 bp, Zea mays
ctcattcgtccgtttggtaacaccaaccgggggggccttttttagaagggttacggtgaaaagctcgccgcttccgacctcagaaactacaagagcgaatccttgctaacgagctatcagcaggcacaggatgtgtacgaccagctcctaatgaaaagagacaggcctcctttgatcaccgaggtcggaacatatcaagggctg

SEQ ID NO: 366171 - DNA, 278 bp, Zea mays
gggatgcttgcgcagacagggacggagaaccggggggggcttttagcggcgagtccgaggaacagcctcacgaaggacgggacataaaggacaaacgatttggaaaaagcctagagcacaaaggaagaccaaagcggggaaagaacgcggataaagacagaaatgacaggacccagacgacatggaaaatagacagtgccgaggcatggtagtgacgatcaacacacaaacagttacagctactggtgcaaaaaaaggaatgaagaagggatgcagat

SEQ ID NO: 366172 - DNA, 73 bp, Zea mays
gggatgcttccgcagacggggacggaaaaacgggggggccttatagcagcgagcccgagtaaccgcctcccga

SEQ ID NO: 366173 - DNA, 164 bp, Zea mays
agcgcccggggtcaaaaccgcagacagggacagaaaacaggggggagtttataggggagagggggaggaacagccgcaagaaggaagggacaaacggaagagagaagggaggggaaacgaaaaacaagaagaacgacgaaggggggaaaagaacgggtaaaaag

SEQ ID NO: 366174 - DNA, 66 bp, Zea mays
tggtcacgagcgcagagaggaacagaaaagggggggcattttaaaaggaagattccgataaacccc

SEQ ID NO: 366175 - DNA, 180 bp, Zea mays
gcggaatgaactgggtcgacccacttcagtccggactttgtcagcatcgaattgtacgtagtattgggggggtcattcttatcgtttggctcggtgtcatcctatcgacgtacatacataatatatgtcttttataaaatataaggtatgtacatagatcgactgaaagacatatataat

SEQ ID NO: 366176 - DNA, 182 bp, Zea mays
gggatgcttgcgcagacagggacggagaacaggggggggtttttagctaagattccgaggtacacccccccgaaggaccggacataggaggaaaacgactgagggagagcgaagaacacgaaggacgactgagggtgggaaagaatgcgtttaaagatgatagaagagcagccgcacgacat

SEQ ID NO: 366177 - DNA, 92 bp, Zea mays
tggtcacgaacgcaaacagggacagagaaggggggggcttttataacgaaaagggggataaaccaccggaagaagagattgatatagtagag

SEQ ID NO: 366178 - DNA, 73 bp, Zea mays
tctcgcgaaccagaccggacaaaaaaagggggtgttattaaacaaagaagcccaagaacaaccacaagaagat

SEQ ID NO: 366179 - DNA, 76 bp, Zea mays
ggtacaggtgcgaagggaggggcaaaaaagggggaggattataaaggggcggccgagaaaaacaaccaacagaaga

SEQ ID NO: 366180 - DNA, 134 bp, Zea mays
ctcacacccgcgggacgacggggcacccaggggggccatttcacagagaaggccgaaaaacacccccaaccaacgatacggagacgcgagagaggaggaggggggggagcggcaaagcacaaggaaaaaggggg

SEQ ID NO: 366181 - DNA, 259 bp, Zea mays
gggtcgttaccgcagacagggacggagaacaggggggggcatatagcagagagccccaggaacacccgcacgaaggaacggacaaacggcagagaggacggagaaggagagaagagcaagaagaacgacggaggcggggaaagaaaggggacgaagatagaaatgagaagagccagacgacaagggaaagcaacaacaccgagggaagggagggacgatgaacaatcaaacggataaagacacgagaacaaagaaagga

SEQ ID NO: 366182 - DNA, 271 bp, Zea mays
ggttcttttgcgcagacagggacggagaacagggggggggttttaacaaagagtccgaggaagaacctcccgaaggtacagacatagaagggagaggattgaagtggagactaaaacacaaagaaagaaggaagctgggaaagaatgggtataaagatgaaataagaggagccagacgacatgggaaatggagaacaccgagggatgatagggacgtgcaacacacaaacggttacagctactggggctaaaaaaggaatggaaaagggag

SEQ ID NO: 366183 - DNA, 251 bp, Zea mays
ttgatacgtgcgcagacagggacagaaaaggggggggtttatatagctacgagtcacattaacaacctcctgaagaatctggcatacaagacagaggattgatgagtagacaagaacacaaaggacgacgaaggtagggaaagaccgcgtataaagacgaaataacaggctccggacgacatggaaaatagacagtaccgagggatgacagtgaggatcaacactcaaacggttacagctactagtacaaa

SEQ ID NO: 366184 - DNA, 76 bp, Zea mays
tgttgtacccaccaaggcaggaactaaaaaggggagagcttatttaggagcaacaccgaaacaccacctccagaag

SEQ ID NO: 366185 - DNA, 313 bp, Zea mays
cgctacgcaagcggcaagaaacacgaagcggggggtgcatttcaagaagctgaccggagtacaccccgccgaagccaacacgagacacgaccaaaccgaacccgtggctacgtgacagcacaaggaacgggaagcgcacgagcagctggacacggaaagaaaccacccacatcaaaaggaagagcaagcaccagaccaagagctcgacccgacggtggcgaaaagaaggaggccgaagggacaggaacagggaaaacaaacaaaaggtgcacaatactgagtgaataaagcaggagcacagggtgcagagacc

SEQ ID NO: 366186 - DNA, 96 bp, Zea mays
ccttcttatcgtccccactaccagagcatgcgcgttggctttacccgagcctgcgtcgcgttcaccctccgagcgccttcctgctccttctgttac

SEQ ID NO: 366187 - DNA, 196 bp, Zea mays
ggactccgcacagacacggacggagaaaggggggggattcaactaagaatccacgggaaaccaccccaacaaccacacaaaaagagccacaagataggggcaaagccaaaagcaccaagcaccaccgaggcccggatgaaaaggacaagaagacacgatagccaccccccctacacagggataaaggacgaaccca

SEQ ID NO: 366188 - DNA, 198 bp, Zea mays
gggggtcccaaaaaaaaaaaaaagcaaaactacttcgacaagaatcaaatttgaccaatacaaacacccccttccaaatttcacaaacaaaatagagacttcccactgggaaaaatgaaaaaaggtcatttaaacatactaactcaaggcccaatcatcaccaacacaaaagcatcaacattatcacccagtaaaaac

SEQ ID NO: 366189 - DNA, 218 bp, Zea mays
gggctcctgcccagggttacgactggagattgggggggtttttcattatgaatggtgggaatatccacgcggataccaggaagggtgcggcaaaatagtctgccacagatgtacttgacgagctgtagttatgactgggtgacaaggttgatgctcttgtgtaggtgatgatcgggacttgagctagtatgcagagacgaacatttttaatttttacc

SEQ ID NO: 366190 - DNA, 159 bp, Zea mays
cgtactcgtgggggaatattggcaatccattgggggcattttgaggggaagactgaagtagaccctcaactcatggaataaagagacgttgcaggaagaataagaaagggatcggcaaggaacaaggaaaatggtgatgcacgacatggagacattatg

SEQ ID NO: 366191 - DNA, 358 bp, Zea mays
aattgacgcctaatcagcgtgttttgttttgtttcgtctcgtcgaccgagccgtccgtcgtcctccctggcggtctggccgcctccgccttcctccccgtgcgtctcacccttttcctctacagcttcctctgcccaatcagctcgtcctctcccctcctctccctcccgtgaactgctaaaatccctcgccaagcatttccgtcgggttaggtggtagataagccgaaaatcgagtggaaaagcatcaatcgagtgctgcgctagttgcctggttcgtcccaacaaattccaccgggaatcagggtcgtccggcagcggctgaggcgtctgggttctggaggagcggccgtcggtga

SEQ ID NO: 366192 - DNA, 96 bp, Zea mays
cccacgcgttcggctagtccaaacaagccctctaaaagaactcgttgcattgtttctttgccccgggaaacaagtccgttttggaagttcggctcc

SEQ ID NO: 366193 - DNA, 112 bp, Zea mays
cctacgcggtcttcttggtcaaacttggttcgtagtcgctctcaggagatgttttgattagcgtacaggcagctaaaccaagcaattgtttaactgcaatttgcagacgaaa

SEQ ID NO: 366194 - DNA, 436 bp, Zea mays
cgctccaagtctctgcaagtctcggtccaaatccattgggtaaacaaagaagagtcatatgaattgtagagctagttgatatgaattcatcgaaatccattgcctagttcggacagttatactgctgcagtacccactctttgtgtgattcttggcgaggtgcacatgtctgtcgcatctatagccaacagatttcccatttggaggcacgaacaaactatagagcaatccaatagggctcgggattcttgatctgcagaaactaaaataaaatgaagtatctgccgccagcacccgacaatgggattggggtaaatgtaagaattgcggaagttaacttgttggagggctcatccttggcagcacctgacaatgaagaactggctgcagggtaaggaaagggattctgtgcagctgaagattttttggctcttgc

SEQ ID NO: 366195 - DNA, 459 bp, Zea mays
cgttcgcgttggttcaaatactgtcttatcagatgcaaaggatgctgtaaatgatggcgcaggggaacttccaacggtggcaacctcttgcagttttgatgaatgcgcagtcatggattctagcaccgttgtagtagttgacactgttatagttggccggaggttccatgagaacattgaattaagagaagatgcagacattacctttatgagagatcctcagaatgctaaggaccctgatgctataaaggtgctacatgcagggtctgaatgtgaggagatgcttggatacttgcctcgagatcttgctaaagttttggctcctctagtggacaagcatcatgttgaatgcgagggatctgtggttggtctgcatgaacagcagtttggcaatgttcccatccagattactatccagaaatgtaaatctgacaatcaaagaaacaatgatccaaattg

SEQ ID NO: 366196 - DNA, 426 bp, Zea mays
ccacgcgtccgcgtccgcttttgcgtatgctaacccggcttctttgggggacctgccttgtacctacctagccatggccttagaatcgccatctcggtgcaagacctccttggttcttcttgatcctggtgcctacactagcactgaatcaaaagagctggacatgatcgaccttctaagcctcaccttgagcagccctactagtgcaacttcaacagattcttcagcacaggatcaaaatggaccccagcaacctgcagttacacataatcaaaaagggcttcaggaacctacagttacaaatgggcaacaatcttactcatagtgcgccacagtatcctctcaaactaccagcctcacactgcaaaccaggcatatgctccacacaccagcaactatgtggcaccttgggcccagaccggagca

SEQ ID NO: 366197 - DNA, 420 bp, Zea mays
catttactgttaccctggggacgctctctggcgcgtggccaccgcggatgcgccccacgttgttgaagatatgctgttcgtcgatggcaccctctacgccctggtaaatggcctccgtcttgccacagtcgaactgtctgatggtttgctggaactatcgtttctaggagaggaggtggatgacgacagcaagccagcaggagggcagttcaagctcggagagtgcggcggtgacgtgttgctcatcagtgaggatcacacgggggtgatgctgtaccgtgtttatcggtgggtttttgaggcggggaagtgggtttcaatcacgagcttgggcaggcggacactgtttcttggtttcttcggatttgcagcctgtatcggtccagattacccaggaatccgaacggattgcttatatgc

SEQ ID NO: 366198 - DNA, 424 bp, Zea mays
cccacgcgttcgaacaggacttgatgtgtcattattgggttcctaacaagctgactgtttagtgaggcgcacctcctgtcaggtgggtttccgtacatttctttctgttgggctgtccattgaaagattcctccccatgaaaacgtactgtgtgtggcccgattcgtccagccgctttgggaactcagattcctattcctccatgcaagagctttacgtccgtccgtttgccacatgagaatggccggctggtttagtcttgaatcatcatcatgattcagtacacatctacctttgctggcgaccaacattagcctggtgcagtgcatggtctgggcttgcatgcatgcaatgcccccgggatctccgttcctatctcttgggttgagatttacatatgaagcatagctgaaaaggttgtggt

SEQ ID NO: 366199 - DNA, 328 bp, Zea mays
cggtctcgtgggcggacatctagctcatttaaccgtaaagtttgaagaatgtcatggcgtctgttccacgacaaggagtgagacctgtcttatgctttcagctgcaacgagatctacatgtctgagggcctttaatgcagtatgaacagacctttattaccgatactgtgatagcacccacagatcaaatctagttggctattgtgagattctagaggtaatatcatgacggtagggaatggaacatcatctagtataatgccgacatgtacacagatcgcaatgcgcattctgtgtgttatataatcgacctgcaaatggagtagac

SEQ ID NO: 366200 - DNA, 349 bp, Zea mays
gtccttttttttttatttttttttttttttttttttttttttggccacagaaggaatccattgagttttatgaaaataatgttacttatgctgctgccagctacaaaatgacaaatgtagtgggacatatattattctctttcttctctatttctcttaagaggatgccttttccaatccaaagttcatgggtttgctggggcatctatttaaacaggggccttcctattccttctagatctagaccttctccttctatggctttggctggtttctcttctctaattatttgcgggagtgctgggggtttacatccggggggtaaacaacaggttccactgtttgcgtt

SEQ ID NO: 366201 - DNA, 476 bp, Zea mays
gcatatgccaagaaagcacagaatgggcagcaacaagagagtgcccccgtacctcctgctggtgctgctggccgtcggagccgccgcggtgagcgtcggcatcctgcacaagatgagggagcgccgcgtcctcgccgtcctcgtccaggaacgcgaccagcagctcatctccttccaagtcctcctcgagaaagaaaaagaaattaataaagaaatgaggaggaaagtggatgaactggaagccaaaacatctgccctaagtattgagagggcagaattgaaaaacaagctcatggattcagaaactaccaccacatatcttaccaacacccagaaagaattggaagcagctcttgtggagaaagagagccatatcaaccaaatgaaagagagtgcagctgctgcaaacacagaccagacaacaactattaaggaactcctgcagcagaaagaagctgggcctgagcttgacaaat

SEQ ID NO: 366202 - DNA, 307 bp, Zea mays
  unsure (1)..(307): unsure at all n locations
gcaataatggccgctcgctcctcctcctcccagccgcagctggtcgcggcggcggcggtcctggcagcggcgctgctgctgctggcggcgggggccgggacggcgtcggcggcggtgagctgcggcgaggtgacgtcgtcggtggcgccgtgcctcgggtacgcgatgggcagcgcggcgtcgccctccgcggcgtgctgcagcggggtgcgctcgctcaacagccgcgcgtcgtcgacggcggaccggcaggccacctgcaactgcctcaagagcatgacgggccgtcnggcgggggcgtcagcat

SEQ ID NO: 366203 - DNA, 429 bp, Zea mays
gccaatcgtccggcggacgcttgtacggcggcatatagaacctcctactgctcaccggctgagtaaccggcggaggattccgagcggggctgccaccgtcgcgttcacgcgcgcgtacagccatgcgtacttgcatggctcgttgcggggcgcgtagcagggcgccaaccgcttggccgagcgcttacgcttcgaggcacagcaggtcgaccagaggatgtacagctggttgtggatctcgcacaggctcggggacgcttgcggtgccgcccgtgagagcgacgttgagatcgacaccgagttcgggatgggccggttgtgtggctacttctctggcgactggtcccggaattggccgaacaatagtagggacatgaaagatttcatgggaagagccataggtagagcattagctacgatgttagcact

SEQ ID NO: 366204 - DNA, 316 bp, Zea mays
tgtaatcaaagtttctattgtaccatgttgggcggcgaaacagatgtttcttcgactacgacgccgcagcctaagctggaataggattcgaacgactgcgttgacgtggccagtttcaattttttctgggtggtctacgagacgtaaaccctaaccgagggcctgttacaaccccaaccaaaccacctgtcgtcttctccttatggtgaaggggacgacgggatcactgccttcggtgcttctgatggtggggacgccgcggtatctgcttatgatgcggctgtggttaacgcgacgatagaagagcgggtgaggg

SEQ ID NO: 366205 - DNA, 494 bp, Zea mays
ctccgtctctctctctgcttgctgtgtgcttccattctgttagataggctaacatttggtatcagaagtccgtcgatccttggatctcgcatggcgaccacaggcgcagttgatgcccagctcaccctcgcgttggaatctcaaacgcgctccctgctgtctgaattggacaagcgcatccatgccatcgactccaagtgggcaaaccgcgtgggaatcctggagactcaagttgccgattccaccaagcgtttggagtcgttctccagggggatccatgaagacctggaggcccgtttggtgacagccgatgaagccgtggatgatcggatccgctatctggaggcgagtacgatctcccgtgtcgcggtgctcgagtcgtcttctcaagccgttgagctctggcggccccaaatcgatgcgtcgattgacgggctctacgccaacatccagacgattcgcgccgacatcgcgcagatcgtgacccaacaacc

SEQ ID NO: 366206 - DNA, 66 bp, Zea mays
aagataaatagtcacattacgggtagctgcaaaaatcggtgagtgaattataagcatcaggcagac

SEQ ID NO: 366207 - DNA, 65 bp, Zea mays
gtctgcctgatgcttataattcatgaacgatttttgcagctagctgtaatgtgactatttatctt

SEQ ID NO: 366208 - DNA, 253 bp, Zea mays
ttcttttttttttttttttttttttttttttttttgggggttttttttttttttttgtttttaaaagggagggagcgccaccctatggatggcggggagctcactaatcaaacagaaaccggtcactaattggagccggaaattagacccagtcactgaactgggggttggccaaggccaaagacaggcaacaaaaaaaaaaagatcccggatcacggtcctaaacacaaagctggcagggggggggctcccc

SEQ ID NO: 366209 - DNA, 370 bp, Zea mays
  unsure (1)..(370): unsure at all n locations
tttttntttttttttccaaatgttgctatctccaggctaccacttgctatctgaacattcagatgttcagatattcagatgtctgaacaaataagtcgtcagcaattcctatcaagctgcgacggcgtccatcacaacatggacagctcaaactaagctaaaatatattgatcacaacatggccggacgatcaagtacatgtaatgcggagggagggagggctctacagacagacgactagtgtgggtggtggtagtacaacagcaacgtagaagcacaggtttacttgcactgccttgggtggaacttctcctccgacagcaacgacgtgaccagccgctgcagccgcgcggctccacggccaggcaca

SEQ ID NO: 366210 - DNA, 343 bp, Zea mays
cagcaatgagaacagctagtgcttggtgtgtagtgtgttcaacaaagcagcctactagcagctgacacgttcaatctgtatctatatgtatctgcaagtttgaagcagcagaattttgtggaaacatgtacagacagcactacatggatgagaacgggatgcacacaaactacactgctggttttaatcataaggctatctagcattcagaagagcacgacaggaacagactaacatcaactattcttgctttcatggccttttggtgttggggacttcactgttgggggccgacccaaatccaagctctgcatctcgcttgccagcagcgccctccgttctt

SEQ ID NO: 366211 - DNA, 481 bp, Zea mays
  unsure (1)..(481): unsure at all n locations
gtgccaactccctaggggaccctagcagtttgcctgctggtggcatgcttattaaaacgatgttaaaacgacatttaaacgtcgtttaaactataaaacactgacagaaagtgaaacgataaaacgttttacgattcatcgtaaaacgtcgtttaacgttgtttaaacgtcgcgttttgacgtttaaacgcggtatagagtgaaacgccgcgtttcgggcgtttaatgtgtctgctgctagaaattggcccagcccaattaggaactcccgcccaggtagggttggcgctctcaccaggccgccgctccaggccgcactccagggctccaggccaccgctgccgctgcttcaggccgccgccttctcccccgtgcagccttatccctcccccgtgctcagccgctcagcgtcgtcccccgtgctcagccgctcagcgttgtnctccctcctgcaccgaccgtccggcgccgccagtcccgc

SEQ ID NO: 366212 - DNA, 459 bp, Zea mays
gttggcttctcctccccctccggttcgggttcgggttcgtgaggttctccggggttcgggttcgtgggtgagcggatcgagatggcggcgtcggatgttgagtaccgctgcttcgtcggcggcctcgcctgggccacggacgaccactccctccacaacgccttcagcacctacggcgaggtcctcgagtccaagatcatcctcgatcgggagacgcagaggtcccgcggcttcggcttcgtcaccttctccacggaggaggcgatgcggaacgccatcgagggcatgaacggcaaggagctggacggccgcaacatcaccgtcaacgaggcccagtcccgcggcggccgtggaggcggcggctgtgggtacggtggtggccgtggaggcggcggctacagcggtggcgggcgccgtgatggcggtggcggctacagcggtggcggcggctacagtggc

SEQ ID NO: 366213 - DNA, 394 bp, Zea mays
ttctaagctccgctcacacctcacagtcacaggagcatgactgtgtaatccatctacgtttgcagacgtcggcgacgccgtcttgagtggcttccagatccgagccgacaccggagcagggacaagccgctgccagcggcaatggcggacgccgtgggggcgctacctcctcctgctctgccgccggcgccggagtgtgagtacggaaggtcctcgccgtaccacgccgagttgccggagtttgagttctggatggagggcaggaacccgtgcccggcgctggtcaccggcgacgaggtattctaccgcggagtcatgcttccgctccacaccctacaggcgccaggcgcttctgacggtgaccgctcgcctcagcctcaagccgacgcggacg

SEQ ID NO: 366214 - DNA, 418 bp, Zea mays
gttgtcttctcctccccctacggttcgggttcgggttcgtgaggctctccggggttcgggttcgcgggtgagcggatcgagatggcggcgtcagatgttgagtaccgatgcttcgtcggcggcctcgcctgggccacggacgaccactccctccacaacgccttcagcacctacggcgaggtcctcgagtccaagatcatcctcgatcgggagacgcagaggtcccgcggcttcggcttcgtcaccttctccacggaggaggcgatgcggaacgccatcgagggcatgaacggcaaggagctggacggccgcaacatcaccgtcaacgaggcccagtcccgcggcggccgtggaggcggcggcggtgggtacggtggtggccgtggaggcggcggctacagcggtggcgggcgccgtg

SEQ ID NO: 366215 - DNA, 551 bp, Zea mays
  unsure (1)..(551): unsure at all n locations
cccacgcgtccgcccacgcgtccgcaagtggtttccaaagccaagtgtgtgtactagcaaccagctagctcgggcggcagcaggcagccatcatgtcggaggagaagcaccaccacttcttcaaccaccacaagaaggacgaggagcagcccgccggcgagtacgggtactccgagaccgaggtggtcaccgccaccggcgagggcgagtacgagaggtacaagaaggaggagaaggagcacaagcacaagcagcacctcgncgaggccggcgccatcgccgccggcgccttcgcactctacgagaagcacgaggcgaagaaggaccccgagcacgcgcacaggcacaagatcacggaggaggtcgctgccgcggcggccgtcggcgccggcggctacgtattccacgagcaccacgagaagaagaaggaccacaaggacgccgaggaggccagcggcgagaagaagcaccaccacctcttncgctgaccgtagtaccggccggcgcgcgaccgagctagctagcttcggcgcacacaaccacacacctgt

SEQ ID NO: 366216 - DNA, 210 bp, Zea mays
tttttttttttttcttttttttttttttttttggtgggttttttttattttttgttgtttttaaacaaaaccatagcaggggctggctttcctggtgggacttccattcaccggttacaaataatacaaagtcgccctcccacagaaagaagaaaaatccaatggcatttaactttttaacctattgaaaaaaaaacgttaagcggcaac

SEQ ID NO: 366217 - DNA, 346 bp, Zea mays
agagaaggagtaaattattggagatgggctaagatagaccgatagaaagggaaaattgctccatgatcattcacattttctcaaggctcagcaaatcgagccaaatcttaccaggttcatctatttttcctaagcaacaccccttttcacaaagataagatcgaagaggaaagaaagttacagcaatggaaacatatgagcaagatgtttggccatctcagcaaccaccaaggccagctgcagcttatagacatacctataagatgccctccgcttgcaacagtaacaatagtgcatctgaagaccaaaacaagaacatcactgcacctttttaaagggataaaaa

SEQ ID NO: 366218 - DNA, 303 bp, Zea mays
ataagaggaataattttaacatggggtatttctcaaggatacacagtaaatatcggtaacaacagtttgagaaagaaagagaaacgtaatggacagtttactcgttgcagaacataaaacaaacagggaaaaatgaaaataaaaaagtaaacgggtaaataaaacaaattcctgcatgcatcaaactgactattcttcatggcacttgccgcatgacggccaagttctctggttccatttttttactcctctcttggaacaaactaccccactgtacagtagtagccgcatgcacaaaaatta

SEQ ID NO: 366219 - DNA, 438 bp, Zea mays
ccctctctgagtggtaacacacctggcgacgtgcacgagtgcgcgtgtgcgggagcagtagttgtactgtaagcatgcagcagcagcacgggggaggtggcggagcatgcggtggaggcccagcgcagcagttctgcgcacagcaggtggagatgccgctgccattctcgccggtcggcggcgctgggcagcggatctcgctggcggaggcgccgtcgcccatcagcagccgccgtcgggcgccggcaccggcgcaacagtatgatgagctcggcccgtccggcgcggcgcagtgggctttgacgtcgagggcttggccgccgccgagcggtgaaggatggctccagccggcggtccgcgggcaacccgtggccgcggcaggagacgctggaactgctcaagatccggtcggacatggacaccgtcttcggggacgca

SEQ ID NO: 366220 - DNA, 267 bp, Zea mays
ttcttttttttttttcttttttttgctcacagaacgggggatttatatggatgcggggtcagacataaaatacagaacatgccacaccttgggttgtgcaagacgaagcacagggccacagcatggttatacctacacagggcacaatagctggacacaggaagcaacatggggatccatacaacataaaacctcaaaaccttacagacttatcctttcagtggacacaggaagcatgcctggatggcttgggcaccctcacctttg

SEQ ID NO: 366221 - DNA, 82 bp, Zea mays
gtgttgcgaaaccggacgcaggtgatccacctcatgcaccacaggactctgacggtcatggctactcggaacgcagacatcc

SEQ ID NO: 366222 - DNA, 387 bp, Zea mays
cgacatagcaaagccattggttcaataccagtacttgggagcaaagtattggtcatggtttacataacaaaagaacaacatagttctaatttccacttaacctccagcatagtcctaattcccggtcctcataatctaaggaaaggtctcactaacgaaccgagcaagaaaacttatctgatatgtcaatgggagagtagggaactgccttgctaatccaggatttttcactagatatgcaaagtaaaaggccttgtgtgtgtcatcaaaacctggaatactttgcaatgtttgaagcaagtcaggtgggtagggtcatctgaactagccttctcaatagccattgcaagcctttcagcaccatctttgaatgctccaatcagccct

SEQ ID NO: 366223 - DNA, 253 bp, Zea mays
cggttctcgtgggaacagaactggacagggtgagggatgctgagtcagaaattaggagggtcttctctcatgttctgtgcctaaatagccaccgggtggaagaatttataaattgccttccattcaaaaaagggcacccagaagggagctcaagattgccttgcagcctttttgggatgggaagagctaatcccaggatttggtgaaagaaactacacgacctgaggactaccaggggcggccgctttagagg

SEQ ID NO: 366224 - DNA, 235 bp, Zea mays
ggggctctaaacccacactctaggtaacccgactgaagaacggcactctattatactagaacaacccattgtttaattctcacccaaaacaaaaaaaaaggaagaccggctgccatgaagcagaaacctatgctgtttaaaaaacactctaggaataacaaccagactgatgccctcgctcacttgaaatggtagaggggcacctcggcgttcagggggtgggacatcacagtca

SEQ ID NO: 366225 - DNA, 183 bp, Zea mays
ttgacatatttgttcagttgttcacccagcgaggggggaaaaaaaacttagcactggttaggaatcaccagaatcacaatagagaccacagactagttggccgtgaatattagaattatatcgcccggagctccacaaccatcacccataagcagccataaggctgccagttcagctggaact

SEQ ID NO: 366226 - DNA, 274 bp, Zea mays
  unsure (1)..(274): unsure at all n locations
tttttatanttttttttttttttttcatcgtgcgggggctttttatttttttttgggtttttttatttttttgggggcaaaaaaacaaatagccaatgccttaaactaaatgcccataaacatggaaggggctaggatttttttggaacccttcccaaaaccaaaggattcggcacagagctttacattattatggaacccggtttttatcccgaaaaggggcaaaccaagcaattgccctaaggatttttttacccatatccccctagaacca

SEQ ID NO: 366227 - DNA, 264 bp, Zea mays
aatgtgatgacaggagctgtacttttcaattaaaaagaagaaaggaattgacctagttttaaggaaaaccgagtcaattacctacacagggtgcacaagcaacctagacaatggtagcccaacacacaaggctcatacaagatcattgtggtcgagctcaacacaaaggacgagcaacaccgactctccaaaacgagcaacacaaggccaaatgaggaaaccaacaatgtctatacccaaaaacggcacagaaggatgaagacc

SEQ ID NO: 366228 - DNA, 372 bp, Zea mays
ggtgggttggcttctcctccccctccggttcgggttcgggttcgtgaggttctccggggttcgggttcgtgggtgagcggatcgagatggcggcgtcggatgttgagtaccgctgcttcgtcggcggcctcgcctgggccacggacgaccactccctccacaacgccttcagcacctacggcgaggtcctcgagtccaagatcatcctcgatcgggagacgcagaggtcccgcggcttcggcttcgtcaccttctccacggaggaggcgatgcggaacgccatcgagggcatgaacggcaaggagctggacggccgcaacatcaccgtcaacgaggcccagtcccgcggcggccgtggaggcggcggcggtg

SEQ ID NO: 366229 - DNA, 238 bp, Zea mays
ttcttttattttttcttttgtttattcatttttggtggttttttttttccacgggactgcaattttcctattggcataatccctgataaaacagtcgattttaaaaaaccttaatagccgtttaacacttctttgcatcgaaaacaccggtaccttggggcccctaaaggctctcaggaataataataataatattaaaggcaaaagggggacgctactaagggcaccagtttgcaac

SEQ ID NO: 366230 - DNA, 412 bp, Zea mays
tttttaataatttttgagtaaaccaaatcacatgggagatcttcaatggtacagggtgtacagcgtacaacactttcaatagaaatcaacaagggcttagacagcaagtgtgggttcaacatctgtgggccatcgtacacgagatagtatttaagacatacagtgtaaatcttggttgtatgagccaacccacgctgcaaaaactaaaacaaaaaaagatggcgtacgtatattcgtagatgtggagtgcaagtaccatgagtgaacagatacagatgggagcagcagagcacagtggacgggaggagcaactgaacacaatctgtcgaacgatggtaactgaggtggagctttcactttgttcacttgtgccttgctactccggcgactcatgttggtatgcagttaagct

SEQ ID NO: 366231 - DNA, 533 bp, Zea mays
  unsure (1)..(533): unsure at all n locations
cccgacccgatctcccaccgcgtcgggatcctcctgcccgcctaccctcccgctccaccggatccagcgccggcgccgacgcatgggccagctacggcagatccaccccggccccctccgcggccccgtcctacgacgacctcttcggcgcctcgctcttcgactcgttcaagggccccaccaccaccacaaccaccaatcccgccgcgccttcgcctgcccccgcgtacgacgacgacatcttcgacgcggtcccggggctgcgcccctccagctccgcgtccaccaccgcctcctccgcgccgcggtacgacacnngcgtgttcggctcttcggcggcctcggcgtacgacgacgtgttcgccaccagcgcccgctccgcgccgccgcctcccgcttacgacgacgacatcctcggcggattccgggagcgcgctgccgcaggcacaggccgaggagaggaggaggccggtggctgtcgacgacgacgacctgctcggggcgntcgggaggagcccgtcagagggaaagag

SEQ ID NO: 366232 - DNA, 383 bp, Zea mays
tttttattatttttttcatccaatgcatattagaggggggaaaaaaaggcattaagctccgctacaaggagatctatggatacatttgccttgttctctactacttgggacgacctgccaaaagaacagcggagaactcgttcagaattattattattattattataaccatcaggactaggtccagctgctatccaagttgatcgcaattaccagctagctgccaaggcatcagcagttgtcggagttaagcgacgaggcggactggtagccgggtgcctctctagcagcagcagtagatgcggagcccctctccgtcgaattggcgaggccgctgtcctccggcctcgagttcagggcgcctcgggttcatgcgctggacc

SEQ ID NO: 366233 - DNA, 372 bp, Zea mays
tttttgtttttttcttttgccacttcaattttgaagagtttaaaattagagagaaagcaaaccatacaatatcacagcatcacgacacaaaaaaggccggagcggccacacaataacaacattaatgacaaaggttttatatataactgaaagaacgaagcgtaagagagagacgacggaataagaggcagtaggagatggacaggattgggagagcgaaagagagaattttcgctctaataatattagaataaatagtccttcggaatttacagttgttttaacagattaggggaggtataacattccagcgtaagatgacctctcccacgggcattcgtctatcctggacatgttctctccggccatctc

SEQ ID NO: 366234 - DNA, 552 bp, Zea mays
tggctagcgggtctgtcattgtcggcgccgccgtcagcagcccggcggcggtgggcgataccgcgctcgccgaaggcttccggctgggccacggcggcgtgtgaggtagaggcgctagcggctggccttcttccacgcggttgcagcaggctctgtggcgttctgctgctggttcacggacttgacctgaccggcggccagcccgatcgaggcgttccatcggcactgcagtgtcgcgacacggcgagcgcatcgcgcacagaagcagggcaggggatgcagcaccaatctgggagaaatcaattagaccctgttttttttatgcgcatagtagatttcattcgaatgccattatggaaattgcaagtactaccacttctttagatggacgctgtagcgaatccaccaagattctcgtttaatttcaggcctgcctgtagattaattgtcctctatcatgctaacatctcatcagatcttatctaagaccgcgtcctattagcatggtagcgtcctaattatttttacactaaatatgtgctatggttagat

SEQ ID NO: 366235 - DNA, 179 bp, Zea mays
aaaaaaaaaacatagcagctcaggaatcgggggttcccttccatgggagagcagagcaggggcccgctcaacaattgggggttccatgggggggcagagcaggcccgaaaaacctctcccaaagggttttatcaaagcaccccaggccccccaaaggggaaccccttaagaaatccctt

SEQ ID NO: 366236 - DNA, 378 bp, Zea mays
tttttataattttttttttttaccaaaatttagaggattattacagatgttgacacgaattttcaatacaggatagtaaaatgcagctacgagaaatcgtctagggtggaaaccaaatatttgtttctgagttctaacctatttccgtctcaacgggcaactacaaatacatagggtggcaacattctcgcaagagtacagagtacacaaaccatgcagagtttggaacacgcatatccctcactggatgtgctaatgacattatttacagctccaaaaaatatcctaacatacagatgttacagggttcacaatatcttcctagcccttagatacgagtatacgacgaaaaatccagctactggtccaactactatt

SEQ ID NO: 366237 - DNA, 251 bp, Zea mays
tttttatatttctttttttttttttttttttttggggacttggaatagcagtattcagctggagtttagaaatcccaagtcacaatatttcaacctgcccaaagcagaatatctaggtgtcattagctaaacatcactggttctaaggccattttaaacggggccagtcaaacttaacaccaggccaaacagtggggccaaaacaccaccaatgaagcatgaacaataccatacactttccatgcactaat

SEQ ID NO: 366238 - DNA, 501 bp, Zea mays
ctcctatctagcggcggccgggcggcgcctccgcacgctgccggcgttgtgcctcgcctctacgcggctccatcagtcctgcgtggccgtcgagtagatctccgtcacaggcgcgagctcatcaccgtccaggcaagcgcgctctagctcccaagccgcgcgctccaggccgcacgtcatccaggtgtcgagctccaggtcgcgccacgccgcgcgccgtctaggcgtcgagctccaggccgcgccacgcctcgcgctccaggccgtgcgctgtccaggcgtccagctccctaggccgcgcgctccagcgtccagacacgccacgcgctccaggccgcgcgccgtccaggcgttgagttccaggccgcgcgctccagcggtccagccatatcgccctcagcgtctcagccacatcacgtcgaggcgttcagtggctccagcgtctcagcgtatgataagccatgggatattttgtctcataatgaagggaacaactcaacg

SEQ ID NO: 366239 - DNA, 474 bp, Zea mays
ttttctctcgagagggactccctcggcgtcaccatcgaccccgcggaagcgggggcgtgcgcgtatccactcctcaaccaagtggagcatcccctcacgctagaccggagctggggggcgacgacgagccagccgccgccggtttgaccagacctgtggtgatggactgataaggtatgcctgtaggagggagagagctttcggtttagaaaataagagggtgccgcgggctggactgagagagcggaaggaaggaaggagccggcgatgggcgggtggaactggctcttctgcggccgatccaaagccggaggcgacgacgagccagccgccgtcggtttgaccagacctgtggtgatggactgataaggtatgcctgtggagggagagagctttcggcgcccttgccgagtggccgaagagggggatttgctaagggcacaatatgctggagagttggatgtacaagtatta

SEQ ID NO: 366240 - DNA, 196 bp, Zea mays
  unsure (1)..(196): unsure at all n locations
tttttaatanttttttttttttttttttttttcgggggttttttatttttttggggttttttatttggactcccaatcgtatatgcatagaacctttcgttaaatcgggcacacaacaaggtttaaactggaacagggcctgggcttccaattggatgggaaggataaatgaaactggaagccccattgaactttt

SEQ ID NO: 366241 - DNA, 330 bp, Zea mays
tttctttttatatttttttttctttaattacatttggaagacatatagctacattggggcgtgttataatccactgtggacatggaacaggcaacgatcaggttttgacatgctcaaatgttgttgaactttctagaactgattaatatcaatatacatataggatcatgattcatgaaaggcaagcgtgggaatcataactaacaaggaagaagaatgatgaaatgggttgtttaatccacctttggtcgctatcagcggcgtcagggctcgcctcgcaagcagattcttccttgtcgccaccgttgagcttcccctccagagcaaacc

SEQ ID NO: 366242 - DNA, 399 bp, Zea mays
tttttattttttttttttttttttttaaggaagcgggaaaagctttgccacccaaagttatattagccgaggaaaaataatttataaacttcgcttcagacttgaggcagaaagaaaagaaaagccgaaagaaaacactataaccacccagcccaagacaaaaattacatctcaacttagcttgcaaaacaggttcctcagcttatcctgcttgttgtcgcagaacaggttcgtccttcagttggtgcgatctgtcaacctgaagctccctgtatctgattggtagatgaaggaaaaggttcctgcagaggctccaggtagggttaggttccccatctttccactcaggaaatacagaagggtttgtcttttcgcttagttttttgacacattaatgat

SEQ ID NO: 366243 - DNA, 349 bp, Zea mays
cctgggcggacgcgacgtctccctagggggttgtattgcctgctcggcggggtatcatcgactaggtcaccatactcatggttcttgcctggataggtaagcctgcgccgagcgctctttacctttacaacagatggcagcatcaggagctttgccgccttaacattcacgagctccagggtgctgagttgatggggaagcactgtaccaactgacccagagatgcaggcgaggagtccgctacatgaggacaatgacgccttgaagaacatgttccccatggagaaagagataattggtaaaagtacaaatactcgctggtggcccagggctgggaactatcaaaagc

SEQ ID NO: 366244 - DNA, 424 bp, Zea mays
tggacgcgtgggcaggcgccggtctccgtcgttcagcccattgctggttgcggtctcgcaatactctgcgttttctcccatttttacctcaaggaggttatgaacggcctcgattggattgccatcacgctagctggtctcggcaccataggtgtaggtgatggatgtcttcggccgatcgccccccacgactccccggggcccgtagtccgcacgggcacgggctgtacggtggtgggagcagaaccagagcagcactggaggcacatttactccgggcttcggacctcccttggcctcaacccctctggaggctggattctgccattttcataccattttccctttgccactgccagcgcgctggccctgtagcggatgcaataagggtgaccacaaggagcctttttctcatgggactgcc

SEQ ID NO: 366245 - DNA, 418 bp, Zea mays
tttaataattttttttttttaacaagtgctatgagatgtattatgttcctgaaacacgttttgtctggcacagatttgggagtcagtaagttttatcagaacagtaaggatctgcaagtattcagcagaacaaaacgaagagaaacagaaaagattatatacatgaagcttaaataccatgtggattgtacaaagcaacccccaccctctagaccatttttacctgcaaccacctaatatatgatatacacagctgaccggaacctggaagaaccagcagatgtctgaaactctgaattcagaaaagcaaaaggatagtcctggactttgaactgaatgaacccgcaagccggcatatatatagcatgacacaacgcatgacaaaggaaggcgttgtaaatacatttcatgacattca

SEQ ID NO: 366246 - DNA, 574 bp, Zea mays
  unsure (1)..(574): unsure at all n locations
ggccggctcgtgctcctaaacttgttgctaccacacccccttcaatatctcgctgtatctgcatccagttgtggtaggccaaggagagaacaatgctcacttcatctgacaagacaaaccttggataaacagtttcctttcaaggcccgggagcttcattaatcattatgtcctagcaggattaccataatttttcaagctataggtgctgacaaggcacactgctcgctgctctctacaaacaagatgctcaacattattgcaattctgcaaggggaaataataattgaagaattgagtttcttgctgagcccttcgatatccaaaaagaagttctgctggtttcttccacaatatcaacaatgagcaccgaacatgacccacaggtccagcatcgttatcatcactattgttggtaaatggatgctgcagcattggtcgcatctcttttacacttgacangcaagcccaggcaatgaggcaaccaaagtcaccaggcagtcgantcgcgtggatcggacatgagggtcagttcccagagtcccacgcatgatgaacccttcatctgaggagc

SEQ ID NO: 366247 - DNA, 497 bp, Zea mays
  unsure (1)..(497): unsure at all n locations
cccacgcgttcgctccgggctcgctaaatttccgcaccaccgcgaacgagagaaaaagggccaggtccggtcactggatgccaccgctccctccctagcccctgacaacgatctccaggcattcgcttccgcagtccgcaccaccgccatttcacgcacaccgccgctgggtgcgcggacgcgtggtcactcccacagtccaaactccacagtccccgcatctgccgctattgctgtgctcggctcggcacactcagactcggagtgagagcgaccaagaagaggggatgatgaagaagtgacacggcgccggaggttgcaccctgctccgcctcctcggcgccacagccgccttaagcggttcgacttagtgctacttcatttggggntcttgattttcttcttctttttaggaaagaacatctctgtgttgagttcaacaataatgctaaaactgggtaaaatcaattgaatatatgttttcagagatgcactca

SEQ ID NO: 366248 - DNA, 361 bp, Zea mays
cataagatcacgggggggacttctaaagattgtgagttacaaaacattacaatgaacgccgtctaagaatgggtggacggaccaccggcgagtggtcccaggctccaggggtcgatcaggaggaacttcacattgacccggcccacgatcgaccgggcgtggggatggacctgcacctcaatggcacccagctcctcgtcacttcaaccggcggcgaagccttccgcgatcacaccagagtcgatttcatcgaaatgggagaccatctgtcccagggcaaggatgctcccgtgatatgctccctcgacgaccacgtgctccacatgatcggacagcgctcgcagccgattgattagaggga

SEQ ID NO: 366249 - DNA, 551 bp, Zea mays
gttgggcttctgcttctccttcgcattcggctctttcccttgttccatgtttttttgagattcctctggttagcatgtacgtatcgagcaagtctgtgaacgacgcggctttggcggcgaagggggcgccccgtcccctcgggtcctcttactgccggcgccggatggggcggctcctttcgctgtcgccttcgtcccaccagctgaggcggcgactgctcctcgcgtggcagacgctccagcctccttggtcgtcctggaggtgccaggagtggttgcccctggtgcggccttctttgagccgccgccttctgcacctggcccggggcaggttttcggtcgccgaggaatgtcgttgtcggcgcgcgctcggtggcgaggttttccggtcgctcggtctgccgtcgtcgtccccgccccgtgaagggggttctgggttggcgctgttgcccgcggaggtcgccgcgctctaggtgccaccgccgcctgccgctattgccttgacttccgcaggtgccgcggtaccatgggatctgaggaaattcacgggg

SEQ ID NO: 366250 - DNA, 203 bp, Zea mays
aaattattgccatattttcatattttcttatggggcaacccatttaatcgagattgaaacccggacgaaatccccggtggaaatagcctaacaatggccgggttcccaaaaaacgtattactgggtacttgtacatccacaatctttaggggggtattataaaacttatacaacatcctgaactttggaggaccaaaccattt

SEQ ID NO: 366251 - DNA, 300 bp, Zea mays
gttactcaacacgtgacgggactatattgaccttcccttattcggttcgctcgcttactttgggagaacaatctctgctgggcctttgacagaatcagacagcccttgcttgggtgctcaattttttgggacctccatttggtcgtcaagggtatgggggatggaatcaacgtcatgcagattggttctttgaagccaacgccagccctttccattgccacaacatgccgaactctgggtcttggtaaaattctgctcgcctgaaaaagcaacccgccatcgatttgaactccataggga

SEQ ID NO: 366252 - DNA, 261 bp, Zea mays
aacacacgaaaactcaaacatgatttatgcaaacatacaatgaccaaatggaggcttggaccgcctacctacaatgcattgagcatgcaagtagctggtcgccaaccaatatgacactgaaaacatgttcaaacacaattatcatcagggcttgttcggttattcccaatgcacatcacttggttgggactggaaaaaattgtgaacaaacttgagctgattgtgattcaaacccatgcaaccccggtcaatccacatgga

SEQ ID NO: 366253 - DNA, 350 bp, Zea mays
ccttcttgttgaggggagtatgcatcgtgctagcaagggggccacagatgatatccttcatctggtcctcctcactgcagatatgatatgaatggaaacagatgctagagacaaactacacgagcgccaacggtgcacactagacgtggacaaccacagggtcaacatgctatcaaaaaagccactgtgcggcgactgggagcgatgactaatatgcaccattgaccggcttaactcatacacaatgcagatgaggcaacagattgccagcgcaaaggtgaatgtacgccaataagtaggtggcaagactgctgtccctacagaacacaagtatcggatggtaaaaggct

SEQ ID NO: 366254 - DNA, 279 bp, Zea mays
cgcgtttttcttttgtacgagaacagttcaacacatgcggggggaacacatggtcctgctggttctgctcgtcctcgccccctgctgcgtgttgagccatcgccatttgcgattgcttttaggaaaagggaagcagcacggcaatacttcacagatacttactcacctaccggtccgaatcgggcaccaagggcaaccaataatttgctccctttgtgtttgtgcgacagcctccaccgcacagggcacgccccagaagccgatgaccccaggcccatc

SEQ ID NO: 366255 - DNA, 197 bp, Zea mays
gctcccactcgtccggcccagcccacgccgaactttgccaacacctagtacagctggttatgctcatcctcgcccactgcctgaaggggagccaccggcatttgcgaagactgtcgaggcaaaagggaaacaaccacggaaatactccacagagactgctgacctaccgctccgaatcggacaccaatgcccaacca

SEQ ID NO: 366256 - DNA, 399 bp, Zea mays
atttttattttgatgggcacctcctgcttcagcagatcacacgcaagcagcagcaacatcaacagcgaccgcagcaattgatggcccgtaggactttaaagatttctgctgcattgcccgggcaggtgtttgattgtttgaaccaacaccgacagtctatgaatcaacagctatctgacgtggagatcttacttgagtccagctcgaacttgagcaacagtatcatcaccaactccaacaagagcagtaccaacggaagctacagttagaaccacttgcccagctcttttaaccacagccacaccataactggaatcacgatgactcttgagcaatcgatgcaatagtagctgccttgttctaattttggaccaaccactatggttgatcaaggcttac

SEQ ID NO: 366257 - DNA, 92 bp, Zea mays
tgtctctcgttcgacctacactatgactaactatgggggacataacagaccagggcttggtgactgatccaaacgggtgctacgagaagcgg

SEQ ID NO: 366258 - DNA, 108 bp, Zea mays
tgtcacgcgttcgtccttgtacatgcctaatctttgggaacatagctacccaagtttatgttcctgattcaaaactgccctaacggaagggatcgaatccacgaagac

SEQ ID NO: 366259 - DNA, 70 bp, Zea mays
gttactcccagggacccgtcagattggatgcatgtgctacattgagtaccgctgatgctgttggatcacg

SEQ ID NO: 366260 - DNA, 232 bp, Zea mays
ttcctctcgtccgcactcacgtacgcccactcatgcgggaaaaatcatacttggtatgcatggtggcgtgcctgcattccttacacatgatgggagctatgatcgatactatactgatgacgctagtggttgaggccataatctctcagaccagcgtttgggtgatctgtacacagagtttggtatggattaacctattgggccaattgacgacctttgagagcaagatgac

SEQ ID NO: 366261 - DNA, 349 bp, Zea mays
cccattcgtgcgctcttgtacatgccgaagcttacccgacattggcatgcaactttattttcttggttcaaaatcgaactaccatagctcaagggaatccagcgagacatatctgcgagctgcgcctgttaagtaacgtatcagttagctaacgtatatcctgatgttcaggatgatattgatatgaataaaaaatatagcacaaataaactggtggttctataaaataaaatttcatgggctacgtacggttagggacgacaccaggcccgcattagggctgctaataataagacttcagcttctgctgatgaggcagagaacatggttaactgaaatgcacatgaaa

SEQ ID NO: 366262 - DNA, 297 bp, Zea mays
ttccattcgtccggccacggatacgcttcctccatgggaataatgaacctgaacctaagcctgctgattgtaatttgctacacaggagaaccactgaaactcgtatgattcatctctcagaacctgaagtacagcgactgagcagacagtgagtactgtaccccacaatagaggaggaaatattaaccagaatggcctggcattcgaatctgtacagaatgaatctttaaacactaactgttcaggtgtattaaacatggccactacaggtacattgatgtctaaaatatctagcca

SEQ ID NO: 366263 - DNA, 260 bp, Zea mays
ctctttcgtttgggcacgcgtacgaccacacatgggcggacgcgagatgacacgcgatggagcaagctctcgaccacacgtggggaagaatgaatacgggagatcagcaagagctcaggtggctatcagtgcctcagaagatacatcttgagaccgcacatgatgtagtacataaaaatgaacatacatatatgggtgtgtggaggcgacaaaattgtatccacactgtcagagaatgaattaagagggtcgaaccacat

SEQ ID NO: 366264 - DNA, 212 bp, Zea mays
aagattccttatctgccgcgaaccttcacacttgcgaagcatgcacatcagcagatgtgcattgttcccaaaggcatgcaaaggatagctgcacatcgctgacggaatgagcatgggaagcttcttatgcgtaagacacaagctcacagtgtaaccagactgtctagaaaaacatgggggtcgatgttggggccaaaaggaaaggctgattg

SEQ ID NO: 366265 - DNA, 423 bp, Zea mays
gcctttcgtccggggcaggccatgcgtgcatatggccattatcgtatgccaaccaacgggcatgatcaaactaaagaagctgggccaagcgcaccagaaatgaatggagcccgtttgccaagggaaaagcgagcctggcagaacggctgatgcatgcatcaacaggatcacctcgaacagtgagagtggaagcttgagtgacagcgaaggacgtgacgacaattctaagaaggactgacactcaaaggacaatgatgggaaggaagatgacaaatctgagacgcgcacgacttatataggaccgtaaggagtggtaaaccacgccatgtctacgcttccaaagcaagcgggtgcaatggtaggaggaggggctagctccacaggagctaacctgaatatcggagtggactactgggcagcttc

SEQ ID NO: 366266 - DNA, 182 bp, Zea mays
tttattcgtccggaacacgctgagcgtatacatgggccacatagactacccgccgggcggtcagaacccatcacacacgcacgagatcgccacgaataacatctacaacctcatggggaacgctcgaggatcgatacataaccaccgcgaacgcgctcttcaccaagaccgcgatcaatggc

SEQ ID NO: 366267 - DNA, 166 bp, Zea mays
tgtgattcgtacggagacatgtgagggtaaacatgggctgcatggattaccagccatacggtgcgtgcctatacttgatggaacataatgccacgactaggactagaagcctctgggacactctatgggtgtgcttaatgatcagagcgtataatgtcttgtccaa

SEQ ID NO: 366268 - DNA, 275 bp, Zea mays
ttaatctcatgggcaaggccatgagggacatcctggtggaccacgccgggccggactactactacatgcagtagctgaagttcaacaggggcaaggtcaccacgctggacttcatcagagctgtcaagaatgactacaccttcgaagcggagagcatggactacaccgtcacgctcgacagccaacggaatcagcttcaccatccaggccaccgacagggacgacgacccgctcgtcgtctacgcttgctgcaagctgctgcacactaaggagct

SEQ ID NO: 366269 - DNA, 140 bp, Zea mays
gaacttgtgcttacaggagccacacaaatccccagcaccagatgacaacaaggactgtgctaaatacacagcagatggaactgatgagggcaccataccacatggcactgacatgagccatgagcctcaggatggccagc

SEQ ID NO: 366270 - DNA, 347 bp, Zea mays
gcctctcgttcttccacgcgttcgcccacgcgtccggttctagatcgcgagcgggcgcccttttttttttttttttttttttttttttttttttttgaattgatgcaatgaccataccaaggtaaagccatgtgaatattcaagataaaaaaaatctaatccattaggattataaacaccagggcgtaaaccatggatggatgcttcaaaattgtttagattaacatccttatatatgtgttggtgcataaatacaataaagtccccttcttaaccactttttttgtttacaaactagggtaccattagtgtgggcctgaaaaggggacagcttattgatttttgct

SEQ ID NO: 366271 - DNA, 328 bp, Zea mays
gtcactcgtttgatacagctgcagggtgatcatggggcacatggtgaacatactgcttgcttggtgcctgcaaaggatggtacacggatgtattatgcagatgaaatcgacatgaggcaacgtgtgagataccaaagatcagcactgagtaaacaggatctatcacaaggaagacaaatatgctagaaatgagcgtttcttgcaggccttcaacaaggaggtgaaagacacggcgattgaggacaagaagacagagcgggagccaaagggcgaggtggggtacgaaggcaattcccatgaggagaatggtcattacacggatgggaag

SEQ ID NO: 366272 - DNA, 196 bp, Zea mays
gtcactcgtttggaaccgcctgggggtacacatggcaggcatggactacactccgtcctttcagtgcccaaaaggcacactcgttagcggcactcgatctaccaaataccccgtggaaactcttgaggctcgggacacaaccaccgaggaggagctcctcaccaacaccgagatgattgtcgacataagcggcttt

SEQ ID NO: 366273 - DNA, 228 bp, Zea mays
ttgattcgtaggcggaaatgtgcgcgtgcgaatgggtaacaatagctactaggcatttgttgtactgctatatgggcagtacaatactgcaatcgctagatgttgtacaccctcaagcgctcacatgtagcactgactaatgtttgtgtccgagcacgacgcaaaggccgtggtgattgtggtggttagaagtgcaaagttaatgactgtgtatgctgtcagaacatg

SEQ ID NO: 366274 - DNA, 275 bp, Zea mays
tttcatgcgtacgcagacagattggcgtaaacatggcagacaaaacctaatcccatcacattgcaatattaacaaacacgtgcaactaaacaaacagattaaagcaggcacttgaagaaaacggaacctaagcatagagcaagggaaaatactatcgacgactctactgttgctaatgatggcaatacatagatcaaggcagacaaaataagtcctaagtcctaaatagctccatatttacaagacatcttgcatttttaaggacacaactactg

SEQ ID NO: 366275 - DNA, 295 bp, Zea mays
gggtttcgtttgcggacgcgtgggcggacgcatggggggaatacactactagcgactttgatatgttctgaccggtaaggtggtactttctaatttgcacatgataattataaattgtggaactggggcgggtgtcaaaaataatgtgaatgtctggctgtattttattatattagaatctgtgatcaaactaatgtctttgctagttgtgctcaacaggcaatgattgtttttaaatgaaagaaacaggtcaaaactgaatcgtttaaataattgacatttcagtgcaagggat

SEQ ID NO: 366276 - DNA, 310 bp, Zea mays
tgtttttacaaggataaacccatggggagaagatgggactaattaagtacacactagacaagcgatctcaagctaatggaaagatgaataggacttgtcttataaactaggaagttgagaagttaaaagcatgttaaccaaagaaggaggggcaaatgtttaatactgagaaggataagcgttcaccaggggcttttaacccttggactattgggaaagatcaagtagtagaaaatgctgatagaagccattttgatgagaagaattactatatccgcagctttgctccaattggtgagaaggttgaaag

SEQ ID NO: 366277 - DNA, 362 bp, Zea mays
ttcactcgtgcgcagacacgtgggcggactcgtgggaccaatactgtcccgcccccgcagaacactcgatcttcctagccaactagtgtaatttcttgagccgtgacatccctgaccaccgagatggtcgccatctgccttcactgctgcgaacgccgtgtcctgcgtctcaccccagtaccatcgacgaatctgttcgtcgtttcccggtccaccacaagagttgaaccgttgtcacgcccaatagtcgatctgtcaagtggaaacactcctatctgatgtgaactgagacgctatttcagttcaaatgaaaagcacttgcctgcagtatctgatccagagatcgactctgcatataagga

SEQ ID NO: 366278 - DNA, 270 bp, Zea mays
tgggatgcgtactcacatgcgttggccgatctgaaggagaccactgattctaccgatcgcagatccgatagggacgggaggactgtgcattcatgcacctgaacacgatgctcatagtcatgctgatgtgaggactgagctcttaatactattaaaccttgcatgtgctgacatatatggcgcccaatatacggtggctggaatatgacgattatatcctgctttagaaactaaagagacccttcatgtttcatgagagcttgaaccatt

SEQ ID NO: 366279 - DNA, 162 bp, Zea mays
gtcttatgttttggacccctagagggagcccatggcgctgatggtctacactagaacgggggtgagcatactacgcatactggtggcacggactaagcagaccaaggcgctcgtggacactgcccagtttcgggcgaccaccactgagtccaaggcgctcac

SEQ ID NO: 366280 - DNA, 379 bp, Zea mays
gccactcgttcgcccacacgtacggcagaatcaaagctctttgtgtgtactcccttactgcggatgcatgcatacatccatctataagactaacttccaactgcgatccctgtgtagccctgctgcgctaaccgagactcagaagaagctcgatctctcggttggtgatgcgattacaacaccatgtacggcgggggaaccggcattgtcttacgcgcgaggggcagagcatggacatgctgattgtacgcactgctcgtgatgcgtacgaactcctgcacgaccctcatactgcaccattaccggaggctcacgatcaagtggcacgcggacccgtgggacaaggaccccgattcggacgaacaggccaaacaaaaga

SEQ ID NO: 366281 - DNA, 236 bp, Zea mays
ccctttcgttcggttgcagctgttgcacacaataacatctactagccggtctttgacttgctgcgtaatgaaacgaacagacctgggaggtgaaatgaatatcaaaactcacaaggaataatattagctgtgtgtcgcaatgaccgtggaacgtgtcttggctccagagaagagtctgacaagtttctgaaaggatgattgctgtaccttcagctttacttcctgattgcaacaac

SEQ ID NO: 366282 - DNA, 293 bp, Zea mays
gcctttcgttcagtgactcctcgaaatcatgctctgacgtacatggctatcagagacccagaccatggcgctctccgaaccaacgatatgcgcgaccacgaccatgatctagatattgctccacgaacaccatctttagaactgattacaacttctgtttgactaccatgaggtcattgacaatggcaaagacaggagaccctgagcgaagacctcagagccatacttacataaagccggctagctatgcaccattaatactgtatcctgggtgcgcgtatttgatgtatgaa

SEQ ID NO: 366283 - DNA, 236 bp, Zea mays
gccatacgttgctagcctggaggataacaacaggggctggatttgccacccaccggattgacactgaccgacaggcaatgaagataaccgcaggtgggtgaacagagaacaccaggtgattggtcagttgcaagccggaacgaccaacggagggttcctgatccctatccaaaggaacgcgggcaaagatagcttcctactggagctgatgccggtgtcatcgctggatacgacaa

SEQ ID NO: 366284 - DNA, 85 bp, Zea mays
  unsure (1)..(85): unsure at all n locations
gcgtctttgggtcatcggacgcntccggttcggatacaaggcagggtctattcgaaacccggcgctggccatctgacgcgcaggc

SEQ ID NO: 366285 - DNA, 159 bp, Zea mays
ttgattttcgtccggtgccatttgaggtattggatggtatctatatcaatcacgccgtgctacctgtgccaaacatgcaataaaatgacaggcacctagagaatcagcgattacggggagaatcacctgatgtatgtaacgacgactaatttcagggtc

SEQ ID NO: 366286 - DNA, 256 bp, Zea mays
tttgatgcgtgcgcgcatactgacttccgtctgtgggaccatcatcaagctcacagcagatcgactgaccgcgatagtccatgcggccttggccatgggctgcgcaaggcacacagtcgcgctgagggagttcctgactgccctgtcgacgttgtaccacctgtgcatcaggaaggccacggagggcttccagatgaccctcgacgtggcggcgatggtcagatggaagctgtggatcttcttggccctgttcaag

SEQ ID NO: 366287 - DNA, 199 bp, Zea mays
tttcctctcgtgcgaccgcattaactgccctgtcacaggtgtttatcaggagagcatgatgaggcagttacaacacagtacacgatgaaccgtatgatactggctcactggtccacctaacacagacaaatccctgagcacaagaggcgcccatgtaggcgcatcaagagcgctggcatacgcgatctaaacaaactat

SEQ ID NO: 366288 - DNA, 451 bp, Zea mays
ctcatgctagatggtaaattgttacacatgcgttgtgtggcacacatcattaatcttattgtgaaagatggaatgaccgttatggataaaggtattaaaaaggtacgcaatagtgttgcattttggtgtgccacgccaaaaagacatgagcgttcgcacaactgctcaaatgaatgttaaatatgataaaaggatagctctagattgtaaaacaagatggaattcaacttatcttattgttgaattgggaagaaatttgattaattatgttattcaattgctgaaaattgttctttgttatatccgatggatatccaatggatatccgaaacccgatgggcatggatatggatatgaatttctaaccgcgggtatagtcgcgggcagatattatctatgaccatggatatgactgcgggcggatattttcaatatccgatctgaatccgac

SEQ ID NO: 366289 - DNA, 488 bp, Zea mays
  unsure (1)..(488): unsure at all n locations
cccacgcgttcgcccacgcgtccgcccacgcgtccgcccacgcgtccgcccacgcgtccgcccacgcgtccgcccacgcgtccggaagtatcaaaaggttgatgagcaaggctcagtcgctatcaggcaaccagcaaatacattttggaccgacaaaatatgtgacaatcaaaatgaagatgtcaatcgaggtgttttgaggcaagaaaattttagccacactgccagagaaggttttaagttggtcgaaccatatggcagtaatatatcttgtgctcagcatgtatctagttctgccacccaacaaccagcatttgaattgaggaatcttgaggaaagctggtacaaaagcccagaggagctcagtcaatttaaaggcacattcccatcaaacatctacaagcttggggttcttctatttgagctcttttgctgttctgagacatgngaagtgcactgtgctgcaatgtcaaatcttcgtcaacgca

SEQ ID NO: 366290 - DNA, 520 bp, Zea mays
atgatactttaggggcctgtggtgacctgcttggagagcggcagggcccttgcctaccttattatgggtggcaatgcgggtattccaagagattcagtgaagtcaactcgctgatgcatttgaactgttctgagcctattgactcttgttatggtgaaacataggatgagtttgcccactatggaacatgccatgggttcggtgtgtggatcgactgggtacttgacatggaatgttccatagtgataagcaccgagccagatagcagatactggaggctgggggtgcagctgcttggctcgcctgtacacgtgaacccagagaattcggtgatgcacgtggaggcgaatgttgatgctgacattgaggagctcacgtttaaatccaccacgctctcatgatgcctactgttatgtgtggacagaccatcctgatgcgtgtgttggtcttaaaagctagcatttgtcgctgcgttatggttgacggtgctcctgatgtgagtcaggcactcaggccatga

SEQ ID NO: 366291 - DNA, 321 bp, Zea mays
ttgctttatcgccaccctctcttcacaccccacaggccaagccagccgcaccgcgccgcaccgcattttggacatggcgtcgtcctcctgcctcgcctcgccgagtggcgccacgctctgccgcccgcggcggccgaggtgccgcgtggcgtgctcggcggccgacgccggcggcagcaccggtccggcgtgggccaagggcgcgggccgccttgcgtgcggcgtgctggcggcttggttcgaccagtgcgcagacaatccggacatggtcgcgagccatagattgcctctcctctcaacggtgcccaagctatgcgtgcg

SEQ ID NO: 366292 - DNA, 550 bp, Zea mays
  unsure (1)..(550): unsure at all n locations
cccactcgttcgcccacgcgtccgcccacgcgtccgagtcagtgaggtcttcgggcagtaccagcagaagctggttcatctctgcatggacgccgaaccgacgtctgactgaatcgcacgccttgtcgcatggcagactgatgcgggcgtggattctccgtttttgaagcttattattatcaacaggttgcaaattccttccaagtttctgcgaagctttttgttctgtctgttggtaggtaccagacgtccagacatgacatcgggactgctgatgtggcagaatctgatggcaggaggcaggaacagacatgcagtgctgtatcgtaggtgccaatggttggcactgtttatacatacgtaagcatttgtatttggtacaagctatgttttttttttctttggtgcgcaaagagcgagtgcgcagcgaacttctcttgtggccgagatgagatgagaacagatgccatcgaggcagcagcagacgatatacttacacctgtacacccatgacagtttttgtctgaagattggntattatatgcttatc

SEQ ID NO: 366293 - DNA, 465 bp, Zea mays
gaccggaccggaattgtcggtccaacccacccgtttttatttttgactgagcctccccgtccagttgggggaatatattctcctgtggcatgcccagtgctcatgagcagcggctgtgatttcccctatgaattgatgccacgcacagactattggaacgggaaacttaacccccacgatattgctgctcttgccgaataaggtgaatacccactgtgggctgaagtctgaggggttctttaagattaagccacagattgaccaagatgagccacgtgagggaccatgctgaacataggaattgtccctttttacattgatgtccactgccttaatctgtgacactgttgggccccactcatgctgtactcttcaattgagctgacgagcttctttttgttgttgtccatgaggtagagctcaacatgatgaatgcttcgaacgtatccatggtgtttttccccc

SEQ ID NO: 366294 - DNA, 274 bp, Zea mays
agtgcgcgcacgtcaccacatactgtgtgccttgtcgtggaggccccgggcacttacgccgcacagggcacaccttgctccttcgaactgctttgatcactggtttgactgcgtttcggcgcttctgcggctgctgttttttatcctggccttcaagctgcagggacccaccacctgtcccaagtgccaatcttccatggcggcgctgggcacggtgatctcccccgcagtaggtaccacggcgccgtgctgatataattggcattcggggagt

SEQ ID NO: 366295 - DNA, 568 bp, Zea mays
tttgtttgcggctgacgacgcgtgcgctccattttcggatttttgtgacaccaaacgagaagccaaacctgatagatcatattaccgccaacaagcaggtgtgctactagatctggctgatagccctatagcgcagcgatcaacagctgagaccgtcaggccttgacaacggctgccacatatgacgaggacggcttgagcccaaacgcgactcaaaaaggcatgctgtcttccaccctgcagtccttgctcggcgtgtacgcgggcaggacccaacaggtcattactcagagatttgagcaactggttagaaacgtcacttgaatggtgagcagcgactagcaatcatgtgtggtctccactccagcctccattaacaagcagggatatattggtcgttgtctacccctcatgacggacagcgcgttaggcagtggatccttaaattctgccgaatcccatgagctccaggcgggacttgtcttgaatcttggctgccatcatgcacaggcttctgcaagctggcttggtcggtgtgttcgtcgtggttactagaacatctttctgg

SEQ ID NO: 366296 - DNA, 570 bp, Zea mays
  unsure (1)..(570): unsure at all n locations
cccacgcgttcggttttgttttgacactgtagcaaggcacatcgttggtaaatcctgtgagattgttttacgaagtgtcactgaacagtctcctatcccacctgatctagcacaaatcatatctctgaaatttacattcagagtcacaattgacaatcaatctcttttccaacaaaccagttgcccaaacgtgttccgcattaattctattgttgctgcacatgggagacaacgttctttaccaatgcaaataggaatttctgatcaacaaggaccatcaacacctcaaaacaaatcaaaaccgatgttattggaagactctccatctacaactttggaaaaattatctactacaactcctacaactgtagtaaggaagcttctatattccgaaactgacaacacgccgaaaacgcactcaatttcttttactcaattatcttttattcattntaagatttagtgagtattgacagttaaaaatacttatatttgttccatgttgacagtgcaaacaagagtaatatcaatagcccagaaaaagatgatggcgatcaggaaaccgcacag

SEQ ID NO: 366297 - DNA, 494 bp, Zea mays
gtccccagacatggcgccctgcgcgtccccgtccgccctcgcgctctccgccagcacgcgggtcagcatcctccggctcccgctggcgctgcggcagcgggcggaggcgcgcgtgcccggcgcccagttccgcccgtcgaccgcgtgctcctgggcgcgccccttgctgcccgagctcgcgggggcggtccctcgtgccggcgcccgcggcactggcaggaggacgcagtcgctgttccggcctcgcgcattgacgacgacgtctcagattgccagctgcgccttcaccctgggcacggtcgccgtcctccccttctacaccctcatggatcgtcgcccccaacgccgacatcaccaaacgcaccgtggagagcggcgctccctacgtcgccctgggcctcctctacgcctacctgctctacctgtcctggacccccgacaccctgcgcgccatgttcgctagcaagtactggctccctgagttggcgggcatc

SEQ ID NO: 366298 - DNA, 77 bp, Zea mays
tgttatccgtcacagcaactgggaatgcaactgagtacgaacgtttagcgcgcacaggccgtccgacgacggtgctt

SEQ ID NO: 366299 - DNA, 223 bp, Zea mays
tcccttgcgtccgagcgagtgggactgtgagtgagttggaaggaggggggtggcaattgcgttgcggaatggcggtgctagttctactaaatgcattttgatttttaacattcagaccaagagctaaatgttgctgaaccacctcaaaaagtgctatttccttagaacattctcaaccttctataaattgcaattgttttaccttcaaaatcaagtccagatt

SEQ ID NO: 366300 - DNA, 190 bp, Zea mays
cccactcgtacgcggaggtcggcccacgccgtttgagaacctataccgcggccgtccccacactgtacctgctagatactggctaccttagcgcagcggggctgacacggggtgcagatgcattgcacatgatggccgatagcggcgtatcactcccgcacgatctgacactggatagcggtcgcgtgcc

SEQ ID NO: 366301 - DNA, 337 bp, Zea mays
ggcacgcgtgcgcacttcacggacgacgacgtgggagccctattacggccgtcgtctccacagccgagcgcctgtggctccacctcctcggggccgccggagcaccaaccgatgcagttgcactccggctgctggccatcgccgacggagcagacctgcaggagcttgcagtggtgggaggtcgagtccctcactgagtgagtgtctgagtgatcgatcgccagaccatgcgacggcggttcactcggatgcaacttgcaggcagacacacacacacacgtaagcacgaataccagttggtagcggtcatgagccccgagcgcacggtgtacatagc

SEQ ID NO: 366302 - DNA, 251 bp, Zea mays
gccacgcgtccgcgctgcacggactacatcatttgagatgaaatacggcgggagtacctacatttcctctgctatggaacattgagctaaatgcaatattgcatgcaacaggagcgagttgcattgcgatgggtgccgagaacaggcttatgaggcctggcggatcttgcagatggacatggtagaggtatacacagagagacttgcgagatgaaggaaacctaaagaaatggacagccgttcagttgtac

SEQ ID NO: 366303 - DNA, 287 bp, Zea mays
cgctcttttcggcgaacgcgatctgatccacaacctccggatccgctgcaccgtgctgcacttcggctgtcgaatgcacccgctccgatccagatcaagtacctcatggaagggcgcgatcaggcaccacagtgggccccagctgtttctgcttgcggagccccatgctcagtagattgtgaacgccggtagatatgccacgtcagtgaggctcgcgcgatctcatgaggaggctgcgcgggaactagtcctgctccttgcgcagatggacgctgccttttggagga

SEQ ID NO: 366304 - DNA, 88 bp, Zea mays
cgccttcttcggctaaggcttgccgactccttctcagatgatatgctgcgctgtcccgcagacaggatgtcgaaggcaccagctaaca

SEQ ID NO: 366305 - DNA, 113 bp, Zea mays
cccactcgtacgcggaggccggccgacaccgcctgagaacctataccgcggccgtacccacaccattcctgctagatactcgttaccttagcgcaacggggctgaaacggggt

SEQ ID NO: 366306 - DNA, 216 bp, Zea mays
cccactcgtacgcggacaccggccgacaacctcggagaacctatacggcggcagtacccacatatccccttctagatgatcgttaccttaggccttaccggccgaaacgagatgcacatgcatcgctacgagtgaccgaaggccgcgtatgactaccggacgcctttacaagggaaaggagatggcgccctgtttgcacacatgatgcaatggaag

SEQ ID NO: 366307 - DNA, 86 bp, Zea mays
cccactcgtacgcggacaccggcccacactctctaagtacctatacggcggcagcacccacagatttgcttctagatgagcgttac

SEQ ID NO: 366308 - DNA, 108 bp, Zea mays
cccactcgtacgcggagaccggccgacactatctaagaagctatacggcggcagcacccacaggttagattctagatgagcgttaacttgaatcataaaggctgtaat

SEQ ID NO: 366309 - DNA, 85 bp, Zea mays
cccacgtttccgcaagggtctcacaaagcactctcaagggatatccttctctgtggtggatgtcgacactctactggggcacctc

SEQ ID NO: 366310 - DNA, 91 bp, Zea mays
cccactcttacgcgaaggtctgaaaaggcactctcacgtgatatccatcactgtcccgtacatacaacatctactgcggcaccatccgatt

SEQ ID NO: 366311 - DNA, 137 bp, Zea mays
cccactcgtacgcggagaccggcccacacaccctgagaagctatacggaggcagtgcccactggttacattctagatgagcggtaacttgggccatggcggccgtgtcggggtgcagtttgactgccactaggggct

SEQ ID NO: 366312 - DNA, 88 bp, Zea mays
cccactcgtacgcggagaccggcccacactctttaaggacctatacggaggcagtacccactggataccttctagatgagcgttaact

SEQ ID NO: 366313 - DNA, 150 bp, Zea mays
cccactcgtacgcggagaccggccgacactctctaaggacctataccgcggcagtacccacacgttagattctagatgagcgttaccttggggcttcccggctgaatcggggtgcagatgcaccgcgactagggcccgatggcctggtat

SEQ ID NO: 366314 - DNA, 113 bp, Zea mays
cacactcgtacgaggactctggcccacaccatctaagaagctataccgcggcataacccacaggtaaccatctagatgagcatccacttcgatcttacaggctgaagcggggt

SEQ ID NO: 366315 - DNA, 89 bp, Zea mays
cccacttttgcggggagacctacccacactctctaaggggctatactgcggtgtcactcacatccttcaatctagaaaagccttaactt

SEQ ID NO: 366316 - DNA, 132 bp, Zea mays
cccactcgtacaaggacgccggccgacacaccttaagaagatataccgcgggggtgcgcactaagaacattctagatgaccgttaccttcgtactgcccggctctcttggggtgtagatgcaaagtgaggag

SEQ ID NO: 366317 - DNA, 296 bp, Zea mays
cccactcgtacgcggacaccggcccacacacactgaggagctataccgcggcagcacccacacgttacattctagatgagcgttaccttagagcttacgcggctgaatcggggtgcagatgcaccgccactagggcctgaaggcggcctataagcttcagtcgctttgacactgtactagaagtcggggtcgagtttgatcacccgagtccagtggaagaactccaactataaccgcgcgctctcaattgtgatgcgctaggagagggactactacccatgcaaggctaggagccg

SEQ ID NO: 366318 - DNA, 154 bp, Zea mays
gccacttgtacgcggagaccgacggacaccctcgggggacctatagggcggcagagcccacacgtctcattctagatgaccgtgaactaagggctggacggctgaaatgggttgcagatgcaccgcaaatagggcctgatagaccggaataact

SEQ ID NO: 366319 - DNA, 112 bp, Zea mays
cccactcgtacgcggagaccggcccacactctttaaggagctatacggcggcagtacccacaggttagcttctagatgaccgttaccttggaccgacccggccgaagagggg

SEQ ID NO: 366320 - DNA, 234 bp, Zea mays
cgcactctattgtacggccataagcccccttagtgacgggggcgctgtgccagatctagcggaggcggaggcggtacctgtactcacgcccgccaagtgtttgatgagaggcctcaaccttacccactacaagatgtgcaaccatggctactactacggaccatactctttcaccactatccactcggtttttatgctgctcgacgacgctgtggccacccgactcgactggca

SEQ ID NO: 366321 - DNA, 214 bp, Zea mays
acgcgtccgggcatttttaagccactaatcaattaattccacctgaggggagatttgatttttatagtggtgtaccttgccccagacaatgtcttgatggaaaatctcctaatgcaattgactgctcaagtacgacttgacctgactacatgcaaccatcacatccgggaaggtccaaaaataacttaaccccatcatttttataggatgacaa

SEQ ID NO: 366322 - DNA, 334 bp, Zea mays
ctcacgcttactatgccttcttgagtccgccctctgctgactaccctatgccaaggagccgactgcgcctggtgggactgacctacaccaaacacacaaggaataaactggccattcgacaataacaagcaccatcagatgggccaggttcaccgttctatgaacatgcagaatcttcttgagcaccaagctgccgatgctgttccaatgcgtagagagacccccagggacctgtcatgaccgtccaatctagcagagatcaccacgtccaagaaactagagcatcaacatactgcccagacatgcaagctgatgtcacacagacatgctacac

SEQ ID NO: 366323 - DNA, 77 bp, Zea mays
atgaattgctggttccactgtaagcaccgctggatgtttatcgctttggctgtttttctgctgttcataactgagtt

SEQ ID NO: 366324 - DNA, 485 bp, Zea mays
gtgggttggcttctcctccccctccggttcgggttcgggttcgtgaggttctccggggttcgggttcgtgggtgagcggatcgagatggcggcgtctgatgttgagtaccgctgcttcgtcggcggcctcgcctgggccacggacgaccactccctccacaacgccttcagcacctacggcgaggtcctcgagtccaagatcatcctcgatcgggagacgcagaggtcccgcggcttcggcttcgtcaccttctccacggaggaggcgatgcggaacgccatcgagggcatgaacggcaaggagctggacggccgcaacatcaccgtcaacgaggcccagtcccgcggcggccgtggaggcggcggcggtgggacctgtggtggccgtggaggcggcggcatcgcggtggcgggcgccgtatggcggtggcggctccgcggtggcggggctaccgtggcggcggcggctccgtggtggtggcggc

SEQ ID NO: 366325 - DNA, 322 bp, Zea mays
gatctttcaggactgcacctgatgccgttggccttgggcttgctcaagacggaataggagggacaccatgctgcctatggaaacttaatcctgctacatcagccaattaatgccatggaattttacatatattagcagctgatatttggttatagattaacgactactagggcgttggaccacacaaaaaccgcaaggattggcgcttctgctgacgccattactgacgctttagccacacccctcgatgtcatgaagacatgatcgatgattcaacgaccttcaaaccaacatcatggatctatcgactggcgacaaacta

SEQ ID NO: 366326 - DNA, 441 bp, Zea mays
gccgatcaccatcaaccagctctccaatagccggaatgatagaaaacaggcaacatgctaaccaggcctgtgaaccttaaaccttggcaggaaaagtttgctcagatgattcaggaagccggattccagagggtggaatatgaaaacctcctgagcggtgtagttgccattcattctggactgaaactgtagagctgaatacagatggttgttttttcatgggtgcaccgattctacaattagtagtatttgttgttttttaatgaattctataataggttcggtggcttgtaaaagcagctggtgctggctgtcagcatcatcacaatatgtagaataagtagtatttgctagaagtatgtgctggagcagtagcgtcagtggctattttggcttttaagccagctgacctcttccatttgtaaagctttttcttggaaa

SEQ ID NO: 366327 - DNA, 328 bp, Zea mays
ggctcttttcggcgcgcgtgacatatttccgaacctacggagtcgttccacagttcttcagatacgactgccgaatatagcagcactgatgcagaccaaggcttgatggattagacgcggacagtcgctagatggggatccagcagatcctgcgtgcggagtatgatggtcattgaatagtaaacgacggtcgatctgccacgtcagcgagggtcaggcgatccattcacggggctaagcgataaagatgcgaatagcctgctcagttggaaggtgaatgtcagaggaaggcagcagaaagcatcggtgactgctgggcaatcgtcaa

SEQ ID NO: 366328 - DNA, 491 bp, Zea mays
gggctgtcttctcctccccctcttaccaagtcctcctggggttagggttccttagggttttgtggaggggcgatggcggcggctgatgtggagtaccgttgcttcgtcggcgggcttgcctgggccaccagcaacgagtcgctggagaatgccttcgcctcctacggcgagatcctcgactccaaggtcatcaccgaccgggagacggggaggtcccgcggcttcggcttcgttaccttctcctccgagaactccatgctcgacgctatcgagaacatgaacggcaaggagctcgacggccgtaacatcaccgttaaccaggcccagtcccgtggcggtggcggtggcggcggtggctacggcggcggtcgcggcggcggcggcggttatggtggcgggcgccgtgacggcggttatggcggcggtggcggctacggcggtcggccgaaagtggcggcggcggctaccgaagcggtggcgctacggcggtc

SEQ ID NO: 366329 - DNA, 101 bp, Zea mays
gtgtttttttcgattacaggtattggatcatctttgagggggatgaacaatcgaagacagactgagatagatagttctgtggttcaatattttgatgatac

SEQ ID NO: 366330 - DNA, 571 bp, Zea mays
gtcctcggttccccaccatggcgtccctcctcctacaccgccgccacggtgcgcacccacgcgccgccgccgaggcctgcgctcgcctcctccgcgccttctccgcgctccccgacatcgatccctcggcgtcctccaccgcaagccctagcccggtcgagcccacctacacctccgcccgcgcctccgtgctcgacctccagctcgccgtccgcgccgagtctgacccagcccgcatccactccctcgtcgcctccgcgctctccagccatgacatgccgcgcctccacacctcgcgccagctcttttccctggccacttgccgcttgatccgcctccggcgcgccgacctcgccggctagctcctcgacctcctccttgcctacaccccgccctacccgggtctgctagcgcgggcactctgcctctacccgggacccgacgacgcgctccgggccttttactcgttttcccccggcggccgctgcgacgtatgcctctcggcgctcctttcggcgttgctccgcgccggccgcctcgatgacatcaagtccaccattaccctgcggaa

SEQ ID NO: 366331 - DNA, 158 bp, Zea mays
ttgttacggatgcgaatgcttatgctgacattgggggtgtgtttgaggcaatcaatactagggagaaccggctgtcatagtgtgtggaccaaccacctggagtgtctacaggtgccgtggtcaagcccttgagctttgtgtgcggagttgattatgtt

SEQ ID NO: 366332 - DNA, 103 bp, Zea mays
gtgaactgtgccatttttagtcttggacaatctctgactgtgctgggcactccatgacagactagaattgatggcttcatgggtcaacagctcgactatagca

SEQ ID NO: 366333 - DNA, 203 bp, Zea mays
ctcttttgttcgtctgatgtcatcgggcgttctcggcctgtcttactgaatcgcagcaatggtgggcaacggagccattgtggagagcgacccgctgatctggagcgcggcaggatccgatccatgctggagcctactgtacaagctgaaacggatggaggcacaaggccgccatcacgtggacgagatcgagacttgcaccc

SEQ ID NO: 366334 - DNA, 70 bp, Zea mays
gacttatttgcaacggaaaacaaattggatatgcaggaggatctttggttcttttgattgggccgtgccc

SEQ ID NO: 366335 - DNA, 232 bp, Zea mays
gtctttgtccgccttgactcactcacttggccactgttcttcctcctcatcaaacgcgctctccagcacttgttcggaagaaaaagaaggtggaacacgcttactagaccaccaaggatcatggggcgcgggcgcggccacctactgctgtcgggagcaaggcgactgcctgtgggcgctgtcgtgcgcgctggtgctgcacgcgtcccctcacggtgctggctccggcgcc

SEQ ID NO: 366336 - DNA, 493 bp, Zea mays
cacattaataatctctacatgggtcgcttgttattgcatcatgtgcttctaaaatggcactgcttcaaggagttcatcacggggcactttgctgtcttataagcgaagaaaattagtgtgctctgatataaaaattgagaactcaagctttgattcttgtgatttgactcaggatgaacgatgactgacaatttgactgccacaatttctggcttatgctctcctagaacactcttttattcactgttgaccacagtataaatacataacctgtctgacgactaaggcactcaggtagcaagagtacatgaggctatgtaccaattctaccaactaactgggccataccaccaaactacccatatagccaaaacctacaattcctgctactgatctacatacacttagacgggaaaacaaaggagcaggccctgttacctgtacttctatgacaaagaaaaagagcggtagcagctgattatataacatattc

SEQ ID NO: 366337 - DNA, 368 bp, Zea mays
agtgtcagccatccagaaagtaactcgcgcgggagacggcgcaggccgccatcccatcccctttcgttgctgtcgcggcgcccctgccgactgctgcggctgttcgtattctcgctcgtatttgcaaccttttggggggggggggtttttttgtttccccccagaaaagaaaagccgccaccttcgggcgggggaaaaaatttttgggggggagaattggtggcaagcttgttttccgccacggggtccagccatttaagaattcgcggttccgctgacttcgcagggctctttcaaacgaggtcccctgcaggagtatgtggttcaaaacaccaagtcccccttgagatgcgcatgctcacattgtt

SEQ ID NO: 366338 - DNA, 551 bp, Zea mays
  unsure (1)..(551): unsure at all n locations
cggacgcgtggggccgcagttcccctgctaggccgccgcagttccctctccgctccgccggatccatccctcgctctgctcatcgccccaatgccgaaaaaggtcgccatgcggcgaggtaagcccgcccccgaccaagggaagaggcggcgccacgggccgcggctgtccaaggtgatgcttcgggagctcgacgcgatggggcctggccctgcccgcggctccgatggtgaggaggacgggtccgacgcggttgccgaggacgtgtacgagtacgaggaaggggtgcccgaggaggaggccggcaagaacggccgctatgacaccgtcgccaagtacgagtacaacttcgacagcgacgcctccgatgcggatgangatgtgccttcggaggaaggcgaggatatggacgaagatgacaatgacgacggtgatgatgaggagaagcagataagaatacttcaggagacgaccggaatgcccagagaagccttcgatggaaagaagaggaaacagccatcggagctgcacctgcagcatggcgatggaga

SEQ ID NO: 366339 - DNA, 129 bp, Zea mays
tgcatgagataggcgtcttcgtactcgcctacctgcgcggctcaaacctttcccccttctcccaattccttccgccggccgccgctccacccgtacgacgacaccatgagggagtgcatttcgatccac

SEQ ID NO: 366340 - DNA, 299 bp, Zea mays
ttccacagagagccgcagcagactcgcaagggggtagtgttgtgtactctgcgctgtgcggacggcggccggcggccggcgaaggagatggatcgcctgcccgagtcgacccggagcatgaggaagtacgcgtcggaggccgacgggctgcgcgcggcgcgtcagggcccccacgggcggcagctgacggaccgcaccgcgcacagcatgtccactgactgcactgcgcaccaagtgcgaaccgggcgcatcggtagtggacattctgccagtgccgcccgttggtgctgaacaaggca

SEQ ID NO: 366341 - DNA, 121 bp, Zea mays
gatgtttttgatgatggtcctgtccgtctggtgcgcgagctcgtcgacgactgatgccacgctcgccgtcaccgatgcgaccccactggctgtttctgctcctggccatgctcaagacgcc

SEQ ID NO: 366342 - DNA, 609 bp, Zea mays
cggacgcgtgggtacggccgtaggcgcgcttggtgacgtgggcgctgtcccagatctagtggaggaggaggaggtacctgtcgacacgcccgccaagtgtttgatgagagtcctcaaccgcagcgactactacgtttccaaccgtggcgactactacggtccatacacttcctccaccgtcgacgcggcggcggtgctgctcgccgacgcggccgaggctcgactcgactggcgcttcgccaagctgccgcagccgcaagctgaggaggtggacgagccgttccgcgacgtggcgaaccctccgtcgcatccttccatcgtctacgagtcgtaccgcgacgcggccgaggctcgactcgactggcgcttcgccaagctgctgcagccgcaagctgaggaggtggacgagccgttccgcgacgtggcgaaccctccgtcgcatccttgcatcgtctacgaatcgtaccgcgacgaggccatggcgggagccggtgctagagcgcttgctgtcctgtgcaacgagcggcccgcaaggggacgcaatttctactgcgacgacagatccgagcaatcctaccttacgcccacctgtgaggccaccaacagggc

SEQ ID NO: 366343 - DNA, 282 bp, Zea mays
cctacgcgtccgttgtttttttgttttttttgggggtttttttaatctatttgcggtgatctcacaggcagctaaggaccctcccactgtttatttaaccagacaatgccattgtgggccaaccaaacccacccgaggtaaaccaaaggaagggaacaaaaagccctacaaaaaaaaattaagaacaaatccaactccccacaaaaaaaaaaaggcaggaaaaccgacctccacgcccataaaaaaatcacacaaaactgcaaaattaaaaacaaaaacccc

SEQ ID NO: 366344 - DNA, 537 bp, Zea mays
accaaagtctgcagattggatcgatggagtcaaattcggcactgggtcttgagccaattgatctgtcatcaccctcgccttgtgctgctcataaaccccaggctgctccagaagcaccaccactgtgtatggaggcagaaagaagagccctttgggatataagcaatttggtcgagaaagaaccctcctgttgcaagcatgaacctggaacaaatgtgcaggtggaagagtcaccattgttcaggcatgggactgggatggcaggcgaagctgattcttcacggagaggcgatgcgcagagtagggaagtagtagaagctgccatgatcgacctctcttctccatcaccagttaaagtcgataatagtagaaggaatggtaagaaggattgtgaggctggcagcagcagtcagtctccagaacacgagaggaaagcgagggagctcagattgttcctagacagtataagagacgagttgtattaacattcgattggattgtatgtaaaccgatatgtgcaatgatgatgtgtgttct

SEQ ID NO: 366345 - DNA, 361 bp, Zea mays
ggcgtgtttccgcgaccattcccgtagttcgacccaaacgaagcggtgatttacaacccagaccaccatgggccacacaatcccgaaatctaacccctccgacggcgatggggatctctagcatgctggaacctgagcacaggctgctgcggtacctggtgtacaacacggtgatctctatcgcagcactggcggggctgccgcggccggcgctggcgttcctggacctgcaggccgcgctgccgcccaggtactactgtggagaccgactggaggagggagggcccagtctggcggagcggatactcaagggcttccagccgccgctgtacgaggagctggtatcaactgagacaaattg

SEQ ID NO: 366346 - DNA, 474 bp, Zea mays
  unsure (1)..(474): unsure at all n locations
gaaccatgcatttaatatctctgtctttctatttcaaacagtaccagggtgcggaaaaagcatcggtttccatctttctataaatccgacatatttcactttccatatttataaaaaattcttcatctttccgtcatttattatgaggcagtgtgttgtgtcgtttcactttcccttgctttatgtgtcccttctcatacaagttgcaatttcttcaatttaaccaccatcatatctccctgctattttgtatcctgttataaatctgccaatataatcagagtatcagctggtggttatgtcgatgtattaccaggaatataaatatacatatgtttatttatagacactagagattggcanaatgtttgttggaatttggaattaaatcagcaatgtgccttcatctacatgtcatatttctacatgctacctaggaacatatagctgngttctgcatatcctatgtccctc

SEQ ID NO: 366347 - DNA, 218 bp, Zea mays
gttttgctgagagggacaagagaaggcgaagagagaaagtgtgctgtggagcgcaggcgctgccgatggagatgacatgcttgaggcagcagcgcatatgggctcaaaccataagcgatgaaggaactggggagagcggcgaccactactcgtatttgaatgggaccttgagcgctcatgctctgcctctaggggctagaaaccctggagtcgcgcgt

SEQ ID NO: 366348 - DNA, 447 bp, Zea mays
ttgtgaagttcgtgttcgacaagattgacccacagcgtccggagaaggaatactcgtttcgcgtaagtccgagatcacaatgtgagttgaagctccttcaagtgtctggccatcaggccatgtgcctctgttatataattcgttttgttccctccattttccacatgcatatttttcttaaagttattgctctttcacatcagtcatcgatagtgatcctcatgtcaaggacattgatgaattggcgaaggatttggatttgaacgaacatctattcgagtttgtaagaatggccagagagaaattccagtctcccttcatgaacggtaaccagcaatttttgtattctttttacgataatgtgaccaagcatcatacttaattacttattattaacatcttctgcaaatataaacaatccggatcttctttccctaaaatctggca

SEQ ID NO: 366349 - DNA, 382 bp, Zea mays
ggatgctggccgcctgcacgtgccgcgctaattggcggcgacccagtgcgtccgcccatctcgtccgaaaaaaaaaagatccatggcgacggaggaggacgaccagtgccctggcgtgtaaggcgactctggtggtggaggctcttgcagttgatctgctggctccgggtcttcacgtcctgctgagagcggtgctcgacatggtcgtaagcaagatggtattactcgtctaccgtaacgctgcaggcctgctcgtggtggcccccgtcgcctacttcctcgacaagaaagataggccgcccttcacgctacgcttgctgatggacttctttttgctggctgcagtccgtgtaacctttacacaagcagggacaggtagttg

SEQ ID NO: 366350 - DNA, 348 bp, Zea mays
ctgcgttttgtgcaagcgtgaaaccactcatgggcggcttgaggcgattctacgggtagaccgtcaccaccctctccggaggaaggcgcggaacgagcgctgcgcttgctgcaccacgtctaacatgctggcgccgatctacaagcgcatggacaacgagaattgcagggagagccagtacagggcctactggttcagccgcaacgagaagattattgaccgccttctcgctgatcactcctccatcatctgtcttgctgaggtgttgctggggaaacgacgagctggtcgacatgtaccagaaagcgattgggagacgccaattacatgctctctaagcttgcacgc

SEQ ID NO: 366351 - DNA, 377 bp, Zea mays
ccctctcgtccgcccacgcgtccggggcactcgacctggacacattagttttggtctagcattagtcctgatcgtggggcctctcttgcgggtttggcatcgctcgtctctcgagacgcaaacaatatatgtggtacttcgcgctacctgatgtagtgcgtgtctggatctatgctagcacccaacgcagagcctacatgtttgctagtgttcgcaatcctatagaagatgggaagaattgcaatgcaaatgcaggatacacagacaaagaacgggttcaattgcttcaatatgatttcatcagctcttggtcctgatgaatgactaacctatgctgatcacctcttggccccattgtataaagtttctgaaggatt

SEQ ID NO: 366352 - DNA, 467 bp, Zea mays
cttagtttccacatttaataatctctacgtggttctcttgttattgcattattgcttctaaaatggttctgcttcaaggagttcaacacggggcactttgctggtttataattgaggaaaattagtctgctctgatataaaatttgagaatccagtcttggttttttgtgttttgtctcaggttgaacgatgactgacaattagactgccacaatttctgtcttctgttttcctagaacactcttctattcactgttgatcacagtataaatacataacctgttggccggctaagtcactcaggtagcaaaagtacatgaggctatctaccaattctaccaactaactgggccaaaccaccaaactacccatagagccaaaacctacaatttctgctagggttctacatacagtcagaggtgaaaacaaaggagcaggccctgtttcctgtacttctatgacaaaga

SEQ ID NO: 366353 - DNA, 405 bp, Zea mays
caaagtcctctgccgcacacgtgcgtccacagcagagcacaagatcctatacgtcgatgcaaggcaacgggtaggccagcacaccgttatctgcggtctttgcaccctcgcttcacgccaaccgtatgcgaagacttcgagatgcctcctgccggcgcccgtgcgatgatgtgcgactactatatgggcgacttcggcggcgacgagggcccgctgacttaccgcaggcgaggagaaggaggacggcaaggaggggctcaagaataagcaggtacaggctgtccagggctggcagactcccgaggtcttcgacgaggttgaagtgcacaaggaattgagagccaaaggctttcaaagctgtcatcttccactttcgtggtgaaccctctactgaaactggcaccc

SEQ ID NO: 366354 - DNA, 391 bp, Zea mays
gatcgcgagcgggcgcccttctatacggtcggtggtttttttttgttttgttttttgctcttgtgcttactttttgggcccaaaaaccttctttccctgcatgcaatccggaaaaaaaaaaccaaagccccggccaaccggaaacaaatttcataaaggcacacaggaacaatgcgcgggggccgggggcccccaccaccgggcccagcccgggggctcgaaccggagccaccggccccagagggggaacccccagagggggccctgctgcgggcggttgcccaagaccacacctccgggcccaccgccctactgagccccgatggaccccaccccgggccccgggtgcaccacttagcctggaccgggggatgcagcggcacgtcccccg

SEQ ID NO: 366355 - DNA, 461 bp, Zea mays
tcttaatataattgcagatgacagcaaatatttgcactgcatactgtacctattgtttacaaaaatggaagtattctgagtacaggcttctttccttttgaatttgtacgtacactgtaacaactagagctgataacgataaggctaacatgtgctcggactgaacgccagggaattaggagcatactaaggatcttgtctcagattgttgctacgaatttaggaacgaccttatctgaaccaatacaattcttaatgcatagcgtactactgctgctatatatgatgatgacatggaggagtttctagttggcagaggaacctgaagacatgactgacgatgatatgtcagagatcgagggtgaagctacacccaacgtgctgctgtggaacccgaccaatatcctataacacaccctggtgcagctgatgcctcaccagcagaactgcagatgcatctc

SEQ ID NO: 366356 - DNA, 440 bp, Zea mays
tgttttactatcggcgctaccattcgccgtaccgctggtcatctggcggctgatctggtggctgctcgcatccgtcgccgcatgctcctcctctagctccttccttagcccgcatctttacgctggggttacatgtctagctacctgcctacctagcgagagggagagagaaagggaggggagaaggttcgggcgctctggcatctggtctctgacttcgccgctgtctgccgggatctcgctcggtatgtgccttggtcggcgccatgaccgcaccggccacggcacccgccgcggcgcccgccgcgccggcaccggctgctgcaccggctgctgttaccgctgccgttgccgtggaccatgccacggaccagatgacgaagctgctcctgaattcgcagctgaaggcggagcccgcggcagagcctgctactgatgct

SEQ ID NO: 366357 - DNA, 513 bp, Zea mays
cgagtttttaatgtatggatgaagctaaatatggctttgtcatcgttatccatgctaaattgcctggacccaggtgtgctctcctttctgcattaaagcaaagcatttacttcttcggtatcttttctgtttcaattttatctcgtggagtaacacaagcaatcaggaaggtatggatggcattcaattttactcaataattcccatgcttctgcttgaaaaaactgaaacttttctttctgccttttgctaacgatagcattcctgtttcaccgaaccttcggccttttgtgatttttcgacccttcacaacagcatacaagaaccaatttgacaacaacatacaagaaccaatttggcacaaaaaagttttctatccgtataggttctaaatgaacagtttggcaatcttgttgcaatctgatctcattttgtagtgatttcataccttccctcaagaactatttggtggttatgtcttcatgaccatatataatttgattccttttctaa

SEQ ID NO: 366358 - DNA, 389 bp, Zea mays
gtctcactctctcttctctccccaactagcccgacgaccgcgccgtcacccactacatggttgaaacacaccggtggcaagaaatcgggtgccaaagtgcccaaatcggcaaaattgatataagaattagggagaggaggctgatacaaacatgatggaggtatcacacaccttgaattgtgttgcgccgagccctatcgaccacggacggtggcttaacggcaatggtaaattctggtaagaaattcactggtatttggttgctcgtctagctttaatctgccctggacacaatccttgtatctaggcaatctgcccaaccacaccggggacactacacagcataagaggcctaagcgtgggcgtaacggcctgggatgtctactact

SEQ ID NO: 366359 - DNA, 224 bp, Zea mays
ctcttgcgtgcttgggttgggttgggtttgggtatagacagttcttgcagtccacaccacctcaagtgagggggtgaccccccaccctcctacgtagcgctcctcaccgccatgctgccaagaaggcagagcatcttccacctcggggaggagggtgcttctctacctgcccaatgtttatgccattttggctcacacgttggacttcctttttctaccctgcc

SEQ ID NO: 366360 - DNA, 535 bp, Zea mays
  unsure (1)..(535): unsure at all n locations
cagtaaaggaaatttctttagaatacgcagtgcttttgcgtatggggcgaaaaggctcggaaagttacttgaatgtccaaaagaagctttaattcctgaattaaaccagttcttcacaaatacatggataagacatgggagtggaagtcgtcctgatgtgcctatcccaagtctggttgatgtgcggcctatgaaggttgtttcttctgtagtgtcaagcagccagagaagtttagcggcattcaagaaaaaagttgaaaatcctaaacttcatgttaatcaggataatcttcgtccgaatcaagaattttccactggaagttggtgacatacattaccgtaatctaccaagaacagttaatccttcagtttctcatgttcagcaccaaaaaagttatacaccacaaggcaatgctaagggtctctgaacagcttgaaagaaataactcagacggattgatncanagtgcaagggatagaagagtgccaaatggtctctttgtcatgacagaatgggcaaacagtccagatttgc

SEQ ID NO: 366361 - DNA, 443 bp, Zea mays
gcctggtgtgggtcggcgcgaaaggcggcaccgcgcaccggaacacgccgctgcccgtgtcgatggtcgcgcagacctgcgcgttccgcccgacggtgctcgacgcgctgcgcggctgcgatcgcgcgtggcgcaccgtgttcgaaaacggcagcatcgacgcgaccgccgcgaccgtacgctccgatctcgccgagaccgtgtggctcgcgtacaccgtgccggccgacctcgacatgctgccagccggcagcgggctgcccgcactgccgaacttcgcgatcaatcttcatctgccgcgcggccagcgcacgccgggcgtggcggtactggaccgccacctgcgcatcggttatgcgcgcttgcaccaggacgttcttgaggagcccagcattcgtacctgagcctgcgaggccatggctgttctatcaggatgcgtaaat

SEQ ID NO: 366362 - DNA, 420 bp, Zea mays
ctctttgtccagttttctgagaggcgacgactggatggcaagtaccttgacgagtctgcggtccacacgtgcgggggtgaggctacactcgtggagagaccttatgcagaccacaggggtaagtgaagctatagctgacgggattattggagcagcatccaagatcgatcgactggcgagatacacgagccagtgaacgaaatgcgcaaggactggagataattcaagttacaactggatcaagagagcttgatcgagatgagggaggcaagaaacaggagctatcactgagattatgaacaacgatcatgaagacaagactgattcttgcaaagaccgatgaatgacagtgcacattccactgccgttggtgtagaacatgctcatgttttgctcccaccttcggagacattgtgtaca

SEQ ID NO: 366363 - DNA, 91 bp, Zea mays
cccatcttacgttcagggagtgcgctcgacagccggcgccattagtgatttagtgttgagagaggaccatattctaaaatgaccggacgcc

SEQ ID NO: 366364 - DNA, 351 bp, Zea mays
tttgccttcttcccccgccccaaaggggccgaacaaggtgagtttattttgccagtacgacccacccccctcgaactatgtgtgggctcccctcctcccaataatcccctgccgatcacagggataagttcctcttcttccagttgccatcctctcttcctttaccgaggcagccacactgaggtgctcacgcgcccgacaacttcaagcgcagcgactggagataattcaagttacaactggatcaagagagctcgataagatattggaggggggggatagaaacaggaatctatcactgagatatatggttgagttcccgctctggaaagactcaatttgtgtcacacc

SEQ ID NO: 366365 - DNA, 389 bp, Zea mays
tcgcgatttgctcgtccggttcagttcagtggcgccgtcgtgcctttacaacggcggtagacgccgcaagcatgtgagagtgagacagacggcgtctagcggtctcttatgccgacgtcggccccgctgcggctgggtagggtgcgtctacacgcggtactgcgactcgggggggatcgattcccttcgctgttctgtcttctccggcgcgtgcgcgcgggatcgaaggtagggtttgggccccaaagttcgagtctttgtggacagcggcggcgatggactacaccaacgccatcctgatcatcccggacgccgcgggccccgacgcctgggccaacgcggcgtcggccgcggtcgccaacgccagcatctgggccaccgaggacgac

SEQ ID NO: 366366 - DNA, 199 bp, Zea mays
ctctagggtaagctggtacgcccgcagcctccctgcccctggttccggattccccggacgcccccacacgctctattttaacaagaaacacgactttggcacggacgggctcccattgagaactcccgatccgccccaccacccccacttgttaaactttgtcgaggggcgacggtccccccctcatttttaccccccc

SEQ ID NO: 366367 - DNA, 406 bp, Zea mays
cggtcgcgtgggtcgtggaggaggcggatccatggagcgcagctcggcgggcggccccctggcagctggcgtggcgagctcatccgcgcgtcctcgactcgtccgcgccggtgccggccgccgtccccgtcctgtgcgacggcgagctcgtcggcgtgggctcccgcccctatgcgcaccagctgcgcactcccccctgctcgacccctcagttcctggtggtcgccctcgggcccctccgctggtgtggctgctgggattgctgctacggacgctggtgctgtagctgctcccaaggaagaagagaaggccgagtacctcaaggaccgagcaagtttgctgctgctgctcctgcagctgagaaagggggaagaggcggaagcctcttctgctgcggggagcgttc

SEQ ID NO: 366368 - DNA, 291 bp, Zea mays
ttccttccttgtcgccttgctagttgctgctcccgtcgtgccacgtgctgcttccgctaactgcgggtaggggctagggagggagctgagcaatggcttccgccaccgccgcgccgtgaccttcggcaccgccgccgcctccgcctccccctcctgcggcggcggcgcagtggctaggcccgcgggtgtcgttcagcctggacgatgcgggcggaggaggagtagggggaagggatgctgcggcagcggcaggagggaaggccgggccaggcgccggcgccggcgccgact

SEQ ID NO: 366369 - DNA, 208 bp, Zea mays
  unsure (1)..(208): unsure at all n locations
aactggaagagccaacattggcagacgccaagaacaacagtacggacaccaaaaagagtcctgctgttgactgttataacatngaagacccaagggaggagaggggcccctataaatgcccagatgacgaaagattggccggctccctgtattacaagcgaagcgtggggggggagaaatcatttataagaccctcaacctaaaacaa

SEQ ID NO: 366370 - DNA, 316 bp, Zea mays
ttcccatgcgtccgcggacgcgtggggtagatgggttggttgcccgaccgacatgctgtgctctctgctccagatgagcaacctgactatgcctgatgaaccaaccatgcgagtgagcagcagccatctgcaggggaaataaactatcgtaatcgtactgctggcagcagtgatcaaaataatgcgcagaggaatcagtactgcaagctaattggagaagcattgtgaatacataaatctgtggatctcactactatactgcgatctgaatcatcagctgctgtacctgctacctactgcagctgtgtggtaactg

SEQ ID NO: 366371 - DNA, 623 bp, Zea mays
cgattattgagctacacaggcacaattcaccatgatcccatcccccactcaaacctgcaaaatcctgtagccgaacatctcgatggtctcacgtgccattcctttctacaggaataggcctataactgatttcaataagtttatgctgcatttcattcagtgtgtttggatgcatatagagaacacgaagtttaatgtgtttggtgcataatgagaattgaggaaatgggacattctagcatgctatgtgaattgtgaaaggctatagattaatgtgtacaggtgggaattcattatcggtttactaattatatagctgtttttccctattatctctctcaatttactgtgtataatgtactactaatctggaaattgatgtatgatagcattttttatgttggaactgcctacatttatgtttggtgccgctcccacgagcgcaccaggacgccggcttggaggtacttgcacacaagggtcgagctcggacgtcgtagcggtgcggagggcctcggccgtagcatgccccgccccgcgcgcatgcctggcggtcggtgtccgcacaccccacgagggcctgtctcaagcgtcttatcttctctgctcacagacctcacgct

SEQ ID NO: 366372 - DNA, 282 bp, Zea mays
ccggatattgaagggtcgacccagagcgaccggccacgcgaccgggataagtcgggggtacgagtgtgaatatctgtttgtgattgtgcaaacacttgtggttcatccaagataagtaaatccatgcgggacgctggggagcactacttctaaaagatggccgcacgtaggaatccatacatcattgaagaagagggtggatctgaagaaatacaggtggagcgtgcttgacgatccgagaccggtcatgggaggaggcaagctcgtggagatgttggtggg

SEQ ID NO: 366373 - DNA, 342 bp, Zea mays
tcggtcttttccaagcaaaaaagcaaagcctgcaatggcatctgcagccaccgccgtggcactcgtggttgatgccaacttggtcctgattatataaaggacaccaaactttacacgaccagatcttctgtcgccaaagcagggctagtgaataagctgtgtttcctcccggattgtcactgcttttatatttgtgcatttattttgagggaaacattttgcccaaaataggccatatttgtacttttcaaacaagtcatttgaaccaaattttatgctgaaaactgtatgcgatacttgaaaaggcaacacacttacttgataggaaaggcggttggcaag

SEQ ID NO: 366374 - DNA, 618 bp, Zea mays
  unsure (1)..(618): unsure at all n locations
gctggtgcgcctgcacgtaccggaactcggaagtgccgagcgccagagccacgcgtccgtggaaacggctggatggacacaaggctgagggaggccgtagcctggctctgactaaaacaccccactataaccgaccacacgcggaccgatgcacatgagacgatcacgacagcatatagatcgcatgcttccacccatacaaacaaacatcctctgccatgcctaacctatgtccgagcgaggtgcctctactgactttgctgggattggggggacaccataaagaagtggagatccatctctgacagagcacttccttactgggtgaggaactccaagccatcctgataggttattcgccctgtgccggcgcaagatccattttatttagacccgctcccacagattggactacccaaggatgaagataccttggtagtcagatcatagaatgcgggtggactgttattaattctccataggatggaatccttgtggaagctgacgtacttgctggagccggcatcacttgctctcatgacacagctatctctgtggcctatgcatnccgatcgcgtgctctatattatggcaaagagatggagagaaacttggatt

SEQ ID NO: 366375 - DNA, 523 bp, Zea mays
  unsure (1)..(523): unsure at all n locations
cccacgcgtccggtcgttttctttctcagatatcctcccaccgctcactgcctttgctctatcccggccaccgccgctcaagcacctggatgaggatcgatgccgtcgccaggatttttcctcgtcgtgctcttctgctgaaatcggtgcccagccactcctctacagccgttgccatctccctcttgtagctcgtcttctccctctactctccgctcaagcttgccgaccgcccgtcttcctccctggccggcgtactgcctccggctcgccgctgcgcgcgcccatctccctccgcgccgcgccatctgggtgtctgctcgccccctgtgccgcngccgtggtctccctccctgcgcacagccaccaccggccgagctcgccccggccccttcgctcctcccatggcgagctcgccggggatgcccctgtcccagttcgctgcgccctgctcggtcccgggcttatctgctgctcgggcgcgtccctccttgntcctccagccgagctgctcttccagcgc

SEQ ID NO: 366376 - DNA, 298 bp, Zea mays
gccggacgcccggggtgccggtttcggtttgaccctcgcgtccggctgtgatcgcttgcgccgcccttttttttttttttggccagatccacgacacgacagttcgcggactactatcaaatcacaccacttcctgaataaatctgtagcgttaataagagaaagagggggcaggccataatactactacaagggcacggaatccgctggtgccacaacaaaccagcaaaggtaaggcggcacacaggaactttttttttacacacggggcacaggcccggctgcctccgtacgcgga

SEQ ID NO: 366377 - DNA, 297 bp, Zea mays
tcgcagcttcgcaatggcagacaacgaactgaagctaagcaagaaaatcgggagggcgaggaacagcacgcacgcacgtacctttgcctggagccgagcacgtcgacggtgacgtggccggaggtgcgctccacgagggtgtacccgtacgccgcggcggcgtacaccagcgcctgctcgtcgggggactcgccctggtactccaggagcctggccgccgccgccgcggagtcgatgccgtcgtcgccgaccacgatcggcacgatggtgttgcacgtcgccagcgtgaggaggaag

SEQ ID NO: 366378 - DNA, 350 bp, Zea mays
agccacccaggcgatagaggtgccgcaggcctactacaaggaggacagacgacggctgctagagctagacaagaccacgtccagtgctgatggagcagaacccacgcccgacgaggggagcgcgcaacctcaggactgcgcggagggctactgggggactggtccagataccgaggaggctgccaacaacgaggaggcaggcgctggaccgcgctttgacccaccgacaatcggtgagattttggcatttcgtcagaaaggtatatacagtgccccctgcctatgtttactagtacactaatatctatctatctattagagatgagatgcatgtgacaagagggactgaa

SEQ ID NO: 366379 - DNA, 321 bp, Zea mays
aggttatagttgtgctccaggcctactccaaggcggtcagccgccgcctcctagagctctgcataacccatgagagctaaacgacggcggcttccacgccccgcacaatctattcatcccgagcggagtgcgtggaaggcgacccccgtcttccgaagataggggagtttttgaggccgggggaggagctgctcctggcgagcgccgtgacgcggcacggcacggcgagctgggactcggtggccatggaggtgcagacacggatccccgtggcggcgcggtcaggcctcacgccgcacagatgccgcctccgctttcgcc

SEQ ID NO: 366380 - DNA, 195 bp, Zea mays
  unsure (1)..(195): unsure at all n locations
tctcttgtttggaggcngacacgcgagggccacaacacagcggcagaaataatcccgaccggaccaagcgcccaacaactgccgccccaagccaagggaagggaaaaggctatcgttctcgtcagtcgtcacgagagccgcgacggcgcgcatggcggcgactgcagctgcgctccggtgctgcttccccggatc

SEQ ID NO: 366381 - DNA, 80 bp, Zea mays
gcggaccagatgcggcccagactcaggaagctttttctttaattcagaccgagctcaccgaccgctgggggggtgtctaa

SEQ ID NO: 366382 - DNA, 445 bp, Zea mays
agggtagctggacccgctgctgagacgcgaccgatcgatccgatccggatcatatgtttaaagaaccgtgtttaccagcgcgccgcggggatatattaaaaggcggcgaaatagacgaaagaagctgtgcaaggtgccaaagatgcaaaagccaactacgctgatgtgagagagttacagacacgtgactgataacgagcggttatacacaagaaggagctgtgacgttgcgaaccagccgatgagcgtgcaaaagatgtaacgatggacgagctaatggagcctaccctagctctagaccgcctgtgaggacacctgagctcactggatgaaatcattatggtagcacatggcaggatcaaacttaatatggaagtgaggctacatgggggcgacaaagaatttgaaaacaaagccttaaaaacgattaaagataatgaaattt

SEQ ID NO: 366383 - DNA, 480 bp, Zea mays
  unsure (1)..(480): unsure at all n locations
tcggtaccacgcatgctgcagacgcgttacgtatcggatccagaattcgtgattggttatcttcttcattttaacgatcggctttggtgcactaagaggattggtgcaataatattgatatttcatgtaactagaaagaaatgcagcaattataaaagtaattgctgcatttttgttataaggagaagatacatatatttaagaaacttatagcaaattttttgttcatgttacaagttatattttagctactggtctatatgcgatcgatagatttttcaaaaatataactacagaatagtataacttgagaactcataaacaaaaggttccttctaatgtatagaaggagccttttttatttttacccctatttcaaataccaccaacaaaatttcaaatactagctggtgtaatttcaaattccgtcggtagtatttgaaattactcacggtgaaatctttgntttattttcatatt

SEQ ID NO: 366384 - DNA, 611 bp, Zea mays
actactatgggaagctcggaccacgcatgctgcagacgcgttacgtatcggatccagaattcgtgatgtcttcattgaatccaaggagtaacgggggcaacaggagcacaaggtccacaaggaattcaaggcccacaaggagagataggtccaaccggcccccaaggaattcaaggtccacaaggtcctcaaggaatccaaggagtgacaggggcaaccggggcacaaggcccacagggaatccaaggcccgcaaggtgatataggcccgaccggcccacaaggcccccaaggaattcaaggcccgcacggaattcaaggtccaactggagctacaggagcaaccggagcgacaggtctccaaggaattcatggcccacaaggaatccaaggcccgcaaggaattcaaggtccaacgggagctacaggagcaaccggagcgacaggtctccaaggaattcaaggttcccaaggaatccaaggccctcaaggtattcaaggtccaacgggagctacaggagcaaccggagcgacaggtactcaggaatttcaaggtccccaggaattacaggcccgcaggaattcaggtccacggagctacagagcaccgag

SEQ ID NO: 366385 - DNA, 368 bp, Zea mays
gctaggaccacgcatgctgcagacgcgttacgtatcggatccagaattcgtgagcttttattttgtccaaagtgtagccaagccaacaggaggtgtcgattggtaacggttgcgatgaccacaccgtgcgattggtgcgacatgaccccacctgtgaggaggccgatgatatgctcaaggaagcatccgacttgcttgacgtaacggctcaccatgtccacatgtattcccaggtgcgcatggtactttcgccgtcatcgcaccccttggatagtatgattcctaatggactacctggtttgcggacaccactgcaagcaacaggggtgacttgggcaaaaaccattgcaggccaatcaggccgacaa

SEQ ID NO: 366386 - DNA, 159 bp, Zea mays
aggtaagctcggaccacgcatgctgcagacgcgttacgtatcggatccagaattcgtgatgtattgtatatgatacctttacttctgatttacatcaattattagaacatttagagcctcaaaatgtcacacttgttggtttttctatgggtggaggcg

SEQ ID NO: 366387 - DNA, 104 bp, Zea mays
gcatgctgcagacgcgttacgtatcggatccagaattcgtgatgtaatagcaataaaccagacaggcgccaggaccgagcgcggaagaggttaagaaaccctat

SEQ ID NO: 366388 - DNA, 469 bp, Zea mays
tcactatagggtaaggctcggtaccacgcatgctgcagacgcgttacgtatcggatccagaattcgttattttttatatttttttgaaatgtttttgcagtatatgaaagaaaaaagtgttcaacaattgtacttactaacaaatcatccacaatctgtaccgatctttcagttttttgacttttttactatagaaaaggatgaggttccagagggaattcaacaactagaacatttttgtcaaaatctaaaagagcatattgcaataatactaaattgtgagctattcacaaagttatgcacggattaattagagggtctcaactgtagctacaggagcaacctgtagcgacagggcttcaaggaattcatggcccacaaggaatccatggtccgtaaggaatttatggttcaacgggagctacaggagcaaccggagcgacaggtcttcaaggaattcaaggtcccc

SEQ ID NO: 366389 - DNA, 57 bp, Zea mays
aagctcggtaccacgcatgctgcagacgcgttacgtatcggatccagaattcgtgat

SEQ ID NO: 366390 - DNA, 490 bp, Zea mays
gcacgctgcagacgcgttacgtatcggatccagaattcgcgatgtttttgatatatacgtagtaaataatacgatagttggggggaaaacaaattaaaagtgagccatctgtagcgaaatgaccgtccatttcacactaagagctgaaatctatactagatggaatatatcatatgggtacacgttccggctaatacaagcaatgggagggcaactccatatgattcaatataaaaggtgtagtgacgtaaacattgattcaggatatgaagcttttaaagatggattttccgattatattattaagatggaggtctcaaaaggggattctatacaccgctttttgggaccagaaggtactttgctggaacattactctcatgctttagaagaaggcaaaactgttggcgtaatactaggtgggatagaggaacatgaaaggattaagactatgcgctgcggaacaatagcggttcatcctaattaccgc

SEQ ID NO: 366391 - DNA, 574 bp, Zea mays
aaagctcggtaccacgcatgctgcagacgcgttacgtatcggatccagaattcgtgtatattcttaccatttttatttgtcgtaataagtaggttgagaccaatacaaacgccatcataataaatgtgatgaacgcaatccatagtaaactttgatcctgaccgaactttaaaagacgcccagaaatgatacctatactaatcccttccacaattgatataccgaaagctactactgtagttggtacattcatatcaattaatgagaatttctcttcaaaatgatctgattgcattcgtttcttttcttgattcgcaattgcgtatgctgtaaataatgcaacaatgaaacaagttaatacaattaagtacggtgtaaaagcattacctgctgcaattactccatcattttgcttttgaactggactagctaaaaagtcatatagcatctcattttgacgatctccaatacggctattcgctaaaattttcgtaaagtttttggagaatgatttatcatcttccattttcttcgtaaagtcatttaataatagatcagcttttgaaacattgtc

SEQ ID NO: 366392 - DNA, 644 bp, Zea mays
taagctcggtaccacgcatgctgcagacgcgttacgtatcggatccagaattcgtgtatagttatacaagaaacgcaattggtaatccaatcatttctgctacttttaaatcattttgcgttctttcattaatctctttattaattttcggaaatcctgtaggtgttacttttaatgctacattactttctttctcaatctcaatttactggaaaaacaacaagagatgatgctgaagaaacaaagagaaattgagtatgctttagcgaaaatggagcatagaattcatttaattaaggaagcaacaaaagcaaaagctgaacaaatggtaataaaagagatcccgcagcgaaaaataacagctattgcggttgccccgaatacgacggatgatatgtttgagtactacattcattcgttgcaaaaaaatatgaggcaaatggatgatagcttattttctggagatatttggtgtaactgttgcgaaaaaagggttaatgcaaaatgagtttcaagcatatagcagtgtatttattcttttggattatatgcctttttgagtacagagttcagatgaaattaaagaaggtatgtttgcctgtgtatatcatcatgggccatatgaagaaactgatgaaacatat

SEQ ID NO: 366393 - DNA, 500 bp, Zea mays
ctatagggtaagctcggtgccacgcatgctgcagacgcgttacgtatcggatccagaattcgtgatctttgacgctattttcttccgagattagactcttgcacactctattcatgataattctctcctttacaaaagaactagaaatttaaaagtttactccgacttgaatgattaataaaaacaaatactggatttatacgtattcttatagtccactattatgtattcacacaatgcactttctatttacatgtcaaacccattacaaattcatgctgtatgcaatataattgctaagttagggattgacttttttagtatatagtgctaatatcaaaaaagagccttctgacttatttgtacctaaaacgtgggattttgtttttttcacaataatgcaggacatgatacctacaaagagctataatttcattaagagagggaaagacatggaaagattaaaagagaaatggtcttaaccactgacacaatgggtt

SEQ ID NO: 366394 - DNA, 398 bp, Zea mays
gcccgcggctgacgcggtacggatcggatccagaatccgagagctttgcttttcgttaggaaagaagaccttgttgtttgggggctttataatatgcgttatattaaggcacactgagcccaaaggaaatcatctcgtaggaatgagaaatgatctctgtgccattcaccaatagtatgatgacaacagacctgatgtatagctgtgctttgagagagaacacgatcaggtaaagccgcatctaaaagagaaattgcgttttgtgtttaaactcgcagcgtctttactaccatttccattatgcgaccagtagccacaatgaaactgctgctctggtcctgggtgttgtgaccatcaccttatcaaaaaattcatactatataggactctacagtata

SEQ ID NO: 366395 - DNA, 432 bp, Zea mays
gcatgctgcagacgcgttacgtatcggatccagaatccgtgatgctttctttttgaggacgcaaaagaagcaggtatgggtggtgtcatttatgatttaccaggattacatagaaaagcaaacgaaaaaaagctttgaacaaataattcgtatgatgtaaagggggaggcacagtatcattattgtgcccattgtaaatacgactattgcacaagaagacgatcattttatagggagtgtaaaacaacaatgcactatggacaacttttcatgtaaacaagagagaatgcgccgtacaatgtatcctttcaagcatcgacaatggtttaggaaactacactaattggagaaacagataacggcgccgagtcaaaataatgttgaaagcaccgtatgtgacttaattgcaattaactgtttcaaagttttttt

SEQ ID NO: 366396 - DNA, 648 bp, Zea mays
  unsure (1)..(648): unsure at all n locations
aaagctcggtaccacgcatgctgcagacgcgttacgtatcggatccagaattcgtgatcgtgtacgctggtgtaaacttagacggtacattcaactcttatccagaagctgcggaataccttgatgaagaaggcttttcacgcaaataaaaatagaaacctatttcattcaacgacttttatagtaatcaaagaagacacttaaggtgtctttttttgttatataaactcctttctcacactatctctactaattttcataaaatgattcagaggaggtttatatgaatacgactgctaaattaataaattggaaagaacatggcgatatgattattctagaatgtgaattaaatggaaaacgcttcgagatatcaacatataaacaaagaatatataatgcacaccttttatcagatgacgtttatattcgtttagactcatctgataatataattggaataaatatttataaaaagtaagaaaagccccctattccgtaggcgggctttatctttattacacaacatcagagtatactctctttntttatacagtttatgtaattatacatattcatcaaagaatacactaaatgaatatgacatgtagtnaaatataacttggtggcacgttctataaagcagat

SEQ ID NO: 366397 - DNA, 641 bp, Zea mays
gctactatgggaagctcggaccacgcatgctgcagacgcgttacgtatcggatccagaattcgtgattattcaacattatcgttccaggtgaaacgatacctcatcattctttaatttcaccgaaagaatatcacggtacagctatcgctttaataaaaacagaagtggaaccgatcactagtagtgaatggtacgagagacttcaagcaaatcccgaatcgtatgctaacatcgctatgcaattgcaatctaaattaagaatgatgcaacaacgaattgatcaattgacaaccgtctctccgaaagaacgtcttcatcgtttacaagaatggttcaccctatatttaggtgacattcctatatatgaaatattaacacaaaccgaaattggtcaactgataggtatacgtcgtgaaacagtgaaccgtttattacgagaacaaataaaaaacgaggtaaaataaatacctcgtttttttgcttattgtaagcttgttgctgggccgaaaaattcataatgaatatgctcttgtttcacacctaaatcagttagtgcagcatttatatgcttcataaatgctactggaccacaggaataaaactctgcttcagttgtcgaataatagtttttaacattcac

SEQ ID NO: 366398 - DNA, 513 bp, Zea mays
agctcggtgccacgcatgctgcagacgcgttacgtatcggatccagaattcgttttggtataaaggtaaaagcgaatgaacaaggggggattaatcttcttattcctgttacgaaaacgacacaagaatcgtaacatggcgggattacaggtggagtgcgttttggctgtgaaaatgctattgtgcaggatagctttaacaatcttatgatgcagattatggcaacgacaatagtgttactacatggtatatatgcatttatcatttttgagatgaagccgaaaaatgtagagactctatatttgtcacttggtagtatatcggcaggtattatatttataattacggctgaacgtggattgttctctttgtatgaatttgaattttcaacatatatgaaaattatatatacatcgtttgtaggtctgagctttattcattgcactgtatatgaaaaggattttacgagggttatggggacaataaaatgattttatttaccattgtattatg

SEQ ID NO: 366399 - DNA, 462 bp, Zea mays
taggtaagctcggtagccacgcatgctgcagacgcggtacgtatcgggtccagaattcgttgtttttcttaatgaaatcgatacgaatatgggcggggtatactaccttatgggagtataattattgacttatccctttatgatcattcaaccttgggatgacaaaagtaatgttaaagtgggctcgagttatcactgattgtggaattctagcggcaactttacatgcggaaagataagcaagcactaatccttacatatgaacagcggactgcacaactggaggatgaagctggcgaaggtgcatttgcattatgaaaacgtgaacaacgctataagattttattcgaagatcacgccgatgccggacactctgtaaatatgaagggcatttttggatcaacctaaataaggcttggcgagagcttattttactgcctattatcgccaagtggtaagcta

SEQ ID NO: 366400 - DNA, 499 bp, Zea mays
aaagctcggtaccacgcatgctgcagacgcgttacgtatcggatccagaattcgtgatgtctgtgcgtgcttttgccgtttcatctggtaaccaataaatttgattggccgcataatagccacgtgttgacccatcctctggagacataacaaggaagcgataacctttcaccactgaatgataataaagcgagtccatacctgttctaactaagaaacgctcatgcgcacactataccgataaaccgtaccaataatcatggttaccgagagaatccatccgcactgcctcattattaccatatccattatacactcgcatgaaactatcatattgctgcactgacacctgtatgtgagacaccacctacaataacaaacgcatattgcttgggagctcaggtatcaaactgatgaatcgatctttaccagcgaaacgtatcatccggaccactacttcgaagatgcacatcactgacaactgaataaactatcttct

SEQ ID NO: 366401 - DNA, 661 bp, Zea mays
aaagctcggtaccacgcatgctgcagacgcgttacgtatcggatccagaattcgtgtttcttatattcacgccgttagcgggatttgcgcccacttgtgtcgtgccatctattgttaaactgtttagaacgaaagttgttccagtagggatgacatctgtaaaaataacattgttcgcatttgtattacctgtagctgtaaaggaaacggtgtacgttagtgtatcaccaatatctgcaaaatttttatctactgctttcgtcattgttacagtagcattattcacttgagtggagacaatatttgtcttatcagtcccacttactgctggttgattaggtacaggaatgtattgatatgttgttgttccactatttaatattgggtttgtttgagggatagaaggaacgagtacttggaatgaaatagtagtagtggaatttgcggcaattgacccaattgatataccattagcgggatttgctccagcttgagtaactccgttcacagttacactccctggaatgaaagtagtcccgctaggaatcgaatccgtatatatcacattcgttgcagcgatatttcctatattagctaaagcatactgtaagtaatgtttcacaatatcggtaaaagttgttaactgattttgtccataata

SEQ ID NO: 366402 - DNA, 76 bp, Zea mays
gccgcagacgcgccacgtaccggaaccagaaaacgtttagtgtgaacacccaacgccacccaaaaaacagaggggg

SEQ ID NO: 366403 - DNA, 627 bp, Zea mays
agggtaagctcggtaccacgcatgctgcagacgcgttacgtatcggatccagaattcgtgatccatttatatatatgtatttaaaaagtgaatatgataatataatgttgtaatattttgaatagaaagaaataaatagtttctcatgttttgtttgttttttttacaggaatcttttataatcttttatgcgaacataagttctgtttttcgaaaagaagaagtttatgtgaaatggagagggtgttttatgtatcctgaagtcattaaaaagatggcattttcaaaagagcatagagatttattattgaagctatataataaagagattacacgtcgtgaatatgatcggcttgtacaatcgctatataaaccttctaaagaggtttacgagggatagaaatgggggagacaatctagtggattgtctttttaaatttatgtatgttctgataaaattaaggctagccttactagggaggtgaaaagattgcggaaacgtttatatatagggattggaattatcttcttgatcgctttaggttgaattgcattttttgtcagctttacaaggaaaccgttcagaaaattttattttaagacatatggtgaatgacaatggaacgc

SEQ ID NO: 366404 - DNA, 624 bp, Zea mays
ctactatagggtaagctcggtaccacgcatgctgcagacgcgttacgtatcggatccagaattcgtgatgaattccttcttgttcaatacaactacagcttatttgaagcaatggaaattctattcccaccaattattaatgaaattaaactttatgaaacacctttacaagatttatatacgtatatacgtgaagcgtggggacattttgcccaaggaccagctggcatcatttcccgttttaaagatgaagctgttttcagcgttgattcccttggattacgcccagtatggaaagtagagacagagagctcttatattttctcttctgaacctggagttgtatcaccaactaaatatgtagcagaaccaaaaccactcgctcctggagaaaaagtcggattaaaatggaatgaacaagatgaacttgttctttatgaatatgacaaatatcaaatccaagtatataaccgttttaaaaagcgaattgatactaccaattaccatttaaatttatctatccctgaaacgaaaaaaatccaagggctatgtgattctgttcaagttgaaacgaaacaatacgtcgctttcggatgggaccgagaacatattaactcctgaaca

SEQ ID NO: 366405 - DNA, 217 bp, Zea mays
gcccgcggctgccgcagacgcgatacgtatcggatccagaattcgtgatcgtttgccattaatgaaaattctcgggcgcaacgctgtctttacccaacttacgcgccttgcggcagacgcacttaacatcagggggctgaaaatggaacagaccggaacacatcgatcttgtcaacagtggcgcagcctagacggcggatgggaaggggcagcgtca

SEQ ID NO: 366406 - DNA, 238 bp, Zea mays
attcgttaaattgcggctgatgagactctcttctaatagctctatagtagaaggcaatgcgtatgttagcgtattgggatgtgtttctaacagcacatacatattgtgctgagcaaacacatcacataccttacgcaatcgcttacatactcttttctctctcgatcgggaagcacctgtctcctttttgcccaccaaatcgtgcgtaatctgttcaagttaaacccattagctaggg

SEQ ID NO: 366407 - DNA, 634 bp, Zea mays
taagctcggtaccacgcatgctgcagacgcgttacgtatcggatccagaattcgttatatttgataagctctcccaaaattccttttctaatatatatatcttctaatcgttgttggacttcaattgtctaaatattctatttagcactttatattacttaagggttcgaattctctgaattaaaattccgtgatattgttaagaaaataattattattatgatatctggatgtaattgctgctaatgctttatcttcaagggaaaatataagtttttcgttaccataatactaataacaacctaacaaactgaatatttaccagaaaatactaaaatgtatccctcagcaatttacagtataatacacttttagaaaaaaatcgaatatttaagtatttccttattaataatatgaattaatagaatgcttatattattatacggattaaagatagctcagctgtggtgatctttattcattttttcttagagtttatattaacttagcaaactgtgtaacagaaccatatataagagcaaatatgataaaagcaatatcacaagttttttatttttatacagtaaccatgtgttagccaatcccttcttttgattcggaatattctgtgttt

SEQ ID NO: 366408 - DNA, 193 bp, Zea mays
agctcgctgccacgcgtgctgcagacccgatacgtatcggatccagaagacgttttatttttaataaaccagccagccgaacggggaggggctgaaatttaattaccttttgcataccgcaaccgacagtgacgcatcgggccctgtagcgatggaaccaacccgcctttattcaaaatatgcctggttcaag

SEQ ID NO: 366409 - DNA, 605 bp, Zea mays
agctcggtaccacgcatgctgcagacgcgttacgtatcggatccagaattcgttatgacttctgctctactcgctggaacaaaactactattaaacgcttctactccacttcctggttctattttttctcccgctatatcaacttcaaattataacaataatttaattgccgatactacaatttcacttcaattattcgacgtattatacatcgttaatttggttggaggtggttcaacaggtgcctctctaacaattatacgaatcgatttaaaaatgatgcattctttttctaataaacattattaaatactaagtctgtcatgataagaacctcccaattatttcataaaagtggtggcgcattaaagaacaaattgcactatattcatagtagaaactatctatactaaattttccgtatatatattatcaatttacactgactttccaccgatgttacattaaatatgaagacagtttcttttttacgaaccatctcaatacgtatatgagaaacgtactccaattctatacgcgagagcaatactatgttgacactcagatgagtgactttttttgggagtataaaaataaaaccatct

SEQ ID NO: 366410 - DNA, 382 bp, Zea mays
gcatttttcagacaaacaagtagcttgccaggcgctattgatagtgaggctaggacgtggtgtcgactgcaggcgcgatggtcacaacgactgacctgtggatcgaggcgacgtagctccgtctgtgcctgcccggctgcggatgtgaaggggagccgagactggctgtgagggaaggagctattcctgcgtctgcgacaagtggaggtaaggctagaccatggacctgaagctgtagtctggatcagttgccgtcagaggtgacatatgaggagtgtggtgctccacgcctggttttattcatgtaactagtggagtggacagcgtaaagatacctcttggccttgtccagatctcctatgcagattgtgctccaaaatat

SEQ ID NO: 366411 - DNA, 494 bp, Zea mays
cttaatttatcaccattcctaatttattctatttcttagtatcatagcacagtatttcgctcgccccgatttcccgactcttcccgtgcctcagacagcatcggattgcttgatctcgattgtcagaataagattcagcgcaggtttggattcaccgaatccaccgattgcttgcgccccgcggtcgcgcgcggcggaatttcggccgccgccaattcgggcctctccggaagggtgtccccagtgtggttcgcctaatatccgctgccctcgagcgggactcctcgtgattttcggctgtgcgcttggcttttccagacccgcgttggtggttccagcctttcaggggatggggcgccgcgggttgctcaaggctgcgcttttgctgagcttccttgctgcttgctccgggagagaacttacgatcaaacagaacccttccactaccatatacaactcgactcttgccaagatactcgggggatatgcttctg

SEQ ID NO: 366412 - DNA, 452 bp, Zea mays
ctttaatgtcattccacccacatcgcgtgccaccaactacgttgtccttagatactacgatgtcaagggagaccccgagggttttaagtctggtgtcatagatgagagccattgccactacatggtcgttttccaatatgggtccattgtgctgcttaatgtttctgatcatgaagcagatggatacctgaaaattgttgagaagcatgcatctggtttacttccagagatgagaaaggatgactatgctgttgttgaaaagcctaccctagagacatggatgcatggtggtcttgactatatcgcgcttcgggatctgagtattgatgggatccgtacaattggaagagtcctgagtcagagtattgctcttgactactatatccgacaagcggatggaatggtagctggagtcacagatatcaaccgcggaatgaaaaaaactgctacct

SEQ ID NO: 366413 - DNA, 272 bp, Zea mays
gggaggaagcaaaacctttggggggaccaaggaccgcacttgtacaaatggaaccccttaccagggttttttaccacaaagaggggtttttacaccggcttaggcaacaggggaacggtttacccccgggaagtcaggttacagcttcacacactggcgataaaacaaaacactttctaacaagcgcctacgttaatgagacctccctatcggaatgaggggcctcaccctccttgagggggctgaacctcaggaagtgtgttggcctgggg

SEQ ID NO: 366414 - DNA, 232 bp, Zea mays
ttgccacacacgctaaccaagaccaactgcggcatgaggcatggccacgagtgtgtttacgttataaagacgcagctgaaggtggcggcgtctgtggccgcgacactcgactggctatacggctgcaaggttctcgatcaatcgctgatccataatatgttaccgatttgcatcctgttcatgcacaacctgaatcaagacgaccctaagagaagcatgctgaccatgttag

SEQ ID NO: 366415 - DNA, 486 bp, Zea mays
tctttagctgctctagctctagccctagctagtagctagccactcggtcgtgtagtcatcagccttctgatcgtcacccatggccactgccgaggtccagaccccgaccgtcgtggcgaccgaggaagcgacagaagcagaaccagcagccgctgagcccgaggctgctgctgcggaggaggagcccgcggcggccgagccggccgctgaggagcccgagaaggccgagccggccgctgaggtggccgagaaggccagcgagtgaggccgtgcgccgtgcgcgcactgcggcggcggacagcgggtcgggagatcgatggctcagcgcgcgcgcgcctacatggcacggcgttgctgttcagtacaacgcgaacggaacgggtttctctcatctctgtgtgtgggacagtgtgtcgtagcttagcagtggctgtcgcgtggactgcccggtgccgactgcgagtgacatgggctaataaagtgtgc

SEQ ID NO: 366416 - DNA, 419 bp, Zea mays
  unsure (1)..(419): unsure at all n locations
atccgcggtcgcaaatggcgctaacctcccaaggcatcaccctccgttccccgccagcggggccccgcggccacggcgggaggcggtcctcttccgtgcccaccgccgcgaccccgcgcgtcttggggcagccccacgcggggcaagccttatccatctcgcccgtcaggtatgaacccgccgctcgcccaccacggggaggctccgccgccgccgccatacgtgccgccgcctcggccggcgcgcagcccggcagcgacccggtctctgctgagcccagaatcgagctccccacgatattttccgtcttctccgagaccgctaagaccggcgctgccttcttcattgcctcgtcggncgcggccttcctcctcggctcgtttggggggttcgggggcggtgctgggggtctcttcggc

SEQ ID NO: 366417 - DNA, 305 bp, Zea mays
agtacagatcatttcataacaaattgtaatgacatgattacaaatatagaaaccaacaatagtgtatttccaaaacgtaacatttataatggtatcattcaaatcaacgcatgataccctacatacgactacctggaaatttggcccagaaactttgttcagtgccccgccaaaggggctctaacttagcatcatttgcaatgccgcacaagattcaggtcaagacggagcagcacacgaagttcttcacttcaccggagattcatcgcccgcaagaaatcctccatcgccttcctcgatgaccc

SEQ ID NO: 366418 - DNA, 352 bp, Zea mays
gacataaagacaacttattccatactattctaccatacagatacaatctaatgattttcatttttcactgccatccacacccacacaaaacatgatatagggacatcatgcttggcaatatttgtattttgccaacaaaaaaagtgactacacctatcacctagacttcacccctatgttcatgtctggaggctgcaagactacagttacatacaggtgccatgttctaggactaaatatagttctgattgagtcaatcccactcaatgccatggactggtctcaggcaaatgggtaccaatatatacaagactcagccgacaagaacagacatcatcctaaagggcataca

SEQ ID NO: 366419 - DNA, 374 bp, Zea mays
tgctgaccggcgcctgtggtttcccccttcgcattggaggaggttttcacgttaaatttgtatcttctctgtgtttgatctactttgtatcgtattaattcgtaacaatttgattattaaaaaaaaaaaaaaaaaaaaaaaaaaaaaaaaaaaaaaaaaaaaaaaaaaaaaaaaaaaaaaaaaaaaaaaaaaaaaaaaagaaagaaaaatggggggcccctttagagaatccaactttactgccccgtacttccaatttaatagtttttctaaagtgcaaccaaatgccatttctttgccccccgttttacagcaaaaccactggaaaacccctgttgtaccccattttaaaagatttgcatttaatccccttt

SEQ ID NO: 366420 - DNA, 363 bp, Zea mays
gtatccacgagcccgcagcctgcaatcagatctggaattctaacgtaaccacaagctaccatccaagacatcagctgcaggggatccgagaccatgcaagcatcagacctgaaaactacatagagacaaagaatactacagaaggcccataatacggatagattctactagagttcatcgcacgatactaaaagcttactgctaaccaaattacaacactggtgcggcgtgttattcctcctcccgcacaggttctgcctaaaatcagtggatgcgtctatgtgtcttcccccagctggaatctcaatagagctacttccatttacttcccgaatccttcggtcttggattctgatgcacatt

SEQ ID NO: 366421 - DNA, 507 bp, Zea mays
  unsure (1)..(507): unsure at all n locations
ccagctttgaccgccgcctcccttcccctccgctactgctcctccccaccccactcccccgcaggagcggcggcggcggcggcgaggtcgtaccccacatcggcgagcggcggcggcaccgccggaggcaaaggcaagatgttcgggcgcgcgccgaagaagagcgacaacaccaagtactacgagatcctcggggtgcccaagtcggcgtcccaggacgatctcaagaaggcctaccgcaaggctgctatcaagaaccaccccgacaagggcggtgaccccgagaagttcaaggagctcgcacaagcctatgaggttttgagtgatccagagaaacgtgagatttatgatcagtatggtgaagatgcccttaaggaaggaatgggcggtggaggatcccatgttgatccatttgacatcttctcatcattttttggaccctcttttggaggaggtggtggaagcagcangggaagaaggcaaaggaggggagaagatgtagttcac

SEQ ID NO: 366422 - DNA, 357 bp, Zea mays
cccacgcgtccgcccacgcgtccggtcgctcactcttgcagctccacccttcactcagtcttaggctcttagctctaggctctagctagccgcgccactccttcgtgtagccatcagccttctcatcgccaccaatggccactgccgaggtccagaccccgaccgtcgtggcggccgaggaagcgcccgtggtggagaccccgccgccggccgtcgtgcccgaggagtctgcccccgccgaggccgaggccgaggccgaggctgaggctgctgctcctgctgatcccgaggagcttcccgcggccgagcagcaggcagccgccgagcccgaggccgctgctcctgctggtcgcgagg

SEQ ID NO: 366423 - DNA, 437 bp, Zea mays
ggccgctgctcctgctggtgccgaggagcccgcggcggccgatccggccgccgaggctgaggctgctgctcctgctggtcccgaggagactcccgcggccgagcaggaggcagccgccgaggaggaggctgctgctgctcctcctgctggtgccgaggagcccgccgcggccgagccggtcgccgaggcagaggctgctgctcccgaggagctcgccgcggacgagccggaggctcctgctcctgctggtccccaggagccggccgccgaggcggaggaggttgctgctcctgaggagcccgagaaggccagcgagtgaggcctggcgcacgcaccagcggcgggcagggcccaggggatcggcgtgagctcgtagcgtaggagccgatcgcacgcgggcatggcagtatgacaccggatattgctgttcagacaga

SEQ ID NO: 366424 - DNA, 170 bp, Zea mays
  unsure (1)..(170): unsure at all n locations
ggcgnatgaagcagaaaaaatcagtcgccgtagctgtgccgtcttcgtcgccgttgtttggtttttttcacataattcatatttttttttttattatttatcttttcttcttctttttatatctttctttttttttatctcctttttttcctttttatttcttttttttt

SEQ ID NO: 366425 - DNA, 76 bp, Zea mays
  unsure (1)..(76): unsure at all n locations
tttatgcgtccggaaggtttggagaaactccccggctctaggagatcgngacattgagaggactatggtaagattc

SEQ ID NO: 366426 - DNA, 279 bp, Zea mays
ccctcgcgtccggttctagatcgcgagcggcggccctttttttttttttttttttttaaccaaataaattttagtttttcacaattctcatgtcactttttatgaatctacagctgcaccagacaaatccttaacaattgtaacaacctaaacaaggtgtatgtcttcgagaacagaagcaagtccatggtttcacatgtttacactgttacagccttattagattacttaataccagcgaaagagaacttctcctcctttaatccgccctagcctacc

SEQ ID NO: 366427 - DNA, 494 bp, Zea mays
cggacgcttgggcggacgcgtggggccgagcaccgcagaaaaagaaaaagaaaagccaaaggcaaaggcaaagtggataccctgctgctgggtagtactagtgtattgctgttgaaacctgcaaatatctgggatcagctgatggatgaagaacaatgagtagtctctgggtaaaatagcatgcctgcgcaagcgagcggacatgagtgacaagaagctgtgagtgcctgcctgcctccatttagagctgatatttaggtgggattaaaatccatggtgggattgggtgtaagaatgaccggacaaggcctaatgtgtatcagcagattgacaacgcaacaagagcgaagccacaagaggtttcagggtagggtaccatctaatgtgtatcagcagcagcaggtttttctcaggtgttaagaaccaccgacatgaaaaagcaccgagtttgctcgttcattccttggcagccttgtcgatgagctcctgtggat

SEQ ID NO: 366428 - DNA, 259 bp, Zea mays
cctacgcgtccggacaaagcgaaacagtgagctgcaatcttcaagaagcatgtatgctaagacagcaggaaagctccgaagctttgaagttcatatgttgactggaaaccaacataagagtccaactatgaacatggatattcattttgatggtgcactgtgccaaaatggaagctacccacctagcatgactttcatttatgtagatgtagttgatccttcatcctctttttcttgtttcttttctattttttttttt

SEQ ID NO: 366429 - DNA, 347 bp, Zea mays
gtctacgacgacgcatccacccgagcccttctccgcgaaatagccgtcgccgcactgtcgtatttcctgctatgttattctttgtgttcatagtgttctttgttgtgcctttttctcattttttattttcgtattatcttgtacttttattcttattctctttttacttttttttctttctttttctttttcttttctttttttttttttttttttcttatcttatcttttttattcttctttcattttattattttacttcttctttttttttttttcttcatattttttttttttttctatccaatttttatttttttttcttttttttcttccttttttctttt

SEQ ID NO: 366430 - DNA, 129 bp, Zea mays
gcacgcctgcaggaccgcccggaattcccggccggacccacccggcgaacttctgtgacggagcgcccccttgtacgccaggcagcaccaaccttcaattccacctcgcgccatggccgcagaagatcc

SEQ ID NO: 366431 - DNA, 149 bp, Zea mays
ggattggttgacctctgccagcacaaatgacaaggactcgggtaattttgagcccaaggcgctgaaataaccataaagcacaccatatacaacttaagacatttcactaatttttgaagagctgcgaccaagcgaggagcctgtcatta

SEQ ID NO: 366432 - DNA, 182 bp, Zea mays
gtcttaattgtattattgcatccgtttgtgaatgcacgaattcatttgcaaggaggaacaaaactgtgatcaaagaacaaagaatcaaagagaacgaccgacctatgtacagttgtacacacacacacaaaaatggcgcgcgatccccgcaactgggggatcgagcaggcggtggattcgtt

SEQ ID NO: 366433 - DNA, 440 bp, Zea mays
ggcaaaatccttttatgtattatatacgtccacaaagtaacagtttgtgaatattgtctgctctatagtcagaaattgtgtcggtagaaaaagagaatactcagacatgagcctttaaacttctagaaaccctagatctcgaagcgtttctcctttgctcagtgaaaaacatggagattactaataggaacaccacaattgataatgcccatacagcaattatccacatcctagaagacctggccagtctccttgatctatgtagaggttgtacagaagctgcagtcctcttgacagtcttcaaccttccctcgtccatggattcgatgtttcctctacttatacttcttgacttttgtgcaacactcacaattttgttagaagcagaaacttgatcagttttcttagatgtgctgctaatggtgtctagccgggggcaa

SEQ ID NO: 366434 - DNA, 452 bp, Zea mays
aaggacttttgttgcatcatgcatctgctggatgccctaaaccacagtggtcaaaatacctgagttctcttaaaagcatgagttttttttttttttctattttctatatttatataatttatttttatatttttttttattaattatcttatatatattttaattatttttttttccattatattattttattatttattttattattttatttttcttattttttttctttatttaatatttattatatttcttattatattttattttttctaatttttatatatatttttcttttttgtttcttatattttattttatttttattataattatatttatttttttatttcatgttctttttttttatttctttttattatttttattttttaactttttatttatttatatgtttttttattattttttattaattttatttacatttt

SEQ ID NO: 366435 - DNA, 97 bp, Zea mays
ttcttttgtgtgtgattctccttgctactctactgatggagatctaaacctaatcgattggacataatgatcaaatgctacagatcctgtgatgctg

SEQ ID NO: 366436 - DNA, 55 bp, Zea mays
actttctttcgtacgcagcctaaacatagagtcatgtataggttgtaattaaaga

SEQ ID NO: 366437 - DNA, 440 bp, Zea mays
  unsure (1)..(440): unsure at all n locations
gcaagctttactcttcttcagaactgaacagagcgtagctagataacaataagcgtgaaccatggctggacgagtacgttcgtagctgctacggcaggtacagcgctatatgactgctgaagagagcgagacgaccagcgtgtggaagaccaaggctctcggctcgcctcaacaagatctctgacaaggatggcaagaaggctgcatctgcaggcttcttgaagtccttcaacaaggaggagtttgacaaggagattgaggacaagaagacagagctggagcccaaggtcgtggaggcctacgaagcatctcctcctggggncaaggctctcttcaaggataagaagccagtcaaggtcagcaagaagaactcggctgcagtcaccaagttcctcgatgagctggctaagattgacttccctggagccaaggtggtgagc

SEQ ID NO: 366438 - DNA, 122 bp, Zea mays
attaacatgaacatcacggattattattttttttgcataagctgcacattccacctatagaaagattacaaaggcttcctctgcccctattccttctccggcaacatacagactaccataac

SEQ ID NO: 366439 - DNA, 852 bp, Zea mays
acgcttatttgcacaagcgagcaaagagagggagagagagaatgttaagaaaagatatgaaggtgaggtccgcgactgtagttgggagattcttcttctttctttgcctttcttttttttttttattttttcctatttttttttttctttttttatttttctttattttctctttttttttttttttttttttttttttttttcttttttttctttttttatttttattttcttttttctttcttttttttttctatttttttttttctctacttttttttttttttttctttttttttttcttttaattttttttctttttctatcttttttttttttcctattttctttattttttttttctctttattttttttttctttttttttcttttcttcttcacttttattttttcttttttttttttttcttttttttcttttttttttttttctctctttttcttttttttctttatctttctctctttttcttttcattttctttattttattttctttcttctctactttttcaactttttctcttcttcttttctttattcttttttttttctttccttcttcttatttttttttttttcttttctcttttttttccttttctcttttattttttctctttattttattttttttttattctcttcttttctttttctcttcttttcttttcttcttttttatttttattctcttttttttttttcttcttcttttctttttttttttctttttttatctatttttttttttctctttcttctttctttttttctttatttctttctttttcttaattcttttttttccatttttttttttttttttt

SEQ ID NO: 366440 - DNA, 200 bp, Zea mays
tgttctagatcgcgagcgccccctttttttttttttttttttttttttttatttttccaaaagcacggaaaatattaatctaaacgcagcatcgaaattggagtgtacatattgcttgctctgtccgtttccaaatggggggggaaggccttgtttttggaagacataccggattttgaaaattactgcctttttatatc

SEQ ID NO: 366441 - DNA, 429 bp, Zea mays
ctgactcgtgggcggggtgccggcgcggcgacctggtggtgcggcagcgcgcgacggggcgcgtggtggaggggaagcccgagtacgcggtggaggtgcggaacgcgtgccgttgcgcgcatgtcccgtgtgcttgctgctttgttacggactcattagcgtgtaggccgttgaccctttcttcatctgtgcttgtaatatattttgttttttttctctattatattgaatatatattttttttctattattctttatacttactttatttttttttaatattatttttattttctatattttatttttttttataatttctcttttttttttctttatttattcttcttatcttactaaattcttattctcttttattgtttttatcatttttttactttttttataccttttttttatttatttaat

SEQ ID NO: 366442 - DNA, 420 bp, Zea mays
tctagatcgcgagcggcccccttttttttttttttttttttttttttttttttccttatgaaaaaatggcctcacttctagcattcgagtaaatacagtcgaaagacaaaattgccttcgtgtttttattccatcttgtacagggtggttccctaagcaagcatcaacaactcagttgatctaactactggaaacggtttacaagttacaactgacctgccaacattctgcttcatgatgccgtttcctgggtaagatccacgtaccatgatttccatgcttccacataatgaccaaaaagatcattcagggcttgattctgatattggggacggaaggacacagcagggttttcccagtcctgaatgttcttcctctcctgctgcttaacagattgatcatcagtttcgggtttctttg

SEQ ID NO: 366443 - DNA, 364 bp, Zea mays
cgctgtgtccaccagctttgaccgccgcctcccttcccctccgctactgctcctccccaccccactcccccgcaggagcggcggcggcggcggcgaggtcgtaccccacatcggcgagcggcggcggcaccgccggaggcaaaggcaagatgttcgggcgcgcgccgaagaagagcgacaacaccaagtactacgagatcctcggggtgcccaagtcggcgtcccaggacgatctcaagaaggcctaccgcaaggctgctatcaagaaccaccccgacaagggcggtgaccccgagaagttcaaggagctcgcacaagcctatgaaggtttgagtgatccagagaaacgtgagatttatgatca

SEQ ID NO: 366444 - DNA, 290 bp, Zea mays
cccaggtgtatcgcaaagatataagagctggacactgagctgtgcactgcgaactggaaaactaagggatactctaatggatactccactgcagcgaccggtataccgagcgctctccgatggactaggcggagctggaggccgtggaggcactgcggtggtcatggcactctaggccggcgactacgtccgtcgtcgtgtccatcttcgtgctctgctcggcgctgtggtagccgatggagcaggacatggtgccggtgctactccaggtgctgctctactggccgttc

SEQ ID NO: 366445 - DNA, 79 bp, Zea mays
gcgtttagttgtcgcgccagagggggccgcacgtatggtcgcggtgccggagagggaaagaaccgcccttagcctattt

SEQ ID NO: 366446 - DNA, 286 bp, Zea mays
tccactcatcgagccatcgtccatcataatggccatacaggtgactttcttgaagtgtggaggtgtggtgttaggaacagctatccaccacgccgccacagacgtttcaagcgccttccactatctttagacatgttcagacttcttcaagcatgacaacagcgtctgccgtgcacctcccgactagcacacctctctacataccacgcacgcgtccggaaaccatgaacacccacacgcaccttcgacattgcagcctggacaggtgctcacagaacaccatgag

SEQ ID NO: 366447 - DNA, 251 bp, Zea mays
tttcattgtccggccatatgcgtcagcatggtacaagcctacatggagaaagtttatccaaaaaacaagttgaactgctgcagcatgagccagaagacggttgtgaactaccatctaaggtacccttccagagtctcccatgctatacagtgagttgtgactgcgacagcacaatcagctgggtctgaaaccttttacagacagcttggcctacctaatctgaatgcttgaaaacattttaactggagctc

SEQ ID NO: 366448 - DNA, 174 bp, Zea mays
gtggaattgagactggcataggagaactcaatatatgcttgtgaataacgcatccagtgaaagatagtagattttcatcaattcactacccaggatgttgtcgcattggatgagaatgacatggaagacggcgaactagaggaagacaacaacctcatctaagctgaaaatgtg

SEQ ID NO: 366449 - DNA, 151 bp, Zea mays
atctctccttccatcctcggccaaaaattctgcggcgagctccgatccggtgcgactactaacccacgccgcagaagccgcgcgtcctgatcgcgcgggggtcgaggagaggggaagcgcgttgtccaaagaatttttctataattttttt

SEQ ID NO: 366450 - DNA, 56 bp, Zea mays
cccactcgtccggagaggagagagtctgcaggatccagcagtcttttgtaaggagt

SEQ ID NO: 366451 - DNA, 75 bp, Zea mays
tttcaatagataaaaggcctgtttttgtatgcgacacagcaaaatttctaatgcttatatgctggcattttttta

SEQ ID NO: 366452 - DNA, 92 bp, Zea mays
gtggagtactcctggaaagaaaactatgaccaaggggggagcagactgtttgcagctgtttatcgcttttagcggacgagagctaagttatt

SEQ ID NO: 366453 - DNA, 149 bp, Zea mays
ctagtggctcttgctactcccctccacttactggcggactatagtgctttccggcctcggattctttgagagcccaccattgcatctagctgcggcttctctccttcgctctgcatactgagtcgagcactcaagctggagcatcaatc

SEQ ID NO: 366454 - DNA, 104 bp, Zea mays
gcggtgcataactagccccgcgaattccccaattttcgccggtccaatttgatcatccgttcgcgcgcccctcgccgaccgtgagaataaattaatattatgta

SEQ ID NO: 366455 - DNA, 77 bp, Zea mays
gggataactctgcagacgcgaccgcaaactctaggggggcatttttaaaggatggtcggacagcaaatgggcatcca

SEQ ID NO: 366456 - DNA, 139 bp, Zea mays
tgtcgatccaattgtcacttgctctccctccaacaagctaattaaggccggtcatccctcttctagctcgtttcattatccatggcggaggagaagcaccaccaccaccacctgttccaccacaagaaggacgaggagc

SEQ ID NO: 366457 - DNA, 324 bp, Zea mays
ttctcttccttctccggttcgggttcgggttcgtgaggttctccggggttcgggttcgtgggtgagcggatcgagatggcggcgtcggatgttgagtaccgctgcttcgtcggcggcctcgcctgggccacggacgaccactccctccacaacgccttcagcacctacggcgaggtcctcgagtccaagatcatcctcgatcgggagacgcagaggtcccgcggcttcggcttcgtcaccttctccacggaggaggcgatgcggaacgccatcgagggcatgaacggcaaggagctggacggtcgcaacatcaccgtcaacgag

SEQ ID NO: 366458 - DNA, 243 bp, Zea mays
gctacttttgcggccacgcaggcggtcaccactgatgagacgcgcagggaggctgggcgacaggatcggtccttaggggactgactcactgaccgcctgcatggcgcgcctgcgcaagatacacaagtgcaggcgcattgccgtcggcaccgacggcttcctgctcaccctcctctcagtggacgttgcgcgggaccactgtccaggcgtgggccggagcagataggcggagctgccggcgcc

SEQ ID NO: 366459 - DNA, 169 bp, Zea mays
cccacgcgtccgtgccaagtggtgatacgggggggtttggaatgtcgcaccagcaggctctggctcaagttacagcccaagcaacccattctccactcagaatgtttgatcaccttgaacagccatctttctccacagctgcaacaacttctggagctctacaccatat

SEQ ID NO: 366460 - DNA, 164 bp, Zea mays
cggtactgtgggcggtcggtttctcaggattcatgagcttcttgtcgctagccttgtggtctgtattagcataaagtttaggatgctgcagtggacattgcctgtcttattccacaagatgatttgcacctactacacaatcaacatttgcctttgctgtgtat

SEQ ID NO: 366461 - DNA, 276 bp, Zea mays
aaatcttaatcccttgggagattacccacttagcttgacaatgtacaacaacgatagtacttagtactcccgcaactcataccacaaccccatgtgatactatcgcaattactactaataatgctggtgaaatcttagggctactaaatgactttcaagaaccagaaaaagctgaccccttaaactgaagtctcacataaccattaactacaaaagtagacaaaccatgctccctttattgtttcaacttaatctgcccttccctggtcgggacca

SEQ ID NO: 366462 - DNA, 277 bp, Zea mays
atcctctcaacagcaactgataacataaccaagtagcaccaatacataaattaagaatccaaaattacatgttcagaatggttagaggcagaacacaaaaagatatatttccttatatatacatcaacacatgcaaacaacacgaagctcctaggaacgtgatataagaaaaaaactgaaaactcttagcggtgttgggagcacgctctcctccacttccttcccaatctccctcgccccggccaaacactgagtttcagatagctgcaaggggttt

SEQ ID NO: 366463 - DNA, 246 bp, Zea mays
cttataactaggttgacttatccaaaatgtatgaacggagctcagaactttttgctgaaacagatgaaactgagagagaaaaaaaaccgtacacaatggaagagaacactaggagagttctttaattaaacgggaagactagtatattggaggtggacttgtacagtacaaggtataaagaatgttaataagcagggccatgcctttaaacacatgttcccagtctaggtacaaaattaaacacac

SEQ ID NO: 366464 - DNA, 232 bp, Zea mays
ggaaaaaaaactggaggacccctgtttatccataaacggggaaagatacctgggggggggcagcccttgggagttttaagttacaggtttccttgccttaaaaacataaacatccgggaatgggtacaacttactactaccctggttccccatccccggaaaggggaaataataataggggggggcaaaatagagaacccttcccttggtgggcctaaccaaaagggggggg

SEQ ID NO: 366465 - DNA, 385 bp, Zea mays
tttatattttttttttttttttttttttttggttaaaggatcagagttttatatatatgcatttcatttctttccatttacacaattcactaggggagcgggatttagcaacaactgaattgtcaacctaatgtacaattacatggcattcatactaaacaaaaacacgaatggcttccatacccaggggtagaactatactgagtatacatggggttatgcagctacttaaagagcatagacatcatgacaacaaaaggaagcctttatagcactaaaagttcacctatacattggggcattcctatatcggaagcatcaccgatcattagtttgcagacacacagccgagacccttcccaagacccagctacagcagcttgac

SEQ ID NO: 366466 - DNA, 331 bp, Zea mays
tttataatttttttttttttttgccaacgatatttcgttttattgctcctgggaaagactgcaggtgtctacaaagaggatcttggagttcaaacagagtacaaagctcatcatcacatacccagaacacacaatctgataatataatcctcatatacgataaaggctacttttcgcctacagatcactctaatgacagctcaaattcaatgcacacactgctttacatgaactatgaaattgccatgcatactagtgacttattagtgccagttgtcttgccaatgcgctacgccgcgataaaacaccgttggcatcccttaaactcctt

SEQ ID NO: 366467 - DNA, 251 bp, Zea mays
aataaatttttttttttttttttttttttgggtttttttttttatttttgggacgcccggacacaacacaccattgcctgcctcacaaaaacatggacacccaagacaggatttatgacaacctggaccaccgccacgaactagcaagatttttatttattacacctgccttctaatttgcccaggggaaagatttaggggggccgacccgttcctttcccacgacatttttttgtttaccggttcctcaa

SEQ ID NO: 366468 - DNA, 278 bp, Zea mays
tatatatttttttttttttttttttttttgggtggttttttttttctatgctcggtaagcgccaatatgcaatttatagccccaactcagctttctcgggttttttttttttttggagaacattataatcgccgttttatagctgatatgacagaccttacatggccagcatgatcaggaagaaacaacacagatacccgcatatgggacatggccttgggactaaaaacgggaacaataagttttatgcagaaaagggctgtcataaacagattgaa

SEQ ID NO: 366469 - DNA, 126 bp, Zea mays
ggccctactaaccatcttcaatacattgggtcagatttaacaaggaaatataacgggtgcatgtcaaccgagggccaccgagctgaaggcagaggcccaaaagcaaagcaggcgcccacccaaaag

SEQ ID NO: 366470 - DNA, 137 bp, Zea mays
tttatatatattttttttttttgggtccagcagcgaaaaatgaacatccagtggtgggtactacatttattgggaactcaagtggctctctcaggacccaaaaatatcagaacagtgttgtggtaatgaggtcgttt

SEQ ID NO: 366471 - DNA, 527 bp, Zea mays
tgacccgcgagattggaatcgcggagccccgccgccctcctccaaaacggcatcgtctctgctcggggtcacctttcctccctctcacttcctcttcttcatttaggtgtgttagttaagcagaggaggtggctttgcttgttgctcgtgtttctgcgtggatgcgtccaggggtttagcaagtcgctggccatgacggtgctcttcgagatcagggacaagaccttcttcgccgtcgcgattctggctatgcgccatcctaggaaactcgtattggcaggctgtttaactgcactaagaaggctgtttaactacactaagagtcatgacagctctatcgacttatctaggttgggttgcaccaaatctgagctgtcatgacaaaaatcatgatgcaatacaagcagaatatgcttcctgaaagacaaagtaatcacaaagttgagggcagataaaatggttgagcaaaccaatcaatctgagttagctttgtgaggctgagcatctgaatgggagtaaaatcggca

SEQ ID NO: 366472 - DNA, 239 bp, Zea mays
  unsure (1)..(239): unsure at all n locations
atcncttgggggctacaagggaggcattgggctgtgccaaacccattaaagtggtgatccattacacgcggacgcagccaaacacgaagcacggggatccgttaaccatgggaatggattacagggcaaaaatacccaaccaaacaggacctaaatacacacaggttcacgctccttgctgaaagaaactccaaaactggctggcaaaacatacgagggacaccagaggaatagataaa

SEQ ID NO: 366473 - DNA, 257 bp, Zea mays
aaaaaaaaccaacccccttacggaagggaaaaacccacaaaaggggaagggtacaaaaaaaatggattaaccacggttggaaaaaaaggccggggggcaagggggggattggatttatttgacaaaaaatggcgggggaaactggggccctggccaaaaaaaggggctaaaaagggggtccccaaacccacaagggggcggggcaataaacgcttttccctggggaaacccaaaagggcaagggtgagggccaaaaa

SEQ ID NO: 366474 - DNA, 445 bp, Zea mays
gcctggtccacagagccagccgaactgcccgtccgcctcccgcgacggccgccacacgccgggtgccagtggtcacgctcacgccgactcccagctccagggcgccctcaaaccagcgctggctgccatgctgccgctcgcacactccgccggctgcagccatctccacctccctcccgctccgagtcgagcttaccttcccaatcgccgccgcgtccgatccctcgtccgagcgcgccctcccagcgcgggggcgtccggaactgaaaccacctctaccactagcggcagcgttatgtcgttcctgtgcccgctcctcaaactcctcgggggagggcgatccttcgcagcaacggaacgacgttgtggaggtcacgacatcttcaatttcaagtttatccagactgccatggggatcaaaagtggctactagcagcggggagaa

SEQ ID NO: 366475 - DNA, 279 bp, Zea mays
aaagagccaaacaaactttccttggcctccattttcacaatcgcacgggaattgtttttgcaaaacccccaaaatttcaacagactttgcagtatgcaattgtcctttgttctaccgccatcagtcaacatttttgatcccccccaccagggagcaggaagcccggaaccaaaaatcatgggccagggtgcaagaaaaactgtaagaaaatgggtatggcaggggggggtttgacttaaaagcccacggggcacttattggggggggcaagggaaattc

SEQ ID NO: 366476 - DNA, 234 bp, Zea mays
accttttgttcggatcatgactgtctcggacctaccggggccatcgcgtgcgctctgtgtccggtggctccattctcggtcctctgttccttgtatcacataccttggacggagactagcgtttatcatattatattcctggatgtgcatgagaatgagaaaatgccgtgggaaggaaccacctcgctaggggccgattggtatggaatcttgctggcaataattgtctatgaa

SEQ ID NO: 366477 - DNA, 171 bp, Zea mays
gccttgcgtacggagctagctgtagtgcctgttcgcatagcgctagagccctaacacgctgggagccataggcgacggtgaagcttacttctagctctaggtcgacgtcagacctgggctgggtgttatggaggccttcggacactccggcggatataatgatctacgact

SEQ ID NO: 366478 - DNA, 69 bp, Zea mays
cccatgctttcgttacctaaagccatcgccgaccatccctctatctacactagtgacgctcaacgtcag

SEQ ID NO: 366479 - DNA, 316 bp, Zea mays
ggaacatagggactgattcataatttcacgtgtacatctatatttacaaggattcagtcaaggttctgatgaaaagcagtaggtcaaatcgatagacgacagattttgagaaatcatcggctaatctgacggatggatggcattccaattgccaactctaaaggctaaaccaacaagtctctcctacccgctacggcgtcgcatcccacggcgcagtgacgaacggattcaagtaaccttcgaaattcctcggcctggcgccggcggcggcgttgtcgtcgtcgtcgaacaccacccactccgttgtgaccactgt

SEQ ID NO: 366480 - DNA, 169 bp, Zea mays
ctcatgcgttcgccaactcgaggagtcgccgatcatctttatatctagcattagtatcgacaacgacaccagtgatgaggcgacgggctagtcaaggactctacccccgccacagctgccgatgtcgtgtgtgaatgtgctagtgccgtggacagttacgccatcgctc

SEQ ID NO: 366481 - DNA, 500 bp, Zea mays
ccgatctctctgatttatgacaggagccttttcccctgaaattacatgacatgtagaaacaggttgtagcgggtatttggttgtctatatattgtaaaacatttgattttgtctcttgcaccatttttatgggtgacataccattttcactaatgcatgatgtcttcgttttagtattttttttgtttaacttaacacgcattgtcaaatgttcagcacgaagaaaggggaaaaagaagaaggatcatttgaaggattcagctcgggatatggcattttcgtcgtcttgtttattgcctcaatgctatcttttgctatcagagggactctcgatgatgctagctgtcctcagaaacgaaagtaggtcattccaattaccaagtatcttcaacactgaacaagagagattcatgcagcactttgatcttcttctgaaagctcgagtccctgagcacatttccttctacagtttcaaggaatcatcttcctcggcaggcatg

SEQ ID NO: 366482 - DNA, 287 bp, Zea mays
cctattctttcgacaactcgagcgagccgtaaaccgtgcagacatctataccaatatctatcacatcacaagaattagagcacggactcagcaagtggggcgggccctcttacagctctcactatcgcgtgcgcgtgctccgtggctcttgcttttttgtgaaaagtctttgagctcaatttgttggtaggcggtcacagacattgtgctttagttggaactctgcatgtgaaacctgaatggcgagaataaccatattgttcatcgaaacattggttggtaagctt

SEQ ID NO: 366483 - DNA, 91 bp, Zea mays
ctcatgctttcgttacctctagcagccgtcgatcatgcttacatctacactagtatggataacgtcacaagcgcatggcgcgacgggctag

SEQ ID NO: 366484 - DNA, 172 bp, Zea mays
ctcattcgttcggcacctcgaggagccgtcgagcatccttacatctacatcaggatcgataacgtcaccatcaatgaggcgcgggcttagtcactggctctatcccgacgcacagctgccgcgctcgaggagcgaatgtgctagtgctgggaacagttacgcggttgctcga

SEQ ID NO: 366485 - DNA, 261 bp, Zea mays
ttcatacattgggtaagtataggtgtgatggagaacctttacatcatcattagaatcgatcaaggacagcatctatgaggcgtgggcttaactaactgactttattccgacacacatctcccgctatcgtgtatctatgcgcccgtactatgagcaggaacgcggtagctggagccttgactttttgaatatcctctaaacagcctcggaggaacgcaccaagggaaatctaggtcgagcgacggtgatgatggatcacgg

SEQ ID NO: 366486 - DNA, 69 bp, Zea mays
ctcattctttcgttagctagaggagccatcgatcatgctttcatctccatcagtatggatcacgtcacc

SEQ ID NO: 366487 - DNA, 173 bp, Zea mays
ctcatacgttcggcacctagaggagccgtcgagcacctttacatctacaccaggatcgataacgtcaccagcaagaggcgacgggccagccactgcgtctatgccgacgcacagcgcgcgcgatcgtgtaccaatgcgctagtgcagggaacagttacgcggtcgctcgagcc

SEQ ID NO: 366488 - DNA, 363 bp, Zea mays
gaatgaaaaccatacttgtttattccatttccttctaactcggaacagagattacaagctaaacagacatggtgaaagaatgacaagtgtacataaagaataaagaattacaactactaacaattgaatcttttatcctatcacctataaaaacaaagctacaaacaaatctttcttactcctttgcttctttttttttgttcttctgattgtataaaagaattgtcagactgtataatgaactaagttttcagtaacagcaaaagaaccactgaaaaaccatgttcttttcttcttcacttcaccttgggtcttccccccattcagctatgctgagaatgggatgcctgtggtggagacaga

SEQ ID NO: 366489 - DNA, 377 bp, Zea mays
ttcttatttttgttttgtacatcgatccgtgcgttcgttcatttgtacacagcagtggctcacctcacacgatacagggaaagaaagatcctctggccgtatccagatagcacggacagaggtagtgaggagaggggaagtggcagtgaggagtgaatcggtagataggaggaagacgaacaggacgacgaatactaagccacagaggaggtcatgagggcaaagcagaggagagtaagtctcttcttgccacaccgattccggacgcgtctccgggatgttggctgggtgctccttctcgtgggcgaggcatcagatgagcaccgcgcagtgatgcgagatcctcccatacggcttctccaagcgggcgagcaacc

SEQ ID NO: 366490 - DNA, 467 bp, Zea mays
tccacgcgtccgaatagcgttgtcccttgccctcgcgcgccccgtgctcttcgtcgtcttcgccagcccaggtggcaggaagctacccatagccagcctcgtcttctcggccaaatccttcttcggtgcaccgctggccgccacctcggcctccgtcgctttgtcgctcctgtgccagtggctgcctccagctcgctcgaggtcgtcgctacggggaagaaggggcctttccgaccaaatccttctttggcgcgccactggccgccaccgcggcctccgtcgcgttgccactcccgcgacaaccggccgcctccaactcgcttgaggtcatcgcagcggggaagaaggggctttcccagccagatccttctttgacgtgccgctggccaccaccgcgccctccatcgcatcgccactcccgctagctcgagggtcgtcacaatggggaagaagggctgcaagatgaa

SEQ ID NO: 366491 - DNA, 412 bp, Zea mays
ccacccaaatgtataattagatgttgtcagatcaccaaaaatcacaaccggaagaaaacagcacgtttggttaaagacaacaatggaacaaagaatatatccttcacgccaactgagcgcatggttggtatgtacattgcaacatcgtactcctgttttacccaggttcagcgtcaggccatgtaccaagactccaaaagagtccatgtcttcgctatatctgcttgtcaaagccattctcctcgaccccactgatcataaaaggcttgtttagcgaggaagaaagaaagattcatagtgaagaaaaaacaaaagtagttaccacaatcacaggtaaactcactgggtctcagagcatcccgcatctccagttagttgttccgcaccactggcatcctttacctgagcaaat

SEQ ID NO: 366492 - DNA, 496 bp, Zea mays
cccatgcgttcgcccacgcgtgcggccatgtcgcgtctcctcctccgccaccgtatctttctcctcccaggggcgcggagcgacgccagccaccccttcacggccgcctactgctcctcccgctcctcatacacttcccggttctcccgtctcgcctaccacgcctccgccgcggacacggccgcaggcgcccaatcagagggtgcggcggccgagtacacactcgcagcggacgaccagtcctcatcgacacctcccctcgcggcacgcggacggtggggcttgctcaagttcggtgccttggcagcagtcgccggggccatctgcggcgtccggatactgcacctacgcctattcgctgaatgaagtggaggagaagacgagagagttcaggaagaacccaaggctgcttatacctgaggatgccttcacgttcgagaagtatagagctatggtgtactcgacggctatcaaaggtgcaaactaaatgggctcc

SEQ ID NO: 366493 - DNA, 355 bp, Zea mays
aacaggggtcaaagctagaccttagacttgtgctttggtacaaggcagacctcccgatcagagtcaaactcaagacttaagtattactcaagccacctaaccaactcagatagagattattttacaattagccaaatcaaacaagcaaaacaaagaataacaagtaagaacacaagcaagcaaataactgcaaacatccatgaggactgaaatccagctattagtatgattgttttattttctacataaagcatcaagacttggaattgcacgaaacagaatgtcttggaaaggttgatgcttctatctccttttatgtccaatcactatttcatgccattccttccctttttat

SEQ ID NO: 366494 - DNA, 368 bp, Zea mays
  unsure (1)..(368): unsure at all n locations
ttttttttttttttttttttttttttttttttggncaccgaaaagacgaccagttcattccagtttccatcattacatgtttacaacatccagatttcatctaggtagcctgccacactaaggacacaatgggaaatgtctaatgctgtaatgcattccacgaaaaatgatgggttagctatgatctttattacggttggcaaacttacagcagattcaaccttaatgtcttgatgggggcctcctaagcgaaatgaaaatttgcagtaccatcaatacaggaaatggtaagtcagtcggcaatcaccataggcatcgtacaaggcctttcccataggctgctaacagaagagcctttgtttaccccc

SEQ ID NO: 366495 - DNA, 525 bp, Zea mays
gggacccgtccgaggccgagatcgtcgaggtcgccgccgagggctcctccggcgccgcggaccggggcaggctgcgcaagacgctcatgctgctcttccagctcgacgactcgaccggcggaggcgccgcgcgtccgtccgaggggggcacccagtcggcggagtctcagtccgtttccgcaggaggaggtcctggtcgaggtggcaagcgcagggggcccgggtcgtggctccagtcgattcgtcgtctgccgaggggagcgctgcggtgggggaggaacgcggcggcctctgccagggagccctcgatcccgccgcgcggggtggcggtggatctctcgccccacggttccggcggcgcgcatgcggagcggaagcccagcttccgccgctcgtgcgagtggacggcgtcccggggcccgagcagaggctccctgcccttgcagccgccccgccattcgtgggacgggtccatggtgggcagggccgtcgcgtgctccttcgcctgcttagaggagcgggagc

SEQ ID NO: 366496 - DNA, 439 bp, Zea mays
  unsure (1)..(439): unsure at all n locations
cggacgcgtgggatttggctctggccctcctggtgaccgcccaaggggcccaggtcgttttgacggcgacaggccaaggtttggtgacagggatgggtaccgtggtggtcctcgtggtgctcctggtgactttggtggcgataagagtggagctcctgctgagttccagccatcattcaggaggcctggctttgggcgtggtggcggcagcggcttcggcgcaggcccaacctcttcttccatggagtgaagttgcccttggtttggacatggtgtttcccttcgcatgtggcctttagttttgaaggacagttattatgtactagtaatattactcggatcggccagtgctgacatatgcnnannaaaaaaaaaaaaaaataaatattaaatgaaatanaaattacatttataataatttttaaaaacaaaattaaaa

SEQ ID NO: 366497 - DNA, 302 bp, Zea mays
cgtttttgtaaggtaacaggcttgtgtaattatacatatgggggtgctgcaagaacatcattggttgcaacaattggtccatattcagaatagaggctagagattacatatacaatgatgtttggacagtcggagactttagttgatcacatgatagaggtgatggattacttcgattacacgaactaaggtagcatacttgttcttgaatatggtaaatttctagcatgaaatgaggagatgaggaatgattttgatgaggaacatcatagaatcagaggtggaattctattccgcattgt

SEQ ID NO: 366498 - DNA, 435 bp, Zea mays
  unsure (1)..(435): unsure at all n locations
gcacgaaaattgagatcatcgatataaataggggggcgaagctatattcagtttaggatgtgtagatgtaccctaagaaatatgcacctcctccattacatgacgtctatacatccccaccctaacgtcccaccctcattagggctgatttagtttggacagaaaaatagagaagatccataggagaggaatccccttcattttcctgtccatcaaactaactcttaagttcgccactacagagtacagtctagagacataattacaacactcagcacggaaacttctgattaaccttgccacccagaacaggtccataggcacacctatatcatccgatccttttgtagagngggagtcagaacggttcgcgtcagttccttccaaccttcgcaaatccaggaccactagtgcatgcaccgacagcgcacgaca

SEQ ID NO: 366499 - DNA, 283 bp, Zea mays
caaccggaactatttttatttcacgggcaaaaacaaagcttaaaaacgaaccccaataaaaagaaaaccgcgggaaattttgtccccagcccggcgctgacaccttgggcggggggatgggtccaccattgacgcggtaccataccgccgacaaaaacccccccagagggagcccaagttgggcgggcgcggacaccccgggcgtggccaccgcggggttgggggacttggaccgcaccttggacaaggacccccccgcgccggtgtcccccccccggggcgg

SEQ ID NO: 366500 - DNA, 116 bp, Zea mays
ttatgcgtggggagcgaacagagcaagcagagcgggtgagcatgtcggacaaactctgacggacgcctccacaatgtcgggccatctatcgctgttacagcccatgcttatgctgg

SEQ ID NO: 366501 - DNA, 465 bp, Zea mays
gttttagcgcctttcggtgcggaagcattttgctgatcctctctttgatgcatgttattgattttggttgcatcaatgctggtacatgtggacctggccaacacatagtcacatttttccctctctgagcagaacacatgggaccagcgccactgaggcacactggccaaacaaggtgatctcattctgttcagttcaattctcactcttcgctgtccttcagatatatctactgtgaaaccatgaacttgctgaatggctgatcaagcttggttagcattgaactattgaaggataaattctattacacagattgtggattggttatgttcacattgtagacaaaagaagtattggctaatgaaggcctataagaattaagaacatacctttaaagcagcatcttgaccattcaaacaagagaagttatgtacacaatggccattttatttttttgttaggttc

SEQ ID NO: 366502 - DNA, 292 bp, Zea mays
gggccggttcagacaactaaatgcatgcttccctctcaaagttatagcatgtcaagtagagcttgactgttacttcagtgcaacacgacaacaatgccattgcttatgcgttacagatttgcccttctatctaatcaaccaaatacattttgcatcgtaataatcagactaaatttagcaagcgagctatctccgcttggtgaccgggcttactttgcaaacttacttccacgtcaaatccaaaatccatgcacgctgttgctctgacagctggtccctgggtcctttgacc

SEQ ID NO: 366503 - DNA, 467 bp, Zea mays
tccatgcgtccgctcacgcgttcgcccacgcgtacggtgtatatatatactggatcaatggatatcacaggatgtaatgtataaatggatctctttggcgtaactaccctactagactactaaaagacactgatccatgattatatagtgactgtatttatcgtaacaagatagacgggaaacatcacacccatacgtggaggagaggtgacccacatatacatacgccagtatggcttgaactacaaggcaattgcacatctaagctatatgcctagatacagcctcttaacacccactcgcagacgctgtgcgagaatcacggacgcacagtagactgaatatcgcatgacaaactgaacaagcaagctcttgggcataatgtcagctaactgcagagaggacaacatctggagcaccctaactaggctcaggttgggagcgctgtctgagccaggcaggttttg

SEQ ID NO: 366504 - DNA, 165 bp, Zea mays
cccatgcgttcgaatatggctcgcacgaaccttatgctcgagttccgttacatgcaagggattgtattgaacacgagagtaggtgactccatgttggactagtatgtaaagcgcgctaacaggtatggagggatggactagactctggtgatactactcaacttc

SEQ ID NO: 366505 - DNA, 150 bp, Zea mays
cccatgcgttcgaatatggataccatgaaccagatgctcgagttcgggttctggcatgggatggaagtgcacacgagagtcggtgacgccatggaagacaagcactgaaaggcggccaacaggtactgctggatgccgtaggccctggtg

SEQ ID NO: 366506 - DNA, 131 bp, Zea mays
cccacgcgttcgactatgtacatcaggtaccagatgctcacgtcctgactccattttgcgtgacatctgcacactacgatcaaagagacatgcgaagacaagtgctgcaaggcgagctacgactactgctg

SEQ ID NO: 366507 - DNA, 128 bp, Zea mays
ttcattcgtccgactatgtacattatgtaccagaggcgcacagcatgagtacattaagcgtgacatctacacaataccattaaatgcacatgggaatacaattgctgcaaggcgagttactactgctg

SEQ ID NO: 366508 - DNA, 369 bp, Zea mays
ttcacgcgtccgggtatgtacacggggtatcaggggctgacagcatcaggacattacgcataacatcgaaacggcaccattagaggcacatggaaatgttattgctgcgaggaaagaaaatacagctgctgcaaccatctagaagaggatagtaaaaacatggaggaagaggggacaaaggttaacaatagattcgtgacgaggatggcgcttagaaagcaagctcacatttctaacacgctccttgggtaatagtgcggtaacgaaacttttacttgaacgaagcttatgcaagttaggggttacttttaaagctttaataggtttaacctacttggaatgcttaattcggttgaccatagcgggagt

SEQ ID NO: 366509 - DNA, 335 bp, Zea mays
ttttgttttttttttttttttttttttttttggggtttttttatccagcagggggttcctgcatcgggttctactagtaacaccctactagtatgaaattttcaatccatgggccccgtttccgggacactgcgggcagttttaaccatccatgtcctgggggccccaaaaaagaaattacatgtcctgatcagtaggcgcaggaagacaaacgctcagggcagcagcagatctcattatccaaaaaatgactacgtgtcacacaaagcatctcacattttgcaaatgggaccttgctgaccaagcctttcgcggaagggtaacagctgggaaat

SEQ ID NO: 366510 - DNA, 120 bp, Zea mays
cccacgcgtgcggctacgtatacgtagaaacaggggctggcagcatattgatattaagcgaatgctagaaggggcaggtttagtggacgaatcaaaggtcaaccctgggaggcaagaaaa

SEQ ID NO: 366511 - DNA, 181 bp, Zea mays
tccatgcgtacggctacgcatctggtgacacgggggctgtcaggctattgatattaaggaaatgctagcttgtgcagcattaatggatgaggaaacgctgaacactgggcggtaagaaaatacagcagcatgggctgtcttatgttggtattggacactcagaagggaagggctacaagga

SEQ ID NO: 366512 - DNA, 168 bp, Zea mays
tccatgcgtacggcaacgcatccagtgaaacgagggctctgaggctatcgatattatggaaatgctagcttgcgcagatttagcggattaggcaaggctgaacactgagtgctaagaaaatacagcaggatgggctgtcttatgaaggaattggacttaagaagggag

SEQ ID NO: 366513 - DNA, 61 bp, Zea mays
  unsure (1)..(61): unsure at all n locations
ccctttctttcgcctctgtacaacgggtaccagatgctcgcgntctttttacttttttttt

SEQ ID NO: 366514 - DNA, 302 bp, Zea mays
cagaggtggtggcacactcaccgctgttgaaaggcctgcatgcggtgtatgaaatcgtgaaccttacaccatcatcaacttttactagcgcccacgcctcctattggacattaaccacatacctgtttcaaggaagggtttatccaaactacactactatctcgagcttaccatggttgactggcatgcatgacatgtaggacattattggggaggaggagctcgaggacacgaattccccaaacgcgaaggatgcatgcgagggcgagggggtggaggaggagggcgaagggcgggccggt

SEQ ID NO: 366515 - DNA, 148 bp, Zea mays
cccacgcgtccgaatatggatctcacgaagctgatgctctagttctggttcttgctggcgatggaattgctcactagagttgattactccatgctggacacgcatttgaaggttgccaacaggtacgtagagatcctgtagaccctgc

SEQ ID NO: 366516 - DNA, 392 bp, Zea mays
cccacgcgtccgactctgattaccatgtaccagatgctcgcgttctggttccgccatgcgttccaattgctcactcgcctcgatgacccaatggaagacaagtactggaaggcggccaacaggtactgctggatcctggagcgcgtggggaaactgctcgcgcacgaattggacctctatctgctgatggacgcccgacacgtttctaccgatcatgagccatttcgcgcatgcgagcggagaccggacctgcgtgcgagggcatatgtgccccgtgcacggggcgactgcccgtcagtagcgtcactagggccctgaagatgcgactaccgtgagtgatttgggtaaaaacggaccctagatgcggaccatggctgcaggaagcgaagatg

SEQ ID NO: 366517 - DNA, 186 bp, Zea mays
gttgggcaaaccctctacaggacatgtcaccaagcaagcattagcctaacaaaaaccggttactggctaaccatgcaattttttacatggaaaaacaaccttggttacaaacacacatttaaatggaccatttatatatatataacccacaagggtaaaaaaaggactagtaaaaggaagggtaaa

SEQ ID NO: 366518 - DNA, 394 bp, Zea mays
cccacgcgttcgactctgttcaccatgtaccagatgctcgcgtcctggctccgcttcgcgtgacatctgctcacccccctcaactagccaatggaagacaagtgctgggaggcgagtgacgattactgctgcatcctgcagcagcgtgtggaagctagctcgcggacgtggtggacctacactctgctgatggacccggacgagttatctacgcttcaggagccagctcgccttacgagcgccgccggggtcagagtgcgcgtacgtatgttttctgtccacggtgcttctgcacgtcgctcgcgactctagggacctgaagaggcttaagccatgcggactgggtatcgaggtgaaccctagcggaagtccatggatgcaggacgcgggcatt

SEQ ID NO: 366519 - DNA, 369 bp, Zea mays
ttcattcgtccgcctacgtacacggggtatcagaggcgaacagcatcaggacattaagcatgacatctgcaagacaccattagaggcacatggaaatattattgctgcgaggaaagttactacagctgcagcaaccatctgcagatgatataacaaatatggaagaaggctcgacaaaggtgaacaatatattcgtaagagatatggcgcttagaaagtacagctcacctttctagcccctgcgcggggcaattttgcgggaacgtaactttgactttaacattctttatgcatgttaggcgttactttatatatttgaataggtctaacctacttggaaagctcagtcgggtgaacaatggcgggagt

SEQ ID NO: 366520 - DNA, 163 bp, Zea mays
tccactcgtccgcctacgtacacgaggtatcagaggctgtcagcctaatgatattaagcatatgatatctacagcaccattaacggctgatggaactgcgatcgctgcgagtaaagataatacagctgcagcaatcatatgatgttgatattagaaatctgaa

SEQ ID NO: 366521 - DNA, 161 bp, Zea mays
gatgtgtttgtacccacaccacggttgagaggcctacaatcagtctatgaaatcgcggagtgtacctctctccatcatacttctatgatcggccaggcgtcctattagcaataaccagatcactgtttctaggtaaggggttagccagactacctactatc

SEQ ID NO: 366522 - DNA, 154 bp, Zea mays
ctgacgcgtgcggagatggagcccaaggacaatatgcttcagtcaccactgctcatggtgatggctaagcttagtgaattggatgagctgctccaagacaagttatgggaggctgggaacgttgactatatgaaccggagccgaccgcggaaga

SEQ ID NO: 366523 - DNA, 209 bp, Zea mays
ttcatgcgtgcgactatgttcaatatgtaccagatgctctcgtcctggctccgtgtagcgtaagatgtgcacaacccaatcgacgagcgaatgaaagacaagtgctgggaggcggctggctgtgactgctggatccaggagcgcgtggaataactgatcggggacaggtagtggacctaacactagctgaaagacccggaccagttgct

SEQ ID NO: 366524 - DNA, 138 bp, Zea mays
ttcactcgtccggctatgttcatgaagtaccagatgctctcgtcctgactgcatttagcgtaagatgtacacagcaccataaacgagagaatgaaagaccattgctgggaggcgggtggctacaactgttggaaccag

SEQ ID NO: 366525 - DNA, 131 bp, Zea mays
ctcactcgtccgcctacgtatatgatgtaccagatactgtcagcctgatgatattaagcgtaagatatattcagcagctttaacggctgattgaaacactattgctgagagtcgagttagctacagctgct

SEQ ID NO: 366526 - DNA, 332 bp, Zea mays
tgttgtatttttcttttttttttttttttgggggggtataccagcccttggggacgtctagtgtcaaccatattcttatgttgcaacagatgctatttcatacagatatagaaactccaaacgtttaatgattaatcaacccagacgagaacaggaaaaaaatacatgattatcacgtgtaaaatcaaacccagagaatcccattcgcctttgtaatttcttgcatcatcgaccgcttgttaggatagggtgaagtatacaacaaaaagacttcagaagtattagcaccgtcaacgttctgaaatacaacagcaatcgagttaagctgattg

SEQ ID NO: 366527 - DNA, 307 bp, Zea mays
tcgttacgcatggaagcgcatcgagtacgaggcgagcgcgggggcgtccgcgtcgtggtcagactcgtcctccgcggagcagcagcgctcgccggggctccggccctcgcgctccctggaccttgcccccggcgcggacctccgaatcagcggaagcgtggagggggaggtcgacgagctctgtcgcaccctggggctctcggggcccgaggatttcgccgaccccgtcgcggcctgagaggcgcgcaaagtggggtctaacttcgacctactgccgagctcccggcttgacctgttcacacccgcc

SEQ ID NO: 366528 - DNA, 247 bp, Zea mays
tttttataatttttttttttttttttttttttgggtttttttatatagaattgggtttttaatttacctaaaacacaataaccgccccatgtagccagcccgcaaacccacgagtgccatctaatagcaacgcttgacatcccttcatgcagatagctacttgggtagaccaagactgacagagcgccacacggtaaacgtatggacttggcctattcatatgataatttaaccagaaaggggcgaa

SEQ ID NO: 366529 - DNA, 233 bp, Zea mays
gtctttttttcgtcgagtggccgcgctttgattatgttttatctagaagtgaaattgtgtgatgacactgcaacaatattcttttcatatatgctcaggggattttcgagatttaccgctctacatatatgtgtaaaggatttactcgtgacacgttctatttgtaccgtagaatttgaggcgacacactatgtatgatgtgaattaaaatatattgataagggcgatcgatt

SEQ ID NO: 366530 - DNA, 68 bp, Zea mays
tcggcgattttttccgctttgttgaccaaggaccaaagtcttcagtactggattcgcgtaggggtggc

SEQ ID NO: 366531 - DNA, 320 bp, Zea mays
accattcgtgcgtctctgatcaccaagtactagatacgcgagtcctggctccgtttcgcgatgcatgtgctcacctcactggacgagccaatggtagacagttgctggcaggcagcgggcggcgactgttggagcctggatcgcgtgtgctagctgatggctgacgtgatggacctacacctgctgatggactcggacgtgttgctacggttcaagagccagctcggcgtacgagcgtagccggtgtcagattacgcgtgcttatgtgtgccgtccacggcgctcctgcacgtcgctagcggcactagggacctcaagaa

SEQ ID NO: 366532 - DNA, 149 bp, Zea mays
ttcattcgtgcgtacccgatcaagaagtactagatgcgcttatacaggctgtgtttaacgatagatgtgcaatactaaatggaggagacactgaaagactctttcagatagctagcgagctgtgactatttgagccaggatcgcgtgga

SEQ ID NO: 366533 - DNA, 240 bp, Zea mays
cttacgcgtgcggctacgcgtccgacgcagcagctggtgtcagcttcatgtcattaagcgtgtgatatcatttgccaggttagggactcaatatatgagtacccctgatcatggagttgggaccgatgctgccgcgataaagtgttgcagaaaggactgcttgttaagttggaactctgcagaactgttaataagggctgggctagtagagctgccgaacctattccacagggtaccttt

SEQ ID NO: 366534 - DNA, 260 bp, Zea mays
tccacgcgtccggccacgcgtccgacaacgcggggggtgtcaggctattgatatcaaggtagtgctatcatttgccacattaatggctcaggaaacccgcaaccctgatcatgaagatgatacacctcctgcgatggtattatgttgcaaaagggactgtgaggggagtgggaactatgatgagctggtactaccgttcaaggaaggtgagctgctttagatactacacatggtacaacttgatacggatttattggtga

SEQ ID NO: 366535 - DNA, 428 bp, Zea mays
tctacgcgtccgtgctgccgtatccaccaacgggggagctgaagtgcctgagaggggtctggatcaaggaactgtaccaatgctagatcaagaagccggtacctttgtttaagtcggttgtctgactcgcgggctagttgggaaggcaagaaattcgtgagaactgctgcgcatcacgtgtgcgaccgcgcgaattacgggaggcagagaggattgcaggccttctaattgggtgtactgaggaagtccaagactggtcaaagactaagacggaacctgtgccagaatgaggagggctgggtctgacacagctgcaagggggcatgcacatgctgaggctacaactaacggactgcgcgctgacttgctcacactgctctgggagctcgtgcacgcctgactggtggcttccgaactcaaggtgatta

SEQ ID NO: 366536 - DNA, 323 bp, Zea mays
ttccttgcggctggctaagcattacctgccctggccgtcgtcgcctccgatagtttggctgagaggagccagaaccgaggaactgagcgagggctaggtggagaattggttgttctcgtgttatgccgggtcctgcggtgcctactggtagtgaacggtacaaattggtgcgatctgagtcggatcatgcgtgcgaaatgggtaatcgagtgttacacacatagctgctgtggttggaatgtgacgcactaagggagcctaaacggtggaccaagggacagtggacggcgttcgatgttgactgtagctgcagttgtttacac

SEQ ID NO: 366537 - DNA, 221 bp, Zea mays
gcttgtttatcctcatataacggtgctttgattataacttaccgtccagggaatttgtattatgacactgcaacaatcttgtgtccatatatgatcaagggattttcgtgtttcaatgctctccatatatgttcaattgatttccgtgttacaagttctctttgcactgtttaatttgaagcgacacactatatattattttaaaaaaaacaaaaaaacaa

SEQ ID NO: 366538 - DNA, 172 bp, Zea mays
gcgaccattccttcatctctgattggtcagtgccacgttctctcatacacgctgcgattaacaatgtttatgctaacgtcagtgaacctgtgaatgataaactggacgtagaggtcagagagcagcaactgctgaagccggcatagcatgggctaactgttgcctgtcttta

SEQ ID NO: 366539 - DNA, 339 bp, Zea mays
gcgatggtttctgtataccatattgagaattgctaggttcgcttatacacgtggggattcacgatctttgctagatactaaagggaggtgacagggatcgaccgtgtcatacgcttacagagctgctactatttgtgctacgatagtgtggactgcactttgagtgtgtgtatgagagaaaactagagcggaaactggatgtattggctcacgtaattcaaacgaagtccgactggcgctatagcagatgcaagctcacggacgcatagcagtgacgacatggattttctgggcgtcgaggagagcccaatctgttacagcattttttacaccagcaac

SEQ ID NO: 366540 - DNA, 390 bp, Zea mays
ttcacgcgtgcgtacacggatcagaagttgacggttcgctcacacaggccggctttcgagatcgctgctccatacaaaaaggaggagacacgaatcgatcttgtcatgcgcctcgcgagctgtgacgatgtgcgccaggttcctgtagaatgcactagaagtttgggtatcactcgctaacaaggagagacaatgactgttttcgctaacgtcattagttcgaaaccagaatggcgcgataccagaggcaatcctcacggggcagagcgattacgacaaggattatcaaggcgaagaacagtgcccaacttgtgacaggcttctccacaccagcaaacaccacctgccatggctggcgtgcatgacttgcaatcgcaagtttcacggatt

SEQ ID NO: 366541 - DNA, 393 bp, Zea mays
ttcacgcgtgcgcacacgcgtccgaatcataccatgctcttgcattcactcgtgcttccggcaactatgacagcaacggccgagctaggacatatcacagtagagatgccacgctatgacgaccgctttggagacacgcgcttggatgatggaaaatatgacaaatgaacgtagatgttgcgatgtaaaagatcgcattctgaatgtatgtagtaatacaagaagtgccaacgaagcgcgactgttcatatatggaggactgagagcatctgagatgcccataaaggtagaaaccaacgagatggcagggatgtagatggtagtcgcattggtgatgcagttgctagaggggtccaacgtggtccaggaggctcacgtgactatatgtgaaga

SEQ ID NO: 366542 - DNA, 377 bp, Zea mays
  unsure (1)..(377): unsure at all n locations
ttnttaatttttctttttgggataagcagttgattacttgacgtcgatgagggtgcccatgagcaataaaatatgaatgaaggaattttactgaaagaattctcgcctacgaataaagcagcctgaatcacttcatttctggctgcgtcaaacaaataatcagttatgcacgatggtaccatgactaaaatcgacactatgttgttgcctgatgcttgcctgtgagtcctatatcacaatccctatttgtagcatgaagaatgggatcctagtcctgcactcgagctctggaaaattgcagtgctaaatcgctcagcagcctacacagctgtagaaacctcgagttctgcaaccaagcgttgaacagtttagtgtct

SEQ ID NO: 366543 - DNA, 356 bp, Zea mays
tctattcgtgcggatagacttcagattgcaacgggggctgttgttttgtaatcgctaaaaggtcttctccatttgacggtgggtatcactgatgtccatgaacaggtatatgaacgtattaaagcaccctaccttactgtgttgtgtgctagcggacctgaacagacatactctgtgctatgacatctacatcttatggggatgcgtgctgcagtggaatttatctcagactgtacaagcttatactgacaatttagtgatccttgatatgtgcacaagttgaaactagagatgtggactgctatagtacaggaatgcatcacatatgacattgcttgtgaactattttaatatgc

SEQ ID NO: 366544 - DNA, 237 bp, Zea mays
gcttgtttttcctcatctcacggggctacgattatgactaaccgtccagtgattttgttttatgacactggaccaatcttgtgtacatatatgatcaagggatagtcgtgtgtcaatgctctacatatcatgctaacattgattcgccgtgttacaagactatctttgcactgagcaatatgaagcgacacactatatattctgttacagcacacattgtgacgggggcgagtcgct

SEQ ID NO: 366545 - DNA, 153 bp, Zea mays
ccacaaccataaagggggggttttgtaacacgaggggcacaaaagtgcactgtcacaagaacacacacacacacaaaggcagcacgacggccttaattcttcacaccacacgatcaccaccacccaactcaggtctcgcggcactaaacccca

SEQ ID NO: 366546 - DNA, 317 bp, Zea mays
gccttgtttttagttcaagccgggcaggaccatcagaaacctttatcttgatacatgatgagaccaccgctacctcaggactgtggcctactgggactctggaagggacgaccatgacttcacctgggaggcgggtgatccagttgaggcggagaaaaccagtgccgaaggcgggcttctttgcagaaggaagcttttatcaggaacatgtgataaatcatgctcccatatggctactagatgctggacaacaatcgtgagctgagcctggctaagtcccagaggtgcactgccctaataaaggttgctgacgagga

SEQ ID NO: 366547 - DNA, 241 bp, Zea mays
gcgattgtttctaactagcatatcggttaatggagcgttcgttcacagactgggggattaacaatgtttacacgaatgtcagggtagctgccaccgagctattgtacgtacaggacaaatagcactagctaagtatgctcgcatagcatgcactaaatcttgcctgtttttatgtaaattaattaaaaaggatgctttatgtactcggcaagctaccgcaaggtagcccgggccgccaatt

SEQ ID NO: 366548 - DNA, 235 bp, Zea mays
tccatgcgtgcgaatacgcgtccgatgcattccatgttctaggctttccacgtactacgacggctatggagcgtgacgggtatgccaacatacaggagataagtgttagtatgatgatggctatggaagcacgcgcttgactgttaacagagcgtaacatcgaactcattcttgtgaatgagaatatttcagctgtagatatggaagattactgaatgaggtgatgaagctcgac

SEQ ID NO: 366549 - DNA, 212 bp, Zea mays
gccacgcgttcggccacgcgtccggccacgcgtacgaccacgcgtgcgctcctctctttgcccggcacctgtcacggagaggaggatggacaagagcggcggcaaagcggcggcggcggcagcagcagcagacgacgtcgagcggcggcggggcgactactagcaagacgagcacgagcggagagggaccgtgtggaccgcgacggcacaca

SEQ ID NO: 366550 - DNA, 278 bp, Zea mays
  unsure (1)..(278): unsure at all n locations
tttttnttttttttcttttttttttttaaactgggggcttttttagacaggatgggtgcacctgaagcaaaatttcatgggcttattattataaggtccgaacgcaccataatcagagtccttatgaatccaccagtacaaaactgccccacgaagaggaaaaaaacatatctattccgacgcaaactacagtaggtcaaccagtaaataccactggctgagtacttagaacattgttgggggtgattcagggtttattcaccaaagctgggatacta

SEQ ID NO: 366551 - DNA, 395 bp, Zea mays
accattcgtacgcaacagagcgcctgtgaagacactcgatgttagacatgttgacattatcggaccatatgaacatgacgcgtatgcccacggcgcagacgatccatgagttcactgcaatcttacgaccttggtacagggcactcacgcttatgctacagacacaagctcggcccttgtatgcaaggacgcttcctgtacctcaccagatacgttaggcgaagctgttgacgaagctaaaagagccgatattggcggcgtaattgctggctcgaacctgacagactagcgacagtgacttagacagactgagtgttgtcctttcactcaagcagatggacctgatacatgccatagctagacgagctgaataagcctcttgagcaggttctcct

SEQ ID NO: 366552 - DNA, 479 bp, Zea mays
ttcttagaggcccgtgaccagcagcttgacgcctactcgagtatactcaaccgcctatttctactacggcccgcgaccgatagaccgaatttcgtctttgtgcggcgaggcgcagcaatttaagtgtctgaccgttgttactttcatcaacgtgctaacgagagaaatttggcaggctactgttgatgctccagatatagtagaaaaccatgggagaagttagtgatgataattccaacatgtcctttctaaaaagaatcgctacaagtgacgtgccactgttgaaagagtatggtgtgaatggagttgttgacgccctgcttctggctgtagatactcctgtcctgctttccatgatgtttggcaagaagacaaagcaaagggcggtgcgagctgatgtggctggagaggagggtatttgcaatgcggaacaacaggttttactgcttagttgaagtcccatgggagggcgccacgac

SEQ ID NO: 366553 - DNA, 293 bp, Zea mays
aaaacggagccggggcagctgaataaacaatggggtcagacagtacaaaagagtactttggtccgttagcagaaactagcaggccatgagagcccacggttgacagttctgaaccaagaaaatcctaggaggcaacggaaactaaaagatgatacatttctggaagacaattcatctgtaacaaattaatacaacgtaaggttgcacttactaagatgatgagttctgccaaacgaaattggaggggaaccttcaggaggcttcaggatttcctcgtcatagttaaccgacat

SEQ ID NO: 366554 - DNA, 320 bp, Zea mays
gaaccatgatggggatgctatatcatgaatcacgtatgatgtcattgcatcatgattagattgtcctttctaagtgcaccatggaccactatgttacgctacaaaagccagagtccaccaactgcataccattccatatagtggtcctatgaagcaaagtgggccggtgctcttctttcatcttcaggtcttgataaagggatcagtagaatagtccaccacttgaactattatcctgtccttcgaccactgcagctcacatgctgccgctaacagcttatgcacctccagctcgttatacatgggcatctggaccagga

SEQ ID NO: 366555 - DNA, 209 bp, Zea mays
  unsure (1)..(209): unsure at all n locations
tgcccacagacacatgacaggacgacgggggaaaaaaagaaaatactccacgtactagtactactacgccgcgccgggggcaacgcgaatcttgtcattttgcccccccggaccccgctctcccgtacggcggtcggcttggatgtcgattggggaggggaggggaggggagggacntgnggcgcgttcgtgccgcgtcctgaccttgt

SEQ ID NO: 366556 - DNA, 242 bp, Zea mays
tgtttgttgatagcttccttcaggagcgcgggcacgggcaaaattgacgacttgggcttcacgctacacggggccaccgagggctacggttacatgaggacgacgacgcacgctaccggctgccaccgcgggaaccaaggtcggtcgtggcttcccgagcacgtcaggagcccgagcgcgagctggatacccagcatccgtgaaggaggacatgaggagggttgaagaggttgttgtccttt

SEQ ID NO: 366557 - DNA, 74 bp, Zea mays
aaacgaaatataaacaaatatttttattatttagaaataaattcttgaattacaatagtaaccacatacattgg

SEQ ID NO: 366558 - DNA, 222 bp, Zea mays
gtacattctggtttcagcttgaactgctctgggtttaggttgaacttcttgcctacaatggtgaacgcaatgacaggcatggactcaagactggcacagtccacagatgataatgccatccggactcggaagacactcgcaaggatgagtaatggaggatcgaataagtgcctgtaacgggttacttagcaagagctcattgtgttcattacacaacccttt

SEQ ID NO: 366559 - DNA, 347 bp, Zea mays
ccgattaggaacttaggaatggactcgccggtgcctgctacgctcgcccgcgcgccagcgagatcgcaagcgcgggcgggcgaggaggcttgcgcggatactcggcaggatgctccggcggaagcggagccacctccccgtcggccacccgcgttctacagctccgtgtttgcgtagatcgaagagatcgggtggaagcagctggtgagcgccacaggagacggagtgtcctgtctcaccttccgcgtcgtggatgaaccaggacagatgcatttactggaagatcacactgcccatgggctatcccgaaagtcctccttcaatctctgcagttagtctctatcctg

SEQ ID NO: 366560 - DNA, 452 bp, Zea mays
tctcgatccacatcggccaggctggtatccaggtcggaaacgcgtgctgggagctgtactgcctcgagcatggcattcaggctgatggccagatgcccggtgacaagaccattgggggaggtgatgatgctttcaacaccttcttcagtgagactggcgctgggaagcacgtcccccgtgctgtttttgttgaccttgagcccactgtcatcgatgaggtgaggactggcacctaccgccagctcttccatcctgagcagctcatcagtggcaaggaggatgcagccaacaacttcgctcgtggtcactacaccattggcaaggagattgttgacctgtgccttgaccgcatcaggaagcttgcagataattgcactggtctccagggcttcctcgtcttcaacgctgttggtggaggaacgggctctgggcttgttctctcctccggagcg

SEQ ID NO: 366561 - DNA, 257 bp, Zea mays
aaacaagcagcaacgggaaagcaaaaatttaacaagccaagggggcataaaaaacagggggttatgggacagggttacaaaaaacagcccttaaacagccccttatttatctacctgggacaggaaaaaaacataagcccggaaacattctgaagcggacaagaggggccttccattacccctaaaaaaaaaaggaaggggcaaaaaaggcaccccgttaggcgccgagggttttggctttaaggcaaccacagggg

SEQ ID NO: 366562 - DNA, 438 bp, Zea mays
acatcaacaaacacatggcatataaatcctggaaagagctcccccatgtgcgataaagtagacagacaaaaaaaccccacgcttcatcacttcataatagccatggttaagtctgaaacagcgcagtaagcgccggaaacagaggaacaagtgtcaattacaacctggtcaactgactgaactgatcacaggtcacacgcacagcagatgctgtggagaacattatccagaccaggacctagatcatatttagcactatgcaacagcatggctgagtgatgagcatctatataatccacattaaatcaaaggacagatttcggtatgccttctgacttctggatcccccgtgtgtcactcatgttccacagaagctgaatgtacccttggaaagaacaggtacatgttgaattctcactagggcactaggcatactgc

SEQ ID NO: 366563 - DNA, 511 bp, Zea mays
ccgccgtccagttcgacggcttcgacctcgaccccgcggccttcttcagcaacggggccaactccgacctcatgagctccgccttcctcaagggcatggaggaggccaacaagttcctgccctcagaggacaagctcgtcatcgacctcgatccgccagacgaccccaagcggtttgtcctccccacccgcgccgcagaaaacctcgcgcccggattcaacgccgccgccgccaccaccgcccctgccgccgtggctatggcggtgaaggaggaggaggtgatcctcgctgcgcctgatgccgcgcttggcagcggcggcgtcgtcctgggccgcggtcggaggaaccgcttggacgatgacgaggaggacctggagctgcagcgccggagcagcaagcagagcgcgctgcagggggacggcgacgagcgggacgtttcgagaagtacatcatgacctgccccgagacgtgcacggagcagatgcagcagtgcggatcgcctgcagaggag

SEQ ID NO: 366564 - DNA, 392 bp, Zea mays
gcaggttctgaaacaaccttgtatcagaagtgcagaagttctgaaagaaccctacaggcctacaacaccaaactactcgtgaaacaacgggtgaatcaagtgctactggtttggtcagggaaggaacatacaacaggtgttagaaaaggttcagaactgtacaagaaaaccctatccgattcatcacttggaacccttgaagccaccgaagttgccggaatctgacgtgccagaaccaccatagcctcttggataacgtgaggagcctgaatcatcagagctccgggaacgcccaaagtcagcgttaccacgtctgctgaaatcactgtctccaaagtcgccaaatctatcagaacgactgaagctaggcctgccaaagtcactggaagatc

SEQ ID NO: 366565 - DNA, 497 bp, Zea mays
cccacgcgtgcggggaaaactgcctaatggggaagaggtcgccgtgaagatgctgacggcgacgggccgggacgacgatgaggagcagttcgagaaggagcttggagcggtcacgagtatccagcgcgagaacatcgttgagttcgtctgatactggaacgcgcatgtactgtcgtccactgttttgtctgatggacgaagccctgtttacgagaagataataagagccctctgcttcaagtacatggagaagagaagcctcaagaaccatgtcgctggtcttgactggcactcccgctatgagatcatcaaggtggatctgcgagggtttgcaccaccttcacagcaaaagcatcgttcaccgggacttgaagcttgacaacatactcctgtacggtgccatgaggcccagattgcagattttggttttgtcccagattcatggcacgcaagaaccaccggttcacgggaaacattatagggaccccgggtgcatg

SEQ ID NO: 366566 - DNA, 204 bp, Zea mays
ggcccctcaacaggaagcaaaaaaaatcggggcccaaggaagcaaaaaaagatttgcccttaaacatgaagcattatttgaacatgggggccattttaaaacgaacaatgcaacagtttcacgaaattttacagagaagggaaacatttcgacatatttttgcccaagcccgacaaaagaggggcccccacaatttttcacccc

SEQ ID NO: 366567 - DNA, 457 bp, Zea mays
cgtacggcaacttgtgcgaccgccggcgccgacgccccaaggcaggtgccctgtgaccaggccttcgccggtccctttcgcgtccttcgccggcgacgagcaccaccagttcgtacgggagcacaatcagaggtgatcaccatttgctgcctgtttggtgaaagttgcgtgatggatggatatggagaggcggctgctgtggccatggagttggaggccgaggccagcccatccagggggcgctcctctcctgtggtttcagggtcaccatcccagaattctgatggaagcatgtcctcgtgggcggctgggcctcaagaacagcatccagactaactttggagatgattatgtcttccaaattgcctcttgcaggagatctcaacgcttgcagtttccttgtcaacaaatgcactaaagttttattctcagaaaccggacagtacctaggggaaat

SEQ ID NO: 366568 - DNA, 311 bp, Zea mays
aaagaaaaacatggtgattttacatgcaatttaatgaaataagaaaaacatggggattctaacctcttactaattgctaacattatcacatttttttaggttgggcacatgggctgacgacagccattgggccatatcaccatcacctgggtcccgggccttaaatccccttggtggctggggttctgaactccttccgggggggcctccccgaacagttttttgccgccgccgccgtttgggccgagcacgccaggtggaccgacaatccgccgaaaactttgacaggggttgggacaattttacaagat

SEQ ID NO: 366569 - DNA, 438 bp, Zea mays
gcccacacgcgttccagcgcgtgtagtgtcacctatgattcgatcagcacctattgtgctgttttcaccactgtattgtgccctgtgctctatatctttaatgactttttatgggatttccgtagatagctccctccgttatttattggcttatagttcacagataacataactgacaacacatattcgagaacgggattagtatataatagctgattatgactatcttttttaaaactatttgttgcaaacttgatggacatctcgaggaccaaagtgacacattatagagtcatagcttcatacaacacaggttaagctgcactatctcctatacatctctagatctaccacttatattagagtttcttcttcattttaagaaattgcatcgcaccttccatttgcctatgtaaaaaactatcatattgtgttcta

SEQ ID NO: 366570 - DNA, 445 bp, Zea mays
  unsure (1)..(445): unsure at all n locations
cgcagtgattgtcgtcttcgtactcgcctacctccgcggctcaaaccttttccccttctcccaattccttccgccggccgccgctccacccgtacgacgacaccatgagggagtgcatttcgatccacatcggccaggccggtatccaggtcggaaacgcgtgctgggagctgtactgccttgagcatggcattcaggctgacggtcagatgcccggtgacaagaccattgggggaggtgatgatgctttcaacaccttcttcagtgagactggtgctgggaagcacgtgccccgtgctgtttttgttgaccttgaacccactgtcatcgatgaggtgagaactggcacctaccggcagctcttccaccctgagcagctcatcaatgggaaggaggatgcaaccaacaactttgccccnggncactacaccattggaaggagatt

SEQ ID NO: 366571 - DNA, 367 bp, Zea mays
cccacgcgtccggggtagtgtcaaccccaagaaggattcagtttttctttccatcttctgatctggctttccgtatcaagctgacgatgtgaaatgctaacagtagaagcttgcctagctatgtcatgtgggaattagatttaagttcttgaatgttacactattttgtgaattttttatgttggacaaattatatagtgagggtgtcaagaaaatcatgcaaagaatggaactttacgacttaccaccctctgtcccaaattatagcttattcttagggaataggaccttaaaacacaggctaacatatctagaaattagatcaggcgaagaggtatagggctgagtatttgaagcaaagagaagt

SEQ ID NO: 366572 - DNA, 200 bp, Zea mays
  unsure (1)..(200): unsure at all n locations
gggaaagctgggacgcctgccggtgcggggccggnctggactgcccgacccaacccacccgtaccttttttttttttgcatcagcccgccgccacgaggaaaccaatccattccattccacacatggtttagccctttaccagatgtgcctccatgatgcgaactgcccatgatgccaacgtcttacgcgaggcacgggc

SEQ ID NO: 366573 - DNA, 281 bp, Zea mays
aacgggaaaccggacttttaattcatataccaccaaactggcaaacattgggactaaatacatgcaacaccagtttttacaaacaagactcgtttttcctaagggatggacctacactgaagctacttcgccaaaaactcagtattctgttcagggaaaaaacctttgggggcaccgggctgatcccatttcctggaactaaaactttgttatgcacattgattcgaaatcaggacttgatgctagaaaaaatccgcctttccagacaccaaaaatggggt

SEQ ID NO: 366574 - DNA, 508 bp, Zea mays
  unsure (1)..(508): unsure at all n locations
cattcttaatccatgttgcaacaaaacatcaaagaacgtgaaccagagaaagcacaggatcagctatatgaataatcaccgtggaaagaacagcctgggccaccattgcctcaaaccacgcgcatgaatttgtttgtgtgaaactgcactggagattgtagcgcccgatagggcgctgtcctgccctagtgacactttaaagcttatggactagattgtcacacatgcacaaggggactgaaaatgcactttactcatcaacttacgtatgtcagcatgaaaagttcttgagaaatattttctatgtttctctaaattgttggcctagcaaaaatgttggccacagtgatttagatagcaaagataatataaggatctgtttgaatgcaatagagctaataatagaatattcggntgaaaaattnctagtaaattagtcgctaacatgctaatttgctaaaaagnagnttaataggttaaactatttgctagacagttatatgttttt

SEQ ID NO: 366575 - DNA, 478 bp, Zea mays
  unsure (1)..(478): unsure at all n locations
cggacgcgtgggcggacgcgtgggcgagctttgtcatctggtactgctggtaacataacaacaggcacgaccaagcttcacaccgagctggaggagctggttgcgcgttttgtcgggaagcctgctgctgtcgtcttcggcatgggttacgttacaaactctgccaccattccctgcctaatcggaaaggtttgtaatgctcatatatacaatacaattgccagatgtctgaattatcagctgttttttctctctccctttttgcgacgtttgacagggtgggctgattatcagtgactcactgaaccacaactcggatcgtcaatggcgcaggaggatccgatgcgactggtcagggttttccggcacaactgtaagctgctttaattgtgcctctgaacaagaacaagaacaatgcggatgaccaccggccggccgcanagcgcaaacgtcactctcttgcatgcatgcaggccct

SEQ ID NO: 366576 - DNA, 425 bp, Zea mays
agttaacataagatctactgatttgcatatatatacacagatcacagacacaggaccaccacttacgcacgcctaatcacctcaccaatgcaatcccctagcttctttcttagtagcatccaaaatccggcctcccctttcaatttgtacgcacgcaggtaggtacgtacgtacacttaagtctcgcaaaattaaattaacgcatcgatcgatccatcgagtggtcgccgtcgtctcgatcaatccatcgtcgtcttgtagtacaaaaggaagaccacgcgcgcgcctgcatgccggcccgacagcccctccgccgttggtgatcacgtactggtcatggcatgaagagcttgttgccgcacttgcagcgccacacctgcgggtagtactcccactgggggccgacgccgggctggatggcacgc

SEQ ID NO: 366577 - DNA, 425 bp, Zea mays
tgtccttgcgtccggcagcccgcggcagcagcagcagctcctcctgctcctgctcgtcgctgtagtcgcctcgcatttaccactcactcactcgctcgctctgcccttcaccccctcgccttcttcctccttccatctcgatctcgtactctccttcgctcgcatcgcatcgcatcgcaccgacagacgcacagcaaggtcgaccgccgtcccacaagaacttggccttttattggcgccggatgccgctctcgccctccggcgccgccggcggatggatgcgccgctgcccgcacgctgacgcactccccggcgtcgccgtcgtcgcgacaacggctcgactcgaggcgatgcacatcggaggatatagcgggaaggagatgagaggtgaggagcacacggctccgctgaaacagaagagactt

SEQ ID NO: 366578 - DNA, 412 bp, Zea mays
tgtggtacggtagatctaaacagtgaatctggaccatacatgcatgaacaacaccgtccagatctagaactaccaccagtaaaaactaccgcatgtgggaaggaaataaagggtgggtagtatcgttgcctctcaggttgggagaacatgtttaattatgctgcaatggaataacggacttgcttagtagctgggactggtccaccaacttaaaatatatgcagcacatgtccacacatatataggtagtggagaagatgatggcagaaacaggagttgaaatcagtcgcaaccggtcgcttcactctcgctatgactgatgaagatgttaggaaataaagatagatatggttagacatatttggagataataaaactctcaaatttattttataacagaacaaagtttcag

SEQ ID NO: 366579 - DNA, 377 bp, Zea mays
cgagggaagctccaagtatagtagaataccatagcttttcgtatctaagctttggccgatctcctcattaatacaacaagccaacactaccccaaaaaaaaatactactagcacatctgagaaacaaggtaccagaaagatattccaggggagaacagaagttagtgccaattaccagtagtacagctaactgcgtctaaaattagcctactatgctgcaacttggagcatctctacatttactactcaacaaagctcgccgcctgaccccgggagccagcggatctcattggacaaccgagtgccgccaccgggcgggaccaacacgccggcagggcccctcccgcctcgtcacagcaggacctggagcgaggcgt

SEQ ID NO: 366580 - DNA, 240 bp, Zea mays
ggaacaccttacagatggatcggtcaattttgacaggtttataatttacaaatgcccttaggaaacactaactggaaaccaggatttacataccacccgaatttgttaaccggtcgattgggtacccgcattattttaacatagacccccccatggggtaactttatctgggtttttatttgggtatatgtaaagggacccaaaccaaaccattttacgggcatttatttacatttgggg

SEQ ID NO: 366581 - DNA, 253 bp, Zea mays
ggccccgtccccggcggcgtcgacggcctcccccgaggcccccgcgtcgggcgccgtggcggggaagcccacggtgctcgtggccgagaagctcggcgccgcggggctcgcgctgctgcgggagttcgccaacgtcgactgctcctacggcctctcccccgaggacctccgcgccaagatctcgctctgcgacgcgctcatcgtcaggtccgggaccaaggtcggccgcgacgtcttcgaggcgtccgggggc

SEQ ID NO: 366582 - DNA, 541 bp, Zea mays
cacacagcgcagacgatgccgaccatcatcgtctcggtggacctggaatgcagccgctgccgcgccaagatccagagggtgctcaacaggatccaaggtctgttcgcgcttgcttgctactcctctctgttgttcgctcttccctttccgcttgtacaggtaggtctcgagacggttcgcgttgatcgcaactgataagtttcctgggacgacggacggacgcctcggcttgcagagaagggcgagttctgcatcgatgacatcgacttcgacgagaagaacaacaaggtgaaggtcacggggcccttcgacccggacaagctcgccgacaagctgtgctgcaaggcgtgcaagatcatcaagcagatcgagatcgtcgagcccccgcccccgccgtcgtccaagcccaaggaggagccgaagaaggaggagcaagccccgccgccgccggagaagaagaggaggccgtcccgcccccgccggcgaagtggagccgcccaggaggagccaccccaggggaagcccccgcaccaggaggagc

SEQ ID NO: 366583 - DNA, 164 bp, Zea mays
aaccccccgggggtgggtttggaagccctgaacaaaaaagggggtgggcaaaaatggggacagggtggcacaagaccaggggttggaattaccccgaaaactcagggttccctcccggggggttaaataatttttttaaggggagaaaacgggcccagaaaaac

SEQ ID NO: 366584 - DNA, 343 bp, Zea mays
ggtgaacacagcatcgtgaagaagaatggttgagctgagtagtactgctttgattgctcaaactgtggaagctgactaacgtacttgggcaacataacaagatataatctagcattgaatcgatatgtgagagacgcgaatagatgacgacagcattccaagcatgggtcagaccaccattgtcgaggtctaggcggaatgtatatttgctgctcatgacattatagaatgtaagaccatacactggagcacgagatgcgctatatatctagcaataaagttcaacttcttcgttttgttaacgagtattgcaacaagcacgccgagccgaccgggccgggcg

SEQ ID NO: 366585 - DNA, 156 bp, Zea mays
tttttatttttttttgagtcgcagcttcttgactttattccttggtgacacaaaaaaaagcattatctctggttcattacaacaacgatacttgacaaatcacatttttcgacatcacctttttcttgtataaaactggagcgtggtatcagtttg

SEQ ID NO: 366586 - DNA, 141 bp, Zea mays
tttgctctttttttttttttttttttgaagctggggtaaatacaggtcaataaggggggaaacctccaccaattctgtatcggtagtaacctccaacctttacatgatctacacatgcaacaggacctacctaccctgcag

SEQ ID NO: 366587 - DNA, 69 bp, Zea mays
cagactttttctgcagcgcctccgccgccgccgccgcatctaacgcagttccctccgccgcagcccgag

SEQ ID NO: 366588 - DNA, 468 bp, Zea mays
  unsure (1)..(468): unsure at all n locations
gcaactgccagtcaccctgacttcctgtcacatggagcagaatttgatcatcacagggctattggaatgcctaatttcagaaatccaggcccatttgctcaagggacaagtggcggtcctggtggccctcctaaacaccagcttggctctggtaaccttcctgggaatttacattcttttgagggtgacatgcatccaggtgaccctcatcttgtcgctgaatatgctcagcatggatttcctaaaactgcagcacactttggtttgggtgggattcttgagaaacgggaatttgggttggtgccgaatatgcatgtttaactgggggagtgcagagaattgggatttgcatgtacaaacaagggaacatcagcaatgtgcaatggacattgtcctgaaaatgaacanagatgttgcaaaaaggcaaaaactgaattatggagggcccaagtcattcaacaacaaaaa

SEQ ID NO: 366589 - DNA, 493 bp, Zea mays
gcggatcgagatggcggcgtcggatgttgagtaccgctgcttcgtcggcggcctcgcctgggccacggacgaccactccctccacaacgccttcagcacctacggcgaggtcctcgagtccaagatcatcctcgatcgggagacgcagaggtcccgcggcttcggcttcgtcaccttctccacggaggaggcgatgcggaacgccatcgagggcatgaacggcaaggagctggacggccgcaacatcaccgtcaacgaggcccagtcccgcggcggccgtggaggcggcggcggtgggtacggtggtggccgtggaggcggcggctacggcggtggcgggcgccgtgatggcggtggcggctacggcggtggcggcggctacggtggcggcggcggctacggtggtggtggcggcggctacggcggtggcaaccgtggcggcggctacggcaactccgacggaactggaggaactgagcggtggggcccgcgc

SEQ ID NO: 366590 - DNA, 616 bp, Zea mays
gcctccgccaccgctagtattaggcgacgccgggtgagaaagcctagcgccgagtccgttccatctccgcggcccttccacgcgcccgatcatgccaccagatgcgtcgtcaccgttgccgccgatcgacacccccgacgacgggcgacggcagcgacgtggaggacaagatcgacccgctgtggggcaggacccgctaggcgcgccggccgaaggggacggtgaggaagcagctcgatctggacgaagttgacgtggaggtggcttcgggggcgggggcgggagcgcaggccaaggggggaagaggaggaacacgaagatggaggaggaggcgccgcccatggagttggtccgggagaagaagctctctgagaaggtaaccagccgctgtctcttgcgttctgggtctggccgttggttagttgaattgctagccggtttttgatgatgtctggtgctctgggagtctgggttcgtgtgttagagaggagggcgcagcttctttcatccatgctgagtcacagaggctgctgcgaggtgtacatatacacacgtaactgcacatggagtagaattagatgcgagattttatctttgtcccatttggtaatgagac

SEQ ID NO: 366591 - DNA, 359 bp, Zea mays
tttccattcatggattgggatctcaagatgtcggtctcctaggacctccgcgacttcccccgcgacagcgtcgggcattgccgccgcagctgccgcgccttccctcgcgacggcgccgagccgagcggagtgctccgtcgacctcaagctcggcaggacgacaccaccacgaaggagccggtggctgcaaccgcagcgccgtccgccagcccgatgggtcggcgtcgggcattgccgccgcagctgccgagccttcccccgcgacggtgctgagccgggcggagtgctccgtcgacctcaagctcggcgggctaggtatgtttgctctcaggtacccgagaatcagaggctccttgtat

SEQ ID NO: 366592 - DNA, 86 bp, Zea mays
cccatgctttctgccgacatcaaaagccccgtacgggggggattggaatggaaccgcgctacagaactcgaggacaggactcagcg

SEQ ID NO: 366593 - DNA, 313 bp, Zea mays
  unsure (1)..(313): unsure at all n locations
ttccatgtgtgagtccacgcgtccgaccacgcgtccgtccacgcgttcgaacggacatcgagatacctgtgcctaggagntttttattattnttcatttattttttttttattattggacatgcagcatatgttgaaaagtcgtggtccagttactttattttttgtcatttattttttgatagaggccgagaccctccacaacttgttttttaacataatgaatatcgtctttccagatttttactatatttattttaagaacgccatgtcgtttttgaatcctggaagcgtttgccgtttttttcttatta

SEQ ID NO: 366594 - DNA, 501 bp, Zea mays
  unsure (1)..(501): unsure at all n locations
acgcacgaacgctcgccaccgtcgtcggcatcgccgacgaccatgaggactccgactgccgccgccggctgctcgcccagaacgaagagatccacctctacacagagccccctaaccgtcaacatcctccactggatgctgcggcgacgcatctcgaggagcagcgtaagccgcagagagtggcctatctggacgtgttccgcggcttcaccgctgccatgatgatactcgtggacgactccggcggcgcgtggccgagcatcaaccacgcgccgtggatcggagttacagtggcggacttcgtcatgcctgccttcctcttcatcatcggcgtctccggcgcactcgtattcaagaaaatggcatacaagacagctgcaactaagaaggctgcaattcgagctgcaaaactttacatattgggcgtgatcttgcaaggcggatacattcatggacgacacanagcaacttatggtgttgacttggatcatattcgatggc

SEQ ID NO: 366595 - DNA, 361 bp, Zea mays
gccacgcgtggggatactcgttccgtggttaataacaggcactaggccctgatgctgatggaagcatgccgtgagtatgttgatgcactacaacctatgacatactatgaggaaacatccaacatcttcttatcaagaggagctcggtttactggacagtaaaatgcgagcttggctccactattgacttactcgcgattagtggctgaacttgatggtcatacaagcatactccatctacttgtggcggagctgcatgatgatacagatactaggaagcaaacgatcgaagctttttgtggatctccaaacaacggagaacatatagcaagtgtttattgatgttatgctgagcagtacg

SEQ ID NO: 366596 - DNA, 407 bp, Zea mays
gccgaccgctcaaccaccttttaatccccatatccgcggcggcatggatagagcctgggagagggactcagccagagagatcagacatagcgaagtagatggtgcgggtagcgacctacttcctaatgaccttattgtcgttcctcttataccagtccatgatcagggtccaccgttgtaccgcccttcaccacgactagaaggtagataggatcgactgggagctggcgataacgtgaatgctgaccgagatactgtcccaagctcatgcgaatgaatcatgagtgtcaatcgttcaaagagtgcacgcagatccttcatagtatttcctctgctgtattgtccatgcattatctttactgatgtatgctcatgctgagtacctgcaataaagcgagacatgctat

SEQ ID NO: 366597 - DNA, 236 bp, Zea mays
gccactcgttcaaccacactttaatccccacatccggggtgccatagacagcgccaggaggacgatctcccacatacagatcacacacagcacagaagcaagtactcgaagtaactcactcactaatgacctcacacccaacctctttttaccggacaatgagcaccgataaacattgtaccgctgctcacaccgacccaaaggcacaaaaaaaccactcgaagcctgctataact

SEQ ID NO: 366598 - DNA, 82 bp, Zea mays
cccactcttccgtccactcttccggctttatccatgggggaacccccatttatcccgggggataaataacctaatttacttt

SEQ ID NO: 366599 - DNA, 155 bp, Zea mays
gccacgcgttcgaacacgcgtcaggctgtatgcaaaaggggacaccctttgggcacgggggaggaaggacctatattgttttgcacgttacaaccgacgagatcatggggattctcgcctgcttctagctatgagagagcggagatttttaggca

SEQ ID NO: 366600 - DNA, 118 bp, Zea mays
gaccacaccttccgcccttttttcgtataacccttcaaatctaaacaagggggatttatttttttcccagggtacaaatacacaattaaaagtcacacataaccctctaagaaattac

SEQ ID NO: 366601 - DNA, 159 bp, Zea mays
gccactcgtccgaagacacgtcgggctgcatgcagggggcaccattcactgcctacgggggactatcgccctaatcagttgcccacggtaccacggacgacctaaaggatactgaccaccgcttctagcagtcatagtgcagatcttcagacgtaagag

SEQ ID NO: 366602 - DNA, 128 bp, Zea mays
gccactctttcgaagacccgttagactgtatgaagggggcaccaaacaccgagtacggtggcaacacgccccaagcagttttacacataaccacgtacgaattaatggcttctcacctccgcctctat

SEQ ID NO: 366603 - DNA, 205 bp, Zea mays
gccactcgtacgaagacacgttgaaccggatgacgggggtgccattccttgcctacggtggcatctcgccacaataagtttcacacggaaccccgtacgaactacaggattcagaccacggcctacagctgtgacagtgcagatattttgaccgaagagctagcaccctaagacagtctaccgtgtcacaaaccgagtcctgggg

SEQ ID NO: 366604 - DNA, 184 bp, Zea mays
gccactcgttcgatgaccctttagtctggaggccgggggtactactacctgcctagggggccaaatcgcctcaataacgttcacacgtaaacccgtacgaactacgggatcctaacctcggcctaccgctgtgacagtgcagatatttggacataagagttagcaccctttgacagtctaccgc

SEQ ID NO: 366605 - DNA, 156 bp, Zea mays
gccactcgttcgatgacacgtcagactggagaacaagggggctacatttctcctacgggggacactcgccccaataacattcacacattaccccctaagaaaatacagggaacacaccccggcttctataaatgagagtgcggatatttctaaata

SEQ ID NO: 366606 - DNA, 264 bp, Zea mays
gccactctttcgctcacccgttagactggtgaacgaggggggttcatttctcccacggggtgcaagatgcaaaattaagagtcacaagtaactctgaaagaaattacaagaatcaaccaaggtgactacaactgtgactttgatgatgtctcgacatgacagttagctccttttgacagtctgccaccgcccacacccaacttggggcctttagaacccttttgaacaggactgttaggttgcgctttttgggacttggacacc

SEQ ID NO: 366607 - DNA, 433 bp, Zea mays
ctcacacctcagtggacgcggcgctcctcttgctgctgggtccgcccgtcggtctactcgccgcgctggcattcctcacgcggccccacgcccggatcgcgctcaaagacaggcacgtcttcatcacgggcgggtccagcggcatcgggctcgccatggccacggccgctgcgcgggagggcgcgcgagtctccatgctggcccgcaaccttgcccggctcgaggaggcgcgcgccgccatccatcgcgactcggtccgcgacgacgtcagcgtccacgcggccgacgtgcggtacgccaacgccgtgatccgtgctctgcaggaggccgtccccgtggacatcctgatatgcaaccaccgcgagttcgtgccgcaagatctcgtgaggcaggacatggatgagatcaataggattgtggacatcaaccttat

SEQ ID NO: 366608 - DNA, 296 bp, Zea mays
cccacgcgttcggagacgcgtcagtcggcatgctaaaggggacaccctttggtcccggggcaaggatgacctaattgactttgccgggcaccaaggacgaactaaagggtaggctcgactgcttcaagcttggatggagcggatattttatcgccgtagccatgagtcctgctcgtaccacttagagatcaattgagcccgggtgaccccttgtctagtacgaagaaaaaattgccacgaccaatggcggatctgttagaggagagcgaacacaggaggcctatgccctgcgctac

SEQ ID NO: 366609 - DNA, 144 bp, Zea mays
gccacgcgtgcggccacgcgtcagtctgcatgccaggggggacaccctttgggcacggggcatgcaggacctaattgcctttgcgcgggaccacggacgaactaaagggtacatctcgcctgcttcaagctggaatggtgcgga

SEQ ID NO: 366610 - DNA, 126 bp, Zea mays
cccactctttcgaacacgcttccgtctccatgctatcgggggcactctctaactacggggggggcacgacatattaattttcacccattacacccgacgaaatacttaggaaatcatccccgcttc

SEQ ID NO: 366611 - DNA, 184 bp, Zea mays
gccactcgttcgacgacgcgtcagtctgcatgccgggggcaccactatctgagtagggggtaagctcgacctaattactttcacacgttaccccctacgtactacaggatactgacctccgcttccagctgtcatagtgcagatattttgacgcaagagctatcaccatctgaccgactactta

SEQ ID NO: 366612 - DNA, 145 bp, Zea mays
gccactcgtacgaagacgcgttagactgcatgcaggcggcactaatccctgcgtacggtgcacgctcgacccaataactttcacacgtaataccgtacgtactacaggcacctctccccggcttccatctgtcatagtgcagata

SEQ ID NO: 366613 - DNA, 206 bp, Zea mays
gccactcgtccgactacccttcaaactccttgccaggggtcctactaccttcctacggggcatcctctccttaataattttcacacataaacccctacctactacaggatcctaacctcggcttacctctgacacaatgcagatatttttacataagagttatcaccatttgacaaactacctcattcacaaaccaacactttggg

SEQ ID NO: 366614 - DNA, 159 bp, Zea mays
gccactcgtccgacctccctttagactccataccggggggtctacattcttcctaggggggctacactcctcaatcacattcacacataaacccctacgaaccacatgaaccaaaccacggcctacatctgagacattgcagatatttagacaaaagag

SEQ ID NO: 366615 - DNA, 333 bp, Zea mays
ctcacattttaacggccgtggagcgtttctttcttcgggggggtcgcctagggctagtgggcgcgctagcattccttacgccgccctacggctatagagggctgaaagacagtcacgtctacatcagggagggctccaccggcctagcactcgacatggccacaggggctgcgcaggcgggcgcacgagtatacatcactgcccgcaaccatgcccgccacgaggaggagctcgtcggcattcatcgcgacttggttcgcgaacacgatgcagtgaacgcggatgaagagcggtacttcaacgccgtggcccgtgctctccatgaagacgatc

SEQ ID NO: 366616 - DNA, 396 bp, Zea mays
ctcacacgtccgtggacgcggcgctcgtcttgctactggggacacccgtcgggctagtggcggggctggcattcctgacgcggccccacaccaaggtcgagctcaaagacaggctcgtcttcatcacgcacggatgcagcggaatgtcgctcgccatggtcacggtcgctgcgcggtccgtcgcgagattattcatgccggggagtacccttgtccggctcgaggaggagcgcgccgccacccatggcggatcggtccgagacgaccgaagagtgcacgccgccgacctgcgctacacctacgacttgatccttgctattcaggaagccgtgcccctagacatcgtggtatcaaccacctcatgttcacactccaagatctctttaggcaggacat

SEQ ID NO: 366617 - DNA, 338 bp, Zea mays
gccacgcgttcgtcgacgcgtccgtctgcatgctaggggggacaccctttgggcccgggggggggttgacctaattgacttcgcccgtcaccaaggacgagctcaaagtgaggctcgtctgcttcaagctgggatggtgcggattgtctctcgccggggtcacgagccttgcacggaccgcttagatattaattgagcccgggttacccattgtctaggacgaagaaaaaactgctacgacccatggcggatctgttagaggagagcgaacacaggaggccactgccctgcgctacatgtaggacttcgtcgaagtaagtgagaaaggcctgacccta

SEQ ID NO: 366618 - DNA, 148 bp, Zea mays
cccacgcgttcggcctcgcgtcagtctgcatgccagaggggacactctcttggtacgggggcggcatgacctaatttccttcacccgtataccacgtacgtactaaaggatactctcatctgcttcaagctgtgatagtgcagatatt

SEQ ID NO: 366619 - DNA, 302 bp, Zea mays
gccacgctttcgactacgcgtcagtctgcatgccaaaggggacactctctaagcacgggggcggcaggacctaatagccttcacccgtgacaacgtacgaactacaggatacactccaccgcttcaagctggcatagagcagatattctgacgcaggagtcatcaccacctgaccgaccacctagagacaaactgcgaccgggggttccattaaacgagacgaagcacagactgggagtacccttatccgagctgtaacaggagggcgaatacaggaagccaatgcccggcgctacataaag

SEQ ID NO: 366620 - DNA, 208 bp, Zea mays
gccacgctttcgacgacgcgtcagtctgcatgccaaaggggacacttacttagtacgggggggaatcgacctaatatccttcacacgttaccacctacgaactaaaggaaactctcctctgcttctagcatagatagtgcggatatttctatgcaagagtcatcaccatctaacatactgcttctgagacaaaatcgcaaccttgggt

SEQ ID NO: 366621 - DNA, 146 bp, Zea mays
gccactcgtccgaatacgcttcagtctgcatgccaggggcaacaataactgagtagggggcaagcacgacctaatctccttcacacgtaaccccctacgaactacaggctccactccaccgcttccagctgacatagtgcagatat

SEQ ID NO: 366622 - DNA, 145 bp, Zea mays
gccactcgttcgaacacgcgtcagactgaatgcaaggggcaacactatctgagtagggggcatacacgacctaatatctttcacacgtaaccccctacgaactacaggatccactcctccgcttccagctgacatagtgcagata

SEQ ID NO: 366623 - DNA, 178 bp, Zea mays
cccactcgttcgaacacgcgtcagtctgcatgcagggggtaacattaactaagtagggggcaagaacgacctaatcaccttcacacggaaaaccctacgaactacaggatcctctcctcggcttcccgctgacatagtgcagatatctctacacaagagccatcaccatttgaccgac

SEQ ID NO: 366624 - DNA, 189 bp, Zea mays
gccactcgttcgacgtcgctttagtctgcatgcagggggtactaatatctacgtagggggcaagcacgacctaataaccttcacacgttaacccctacgtactacgggctccagacctcggcttccagctgagatagtgcagatattctgacacaagagttagcaccaactgacagactacctcgtcac

SEQ ID NO: 366625 - DNA, 285 bp, Zea mays
gccactcgtacgacgacgcgtcagactggaggccgggggggctactacctgcgtacggggcaaacacgactcaataaccttcacacgtaaacccctacgaaccacgggatcctgacctcggcctaccgctgagacagtgcagatattcctacacaggagttagcaccaaatgacagactgcgtcatgacaaaccgaaactgtgggctccaatccagtgaacgaaccactagttaggaggcccatatcccgacgctgtaaccgggaggcctatacgggaacctttt

SEQ ID NO: 366626 - DNA, 239 bp, Zea mays
gccactcgtccgaatacccttcagactggatgccggggggactattaccttcctagggggccaaaacgccccaataacattcacacgtaaccccctacgaaccacgagaaccaacccacggcctccagctgagacaatgcagatatctcgaaataagagctagcaccatttgacagtctgccgcatcacaaactcgaaactgggggctccaaaaccgataaggaaacacagcttaggtt

SEQ ID NO: 366627 - DNA, 181 bp, Zea mays
cgcgcaccacttgtgcgtactcgtctcacgttttgcgccaggggcaacactatttgcttaggggggcaaatggattctattatccgtcccctcgtcacccagtacgttctaagggatacactcctgctgcacaatctgatacagcgcagattttctagccgaggtgacagccccttctcgc

SEQ ID NO: 366628 - DNA, 304 bp, Zea mays
gccactcgttcggagacgcgtcaggctgaatgcaaaaggggacaatctctgagcacggggtcagatcgacctactttccttcacccgttaccacgtacgtactaaaggatacactcgtctgcttcaagctgggatagtgcggatattcgatcgcagttgtcatcaccatttgtccaactacttagagacaaactgagacctggggccccaataccagagacgaagcaaagactgggacgaccaattccggagctgtatacaggagagccaacacaggaagccttagcccggctctacatgaaga

SEQ ID NO: 366629 - DNA, 145 bp, Zea mays
gccactctttcgaatacgcgtcagtctgcatgctaagggggataatctctaagcaggggggaagaatgacctaattactttcacccgggacaccgtacgtactacaggatactcacgactgcttcaagcttaaatagtgcagata

SEQ ID NO: 366630 - DNA, 143 bp, Zea mays
gccacgcgttcggagtcgcgtcggtctgcttgccagtgggggcactctttgcgtagggggccagcaggacctaatctctttctcccggtatcccctacgtactacaggggactcacctctgcttccttctgtcatagtgcaga

SEQ ID NO: 366631 - DNA, 175 bp, Zea mays
gccactcgttcggagacgcgtcggtctgcatgccacaggggccactctctaagcacggggggggaacgacctaattactttcacccgtgacaccctacgaactacagggtactcacccctgcttctagctgtgatagtgcggatattcctacgcaggagtcatcaccatttgtcc

SEQ ID NO: 366632 - DNA, 178 bp, Zea mays
gccactcgtccgaacacgcgtcagtctgaatgctgggggtaacaataactacgtagggggcaaaaacgacctaattgctttcacccgttacccactacgaactacaggctacactcctctgctaccagctgacatagtgcagatctttctacgcaagagtcatcaccatttgaccgac

SEQ ID NO: 366633 - DNA, 145 bp, Zea mays
gccactcgtacgaatacgcgtcagtctgaatgcagggggtaacattacctgagtagggggcaagaacgacctaatcactttcacacgtaaaaccctacgtactacaggatactatcctctgcttcaagctgacatagtgcagata

SEQ ID NO: 366634 - DNA, 180 bp, Zea mays
gcctctcgtacgtactctctttagtctgcatgctgggggcaacattaactacgtagggggcaataacgacctatattctttcactctgtacaccgtacgaactacagggtacagtctactgcttccagcttagatagtgcagattttttgatataagtgctagcatcttttgactgacta

SEQ ID NO: 366635 - DNA, 63 bp, Zea mays
gccactcgtacgacgtcgcgtcagattgcatgcaggaggtaccactatcttcgtagggggcca

SEQ ID NO: 366636 - DNA, 248 bp, Zea mays
gccactcgtccgatgacccttcaggctgcctgccgggggtcccactatcttcttagggggccacctctcctcaatatctttcacacataaacccctacgtaccacgtgatccagaccacggcctccctctgagacagtgcagatatctcgacacaagagcaagcaccatatgacagactgccgcatcacaaaccaacactgagggcatcaatccagaaatcgaaccacagcctaggtcgcccatatcc

SEQ ID NO: 366637 - DNA, 286 bp, Zea mays
cccacgcgttcgcagacgcctcagtctgcatgctagtggggagagccgctaggccgggggtgaggaagacctactttacttggcgggttaccacgtacgtactcatagttagactcaactgctacattgcatggattgagcagatattctctagcaggagtcatgaacaagtctccatccacttatatattattcacaaccgagagtcccattgtatatgacgaaggaaaattttgtgacgaaccctaccggagctttgagatgagggcgaacactggaggcctga

SEQ ID NO: 366638 - DNA, 298 bp, Zea mays
cccactctttcggagacgcgtcagtctgcttgctaagggggccactctcttggcccggggggggaacgacctaatttccttcgcacgtgaccccgtacgtactaaaggatacactcgtctgcttcaagctgggatagagcggatatttcttcgcaggagtcatcacccattgaccgaccgcctagagacaaactcgccaccgggtgtcccatgatcgatgttcgaagaacagactggtacgacccttaccggagctgttagaggagagccaacacaggaagcctttgcccggctctac

SEQ ID NO: 366639 - DNA, 177 bp, Zea mays
cccactctttcgaagacgcgtccgtctgcatgccacaggggacactctctgggcacggggcaagaaggacctaatctctttcacccgttaccccctacgaactacaggatacactcgcctgcttcaagctgagatagtgcagatattcttacgcaagagccatcaccatttgaccaa

SEQ ID NO: 366640 - DNA, 169 bp, Zea mays
gccactctttcgacgtcgcgtcagtctgcatgccaaagggggcattatttaagcacggggcaggaacgacctaattttcttcacacgtaaccccgtacgaactactggatactcacgcctgcttcaagcaggcatagtgcagatttttcttcgcaggagtcagcaccaa

SEQ ID NO: 366641 - DNA, 159 bp, Zea mays
cccactctttcgaagacgcgtcagtctgcatgccacaggggccactttctaagtacggggggggcacgacctattctccttcacccgttaccccctacgaactacaggttacactcctctgcttcaagctgacatagagcagatattcggacgcaagag

SEQ ID NO: 366642 - DNA, 160 bp, Zea mays
gccactcgttcggatacgcttcagtctgcatgccgggggcaataatatctgagtagggggcataaaggacctaattaccttcacacgtgaccccgtacgaactacaggctccatcaccacggcttccagctgacatagtgcagatatttctacgcaggag

SEQ ID NO: 366643 - DNA, 145 bp, Zea mays
gccactcgtccgaattcgcgtcagtctgcatgcagggggtaacaataactgagtagggggcaagcacgacctaatcactttcacccgttaccccctacgtactacaggatacacacctctgcttcaatcttacatagtgcagata

SEQ ID NO: 366644 - DNA, 278 bp, Zea mays
cccactcgttcgaatacgcgtcagtctgcatgccgggggcaacaatacctgagcagggggccagaacgacccaatcaccttcacacgttaacccctacgtactacaggctccacaccactgcttccagctgacatagtgcagatattttgacgcaagagctatcaccatttgacaaactgcctagagactaaccgagactgtgggcctcaagccagagtacgaagcacagattgggacgacctcttcccgagctgtaacaggaaggccaacacaggaa

SEQ ID NO: 366645 - DNA, 240 bp, Zea mays
gccactcgttcgaagacgcgttagtctgcatgcaggaggtaccactatctgagtagggggcaagcaggacctaatatccttcacacgtaatcccgtacgtactacaggctccagtcctctgcttccagctgacatagtgcagatattctgacacaagagtcagcaccaattgacagtctgcctcgagacaaactgcgactttgggttccaagacagtagacgaagcacagtttgggacga

SEQ ID NO: 366646 - DNA, 176 bp, Zea mays
gccactcgtccgattacgcttcaggatgaaggccgggggctctactaccttcgtagggggcataatcgactcaatctctttcacacgttaacccctacgtactacgggctccagaccccggcttccagctgacatagtgcagatatttagacataagagccagcaccaattgacaa

SEQ ID NO: 366647 - DNA, 279 bp, Zea mays
cccactcgtccgacgacccgtcaggatggctgccaggggggctactaccagcgtagggggccagctctacccaatgaccttcccacataaacccctacgtactacgggctccaaaccacggcctccagctgagacagtgcagatatctcgacataagagtaagcactaattgacagactaccgcatgacaaaccgagaccttgggctccaagccagaaaacgaaccacagcctaggaggccattatcccgatctgtacccgcgaggccaatacaggaac

SEQ ID NO: 366648 - DNA, 96 bp, Zea mays
ccattttgtcggtaacagcttaggacccctgcttgggggcactccaaaccagcagggccatctgcaaaacctattctatagccaacgttaacccca

SEQ ID NO: 366649 - DNA, 262 bp, Zea mays
cccactctttcggactcgcctcagtatgccagctaccggggagaatagcaaagcagggggcgggaacgacccactctccgtctccggtaaaaaggtacgaactaatagttccacacactttcttcaagctgaaatagtgcagatattcgtaggcagttgtcaccaccaatcgaccaacggcctgaagacgaactaggaccttgtttctcaatccacatcacgaagcacagtatgggaggaccatttcacaatcgctgcccgg

SEQ ID NO: 366650 - DNA, 126 bp, Zea mays
gccactctttcggcttcgcgtcagtctgcatgccacggggggcactctttaacctgggggggggctcgacctaatctccttcacccgttaccccggacgaactactggatactcacctctgcttca

SEQ ID NO: 366651 - DNA, 187 bp, Zea mays
gccacgcgttcggagacgcgtcagtctggatgccaaaggggacactatctaagtagggggggggcaggacctaatttctttcacccgtaaaaccgtacgtactacaggaaacactcgtctgcttcaagctgagatagtgcagatatttctaggcaggagtcatcaccacttgaccgactacttaaag

SEQ ID NO: 366652 - DNA, 145 bp, Zea mays
gccactcgtccgaatacgcttcagtctgcatgcaagggggaacactaactaagtagggggcatgcacgacctaatcaccttcacacgtaaaaccgtacgtactactggctacactcctcggcttcaagctgacatagtgcagata

SEQ ID NO: 366653 - DNA, 158 bp, Zea mays
cccactcttccgcacacgcttcagtatgaatgcagggggcaatattaactacctagggggcaaaaacgacccaatctccttcacacgtaaaaccctacgaactacaggctcctcaccactgcttccatcattcatagtgcagatatttctacacaaga

SEQ ID NO: 366654 - DNA, 147 bp, Zea mays
gccactcgtacgaatacgcttcagtctggatgcagggggcaacaatatctaagtagggggcaagaacgacctaatcactttcacacgtaaacccctacgaactacaggctccacaccatcggcttccaacttacatagtgcagatat

SEQ ID NO: 366655 - DNA, 278 bp, Zea mays
gccactcgtccgaatacgcgtcagactgcatgcaggcggcgacactacctgcgtagggggcaagaaggacctaatctctttcacacgtgaacccgtacgtactacgggatccagaccacggcttccagctgacatagtgcagatattctgacagaggagtcagcaccatatgacagactgcttaatgactaaccgagactgtgggccccaatccagagtacgaagcacaggttgggaggacctttacccgatcagtaacagggaggacaatacaggaa

SEQ ID NO: 366656 - DNA, 291 bp, Zea mays
gccactcgttcgatgtcgcgttagtctggtggccgggggcactactatctgcgtagggggcaagatcgacccaatcactttcacacgtaaacccctacgtactacgggcaccagacctcggcttacagctgagatagcgcagatatttggagataagagtaagcaccatatgacattctacctcgagacaaactgacactgtgggtctcaatccagaaaacgaagcacaggttaggaggaccatatcccaatctgttaccgggaggacaattcaggaaccctttacccgtc

SEQ ID NO: 366657 - DNA, 202 bp, Zea mays
gccactcgtccgaactcccttcagtctgaatgccgggggtgctattaccttcctagggggccatctctacccaatcactttcacacataaacccctacgtaccacgtgaaccagacctcggcctcccgctgagacagtgcagatattttgacataagagttagctccaattgacaaactacctctagataaaccgacacttt

SEQ ID NO: 366658 - DNA, 391 bp, Zea mays
cccacttcgtccggttggcttctcctccccctccggttggggttcgggttcgtgaggttctccggggttcgggttcgtgggtgagcggatcgagatggcggcgtcggatgttgagtaccgctgcttcgtcggcggcctcgcctgggccacggacgaccactccctccacaacgccttcagcacctacggcgaggtcctcgagtccaagatcatcctcgatcgggagacgcagaggtcccgcggcttcggcttcgtcaccttctccacggaggaggcgatgcggaacgccatcgagggcatgaacggcaaggagctggacggccgcaacatcaccgtcaacgaggcccagtcccgcggcggccgtggaggcggcggcggtgggtacggtggt

SEQ ID NO: 366659 - DNA, 241 bp, Zea mays
cccactcgtacggattcgcgtcggaatggatgctgggggtaacactcactacgtggggggcaaaaacgacacaatctccttcaaacgtaaaaccgtacgaactacaagttccacaccactgattcaagcagaaatagtgcagatcttcttagagcaatgtcagcaccaatcgacctactgccgcgagacaaaacactaccttgggtatcatgacagatgacgaagcacagattggtatgac

SEQ ID NO: 366660 - DNA, 280 bp, Zea mays
cccactcgtccgaagacccgtgaggctggctgccggggggccgactaacagagtagggggccacctctccccaagaacgttcccacataaacccctacgtactacgggaagcaaaggtcggcctccagctgagacactgcagatacctagacctaagagtatgctccaaatgacagactgccgcatgaaagaccgcgaccgggggctccaatcaagatacggaaccactgcctaggaggcccatattccgaactgtacaccgcgaggcgaagacaggaac

SEQ ID NO: 366661 - DNA, 220 bp, Zea mays
atgcttactggagtgcacaagcacgggttatcacttaaccaaaggagggacacaactttgatgactataacactgatgaacaccatatacagagcatcgtatatgctgatcttagaaataaaccgtcccttcgcgtatcgtggtctacgtataaataggccccacaacgagaagtacgctagtatgctattggggatgataacacaagctaaccacccgg

SEQ ID NO: 366662 - DNA, 128 bp, Zea mays
cccacgcttcctctaggcatgtatcatgcgcacacgtaaacgtacacctacctcggcgagcaatagggaatacgctgatcggagcaacgactcccgcagccatgccgacggcgagatgcagggccacg

SEQ ID NO: 366663 - DNA, 176 bp, Zea mays
gggccgggggggtgggaaatcccaaaataaacccgcccaaagggggttaaaagggggctatacaaggaatttactttaggggcaaaaaaaaataggacccctccaggcttatttaaaaaaaaatgcatgggccccggggcaaaggaagtccggaaaaaaaaatctaaggggtgggg

SEQ ID NO: 366664 - DNA, 242 bp, Zea mays
cccacgcttcctcattgaccccgtggaagcgggggcgcgcgcgtatccactcgtcaaccaagtggagcattcactcacgctagaccgatgctggggggtgacgacgagccagtcgccggcggattgaccagacgctgtgtgatggactgataaggactgcctgtaggagggagagagctttcgggtaataaaacatgagggcgccgctggctggactgagagagcggatggaaggaaggagc

SEQ ID NO: 366665 - DNA, 357 bp, Zea mays
ggggaacggggatttttatcccacaactattggggcgggcttaggagacaccttaaccacacaggggaggggacgatctaaatacaaatgggggggtacccaaaatggcccccttaggggggggaaaaactgggcgggttgaccccacaaggccccccacacttttaagttttcccgggcaaaattttccctggggctcccccccccaaacttggaaggccgggcccggttggccgttccactaccgaaaagggggggaggtgaccccaatttccagaaaagggggccccagacagggcagaccccccaacttcggaacgaaacgaaacgaaacaagaaccgggggggggggggggg

SEQ ID NO: 366666 - DNA, 183 bp, Zea mays
agcacacagcccaacagaatttaaaaacacacactagtggctatcaatccgaagactagaccgccaactttgctcccgggaaaaaaactgagtcctgcatgagtcctgcctctgtagcatagcccatgcgcgaagcctttgggctacagcaaaaatgaccaattcatttctggcaccatttag

SEQ ID NO: 366667 - DNA, 394 bp, Zea mays
ttttttttttttttttttttttttttttttttcttttttttttttttttttttgttttttttttttttttttttttctttttttttctttttttcacttgaaaagaaaaggggcccccggcccccccccttttttttaaggggcccccccccccatccggaaaaaagggggggccccggccttggggttgccccccccccccccaccagtgttccttttaccccggcccgcaaaaactacataaggggctggagtctcttaaaaagggcccccccccatcaaaggacaaaccaaccccttgccaggggggtaaactaaaccctttgaacaaaggggcataatatccccccccccattaaaaaaagcccgctttttttttccccccccggggggg

SEQ ID NO: 366668 - DNA, 263 bp, Zea mays
  unsure (1)..(263): unsure at all n locations
ttccttttttttttttttttttttttttttttttttttttttnggaaggaaggctacagtagtcttcatgaattttggaaatttcgaatacatgtcttgttctccattaaagcctgttgtaggtttacattgcaggagtacaagacatgtttacctacaacaggctttaatggagaacataaaaaaaatgtcaaatttaactgcaaataatcctccgcagaaaagaaaaccagatgagctacaattgctgatgtacaggaatt

SEQ ID NO: 366669 - DNA, 305 bp, Zea mays
aaaaccactaatcggggatttatgttttccttggcccaacctgaaagagggatcagggttacaatcactttaaaccttatttaatacaagggaaaatcctgatcactggaaacaacaaagtcttttagccgggacctattaactacatagtctatggaagcaacgtcgccccttgagacaattgacaaccaaaaaaaaaaaatgggccaaaccatttttcaacactgggttttggcaatttgattggaccgggttagggccacagggttctcacaccaaaatccctttttgcctgactgggggcc

SEQ ID NO: 366670 - DNA, 234 bp, Zea mays
cataacaatcgattaacagtaagtagctgtgacaccaaaaaaaaagaatagtaagtaggatacattacttggtctgaaaacttatgtgtggactttcaactgaaagcagcagcttaactgaagaagcttagttccctttatacatcccaggcccaggtgaagtcaccaaccaatcctcctaatcctaatgtttttttctctctcaagcagtttattattcacaacccagtcaac

SEQ ID NO: 366671 - DNA, 436 bp, Zea mays
  unsure (1)..(436): unsure at all n locations
ggttattattctgtgtggtcatggtcatgaaattggtccgtgtatgctttctggaagcttacctgccctattgggaagtttgctgatttactttctcctcactcttagccgggtcttcaaattagttgactttgtaaataaataaataggatggatggttttagcactttctatttagacctggtaatgttgatacttgtattaacaggatccaagctattgattaatgaacttccatccattcttgatggttcggctaaagataaggcacaaccacaggatgactccaaagctacactggcaccaaagttaaattctgaggagtcatggctatcgtttgacgaagaagctaaagtgctgcataacaaggatggcctgngacgcgcgcaaagctgcaactcataaaccaaaacagtgtacccgatgtactagagat

SEQ ID NO: 366672 - DNA, 474 bp, Zea mays
cggacgcgtggggcgcgactccatccacgcctccctgggcctccccgtctccgatcgctccctccgcctcaagctcctcgcctccgaggagcagcgccaccgcctccaggaccacgtcttctcgctcgaggaagacctccgcgcagcccagcgccgcatcgacctcctcaaggccgaggccgccatgaacgccgccggcctccgccgctgcgtcgaggaaaaggaagccgtggccgccgcatacgccgacctctccgacaagagcagcaaggagtgtcggctctacgagcgggacctcgagcgcgccatggagtcctgtgacgacctcgccagggagaacgacgacctccgcgcacgcctaaaccagaacacagatttggcagcattgatggtgcaagtgcaagaactacataaggaaaaggagattctgaagatgaatcttgatacggcggaggcagaggtcgtgacactgag

SEQ ID NO: 366673 - DNA, 385 bp, Zea mays
cccgcttccatctcagcatctcgctcgtccgccgctcgaggtccttcctaatcggcggccagccagccagccgcagccgcctcctttggcaagaaggacactagttccacctgttttcttgcaaaagagcttttttttttcttccatccctctctttttcttccccatcgttcgtgtgctgcccccaagaagccgggagctagctagctagcgagcggcccaccggccgagtttggagctagcacgagcaggctgctgtaggcgttggcagcacgctctctttctttccctctcggcggcatgccttcggcggcattaaatctcggcacggcggtcgagggcagcttccaaggcgccggcggcggcatggtgccgtccgcgcgcc

SEQ ID NO: 366674 - DNA, 107 bp, Zea mays
cccacgcgtcctatttgcatttgtaattgaagtctgtcgctttaagcactcttggttctaaagatctctgtgcttttggggggtgtttttgcattgccccagattcc

SEQ ID NO: 366675 - DNA, 261 bp, Zea mays
attcaattacaccgactgatgcaggcgggctgcttttattattgagaaatgttcatacatcatgaggatggggtcctttcacagggcattcacacactactcttgctaccaagtttgttcggccagactgattgtctgatgcaaaaaagcacaaacaaaccacaaggtccacactaccaaacatggcctgaccaaccaatctacacactgtcagggcacgcataataaattttagtttcacaccacaccagagggcaaggg

SEQ ID NO: 366676 - DNA, 126 bp, Zea mays
cccacgcgtccatcagacctgctgtcaatggagttcatcctgtcagaccttctcctgatgctcctaatgactgcatacacattcaattgctggctgaggttatgagatgttcctcaacctcaatgc

SEQ ID NO: 366677 - DNA, 340 bp, Zea mays
attcttttgatattttacttggagctctggctgaagagtccaaggcagcagatgctcctgggaaagatgaagttggcaaagcttccttgacattaataacactggctagcaacgagccctctgttacagaaggcagagttgtagacgtggtggaaacagacacaattttgggagcaggaaaagatgataaacaacttgaccagccacatggcttccatttgtcagatctggtgtctagatgcatcgggagctcaaatagatccgatatcatatgctatgtcagacgcaacacaaaaggaagagggattactcgtgtttcgtccgctctccctgtgagagc

SEQ ID NO: 366678 - DNA, 456 bp, Zea mays
ttcctttttttttttttttttttttttccactgaaaagatggccgtagtcacacatatataacagagtagtgtttttcacactcagaattgggccttccacagactcatgaatagagtacaaaacaccaggatttgtaggggagacacaacctagatataccagtattgactaataaaaactcacgacagtttggttgaatttaacaggtatataatgctatctgtttcgctatttcttatctatgggttaccttctgtttccaactttgtatgcatggccaacatctgccacatttgacaattcatagaatcgccaatcttttaaaatgatctacacagttactgttgcacaatgcgagacagacaagcgatccatctatctagtacattccttcggatatcacttcactgttcagccttatgaacagattactgcgaagctcaagccgctggtt

SEQ ID NO: 366679 - DNA, 283 bp, Zea mays
  unsure (1)..(283): unsure at all n locations
aattattncctcnggaataaagtttctcatgttattcttgggaaggctgtatatggctcaaagtttcccttagaacccactgatgctgttccggttgaacaacaggaaacacccaaatcaagagaggactctcttagaatgtctccctcaagccggagatggaggctttggctcaatccctttcggataacaagatcccttcaacgtagtaacagtgattcttccgaagacattttccttgactcagagtctgttttgagtccaatggatgatcaaactctgg

SEQ ID NO: 366680 - DNA, 471 bp, Zea mays
gaggttcttgcgctcctactctctctctctctctctccctctccgcggagtggagccggagtcgagaggcaggcagaccagacgaggaatgcttccttcttcccatgccgccgccgtccctgttcttctcctccctccctaattccagtgctctcacgtaccacatctgaggccgcggcggagcgtgacgactacgaagtctgtcatgatgagccgcgaggataccctgaaagtgcagaccctcgagctcaaggtgaacatccactgcgacggctgccttaagaaagtcaagaaggtgctttacaagatcgatggtaaaacgttcttcttctttataaagacgcgaaccgcttgccttcttttttggtattgattgccgttctttcgtggtcggcttctctgcctgccacggtgagacttgagagtgagaccagcttaacccggagggagaggctgctcgcctgctctttt

SEQ ID NO: 366681 - DNA, 512 bp, Zea mays
gaaaaggataaggcattatgcatatataacgaagaaaatcacaggttaaaggagaagttagctgagttagaaaaggaacgcttgatccacggtgaccaggaagttccagaagccataaaacaagatagcacagaaattgttctgcgtgacattgaggttgagccttgcacgtcaccgagaagatcaaatgtgaacaattcaaggtatgacgaacttgtgaaacttgactcaagcttagagcaaacgtcatgtgtcctcaaggaaatgaacaacaaaaatatggatcgcagtagtagcctcagtaggaatgagcaagagaagcagctggagtgcattttagtatctatcatgaaactatcaaaagattttgtagagatcgagaaaaatatgtcagcggaaagaaccgaaaacaggtcagaagaactgagcgatcactgtaaccacatggttagacaaggcatggtactaacaagatagggcttttgtataaacaaatgattgaagcgaggcgt

SEQ ID NO: 366682 - DNA, 78 bp, Zea mays
atggcattacacatataacaccaataagggctcaccttaaaggtgatgtgatggtactaataaaaggaacgcctggtc

SEQ ID NO: 366683 - DNA, 511 bp, Zea mays
cccacgcgtccggtgtaatatatgctgctgcctggtgggtttgcaaggtttgtaatcagatgaacagcgtccaagataaagttagcagctcgttcttgatgtgcaggaatcaaaattgctgtcactgtcccatgtggctgtgctgttgaaccggtgggcggcagcacgtcatctcgccttgcagctgatcccggtctagctaagcaagaatggaatgtgtttgatcttgagttcttgacgtcagtaactggggcatgtgagtaaacacatcacatagataactggagggttgcagctcccatatgcattgtatagcagttaggctaactaagccatgtagcaattagcaacatatgttcaaagaaggagaaggcacgcggacggaggcacgcaacattgcagcaagggcagggaatgtgtgcatggatagaggcaactgcaacgacagcttgcattccttgattccacaagctgacctctcagtcactcagttcttactcactcattccat

SEQ ID NO: 366684 - DNA, 373 bp, Zea mays
gtccgcgaccatgcggtgcaccctgtccgaccctctccggcgctgtctctcctccaccggcgccggcgatcctagcctagtctcttcagctgagcatgcgtaccggctcctgcgccgccaccactccgacccgcagaggctctccgccgcgctgtccgagtcgggtctcgacgcctactcgccgaacgtcctggacgccgtcctccgacgctgtggcgctgcctgctccctcgcgctgcacttgttccactggtgctccccgtggctgccctcgacgttcccgttctccctagcgctcctcgccaagttcttctaccgcgcgtacttcgcgccggacacgttcctactcgcgccgatcacctctgaactgctt

SEQ ID NO: 366685 - DNA, 119 bp, Zea mays
cgtatgatatcaagacctttggttggtgtctgtagtagacactgaacatcgggatcgaggctgagcgcctgctccacctccatgcacctcatataggtgccctttgaatgctctttcaa

SEQ ID NO: 366686 - DNA, 410 bp, Zea mays
cccttttgtccgcggacgcgtgggcggactcgtgggcggagacgcacgcagcccccggtgtgcgctcgcctatctccaatcatccatcgcgtcggcgcagaggcctagttctcacctttcccgtaggaagccgaagttcaggcagcagcgtcgccatcagcaccgatcatggacgactactagcaggagcatgatatggaggtggaggcactgcaggccattctcatggtcgacatcaaggagatcgacccgagtgagagtgggattgccaccaccgtccggtgcttccagatcctactgtctccttaggatgatgattattgcacgagtcaccttattgtcccaattcaactggtcctgatttttgcgcacactgcaatggacccttttgaaccttcactactaaatgt

SEQ ID NO: 366687 - DNA, 532 bp, Zea mays
gctcgcgcggcgccgtcctctcccactctctacgcacgaacacagcacgcgccgcaccccgctctctctctcctgcgttcccatctgcggcggggagtgagcacattgaggacggtctactcctcgttcgcgtgcggttcgtcccgagcgatccggcaaccatgaacatcttcaagaagaaggtcgaccccaaagaggctctcaggaccagcaaacgtgaaatggcggtcgccacgcggggtgagcaaccgagcactgctgaccaattgtttgccactgctgatgatttactgttagtagactattagttcgcattgctacccaggcatcgtggaaaaagaattcaggaatcgctggcacatttgctagtcgacatgtgtgttatattgaaccagactagcacatgttcatgaatctggaatataggtggatatctcataacttatattgttacaggtttggcatatcaaattacagtagctcttcgatttaagaatgacgcttaggtagcagaccttttagcctttattta

SEQ ID NO: 366688 - DNA, 345 bp, Zea mays
cggacgcgtgggcggacgcgtgggcggacgcgtgggcggacgcgtgggcggacgcgtgggcggacgcgtgggcggacgcgtggggccgtccggcgcccgcccgcctgccgcaccggccgaatcatgcgacggcccttaagctgaggcggcgtggcctaagttgcagcgcggcggtcgccccgagtcgtccacttcggccccgacaggctgtccacggtggcgcgaactgcccctcgccggttcggccccgcccgcccgtagcagctcaccagagaactagcctctcggggggcttccccaggtctgcgcgtggcgcggcgccgcagcaaagctccacgcgtgcgt

SEQ ID NO: 366689 - DNA, 387 bp, Zea mays
cccacgcgtccggtgaggttctccggggttcgggttcgtgggtgagcggatcgagatggcggcgtcggatgttgagtaccgctgcttcgtcggcggcctcgcctgggccacggacgaccactcccttcacaacgccttcagcacctacggcgaggtcctcgagtccaagatcatcctcgatcgggagacgcataggtcccgcggcttcggcttcgtcaccttctccacggaggaggcgatgcggaacgccatcgagggcatgaacggcaaggagctggacggccgcaacatcaccgtcaacgaggcccagtcccgcggcggccgtggaggcggggcggtgggtaccgcggtggccgtggaggcggcggctacagcggtggcggtcgc

SEQ ID NO: 366690 - DNA, 347 bp, Zea mays
ctcacgcgtccgaccacgcgttcgatccttgcttgcattggaggagcactattatgctttccacgacagctcataccaagcctcacatgatgctggtgccgatcccgatgcacggtcacatgacgccgaacgagcagatggggcgcgccctccgtgccaggggggtctacgccatgctcgtccacacggagctggaccactgccgactgctgtgcacaaaggatgagcatgccaccatcagtgacgacaccatggacccagacgacggcttgttcgtcgagttcataccgaacaggctatctttggaggacgaaccgagcacgcttcgtgcgtaccactaggcgatg

SEQ ID NO: 366691 - DNA, 93 bp, Zea mays
cttatgcgaactattacccttaagatgaatgaatgctcaatgaatagggtgaagaggattctttgaatcactcttatttcatgcatgcacaag

SEQ ID NO: 366692 - DNA, 214 bp, Zea mays
gggacactgaggtacaagccagacgagctcttaatggcggctgatcttctcaaaagcgtatgtgaatacaagaaaggccgtgaaaccgtgcaagcggtcagcgacctcatcaaaaagcggagcattgtggtgcatgcgctgaaaaagaaagtcgagcttgattagtcgaatgggcgcaccgtggccaggaaggcgaccaacctgcggctggcta

SEQ ID NO: 366693 - DNA, 384 bp, Zea mays
gagttactgaggaacaaaccacacgggctcttcatggccgctgatcttctaaaaagcctatgggaatgcaacgaaggccgtttcaccgcccaagaggtgagggatctcatcaaacggctgagcactctgatgcatgacctgaaaaagaaggtagagcttgataagaggaatgggcgcaccggatccatgaaggcagaccaacctgcggccgcttagtgaggccgtcacactctatcatatccttaccgagggcacttaacgcgtcggcggcatgactcggaaggctaatctcacgttttgctgtacagaaattaaggataagactgttttcatgtacctgggggagactacggtgcaattgttgaaaaccttgctaggtaacca

SEQ ID NO: 366694 - DNA, 247 bp, Zea mays
gctttattgaggaacagaacatacggcctcttcatggcggctgatattctaaaaagcctatgtgaaaacaacgaaggccgttataccgtccaagtgctgaggcacctaatcaaatggctgagcaatctggagcatgacctgtataagaaggtagagcttgataagaggaatgggtgcaccgcagccatgaaggcgaccaacctgcggcggtttttcgaggcctacacattctatcttattcttacca

SEQ ID NO: 366695 - DNA, 153 bp, Zea mays
tctttttgtactcttatgcttactactactggtgccttaataaatagtaacatctcaagaggttggaacaccgagcgtgaagattggaatggcggaccaaagctaaatgataatctgggagagcgtgaacgagtgttacccagagtagcatgt

SEQ ID NO: 366696 - DNA, 165 bp, Zea mays
gttatttgtagggctaagaggaagatcattgtaagagctattaatgttgtctaaatgagctttgtgaacaaagaagttgagggttggacgatagaactgtttgtggaggataatttggtgcagattgagatcgattagaaaaatgtagtaggagatgattgatat

SEQ ID NO: 366697 - DNA, 162 bp, Zea mays
gttatgtgtacggctaggagcaggatcattggaggcgccattaatggtgactaattgtgcattgtgaacacagaagttgagggtatgacgatagtacctatcaaaaaagatattctggtacagattgacaacgatttgaaccatgttgtcggagctgatgaa

SEQ ID NO: 366698 - DNA, 370 bp, Zea mays
gccttactgaggaacaagacacacggccttatcatgggcgcttatcttgtcaaaagcctatgggtatgcaacgaaggtggcttaaccgtgcaagtgctgagggagctgagcaaacggctgtgcaatctgttgcatgacctgaaaaggaaggtagagcttgatatgtggaatgggcgcaccagggccgtggaggcgactaacttgcggagacttaaagaggctgtcgcactctatgatatcctgacgaggggctcttaacgcgtgctgagcatgactcggaagggtaatctcacgtactgctgtacgataatttaggattagatggtttgcatgtaacaggcggagactacggtgatactggggaaaacct

SEQ ID NO: 366699 - DNA, 370 bp, Zea mays
gccttactgaggaacaagccgcccggacactttatggcctctgatcttctcaaaatcctatgggtatgcaacgaaggtcgccaaaccgtgctagtgctaagggagcttagcaagcggctgtacaatccgttgcatgatctgaaaaggaaggtagagcttgatctgaggaatgggcgcaccagggccttggaggcgacgaacttgtggatgctaaaagtggccgtggcactctatcaaatcctgtccaggggttcttaacgcgtgttgatgctgactatgaagggtaagatcacgttttgctgtgcgataaattacgagtatatggttgtcatgtaccagctggagactacggtgcaactgtggaaaacct

SEQ ID NO: 366700 - DNA, 180 bp, Zea mays
gccttactgaggaccaagcggtacggccattgaatggcctctgatgttctcaaacgcctatgggtaaacaacaaaggtcgctataccgtgctagtgctaagtgagctgatgaaatggctgtgcattctgttgcattagatgaaaaagaaggtagagtttgataagaggaatggccgcacc

SEQ ID NO: 366701 - DNA, 112 bp, Zea mays
gccttgtttacggttaggcggtggagcattgtaagggccatttatgttgtctaaatgggatgtgtaaacaatgaagatgagggcttgaccctggatctgattgtggtagata

SEQ ID NO: 366702 - DNA, 70 bp, Zea mays
tctttttgtacgctcacgaatctatacaagggatgggttatataaggtgtcttaatgcaatctataaaca

SEQ ID NO: 366703 - DNA, 175 bp, Zea mays
ggtatgcgtagggccaggaggaagatcattggtagagctattaatggtgtcgaaatggactttgtgaacaaagaagatgagggtatgacgatagtactgtttgtggaggataatctggtgtagattgagaacgattagaaccatgtaataggaaatgattatatgtaagagatcg

SEQ ID NO: 366704 - DNA, 162 bp, Zea mays
gttatgcgtacgtccacgcgtaggatcattggtggttccatgcacggtgactaagagggctttgtaaacacatatgttgagggtttggcgatagtaccgttcaagaaagatattatgggacagattgagaccgtgcagaaccatgttgttggacatgattag

SEQ ID NO: 366705 - DNA, 160 bp, Zea mays
gttatgcgtgcgcccacgcgtcggtgcactggtggagccatttaaggtgactaaaacgacagtgtcaacacagagcatgagtgtttgtccaattgtccgttcaacaaggatatcctgtcacacattgacttagttcagaaccccgtctttcgaaatgatt

SEQ ID NO: 366706 - DNA, 360 bp, Zea mays
gcaacacctaggggcaagacgcccgaccatatcatgggcccctagctgatcaccctactattggtgtgcgacagaggtatgctcaccgcgctgatggtaaggaagctgagcaagcagcgctcccgtgccatgctactcatgatgaggaaggtggagctgactctgtagaacggccacaccagctgcatggatgcgactatctggtggatactgaaagctgctgttgcaatctatgaagtcctgacgagcgtctctaaacacatgctggacctgactctgaacgggaagtacatctattgattaccgatcaagaacgagtatatagtcggcaagaaccacctggagaatacgctgtttatg

SEQ ID NO: 366707 - DNA, 122 bp, Zea mays
agggctagaagaaagatcaatggtaggggtgattatgttgtaagaaaagagctgtgtaaacaaagaagttgactattggatcaaattgctgttcaaattagttaaactgatgcacagtgaga

SEQ ID NO: 366708 - DNA, 166 bp, Zea mays
gttttgtgtaggtccaagaggaggttcattggtagagccattaatgttgtcgaattgaactttgtgaacaatgaagttgagggtttgatgatagaacttatttagaaggatattctggtgaagattgagatcaaatagaacaatgtagtaggagatgatgataaga

SEQ ID NO: 366709 - DNA, 102 bp, Zea mays
gttttgcgtacggttaggcgcaagatcattggaagcgccatttatggtgacgaactcggctttgtaaacaaagtagatgatgttatgatgatagtactgatt

SEQ ID NO: 366710 - DNA, 92 bp, Zea mays
cgtacgcctacgaataagatcactggggattccttataccatgtcgaattgttttatgtcaacaaattacttttgctattgagcatataaca

SEQ ID NO: 366711 - DNA, 277 bp, Zea mays
tctatgcgtacgcccacgcgttggatcactggtggcgccatttaaggtgactgagagaacttggacaacacataacataggcgtttgaccatcgaacctgttcatgaacgctattctggggcacattgacaacgattataaccgtgtcctccgacatgcttaaagggataggctatcgttacgacagcctcccttaaatcactggctatatttttaccgatttctaaagggcctaaatccttagttagccttacttagatgattgcttaatgttgct

SEQ ID NO: 366712 - DNA, 387 bp, Zea mays
gccacacgtaggggcgagaggccggaccatataatggaccactagctgagcgctgtagcaggcgcgtggcgtagagatatgctcagcgagcttaagggaaggatgctgagcacgcaacgctccccgggcaagcgaccgaggatgaggaaggggttgaagattctgtaaaaggccaagaacagctgcacggatgcgtctatgtgctgaatactgaaagctgcgagtgcctactgaaaagtcaaggccgaggcatgtagaaaaaaagacgggtcctggctcaggtcgggaattacatccatacgaatacgtgcaagactgtgtatatagtcggcaagtactacatgcagtatgcgctgtttatagatattgtaacttgaaggatcaaac

SEQ ID NO: 366713 - DNA, 346 bp, Zea mays
cggacgcgtgggcaaagaggccaagagcttagcttttacctaaagcagctgaggtacctcaccatcaccaccaccgacaccaactgcgccgaggccggaggcggagtagagccagaccagaatggtattggggggaggccctctaggcgccatcattggccgctacccctacgcctccgtcgccgccggtgacgattaacaaggggacccggtacccggaggaggcgccattcgccatgaccgcaagtgccgggactggcccttcctcgttcatttcgccttcttctggggtgccaagaattggaacttacggatgcgattcaaccagggcaactcactcaggctt

SEQ ID NO: 366714 - DNA, 261 bp, Zea mays
gctacttttaggcctatgtggtaagtcctgcacacttgatcgaggattagaaacattcacagggtgaacactatattttagtgagtgcagaaattgccaattgtggtagctatactggtattttttctgttggatttggagcaagctataggaactgaatataagtaattgatcgtttttacctggttataagagatacctacgatgggattatatgatttctatagtgacaacaaatagtattttaagataattcttaag

SEQ ID NO: 366715 - DNA, 80 bp, Zea mays
gctatgcgtacggccacgcgtacgggaattggaagcaccatggactgtgacaaaaagtgctttgggaacactgtagaaga

SEQ ID NO: 366716 - DNA, 158 bp, Zea mays
gttacgcgtacggccaagagcaggatcattggaggagccattaatgatgtctaactggactttgtgaacacagatgttgagggtatgacgatataacctattatgaaagctaatctggtaaagattgacgccgattagagacgtgtagtaggaaatga

SEQ ID NO: 366717 - DNA, 151 bp, Zea mays
gctatgcgtgcgcccacgcgtccgtccactggtgcggctgtatatgatgactggaaccacattgagaacgctatgctggtgggggtacataccgatcgtgttatgatcgatagtttgtggcccatggactccttattaactcagtgtaata

SEQ ID NO: 366718 - DNA, 440 bp, Zea mays
gtcacttgctctccctccaacaagctaattaaggccggtcatccctcttctagctcgtttcattatccatggcggaggagaagcaccaccaccaccacctgttccaccacaagaaggacgaggagcagctcgccgccggcgggtacggcgagtccgccgagtacacggaggccacggtgacggaggtggtgtccacgggcgagaacgagtacgacgagtacaagaaggaggagaaggagcacaagcacaagcagcacctcggcgaggccggcgccatcgccgccggcgccttcgcactctacgagaagcacgaggcgaagaaggacccggagcacgcgcaccgccacaagatcgaagaggaggtcgcggcggcggcggccgtcggctccggcggcttcgcctttcacgagcaccacgagaagaaaaaggaccacaaggag

SEQ ID NO: 366719 - DNA, 160 bp, Zea mays
gctatgcgtacggccaggaggaggatcaatggtggggctattaatggtgacgaattggactgtgtgaacacagatgttgagggtttgtccaaagaactgttgatggtggataatctggtgaagattgagatcaagtagaaccatgtagtaggaaatgatg

SEQ ID NO: 366720 - DNA, 131 bp, Zea mays
gctatgcgtacggtcacaaggcggttcattggtcccgccatgcatggtgactgcttggagtttgtcaacactgatgattggggtttgacgaaagagctgttcatggacgctattctgggaaacattgagtc

SEQ ID NO: 366721 - DNA, 118 bp, Zea mays
tttatgcgtacgctcacaagcccgttcaatgttggtgccattaacgttgactgcgaccacattgtcaacacatccgaagggggtttcacgaacgatctgttcatgatctctaatcttg

SEQ ID NO: 366722 - DNA, 278 bp, Zea mays
  unsure (1)..(278): unsure at all n locations
ttcctttttttttttttttttttttttngccgccgacgaactaataaccagggtaatcctcaaggagtgacagccatgacaggctcaccaggtgcaacatcatcatagtagctctgggcaacatggtttctagttctaacaccatgagctagtttcacgacataggaccgttatatcacgttactgaagtaacaacgacacaatgcaactgctgatttaacaccagagcacaagataactgaccaaacctgggcatttccgatgactactaatctaga

SEQ ID NO: 366723 - DNA, 189 bp, Zea mays
cccacgcgtccggtagattttaattaagatatttttaagctcatgccttgttttataaaatatagatcacacatttttgaaaagaatacccttttattatagccattacttgcgatgtttttgaaaaacgaacgctcttttcgttaggctttcttttagctttacgtatggtgaatgttgtatgttatt

SEQ ID NO: 366724 - DNA, 114 bp, Zea mays
aagaacattgaacagccggcctcctgttctctttcgcatgttaggagggtacaagatgacactgtattgtcgcccttttattcatcgcatatagaggagtgtttgagaagaaaa

SEQ ID NO: 366725 - DNA, 312 bp, Zea mays
tccttttttttttttttttttttcgcagtcaacaaaagcactaaagcgtacgtttacttagcgggtcaagcatatttacgcccacccacaaatgatatttgcaagcagcggtctaataagctgtccatgatacgaccgacagttgacacctgaggggagttatgcagtattcctaagcgtcttactaagaccgagtgcgcaggctcacatctgacagacagaaagggctccagggccaataccacgaacaaggttcactgctactaaatgcagatgacactagctattcacgtggataacctggcctaacta

SEQ ID NO: 366726 - DNA, 193 bp, Zea mays
gtcaccacctgtctttcccccgcgccgtcccacccttgctcccactcgttgcgccgcgccgcgcgatgcaggcccgcgtcgtcgtcttccccgtcaagggccgcgcctggtgcttcgccctcccgcgcgccttcgccgcagcgcccgctgctgatggcgccctcccgcgcccgaccctgagggacctctggcg

SEQ ID NO: 366727 - DNA, 360 bp, Zea mays
gcgcattgcgacgaacgcaaataaagtctttaccaaaatccaatatacacaggttaaaaaaagcctgaaaagaaaaataagttctactgcttgcacacttcctcggccccacatggaagaaaagatttttcagcctttctctagtgccatcaatgctcgctcacggttcacacactcgtgcaccagaccaccacgttgagacttgcgagcctgtgcaactgcgtttgcgcatctggttccttctgggacatatatatacttctctcctagcaggaacaggaacagcaggccactcgctcctgccggagagacgatggagcgggagccgacgagttccactgacatgtgggctatgtatgc

SEQ ID NO: 366728 - DNA, 145 bp, Zea mays
cacagagctcccctacacccacagcggggtgaagcgaatcgcatcaaattcgaccgaagaatcgcgccgctcggcccggccaccatgagcttctcgtccatgagcaagcagcaggtgctggacgccggtgacggggagggggagg

SEQ ID NO: 366729 - DNA, 170 bp, Zea mays
caaatcctcgtccttgccgacacgggcgcgccacgcccgagccctaagcccgcacgcgcattcgccgggctcccgctgcgccccgccccgccctccgctctgtaccggcgccaatcgccggcggagggttgcttaccttgactgatataggcaattgagtatgctgctac

SEQ ID NO: 366730 - DNA, 202 bp, Zea mays
aaacatgtgaataacgtatctgacagaaccaaagaaaccaaaacagactatctatggacaacatggtggtaaataaccacaaatctggcaattcacatagacagtgcatacagtctattcacaacaacatcaacacgatgcatgcagcttcacgcatcctgaagaatctgtagctcaatctagcgctgtggaagcttgatca

SEQ ID NO: 366731 - DNA, 239 bp, Zea mays
cggacgcgtgggttgtcccacgcccgagaccgagaggccgggccggcgcacccaaataaacccgaggagtgcctacctggcctgggcgcctggttgagcgggaaacaaatccgtgggcgtcctgcggctgcgattagaatagagtagaattcatcagcgggtcgccgtcgccattggcgcggtgcgtgtgcgagcccgagccgggcgaagcaggtgaggcgaggggacagacggtacac

SEQ ID NO: 366732 - DNA, 313 bp, Zea mays
ggcgtgacggggcaggtatggctgaacactactgtataatttgagaccgaagttctagataaacattgttcctgtgacttataagacgtacaaagttgaacaactaacaaaagaatttatctaataaattaaatgtctaggcaatgggcaatatttccttcgattgtaaatacaagttcatcttggtttgtcttaaggcaaactgttttttaactctgaccaccatcaatatctaaaatttgatatagatggacgtcacttttatgataatatattattttccttatgatactttttataaaaaatgtcaatt

SEQ ID NO: 366733 - DNA, 481 bp, Zea mays
gcacgaatgatcattactggaacaagtagcttgtgcatgaacgagtaatactgtagatgattggacatgtatgtctattttagatttttaatatttaatgttatatattcagctcataccatacatgaatttgcatttctgtactatactcacttaatgtcctacctgttttgttagcttcaactatccgctttaaactgacaaaaccagaccaaacatatgcaaatctcatatacctgtgaaagcaacaactgatttgccagattggttaattaaacgtaacaataaatagccccgattaaatggcttataaatatacttggatctgttcatttttcacatatcagctattaatgaagccttcactgggttcattttgtactactccattacttatttacagttacaagtattctaagaaacttaatatttcatcatcaaagttgtattcagacagtttcatttacattgctctgatttt

SEQ ID NO: 366734 - DNA, 195 bp, Zea mays
ataatcaatattgctcaacagtatgtcccttgtaaatggtaggatcagagtgcttctgctatgtcatcttcgacacttcctggtgtttgcaacaaacaaagtgcttctatgctgtgcagttcttgtttcttacaagtggtgatggtggtagtggtctggtctctgtgtgagcattggtctagaggatcgtgaagc

SEQ ID NO: 366735 - DNA, 126 bp, Zea mays
ccttaaaaactcatccatcaattactacgccatgttggaagatcaacatttcttggcgcatagtatcagtacagccatgggggtttgttttgacaggaacatactgcactgtcatactactgtttt

SEQ ID NO: 366736 - DNA, 117 bp, Zea mays
agcaaacttgttataaagctttatggttacaatgataagcttcccattcttctgtccaacatcttgtctactgttcgatccttttctccaaaaacagatagattcgaggtcatcaaa

SEQ ID NO: 366737 - DNA, 370 bp, Zea mays
ggtatttgttgttttagcctaggtaatagcctactttattaacagagcatccataactcaacccattctgcagttattgacttaattgtacagttaattgtcttacaactgagcagtgttttcttatgtcagtgcaatgccagtcagtggcggatccaggattgatccaagaggggggctaataaactaagactaatattttttaaaccaaacaaaaaaatataatcgatgtttaatatgacacaacaaacaagatataatgtaaacatcttttttctggttttttatatgaaattttttcatcttattcctataaacatgggactactaccaaataaataatcaaatcaaaactttaaatcaaagcaac

SEQ ID NO: 366738 - DNA, 262 bp, Zea mays
aaacgacaacacagccaacctttgtaattaatgcaacaagcacaattatggctcggtaatcggggtacacgataagtccatgtaatgtgcgcaacaggcgcaattgtgactcgatgatcacgggagacagacagcgcctgcagggcatgcgaaaaatacgcgactcggcaatggcggtatgactcaaccggagcgatccgactaaacaagagtgtcacatagcaatcacatgacgcaaccaagttcgaacgacacaaatatt

SEQ ID NO: 366739 - DNA, 288 bp, Zea mays
tcggtatcattcacggacacacatacagctgagctgcaccgcttaccgccggatcgaatgcgcgtgcacgtttggaagggtctcactctcaccgcctgggggatgattccattccattccgtcgccagcaggccaggcacccgccattatccggacaggtaggcggatacgtctcgacgcgaccgccaactaactgccgcaccgacctcacttgtatgtactggttggcgtctggacacgagtcatgactcatgaggtggagctgtgggtactcggagattgctgagc

SEQ ID NO: 366740 - DNA, 421 bp, Zea mays
atatctcaaggaacttaaaaattcggaatagttgacaggccaagacagcttgaaacgaaagcttcaaatggttcaaacagttgatttagcaacaagttaagacgatgttcggtactcatatacatagacctgcagttgcatgtgcgacatccaatactttggaaatacaggacactatacgaccttcatatcgggataaatggccgtccataggaggagcctacagtactatctgagctccatctctggggggtaaacgaacacgcatcatccaccattaccttcagtatttactttagtgaagggataaaccataagacctggtctcgctcaggccaacggtggtagtcattgcgcccttggcctcggccgatggtaagagtttggacgagttccttggtcccatgctcaaggttgaaag

SEQ ID NO: 366741 - DNA, 109 bp, Zea mays
ctgtatgatctgtgacattgattttctagcttgatcatattgatatatcgtagtgattttctaaatctttatccatataaacaaactaatatagaaacgatgttatatc

SEQ ID NO: 366742 - DNA, 408 bp, Zea mays
cccacgcgtccgttcagcatatgcttcctgaatcttggcgtccatcaagtccaaggccaatggcacctaaccaatataataattttggatctgacaaccccttggcacttagtggtggcactgtaacatcagcagatactgctacttttcggcctccgatgttccctggaaatggctccttgtcaaatcagacggctgtgccaacttcgtcacacatgggcatgaacactcccatggtacaagaacaccatctacgaggccaacagatcccatccctgcaaaagccacctggtccaccacagaattttgctgtacaactgcagaatgcacagccaggacagcctctgaggggtatattccacagattgggcagcttcaggccccacaatccacgggacctgtttcatt

SEQ ID NO: 366743 - DNA, 88 bp, Zea mays
  unsure (1)..(88): unsure at all n locations
cctgctggcttaccagtttttcttattgtgtgttgttttttagcaagaaaaaaaaatggcccaaacttaaacccccgggggatngnng

SEQ ID NO: 366744 - DNA, 351 bp, Zea mays
catggcctacgtgatttgtgagatcaaaaagattggcataggtctggtggggtttggcatcctattctcattccttggtgttatccttttcttcgataggggcttgttagctctggattttctttttaactggagtgggtctgttactcggttggcaatctatgtggcagcttttcacaaagaaggcaaaccttaaggctaaagttgagccatatgcaagtccaggagacaaggacacacatgatatagtattgtagaatgcatactctgtggcagcaatttctatctagcaagtccaagtgctttggcattagaacgtctcttgatcgggatcagtgcctttcttcattg

SEQ ID NO: 366745 - DNA, 396 bp, Zea mays
cccacgcgtccgttctcgcgtccgcccacgcgtccggtccccatccgctccacctctcctcctccactcccccgccccactgatcgcggcggtgagaacatgctctttctacatttcgctgaagttttaagttatattggcattcgtgttgtcaagtctgaactaaagcctcagccaaagtggcatgtctgctaaggtgccaaggtgcctagaagtttgttccagtggcatggcggattgggcctctattcaaacggatattcttggtataataataaagaagctcccaatccctgattacattagattccgtgctgtgtgcacatcttggaacaatgtctgcaggatgtgtcatactgtccaagggtggacccatggctgatgctccccccaaac

SEQ ID NO: 366746 - DNA, 431 bp, Zea mays
aaacattattgacgtggtaacattaaaaatgatgtgataaaactacaactgagaatggcctaataagacaattcatggcaagtctaggcttgccaaaatcacaagacacacataaaagaacatgatttcttcgctttactatagctgtcccccttccctttccttttgctttttttggttgtcttgtacttttcttgtttttctttctaataaattagctctgccaagaaccaaacttggcaacagactattaggaaccaaaagcctcactggctaataaacagagctgctaggcactgaagatgacgttttgctggtagggatcttctgcaactgcaagccctccaactgaaccctggacaccagcgtgaccggcatggccagcgattgaagtcgaagaccgcccagtttactgacttcataaaaagcat

SEQ ID NO: 366747 - DNA, 109 bp, Zea mays
cggacgcgtgtgtacaaccataatgctagaatccagacttgcagggggtccgatccggctgggctcggccttgattacctgctacctgctctagcgcgagcgagagagg

SEQ ID NO: 366748 - DNA, 55 bp, Zea mays
gttacagctagttctttttgtatgtaacaattgtcagcaatcaggatgtttaacc

SEQ ID NO: 366749 - DNA, 382 bp, Zea mays
cccacgcgtttttccacgcgtccgctagatgttaatgttggggctatattgaactttgaggagcaggagcaacatagtaagtctcctcgtccatttgacccttcagttttggagagttacctattgaagacactgccttctttcaagcagctggatgactacaaatcaataatggtacccatgctacgatctggacattggacattgtatgttgttaatcttcagattggacgcatacatgtgttagattccaacccttatggaccagagatgggtgggactatctggaaaaattaccattgtatacctatggatttgggtgataggaaggtttcatgggccatgttaatgatgagtaggctcaatctagctattcaaaatg

SEQ ID NO: 366750 - DNA, 378 bp, Zea mays
aaaaatattgtaacacttgacactcatgttgaagactatcagaggatgatcgacaatcttcaggttgaggtttctcagttgaaaaaggaattagctgagaaggagcatcagttaagtgtaaagcctactgaaaaaaactgcagatagtgagctatcttggttaaatgtcttgagccaggaaactggtgagaatgttcaagaacgcataaatcttcagaaggctctgtttgaactcgaagaaaccaataagcgaaaccgcatggaactccagcatcttgatgattctattgcaaggcatcaggtgaaagaaatggactctaccattctccaagctttaacatcaaggagacaagttattcttgacaacatccgtgataa

SEQ ID NO: 366751 - DNA, 321 bp, Zea mays
aaatcaactgtcagctttatatgcaacatgttagccactgaaaatcctccagtctcgaggcacatgatgacagcttctttctttttgcaacacacatgatagctgatgttactgttggttttctgaagcaactagactagacctcactagtacggcaaaacatcctctttgtacgaactacgaagggaaccaatttacaacctgtgcatggtaacaacaggcaatgggtgttatgggctatgctcttggatgcttttgaccctcttctcgtggcagcatcctaaatcctgcttttgaatgtaagtttaaccgtttgaagcc

SEQ ID NO: 366752 - DNA, 345 bp, Zea mays
ggaaatgttatattttgtggacataagatgctgcggatgtggtatttggcctgccccggtaatcataaacgcgtctgcgcgctctttccggataagagcacggtctgtctctttggattatcccagtaggactgagcagaagaatgagactaatctagtggtggtacgaccagagcgaatgctgcgggatgattttgtcgatgcaggtgcagaccatggaagtggcagagcaactgcagatttcaagaaggcagttccatccttcgatgctaatctgagaaacctgttggatgagcaactaaaaccaggaaggcccttggatcataactcgggcaaggtggcaaa

SEQ ID NO: 366753 - DNA, 118 bp, Zea mays
gttcctgtcgtaggcgaccacccactcgccgggcttcctcgggctccacatgggcaaggacggcttctggagccgctccggcttcggccgcggcgtggtgattgggctcctcgacacc

SEQ ID NO: 366754 - DNA, 157 bp, Zea mays
aaccccaaccaatattttttccagcaggggaataaagttgccaaatttaaagttttacacccccccttacaagggtggcaaattggtctaatttgggggacccaattgaaagattttgttactggaaaacaggttcccccaaaaaaagttcaaaatt

SEQ ID NO: 366755 - DNA, 391 bp, Zea mays
cttctcctcagtctcggctcaccccctcccccttgccgatctaacgggaacgcgtctcacagcttccacgcgactgcaccgtgccacccgaggctcgcccccgctgagccagcggagcgaatctccatggcctccacatcctcctccaggtacgcgaaacatcgtcggatcggagaggacgatgagttggaggaggttgaggaggaggccgaagaggagcttgagcggttcgatgatttcaccattgcttcgtcatgggaaaagtactgcaaatctgcaataatgcttacagtgatgctatccaagtttattatcctcatgtttggtcaattttacttatgcataaaggattgttaacagtttcttaacatctaggtttatatctgagata

SEQ ID NO: 366756 - DNA, 381 bp, Zea mays
cggacgcgtggtttcattattactgacctgacccataagacctagctgattgctcaagatagttatgcaattaagggtttcattctaaatattcataaacctgggatcctatgttgcatggcaaagcacccaaaatcattctgactttatgcttgataaattgataactggcatattagttgttacagtcaagcatcatgattatgaatctagattttattaatgagtcaagcatcaagtacttatgttaaatactcttgcttgcatggacttcttgagcgaaaacactatgtgacgctgtttgcaggagacatactttgctacagattctcaaggagacaacaacacaaaatcatataaaacatagtaccaaacatgaat

SEQ ID NO: 366757 - DNA, 378 bp, Zea mays
  unsure (1)..(378): unsure at all n locations
cttttgagaatggtctgttttgttacaagcttctcttagatagctgaaagatggatttgaatatggtcgtggatagtaaaattctgtaacaacatttttgaaaattgttttaaaacttcacataaatccagtttgatcccttaaatgttaggctacacttttaacagagttgtcgctcatttctagaagaaaaaaaggatagatttagtttctagataatctcacatgatttatggagttangagttttcttctatgatgatttgagttatccatgtctcgcattgggatctcgtggcggatgatgatggagctgtgatggtcttgcgtggtttgtgttgttggagatagcaatatagcatcaagggggctacgacag

SEQ ID NO: 366758 - DNA, 392 bp, Zea mays
ggcgggagcgagtgagcaggggcgtacgtccgtcgtcaaggccatctctctcctcctcacttcctcccctcacggggacagccacgtacaaaggcagctcgccaacgcccagcacctccctcgccgtgcgcctttaaagacagcgcgcgacaagcttaaagctgcagaggaggtgacacagaggccagagccgtcgcgcgcgcgcgaaaccgaaagcagagaggagcggcaatgtcggtgaccgcgcggctcgtcgcggtcgtggcgtgcgtcgtcttggcggccgtggcggtggcgccgcggccggcggcggggatcctcgacccggtggacttcctagcgctgcaggcgcgcgggcggtccctggacgacatgcccggttcggcgttctt

SEQ ID NO: 366759 - DNA, 184 bp, Zea mays
ccacggggccaaggaaacaggccccttgcctcccctttttttattgggccatggaattattacatccacaaaaccacgacaaagcaccaacttataaacagggggagaccattattcattggggggctaacaaattatggggggggggctctgatggaaacctttgcagccatgcctaggggga

SEQ ID NO: 366760 - DNA, 238 bp, Zea mays
cggacgcgtggtcgtgtcgcgtgggcggacgcgtgggcggacgcgtggggaagcaatctcatgcacccgctgttgctcacaaggttcttctatccataacaaattggcatccacaaaattacttggatgatgtacttcatccatcagaagtacaagatcgaatactcgaacgcttaggtccagcagcttctccagaaacagctgctcatccagcttaacatggcaaggatcatggagc

SEQ ID NO: 366761 - DNA, 417 bp, Zea mays
cttctctctcctctcgatcgattgcttcctccaccgaggcgggggaaagcgccgcccagatcgccgtaggcaagcggcgatcactccagctttgagcataaggtaacgggccgccgcccctcttcctctccgtcccaacccgattggcgatttcttccgtaggacttgcggccccggtcagatcttgctccggtactcgctgctggcccgatcgaaacctggagttgcagggtgggagcgaacgccatccaatagagtcttcccctacggcgacggttggcggggcgctttacccgtccagactatcccgttccttccccgattcagcccttccgaaccgtgtttcgcccctgatccacctgatccgcttgctctgttcctatgaccctgctgacagcttggggatttagtttctgc

SEQ ID NO: 366762 - DNA, 208 bp, Zea mays
  unsure (1)..(208): unsure at all n locations
gacgataataatttttcttggacagatgtgtcagagagaattattaagccatccacaccattcgataggtcagtatacaaggatgctgaggaagatactctgccaagcacatctgatgatgataatggacaggactntaaagagaataagtataaagaaatgatatttggagaagatgctctgaaaatccctccttcagagtcatact

SEQ ID NO: 366763 - DNA, 303 bp, Zea mays
aaaacacaacaaatcttctgctagtgattcaaccaatttagagaacacactcgaagcactgctactctagccacccacagatcaagtagaacccttgagtagaagagcaactggggcttttttacaaatagtgacatatcaagctcaaaattggagtgaagatcctctaaaataaatgggtcaaaccatcccaaatctaatacctctacctacacagtgtagaagggttgatcatatggatgagcgtacctaggagccagaccacctttctctgatttgatctcgacggcaaggcggagcggc

SEQ ID NO: 366764 - DNA, 302 bp, Zea mays
aaagatcgcaaaacaccactatgggatcaaaataatagatatccgtacatttcagcagtatcataattgaatcaaaacaaaaataacaaaggtttaaaagtaaagactccattgcttttgcatcatgtcaaaaacaagcaaagcagtctgtcatgtatctttggcattgttctaaaagaaaaagataacactaaattgagaagagcagaccgagaacccccagatttgagaagagctcccagacccagccccatgtcatcacaccgggagatccaccacggctcaaagcaacctaagctttc

SEQ ID NO: 366765 - DNA, 343 bp, Zea mays
ataaacgaattcggattgctgctttggggtttttacttcttataaacaaatcgagcctcgatagcatcagtcttcacagcaccacagataggacatgtcgcaagccaggctacgcacggcttacatgcacagaggtgttggcatggcaacataagtacgccggcattaccagagttgcagaccttgcagatcagattgggctgtgctgtctccaatgctgtcctcgccatgctcgatgcttcactataacttggagcatctagatcattagatgaaacatgagaattcgcttccagctgcacggtacgaagcatgcggataagtgtctgattaatttcataag

SEQ ID NO: 366766 - DNA, 465 bp, Zea mays
gaaggattctgtaggttttaaaataaatgtgaacgctcatgcttgttcaagtaatgcaatttttaattggtgtaactttggtaatgacaaagataatcatgctaactatgtaattttatgctaatgacaactgtaagcatgcaaacccacagttttgtatgtatcatttagtgcgatctgatgatgatttatgaaagctgtaatttcctagcatgactacacttttaatctctcaccttttggtatctaaggactaaggatagaagtaggctttggattaatttgtaaaaaagtggcgataattagttcaggactactatagttcctttttatttgtacttcactatttttgcccatcatggcattgctaatctgcgcaactattttggtatctaggatagatttccttaagcaggttttggtctaatttgtaaaaatgtggcaatagtaaggagttcaggacta

SEQ ID NO: 366767 - DNA, 226 bp, Zea mays
gcgagcttttttttttttttttttttgttcacccattgagcggtggcggtcaatgagtttattttttgtcatttttttttttttttttgggcaaaaggccggttccactttgggggttctttcgaccgaaagttttacacacatgggggggggtaaaggttaattaaaccatttggggccgggcgggtccattcttgcccgcccaaaaatacacccaacttggggg

SEQ ID NO: 366768 - DNA, 217 bp, Zea mays
ctcagccgagccgagtagccgaccgaatcggcgtctcctccctccgcagctccgtttctccgacgcgctcagccgccggctaaccatctcaattctcacgacgtcaccgcctagtcgccctcactgacgacgcggcgccatgcctcctccccaggatggggtcgatgactccgcggcgcgggtcccgctcctcccgccccctgctccgcgccgcgcg

SEQ ID NO: 366769 - DNA, 293 bp, Zea mays
acggggcaagctgcattagcctccgcacagatagtggcgccgctgtccatgaaatcgccgacgccatctggagcagcggcggctaccttgactgggagggaggcgggagcaagcagggagatgctgggtctgtagaaagatggtggcagtgcataattcgggaggcttggcgacaccccttgcccagatagttctctgattattgccttctttttagactgagaaaaacctcgaaactttaggagggttgtgcattttgacagactcgggccgtcgactgactctagtgatgt

SEQ ID NO: 366770 - DNA, 159 bp, Zea mays
caaaaaagtcaggttcggccccaaatatccggggattaagggctccaagcacccctgttaacggggaattgccattctaaaggctctggaacattggaggattgccttttgaattttctcccgggcctcccaggggtatcaacaaatgccgggcaaatg

SEQ ID NO: 366771 - DNA, 378 bp, Zea mays
cttgtgtaccttcaattggtacaatccctctccttatatagagagggttacttgacccctaagcactagatttaatcttatctctacttctaatcttataccaaactagtctttcgttatctaaacaacctgcggcactgtagcaggccctcttgggccctgacagggagtcttcattcattgataggatggctgaccgaggcctgaccacctgacgactcctgatcagctgttgtagagtctgcgaccaacaggaaaaagtagggcgacaatgggtctcatcttagtctgcgcttgaagaatgttttgaatcaaggtgcaccacaggttgttgaagccacgagccattagaattgcctgcaagctttccctgttaac

SEQ ID NO: 366772 - DNA, 389 bp, Zea mays
cgggaggggagaaaggcgaactcgaattgggggaagagagcgagagacgaatcgcatcgagccggagaggaagtcagagacagggaggagggcggcggaatcggcgccggcgggaggcaggcatggaggacctgagcgtggaggagctcgcctccaacctctccacctacaaagagcagctacgcgaggtcaagaagcttatcaaggagaagaaggatgatgctggaatttctgaatatattgatatggagaaggagcttcaagaggagccatgcccagcaaggtagcatgaaaaggccgcttgcaacagaagatttgttttggggaatttagatttttgtaaccttgaaaggtgagaaggttaattatggcaatggtttgtactacta

SEQ ID NO: 366773 - DNA, 387 bp, Zea mays
cccacgcgttttgtggataacatggggcaacaagtttttctccattgctgggcataccaaagatccatctgaaggtgttacagttaaggaatttgatccgcatacttgtacctggtctattgtcaggacttatggaaaatcaccggtttctcgcggaggtcagacagtgactcttgttggaacaacactagttttgttcggtggtgaagatgcaaaacggtgcctcttgaatgacttgcacattcttgatcttgaaaccatgacatgggatgatgtggatgcaatatggagtggtcaagacccaaacaacaaggcctgacgccaagcccaagagctggccatgctggtgcaactgtcggggagaactggtacataagtgggggtggc

SEQ ID NO: 366774 - DNA, 324 bp, Zea mays
ggaaggggaaatatccatgcccatatttttcataatatttaaataccggccaatatctcaaaaataagcattggaaaataactcatacataagggtcctttaaatctaaactaaaatcctaattgaaaaactgggccatcaactgtttaccctaatggggggcctaactaaatttttttgaatccaagtctccacacatggggggccatcaaaattggggtttaattccattttttccttttttagaactttgctggaagcaggcgtgctgacaattaatgggacaatcattttttgtcacatttgaccaaaacttgcatttgg

SEQ ID NO: 366775 - DNA, 55 bp, Zea mays
ggttaaacatgctgattgctgacaattgttacatacaaaaagagctagctgtaac

SEQ ID NO: 366776 - DNA, 310 bp, Zea mays
atactggaaaaacttgtctaaaaggcatgggtccatgacaacgtgttatacagaaaagactatatcacacatcccactgagggtgcccaaccgcgcacatcacgaacgctcaaaccatcccaaagggtggaatacatttacactcgtatatgcagctttctgcaatcgccaggcggtgagaaaagaaccactactgaagaatctacaatcatgaaatgaaacggacatcctcctacctggggtggttccaaggagagggtggcttgaatggaaagccctgcggagcagatccacgatccaaatcaaggct

SEQ ID NO: 366777 - DNA, 357 bp, Zea mays
aggggaactaaatattttagtatagacaatacatattcttttttttcacaaaaaagggcatcccatggaatacctaaaaatacccctgccgccgcccctgttttttttttacaactatgcccgggagcagggagggtttcacaccttgcgtgcgtttatgcaactttggatctatccgggggcaatcattgtacgatcctttcgaaacacgggatctgggggggaaagggtatccggaccaactatcccgaatcgggagggagcaatccacactttaacctgatagcttcaaggagctgaggggatatgacctccttttcgccctcgtttgggctactttcccttgagcttttttgg

SEQ ID NO: 366778 - DNA, 129 bp, Zea mays
tggctgaatctgttgtgccttcctttttcacgatccatttgttggggtcgtctgcttaaactcttggcgtgatctggacggaacatatttttggcaattttcttacttggacgaagaatgaccatcatc

SEQ ID NO: 366779 - DNA, 163 bp, Zea mays
cgctcgttgcctgtcagccagcctaatctataagctcatcgccgtcgaggcagtgcccagctgctctcttctatttctacaagcggtcaggtagtattattagtatgttgtatggctaatggctaatggctaatggccgatggcctgcgagacaacaccaact

SEQ ID NO: 366780 - DNA, 237 bp, Zea mays
gacgattgcagtgaagtgctgcgtaaatatattctgaagctccgaagattcattcatcaaaaatatccacatcacattgcacacctgcaaatagttggcatgcaacagcaggaccccaagcactcgtacacaaccgtaaggagacgcaccacaagcaactccagctgtgatcacttcgctaccgatttctagttacaagagagagaatattattgacagaactaatgaatctaccca

SEQ ID NO: 366781 - DNA, 417 bp, Zea mays
gaagcgtagaagtcacagggacggcagggggacgaggaggacgacaggagggacagaggctgataaaatctaggacaaaagccctcgagctcacgccgatccgcctcctgcattgccttgaagcctctcgattcgggcagacccgagctgccccgcggagggctcgatctgggcccagatcgagcaggcgagcagcatttcgatccggtgcatgctcaagtcccggcggtgaggcatggggcaggggcacgtggacgagttccttgcagccaaccggcgagctgaggtgatagattggcttggtgggttgctgccggagttcgacttgccgctggattcttcagacgaggagctgcgggagtacctcattgatggcacgggactatgctacattgcagagaaactcatgcccggcat

SEQ ID NO: 366782 - DNA, 369 bp, Zea mays
cccacgcgttttttcacgcgtccggtccgtgctgagattgctcctgcaatccttttggtggttgattttggaggatggtataaagttgattcaaagtcttcaagcaaaaactcgtctcgggtgatacagcacactcaagtgtcattgcttaaggatgttattgtgccttacacgcatttgcttccgacactgctcttatcagagaataaagatcgtcgcacacttctctacttcaagggggcgaagcataggcatcggggtggtttagtacgagagaaattatgggatttgctgggtaatgagcctgacgttatcatggaagaaggctttccgaatgccaccggacgtgaacaatcaataaaagggttg

SEQ ID NO: 366783 - DNA, 216 bp, Zea mays
ggaaaaaaagccctgggtcatgaacagggttctatttgcccatttggtatcgaccggcctctcaatcaatcaataatcctaaatgggggtccatcgttgggccagaagcttggggtttcagcatttcctgctccagttccccaaaaaagattgggggggggatgaaaaccctaagcccaatccctgccccctttcgtttttccatcccaagctgca

SEQ ID NO: 366784 - DNA, 436 bp, Zea mays
cccacgcgttttttcaaacaaggttcgagtccatgtcgcagaacattgtgtcaaagaatatccttatctgctttaaatttattatctttattctgtttgtcttttcaagaaaatgtgaaaaatagagctccgagataagtttctaccagtgcagtcattattgttttgatgttctttaatatagtaatatctgatgccatgcttctgtaatgccaatatgcattttggatgctggtatatttaacaaatcattgcccatggacgatattttttaggtgtgtttgtgcaagcttgtaacgttctataactgaaacaaaccagctatacatacacacaaaatataccattatccatacaatattcttgttccattttgagaatctgtctcctgaccttgataactgtttttttgggctcttctgttagccctgtagtt

SEQ ID NO: 366785 - DNA, 324 bp, Zea mays
gagaatacgatttaaaataggaaccggataagtttggaaagagtaatatgcaatttataggtaccagaatcaaaataagaactcggcacaaatgtaatgactgccagtgaaatttatttttccccttaatatcaccatactatgcaatactgtatcagtccagctactgcattcacgtgagccctccacttaaaacaagcgctgcctggtttatgactcgagagaccctgtaaatctcatgttgtatagattgcaaggattcagaagtatttgttttcttcaccctctcaatggcgtcaccaatgcctggatacacttcagccc

SEQ ID NO: 366786 - DNA, 232 bp, Zea mays
agacggctcttccaaggggctattatcgcagagtttcatgacaagaatcattggtggcagctgacaccaccagcacaaagatttattgcttcaaatgaaaaaaggaccagagggtcattttgtctaaaatccaagtccaaatccatatatgctcctagcagcgatcacattgtcaaagccccaggggtaaaaatagatccatcctagataagctgggatttccatcggacaa

SEQ ID NO: 366787 - DNA, 287 bp, Zea mays
gcaaacatcaagataatctgctttgaatgaaaatatgttcttacattacatgaacatcaagataatctgttttgaatggaaaaaagtctaaagtattaaaaactaaataactatggctgcctactcccaaagcgtcgagctaaaatatcttctttcatcaactgaaaatactgttttccttggtcatccattgtgctcgtgtcaagactcaagtgccattatcaacttgtcatgctggtcttgctccaagtctacttttttcttatgcagctcaaagtatctttcat

SEQ ID NO: 366788 - DNA, 333 bp, Zea mays
  unsure (1)..(333): unsure at all n locations
aactgtgccgcaaaggcgcaaaacagcaatagtaaattttttcacccgttctgctttcagggatacaaatcatgtgacaattaatggatcgatctgcttctgcttttgtatagcactgtgtaaagtaattacacttgcttccactttctcgcccgctacatttaatggtttaaagttattaccttgagtaaaaaaaaagaatcaattaacgcctagtcctgcagacaagtagtctacactgnccaggttgatcgtgacggggaacgacaacaccagcgcgtcatctccgacgacgaccgtgctgacgcccgacggcacgacggtgtacgccgt

SEQ ID NO: 366789 - DNA, 239 bp, Zea mays
ggcgctcttacagcaggttaattaaggcgacgagcatcagcagctcaacaatgcatgatgcaggtgcagtgcagctagctcgatcgctggccgggacctcggttaatagcgtctcggcctcgcgtgagctgtgcgtgctttcgttaatggtagaaataacagtagccagtaggacaagacagactgacagagactaactagctagctaggagcctaggagtagtaccgtggttaataca

SEQ ID NO: 366790 - DNA, 138 bp, Zea mays
actgagcggttttcgtgtgtgttttgcctttcttgtgggtgtgcttgcgttgtgcccacatcctgtcccttgcatgatctggaaacgagcgcagagaagcgtgtaccataactaataaaggtggcgcaacactttagt

SEQ ID NO: 366791 - DNA, 282 bp, Zea mays
gttgggccagccaacaaatgggaacaataaacaatggtactccttacatgacaccggagacttacacgggcagccgattccatcgggtgcaaaatttatcatgcatgatatgggttggtttcaaatgtctttttgcagtgcaacagcacactttatttttttctatgcaacaaaatgaaccaaaaacatacacaaccagcaccatgccacaatcaccaaaacaaaccagaatagacagacctggagcgaaaatatgtttcacatgtgtctgatgccaaggat

SEQ ID NO: 366792 - DNA, 305 bp, Zea mays
cttcatgtgtcgacaaattattactgtcactatatgtaacaggacaacaaaattccgtccagtggccagcaaataacgccaccaaataagtgaatatcgagttgttcagaaactcgttcgaaaaccacatgtacaaaacaccccatatacagcggcgttacctgcttcttttacatccaaggtaatctaaaacctcctcggtttccctaccctagcagattctaatggaaagcaaatgggcttccggcaacaaagtctgttacacgctaggctagcgaaacatggcgcaacagatgacgttgcgc

SEQ ID NO: 366793 - DNA, 143 bp, Zea mays
atagcttattattgacaaactattcaaaatggttgacttttctgaagtgacaaaaggcaggaagaatcttgccttctttatgttagtcttgggttttgggatatagcttgtgccaaatttatgtgtctggttttgtgtttaag

SEQ ID NO: 366794 - DNA, 329 bp, Zea mays
cggacgcgtgttgccgacgagacgtcatagcgaaccgactgaggccgacgacgaggccatcggtggtctggtgaaacttgcagctttgggagctgggagcttggaggagtgaaggttggtgttggtttgccaagtttttgtgtgtgccgggcacgagacatgagaaggtaaaaaatgatatcttttccatgtttcttgtataatcgcttcgtcagcagtaacaagtaaataactcgtgagcctgtgcatgcactgcggagcgtcaggaattgtaagtaagaaagaatccttgacggaagtagttttgtatgcgaaatttacagcacgaa

SEQ ID NO: 366795 - DNA, 123 bp, Zea mays
cttatgcttagtcactttccgaccctcagacccttgcacaccatggtcgatgcctcagctgcggttttacaccttgtgaccccgaccgtgactcgctccactcgtctcgccgttcgcctcccc

SEQ ID NO: 366796 - DNA, 115 bp, Zea mays
cccacgcgtgtgtgtttttttacctgaaggggcaaaggatatgggagtttcagctccctttacaacacagcagccgcaagaggttaagtattcacaccttgacattgtcggaaga

SEQ ID NO: 366797 - DNA, 364 bp, Zea mays
  unsure (1)..(364): unsure at all n locations
caagtttgttttgtaataacaattaaaaattgttagctaattattggtcattaaagtttgaatcttggtatgtgggcaccttataaaagggaagggaggaagtagtactagctatgttaagtaacattttggggttgatgcttgaaatagattatagttgcttctttttttctcgaacatgctatgcgggagagctgtgtatatcattatatttaggagaaaggggggatttgtcttgatcctgaattcggaagacttggccaatcaggtgtacaacaatggntgctgttttcaattctctttctgggtctttcaagttcctgagatggtctagacttgcccatgccangtggtggcctttcca

SEQ ID NO: 366798 - DNA, 438 bp, Zea mays
  unsure (1)..(438): unsure at all n locations
catcatcagtttctgatggacatggacgcccccgccgccggcgcaaccagcagcagcgccacccatgcaccgccggcgcctcaccatgccaccgcgaagaagaggcaccactccggccgcaccaagaccctcctnctcttcgtcgtcacaaactccatctccatcctcctgtccgtcaccttctcgcgcgtcaccggccttgggaccggtggcagcggcggcgactccgcactcgacttcgcgttcagcgtcctctcctccagccagagcctcgccgtcgacctccacaatcgcgtcgaggccaccgacgcgatcatcaagaggctcatctccaactccggaaagatgaagcgggacgcgctgccgncgaagctgacgccggacgaggagctcacggtcgcgctcggnccgcacacgctcccgttcggctacaccccg

SEQ ID NO: 366799 - DNA, 437 bp, Zea mays
cccacgcgttcgatggcacacaagggtataaaaacaggatcatcagacttcaaacttgggaatcataggagaataactccaatcatagcattggagcatttaattgctcatcacttgatcatcaacagttgaagcaggcaacagaagtgtttagacgtagtgcaaactcacacaatgagataagtagcagcattatgagcaaagtgtcaatgatagaaagtgtccataagactccaacaaaggaggtaagcagaaacatttgtgttagaatacaagaaaccagtgacccatcaaaaacagaacttagtagagtgatgctcactgctcagaacatgaaacatcttctcattaatgccaaagcatctctgaagtctgacatgcgaatttaatttccacgattcatcatagctttcattcaacagatagtaaacaaaatc

SEQ ID NO: 366800 - DNA, 388 bp, Zea mays
cccacgcgttttaattctctctccccatggattttgctaaaagtgatcagttacatggaagggacgatgatggattcaatgatgatgaagcttttgatgaatggcaagaatttacaacaagtggcaatcaaggcagcctaatcaaatgcggaacatattgaggaacctttaaagagagatttgtctgagaatgatgtaatagatcccttgcgagtaggcagcaaggaatcacccaacaatgttattgaaaaatcctctaatgaatggcaaggttttgcttctgtgtctggtcaaggaagagattttgtgacatctgtggaacgatcaacaagtgaccacagactaaatttggtgggaccagttggagatgaagagacaatgagcagca

SEQ ID NO: 366801 - DNA, 236 bp, Zea mays
gttgagaatgttgttctatggaactctatgttgtgcgatagtgctctacttgtttgattgaaagaaaagtgatgttgtgttagttggtgtcctatgcaagttaattcggaaagtggtatagaaagttagatagaatgttcctacccttattataacttttaggtgcctaggaataatgaccctaagttctactagtctattggtgtatgtctaagcaaggtagagtgcttatgcat

SEQ ID NO: 366802 - DNA, 150 bp, Zea mays
cccacgcgtttgcccgtttccgccgcgactcggcgcgcgccgcggcggtgtcggcccgagcgacgctggcggcggacggcgtgacccggctggacctgcgccccgcgaacgggtcggcggtgttcgcggcgtacgcggcgatccagggcc

SEQ ID NO: 366803 - DNA, 269 bp, Zea mays
atggtacacaagtccaggttgatggcatgatatatagggatatacaacagcactatcatctccatatatctctccaaaaaaataaacactgaaatctatgtggcaggaatcgactctgcctacatttttattttggattcacacagacctcatgacctcgattgcatggcaatcgtcggaatgcattaatagtccaacaacgcaaaaaaaatttgcagatggctacaccatgcatgccggaccggaagaatctcagtttcgcgcccatt

SEQ ID NO: 366804 - DNA, 152 bp, Zea mays
ggacaaaccaaacacccctccaaactagccctgttaatatttttcgggcgggtaaactgaaaacagattttactaggggtccatttattatagagaactccaacaggggccgggcagccgagcaggcaatggtacacagggctagactgctt

SEQ ID NO: 366805 - DNA, 315 bp, Zea mays
acaccgaaaccgtgcatacatttctatatacagacataccagtagttacctgaaggcacgagttgatcaagctccttatgaattcacaagcctgatctcctaaacacataggaatcatagcgatatagcttccaggcattaagagatgccatataactaaaagcttcaaggtttatatatctcctctagctgtacaaaataataataattatcccagaacgaaaatcggtatcaaaataccatagactgtagcgagacattgccactttacacattttccacactaaacgtatcaaagagagccgtaccatcatg

SEQ ID NO: 366806 - DNA, 334 bp, Zea mays
aggccccaaaaatgggggaatccaatacatccttaaaaaaagggtggttaacaaaaaaaaatacttgggggccgggccaaacaaaaagaaacctccacccaacaggaaactggggggccaaataaaccacacttactttgggtcgaggtttggacaatccaaccggaaaaaaaaaaagggtccaattttaccgggggcattggcacaagggcaaaaaaattttaaaaggggacaggggttttttttaaaaccctccaaaacagccttttgaggggttgaaaggggcctaaaaaccggattgggttgaccttgaaaggggggttgttgggggaaa

SEQ ID NO: 366807 - DNA, 445 bp, Zea mays
acatcattcacagttgcacgaacttcactatgacaataataatgtacatcagttgcatagggtccgtgattcactctaaaactcacatggaacaaatgccgtggacaaaactgaggaagttacgaaaggaagaagggaattcgataagaatctatgcacccgacttagattctttttggtggaactctgcagccttccaccacctcggcagatttgcaatcactcggtagccacaaattgctgcagttatatacacaaaccaacaaactgtaatggaggaatcaacaatcgctatgggaaggttatcactacgccatgtacaagcccctgccggagaatccatcagagtaacctatatttcctttgatattctgacgcacgctaatacatctcctgtcttctcaaggccttttcttcgtccgaagtcctctcatccacgacatgc

SEQ ID NO: 366808 - DNA, 94 bp, Zea mays
cggggagaagtttatgctcgatctcaacactacagagacgcttcagtcaccgaacatgatcagtaacagcactgacagtctatgcgttgataag

SEQ ID NO: 366809 - DNA, 96 bp, Zea mays
ggagccgaacttccaaaacggacttgtttcccggggcaaaaaaacaatgcaacgagttcttttagagggcttgtttggactagccggacgcgtggg

SEQ ID NO: 366810 - DNA, 344 bp, Zea mays
gttgcttctatcatgagcttccgtgccgtactcctagttgcgagtttgcttctggagctttcttggggtgtttctttctctgtcctgtatgtttgcagcaattagagagacgctgatggtgggtgggatggaagggccgccgcatagatccagggaaagagagacgcgtttgtggtccatccatatgactggagagcctgaccctgacgccaacggcaagcagcagtggcggcatccagatcctggcgcaccgactgcacccgcccgtccggcaccttctttcggcggcagcggcactccgcgcgacacggggccgtgtccgtgtgggatgggatgggatggaa

SEQ ID NO: 366811 - DNA, 141 bp, Zea mays
cagaagaaggcaataccaacagatttcataacaaccatccaccttaggggagcaaatgctaataatttatgaacatgagcaattgaccatatatctgttaaacttaacagatgcacccactaataacccaatgcagtcaaa

SEQ ID NO: 366812 - DNA, 478 bp, Zea mays
gttggaaccatctcctcccatgtttctcgatcacacctcctagaaatctcctccggttcttccacctccctgtagttctcgctctcctgccaccattctcttcgtgctcctgctccatatgccctcctttcagtctgctgcttgatgatccatcgcccagctgctggttgatccgtcgcccagctggtaacagatttcttcgtgggtgcagtagtaccataactgacccaccctctaatctttactccgacctacaagggaaagaagtaatgccaatgaaacacagaagactacaaagtctgaacttagaagctgagacacaggaaaacgtggaacaacatgaagatgtccaagatccacaaccagagctcaccattgggtttcctgagggagaagcgccaacaaggaataagtcattcaaaataatatggcaaaatggagttgttcgggaggtttttagaaatttccgaacagctga

SEQ ID NO: 366813 - DNA, 433 bp, Zea mays
  unsure (1)..(433): unsure at all n locations
gggtggagaactttatccttctatatattacgttttggaccaaccaagaaattgacacaagatatcaagtgttgaatataattgatgcattacattatcttctttattgtgttcgatacatttttcatttattaatttacattttaaatgtaccgaagaccctcgtactgaatataattgatgcttattgtgttgtacatatattttggaattccaagcccgtaagggtgtccttacccacatctncaatgacggtgaatagatgtcaacaaaagtaacaagaggaaataaaagaattatggcacctgtgcaggaacgaccagttagagtcactagacaaagagttattgaagtaaaccaagagtctacccatagcctaaatgtttctacatagcccagttcaagtgctgccacaaaccatgatttgacccac

SEQ ID NO: 366814 - DNA, 300 bp, Zea mays
gcacttaaaactgcattttttttttgggccaacggagggagtaaatgcaatcgtaggcgacaaattacccacgacaagattcccagaggagggattttcacccccagatggacccgaaaaacgaacctatccaacagttcccaagacgggaagcacaaacttcctgttgggggccacaagtcgcccagcccataattgcggcgcgatttctttcctttcgagactgacagtgacgggaatagtaatacttggcgaatcaagataaccaccacacatacccacacaccttgggcgggattc

SEQ ID NO: 366815 - DNA, 465 bp, Zea mays
gaaaaagctgaaatgcattgaacttttctattacaaacagttacatgatttgtaagtgtttcctcttgcgagcgaaactaggtgatggcttacatgactgaacattctagcttataaatactctccttcggtatgaggaggtcaagtattgtttaattagattcaatcacggtgggttcagatccttcttattgtccacttggatctcagacctccaacaaatgagctttctcgttcagaatcgtcccagacccttgccatagctcccatagctcattccgtaaccatgacaagtacatgacaggtcccagtgtcgatggcaccaggtacagtaaggctggttgaggagactgagacaagatcccagcagctagtgcagctaccaagccaataccataacctgttacagcataccacacataattccgccgttttgggggagacacatctggtggaaaattcaca

SEQ ID NO: 366816 - DNA, 170 bp, Zea mays
cacaaactaataaaactgcctcaagaagaccttggaaaatggggagcccaaaattgtaattgacattcaccgtgtttgcagaaaattttgaaatgggatacaaggtagaggatttactagaaatagtttaagaggatcatgcccatacctatttaaattataatgttaca

SEQ ID NO: 366817 - DNA, 275 bp, Zea mays
gttgatgtgcatacaactatacaaggaaaacatccaactgtttgaggcacatctcaaaaaccataattcatatccatagtatttccaggacactgcactatccctacaaagcaggtaaatcgcctgactgtatgacctagttcatctcgattgaaccaaagaatcacaggttcacaacccatcacttatctgatcccacatgaaaacttgtttctttagtagaaaaaccctgttacttcccctggcatgggagccagatctttcctcccaaacct

SEQ ID NO: 366818 - DNA, 401 bp, Zea mays
atttaatcagtatcattagtgatcaagttgctggttacatgagagatccaagccggatgattaacaggatgtacttgaccaactctgctgttagagtatttggaaaggatgtgggagaacctggaacagctgaggaggttcgagcatttactacatttcccttaaaaatatttcaaaccttatttggtctccttcagtctactgaagtgtaacggcctgtagttaattgaagctcatttcttcccctgagatgatttccccttttctatcataaccttggttatttatctgttacactaacattgctatcagaatgctactatttgtacaaatagaagatataatgcggactacactacctgagcttatttcatcgcctttgctataactcaggggcacat

SEQ ID NO: 366819 - DNA, 429 bp, Zea mays
cttttcttctagcaggccctccgactacttttatattgggtgctggtgtttgttgcagctagtgggtggcggtgcaggaattttttattccgggggcaggaagaaggaggacgaggaggaggaacaagcgagagatagagagagcgctctcctatcttcttttgcttttggtattgttatcttgggatctgattttgtccccatacataccgagcgggagggaagggggcttgggttttctttctgctctgttctcttcttctcccctatcaccctattcttctcccaaggctgactggccgtcggctcgggtctggggacagcaatccctgccgtcttgccatgctccccacgaggagcacaccgtcaggtccgccttcattttcctattgcttaatcaatcgccttcgcatcattggctactccctc

SEQ ID NO: 366820 - DNA, 209 bp, Zea mays
gcccagtgattttttattttttttttttttttttttggttttttttttgacatagcaaggggaataaaaataaatactcttaacttgggagcccccacgatctaattcgccatgacaaggctccacgcacgcatacttgtgagaaagagagaaacactgctggagctggacccatcgcgccggacacaggctggcatggcaatggcatt

SEQ ID NO: 366821 - DNA, 235 bp, Zea mays
cccgcactttaagcgtaacgcgacaccgacgcgccctcgccaccccgtcacccgttgcgctggctccctccctagtccctatctctctctgccgtctgccccgaaagaggcagcaacccctgcgcgcggggatcttctctcggtgctctgacaggcggcgcggcagcgagacgccgatctctctctcactccccggatcctccttttattacccgcgccggagagaccgatcgag

SEQ ID NO: 366822 - DNA, 344 bp, Zea mays
gtcgtcttctactcgcgctcccaaacaaccatccagcctcctccccttccattctcctccccacgccgccatccgctccgctccaaccacgcttatagcttctatccctcaccggttgttattcctctccctagataagctttatctcaccaaactaatcccgctataaacaaggacccgatttcatccagtaatcccgctataaacaaggacccgatttcatcctttgcgagtaagaagcaaaaaaccaaggtgggcgaggaggcgaagaagcaagggagaaggacggagcgggaggaggctgctgcctgctgctttccctgctccttgacgcgaaggccgcc

SEQ ID NO: 366823 - DNA, 388 bp, Zea mays
ggataggtaaaccattcttattcatctcctctttttatttcttttttctttgttgttgttgttgggtgaaatctccatggctgctccattattgctccctcgtaccctcaattcagaaacagacaccgcgtgatggaccgcgcacgctagtccaggggatccatgagccactcaaggtgctcccataaatctcatactctggttaatgcatgcctaaacgacagccgtttatacggcctgctggagatggagatggcctcagaggagtcaggcctgggcgtcctcgcaaatgccaaaaagcctactgttccattccatcccatcccatcccacacggacacggtcaccgtgtcgcgcggagtgccgctgccgccgaaagaaggtgccg

SEQ ID NO: 366824 - DNA, 251 bp, Zea mays
gagccaaaggggggttcccatttaaccaaaggggggggggcgcaccaaagccctttttttttaccaggacattttttctttttaaatccccccggccaaaaacttcaaaaaaacggttttccctaaaaaaaccggggctttttaccccccttacccaaacccccccaaggccccaattggggctttaaaactgaaaatggcccatttccggccccttttttgggggcccccccagggcaaaaaggcccttt

SEQ ID NO: 366825 - DNA, 322 bp, Zea mays
aaaaaagggggggacagaaaatttttggtggaagtttatggcccttcttttattgggcattcagggatatagaaccaaccgggggggttggggtttccagctcaaaaatcttttggttaacagtttgggcggttgaaaaaaaacaccggaatttaaccgttccgggacataattttacaaattttcccgggcccgggttatttatgaaaaactggggctcaccaacaaaaaaaaatgggccctgcctccagataaatccgggaaaggggccacggggccaatttgttaaatttattaaagggtgccttggcaaaaatttggg

SEQ ID NO: 366826 - DNA, 434 bp, Zea mays
  unsure (1)..(434): unsure at all n locations
gcagtaagttatcatatgctagaattgtactcagcatgacgtttctgaaacacaagctgaacttcttttatctataattaatcaagtttgaggtatcatatgctagaattgtactttcctttatcagacacaggtagtgcatccgtaacagataggagtaacatcgtttccacctttgtttgcagtgtcattctttgaggtgagcaatgcatgagactctgcagtgcagtccaattggcaatgggtccttccactatttttataaagagaatgtttcgatgtattagcttggatagtccatggtacccctattccatgacaagaaagaggtgtctccaagagtccttggcttaatcatgtagagaactacaaaaaccagtgcanggaaaaggcaaaaaccaccaacaatcagatatgcgaaaccaatgaaatta

SEQ ID NO: 366827 - DNA, 161 bp, Zea mays
gggcaaaaaaagggccttggaaaaactgtctttccaagaattccaaaagggggaccccaaatttgggcgagggttcccaccccgttttccccaggtggggaaaaccaaaagaaggcgttaaaaaaaagcctttcccgggggggggcagccccaaattaaaa

SEQ ID NO: 366828 - DNA, 114 bp, Zea mays
gataagtagtgcaagagcatgagtaagagcaggagcgggagcatttgcacaagttgaagccgctcatactatagggctagacctgcacggcacagtgctagcccttgcaagagc

SEQ ID NO: 366829 - DNA, 401 bp, Zea mays
ggcccaaattgaagcataatttgattggtgaactaggctctgcttgtctacgcacaaaactgatgaggacattaaaacttacaattcagcctaagtctagggacatcatacctactacagtttatagaagtagaaaaggcaacagaaagaaatgtaaacctactgcagtttatggattctagctgctattcccaaataaattctcaaacaactttggagccattggaggaagaaccatgggctccggtgccatgaaattagggatcttttcggggacatggtaccgtattttcctgctcttcgaagcacgacgatcgacaagctttttttttttaacctgctgcttttttagagagtaaaatgccgactttgatgcccctctatcacatgactcaaggaac

SEQ ID NO: 366830 - DNA, 201 bp, Zea mays
gagggaaaagggaggctaaatcgacgggtaaaactttgaagagtccttatcgggggaaacacaaaaaaaatttcccacggaactgaagaccacaaacaaggggtattaaactgacctaggaaccatttgaatgggcaacggaaatgtccgggcgaacatggggggtgcaaagggcaagtgggcaactggggccttaaaccc

SEQ ID NO: 366831 - DNA, 257 bp, Zea mays
caaaccaacggtttaacacacattcgcacataaattttcttagttttatatatgttcccgtggcaacgtacggcccctcacttggggacccgtaaagaagggatagaggatgtcctgggggactttttggggccctcatgagatcagaagttcaacatttcagacggttttatttgtttacaaaaaaaagcagttgggacaggcggggttccagttccaaatggcatgggaaaaaaaagggggattaaaaccggggg

SEQ ID NO: 366832 - DNA, 176 bp, Zea mays
gtgaaggggccagaatataacacctcccattaccttaaaaaaacacctgcccaattcgctatttggtcccggggttacaaccgtccaatcaatggatgcaacgggtattgggagagcacgtatattttgtttcacgacgtcgggccaggtatactagggccggccgccggcacggg

SEQ ID NO: 366833 - DNA, 120 bp, Zea mays
cccacgcgtattttgttgggaggggtatctcgtagacattgaacaacggctgcattgcaagcgcatgcgccacctccatccccctagggtcagtgccctctgcatgcccgtgcaagaaga

SEQ ID NO: 366834 - DNA, 193 bp, Zea mays
agcaaatgtcccatatcaccttatcgggagaagaaatactcaggctcaggtccatgtattatgggtttttgacaaatcaaaacatttccccaaaaaaaaaacctgcgggactaaaacaaaagctaatttgtcgaccagaacacatgattttttttgggccccccctcccaatagggcagggaaaacaaccccc

SEQ ID NO: 366835 - DNA, 307 bp, Zea mays
agaatatgaacaaggccttattgattgatacttctgcacgtcaacacaacgcacaaaaaaatgtacgtagtaaaactatcatacggcggaagtagttcacgcttcacatgcacgacatggtcaccacctcgcactgcagcaatggtcacagcagaacttgacccgcgcggcgcgcagatagcaatgccttgcttacatggacacggacggtcgctgacgctcaccagacgggcagcaggtagcagaagtcggcgtggtacgggtcgacctccagcatcttggccgccggcgccggcgtgggcgccct

SEQ ID NO: 366836 - DNA, 412 bp, Zea mays
cggacgcttgtgttttgtcatttctataaaacatgatgcattttttttcaattcatattgtgatgttattcctcttttgcctttagagaagcccataatacaaatggataagaagtcaccaaacatttctaaatcactggtcttcatccagtgacaacctttagtgtcgagctggtgtttgtgcttgagctttagtgtgtctgcaacaagcctttaggaatgtcgatatgctcatatgcttagttgtgcatgagtatttttgttgcaaggtttagatgcagtgttctggtctttagtgcatgtattttatagaatataacacttctatattgtagaatgcaatctgatagtttacatagaaactgataaacttgattgatccttggcattatagtacaaaaagtgcaatacc

SEQ ID NO: 366837 - DNA, 325 bp, Zea mays
cgattcttttcgaaagaaactcttgattggtgtgtcttagcccgggggaacacccatctcttctctctggtgaactacacatagtggctatatgctcctctatgctacacaacaagcaggctgatgcgatattttcctgaagttattatattccagtctatgccagacatctacatgtaactccaccaccttggtcttcctttgttttgtgctattgtatttgcatgaactttccttctcatttccccacttcttaccagcacatcaacttctgaaaagtttcttttcaggtagatgatgctcatataaggggggtatgcaaatc

SEQ ID NO: 366838 - DNA, 177 bp, Zea mays
gaaacaggggggtccctatttattacatggtggtcgcatgaccccccgaatttcagccgtaaattcagcacgcaatgttttatataccgattgtcctgagggattacttaggcataacaaaacgatggctacctaatgcatccgactaaacttgcaacgacgtcaaaatgtaaaagt

SEQ ID NO: 366839 - DNA, 220 bp, Zea mays
gtcattccattggaatttccgagaacttagggttgatttggtaaccagaggaccacaggagaattgggggaaattgaggaggacaagaactaatttcccaccccacccatcccctgggatcttttgttaccaaacatattttcccttaaacagggattttttgaatacaaaataacaggatcaaaatgaagcaagcatagagatcacacgcattttttac

SEQ ID NO: 366840 - DNA, 192 bp, Zea mays
ttttttttttttttttttttcataaagaaaaatactgcatggataaatagcatcggtacaatacaagccaacagatgtacagtagttgcattgctggggaagaagtacagggcaaggcagattatctagtatgaaacaattgtcggacgtttggttgttaattcgagagaaccgaaacaacacgaactcgtg

SEQ ID NO: 366841 - DNA, 324 bp, Zea mays
cccacgcttctttgtctctctgtccagcctccgcctctcccctgtgccctccccagtccccagtccccaccctgccctgcctgcgctttccacaccgctccgcgtgcgccgcacgtagcccgcaccttcggctgccgagccgtgccgtgctctgctcctcacccgatgctgccgccggcgcggtccgtcccgagccacaggcggagatgagctccaggaaccgctccgccgcctcgtgcgctgccccggctgcagcaccatctctccggacgccgcgccgtctcaggcggcgaccggttaaggcggcagtaccggggccgggcg

SEQ ID NO: 366842 - DNA, 170 bp, Zea mays
atcaaaaacgaaaactcttggcatttttgctgcaacacccacctcaaataatgaccgaacaatgtactatctctctctatctctccttacacacacacaaagaatgtaacgaatattgaaatccacaaccagtttcactcccaaagctatcagcctctcagcacttcttg

SEQ ID NO: 366843 - DNA, 282 bp, Zea mays
ggcggttgcgttctcgcgtgaagaaggccggggccctatctctccgatcgcggtagggcgttcgcagcgccgattcgagccgacgattggccgtccgcgaaggtatacccctccgattcggcccccagccctgcttaaatccgcgtggtactcctatgcattcggcggtagcggcacttcctggtacagcctaccctgcgtgggtagtgggtggatgctcgtggaatttagggggagttgcaggatcggtgcgcccggttggggttctcgctgctgagtcgc

SEQ ID NO: 366844 - DNA, 156 bp, Zea mays
cggggcatgaaaaacagccgacgtttccaagcccccccacaaagggggcaacccccttactttaattccaagacggggagggacccaaacttttatggcctcccacgaggggggtcctacgggggggcttttgcttcccattaattcccatggggg

SEQ ID NO: 366845 - DNA, 167 bp, Zea mays
ggccaactttttttttctaaaaaacccgggtatttctttaatttccttttctctcccactcggaatatggtttggaaaaggtttcacctggttgtaggtttgccggccagcatcaatagcttcattggggccgtatagccccaatagtttatgaaacgacggttttt

SEQ ID NO: 366846 - DNA, 296 bp, Zea mays
aatttaccttgacggaaaccatatgtatcttgggattcaactaaagataccagacagctaagattcgaagttcatatatcacacacgacacaaacgcaaaaatacacaccagctttaataaatataataatgccgtattgggcaagcaggcatgtccccgatagtaaaagctcagcttggacaggggccagcaattccaagctcactcaaacgagatgtgggaagttaaggttcacttggttgaagctgctgtaagatgtcaaaccttagatgaaagaacagccatcatgtatcat

SEQ ID NO: 366847 - DNA, 329 bp, Zea mays
cccacgcttcttcggacgcgtgggatttcaaccaaaataggaattagaagaaaaggtaaaatgattgtttttccattgtacctgcacctgaatacataaatagtagaattatgattttgttatctctaactaaaatggtgcttcggtaggtatttgttacatctatctttcataacttagcaacattagtaacttatgaatcataattgcaatttcgtatttctttgaatatagttgcagaggcgacgtgggccatacccactcagtgatgtaatgtatcaatcttcttaggtattaaggaatctagagtgtaagacacacgggaatgg

SEQ ID NO: 366848 - DNA, 377 bp, Zea mays
ccgccgccggtttagtttacccagccgcggggctcggtgccccggccatccatcccctgcgaatctcgatccgccctcaaagggagtcaagcctcctccagcctttcctttcaaatcggatttgtttgctcaagttgcaaggtacagattccctaacacattgcatatatacagatcagttcgattgttgcttgcttgagattatttccacaaacaatgaacttatatgtacttgtgaatacatagcataatgatgtgattccagattcattatgatgtgccatatgttttttttgtatttgatgcttaaatgtagatggataagaggaccaaggttgcagtttgtgttgctgctgcacataacttactgtcaatga

SEQ ID NO: 366849 - DNA, 146 bp, Zea mays
caaaccgcccaattaaacaagcaaccaattttttgggccgttttttaaaaataattaaagacttttggggttatagctttccataggaaacgaatttcatttccctgtaaagttccgggggaatgggctaggcaaacattgcgggt

SEQ ID NO: 366850 - DNA, 298 bp, Zea mays
aaagtttcctgcgaagttacttacaacccggtgccttctttgaaaacatatataatctgatcatggctgtcaagggaaagtaacatgactagaccgatatgcatcagaggcaccaatgatacttacttgaatttcatatatataatatatacaggaatttttttgaaaaaaaaagatatgccacaaacatttcatgattgctgactactaataatggcaccagtatgggagagtctgggcgcaattgatgttgatatcttggtaacaaaaggggagcgcctcacagtttgcttgatgc

SEQ ID NO: 366851 - DNA, 225 bp, Zea mays
cccacgcgtcctaccgtaagtggttttatcttgtaacggccggcatggaccttaaccactttcttcttaatataatgacgcgcagctctcctgctcttccgagaaaaataaaggatttaaaaatcattatcaaccatgagagaaacaacattgcatgtagtcatgttgataggtaacatcaaatgaataaaatgaaacatgtagctttttgaaaaaaaaactaat

SEQ ID NO: 366852 - DNA, 348 bp, Zea mays
gcgggtggagtagggctcgatggcggcctccgcgcctgcggcggcagcagcgagggagagtgacctggaggcggtgggcgagccgatgagccccgcggggcggctgttccgcgagacgcacttcaactgctacatcgtggccgtgatcgggctgggcgcggcggtggacgtcgcggcggcgcgcgcggggctggaagtcacgctcgtccgccacccacgcttctccagcgtccaggtgaatgatggtgatgcgagaaagaacgccaagccgcggtgggtgcggaccacggtgaacctggacgatcacatcatcgtcccctgcctggaacccgccgccacgtcgaccaa

SEQ ID NO: 366853 - DNA, 273 bp, Zea mays
gggggagagcccaggggtttatttttttccatgaaacatagcctaaacatttccgggttgcccaaggctcagccccaaacgcaaaattaacaaacaaggctcccagaaacactttttaaaaagaaccgttccccagcagttactaagcaactcccgccccaaatagatggggttaccccttactattatttttcacacacacaggcccggccccagggggggagagggggtttaagcctaaaccgtaccttaaacttgggggggccaggacgg

SEQ ID NO: 366854 - DNA, 228 bp, Zea mays
caagctatagcacactttcaaaataactggcgaaggtgaccaatgagcagactttgtaaaaatcagtagaggtcaccaccgaccagcccaaccacccaccggagcctcaagccatgctccttgtctttagaaactgaacgcttgggttacattttgctaatggtgacggcacttcacactacacattagaagcaccagtcacgggcagttcgagttcttgccagggcc

SEQ ID NO: 366855 - DNA, 401 bp, Zea mays
agcatatatattcagcagaaaggctgtatatgcttaaagtgaaaaccggtttcttacatgtgtaagtagatatttgatgtgttgcaaaatgaggcattgtttttgacaaataatctccaaacttttcagtaacataatatttatatatgtcaatatatgcaaatattctcatcttatgataacatgtacaccagtgaactgttgaattctttttttgttttcccattttattggcagaactcggatgcaattagtaagatgagcagaatagttagattttggagatcgatacaagttaagaggacagataaaagggtttcagctggccagggccacacgggaggtgctctcctcggcgccgtccgccgtgctggagcaccacgcgtcgtcggatatgaact

SEQ ID NO: 366856 - DNA, 123 bp, Zea mays
gtgaattcacttactaagctactcttgcagcggctcacaaggatagtcgtcttacatgtcatgcgtgcctgaacccaaactgaatgagaaaggatgttattctatagcggctggtacagacaa

SEQ ID NO: 366857 - DNA, 131 bp, Zea mays
ctcgaagccggcctccttcggccagcccacctacgacggcgtcatcgcagggcggttgtcgggacggcggtggaaggaggcccgcacccggcgagcgtcggccgtggcggtgtcgcggaagccgaccccgc

SEQ ID NO: 366858 - DNA, 417 bp, Zea mays
gaaaactggtggctttgtataattaatgggtgataaaaacttcactttccgttttcattctctaaacatccttggcacttctgttcgttcttttaaaactccaggagatatctacaacaaaattgatctgcccattgtacagcaccatctacatggttaaattaagacatgcttgtttgagattataatctggccagattatataattcaatatttttgaactaagtgtacgtttgtttactcgattatataagttggattataataaaaagggtaggaggataaaatatcactgtaggaccataaataagctgaaataagctagtattgagtagcttattttagtttatttatgatcccaatgtgttattttaccctcttaacctttcaccataattcagcttatataatctagaa

SEQ ID NO: 366859 - DNA, 349 bp, Zea mays
cgcctgtgaatttttaaaagtatgaggggtattcaaagctcaacgaacccttttgctatgttaggatttctcatctgacagacctcagcacaaatccaacactgttagcaactaaagctacaacagactgcaccacaattctcaacactgccatgtccctgcaaagaacgcaactactggtggacttaaaaacttcctaccatcccaaaaggatactttggcggtcatccacaaaagcataacactatttccaacagcttacccatacacatagctatattcaaactccactctgcgaacagggcagtcttcagtgcataacagggcttatggataaactttggatgaa

SEQ ID NO: 366860 - DNA, 423 bp, Zea mays
gccgccgccacagttgctcacggcccctcctcttcttcgtcctcgtccggtgctcccgccgccgccgggcttccaccttgctccgtccgcacgggcaccgctgcctgcccgcggccaaccttcatctagggggcatccctttcgcggtcaattcggtgggctccagttgcacgtgctcaaaatacatgtgggagaggatatcgtatcaaagattgtgcaggtctcgaaaataactgggaaggctgtctgtgttctctcagtgtttggggccgttcaggattgctatctgctccactctgctgtcatcttaaatcacaagggtcctttagaaatcattcatgtgtttggatccattttgacatctgatagtcctggatttgggtgcttatctgcgactcttgcttgtggtgattgttctcttgt

SEQ ID NO: 366861 - DNA, 203 bp, Zea mays
aaacatcgggggcaacaaaagcaatgacaatgtcgtgttacctccatcgccgcagaaggaaactaagtgggggcaaatccaacgattattacaacacaggttttacatctcatctgactatctgggttcccaaaaaagagtagctacttctaaacaggtcactacaatttcgcctcaacttcccgcagcctcactttttaacc

SEQ ID NO: 366862 - DNA, 426 bp, Zea mays
ttgtactgccgccgcaacggcgcaacctcccttctactgccggcgcaacctcccttcttcgagtcccatccgacctagccctgcaacccgccggacgacgagcagtgaggcccgcggccgagatggaccggtacctgacggtggagcggccacggaacgagtcaaccatcgaagagaacgggatccgcatcaccgcgcagggcctcatctgcaactatgtctcctacgctacctccctcctccaggtgcctgggcttgtcctcaccatcgccgtcgtatcgtattgtacttaggatgcgctgttctgttcgagtcccgtccctgtcgattcgaagagatccccagcaacgtgagggaggtgttcctgaccggccccacctccaagttcggcagggccatcgcgctctacctctgcaggaagaagat

SEQ ID NO: 366863 - DNA, 321 bp, Zea mays
agcttgcttttcaagcccctgtttgaattgggcttcacatttttcacaagctcggcccatcccctgatacacaacccaaaataattgactttcttgagtgagtagtcgatgttgggtatgaatgcatcagtatccaggaaagcagcaacgtttctcctgttgaccttgctactcaacgacaagcaatcttcgctagcaagcggtggacgaggacaggttgacgttttttcgaaccatgcgctaaaccccagatcttttctactagtagtacgatctgaagaaccaagttgatcccgtcaaaccaatccgaggaacgagatc

SEQ ID NO: 366864 - DNA, 464 bp, Zea mays
gggagcgcggtgaggtactcggcgtcggcgtcggcggaggcggaggcgtccgggagcaggaggaggagctccaggagccgcgcggagaaccggacccacgacgcggcggcgaaggaggaccggccgagcgggaacgacgacagcgcgagcgggttgcgcccggaggccgggtgccgggcgagcgcggcgaggagctggtcgcggaggatgaacgcgccccgcgccaggaggaccctgagcgccacgaggcacttgagagccacggcggcgtcgccctgccccgaagccgcggcgcgcaggcggtccacgagcgccgcggcgagcgacgcggcggagaggcgcgagccccgcccgaaggccaggaacgcgtccatgtgctgcgcggacggcggcgccgtgctagggtggggaagccgtcgcgcgccacaccgagtggtgcgcgtcggccgcggagcccggggatg

SEQ ID NO: 366865 - DNA, 225 bp, Zea mays
cctggatgcttgttctgtacaagaacatgaactccaagaatcgacgttcgggacaggtttttagactatagatataggactactcgtcatattaggacgaagcgacttgctcggagatcgatttttgggttactgtatttgtccctggatggcttgttctggaacttgtcaagtttttggattatgctatggcactttttatcgatgaatgctacataatgatct

SEQ ID NO: 366866 - DNA, 344 bp, Zea mays
tttgcaaaaaatccttgggggattctttgacaatcccggaggccacaaaaagtggcatcagtcatagttcagaacagcagagcaggctgtaataagccaagaaatggggggtcttctacaataacttgatttttcatccaccgactcacctacaaaacagcagccgtcttcacgccatatcgaactccctcatcgatcttgggctgcagatgatgtcgaacggcttgtcaatgctgtcctgcaatattgggatctgcccctccttcacaagtatgtcttcgtccagggcttcgatcttcttcttcagcgatacaacctcgtcctgcatgatgctgatgtttcgt

SEQ ID NO: 366867 - DNA, 177 bp, Zea mays
gtgtgggtggtgagcaaaccctgtaacgtatccaatccaatgacaaaaaaaaaaatgggtctgtgactacttgaccaaagggaggcctgttacaccaaaagcgagaaaactccatccctttctttttgacatcccatgccgccacacggaggatttggggacctcaaaaagggatcc

SEQ ID NO: 366868 - DNA, 173 bp, Zea mays
gtcctccttattattggagttgcacaagccgctcagcaaccttgttcttcatcttctccagtcctccctcccgccccggccatcgacacaacagcttgcttgtcaccaagctagccaagcaggaggagtaagagttcagcccccagagagagagagagagagagagagagagt

SEQ ID NO: 366869 - DNA, 338 bp, Zea mays
cttctcccttttcttcctgtctctgcgtcgcgttgcggttgtgcgcacctggtcgttctcggtttcctccccagccggtcctctcgggctccgttttccttccgggccgctcttggcgccttgctctccggccttttccttgccggccacgcccttcctgcgcattgcttctctgatccccgccgggccgcttcgcgttcccttgattgactccactcgccgacttgtatgcgtccgtctcggcggcggcggttggtgctgtgagcgactcgcggcgggacgagggattccgtcgcgctcaggcgccctcaggagccgacggcatattgtgcatggag

SEQ ID NO: 366870 - DNA, 259 bp, Zea mays
gggaagggggaaagcaggttccccttgggttcccggtttttccccaaattaccaagggggggccaaaggacttacaggccaaggccaacattagggggggttttttttttttacggttttttccaaatttaaaaaacccccgggggccttaaaaaagcttccaacgttttgggccaaaacccagggccttccatgaatcccgaaggccccccccccctttttttttttgaaattttccccccaagccccccaggggccc

SEQ ID NO: 366871 - DNA, 201 bp, Zea mays
gaggcaaccttgtcgctttttgtaaaaaggcgtgggaactacaaaggatacggtcattttgctatcactactgcataggtacagttggtctgggcagcaacgagttgacgaggtcctcgtttatcatctgggtagcgggggcatctgcgtcctcgtttatcttcacaggtagcgagggcatctgcttcatggtctctggag

SEQ ID NO: 366872 - DNA, 112 bp, Zea mays
catccagattgttaattttataattaagcggattacacataaacttattcgaacacactgcctgtgtgagtgtgtgtgtggcccaaacccacgcgtccgcccacgcgttcgg

SEQ ID NO: 366873 - DNA, 175 bp, Zea mays
ttatgataattgatcagtataatttgtggaattattatattttaaagcaacctgaacatagagttcaacatagaactctttgtttgactgtaagcattacagtagatttttttctcaaatttgtattgcagattgagatgatacacagagttcaatatagaactcttggctgctc

SEQ ID NO: 366874 - DNA, 246 bp, Zea mays
ctttgggccggcaagcacatacatacactacacacgactaggtaatgacacacatgctaacaacaggcatttatacgtaccgatcgacacgacgacccacacataatagacatgcacgacgacctggtacatgcatgcacagacgacgacgacaagaacattttaattagtacgaacacacacactctaaataggtacggggaccagatgagagagagaaagagacccgttcgtacgggcccctgc

SEQ ID NO: 366875 - DNA, 430 bp, Zea mays
cccacgcgtctgtgaaccggtcggctgaacaagacggcgcgtgtggagccatgcttgccagcgcgacgagagcagggacgtcgtcgacgaccaagcccgaccacgcggcgggcgccgtccacggagccggagccggagccggcggcacccccatcgtcgtcaccgacggcgggcaggaggtcaccgtctctcagttcgtcgcgcagctagtgagactgtgagagtgatacgacgatgatgataagatgagtgagatcgctatgaaaacctggggtgcggaaaatcgacaggtttcagctgtgttttgacagatgaggcggcgcggcggaggctggacagcatccaccagaggttgaggctgctggagcagcagatggagacgctggaggccgagtagcattagcagatgaagaggcggaatattcttctt

SEQ ID NO: 366876 - DNA, 326 bp, Zea mays
  unsure (1)..(326): unsure at all n locations
ttntnccttttttttttttttttgaagcgataattgtgttttttcggttctatcaggggatgtgctacattcctctttgtacaagcaggctgggcatcgccgccgccatagaaataatacgtagctactatacaattagtgtacacttacagggccgtcagatgatataggaacattctgttagagagcgatcgcagaactcgtggcagtcacaaatgctcatcggcatcaatcacctcttcaccaggtaatggaagaatgaaaccaggagcatcgtcagctagtcatgcgattggctgatctctcttttgagatcctctcttcct

SEQ ID NO: 366877 - DNA, 404 bp, Zea mays
caaatgcgtcttttggaccttttgagatgcactgggtgaaccaaatacactggggtagttccacgtttccccgccacggaatacagctgcacgatccgacttctaaggacgaacgtgcgacgtgcatgacatgcacaccgtggcggaaacacatccctagacgcggtcactgcacgggctgtgcactctccagctcgtccgcgattctacgaaacaaacttgtccgactgacgaacacatgagtacatgactcactaatgcaactacatggtagattgttcagagggtactacagatgcagcagctctaaaggatgcccggcgcggaagcaggtggagcgcagccggacagacccaagcctgctcaacacgttcccaccacgccaagagcagcaagaacaagta

SEQ ID NO: 366878 - DNA, 378 bp, Zea mays
  unsure (1)..(378): unsure at all n locations
ttnttttnttttttttttttttttttttttttttgtttttttaaagaaaaaggggtggatccctaaatgacctcaaaacaaatgtttacgttctgacaaatattttttaagatcctagaacataaaagacccacagattccaatctaaaaatcagcttgccggcattgacttggctccacgacgtcgttgtcactgccacacaaaaacatgggtccttcgtagccgccacaatatgcactccatttgggggcaaaacaacgcaacaaaacggtccagcatatagcaataaaaggcaacaatcaaagacatttactaaaaacaatgttgatgcactaaacacttttgaaaaaaaaagaatgaaggtagtaaatgaaatg

SEQ ID NO: 366879 - DNA, 353 bp, Zea mays
  unsure (1)..(353): unsure at all n locations
ttngcaagagcgtttttaatttaacattgcatgggggccatcactttgacagcatctgttcctacactttatttattgaagttatttacatacatcaggcgacgtaaaaccaaagaagctcaaatgggggatggctcgaggtgactaaacgcagaagaaaccatttctttacagtataatgccatgcgtctcttatctcttctttttttctactacttttctgttgaaggtatttttacatcacgatgcacctctctttcttggattcacttcttgacggaggcggcacattggacatccttggaccaacaacaagtcctggtcggccagattgagctggttggtgctgcgtc

SEQ ID NO: 366880 - DNA, 392 bp, Zea mays
  unsure (1)..(392): unsure at all n locations
ttntttttttttttataagacatttgnccttttgtatcttttatcgaccggggtaatcaaaacccagcaatatactcaaaccacttgaaggtttacaactctggacaacctgcaacgcagaccattcctgaggaacctcaaaaccaaaccactcaggaatgtcctacggcattgcagataattagactcaggctatacagtagccagatataaaacataaatgacgcaaaccctagagagtagcctgctcaaaaacccagactcatgttcgacgattatggtcctgttacagaccctgcgatactgatatccatgacagcttgggaataatgctaacccatctcccttgaaatctcgaatttactggaccaaccacaaaccattatcccaca

SEQ ID NO: 366881 - DNA, 269 bp, Zea mays
  unsure (1)..(269): unsure at all n locations
ttntncctanttttttttttttttttttttacagtgttgaatttagaaacccaggggtggcaaaaacccatcaccgccacgttttggttacagaacgtacaccattcccacctaaagcagcaaccccgggggaacgcccaaaaccacttccgggccggggaatttccggcccaagaagttgtagccaaccccaacggccagccttttgagtatcgacaacccgggcttggtcttaacgtgcgagtggcccaaaataaacgccgtgccgg

SEQ ID NO: 366882 - DNA, 166 bp, Zea mays
cgcctggaaaacgaacatattatatacatacaataccacaatgccagcagctttctagagtgcaaagccttttccgtgaacatccacaaggcagtcttctcaggggtcaaaacaaattatcctggaaagcaacaccattgcatccgaattgcgacttacgaacatt

SEQ ID NO: 366883 - DNA, 432 bp, Zea mays
ctagggttgagcggctacacgagcgtgctagggttgagcggggctccgcgggcgtgctaaggtttcgcgagcatggcggtggccggcgagcaggtgagggctcccgcctctaattccctcccgagctcctcgagcggccaagcgtctgtgtgtggccgtgtgggcgaaccacatgcgccagccaccgtgcgccctgggtgagcacgtgaggccagaggagaagcgcatgtacaagcagctgcgccagtttagcgcgagactgcagggtagtaggcaagccgcgagcgtgtgactgcagctgctagccaagtgagcgtgccactacaggacagcaaacaacgacgacagcaagcaagtaagcaatgagcaagttttatgtctataattaaggatcctgatccccgatgttaggagaaattagaaaaatctact

SEQ ID NO: 366884 - DNA, 366 bp, Zea mays
  unsure (1)..(366): unsure at all n locations
cttacaattgggatccatcagatccattgggcaacgacattttattacaaggccacagttgaaatgtggaagctgaggcaacaactaagtcatgggggatccacagtcctgaccatgtgtactgacaacatgttgcaaaaaaatacaggtcactgacaaacaaatctgaacagctattcatcatcatctgcacaaaaggtgaaacggaaaatgtgttaggtcccatgactaccaaacagaatggttaagacaggcaccagctgttcccagggcctcttatgtttttatgttatagnaaatactggtagaatggtcaactgttttcagccactaaatagattcacaactagaaatactgaaatagca

SEQ ID NO: 366885 - DNA, 476 bp, Zea mays
ttgcactacaccatcaggagccccaatcattcatatttgatatggcgatgtagaaattttcttttggggacatttaatgtttagtcctgccatattggtacctagcaagagatggttttagttccaacctttggccctatatctattataagtagagtacttggagtaggtgacatgacttcagtccctttcaaaggcctcaaagtctgaacctaatatcatattcttgtttgaatctgcacacattttgcactagctcattaatattttgttgacttttgcttctccttttttacattcttccttgtaaacccaaaaaaattgactgcattttctttgttaaccgcttaattatgacgaagagcataatatatttcattctcactttactgctgggaagtccttaataatccagaaaaaatgtggatttaaacgcttgacttgtgttataatgttgcttgatatctataatatgt

SEQ ID NO: 366886 - DNA, 348 bp, Zea mays
caacatgtgcaacaacaaacacctccctccttcttcacttccctgccgttgttgcaggaagcaagcgagggcacacaaaccgacaaggccgcccacgcgcgcgtcggccgccgccgttgccgaccagcaggcaggcagcatggtcgtgaacaacaaggtggacagcctgtcgtacgacgtcgaggcgccgccgccctctgccgccggcgccgccgcggggcaagcgccaccgccggcgtcgccagctccggcgccggcaccggcaacccacgcgcccgtgacgcgggaaggcggcgcggcgtcggtgctggagctgcacaaggtgtcgctgccggagcggcggacgac

SEQ ID NO: 366887 - DNA, 312 bp, Zea mays
gacatagcaaacccatcctattaaatgcgctgcaccaatgattcatgacgccgttcagctgaggccacactttcgacaggcgaccagcggcagctaccaaaacggcaaaatcccccaagttcccttggccagaagcaacatttctgaacctaggacccttaccaaaactgcaccacttttactactacatgttacaaaggatgaggcggtgagcatctgctcatcatcacttttttcgcgcatctttgctggctttctaaaaaggaatcttgaccacccaccacctaggtaatgacatccacaacagaccca

SEQ ID NO: 366888 - DNA, 481 bp, Zea mays
cccgccaccgccggcttccccaagaaacaccagctcaggtgcctccaaacgctggcatcggcgcagtcgtggccggaaacggtttctcctccggcgactgccggagtcgacgacctcgcgccgcaggggtcgagtcctgcttcaccatatattcctccgctccctcgtcacaaccaggtgcatggatttggtggcaatgatttatttgatgatatggtccaagagatggaacatattctgctcaattcaggggagccacatggaaatggatcttttatgaatgatcgtagaaataatgctctccaggctcaccatttcagagatggcagcactactgcctctacttctggtacagatgatgcctttgtatctcctgttccacagtattcttcaagaatcgattgggggaggttgtgggggcaaagcaaagatctggtgatgtttcttttggtgaacgaattgttggtgtcaaaaaatacac

SEQ ID NO: 366889 - DNA, 364 bp, Zea mays
gcttgtctgcacaacatccccaaagtatcttcgagtcgaatacaacagggtaactgagtgtaaccacagttcgtacagaatttgtagagaaaacgaattgtccaaaccaccggataaattcatcttgttacaatgtttgctggcagaatagctcgcacagcacaggagatgagaccagttcatatgaaatcacattttaagggggaaacgttcagctctccaacccgtgctgtctttgtaaaatcagtggaaacttgctggctagtgatggtttgcctcaccactatacagatcccagatgagttgaagaataccagtagcagggtcatgctagtgtactggttttgtcagaaacaaaaaaaga

SEQ ID NO: 366890 - DNA, 184 bp, Zea mays
aggaaaaaaattccttgggcccaaacaacggattacaaaagcagactgaacccccaaaatgccaaaaaaagccttggcttgggatttacaaaaatgatgcccaatgggtttttaaaatcttttttttaaatttggttaaccagccttgaaggtttaatatccccccttttttttacaacccaat

SEQ ID NO: 366891 - DNA, 434 bp, Zea mays
  unsure (1)..(434): unsure at all n locations
ctccttttccctatcctctcgtctccccccaccccgccgcgatcaaccgagacccaccgccatgacgagcgacgacgaggaggcgtgcgactacttctacgacgacgacgacgacgccgaggaagacgccgccgccggactggaggaggactcttcgcttccaacgccggagggccgcgcggactactgggctatcacacaagataccgttttcgctgcacagaaacaagatctgtctacggtgatgaacttgctcaatataaatcaacatcaagcacgagccctcctcattcaccaccgatggagtatggatggcatctatgattctctagacatggggcgagaacgcatgctcagaaattcagggnatcgtgctgcaggaggtcaacagcattgcagcagctggctcaatgacaccatggagaacagtgacc

SEQ ID NO: 366892 - DNA, 290 bp, Zea mays
aactagccaaagattttattcatatctaactggtttaaaagccttatccaacaatgcaggggttacacaaaagctacattgggccttacagatcactgaacagcttatgttgataaacgggctaggggctacccagggaaattatcgatcacaggccattgttcggcaccttgatcttttgaacatagagccatgtccaatccaacataatccaaccccctttttgcaaccctgtacaaagttccaggtgttcacaaccccaaaatttgcattatttttatggggggacc

SEQ ID NO: 366893 - DNA, 289 bp, Zea mays
ttaacagaaccatacgggggcttctttttttttttttactttcttatatagccaaaagaaatacatagccctcctccacaaatccaaaaaccgtgccaattcactccgacatgtctcggattggcactcaagacaaaacaccatggaaggaaggcaatgcaaagcaaggagcaataaccctcgtggtcgacctcataacttatctggaccacacttggacgagccatactgaaccagcaattccaaactccatgagagaaagttttcattcgactcaaatgggagactg

SEQ ID NO: 366894 - DNA, 340 bp, Zea mays
ccctccttccccctctcctcttcttgtcgccgtctccctgcagcgttacgctggcggaaaagaaacggagcgagcgagatcaactggcggctcaagaaaccagagggaggagtgagtgcacgcaagggtcagagaagagccgagagagcgcgcagcagtgcagtggtgctgtatccgctgcattcttcctccccctttggattccctgactcgcatggtatctggtcagaaaggcacaggctttagtgtgcccgttgctgttgtaacgcccctgtctgctcctgcggaggagaggtgcgcgagacgagagacgcgggaaggagagggacggaggcgggga

SEQ ID NO: 366895 - DNA, 283 bp, Zea mays
aaacaccatatgttcgaaatgggcctcaaacaaagcatacctagagtttccaaccaaccaccacaactcagggggggcagcaacaacaacaacacaacggggaagacaacaatgataaggaccatttacaatctcactcaggccaccacgcattcccaaagactgcagcaatcgcacagcctgaatataaccctataagtctataacccttttttcagaaatatgattgtttctcattttggagctaaaggggtaacagaatcagcatcccaaaactgaggac

SEQ ID NO: 366896 - DNA, 381 bp, Zea mays
aattcctttaccttatcttctcatcgcctccctcctcccagcttcctcgaatctcactgctgccgccactgttttcttgcttcgttgcgtgctggcggagcaagaggcggccatggccaccaccagcgacgccgccccagtcgcgcctgtggaggaagagagcacctccccggcagccgcagaggaggagccgcccaagaaagtcgaggcgtccatggccaccaccgacgtcgctccagtcgcgcccgcccccgtggaggacgagaacctggcctcggcggcggccgaggagagtccgagcaagaaagtcgaggcggcggcggcccaggaggaggtggaggaagtggtggaggcgccaaagaaggtcgtggcgggtggggg

SEQ ID NO: 366897 - DNA, 146 bp, Zea mays
agttttaccggactgccatttgattccccaattaatgaaagacccccccgaataagcccctccttgtttttaaaacattacagactgccaacaatacgagggggcaggggattaacatttacatatccctgggcctttaaaaacaa

SEQ ID NO: 366898 - DNA, 316 bp, Zea mays
tcaaaaccaccatggtcctcaccatcgatctgatctacaatacaagactacaaccaggattttgtggcaagaaatatccagcctaaaagtgccaaaggaaagttaataaataaaggtacaggttgttcaatcaacgatattagcaagtacagaatgtggagtcagcagagaactcgagataatagattaacagtagcaagctagacgcagtcaaattcatcagatcatgcatgtgcaacagttaggtaaatccactcttaaccttgatttttttttgtaagactaaaaaaacttcctccagtaactctatacaaac

SEQ ID NO: 366899 - DNA, 260 bp, Zea mays
aaacacaaaaacgatcagaaactagaagtgcaccctacaacgcatatgacacgaaagagatggaacttacaaatcgtaaaactcttcctcttcctggaatttggcaagcttcagatcaaaggttcacgcctagtgctaggcaccaacatatgttagttcagctcctaagaacttagccatcccgtctcgttagaaaagttggtcttacaaacatgagattggtatcatctcatcgatactaaactgaaacagtacattca

SEQ ID NO: 366900 - DNA, 244 bp, Zea mays
cattttggagccgaagaactcccggttagacagcgcggccaccagcccgtacgccacggcgccgtccagcccgcgcggccggcgccttgtcccctccgagggagcggcgggcagcctattcctgacggcgccgccgtcgcccaacccgctcgacctcctgccgccggccaccccgcgcctcaccggcaccggcaccggcgccgccaacccgttcgatctcttccagcacttcaccagcgcgccc

SEQ ID NO: 366901 - DNA, 282 bp, Zea mays
gcgctttctagcaatggcttctgaggttgtccgccctagcgacgccgagctactaaaggcacaagccgacatatggcggctcagcctctcctacctcacgcccctgtcactgaggtgcgccgtggagcttggcatccctacggcgatctaccgccatggcggggctgcctcagccgctgagctggtcacggcgctgtctctcccctccactaagctgccgttcctccgccgcctgctgcggctcctcgccgcgtcgggcgtgttcaccgtcgacaagcagag

SEQ ID NO: 366902 - DNA, 271 bp, Zea mays
gccgtttcccttttgcgtgagcaaagaaagagagcgagaagagcagtcgccatgtctggcatcatccacaagatcgaggagaagctccacatggggggcgaccacaagaataaggaggaggagcaccacaagaaggccgaggagcaccacaagaaggaggagggggagcaccacaagaaggacggcggggagcacaaggaaggcatcgtggagaagatcaaggacaagatcaccggcgagcacggcgacaagtccggcgaccacaaggaaa

SEQ ID NO: 366903 - DNA, 268 bp, Zea mays
ctctctcgtccgtggggctgttcttcctcgggaggggtttgatcagctagcaggcagtcaagtagaaggtggtggctttgtgcagctgcgaggcagagtacattgctgacagttctgcctccactcaggctctctggttggctcaactgctggggtgatctccttggcagacgctaaagcagttgagcttagggtggacaaaaagcctgccttggacttggcgaagaatcccatcttccatgagcgcagcaagcacattcgggtcaag

SEQ ID NO: 366904 - DNA, 168 bp, Zea mays
accaatgcaaacgaaagaagcccacatacatcaaatatcgaaaggtcgaaaccttttgcctctctgctaccgtcccggccgcgtatacgcagtcgggctgcttaaaaactcattagcatgcatgcagtaactaaacgagggactagatgtagcttatatatgactagc

SEQ ID NO: 366905 - DNA, 279 bp, Zea mays
  unsure (1)..(279): unsure at all n locations
gcacgccaacgcgggagcataccgacagctccagggaacgattgaaggagtaggagaaagagaaagaacaagcgtgggatacagacaacgagaagaccgacgagccgcgacaccgncactgccaccccgctccgaagtcctagctcgtgctacaaaggaataaaccaaggccggcccatgtcttcatctagcggctgtaaccgcgggcgagcagtcctcccagtcactgcctccctcgttcccttcctgctcctcctcgtcgtcgtctcgtgccaggcc

SEQ ID NO: 366906 - DNA, 272 bp, Zea mays
gcgtgttccgctcccccgcagcgcctggctcccctttccttgcgcgacgcgagatcggcgagattgccctcaacgcgctcgcgtcgcgccgcggatcccccaccctcctcccctctgcacgccgccatcaactcgcaccggccctcgcccgtgatccatcctctcccccgcggcaatgatatggcgtccccccctcaaccgaccattcccgcagcggatccgcaccaacccgttcgcgccggcctctggaagaagaatccaccgaaggcgaa

SEQ ID NO: 366907 - DNA, 295 bp, Zea mays
ctttatcatacaaatgtgttgaagttgcttatctgaaggctgcatactacaaacacccaactgcaagcaaagatagacaagtgttacaggcagttgtacagactgcaccaggtgaatcaccatcatcttcagcctcagacattgataattaaaataacaatggattatccaaggcctcttcaagcaaggatgctaattcaccacaagtggctggaaatcatttgttgctggccgctcgaaatcaaccacacttgatgcggttactagcttatacaaatgatgtcaatagtgcctt

SEQ ID NO: 366908 - DNA, 116 bp, Zea mays
cgcccgtcaagcacatcaaggccacgctcgccaagcgcgctcttcgggggcaagcccaaggagggcaccataccggaggagggcggcgcgggggccggggccggagccggaaccgg

SEQ ID NO: 366909 - DNA, 334 bp, Zea mays
  unsure (1)..(334): unsure at all n locations
accggccggaatcccgggcgacccactcaccgcggactgagcagaagcgagaggaagaacggggagggtcatgaaccnccacactgcccccatcaaccacaaaacaacgaccaagcccttcaatacctaaaattgcttgcaatgaaactggcagagcagtaccagcaaagcatccttcaagggcacattgacagctatcaacggaggacgcgcttgaaaaaacgggaacacctcagcgctcagccagccgaaaaagaaagcatcctggacaaggcataccaactgctggctacagaacgacgaggaacaaaagaaggacataacaacaattgca

SEQ ID NO: 366910 - DNA, 138 bp, Zea mays
  unsure (1)..(138): unsure at all n locations
cggagtaaaaacacaaaccaagaaaaacccaacgggaggcgnaaaagaaganaaaaaaccggaaaacacagnnaagaggaaaaaangaaaaaaaaacgccaaacaaaacaaaaaaaaaaaaacaagaacaacaacacc

SEQ ID NO: 366911 - DNA, 221 bp, Zea mays
cccaacttgaccggcactgcctgcgcctgctgtgccgcgcagtccaatggagagggccgcgtcggtcacctcctcgctgctcggcggcggcagcggttccggggcacaggcggcaacggtgaagtacagcctcgggtacccgcagaagtcgtgcaggggaatctgcgcgccccaagccccaattaccggcacggggttcaggtgggatccccacgtttatc

SEQ ID NO: 366912 - DNA, 366 bp, Zea mays
  unsure (1)..(366): unsure at all n locations
agtcnngcctgccccttccatcctccttcccgaggccttcttccatgctcgcccgcgcgctccacacgtggcccgacgtcgagctcgccttccatcctactccccaccccattcttgcagcctcggtcgcgcgctccgtatgaccccgacgagagcgcttgtctcccttctatcagccggcaaggagcaggcctgcaccccgctattcgacacgcttgacggcgaaaaggatctctggagcacagtctcatctacgacgcgagcaagggcggtgcttgccatgcgatccacggggaccaggcatcacactcnctatctcttgggatgggacaggcaggaggaacaggtcaccgaagaggaacgcgc

SEQ ID NO: 366913 - DNA, 161 bp, Zea mays
  unsure (1)..(161): unsure at all n locations
cccactcgaccgcccacgcgtccggcgcggaggggcaggaacactaagggccggccgcccaccacacccccgtgcgagttnaggggcgcctaccaggagctgaggaagcaagctagggaggagcatccaacaggaaggccaaaggaggaagacccagagcg

SEQ ID NO: 366914 - DNA, 385 bp, Zea mays
  unsure (1)..(385): unsure at all n locations
gtgcngtgcctcctgctgctgaactactagcttgtatagttgtatgtacatgagcattttgaccgtttttaaaaaaaaaaaaaaaaaaaaaaaaaaaaaaaaaaaaaaaaaaatgaaaaaagaaaaaaaaaaaaaaaaaaaaaaaaaaaaaaaaaaaaaaaaaaaaaaaaaaaaaaaaaaaaaaggggggcccgtttaaaagaaacaaagttaaaaaaccggggaatgaaacgtaatagttttttaatggggaaccaaaatttaaattactgggccgtggttaaaaaaacgtgagaaagggaaaaacctgggggtaaccaaaaaaaatggcttggaaaaaaaacccctttttcaaaggggggaaaaaagaaaaaaggcccaaaca

SEQ ID NO: 366915 - DNA, 87 bp, Zea mays
  unsure (1)..(87): unsure at all n locations
attcaaacactgactccgcttcccgtccccatcgcgctgttcaagaacgggagccgacgaacccacgnnganagggaggagatgcac

SEQ ID NO: 366916 - DNA, 82 bp, Zea mays
  unsure (1)..(82): unsure at all n locations
agggaaagtggaacaccgcggaccggccggaaggcccggncgacccacgcgacgnaacttcnncaaaggagcagcacgccgc

SEQ ID NO: 366917 - DNA, 371 bp, Zea mays
  unsure (1)..(371): unsure at all n locations
ngtacncttcaacttgnctccagagtccagaaccggcagtcgccggcccacttgctcccgagggccgttcgccgccgccgccgctgccgctgccgctgacttctcctgaggagctaactgcctaggccgcttcccttgcagcgccgcgccgaggagcgggggagaccgaaattggcgcgccttcgccgcgctgccgcctcgccgattcgaccgacacgttcctctcccgttcgggcaggcaggtgccgatcccgcgcgccggcctgcgcgggcgcggcggcgcgaggcgtgatgtgcagcggatcggagcgcgggcgtgatcgcgtctccgccgagtagaggccggtgaggcccgcgggtgccggtgtgcc

SEQ ID NO: 366918 - DNA, 244 bp, Zea mays
  unsure (1)..(244): unsure at all n locations
ataaattgaccgaagcaggggcagcagagggagcgattgatgcgganaagccgccggagccaaccgnnggaagaggggaaaaaaaaggcagaggagcgaaaacaccgaagaagaaaaggaagcagacagaggaagaaccggcaccggaaagaaagcaacaaccagaaaaggcaccagaggcnacaggggaagaaacacaacagagccgaagaggacnnagggagagaaaagaacgacaacacaa

SEQ ID NO: 366919 - DNA, 570 bp, Zea mays
  unsure (1)..(570): unsure at all n locations
cggcattantcgccgcggagngntcgagaatcgggggcttgtacttcgagtgcctcctcggtggcctcgcgtaaagcacggcggcgcgaagacggctgcggaattcaggtgctttccctgctttcaacgccggctggtttcgtctgacccgggaacattgcttggtaagcgcacccagctccaacacacctcgccgcccaagattgacctgcttgccaccacatctagcgcgcttaccttggccacacgcccaatggaacgaaccatttcatcgcgttggcgttgctttggagtgacgtcaggtgtgtgaagctgcccaactgctttcttcgcgaggtacttgcacgggacaattgacaaagcctgtatggtccaaggaactgaagttgcagacttcctccgaaggaatagtttttcttcctttcaccggactacaattcggtgccattcgtcaggaattgagggtcaactgactaactctgctcgcttctttcccaagctcagggttcctccacaactgtccagtgttcatcgcaagctccttgcaggtttacgatggaactaggaaac

SEQ ID NO: 366920 - DNA, 187 bp, Zea mays
cccactgaccgcccacgcgtccggaaaaaggaaagagacacagaaggggttggagagaaacggatcacgggcggaaggttccagccctagcacagcaatggcgggttggtgcgaggaggcggtggcgttgctgcagcgccccgcggtggcggagatggccgttgacgtgttgctttgcgcggtgctg

SEQ ID NO: 366921 - DNA, 309 bp, Zea mays
  unsure (1)..(309): unsure at all n locations
gggatancgaggaggtgctcaaggacgtgatgagggggaccatttccaagctcccggacttcctgcccctcctcacgccgctcttcaggaagcagctcaccgaggcccgcggcctgcgccgccgccagctcaactgcctcgtgccgctcgtccgcgcgcgaagggacttcctccgcgacggcaccgcggcagcggcggacggcgtggagatgatgagcgggcccggggaagcgtacgtggactcgctcttcgacccggagccgcccggcctggggaagcgccttccgtcaggaggcagctcgacacgct

SEQ ID NO: 366922 - DNA, 185 bp, Zea mays
ctacgcgtccgggatcaagcaagcttagcttgtgcatatgcataagacttctgaaaaaagagcgattccattcgctgtctgtacatacgctgatacgcaccaccagaactgaagctacatgtcatgtgtgttgatgtatgtatatgctgctagggtcgtggccatcgaatagattcatattttgc

SEQ ID NO: 366923 - DNA, 360 bp, Zea mays
gatgaaaccgtaccacttcatcaggccaaatggcgagcaattcaccatggctaaaccagaggggccaaccattggcgtgaagctgttcgtggacaaagagaagaagaaggtgctctttgctgagtccgacaaggagttcgtcgatgtgctcttcagcttcctcaccatgccgctcggcaccatcgtccgcctgctggacaagcagtctcagatggggtgtctcgaccagctgtacaagagcgtggaggacctcaacttggagttctttcaaaccagggctttgcaagggcgatgcttctgaaaccgattaaaagcggcttccggccactgctgtcgccttaagatcaaacgttgttggaa

SEQ ID NO: 366924 - DNA, 52 bp, Zea mays
gctagaatctatggattcgatgtgaagtcccaaagggtagcttttagggagg

SEQ ID NO: 366925 - DNA, 248 bp, Zea mays
  unsure (1)..(248): unsure at all n locations
cccactgnccggccagaaccaaggaggcatcgcgggcccagattccgctggcgacagcgagctaatgcgccggngcncgngaggcacggcaacgcgacgacggagcaaaccggagagccacggnccgcccnccaaaaagaggacaagggncncagaaaaccgagcaaaagggaagcccagagcacaacaacaanagaggccccaacaaaggggaaaaccaagaccagcgcaagacaaccaagaaacga

SEQ ID NO: 366926 - DNA, 340 bp, Zea mays
  unsure (1)..(340): unsure at all n locations
cccactcgnccgaaagactgcccatgaagcagctgtgagggtcgtgctgaaggtatcccaccaggatagggccataccaggaaggtgatgagcagccaatcgaacacgaagagtatcagggcatccgatggcttataacttcattcctatcgggcacagacagtcatcagcatcgaggggattgacggagccagcagaatgtgggaggcttgagcctgagaaaatctcccatcttgtcctatggccttccaccaatcgggcgctgattctctagacttctagtgaggacttcaatgagtcgggtttagttggccagaacttgggctaaatctaatggcag

SEQ ID NO: 366927 - DNA, 113 bp, Zea mays
  unsure (1)..(113): unsure at all n locations
gttaaaacttagccagagatacgnccaggagaggggctgtattgaagggagccgcccctgcccccccnggggggaagtgaaaagaacaggaccccagacaaacaaaacgcaga

SEQ ID NO: 366928 - DNA, 249 bp, Zea mays
cctcgaccaccttgccgaccggagcgtgtgaacggtactgtttcgcccgcgtgagatgacggccacctccgcgttcgagtcgtccccggagatggagcggttcctctgcgagcggctgctgaacacggagcagcccatcgcggagcgcttccgggcgctcttttccctccgtaaccttcgcggggatgctccgcgccgagcccttcttcaagctgcttgggtccctttttacttgcttggccctgaggt

SEQ ID NO: 366929 - DNA, 109 bp, Zea mays
  unsure (1)..(109): unsure at all n locations
acacataanggtgaccgagaacngacagaggactggcgggtttatttaatcgagcacccccagaacgcctgctatgcttctagactaatcaatttgctacgacctgatc

SEQ ID NO: 366930 - DNA, 127 bp, Zea mays
cgtacgcgtgggttccactccgacattcacgtgcagctgtcgggagcaggcaacggcgccggatctaagcgaactcgccgccgccgctccagcccgtggcgcctacctcgccggcgtcggtgtcgcg

SEQ ID NO: 366931 - DNA, 291 bp, Zea mays
aataagcgagcgacgacgcgaacggccacgcgggggggaggtttagacggaacacacccaccaccacagccgacagaaaagaaacaaagggaaacggaagcaagcacgaacggaacaaaacaacagaccagaagcgagaaaacaagcagggaaacacaacagaagacaagacagaccgagaaaacgagcagacaacagcaacaccagccgcggaccagaagcgaagccaccagacaccagcacgagagaagggaaagcaagccccgaagaaagagcacaaaagcaaggaca

SEQ ID NO: 366932 - DNA, 309 bp, Zea mays
  unsure (1)..(309): unsure at all n locations
atcgtcgttgccgccgatgctgngatccgtctcttggccgatggcttcggccaagcgtctgtaagggagggggactggaattgtcctcagtgtggtaatgtcaacttcagttttagaaatgtttgcaaccgtggagcctgtggtgcaccccgtccatcaccgagtccaagtccaagaatgatgtcaggacctgctgcttttggatatgaccggtcacctctattttacggaggagggtggtggccccccacctccaaaaacgcttggaactggtagctatggagctccatatccacaccttgggatgcg

SEQ ID NO: 366933 - DNA, 430 bp, Zea mays
gttgctttgcttgctcttggaatcttcggaaccgaaggccaccgcgccaaccgcccaattaccgaaccaaaccctaccggtcgcggctcctccatagtccatactctcgcgcgcctaaaccctagccatcctcctcgccgccggcgaccgccgccatgagccgctacgacggccgcgctgcggacgcgggctcctaccgcgaccgccgcaggtaattgaccgccccacggtcaggctctaaagtctgaaccctaagccctggccgcggccgacgcgagtgactgtgcttccccttgtgttccatccagcgagggggcgttcggaggcgggtcgagggcgttctcggcgccgagcaaggcggacgcttccgcggcggcctcggagctagatgggctgccgcgcttcgagaagaacttctacgtggagtcac

SEQ ID NO: 366934 - DNA, 187 bp, Zea mays
atacaggttacaatacaaactcgatttttaacaacctaataaaatgaaccgttagtaaattgggcaaatataacgaatgccaaggccttttaatcccttaccaactacatacaactttagttgcatgtagcatgcttcaccgtgtatacgagtcaaaaatcaaaaagaagaaaagaatgttgaagtc

SEQ ID NO: 366935 - DNA, 436 bp, Zea mays
gtttcaaagtcataaactcgttgtcacttccggatttaaggacaaattcagacatattttatatgtgtggcaggatcaagtttcacacatatggtgactcagtgtatagaaaacaatgtcacatttttattatataataattctaaaaaaaaatagctaaataaatacacatgtgttgaatgtgtgggggtcggtggagtgtttgtatgtgttcttgcctcttttttcctctctcttattataaagatacacatgtgtgtttgagaaaaaaaattgcaggtgcacagaaaaccactcgaactgaataatgattggcattcaaagtctgctttggcccagctctgactacgatgaacagtctaggaagacaacacagagctggtaatttgggcctccacgttacggcgtactagcttctcatctccaactacgcacc

SEQ ID NO: 366936 - DNA, 197 bp, Zea mays
cccccttaggggcatcttccctcccttttatagtctaaggaaggggttaggtacaagaaaaatgagtatcgatctcctcctagattaccggatctatctttatctacaactccttatatctcgagcgttgttgttaaaatgcaaaattttcagataagacctccttatcacccaatcttctctccaatgtaggattc

SEQ ID NO: 366937 - DNA, 117 bp, Zea mays
atcaggtctgtttgtttgcactgggcactgggtacgctcagttggggagggcaaaagagactatggatttgctggagaagatgttggctaaggacgtgaagcctgatggagtaacct

SEQ ID NO: 366938 - DNA, 185 bp, Zea mays
gagacccgtgcttctatgcccgctgccgctagccggcgtgctgctcatctggtggcgggtcggctacctcccaccatacggcgacggcggctcctgctgtagatccctgcttaccccgagctttaagctcgtgctacctgcatacctatccgtaaggagagagagagagagccgagaaggttcgg

SEQ ID NO: 366939 - DNA, 155 bp, Zea mays
actgaattacaggacatgttattatggcccctttacccaaatggaacccgaacgggaaaccaaatttggcagtacttaattgcccccagcgcaaaggagggcgtaaaccttgtccttgaggggcgccttgtcgtcccccaggggggcgggggggg

SEQ ID NO: 366940 - DNA, 291 bp, Zea mays
aatccttaactgcagcgtcttgcttgcccaccgcaaacacccaatgaaaagacaagcctcaagttcaagggcacagttttgtccctcgaaggcatggcatggcatggcatggcatgggtgagatcactgacgacaagcattacaagcggacggccaaagatgaaagaagcttgagggtcgttacatggacatgaggaaagctagggggtgggctagccaggagcttgaacccaaccctggcaaagcgcctccatcccccgcaaaaaaacttctgccaggcaggcccccaaa

SEQ ID NO: 366941 - DNA, 458 bp, Zea mays
gctgactcgattctccccgccggcggtgcccgccactaaccgcgttgccctctacctccgccgcgcgcgcctcatcgactccctgcgcgtccgtctgcgttcctcctccccttcctcacctcctgcgctcccacccgacgaccccgtggtcgcgctccacgccatccgcgcggcgcccacggtgtcctgcgcgctctccctttttcgcgcgatcccctcccaaccaccgccgccgctcccactctaccaagctctcgccgcccgcctctcctccctcgccgcgctctccgacctccgcgcccacctcgcttctttcccgctgcctgctccgccgctcgcgcggctccgcctgctcgccgccgcgggggaccgcgcctccgcgctcgaagccttcggttccctcccggccaccccgcgccgccctgcggaggcgcacaacgtcgtcatcgaactccacg

SEQ ID NO: 366942 - DNA, 67 bp, Zea mays
atgaaggcatgtactccgaatgttacagagatctaaaatccataagcttcgcataaggggcggaaat

SEQ ID NO: 366943 - DNA, 421 bp, Zea mays
cccacgcctccatttatacgttcccataggcttgctttcataaacgggaggtttactaagatctcctgcgcgtattgctgattgactaagtgctcatatgacaagttcagctctaattactagacagacttttacagctttacacagacattatttgtaaatgagtctatgagacttacacgccagtgtatgtctattcatctcgatactaatgattgcaggttgagctgccttttcgattctcagaaaaagactggctctgcactcggataattttaaaaaggatagtgcacagcagtccactggggaattgaacaatttgttcgatactcttatggattctggaggtgaccagagttcacagcctcaagatgctggcaatgaaaccagctatacaaattggaaagaccttcccatggag

SEQ ID NO: 366944 - DNA, 318 bp, Zea mays
ggatatatagatgttgctatcacggaacacacactgagccaatgagatgtagtaacgagtggtggcacaccttgctctcaagtcggcatgctcttggactatcagagagaaccaatggtgggagcatcagccgtgttatccgtggccgcaagaggttggagtggctgatatcttgccattttggcatttcggtcaggagcagggctagatgccagagggaaaagctggtgtgagctgttacgtaattttcatttacaccaaagataaagttatgcatagttacctcaccttgttcaaactagctatgatctttgatgc

SEQ ID NO: 366945 - DNA, 187 bp, Zea mays
ggcctacgcctctagctcgtgccgttgggtagcagagatatccgaccgccgtcgtgggcgattcttgcccaagccgccgatccggcctcaagaggagagcagagagggagtgcttcgatgccgctgacaccgctatcgccatgcgctggattcataggagttttggatttgggcggatgtgtgctgt

SEQ ID NO: 366946 - DNA, 375 bp, Zea mays
cccacgtttccgcccacgcgtccgccagtctactccatccaataggcttctcttcgagtattcagcaacatcacaggaatgattcattttttgttattgcgcacagcaagaattggttgtagcagctgcgtcgtacaaagattaggtggcctgataatcgttttttttgtagataagcaagctttgataagttgtacgtgtacaatcgctcagttgtattgtatttacattctttctcggaaacaaagtttctgagcctgtaaataataggtagcgatcttagcgtcgggtgtagagagaagtataaatgaatgaacgtttcctgtctaaaaaaaaaaaatatttactttacttttttatattatatctatttct

SEQ ID NO: 366947 - DNA, 524 bp, Zea mays
ccctttcgtccggttggcttctcctccccctccggttcgggttcgggttcgtgaggttctccggggttcgggttcgtgggtgagcggatcgagatggcggcgtcggatgttgagtaccgctgcttcgtcggcggcctcgcctgggccacggacgaccactccctccacaacgccttcagcacctacggcgaggtcctcgagtccaagatcatcctcgatcgggagacgcagaggtcccgcggcttcggcttcgtcaccttctccacggaggaggcgatgcggaacgccatcgagggcatgaacggcaaggagctggacggccgcaacatcaccgtcaacgaggcccagtcccgcggcggccgtggaggcggcggcggtgggtacggtggtggccgtggaggcggcggctactgcggtggcgggcgccgtgatggcggtggcggctacggcggtggcggcggctacggtggcggcggcggctacggtggtagtggcggcggctactgcggtggcaaccgtggcgg

SEQ ID NO: 366948 - DNA, 152 bp, Zea mays
  unsure (1)..(152): unsure at all n locations
attaantnaanntatacgctttaattactgcacaggggctttaatcataatcaagtagccttttaaaaccccctctacttacaaagatcatattatatcctatacctttcctcatattcaactaacatactttatgacgcacattaaataac

SEQ ID NO: 366949 - DNA, 343 bp, Zea mays
caaagattgcccggggaagccggcgagctggagcgtggggcagcttggaaccggtcgggcttctccctccccgtcgctcccgacctcttcctcctcctaatttaatcccacccggcctccccgttctccccgaccgcatccccccttaacctcccttcctcctccttctcctgcggtcccaactcccatacttccgttcaggaggcaggcaggcaggaaggcaggttcgaggggggattggctactctcctgctccatggttctgagagtgatgctatcgcacgctatgatcttgccgtcgatggtgccaaccctctttgtgggtcttcccggattgaacaag

SEQ ID NO: 366950 - DNA, 285 bp, Zea mays
actatatgtagagctgagacgccggcgggcaccggcccggaattccgggcgacgacaccacgcgcgcgcattttgtcgcgaggcaatgcagacccgactgcggaggaagctgagaacgatggtaccgggccaaaggccgagacgacacgggatggagccaccaccgccgactaccaggaagggcgtgaaaaggggcttgaagccctacaagtcgctgacgaaggcgaaggtcgtacagagcccccatgggaggaagtataataccgatgacctgatcgacggagg

SEQ ID NO: 366951 - DNA, 243 bp, Zea mays
accactctccacccgcgcctccaaaatccaaatccgatcgggctccgcggactccagatcccgccggcgggcggagacggcgagctccaggcggccaagaagcccccccctcgcagcgctcctctcctctgcctctgcgaatcccttaccagggggaaataacattgcctgaaagtttttcaggccctggtgtagcagctagaattacccagtttaatggctgactaacgagcttttgatggt

SEQ ID NO: 366952 - DNA, 257 bp, Zea mays
cggtcgcgtgggcggacgcgtgggccgtaaaccaagcgacgacgcggcccacgccatgagctgatgaacattgggccagtcgctgctccagtcctctgctcttccttccgcccacgccagcgccaacgccagcgcctcggggccgtgcgggggctagggtttggattcgtgggtggagtccgaggctagatccagcaggaggaggggaggtgaggtgccaccctatattgcattctaacttttgttgactctttact

SEQ ID NO: 366953 - DNA, 449 bp, Zea mays
gacgtttctttgtcttcatcaccggtggcgctgctccagggggaggactcttcgccgcaggggtgggacctcatcaccaccactgcctgggtgcgggaccactggtcccgcgagcgcgcccacctggacgagatggccgaacacaccgacctggccgggctcctccccgactactaggacctcttctacgactaccagttcgagcagggccccgtcgtctaccgcgtttagaacaagatatggtgctcaaggcgctgaacatgaccttcccgcaaggcgcgaggcgacaccccggatgcaggttccgggagaaactccagtaacgccgagaaagccgaccaagtaccgccgggatgacccaagagcaacgctccccgcgtgatccaacagcctcgctaggttcgctgggggaacctcataagaaggctgttgcccattttgcagccttg

SEQ ID NO: 366954 - DNA, 422 bp, Zea mays
ttttgcgtccgcccacgcggccgcaacattagctggtgttcccgatgagccgggagatactccagggaagtctgagcaaggcgagcggagggaggtgcctctcaatgatttgcaaagttataaatggagcttgaccatgcgccctttcttgctgatgacaacgatctgttacatcggaactgatacatttgtatattactaaccatgaattttgtctaccgatgtagacaagctatggaaatgagaatgtcctactgactaaaggatcttacaactttgggcttacagcacatatgggagaagattctcgaagaaacggctgccataaacaggctgccttgactgagatcttgattggagtcctactgctcggagttacatatgtcacagattttgctagcctgtggacaataaggcattgt

SEQ ID NO: 366955 - DNA, 207 bp, Zea mays
ggatgtgtttcgatccggattcagggcgggccaggctacacggaggtcacggacggtccggatgcggtgacctcgtacgaggatttgattcagttaatcgaatagttgtaatgttgatcgatatcaattcttgttatatatagtgatgtaaaggttagtggataaacatattgtgattgtattggatttacttaaaatatttgaatt

SEQ ID NO: 366956 - DNA, 587 bp, Zea mays
cccacgcgtccgcccacgcgtccgcaacatttgctgctttatcttatcaggcaactgatttcgtgatgcaaattccgatgccgattggattgagtccctctgcatcatttgcaaagttataaatggaacaagtaagctaactgcttttgtaaaggattagatctgttacatttgatttgatatttttgtatattactaaccatgaattttgtttttttctttattggtgctattgttataagaatgtttaaatgactaaaggatataacaactttgggcttacagcacatatgagagatgactatcaaaaattgggttccattaattggttgccttgactgattttcttgattggagtcctactgctcggagtttgtgtaagaacttattaggatgtccagtcaaaactatctctctgattccctctcagtttagtagatgccatagtgtgtagagttttgcccccttgaattcttatacaaactttgaataagcattgtctgtataaagatgctcatgtcattttcccaccaagtcaccatgactaaagaaagctaggttgtgcctataatggcatggtatttgtt

SEQ ID NO: 366957 - DNA, 581 bp, Zea mays
  unsure (1)..(581): unsure at all n locations
cccacgcgtccggcaacctcgctgggctcccatatagcgggcccgcggagccgggatatactccagggaagtcgagcaaggagagcgtggattgtggactacaggggtaaagatcgagtgagcatcgcttcaccatgcgcccttctctctgctgcgcacctctttttcttctgctactattacatttggcatttgctagacctctctttcctctaccgagtaagacaaagaatgaagagaagaagcccatacagacgtttcggccatataacattgctcatcgtggatcaaatggggaaattcccgaggaaacagctgctgcatacatgctttcagattatcagatatcgattactgcaaaggactatggaatttacatatgtcaagtttttttctagcatgtggacaataaggtattctaaattggaaaatcacatttaacaaaagaaatcctattgcagagagctattgaagaaggggcggattttatagagtctgacatccttgctagcanagatggngccttgatttgttttcatgatgtaacacttgatgatacaactgatgttgccaagcgtaag

SEQ ID NO: 366958 - DNA, 455 bp, Zea mays
ccctttcgtccggggttggcttctcctccccctccgggtcgggttcgggttcgtgagggtctccggggttcgggttcgtgggtgagcggatcgagatggcggcgtcggatgttgagtaccgctgcttcgtcggcggcctcgcctgggccacggacgaccactccctccacaacgccttcagcacctacggcgaggtcctcgagtccaagatcatcctcgatcgggagacgcagaggtcccgcggcttcggcttcgtcaccttctccacggaggaggcgatgcggaacgccatcgagggcatgaacggcaaggagctggacggccgcaacatcaccgtcaacgaggcccagtcccgcggcggccgtggaggcggcggcggtgggtacagtggtggccgtggaggcggcggctacagcggtggcgggcgccgtgatggccgtggctgctaccgcggt

SEQ ID NO: 366959 - DNA, 577 bp, Zea mays
ttcatttttaatgcccataacattcgtgggcagtacggtgcctttttggcttcggttagctggcccagccgaatatttgagcaactatttgtcatatataatttgacaaagtttgctatttctcggtatactcttatactcgccgatctgcccaaccgggacttctgagcgcatggaacatgagggagatgcggccagcgggatcagcatcacaaccaccaggagacttatgccgcgcaccaccaccagcagacgtaggtggcgcaccaccaccagcagtacgcgcagaggcagcatcagcaccagcaccacggtcacaatcgccatcagcaacagcagcagcaccacatttaccagcagcaacagcagcagtggctgcggcggagccagattgcccgcgagaccttgggcgcagccgtgaccagcgagccgaagtccctggcgccttccacggtcgacgatggcgtcgattcgagttcacatgattggaaggcccattgaagctgccgcctcagaacacgctcaggacgaggatgtccattaccagggaatgagttgagactatttttaagctgac

SEQ ID NO: 366960 - DNA, 439 bp, Zea mays
ggctttgttgatggccgcaaacgtggcgctaggtgctggggcctattgaaagcctacacgggcgtctacgacgactcgctactgcctcgccgacgcttcctgccctcccgaccaagaaaagcaagctcccgagccaccaccattatggcggagttgggcgatgacccgatcagggaatggattcttacggaagggaaggccacacaacaaaaagggatcaggtccattggtggtggctgccttaactccgctcaacgctatgataccgacgcggaccccttttttgcgaagaccaacagccgcattggtccagtaatgctagaaggggacgctcttggttagaaggtaatgtatgacacataagttgattcgtgctgcggtgccatacaaggttggatattgacctacaggtggttctattatcatcatggagattatt

SEQ ID NO: 366961 - DNA, 64 bp, Zea mays
gaggttattcggcactacgagctgctggtggaggacgtggactgcataaagtcgggccgtgttc

SEQ ID NO: 366962 - DNA, 437 bp, Zea mays
cccatttttgcggtttcctagaaccaattcgacaggggcggatttagactgttgggcggtactttcacctcgatcatgggtggtgtctgctcaaggaagagaagccaattggtggatcaaggtgactctctccagacatccccaaggttttcaaagactcagtagcttaaaatggctgttgctacactgcctagcccagttctgatgcttccgggaagggacagggaaatgaacctgggcggggcccgtccctcatgggggtttgagtggctagagtctgccatgatatctgcaggtattctactatcgcaatgcttgcaagggatctcagccagcacattttcaatgaattagaaaatacaaaccgttttacagaggcattactttaagtttttaccgattgtgctctgcatgacattggcttaggggagtaccct

SEQ ID NO: 366963 - DNA, 387 bp, Zea mays
aaggggggaatcaactcggtacaaactgcaaaacattactggttgaaaacttgaataatcacatctgaaatgcatcaaaagcaaggatctggatgtcgtaaaaagcatatgcagcatgcaacgacaaacacctatgtgcagcataaaagtaagctgtcctctacttgcctcaatattctttaaggccagcctgttctattctgaaatcagacatacatactactttcataatctgcccacatcctcagtgcaataccatctctcaaagcattacccatgtcgcattcactgttgaaagctgaaacatcataaccatacgtgtcatcaccactaggaagattcactgttttacgggacgcaaatggaattgtttgctcacataacaac

SEQ ID NO: 366964 - DNA, 430 bp, Zea mays
ggcatattcgtcggtgccggaacccacgctcgccgggggcgaatgcatatgtaggctgctgtttgaacacacggacaattggacgagctagactctgcggcgccgggggtggggtgctacttctcagggctgaacgcactgtactacaccgacagacgacggcgtggtgacttatgggttaacgactaccacttacgcgtgctccggaggcatcgcgatgccggccctgcgggttagtcggtcttcctcgtcagggaggtcgatgacgtcgaaaccgagtacgacagcgcggttggggcagagcccagcccctcatggatcgccgggaagaaaggcgtcgacccatcacacatgttagctgacaggacatgtgctctcaagaaagttcatgttcagagcgatcaggacttggagcttgatcaggacgaga

SEQ ID NO: 366965 - DNA, 550 bp, Zea mays
cgaaccccgcgtcgcccttcgctcccaacccccggcgccatgccgcccgcctcccccctcctcttcgtcttcctcgccgccgccatcgtcgcctgcgccaccgcagcgacgtcgacgtcgacgtcgtcccaggcggacgcgctccaggccttcagggccgccctcaccgtcccgcccgaggccgctcccttcttcgccacgtggagcgccaccgcggcatccccctgcggcttcacgggcgtcaactgcaccggcggcaacgtcacggcgctctccctgccggcactcaagctgtccgccgcgacggtcccgttcgccgccctctgcgccgccctgccttccctcgccgcgctgtccctgccggagaactccctcgcgggcgccatcgacggcgtcgtcaagtgcaccgcgctccaggagctcaacctcgcgttcaacggcttcacgggcgccgtgccggacctctcgccgctggccgggctgcgcagtctcaacgtctcgttcaactgcttcgacggcgcgttcccgtggcgctcgctcgatacacgcc

SEQ ID NO: 366966 - DNA, 346 bp, Zea mays
ggcatatgccaccgccgccgggctcgcgctgcacgggtgtatttttaatgtgacgccgggttctccgtacattgccactagagagacgcaaaccaatcaggtatgaaggatcgcgaagacggtagcgggcgacggtgaggtctctgctagcaaagacaaggccatcgtcggcggcgccgagcggacgacgatggactgcgtgcaggataagaacgtgatgcatcttatgaagcttaataccgctctattccctgtccgctacactgaaaaatactaccaggacgccatcgcctccaagggtttgtccaaactagcatactttagtgatatttgagttggtgcgata

SEQ ID NO: 366967 - DNA, 539 bp, Zea mays
cggacgtgtgggcggacgcgtgggcggacgcgagggtggacctccaccacaccagaccggcgccttcaccctcaggcctccgcctctgtgtcaggttatctccgggtccttacttacggacgacgattcttctacgcgaaagattcctggctgcactgtcgactctcgtctcgtttttcgcgtgcatggtgctggacggctgggagatcgcgatgggcctggatctggggctggacactaggctgttcgccgcgcggagcgcccgagggatggacaagggcgctgaaccggcggggctccagtcctgcatcacgagccatcaggtggagcgcaagaagatcgaggtgttcaggcacgagcttcaggtctggctacgcctactcggcgacgtgatcgacgagttgaaggaggatgctgccaagagaggagagtacgaccaccgtgcactgacggtggacgacggtcacaaacggcagtggatgagcccagctcagttgtgggtggacagcgacgccaaattgggcgagtctgacaaagag

SEQ ID NO: 366968 - DNA, 140 bp, Zea mays
acttgattaaaggcaatatatgtaaggaaaattgcccggctgcaacgaagggcagactagacacaccctatgaccatgttttggggacccacccacgcgttcgcccacgcgttcgcccacgcgtccgcccacgcgtccga

SEQ ID NO: 366969 - DNA, 416 bp, Zea mays
  unsure (1)..(416): unsure at all n locations
gtatcaaataaaatatattaacataaacctcacgggttattatcttggcataagctgcccaattcacctttagaaacgttacaaaggcttcctctgcccctattccttctccggcaacatacaggctaccataactctccatggcatggagaaaccacaaaaaggttataataaatactaggtgtgatcttcccgcccacattagcatcaccatcatatgtaagcttaatcgaaaagatacagtaaacatggcaaggtggtattggccttgcgccaaggagtagctctgacctcctgtttgttcagtcttccatccatggccgtcctccagtgagngagggcggtgctacaggcctacagcggcctaggtctttttgaattgcaacagctcgggcacttgtactgctttatgctct

SEQ ID NO: 366970 - DNA, 489 bp, Zea mays
cggtcgcgtggggtacaactttacactaacaaacgtgaagtaaaagaatcagagggagtactaagattgtgctaatatttggatatggtagatgaatctgattatgaggtttgcttaagtactctacttcaagcttttactaatctttctggagaagtagctattgatgaccgtggccaaacctgtagtaaagccttttagtcctgtgcatgttggacctgcctagagatggaacccagcaaaatccataggaaagagcaaaaaagaaagaaagagggattaataagagccacaggccaaatctttactaacttgtaactagtatgatttgacaagattatcctgtggtttgaacttggaaactgtgcagcactgcagtatctcctgtgcaagactaagttaattgctgattggggagaacgtttcttagtctctaacagtgaaaaagaatcatgatgagtatagggagaggagtaatttttagggaat

SEQ ID NO: 366971 - DNA, 336 bp, Zea mays
gggggcaaagcaacacatgggtcttaaaaaccgggggggggattaaaattttatagggccgaacggcaacacatggatcttaaaaaccgccgttggggggggttaaaagccccccagcccacactggggggttccaggccctttttaatttaaaacaataaaataccccggtttcgaaaacattttaaaaatggggaagacggccaatcgtaaaaaaaggggaaacataattttatcaactccaacgggggcttttttttttaaaggggtcccagggaactttataaagcccccaccacaaatttaggaaagggggccccaaaccggggggggggg

SEQ ID NO: 366972 - DNA, 306 bp, Zea mays
gaaccatcagcaacaggcttcgacagagttgtctggtatttgctcatcagccatcattaatttatcatcagtgtaatattacacagtgtaacattacagattgtaccagtagtaatacaatacacaggaattgaagatgcatgcgtccatcaatccctcaagactgttcctagctagacagtatccacctatcactaagagaaacatgtctatttcctaccaagactggacaccctagctctagggagctctaggtgatgtcttctaggtgatgtctgacttccaaagacgacgtccttcattcac

SEQ ID NO: 366973 - DNA, 155 bp, Zea mays
ggtttttactctcgcctccggccaatctcgtcacggggggtatattaaaaaaacttgtgctgctaaagactcgccaatcagaccatcgcctacctacatagatcattcacttgaacaaacagtctggacaaacgctcagatctcttatagcacac

SEQ ID NO: 366974 - DNA, 153 bp, Zea mays
gcccacacaccacacaaaaggacaggggtgggcttttagaaccccgttccggttaaaacaacccaatgaccggatgccactaaacttgcttctcttcactcttaagcaaacggaatagtgcaagatgcagcaccccgacacacatgctacgaa

SEQ ID NO: 366975 - DNA, 54 bp, Zea mays
ggtttattcgccaaaacagcaccgcagagaagaacggggggaatttgaagaccc

SEQ ID NO: 366976 - DNA, 352 bp, Zea mays
ggggaaaagaacgaaaacagactgttcctttcatacaatgggacgccctaactcgtgaacgcagccatactcaacacaaaggccatgtgaagggcacatttttactcaccacaaaggcacattgtacagaataaggaccttcccgggccaaattttcctctagctaatcagtatcaccggaacatgttctgaaatttccctcattcttattcgcctatggttaccaaaatgccagtgttaccttattatgagatcatccgctgcagagttacaggtcaaaccttcgccggctccggcttctccccatcgaattccgtctccacgttcggcgttatcatcactgacggatcta

SEQ ID NO: 366977 - DNA, 212 bp, Zea mays
  unsure (1)..(212): unsure at all n locations
ggcatttgtgttcatacttcaacggaagttccactagtgtngctttttaaatcgggtcgtggggtttataacccacgatcgatgttgagttccatgtccaggaattcttacgcatgtcggaacccccctattcaaccctcctacatcagtgcttttgcttgcccttggaaaagggggtggcgtcacttatactcgtctgcctcctgttgccc

SEQ ID NO: 366978 - DNA, 529 bp, Zea mays
cccacgcgtccgcgcgaggcgaagccagggagcggggggaggagcggcgccttatgaccaagcgcctggaccgcttcctgcggaggctggccgaggagaaggcggcgtggaagtcccgggtccgggacaaggcccgccacgccgtggccgccctccaggacgagctaggcgcagagcggaggcaccggaggcagctggagcaggccaacgccaggcttctgcgcgacctggcggaggcgcgggcggcggccaagcagcaggcgcagagctacgagatggagcgcaaggcgcgggagctgatggaggacgcctgctccgagctcacgcgggaggtggaggaggaccaggccgaggtggagctgctccgcggggagtgcctgcgcatgcgggaggagatggaggaggagcgccgcatgctgcagatggccgaggtgtggcgggaggagcgcgtgcagatgaagctgtccgacgccaagctcgcgctcgagaacatgtacacgcacctcaaccgcttgcaggcggagatgga

SEQ ID NO: 366979 - DNA, 528 bp, Zea mays
cccattcgtccgcccacgcgtccgttcgattaggaggggcattttgaacctgttgcgcttctgctctccttggctaccggtctgtgacaaagctagcatctcacgcgagttgcacaaggactaaccctatacagctccaggaggtcggtgccctagccacctaggccaccttcctggagaccgggcggctacgacggggacgaacgaccgcgatgggcttcgagcgtgtggagctgcggtgttccagggagctggacccaccgccgagctggacgctcggagatgtgctcgatgagcttgacgcgctggatgccacccggcgcgctgcgccacccacgcctctgaagcagacgccggattgggctaacggtggtggagagaaggcctatgtgatgcgggctgatgacgacgactaagactacacagaagatgaagacaatggtacaagtggcgggaagtgcctggctctcgtggccaaaggagcatggttatcgtgtaatgatcttgcatcaagtgattcagaggatg

SEQ ID NO: 366980 - DNA, 312 bp, Zea mays
caaccaaaaatcagtggcattttacttgaggcggtacttgtaaacgtcagggtcaactacatgtaggactacagggggcagtttatttatgtacatgaacagccgcctgaggttctccctagtaagggtatccgggtccaccacgtcgttgtcgtgggtgtatatccacaggctgcccggtttaacctcctccaggcaggcccaacagagggggcaggacttcaatttctcgttcctggagggcaaagagcgaacgaacttgtgttatgacaaccccggcccaccattgggatcatcatcacttataatagc

SEQ ID NO: 366981 - DNA, 127 bp, Zea mays
ggtttatattctcacctccgtccactctcttcccggggctaattttaaaacaccgtgcggggcaaaataatccaaagtcagacaatcgaataacgagaaaccttatattctttaccaaacagtcatg

SEQ ID NO: 366982 - DNA, 428 bp, Zea mays
gccccggggggccccgccccggaatcccgggcgagacccacgcgcgcgctttttcttgctcccgcacaaagccaaggaatgggggggcatttaaagaagaggtcccttgccaccaacacaagtagatatccagggcagatccagccgaatacaagatgacgctgtgacccaccgctgtgtgctttcttgaaggccggaaagtcaactacaattgggccgctgggcgtcgttgagctagacccctcctccagctcttgatccggtccatggggctatggcatggcaagccgacgcaaatcccggaggccgaggctgacgaggatacccacgaagccttcggtgcgggcaacggtggcgacggtgccacctctaccgttgaggcggccgcccgcggcgaaccccggcacgccgaaacagcccaaggttcc

SEQ ID NO: 366983 - DNA, 321 bp, Zea mays
ggcgttttcaggacgtcgcccactgggaaatgagcgtgggggattttcaaacgggttcggggtatgataagcccgagccaatgatccactccctctgtacgcaaaagccctaacgtgtaatctattcgtatccgctagcatagtgcgtcaccttttaaaatgcatcctgacttatatgcgtccacaccttgcactgaacccggttggttagcgccaatgttttcttgaccagttgcgacgtccacttgaagaccttaaccgtaaacattgcactaacatgcattattaccgcggccaggtcgatcattggctataattgac

SEQ ID NO: 366984 - DNA, 319 bp, Zea mays
acatccagaggattagtatttctccatacaagaaaaaaaatgtttcagggggtataccaaacaggggggggggggagtttcttaaattcttttacttagggggggacatggtacgacacggacagaattattagagggtacatagctcgcaaagctaagggttgggctgggctgaacttttatccatcgcaggggggcgaacgaagcgcgcaacggggggctcgggggtcataaaggggcaaaccaacccttgaggcccctacctaccctggggctgaggatgccaaacctgctgctgctgctgctgcggacccgtggg

SEQ ID NO: 366985 - DNA, 465 bp, Zea mays
agattgttgaagcacaaaacaactcataggcgttttgtaaattagataagtttagtactccccacacatattccgtgtgacaagcccatgcaaaaatatgagaaggcctgcaacaatgaccccaatcattatctacttccaggtagtagacactgaacaaacacaaagtttagtactccccacacatattccgtgtgacaagcccatgctaaaatatgagaaggcctgcaacaatgaccacaatcattatctacttccaggtagaagacactgaacaaacacaatgagttaaaggttgttgtaggtttgaatagatctggatccttctgtgcccatgcaagtatcccacctagagatattcgtcaaataatgtgggataggaagtccaatcatccgccaacaagttcaactgcaaagtcctatctccattgcgatgcctccaaaactgcagattacaatcgaatc

SEQ ID NO: 366986 - DNA, 293 bp, Zea mays
gccatttattctctcctacgcgctcgggctcccctgggccaaactaaaccctcagtgcgtggccgcttacttcttgttcgtaagaccgaggagcgcgacagccgaaagggtcctgtacagagttatttcacgatgacggctcgaacacctgtggactatgatctctctgacgtcactgaaacccaggcctgcttggacttggacatcaaagagaatggcctgaaggataaatttgcatctcgcttgtagttacccttgctggctaaccataacgccgctcagtatcagattgc

SEQ ID NO: 366987 - DNA, 60 bp, Zea mays
cattgtttcgtcaaaccgcgcgtgcgaattacaccggggggcacattacgaccaggttgg

SEQ ID NO: 366988 - DNA, 456 bp, Zea mays
gttagattctggacttaggcaattcagtgacctgcctggggggattgacaagcatgctgagcatttgtatggcaaatccaatgttatgcacgtgccaggacgaaaacgctgttaaaggcgataaccttatctgcactcaaaaggtgaatcgattgagaacgaattttaccaatttgcggtgcattgatcggcatctggcgcaaggtctagatggcggctattttgacggaaagaatttttgattagaccacataagatgatctgtagagccttatggagaacttactccgtgcatgtgtgatatgtgaggataaatttgatgactattatgacacgctgacagaacacacattgcagaatgtttgtcttagcgtgcccaccatgtcaggatgctgctgaggaatattgcatgccagctgtcccaaaaggatggcaacgaaccgtgccaacgtatca

SEQ ID NO: 366989 - DNA, 59 bp, Zea mays
ggtatatgtgcgaccgaaccgagcacaagaactacgggggaaggttttcaaaggctctc

SEQ ID NO: 366990 - DNA, 114 bp, Zea mays
ggggacgcccgcgggggcccggccggagaatccggggcgacccaccacgcgcgcgcttttagctcgtgtgccgattcttgcaatcagacgggggggaattttttaacacagtaa

SEQ ID NO: 366991 - DNA, 406 bp, Zea mays
cagggcaattatatttttccaggttcacgtccatagatgtctacatattcagagaactgcaacagtgcacactcctttcaaagactgggtgcagcaaagattgttcttactgccctcagtaacattggatcgaaagctcaaaaatgatggacaaggatgttggagcagcaaaaaaaggtactgttattgtctgggaggtaacaagttggcttcaattattttttaaactgtcataaagtacatctaatcttattgttgattgcgggcttaaaactttataactcatgaaattctttgttgtattattattgctcgacataacgagaatatgattgccatccaaactaaacttgtatcagaatttgtgctttctgtttttgtataagactgccaaacattttgattt

SEQ ID NO: 366992 - DNA, 559 bp, Zea mays
  unsure (1)..(559): unsure at all n locations
gccctctaccccacgctctgcgcctctgcctagggttacgagcgacgctgcgccgtcggctggtgcattgacgagcgacgccgcgcggggttacgagcgacgccgtcggctggtgcgttactctcgtgtgcacagcaatggcgaatctccagagaggagaggaacccaaggtacggttcgtgttttctgttgttattcgatgattctattttcacttggcttatatgcattggccctcactgcccacaggccacaacccacatggccttgttaacacgtattccagtatattacgttttcactcgcgatatcgtacttttggttcgtcgtgtactcgtgtggaaggcggctgcctgctcccgcgacccgcggtctcttccgtctcggaggtgggagcgagcgatcagcggcgtcgccgggtggatccaaagcgcgcgagaaaatgcagggcggatccagccagtggcggatctagaattgatccaagagggggctactatatatggnctcttttgttctacacggctcttattcgccctaattggtttaagattagaag

SEQ ID NO: 366993 - DNA, 147 bp, Zea mays
cggatttttcggaaaccgcgagggcagggacccacgggggggccaggatcaataggttgtcgatttgaacgaccactacattaatacggacgacctgaggcacaagagcatgtacggccccgagcacggtctttggacgcacagtga

SEQ ID NO: 366994 - DNA, 90 bp, Zea mays
gttactttcgggaatccggcacgtcagagacctaccgggccgcatagaccaatacgttctgaatctgcccctcaagtccattcgtccgaa

SEQ ID NO: 366995 - DNA, 362 bp, Zea mays
ttctttttttttttttttttttttttttttttttttttttttttttttttttttttttttttttttttttggaaagcccaaacccaaatgggctaattagaggggaacaggataaaaacattagcgggcccacacggatacactggagctaagccttgctcaaccgggccggaaaacatattacttacattttactaaagggcatcgccctaggggcctatgatcaaacgggaacttaaactaatcctaaccacctgtttggaaggcaggaaaaaagttcggccctgggtatttggggggaaaaacagcctataccaaagtcaggggttcaaaagggggcctaaacattttttacaaaactt

SEQ ID NO: 366996 - DNA, 142 bp, Zea mays
gcatctttcgggcatcgagctcatccgcggactgcctggggtcatcgtacaggccgcgctcactctgccccacaatccgctttttccccatgctcactcggcacggatcgaagtcatgatccgattcatcgtgtgaaccata

SEQ ID NO: 366997 - DNA, 452 bp, Zea mays
gttgttttctcctccccctccggttcgggttcgggggcgtgaggttctccggggttcgggttcgagggtgagcggatcgagatggcggcgtcggatgttgagtaccgctgcttcgtcggcggcctcgcctgggccacggacgaccactccctccacaacgccttcagcacctacggagaggtcctcgagtccaagatcatcctcgatcgggagacgcagaggtcccgcggcttcggcttcgtcaccttctccacggaggaggcgatgcggaacgccatcgagggcatgaacggcaaggagctggacggccgcaacatcaccgtcaacgaggcccagtcccgcggcggtcgtggaggcggcggcggagggtacggtggtggccgtggaggcggcggctacggcggtggcgggcgccgagatggcggtggcggctactgcggtggcggcggcta

SEQ ID NO: 366998 - DNA, 344 bp, Zea mays
gggaggggggcatactactgccgtacaaattgaattggcccatttggtccaatccaaaggcggacatttatacactatataaataccacaatttttctcaaacacagatcaatccattccataaatacacccacaatatagctccacattgggaaaaaaaccaggtttacagctatcacaagccaccctgaatcaaaagaatgaaataattatgttaaaattgaaaggccaacgccatgccattgaaagatagctcgattttccatcacaaatcttggaagcagacaatgctacagagccagccatttccttttttcctggacaaaaagccttttgagatgcct

SEQ ID NO: 366999 - DNA, 188 bp, Zea mays
ccgactgttcggaatcttcagccgcagggtactactggacaaagaggaccattagctggtctacgttaacgacgcttgaattactacgaggtaccatgaccacatgactgtgcacgaccccgggcacggacaggggaagctcagctacatcggggttaaggactccttgacgcttgtgatggggaaga

SEQ ID NO: 367000 - DNA, 266 bp, Zea mays
cggtccgtaattggggggaccaacgcgtccgccgtattttcgcagattgtcttcctggagaggaaatgtggggtttggtcaaatagctcgccggtcataacgagctcgagactattaaccggtaggagggcgccgtgtttgcatggaaccaaagaattctggaggaaagaagcacgagctccccaggacgccattcctggaggtttatgatggataggtagacgtaagctgacatgatgtccggatgcatcgaaaggattgacgct

SEQ ID NO: 367001 - DNA, 364 bp, Zea mays
cgcacgagacggcaatagctctgttaatctagcctctcaagggcactgtgcgggggtatttataggtatccgggtgcccagcgtcccgtgttaaggacgcatgtgccctcagacacctaggttatccccggaatattctcataaagcggggttacagaccgtaattacagggagacctttacaaattaggctcgtaacgcgcaacggccacgcagggcctgttacaatgggccggatcacacgcgggcctccactctggacgaggtcgcaggatgatacgacctcgtcgcgggtcttcgtccggcggcgtatgagacgaagggtaagtctgcccgttgttttgtcaccgttggtgcagcgagta

SEQ ID NO: 367002 - DNA, 106 bp, Zea mays
cccacgtttacgggctcctctagttctggaactgcatgggatggactgagggatatctgcgtatgatgcgctcgccatcaattactctctcgatgattgactggcc

SEQ ID NO: 367003 - DNA, 433 bp, Zea mays
cttacgcgtccgcttcgtactcgcctacctccgggggtcaaacctttcccccttctcccaattccttccgccggccgccgctccacccgtacgacgacaccatgagggagtgcatttcgatccacatcggccaggccggtatccaggtcggaaacgcgtgctgggagctgtactgccttgagcatggcattcaggctgacggtcagatgcccggtgacaagaccattgggggaggtgatgatgctttcaacaccttcttcagtgagactggtgctgggaagcacgtgccccgtgctgtttttgttgaccttgaacccactgtcatcgatgaggtgagaactggcacctaccgccagctcttccaccctgagcagctcatcagtgggaaggaggatgcagccaacaactttgcccgtgggcactacaccattgg

SEQ ID NO: 367004 - DNA, 370 bp, Zea mays
tttactcggccgcaaggattcatatctgtccggcagagtataatccatctaagctctgcgaaagtcgcattagtgaggctgcaatagtggagaatgaacatacgaggctagtcgcacggaatgccatcattgaaaaacgtgcagaagagcattggctgtaaatattgtcaaatgaaagagaggaggtacccccgagattgagcgtgcaaatgaaaactgaggataaagaaaggtgtgaggcattatcactgaacagagggctaggtgagcatgacccgattccctagagatagaggaagcaaatagagctgacactgatatgatgctcatgatatggataaggcatgcaacaaacacgtggatgctgaag

SEQ ID NO: 367005 - DNA, 311 bp, Zea mays
aacaaaacgaaaaactcttccttttcctggaattgggcaagcttcaaaacaaagggtcacccctagggctgggccccaacatatggtaggtcagctcctaaaaacttacccctcccgttttggtagaaaagggggccttacaaacaggggagggggttcatttcatcgatcctaaactgaaacaggccattcatggggggtttggggcacaaaaacaacccttgccaggggtgaacaaaaattctgacattatccaaccctggtccctagctttttttttgaagggtccatatgggggggaaacttttttg

SEQ ID NO: 367006 - DNA, 424 bp, Zea mays
cgtacgcgtgggcgcctggacctccccttccaccaccgcctccttctccgccctctcctcctcgcccgcgtccgtccccagtctccggcaggctccttacccccaccgtcggccctgcttcttccttctcccctacgcgtgatgccctcaacaccgtcgccctctcttcttcaccatcgcctcgctcgcctcctccgtcgtcgagccagcccttctccgtatctgtcgccatcacacccggatctgcctccgccatgaccgacgaccaacgagagcggcgtgagacggctttaggcgacgaaggcggcccacaccatgtcagccaacgacgcacagcggtggaagcacgcgatgggagctgacgacgcccttcctcggacggtatgcctacccccaatcaggtcatcgtcggcctcctgcagct

SEQ ID NO: 367007 - DNA, 269 bp, Zea mays
ccacgcgtttctcttgtgccgcgccgagccgcccttgataggggggctgaacaaagcgcgtgatgcttgtcctccggggatccaccaaatgggcgcgcggatccgtacccctacctctcaggctgattaatccttctcccttacacgtatatcacgaatcaccatgttcaccgatgctttactataggttcggttgtcttctccgtcgtccagccatgactactatgaacatggtaccagcacaccacacattgtgtgcgtcatcaccg

SEQ ID NO: 367008 - DNA, 272 bp, Zea mays
ggcacgggaggcacaatattggggaaaataccccctaatcaatgggagggaggcacaaacagccatttggttttacatcccaaatttcaccatatttgtctgctaaacaaatgggcatggaaaacatccatctggtttacatcccaaattttatttctgggctcctttggttgggccatatgggctggggggatatggggctgccgggggggggggaagaagaaggtcctttcccttaatttgcagggccactgttcggttgaacttgccca

SEQ ID NO: 367009 - DNA, 378 bp, Zea mays
tcgctcaaagaatccatgcactatgcaggcaggagggtcgattgctgggaggcattaaagcggacgatgacgccttggcctcgctgcaatcttgcatattgctgctgcagcgcttgtttaagagccaaccattcacatataccttgtttgacgccaagccaccggtattgacggaaccgtgccctccgctccgctccccttactcttggctttcgggtacttgctccctaaaccagccatatgttgctatttatgccacagccactaccaagagcggcgggagcaaagagtgccagagtatcacccctgaggccgtgcaaagccactgctcgcagtctctgtctgctcgcctggtgagctgtctacttctgcgactcg

SEQ ID NO: 367010 - DNA, 419 bp, Zea mays
tttctcacgcgtccgcccacgcgtccgaggctaactgccatgctgcatccagtgcagtgtattttatggatgcatgtttacatccttaaaacattgtgtaggattagaataaatctgtagagttgtttgagggagatgaccatatcatataggaactggttgccaatctgtgatccgtagagaggaaaatggtaaactattctagccttttcgattgggatggagtgactgtagttcatatatgagcaattgatatttgtaatttagaattgtccggtgagtcgtactgtagcttattataaattgggatatttaaagttcatgtgaaagttcaatcttgttcacttctaacaatgtactaaccctttcctgtgaggctgtgacttagactgtcggagaaacgttggctaatttccctt

SEQ ID NO: 367011 - DNA, 399 bp, Zea mays
ctcacgcgtccgggccgtccattgctcgccggcgccgccgtgtccggcgaccgaccgccagcttcgtcggacatgggctctacaagccctaacccggactgtctctccgcgcccttgctctccgactccatctcgcccgcccacgccgccaacgggcacgcagccaaccatcggcaccaccacgacggcgccgccgcggactacgtgtgcggcgacgcgggggacccgtacgcgttcctctcggaggatcggccgacgcgggaccgtgggccgtccccggccgacccgttccgcaacggaacgccggctgtggtgcggcgacgcgtacgcgtgggcgaggacgctgctgctgctgccggtcgcggcggtgcggctggcgctgatcgggctcgacatcgg

SEQ ID NO: 367012 - DNA, 125 bp, Zea mays
agtagcagtactgacattacattcattacgcgctggcaaaacatgcatatggagaaaagatagtacagtactacacataccaactagtcactcactatatatatacttgtgtttgtgtattgttg

SEQ ID NO: 367013 - DNA, 202 bp, Zea mays
ttgtttaatacacaaacacaagaatcatagggggagtgattcgatggaatgtgtagtactgcaccagacagagtacacatgactgctgggcagaccgaacgaatggatagcagtcagtactgacgaatgagaccaaggggtcaggcggtctataagaaccaagattacaaaaggcagcatgcgactgaaaatggataaaata

SEQ ID NO: 367014 - DNA, 305 bp, Zea mays
ataggaaggcaacagaactagttaatagtacttgtgaagcaagcgttttggggttacatcagatccaagcgcaaacatgcatgcggagacgaacgtaactgaaaatgaaacagcaaacataggtctcatctggggtctactgtccccagataaatggggaaccaaatcttaaaagaaacgcgcggtaggggtaccggtggaacaaaactagtgatagggcatgcatcgcgggtgtctttaattttgcaattaaatctactgctgctcccttatgatgaattgaagaggagtcctcatcatcacat

SEQ ID NO: 367015 - DNA, 314 bp, Zea mays
agtgcgttttgttgacgatgactcctcttcaataccatcataggggagcatgaagtggactgagagtgcataattaaagacaccctcgaagcatgccctatcactagttctgatgcaccggaaccactaccgggcgtttcttataagactcggttccccatatatctggacacagtagacgcccagatgagacctatgtatgctgttatattatcagacacgttcgtctccggatgcatgtttgcgcttggatctgatgcaaccccaaaacgcttgatgaacaagtactattaactagttatgatgccttcctc

SEQ ID NO: 367016 - DNA, 416 bp, Zea mays
gtgcccctccctctcccgggaggccgggacaagaggcaacgggacacccgcaaggccgcaagaagaaacagcgcagcaacaaatacgctgaagagtggaaagcgagagccgacacgacctcgcccgacctgcgctggtcgactgtgagtttttcccccctgtcgcctcccctgctgggccgtgggccgcggcctcggcgcatggcgtcgtcacgggtgatggcgtcgtcgtctccgccgcagcacgccggggcgggctcgtcctcggacctcgcgcgattcaagagtagcggcgtcggatcgatgaacatggacgacatcatccgtaacatctacggccccgaggccgtcaacgccgccgccgccgaaagcgccggcctcggcccggcggagccctccctggcggccccggaggct

SEQ ID NO: 367017 - DNA, 346 bp, Zea mays
acacgctttgtgtccggaaaagaaggagcacgagcgggggggtctaataggcatagagcatagatgtgacgcggagcgatcctctccgagcacatcccgaccacgcctgctcaccgcggcggcgcagcgtggcccaccgtcaagtgcaagacggcaaaaggcgaacgactacgaggccgcgttccgggagttcgactaggactcccaggaggaggaggaggacaagggggtggcggagagcaagccccccctcgttgtccgcgcctccgtacgcggcgacgcaacccaaggcgcgccaagagcagcaggaacccgcgccaggcgcccgaccagcatcaaaacaggg

SEQ ID NO: 367018 - DNA, 418 bp, Zea mays
ttactcgtgggcggcaaagcaagcttccttccttgcgaacgcaactgaccgctccggattcgccggcccccgccgccgcttcgccttctctctccctcgtccacggcaaccaactaaccgtcgagatattggcggggcgccgatgctccctgactccccgtagcgcgttgcggatgctgtgggcctgtgaggctcgctgccgccgctttgggatctgggctgctgccggagcggcagcggcggttgtgactggcgccggcgatggcgatatcggcgaaggagaggaagctgagcaggctcgggagttgtaagggcggagcggcggctggaagtggcagcggcggcggcggcggttcgcctgctgccagggcccaccggtcggtggcggcggcgccgcagcggcgtgtcttcgctgcgc

SEQ ID NO: 367019 - DNA, 283 bp, Zea mays
acgcaagcatgttctacactgcgtctctcatggccaaagcgctcatcaccttctagatacgtctgtcccggatctacctcctgacaataccatcgatgccttgcgcagctccataccccacctccagagagctcatgattgcctcgtatcgtcaccgaagacaatcctcggtgggcgggctcccagggatagatagcttgcccagctaagccccgctccggtttgctgctcggtctgtggccgggttgtcgattgagagaagcgattccgcgactgatacaag

SEQ ID NO: 367020 - DNA, 385 bp, Zea mays
gacaagcatcggacaaccattaattccaaaaaaacaaaagtaccaaacataccttgtaaatgttaaaccaaacgtctgcttggctgtatatattactcttagtgcagataaaatataggactatgcaaaaccgcgactctcaagtctagcaaccgtgaagcaatatcaatggtggaccaattcaaacacattgaccatataagattatatcctcatctgctacaccatattttcccttgcggcggttatatgctaccccaatttcttccctgtagatctttcacttgcatctgccaaaatggaattgtgtctttctatagaatatttcagcaagagcgtattcagtgtttccctttctacttcagaggatcatctcatgttttga

SEQ ID NO: 367021 - DNA, 475 bp, Zea mays
agctggcccggctgcaccgccgcggactgactggggggtcacccggcctctatttacgcgaggaccctctcaagggcagggggcaattttgaatacactcttgtgtgaaatcggatgaagagacacgaggtccttgggcctgatgcatgtgaacgacctacagggaggaaacagacgtagcatataagcgtggaatgggaaaatagaggggtagtcagagcaggacttgaagccaatgggcaaagcgatggaaatgttgcaccggaagatatgaggatcacgagctgctctaggtggaggagtaagtggttcaagcatagtcctaaaagaagtggctagtggcgctacttttccaggctaacatgctgtggggtaagcacacacaagggatgagggtgactggagccaattcggcaaccatgaatgtttcgagcttgtcgctcgtcaatttggaatgtgcggacaatgtaaagga

SEQ ID NO: 367022 - DNA, 422 bp, Zea mays
ctctctggttgctcgatgagagcgatgtgtctcatgttgggtccgaggatgaggggctggaggaggattttgtcatcatagctaaccaagctgaggaggaggaggaggatgaggatggagacatggaagaaaagcaagagtggaatggtgtcttcagtgatgttgaagaggaggagttcgattttgaggaggatgagccaaagccaagagtgagacgattgctggatgaacaatttgatttgcttgctttagaggaatatggagacagtgatgatgatgacatgggtgttaaaggtggggaatatgaactgccaaatgaggctattgatgaactgaaactgttccaaaatcagaatgtatgtgttgatgaagaatatagaacaccagcagattttgttcgtcaaaaactggattcaagcatg

SEQ ID NO: 367023 - DNA, 376 bp, Zea mays
gctcaaaacttacaaagtttagcaaattgtcaaaaaatatgttacaatagttttcaggttttaggttacaatagtttttattggacaaacagataaatagaaaataggttacaacatctgaagttaagaacagagcacacacacctggaaggtttatcaaactgtcaaaaagatcatctggcacatcagtgtcccctgtggcaaccttctcaatagcactggataaggtatccccgacacttttgaatgcagcaatcaacccctcatcttcactttcacgtttttttgccttcttcctggtcttgcttgtcaagatgttatggcattatcatcacaagtggacatccttttagtgaaagcatgtgccatcaccttt

SEQ ID NO: 367024 - DNA, 373 bp, Zea mays
ggggcacaaaaatggggggagcaggcagatcctgatatatgcatggacagcaaacagggttcaattaaacaagggaaaggccccgaagagaaagaggaacatgcagagggtaacatggattgcataatgatgggacaaagtcctcctaaaacctaaacatatcaatgggaatccaagagatgcaatgtacagacacatttacaggggagcagacattccccagcctttcgttttccctgccctcctaaacaaccatccataagaatggcattatacttccccatttactggcacaaaaccaagctcgttttggttttaaccaaacaaaatatagaatgggaaccaaaagccagcaaaacccaataaattaacg

SEQ ID NO: 367025 - DNA, 373 bp, Zea mays
aggcggctacggccttatcatccctaggatcgactgcgatgtggctaccgttggggatgcgccaacaccctccgaccctgctgtgtcggaggccgactacatagcgcacgcccatggcagcaatgcgctgcatgaaactgagcacatccgggatcgttcgactaaccaaaaccagaacgagagagagtgctccgcttggcactgtgaaaatcaaacaaaggcactccacgtcaacctctcatctgtatgaggttcatgcatcggtgcgatgaatgattgagagataccgtcacggcacacagacagctgagctgtagatgtgcacgggatactctccctcatgctattaccacccgttggcacactggctttt

SEQ ID NO: 367026 - DNA, 400 bp, Zea mays
aaacaacacaccattttcggcatccatccattcatgtgactgctcgcagaactaacgagctaagattcctcccctcaccggcgcttgttcccatggtctcccaacaccgagccgccaattattcccactgtctcctcaccacgagatgctgcccttgtgctctgcatgcagatgcaggtgctaccgaggaagaggaggcgctcccggtcctggcttctaaacgttgtgaaccagatcttggtgcggttgcccgagtagtttactcgtctagaggaggggtttggttgtcgacccgatttggtgggggcttcgccactgggataaggggacagtttggcctactggatctttattgccagttgttggttctgtcctttccattgggctggtactttcttga

SEQ ID NO: 367027 - DNA, 458 bp, Zea mays
gcgaggcgacacgccgaccagccagtcagccgcccggtcacagccatgcgcctacacgccggcgcacgcctcgcgctcctgctcgcccgccgctccctctcctcctacccccgtatcccgcgggtgcacacagggatacggagcgaggcgccctcccggagctctcccttctatccgccgagcagcgcccgcaggtccttccacgggaccaggccggtggcggcaagggactactacgatgtgctcggcgtcagcaagagcgccagccaggcggagatcaaaaaggcctattatgggactctaaaggatgaacaaaaaagatcattatatgatcaggttggccctgatcagtatgagaaaactgcttctggcggaggcggaactggcttcgagggtggttttggaaatccatttgaggatatttttggtggtggctgtggcggtggtggaatgaatga

SEQ ID NO: 367028 - DNA, 360 bp, Zea mays
cccacgcgtccgttttttcgtccggtgccttcgttgtttgctccacagtccacacacacacacgtccagctagctgcactgcaccaatggccgccgtcgaggtccaggtcccgactgccgctcccgtcgaggaggctgcccagctggccgccgcctccgccgtcgagaccccgaacgaggagaccgctgctccggcggtggagaccgaggtcgtcgtcgctaaggagccggagccggtggaggccgagactgagactgagaccaaggaggccgaggccgttgctgagccgaccgaggcagagcccaaggaagcagagccggaggccgccgcgccggcagcagagacggaggtcaaggaag

SEQ ID NO: 367029 - DNA, 197 bp, Zea mays
gaactcaaccgacagctgccgatttttgacccttacttttcacgtcatgaatgctcgtcagctcgtgagacgtgacgccgtgtcctgaaaaaaaaaaagacccgtcccggcgacccccacacccttcaatccggggaaaaaaagcaacagctcgattgcccggatcttccaaaaccctctagatctcggttggtggt

SEQ ID NO: 367030 - DNA, 357 bp, Zea mays
ctcatcagatccatgtttgcgagagaccgaggcaggcagacatgccgctgccggtgccgctgccgccgctcctgctctgcgtctgcgtctgcgtctgcctgtgcctctacctcacccacctcccccgtctcgcctactccgagcccgacgccgacatggcggcgctgctggcgttcctcgccggcgtgggccgaggtgccaccgcgcgcgcgcgcatcaactggcccaccaccccgctcgcctgcgccggccccggaccgggctggacgggagtcacctgcagccccgacggcgcgcgcgtcgtggcgttgcaccttccggggctgggcctctcgggcgccgtgcaacccggcacgc

SEQ ID NO: 367031 - DNA, 416 bp, Zea mays
ctactgaggctgtatatcgcgaggcaatatctagggggcagggtccatactataacggggggacctcacctattgatccccaggctgtgtatgcaagtggtggaaaagctcatggaagggacacaatgtttgttaacgtgatcgacttgagccacgtgagggatcaccgtggaggtttgacgaggactgctgctcgtagcttccctcgctccactcaagatccagcaaaagtggagcatctgcgcgacgaactcatgcgaaatcctctttgctaggggaggggtcgaccatcactcagaactgtatcccgagggtgatcgacgaccataaactggcatgttattgtggtctgatacttgagacttttattatgaggatgatgatgagatgtgtcttcttcaaatgctgaacgagga

SEQ ID NO: 367032 - DNA, 533 bp, Zea mays
ataagatgtttctaggagagaatttattgtttgccggggaaactggtaatatgctactggaaactacagatgatatcaacaatgaacagcatgatgatgcagctgtctctgagccccaatcggcagataatgatggaagtggaccttctggtgcatcatcactaccaccagagaaagatgcatacatgggatctaaagaggattctattaacgactatcatgatccttcagttgtctctgagttccaaattgctaataatgatgcaaaatgtgaaccttctattgcattcttgccagaaaaggataaagatttggaagctaataaaacgagcttggaaggtccagcaaaaacaggccaattgtcatctgaagctagtggcagcactttgatgatctcagagccacaagtattggttgtgtccccacaagatgggactctgtctttcatgaacaataatacgaacaaccaagagatgtgagggttcctgaatgtttcccctgataccatggataccgaaatgcagatggactct

SEQ ID NO: 367033 - DNA, 148 bp, Zea mays
tttattgttaggcccactccggctaacacgggggggcgtttagaaaagaacagggggatgcacaattcgccactgagcgcgccctacgggctggatttgggcaccgcaagaggaaccgcgacacacacagcctggcggatgctggagg

SEQ ID NO: 367034 - DNA, 425 bp, Zea mays
tttcattcgttcgcggacgcttgggcgcttggggggggggtggcacacaatggggggggtgccaaagaatatacgttgccatataaggtctgaccttgaaagcctctcctcttgatccccgcggaggtggaggggagggcgattccgaagcggactacacacacctactcgagcgaggacgcactgccggagggacccgagtccgaccttttcgtatactactgcgagcactgcgcctcatatgtactaatgaccaatgcccaaatgaagaaaatgcccaagcgaaagactgacagagcacatgttttagacaaggctaagcatctttcaaggctaaatgttaaggaggcaggaaaagtaatgtcgaaacgtggtgaatgaaagcttgaaacgcagtttcacatgagctgtgtgggatgtgacct

SEQ ID NO: 367035 - DNA, 113 bp, Zea mays
acccgcccactcgtttgcccacgcgcaacaaaacccaaggggggggggtgaaagggacaacagcagggggaaccaaacagagagagagagagagaaacaggcacagggggccg

SEQ ID NO: 367036 - DNA, 501 bp, Zea mays
cgggccacgcgacccgccattcttttccgcagaggctagccgcctcaccgggggcggtgttgctaggagcgcccgatccgctcactcctagggcgccagctcgccgcgagcgccgaggcctgctgggtacccctgaacggcgccactttcctttgccaaagctctgggtccgctggggggggtagcacaggatccggaggaggcccatggaacgctgacggacacaagcgcttctggcctggacatgggagctggggctgtttcaggcgtacagaggcacaggcatggtttggggctgtgcccttgtggctctcgctcccaaggagcagcgtgtggggagcccctcccaaacatgggctaccgctatgaacattgtgaatattttcgacagggtaacttttagaccaactacaattattgcctatcaagctgaaagcggcttaggggagacgacaacactacttaatgggggggaacaagcagctatattggttagggagg

SEQ ID NO: 367037 - DNA, 278 bp, Zea mays
  unsure (1)..(278): unsure at all n locations
tcttnttaatttttcttttttttttttttttgcagcgaatcttaatggttcccaggggcggccatagtagttatttgttcaccaaactaattgcaaacgtcatcctaggcaatcataacgtgttcattctacgcaatcataacgtggtcaatacgcataggagtagcgtagcaaattatggagatactcccagcttcagtcaaaccttcggtgatgcagtaagaccttcacggtagcatataacgcaaccgtgttggaaacttgtactagtgcttttg

SEQ ID NO: 367038 - DNA, 263 bp, Zea mays
aactttcattttctaagcgatccaactgaaggattggcggggttccatgaaagggtcactgtgtaacctaacgaacgactgggggctggcagacatactacatacccggctatgctgactgctagtggtggttgactgctgcttagaaagccgaggatgaacacgtcgtcatggcgtatgatgacaagggtgaccagtctggggagaacaccacgactatggccaagcccggtaacacctggaaactgattgggatgcacgcg

SEQ ID NO: 367039 - DNA, 278 bp, Zea mays
gcctttcttttctctccggagcgcaggaaccacggggggggggttgatttgacatgggctttggtcaaccaacaccgggcgctccaagattgccagctgactatgctggttggatgggggacataaaacctttgtcggacttgagggatacatacaaggctgatacgggcttctatgttgaagagacggccagggttgcgcacgatcattcctggaaccatgggaagcctcttctgcttgtgctacatgggaggaataccgactctgggaatttctca

SEQ ID NO: 367040 - DNA, 532 bp, Zea mays
tggtctcgtgggtcgcccacgcgtacgggagcggacacacacacaaccagatgtcccccaaatgcacccgtcggcacctgcgcttcaagatgcagatctttgtgaaaaccctgactggcaagactatcaccctcgaggtggagtcgcctgacaccattgacaacgttaaggccaagatccaggacaaggagggcatgcccccagaccagcagcggctcatcttggctggcaaacagcttgaggacgggcgcacgcttgctgactacaacatccagaaggagagcaccctccaccttgtgctccgtctcaggggaggcatgcagatctttgagaaaaccctgaccggcaagactatcaccctcgaggaggaggcctttgacaccattgacaacgtcaaggccaagatccaggacagggagggcatccgttcagaccagcagcggctcatctttgctgggaagcagcttgaggacgggcgcacgcttgccgactacaacatccagaaggagagcaccctgcacttggtgctgcg

SEQ ID NO: 367041 - DNA, 185 bp, Zea mays
ttttggttttaccttttttttttttttttttttttgtttttttttgggtttttttggttttttagggaattgggaaatatccgggactatagacaaaggcccaaaatacattttattccttactcaaagccccgagttgttacttcgcaaaattaatgggaaatttacaacgggggggtttccct

SEQ ID NO: 367042 - DNA, 503 bp, Zea mays
acccgctttttcatctctggcgtggtgtgtgaggctgctaggggggggctatttgaccctggccgctgcgtaggatcgatacttcagcatcatctaccagggggctgtgcgaatcacaggaatcagttatcttaaggatcgcctacagggtccttgaattcgattcaggagcagtcgtttgctgtcggtcgctggaggcagacgggctgtcctagatcgaattgactcgcgagaagaagccatgtcgacagtggctcctgcccatagcgctggtgaccagaccaccaatgttgtgcagaagctgtctctggagggcaaggatggctccgacactggcaagaagccttctgggatgccatatggaggatctacccacgctggagatgcacagagcgctgcttcacaagtggacaggtcgataacacctctactacaggaggccatggatcctaatttcttctaccagcccagtgcatatgcctttccagcctattacttcccta

SEQ ID NO: 367043 - DNA, 530 bp, Zea mays
cccattcgttcgttatatcctctggaacccccgatagtagatgagttcgactgggaaatggatgattacgaggattttgcagatcagaaagtccaagaaggtagcctgcccgagggcgagaaagaaaaattcaaggagttcctgaaggagaaggttagagaaaggaagagagagctgagacaggttcacaatcatgggaattatttattttatccacaagagatttgcattagtattcaatgtttccacaaacttatttaggctaaagaagccaggaagaaagctattgatgatatggatcctgcgatgaaagaggcattcgagaatatcaaattttacaaattttatcctgtgaaaaccccagacacgcctgatgtaaacaatgtaaaggctaggtacatcaacagatactacaggaatgcccattatctgaagtaaaggctctcctgatctcacgtgcttgaggacgagcttgtcatttgagttggtgtaaaaaaattttgaaacccgggggagaaaagtttgtgaca

SEQ ID NO: 367044 - DNA, 305 bp, Zea mays
acccggattttcgttcttccgcggacgcaccacactctgggggggggtgtgtataaaagggggggtgcattccatgaagcgaggatcaaacatgaccaacgaggggaggccaagggcgaccactgcccatgcggccagctaaggacatggccaggcatacaacagggcgagagaccacaagccagagcgagcggaaagaccagagaaccctcggaaagcaggcggctgagaggaaaggcggcgtggaagagcaaaaagagagaacacaagagcaaccagcacaccagacgacacacaaaacagag

SEQ ID NO: 367045 - DNA, 531 bp, Zea mays
attgtcttatcccagcctcgctcctgcgcctgcggggcaggtatcgtcgaactgttagtctggcggtggccggagcaagaacggcaataggatgaagctgctgctgtccaacccctacggcttcagcagcccccgacatcgggtgtcgggatctgggactccagcggcaaggcgaccactatgccgcacgggcgcggtgcaggagctcctccagcggggccgcaactgcctctgagccctcatggtccagctcgagtgctcgacgcacccgctccgcacccgcccttgtcccccaggtgtcggcgtgcgggattcggtaacggtgttggagctcatccagtggcgccgcaaccgcctccgatccctcaaggtttggctcaaggctgatggccaggtcgaccgtctcctccatgcgcaagggaagaggaaggagctggagcacacggtgaatagcttctctgatttctccctctccggtcctggtgcaaagagccacaaactggttaggatgtcttgtatcatcagacagat

SEQ ID NO: 367046 - DNA, 400 bp, Zea mays
acccgatcttcacaccttacgcatggtgcattcagcccaaatggggggggggttgtcttacgttgcagggagagagctgaggatgtgggctcggtcgacccagacggtactgaggtccactacaggaaaggctatgtcaggcaacaattctccgaggctgcttggcacaaagcgtcagcgaccggacatgcgaaacagaccaaggcttcaggtaatacatcttcgagagctttgtagagggtagatatgcgcaagaaattgatgctggtgataacaagatctctgtacacaggttaggtgcgcgagatcgcgcttgaatcatgcagagacgttcttgcatcaaggccacccgggctgtggctatgacacgaggcacgagcctttgtgtactcgagcagca

SEQ ID NO: 367047 - DNA, 295 bp, Zea mays
ggggtatatgtggatatattggtatttgatatcaggtttcaggacctgatgttaacaaggtagctagctgaaagctgaagctaaggagggacttcagcaactgacctgacaatctgcacaaacagttaagctgtcgatggacgtttatttgtgcggttcatccagaacggcagctttggttgctgccgatgcattagtaatgtttgtgaaatggagtggaaagtttatttgctgagacactcctttgttgaacttctgcttttggctatgttggctttagaacaaggcaggggcc

SEQ ID NO: 367048 - DNA, 468 bp, Zea mays
cgggcctcatttgccgacacgtggtcggctttggccagccggatgaatcttaagaatagctggatgatactggcgatccgaaacatataaaaaacgaagcacggacgacttacgctggatctctctgcacggacgccatccggacatgatgctagctgcaccagccaacgcccacgggcgacggctggaccaagaacctcaccggctaagcccgcatggtcggagatgggggcaacaaccacctcggcacgcaccggagcccaaccgtgtacgactgggaggtgttctgttcggtggacctatggaggccaaggcacgacgagaactgcacatggaaacctaccaggaccattaacacagctggcggaactgcaggagggagggggcagaagagccatggccatgtaatgtaacgaccaatctatatcagagctactggtgacatgaccaggcactatatacatacat

SEQ ID NO: 367049 - DNA, 264 bp, Zea mays
ttctgccccctggccggcacccaagggggggggtttaaatgaaaggtggtttggttcatgagccaccacgacaagtgcctggacgcggacaacgacaaggggcgcgtgtcgcccgaccgggacgggtccttggcgaacgcgccgtggaccagggaggcagctccggacaacgcgggcgccatccgactgctcaagcatatacgggcgctaccttaccgtctccggggagccgttcctgctggggatgacggggcagccggggag

SEQ ID NO: 367050 - DNA, 313 bp, Zea mays
ttttgtcttttcgtttcttgtaaagaccttggggtggtttttatttaaggaggagggtcttataattagcccaataattggcaagcaggcacaggggcaacaaactcgaagctggcaggaaccaatcatgagcggcgaagctactagcgaaatcgtggcgggctcaaagcggatgatgtttgaggagagcgccaaagtggacagcaacggaccaagccgcgtaggccattagcatcggtgggcagatcccgaacgagggagcggtcggtcaagggggaaaaaacttccgggggggcaacattaaagggggggg

SEQ ID NO: 367051 - DNA, 391 bp, Zea mays
ggggaccggaattgaattcccggcccaagccacccgtccggcaggttagcctgcaagaaagagacagccaaggctggggactgtttcactgctgtgcggtctcatctcaacggcttgctctaccgtatccacttggagctgtccatggctatagcagggtgcgcctttgcctctgcggggctcttcccgtaagggcccatacatgccttgctgtccagggcgaggcttctcagcggggggaccagggcgctgatgatcagaggcaccgtgctgctgcaaggccatcgccgcccgtggaagcgctcacgcaatgcgggacggacggtggaggcagcagcagcacccggcgggggctgctaggcgtggccctgtgagcctctgccttggggct

SEQ ID NO: 367052 - DNA, 597 bp, Zea mays
  unsure (1)..(597): unsure at all n locations
gcgnatcncgcaggtaagcatctaccgtggnnnngnttgttnttttttaaaannngtcccgcctttacaaacccnnccnaccctcttacccacccctcccccccccccccccccacccacccaccccctcaccccacccccccccacccccctctacccaccccccctcccccccccacactcaacacctcccccccccccccccccaccccctccccccccccctcccacccctcctcaccaccctaaccccccccccccccccccccccttcccccccccccccccacacactcccccccaccctcttcccccccccccccccccataccccctccccccaccccctcctaccccccccccccccccccacccaacccccaccttttcccctccccccatctcccccccaccctcccccccctcacctctccccccactcccccccaccctcccttcaccccccccatacccccctccccccatcccccctctccccacccctcaccctcctcctcccccccccctccccttccctcccccccaccccacccaccaacccatcacctcccccaaccacccctaccctccctccct

SEQ ID NO: 367053 - DNA, 102 bp, Zea mays
tccactcgtccgctcttccacggttccaccccggccgtctcctctagagaagcacccgcaccatacatcttccggcgcccgacacggactgcgagccccttc

SEQ ID NO: 367054 - DNA, 283 bp, Zea mays
tttctcttgcggtttggaccctctccctcccgcgccgccctgaactctccaggtgagacatggaaaaagacggggccttcaccacaccactcgattcctctttagagcacgacttacgaagtgtgcccaggccgtcgccgccgaccagcaaaagggctggaaagcccccctcttttgtgctgtgcgtgcaactcggctcctgccctgccatcttgctttccaagacccctgcgcccccagtcccataattagttaggattaggatcaccaccatttccaaatc

SEQ ID NO: 367055 - DNA, 388 bp, Zea mays
caaacagggaggcgttctccggcttcgacgtggatgcggtcgccaagtacaccgagaagcagatggcgtcgctgagcgccgactacgggctggatttgggcaccgtcagaggaaccgtcaacaacgcctgccggattcttgaggtaccgtcgtcaacttgattgacctcagtcctcagttgaagttggtagtgtttctgataagatactagtagttccagtaccacatctcgcaaccgaagcttaaccgaaagatgaagggaagcggtcaattaatgaagggaaggccttaagcctgtatgaaacgaaaccagtttagcaactgaaaggcgaagcttagcttgatcccttgaccctctccctctgagccgcgttctgtcctttattta

SEQ ID NO: 367056 - DNA, 351 bp, Zea mays
  unsure (1)..(351): unsure at all n locations
ttcccccntcgacccacgcctcccccttttttcaccctccatcccgaagctatgaacattgtgcctattctaaaatcttcccgctgctactccacacgcatccccatcccttccaccctaacgctaccaaaccccatcccaacctccctcccatcaaaagtatcattcacctcctcacccaatatataccatcaagacatatacacatcatggacatccaccaaagaaaaccacacacactcacccactcactactctcctcaaatcctccttcttctcacgattacgacgatgatgcttaaccctcatcaacaacaccttttaccatcgtcccacccttatcataaccac

SEQ ID NO: 367057 - DNA, 386 bp, Zea mays
  unsure (1)..(386): unsure at all n locations
cggtcgcgtgggcgcagcgcagccacgccgcggcagcagcaacaccgcaccatggcgcttcttcttcatccccgcctcccgtcccatcctttccgggcggcagcccaccaccaccacgccatctnggacgcctcttgcttccttaccctccacggccccggagggaagcgccgaaggtgtttgcggggggacatgccgcgcgcagccagggccaaggagccggctcagagcgcgggcgcctcgctctccgccgccgccacaggcgctgacaaaggaggcgcacaagtacttcgaccacgccgtggacaccgtcgccgcgggcaacggtggacacggcgccgtgctcgccatgccgccggcgccctccgnggacgccgacaagcccc

SEQ ID NO: 367058 - DNA, 382 bp, Zea mays
  unsure (1)..(382): unsure at all n locations
caagcgtcgaaggcccgcagccgcagccccggcccgtgccttctccttctccttccgctgccctcccaccccacaccgcaagcccaaacaaaacgcaacgcgaaccagccacacgaatncaccagcgcacgcgcaccgtcacgcgaggggccctcccttctcgccccgtccggacccccgcccgtcgccgtctctcccgtcgcgcgcgccacgcgaacggcacctaggcgaagcggcgcacgatgaggccgggcgggccgccgaactcgcgtgcgctgcagccgccggcacgccgggngcggtcgcgccggcgcccggacctcaccctgccgctgccgcagcgggatctgacctccctcgccgtgcctctgcccctcccgcc

SEQ ID NO: 367059 - DNA, 343 bp, Zea mays
gttcttctcctccccctccggttcgggttcgggttcgtgaggttctacggggttcggggtcttgggtaagcggatcgagatggcggcgtccgatgttgagtaccgctgcttcgtccgcgggctcggctgggccacggacgaccactccctccacaacgccttcagcacctacggggaggtcctcgagtccaagatcatcctcgatcgggagacgcagaggtcccgcgggtttcggcttcgtcaccttctccacggaggaggcgatgcggaacgccatcgagggcatgaaccggaatgagcttgactggcccacatcaccgtcaacgaggcccagtcccgcggc

SEQ ID NO: 367060 - DNA, 492 bp, Zea mays
ggtttgttggcttctcctccccctccggttcgggttcgggttcgtgaggttctccggggttcgggttcgtgggtgagcggatcgagatggcggcgtcggatgttgagtaccgctgcttcgtctgcggcctcgcctgagccacggacgaccactccctccacaacgccttcagcacctacggcgaggtcctcgagtccaagatcatcctcgatcgggagacgcagaggtcccgcggcttcggcttcgtcaccttctccacggaggaggcgatgcggaacgccatcgagggcatgaacggcaaggagctggacggccgcaacatcaccgtcaacgaggcccagtcccgcggcggccgtggaggcggcggcggtgggtacggtggtggccgtggaggcggcggctacggcggtggcgggcgccgtgatggcggtggcggctactgcggtggcggcggctaccgttgcggcggctgctaccgtggtggtggcggcg

SEQ ID NO: 367061 - DNA, 204 bp, Zea mays
aaatacccttcaccctacgacccaacacatggcccactcgttgacataaccccttggctcggatatgcgagctgctccttgctgggacaacgccgctcttccgcgacggctgcctcgtctagcgtctcccctagactgctgctgacattccccaccgcttgaaaagtggctagcccccaagccactgaaggtaagaaattttag

SEQ ID NO: 367062 - DNA, 301 bp, Zea mays
ctattgttaagctcgcctcctgcacgcgccccggacattatcgggtgcgacccactcgtccgggctctttgcctacacagcctgcagcccagctcacgaggaccaagaggagaataagttgcatagccggccatttgcatccacactccaacaggtgggtcccttttttgctaacaacgctcgttgatttggataggtgccttatcttctcacgtcttagctacaagcatacttgggagcgcctgttgtaagacaggaccagctaccgggcgagacggtttttgaatcggaccctgaccag

SEQ ID NO: 367063 - DNA, 408 bp, Zea mays
caatttcttttggccgtcctttccttgcctctccctggcgggattttttaacgcagggggagggcgccaccggctttaaccatggcctgtcgcttttgcctcgtctggtcggctggtccctctgctctatcccatcccccttgagcatgctgctgagcaagctgaactcatacgaacctcgatttcttccggccggcgttattttttctctcagtttctgaggtatttctccccctttctttcttccctccctcccagaagatccttcactgctcggggatttggaacaaaggccgggggtccaagctcgggtgttagatcaattgtgcggaaagaaaggcccagtgtatgtgtgaagtactgatagctagcaagtaggcttgctctcgccttcccgagcgatggatc

SEQ ID NO: 367064 - DNA, 410 bp, Zea mays
cacatattagcaaggacccggcggccttctagtccttgcctttttttacaacggctgccgcgtccctcctgcctcgctcactctcgcttccaactgacaccctgaatccctgcccccctgcccccactgtcccacttcccaccctcccgcccccgacagcttagcttgccgcgagccctgccctgccctgccctgccctacacacccgacgccatcctgacctgtgcgtgctactgccaggcaccaggagctcgcgctcagctcggcaggtcgatgagctagcgacaaccgccagtccgcccgaggcagcgacacgtatgggccgacgaggcgtctcaactgcaatgagggtgtacatcacggccacagccactgctggcgaatgccacccaccaaacccaaggcgcccc

SEQ ID NO: 367065 - DNA, 324 bp, Zea mays
  unsure (1)..(324): unsure at all n locations
ttccctttttttttttttaacccnnnnnnacatcaccaaagtggctagtttgacagtgggttgtgaaaactcttggagatgcaccaagttactgccctactgactactgtagtgacaacttgtatccaggctaaagcttagaagcagtaaaaggctactcccatcgtaggttatccgacggtcagtttcagatgttcttggcttcggcacctgctgctatgtccaacgggctgttactgtgactctgtcagctggctttcgattctgataaatgaaatagggagatctggtgcagaatcacttcgatcgattcgactcaagcag

SEQ ID NO: 367066 - DNA, 362 bp, Zea mays
aatactcgggggttttttttgagaacaactgggaatttttaaacaaattgtttttaaaagggaggaaaaaccttgctgcttgacaagttttgcttgaaaaccaatcgttatatctatgattgactcccgaaaaccctccctgtgtagaaagtgttctccaccattatccaaaaatcctgttgaaaggggagggtaatctaacgcctgcttgagcttgcctaaggctgtctaccgggcgcctggtggagaaatagggatcctatggggttgagtcttgctcggctgccttgtacgcccagagctatgctgtaaccactttataaaacgcatatatgtgtggacatgcaagatggttaggaccg

SEQ ID NO: 367067 - DNA, 297 bp, Zea mays
cccatgcttccgcggacgcgtgggctttcgacccgggcggggctttgtgcgccgcgagggaggtttcggaacccccaatctatccgacgccacacgaaacgaaacacaagagaagagactagagagaaggtcggagggctagacccgggcccccaattcgaattcgcccctctaggggccggtctcgcgagacgccgattcggatcccatctcctgctcagagcctacattccaccggcgggggcgaccattcgaccgggtcggtagccaggcataggcagccgaaggagaggatga

SEQ ID NO: 367068 - DNA, 331 bp, Zea mays
ggccggggctttccccacgtgttaatcatgtctgcagacggtctagttccaggctaggtatgcaaaatatctgtacatacagcaaatgcacaggacgaacacggaatggggtcttgaatcatggcgaggagctgagcagaaggctgcccccggatgatgggatggaatggaacacagcggtgtaccaccataaccaccagtcaacggaatgtgtgcgggggtgcttttaattgcccttgctccctccagatgcggccggggaccccaagattgagttcatgtgtggctcacctccaacagaagagcgccatgttcctgtggatgatgagcc

SEQ ID NO: 367069 - DNA, 338 bp, Zea mays
gcctttcgtccggttacgactttcaacggtaacgaggggccatatggaaaacaagggggtggtgggcaggtgatgggttgggctactttccgacgtgaacggagctgtttacaatggcaccgggaagcatctttgcgactggaacatgcgagacagactgcggagataacgatgggctttctgaatcactggggggtattatgcttgacatgcactcatcaagtaaaccgtggtctacatcggtttcggctagcacaatgttagcattgatactcgctgtgtggattgaatgattttatagaatgcccacagtgtaccaactagatgcgcccacgtat

SEQ ID NO: 367070 - DNA, 543 bp, Zea mays
cccatgtgttcggctaaacatagtttcgttcaagagggcttgctttgtttaaacaactaatacggttttagtgcacaatcgatgaatttgtgttggtcacaagtctcctgatttgtccatgttttgtcaagttctgtatatcgtcatagtttcattgattattaagatttcagattagtacacggagggagctgtggctcaccaagccgttccttttcccccttcaggaaaccatgctctgctcccaagtggaaggagatgacaggaagcggcatatttgctgctgggggcgaggctgaagaagatgaatctgccaatgcctctgcaactcccattcggaccgctccaaagaattatcaggtactgcttatgtaggttgatttttactctgttttgtttaggcttcatccctggcaacccttctgcgttgaactgttgatattaggattattggtttattttcaggtgctggctaacttgttgtgacaagatggatcacttgatttatctatttatgttcttgctgtgctactaaatttgaat

SEQ ID NO: 367071 - DNA, 366 bp, Zea mays
gcattataaaggacggcaagcggcgggggtggagcggggcaccttagaccacgactgcttcgcctagaacgcgcggaccgcgctgcacggttcgataccgcgcggaggaccatggaacaacggcaacagctactacatcatgcgcgggacggcccccgctgggaaggtggagggctcctcggaggcggaactggagaccgactggacccgcctaggcttcgcggaggtggactacagctggggcccgaccgcgcacgtggcgccgatcaccaacctggactacattgccacgcgcatcctggcgaggccgtgggcgcacaagcaccgggcgaggcttatcacgcaatgcagcaccccggaccgcgc

SEQ ID NO: 367072 - DNA, 290 bp, Zea mays
gtctctcgttcgcccacgcagacgctagttaagggcggacataacagttcaaactggtgtgatagtccatggcggagcacaggtactactaacatatcctggtacaacagaataaaggttcaggggcattctgcttttaccgacactgtgagcgcgccgacaacacggcgggcacgcggacggaagacgcggacagttgtgcgtgtaggcagcataaatacaggatggacgtgtaggaccacatttgcgagctgcaactcacagaggttatcgccattgcctgtgtggct

SEQ ID NO: 367073 - DNA, 296 bp, Zea mays
attttaggagcgaccacgctcactaatgcgacggcgggacctttctgtcctggtggggagcacagcacacacacccggaacgcggtaccagctcagagtcagataccaagacagttaatcatggctcggccgggcattgtcggtgcctgtgtcgctaggcccctcctgctggtgctctccgccgcccgagcggcgcgtcgcgacgccgcgaacgctgcagacagcgacttcctgctgaagttttgccgaacgacgcagcacctgtccgtgtgcaaggagagcctggcgtaggacgg

SEQ ID NO: 367074 - DNA, 89 bp, Zea mays
ttctctcgatcgaccacgcgtccgtacacctggggggactttgtaacacctaagcggcctctatttgaacaactaaaactatcactctt

SEQ ID NO: 367075 - DNA, 69 bp, Zea mays
gtctctcgtgcggacacgagaccggacatctgggggaatcatgtagcacctacgaggcttgtagttgaa

SEQ ID NO: 367076 - DNA, 140 bp, Zea mays
ttctctcgtacgcccacgcgttcgtacacttggggggattttgtaacacctacgcgttttgtataggaacaactaaaatcatcacttttcttgagcaattcaggaaatttcactctgaaatgagtaacagcatgagtccc

SEQ ID NO: 367077 - DNA, 119 bp, Zea mays
ttcatgcgtacgaccacgcgttcgtaaactgggggggattttggaacacctacgcgttttgtataggaacaacgcaaagaagctatctagaggagtaatgaggaaatctcatttgaaaa

SEQ ID NO: 367078 - DNA, 130 bp, Zea mays
ttctctcgtacgacaacgcgatcggaaactgcgggggcttttataacacctacgggttctgtatttgaacatctcacataatctctctactggaacactcatcacttctcactctcaaacgggtcactgc

SEQ ID NO: 367079 - DNA, 92 bp, Zea mays
gccatttttacgcccacgcatacgtacacctaatagggggctttattaacaacgataccggtttaataaaaactacaaccatctctcttaag

SEQ ID NO: 367080 - DNA, 112 bp, Zea mays
tttatgcgtacgaccacgcgttcgtatattttgggggattttgtagcacctacggggtttttatataaacaattccaataatctctcttgatgaggactcaagacatttcat

SEQ ID NO: 367081 - DNA, 145 bp, Zea mays
ttctctcgtacgaccacgcgttcgtacactttggcgaattttggagcacctatgcgttttgtattggaacaacttaaagaatctctctagatgagcaatcatgaattctcattcgtaaaagagctacagcatgagacccgcacaa

SEQ ID NO: 367082 - DNA, 131 bp, Zea mays
ttctctcgtacgcccacccgtccgtatactggggggaatttttaaacacctacgcggtctgtattggaaccctccaaactatctctctacaggaacactcatgaattctcactcgtgaatgagtaacggca

SEQ ID NO: 367083 - DNA, 221 bp, Zea mays
ggccccacgggaaacttttttaaaattcctgggggcaggggaccatggggggggcccccccccccccaaaggaaacgggaatttttacttccgcacagttggcaaccacattttgtacattggggccggtcatgcgggccataggttttttactaaactaagcgagggggggaaacaaaacttccacttgcctttgggggggaaaagatcaggggtaatta

SEQ ID NO: 367084 - DNA, 532 bp, Zea mays
tcttcgcgtgggtcctgatgaatatagtgatctgggaggaaatatgcatattcatgatattgatgaaaagaggcggatgtatgctggagatgagtgggtataacttcagaaagattttactagctaaacattcacagatggaaaagatgggagctcttcactggaatttaccttgagagggctcaggatacaagttgacatgtatccagatggggatgcttatatatccaagctattcatcgctgttgaggacttaactctgggcgaacaaaggatccatgctccgaggcaactggctcttggatggtacaactcaaaggactattcaagagagtctcggtccagggctttcaggatagaactggagtctgagaggcctgagccacaggctcctttggaagactacaggctccatttcgaaatttagcctctacagttgcatctagagcaagagcaacttaactagctaatcaacttcttcaagaatgattcatgtaacaatgactctcatacgcattgtgaaaatgagact

SEQ ID NO: 367085 - DNA, 255 bp, Zea mays
cccccccccaaaagggagggaaacgggcccagatttaagtttaaaaggggaaaggcatacatacgggaaaagttgggggttaaaaaaatccctaaaaatgggggtaaaaggaaaaccggctttttttaacagggttttagataaaaagggggttacaactggtcgaaggggggggggtcccaaaaaaggttgggggccccaggggggggggggggttaccccgtggggtgctttttttggggggggggggggggg

SEQ ID NO: 367086 - DNA, 112 bp, Zea mays
gccatttgttcgcccacgcgaccggccactttctcgggggccgtgttaccaacgggaactgtacaataacctctccaagaggcagtcttgctcagtgttcatgattttttat

SEQ ID NO: 367087 - DNA, 93 bp, Zea mays
ttctctcgtacccccacgaaaacgaacacctaggggggttctttaaaacctatgccgttttaaaaaaaacacctcaaatcaactcactacata

SEQ ID NO: 367088 - DNA, 319 bp, Zea mays
ggacaaaaagactgttgtctgtcctttgtttttgggaggttccttttttttacagcaaatgctgacataggttatcctggagacatgctaagggctttgcaaaaatgcagctgcctaaaatcatttttgcgccggcgacgctgatgttgccatagctatacagttgtttgaaaatgcatttaccgagcgcatcatttagatcggccaagagtcacttcactgggagagaatgttgtagaggtatgttgcaatgccaagaatgatgcatatcaagatgatatcaattgtgaagttcctggttgaccgaaactggttgaca

SEQ ID NO: 367089 - DNA, 132 bp, Zea mays
gtcatgcgtacgcccacgcgtccgtatactttggaggattctttatcacctacgcgacttgtatatgaacatctaaaataatctctctagatgagcaatcaggaaatctcactcgaaaatgagttacggcat

SEQ ID NO: 367090 - DNA, 321 bp, Zea mays
agaacgggcccagattttaaaaaacagtcaacacctaccacattctaggggacaacccacaaagcaacagacatttcttttttttggacctaagggcaaactgtttcccaaaattttagttgcagaataataggcaaaagaaggggggaaaagggggcccgacaaaagaaaagaaacgcccctccaatttgggggaaaaacagacagggggggcgctttaatgccttagcaccaggggcctaaacctaaatgcgtcctaaaacctttttcccagtcattgaacatttttggggggaagacagttccgttgcttaacttttt

SEQ ID NO: 367091 - DNA, 118 bp, Zea mays
gccacttttccagccactgaagaagccagtcaacagggggttcttctacatactgccggcctggtgatctactccgcagagcatttcgcaaagcctactattgcggagaccatggaac

SEQ ID NO: 367092 - DNA, 134 bp, Zea mays
cccatttttacgcccacccgtccgtctacttcatcgggggggcttatacctacgttaacggggttataaaacctacaaacatctctctttatgaccactgacgaaattttcattcttaaaagagcaattccatg

SEQ ID NO: 367093 - DNA, 58 bp, Zea mays
gccactcgtacgaccacgcgatcgtatatgttatagggtgatgtgataactacgggaa

SEQ ID NO: 367094 - DNA, 90 bp, Zea mays
gccatttttacgcccacgcgttcgtatacttaaccgagggccctttcaccaacgctaccggttttttaacaccttaaaccgtttctcttc

SEQ ID NO: 367095 - DNA, 110 bp, Zea mays
ctcatacgtacgcccacgcgttcgtacacctaggggggcaattttacacctacgcgggctgtatattaacacctccaattatctctcttaattaacaatcatgacatctc

SEQ ID NO: 367096 - DNA, 358 bp, Zea mays
agccacattccttccatggtttcggctcaatagcatcaacatatttcctaccaggacaccttaaacaaacccagcaggatacagctgccagctaaacatgacactgggacttttaatagaatgttcgcctgcctacagtacgggcgggggaaacaaaaacaaaaaaatgactgtttcagccacgctgtttttttgggctaggtaaatcattatcggagggaccgccattttccgccccatttttttcgccctttttcctagccagaatcttgttgatcttgggggggtcattcgtcagcttcggggccttggtctgcttccggggtttcctgccggcctgcattttcaccccgaactg

SEQ ID NO: 367097 - DNA, 110 bp, Zea mays
gtcatgcgtacgcccacgcattcgtacatttttgaggactattttacacctacgagacctgtatattaacatcaaaaataatggcattaaataagtattcatgaaatttt

SEQ ID NO: 367098 - DNA, 272 bp, Zea mays
aaaggcaaacactaaccccttttttactttttttggaagtggatattaaaaaaatttggctgggagggtcaaatccccctactaatattatccatttttatttaaaccaaggcccctacataaatggacccaaattccgaaggggctagctgtttttttatgaaaccaagagtttgctcagggtttttaagagccatttggcccctaaccttttccattatagacttttgatatgcggtcgcatgctcagcgactggaagggccaattttgg

SEQ ID NO: 367099 - DNA, 111 bp, Zea mays
gttatgcgtgcgccaaggggttcgtatacttagggggctttttggacacctacgggggttgtatataaacatcactgataatgtctctacagaacagatcatgaattctca

SEQ ID NO: 367100 - DNA, 108 bp, Zea mays
cccatttttccgcccacacatacatccacccccccgggtgcgttttttgaaactagagcgggtttctcaaacggcgaacccatgaggcactacgaggtccaccgagca

SEQ ID NO: 367101 - DNA, 114 bp, Zea mays
atcatacgttcgcccacgcatccgtacactaagggcgcgttttttaaacctacgcgagcctttttaaaaacaccacagactatctcctcccataaacaatcacgaaacatcact

SEQ ID NO: 367102 - DNA, 307 bp, Zea mays
tcgtccttttttttttttttatctcttttttttttttttttttaggggatgttttttttagcatttgttcaactcaccggcgacagcagctttgagcctacgcgtcttctcctctagttgggagcccatagctgtcgctgggccttcccgtgaacaatcgtggggcagacatcttctagagtccctagtgaatgtcgagagctatcaaccccaccgatgcctatatgttcagaggtctcaacttccatgcagagcaaagcaatagtagtactaaacaggccagcctctagcacggaggcggatggcc

SEQ ID NO: 367103 - DNA, 488 bp, Zea mays
gtgtgtgagagagagagagaagagagagagggggagggtgttttcgatggcgtgcagagtctcttccagcagccccaaatcagcgccgcgtcgccatgggccggcggcgcccaagaatggcgccgacctgctcagcccacggttccggtcggctgccgcgctggccggctgggacgaggagtccgtcctccttgccgcgatggtcgtcgacgacaccccagtccgcgactcccgtcgtaagaggcgggccttcacctccttcgtcggcggctgcgccggatccagcaccaggaagaggaggccgcgcaggctgtctccggccaagatcccggcggtggttttcgcgctcgacgacgaaaagtcggacactgcggcagatagcaaatcggaagtgaaggccgcccaggaggaagagaagcctgtccttgtgggcgacaaggaggcgtccggttctggcgagaaagcaatggccgcggcaaacatgccgt

SEQ ID NO: 367104 - DNA, 359 bp, Zea mays
  unsure (1)..(359): unsure at all n locations
tcgtcacgcgtccgatcgcgaggggccgggggggggtttttttaattttgcgttcctttttttacacccgatnagggggcgccgaatacctacagcttggtcagcaaaaggaaacggatcgttctccagttttttcacaggaacacctatgaacatagccacaactttcttggttctaaagcctgggatggcgaccccacagggttacaccagcacaagctcacaggggtgaatcaagggacgaggagaaccgccgccgactgaaccgggggggggagcagttgaagaagcgatcatgcacaccgccaaagagagcttcagggtcaggaccgaaccatatgcctgcgatctcaccaaaa

SEQ ID NO: 367105 - DNA, 352 bp, Zea mays
gcgtttcactcacccgcccacgcacgcgtccacccggggggcttctttagacatccggggcgtttacccacccacgggcggaggcatgaacccggcgaggacgctggggccggccgcggcggcggggaactacccggaggctgggatccacccgcggccccccaccctgaccccgtgggagggccaccacgacaaacagggggaaccctgggcgccaaaacggggggaacacccaaacaacgaaaattcgtgtcgtccaacaaactctcacacgggggaaaaaaaacgcgggagaaaaaaaccccccaccccccccaccccaaaaaaaaaaacaaaccaaaaaagtggaaaa

SEQ ID NO: 367106 - DNA, 184 bp, Zea mays
tccttttttttccttctttctccttttttttttttttttttgggggaaatttaactcatttactttgtcatgccaagcagttgctttacacagaatagcaagcagcaatgtacatcgtggaaggccggtcgccgtggccatgaaatggcgaggagactaaaactgctgttgagaccatcccaat

SEQ ID NO: 367107 - DNA, 129 bp, Zea mays
gtaggatgaaagtgtgcttggcattgtggatagggggcttgtgaatccagccaggagttgggctctgggtgatggcaactcttcaactgtgagccaggtaacaaaggattcacactctgtggcagtgcc

SEQ ID NO: 367108 - DNA, 489 bp, Zea mays
  unsure (1)..(489): unsure at all n locations
gtttttcttctcctccccctccggttcgggttcgggttcgtgaggttctccggggttcgggttcgtgggtgagcggatcgagatggcggcgtcggatgttgagtaccgctgcttcgtcggcggcctcgcctgggccacggacgaccactccctccacaacgccttcagcacctacggcgaggtcctcgagtccaagatcatcctcgatcgggagacgcagaggtcccgcggcttcggcttcgtcaccttctccacggaggaggcgatgcggaacgccatcgagggcatgaacggcaaggagctggacggccgcaacatcaccgtcaacgaggcccagtcccgcggcggccgtggaggcggcggcggtgggtacggtggtggccgtggaggcggcggctactgcggtggcgggcgccgtgatggcggtggcggctacggcggtggcggcggctacngtggcggcggcggctaccgtggtggtggcggcgg

SEQ ID NO: 367109 - DNA, 336 bp, Zea mays
ttttcctccttctcctttttaaaaaaaaagctaggggatttttacaactggtgtgtcttttaccacgactcgccctcggagttctaagttaacgaccaaaaaaaaacaaaagaagtgatattatcctccacattctgcatactgacttttcagctgcacagtaagttagctggttcctggttggagtaaacgcttttcagtactgcacgggctgattcttttcccaggccgacgagtcaatggtcaaattctgagtacaactacaggggtgccccggcaactaatctgcaaaaaaccggaagcctctttctgccaaacggatggttgtcatgctgg

SEQ ID NO: 367110 - DNA, 270 bp, Zea mays
  unsure (1)..(270): unsure at all n locations
tcgttcacacccccgaccacgcgcccgccnggggggccttaataaccagggggggcttttatttccaccgacgggcttagtagtagctacttatcttgcagtgggcgatgaacgaatggagtcatgtaaatgtagctccagtcgtgtcgcattctttgattcgttgtttcaacagcaccggatgtacaagtactgagtttggcctagcaagaataagaaatctttttcggtcaatccatcaaatcatagacacgtaacccaaatcatact

SEQ ID NO: 367111 - DNA, 179 bp, Zea mays
tcgttcggctcgtcgatctcctgctaggtgctaaggttagcttgctcgctggcaacatcaattaaagccgcaactggctcatcatcagtctctcgcgctcttgcgttgctcttggcggcgcgccttctctggaaggaagccgcgtgcttttgggcgcccggtcaaaacaggggcgtccc

SEQ ID NO: 367112 - DNA, 545 bp, Zea mays
tctttcacgcgtccgcccacgcgtccgcccgggggggcttccacgcgtccgcgcagggctcaaagcaagcaagaagaaacgaaggacgattatggctctggtcgggcaggtggccacggtggcgcacctggtgggcgtggacgcgttcagccttatcacgataaccgggggggggcgccaaagggccgggggaacccccccttggggcctggattttgcccccggtgggggaaaatttcgggccctcttttgggggggggggaaggaaaaacaacaaactcgttttgttgtggaaagaaaacccccccccccgcggggggggggggaaaacccccccccccctctcttttgtgtggtcgttataaaatttatatttttttcttttggtggggggggggtcgcccctctccgatgtgggagggggaggattgtgtttcgtgttttctcttctcttctctctcccacaagaatcaggggggggggggggggcaaaaaaaaacggcgggggggcgcttttttttcttttttttagagaaaactatttt

SEQ ID NO: 367113 - DNA, 521 bp, Zea mays
tcgttcacgcgtccgcccacgcgtccgcgaagccctattcctcagaccatgccactcgcaaccgccatgccggacctcccctgcgacggcgatggcgtctgtatggtctgccgcgtcgcatccccgccggaggtcgacctcctcacctgctccacctgcaccacgccctggcactctccgtgcctctccaagccccccgccctcgccgacgccgccagctggagctgccccgactgctcccccgactccgctgccgtcgccgctccctcgggccccgccaacaccctggtcgccgccatccgcgccatcgaggctgaccacacactctccgaccaggagaaggcgcgccgccgccaggcccttctcaccggcgacgcccccgacggcgcggacgacgatgacgacgaagcgtccgacgatgcccttgagatcgtcggcaagaactttagctgcgttttctgcatgaagctccctgaacgacccgtcacgacaccctgtggccataacttctgcttgaatgc

SEQ ID NO: 367114 - DNA, 274 bp, Zea mays
gtcattcacacgcgaaaagaaggagttcgagtacgggtttcattgaagcagccagcgggttatgtgtggtggtgcgatcctcgtcgagctcatcccgaccacgccggcgcgccgcggaggcgcggcgcggcccgccggctagtgcatgcggcggaaggcgaacgacttccaggccgcgctccgggagttcgacaaggactcctaggaggaggaggaggacgaggtggccgccggtcttcttctctttcaccagttcacgaggtcgagtgcgaga

SEQ ID NO: 367115 - DNA, 335 bp, Zea mays
ttcttttttttttttttttttattctcgaaaatgctcgggcctagttataaaccacatggggatttgtacaatgtcatcttcatccatgaacatttgccaaaattaggctcaatactaacagaagacaagcttttcgctttgcattgtatgcatctgatatgctgaagcctaaaatcaattgtctctcgactcttttggaagtatctcacgtctccacaaccttaaagggaatcttcgacctcgtgggcttctccttgagaagaatttcaaaacctcatcaatcaaaattacagggaaggatagataaagaacaattttccactcaacccacgac

SEQ ID NO: 367116 - DNA, 88 bp, Zea mays
tcgctgacaccaagggagagcgccaaccggggggggggtaaataaagaaagcgcccggtccagacgccgaagaagagcagccaggaag

SEQ ID NO: 367117 - DNA, 374 bp, Zea mays
ttgtttccgcgtccgcccacgcgtccgcccgggcgggcgttttataaaaaaacggtctatacttcccaaaaaaaaaaaaaaaaaaaaaaccacaaacataaaaaattaaccaattttgggctggcccctctatgggatccattcttttctcctccttttggggggggcctctttgggggtcccaggtctccccccccgggcttgcggcggctttttttttttttgggggcccctaaatcccttctccgggccccgtttttctcccgtgggggcggggaaaccccgggcggtcccccttttaattggttggggcccaaccccccttttcccagggggggttttccccaaggggcccccccgggccgcccctcccc

SEQ ID NO: 367118 - DNA, 184 bp, Zea mays
caaaaaaaaagggtttttttcacccacaagacatcaataaccaatgacaatccgaagtagccctaacaggcgtctcattaaaaatgaatggaccctaacatattggggccaaaaaatcacaagggaaaagcatagggagcgacaggtattgcagccttgatgaaaaggggaggaaagcggcggc

SEQ ID NO: 367119 - DNA, 319 bp, Zea mays
tttttctcttttttttcttttttttttttttttttttgggttttttttaaattttttctgttttaaacccccttttttgggacaaccccgttttttaaagcaattttaatttttcccaaaaaaaaaaaaattcatttcccatgaaaccggggccgagtcacccccctaaacccaaaaaaacagggtttggggacaaacaaccgacgtttacctttgaaacaagtgccatttcaaacacccgccccattttaatctaacattcccctgggttacaagaaaaaaacaggttacatttggtgccccaaatttccaacccccc

SEQ ID NO: 367120 - DNA, 163 bp, Zea mays
ttgccctttttttttttttttcctttttttttttggagaccacgagcgtttcttttctactgaaatgttcagctacatgtatttgaatgtttatgtaatacaagtcttgcacaacgaaatcaattcaaatgatcgtcagctccatatcaaccggacgcgtggg

SEQ ID NO: 367121 - DNA, 297 bp, Zea mays
ggttccttctccattgtttctcaaaatacaataccaatatataatatatacacaggtccaagaaaaacctcaaatcaaaacggaaagaaaaataatccgtcctgcctgctcgcttcctcctttgtcctttccccgaggtggaaaagacttctcagcctcttccaagtcccatcactgctcgctcacagactggtcccacgtggcgagactgtgctgcctgtgactgtgaatacatgtgcttgcgcatccggaaaatccatctgggcagtctggcagcagggcactcgctcctgccgg

SEQ ID NO: 367122 - DNA, 454 bp, Zea mays
tcgttcacgcgtccggtttttcttttcattggggggcttggtcggctcttcagggcccttttccacttggtttttgttggctctgttgtgtttgtgcttccctttcctcgcgaccgcgactcggatcggatctctctcctgtgtagcgccatgctgtgctgtgctggtagtagcagcagcagtagcaatgagtagtccagtccacagctccaagaacacgtggccgtcctttccttgcctctccctatcggtattcggccacgcagggggagggcgccaccggctttaaccatgggccggcccttctgcccttatctggggggctggtccctctggtctatcccatcccccttgagcaggctggtgggcaagctggactcataccaacctcgtatttttcccgtccgcgttttttttactctcaatttccgggagattttttcccctttttttt

SEQ ID NO: 367123 - DNA, 338 bp, Zea mays
tttttctcttttttttttttttttttttttttttacgggggtgttttgccacgcaggggttcttgtttcattactacgtacttgacaacaactacaacagcaactggtcacatccttcaaaaactcttctcccctcccctgcgtcgcacactcgcatcgcatcggagtggaggaagagaggccatcaccatgttattcgtacgtcgtcctgccctactaccactagcagcaccggtagtctgactctgacccatcctattcctatgcatgctcccgtgcggcacctcagggatcagcctgtcgtcgacgtcagggctgcgccgctttgcacgcccccg

SEQ ID NO: 367124 - DNA, 115 bp, Zea mays
gtcacgtgtacggttgttaccaggggcagagtttttcgtcagctgttgtgcgggaaagaacccccagacgctcaccagatcacttggtaaactttggtgaggggtgatggcggtt

SEQ ID NO: 367125 - DNA, 310 bp, Zea mays
gttctcgtcacacggatcacccatgtgcctgcgagtgctgttgctccgaatggagtcatatcctgtccgactgcgacctaaggcatggtaacccgttgcgcagccacggaggcagctctcggctgctgatgactgccttacacactgctagcggaggacgctccattgcggctaccgggttgggcttttggaacgtacattcgagagcctctcgctatgatgagcgatgcagctgctgatgagaaggactgttcctagtgagaagtacacgaactgccgtgcttgcttgtgggccagagaacaccaactt

SEQ ID NO: 367126 - DNA, 145 bp, Zea mays
cccacgcgttcgtttacgcgtgggcgcacacggtgcacaggacgcgcgccatcctctacagtccggattgccatggccagcacggcgttagccggcgccaggttcttctccgcctacctcgactcctggacacgcattgagcccc

SEQ ID NO: 367127 - DNA, 233 bp, Zea mays
tttgtcgtcacacggatcgcccatgtgcatgcgagtgctgttgctctgaatggagtcaaatcctgtccgcatgcggcctatggcatcggctacaccgttgcgatgacaccaaggcaactctgactgtcgatgactgccttactcactagctgcttcgggacgctcccttcggactagcgggtacggaatctggaacgtacattcgagacgctctcgctatgctgagcgatgaa

SEQ ID NO: 367128 - DNA, 465 bp, Zea mays
taacaccaccaccaggcgaggtgccaccgacccgacatgttactccgacgacgatggcgaagctgaggtcgatcctcacgtgctacccgatgacgacgaccccgccgatgtagcggctcccgacgaggacaaggagggggaggacctcttcaacgacaactacctggatgattaccgaaggatggatgagcatgatcaatatgagtcagttgggttatatgactcactcaaggatgagaggaatcttgatcaaatcatggctgatcgaaaggccagggaagcggagcttgatgcaagggaagcgaggactggtgcaacagctgataggaagctgccacgaatgctccacgatcaggatacagatgatgatacgaatttcaggcgtactaaaggcacagggctagttttagacaaccaagtggaccaagacaccaagaacgatgattatggtgatggagcactcta

SEQ ID NO: 367129 - DNA, 53 bp, Zea mays
ccgccacggcgagaccacatgctcatgctagcaatgttgttccagacgcatca

SEQ ID NO: 367130 - DNA, 146 bp, Zea mays
actgctacgcctagcccacatgcacatgctactgatgctgctccagagtcatcaacacactatactggataacttactgggacagataagcctggtcacacagcttgatggacggcgttctatctgctgaacagctggccttcttg

SEQ ID NO: 367131 - DNA, 178 bp, Zea mays
cgctacaggaaagggacctctatattttggcaagggtctatctgaggggctggctacgaattcgagaaaccgactggccttgagcgggctgggctagagaccgcagtaccacaagaaactgaccatatattgtccacctagggggaccaagcaaaacatcctgcgcatctgatacaga

SEQ ID NO: 367132 - DNA, 294 bp, Zea mays
cttgcccggttccgatccccgcgccggccccacaaaattccaggccgggacccctccttggtcacttttgcacccgtggctacccgttccctttcctggatctgaaattttgcccgcttagcatagatacctctaggacgggaggattaatatctttggccatgagcttaccggggaggaaaggccaggtgtggccttctgagacctgcggtgggtcttcaccgtctgcagtaagaccttgccctgttgctgacccttcttgtgatatcgctgtcccagggcttgatcctgcct

SEQ ID NO: 367133 - DNA, 381 bp, Zea mays
gagcggatcgagatggcggcgtccgatgttgagtaccgctgcttcgtcggcgggctcgcctgggccacggacgaccactccctgcacaacgccttcagcacctacggcgagggcctcgagtccaagatcatcctcgatcgggagacgcagaggtcccgcggcttcggcttcgtcaccttctccacggaggaggcgatgcggaacgccatcgagggcatgaacggcaaggagctggacggccgcaacatcaccgtcaacgaggcccagtcccgcggcggccgtggaggcggcggctgtgggtacagtggtggccgtggaggcggcggctaccgcggtggccggcagcctgatggcggtggcggctaccgcggtggcggcggc

SEQ ID NO: 367134 - DNA, 343 bp, Zea mays
aagcgctagtaagagtacaacatgagtagtactgagacttctggtgcacttcagcttctgttgacatgaaaacatcaagttacaggattttgatattacaatacgttgtttctgtgttcgacatcattgatgatatcaatcgatcctgtgacaagttactgatctcggagcttccactgtatatgcaacaaattaggccttatggtcggatgtcctctgctcgtgtcagaataccattggtaacactcccatcacgtgagactgccaatgtccaaaggtacatgacatgagctaaggtgtactgttgtctttgctgacattgttgttagaaccctaagatgtc

SEQ ID NO: 367135 - DNA, 304 bp, Zea mays
ccatgagctactactccggcgaccgatcctcctactgctccttgcgcgccaccaacacctacgtcgactcctacaagttcgactactgcagtaactcctcccgctccttcggctctagccccctccgagaccagcggccgggcgcggctaccaaccgtccaacgaggcccgtcaccggcgcgcacgtgagatgcaccagaccgtcagtgccaagccgcagtggacccaccagccttgccccgccgaggcgtcggcgcccaccatggcggagcctggatccgggccaacctgcatggtcggcgac

SEQ ID NO: 367136 - DNA, 269 bp, Zea mays
cccacgcgtgcgtctactcgtacgaggcctgcttgccttcccatcctcctcggagatctccggcaccgggctccatgagctactactccggcgaccgtgcctcctactgctcgttgcgcgcgaccaacactctgcgtcgactgctacaagttcgacttcggcatcaactcctcccgctcctccggctctagccccctccgcgaccagcggccgggcgcggctaccaaccctccaacgaggcccgtcaccggcgccacgtggatgcacca

SEQ ID NO: 367137 - DNA, 236 bp, Zea mays
ctccgcgaggctgtgcctggcgtgcgaccgacacttgcacggggccaacaccgattgcactcgccacgcccgggcgcccatctgcgccgggtgccgcagcagacggtgccgctgtggcccgccacgcgcggcggcttgctctgcgccagctgccgcttgggggaggagaaggatgagcgggactgctgtggcgcctccgacagaagtatctactacggaggcgcgggggaagggta

SEQ ID NO: 367138 - DNA, 409 bp, Zea mays
acagcgctaagaagagcaccacatgagtgtactgggactcctctccatgcactatctgctgacattgaaaaagctagttacgcgattatgactttacaaaagcgtgtttttctgtttgacatcattgataatatgaatgatcctctgaaagtaactgtttcggagcatccacttgatatggaacatataggcccgatgctgggattactgctgtacatgtcagaataccaagggaaactcccattaagcatgcctggcaattccaagggtacatgacagaggtcaggtgtttgtgtctagctcagctggtggtagaaccctaatatattgtggtgtaaatgaaagatggtctaataatacactagagataccgaacttttgatgttcatctgagaccggctatttgtct

SEQ ID NO: 367139 - DNA, 379 bp, Zea mays
  unsure (1)..(379): unsure at all n locations
tcgtcctttttttttttttttccnnccttttttttttttttccancgaacattttaaaagatactggttcaatccccggtttacagggaaacatgaacttgacaacccggggaaacatgaaagcggcgactcaagtcaggtgaagcgcggccatctgaaaggagattctacatgtatctttcacgatcaaacagcttctgcagtacagcggggcaggtggtgttcagcttgagggactcagcgagctcgcgggaggatatgaggagcttaacaggtcggtattcaagcgcctggtttctccatctattgtcaccaaaactaatcagctcacgatccgaaaggtgctcaaaggccctaaaacaaacggtgcttgcatatt

SEQ ID NO: 367140 - DNA, 429 bp, Zea mays
tcgtcctttttttttttttttttaccgctggtaatcaaacatgaaggagtacttttagaaatttacattgtcttttcgcgaaccaatcgccaccttacacataataatacccaccattcggtgaggcaacaaaagaaaaaaaaagggacggtatgaacaaaagccccggtctgccacccatacgagttcctggttcaatcgttccacagtgccaaaacattactgttctgcacaattctttgcatagatcacagccctcctccgtcttctttcacgggtataccagcactgatcttcgaatgtggatcaatggcaagcggccttaagcttaccatggctttgccaatccgaaatgttgcacctctagctggatagagtagcaaacataccaacatcacatcttttttcatctttgaacacatgcttgct

SEQ ID NO: 367141 - DNA, 350 bp, Zea mays
tcgtccttttttttttttttttttcctttttttttttttgacaaagcggatttttttacgctttaccggtcaataattactggaacatcatttccacaaaaatgtacagataggtggtcaggtaaccaaaaaatcacaacagcgggttgtattgaggaacagagggtgtcatctatcgtactcccgttttacccatgtccagcgtcaggcctatatgtaccaagagtccaagactccgagagccatgcatgccacgtcttcgttacacctgcttaccaaagccgttctcgtgggccccatgggtctaacaggacccagcgtctccagctggttctgcaccgctggcgtcc

SEQ ID NO: 367142 - DNA, 500 bp, Zea mays
aaactgattaatttcttcaatatatcagtttgggattctaatacctttagtgagtagtcacatccataagtgaagtggattataaatgtattagaatcccaaactgattaatttcttcaatatatctggtttccatacgaaatttaaaaatattgagtgcataaagtagatattttattgttcctgttattttactgaaagtattattaatcttttagggtgaactgacctatggtaaagttggtgaatggcgatttgacaaaagatcattcccagataggccaccaccaagaaatcttacattgccccctcctggagtaccagaaagtgtggtaagtgtattagcagataaattggaaaagcatggcatgtttgttacggcacaatggatctattattgtattgatgtgttttaaatgttaaccatccacataattattttaaaatgttcaccatccacataattattttaaaatgctcaccagtcaccatttacatga

SEQ ID NO: 367143 - DNA, 338 bp, Zea mays
tcgtccttttttttttttttttccttttttttttttttttttttgggttttttgtaaattttttttgtttcaaaacaaattatctggagactgattttaggaggcacttttgtcaaaacctactgaattgaacacggcccctaaaaaaaaacttctggacccccccccaaaaaaattgtaagaagaatcaaaagactaggttcttcccttgctataaactttgggtatacttgcatacaaaactggattttcaggttttccttttctattttcctttagctcccccaaacaatacatcaacccatgttacacacaaaaaccaattttacaaacataac

SEQ ID NO: 367144 - DNA, 341 bp, Zea mays
cccactcgtccgcaggaaccacccacggcggccaccgcccccgcccacccgcgcgatcggtccgccccctgcgcattgcggcagacctacctacctcggtgagccgtgcccgtgggcgaaccacccctcccaatcccaccttctccccaccggaccggcaattcggcggtgtccgagccgccccgtccgtccaccccgcgctgttggatcgggccaccgccgccgagaaaaaaaaagctgcctttttatctccttcggcccggcgggcgcgccgagctgtgatccggcgccgcacacctgggctctggtggttccggttcttatccggaaagggggggcgg

SEQ ID NO: 367145 - DNA, 259 bp, Zea mays
aaggaacaccaaccaactactacatcgaaacatacgcattttaagtttgttttggcttgggcccgaagaacaaaaggggcataacattaaaacctaccaacgggaaactaaaagctcgaaacgggagaaatcaacgaactagggagagtccagcagcaaaccagcgatagcagtttcgggcaccaccggagggcccctcaaaatgggagatcgacccggcggaacccagccacaacagtttccccgggaacaagggcgg

SEQ ID NO: 367146 - DNA, 474 bp, Zea mays
cttctccgcaccgttaccaaattgatccttcccgcaaagctgcaatggagttcgcctcccgcagtcgacccaccaccacagcagccgacgacgaataaaacgactgtcttcgccgcttccccgaccatccgccgtcgcagccgcagggacacggcgagcccaatacatccggggtagacgctgcactactggcgaggaggcagaaactgctgttggagctgctcaagggatccatccaacagggcttgatcttgcgtgagctcgtggagactgagcacgccatgggctttattgccggcagccacaatcctgtgccagcactcccacaggatttcttgcgttgctggacgccgtcgatgtctactttggaagcgcatctgcgccagccatgcccttgtggctgtggaaactccatggcggtcagggcacctgcagtgaacccacacttggagcggtcatcgcatgcacccgagc

SEQ ID NO: 367147 - DNA, 481 bp, Zea mays
ggcccaaaaaaaaatggttgcttttatcagattctcatataaagttcgacgataacagcaaacgatacatgtaatataatcctactaccaccaaccttgcacagcatcacctttttttcttctttgccagtatcgcagtcagtctctccctcgccgtggtgaagccgcccggctgctgctgccgcccccgggagcgccacttccgctttcttctcccggccttcttgcccgccagacgctgccggcgagtctcgggatcggcccagcccctgccccaatcggagaaaccagagaagggccttggctccttcattgccaagagcattgccgcgtccgggtatgcatacagaggtgcctccgactgtgagctactaagaaactttaatccgtcctccgtcagttcagggtactgcatggagacacgaggagtttcagctgcttcctctacgcatctcatgccctctaatatacgggaaagacc

SEQ ID NO: 367148 - DNA, 343 bp, Zea mays
atcggtccgcgctcgtagaggggcccgggttcgtgggcgccgagggaggagcgctccccggcggtggtagacgagggcggggtcggcgaagcgggtcccgcttgtcgacggggccgaagtcgccggggccgcacaaggctgaattcctggaactttgtgaagtgcttgaggcagttgttcttcagcctggatcgacatatcacatatatggaaattcagtgcttcaggggattatacagctagttctgcttataaagctctcttccatgttcagttcagttcgaaccagcagaacgagtgtggagatcttgggctcctgggaagtgcaagttctttatttggc

SEQ ID NO: 367149 - DNA, 307 bp, Zea mays
ccgttcttcttacattaaaagaaaggcggttttttaaactgtgaaggcctcacacacaagcgtgccgtaacggtccctgagaaattacaacccttgcgcacgacggtacaaggatcgccctgctgaggcaaaacttgacccttattcccaagttaccacgctgctgcagccatcacacaccgcgggaatcaaatccgccagaaataactacacctacagcctactccacaatgctggtgagaaccagaactctacatatacattaggtcccaggcaatagaatcggtgttctcaaaattataagaag

SEQ ID NO: 367150 - DNA, 173 bp, Zea mays
acagacatacaatccatcaacatggacatgaaatccaggggggggactaggctaactagacagagcacaaataaagaggtctgatagaccatagctttgtttcttaccatttattattccattattactgattgagagacagaacgacgaatgcaatccaaggcaaggatgga

SEQ ID NO: 367151 - DNA, 361 bp, Zea mays
aaaaacgaggggtgaaagctaccattccagaccatacgagttacattctggagtcgcaaatgggaaatggtaagctaacttgcaaagtcagcacgagctaacgcacataagtaaacgagtttcctgctggctaacatcaccaactttaacttcatctgacgcgggaggctttgatgcttgaattctacaacacaggcatggggcgcttttctaggctttcgcgtccctcccagttccaggggagcagctacacacacaatgcaaacaagccattactcactggggcgcattaccgcaacctgcaaagatacaagatggcaccaaccaaatggtattgctattgctattgctaacctggggg

SEQ ID NO: 367152 - DNA, 358 bp, Zea mays
  unsure (1)..(358): unsure at all n locations
ttntttttttttttttttttttttttttttttgggggttttttaaaaacaattgggactatttgatatgtaggctcctggatattactcagcactccaaatagacagttcaaattttgatgcttcaaaagattgttaaactgtacagctgggttatgcatgtcatgttccggctaaaaacgttgagcccctttttctatagggccgacatgattgtatttgttgatgcctgccgacagactaaatcgataggctcccaaactgcctggtccattcttaataagcccccagctcgcttgaggaaacaaaaggttttacctcccgcatagcattctggaaatccttaaccattactggcc

SEQ ID NO: 367153 - DNA, 367 bp, Zea mays
aggtcagtggtacaaaatataatatacatcaaagtcgttataggttactggttacataaatgtatgagcaccacagtttgcagccttgtagcatgaatatagaaggaccaaaataacatgcgatgcgatccgcaaacgcaaaatacacaagagcgggttgtggttgtgcagtcactgactacggctagacctagtgggtaacagcacgcactggctaaacatcagggagtaaagacctaatctataatcagagacgggaagtgtagacgtggcatgcacatctttaaagtggagcaccacgacatagcgctaaccttcgagaggccagcaaagttgttcctgcaattcctgcacttgtagcccacat

SEQ ID NO: 367154 - DNA, 531 bp, Zea mays
  unsure (1)..(531): unsure at all n locations
cccacgcgttcgttttggaaataatgctggtgagtttcaaacctcattggaatctattcagaattcactagcagatgggttgctaaaactgacagaacaagtaacttctgacaatcggagtattgcatctttatctatatgtatgcacatttggttgaaattctatgcagtgtcaacaggtacacactttacaagattacattttcattacaagatgcttgattgcagccaatattttcatttctttggtgcttgtgtagaagtatcgccttgcaaagtatataccagactctcatgctaaaggttttaaggacgacaagaaagtttgagtgattccctctcgaacatggattatgtaccatattctgaaatgtgtttagaggattgcaaatcaatgaggcactaaagatgcaactggaagttcagaagcggctacacgagcaactggaggtatttgaaggtgtctgagataaataatgatgctaaaatgaaaaggacaatgcgacgtcccctaccatctggtcgngtagt

SEQ ID NO: 367155 - DNA, 203 bp, Zea mays
ctcggacccgtgggcggacgcctggggggttggtttaatttaaacttgggggggggttacttcatattattcccatgaaagagagagaaaaaaaaggataggctaacagtggacactgacccgttcggaataaaaaggtggtgccaaacaactccggcgacgacgagacacccgacgactactaccactacacgatacaacac

SEQ ID NO: 367156 - DNA, 334 bp, Zea mays
ttgtctcgtgggcggtctcgtggtttttatttggagaaaatttttttttaaataaagaattttataaaaggtcgggccttctgttttttccgatctttccttggctgcccgttctatgggatccattttctcttgtgtgtgcttcctcaattcactgtcctgtctcgtgcaccgcaacgtcttgactggccctgccttttccttcctcatttctgtggcatccctgccctttcccatcttattggcttttaacatagtgcccctttccgcacctgttttccttccgtatagctccctaccttgcgtcttttccgccccttgccctgtctcattg

SEQ ID NO: 367157 - DNA, 498 bp, Zea mays
  unsure (1)..(498): unsure at all n locations
cccactcgttcgcccacgcgtccgcttatagactttcctgataacagggaaatgcagtgcacaacatactttgtattcttttatttttcatccattgctgctataagtgtgtgatagtgtgggtcagctcaaatgttcttagccgagttggttagatggctctagttgcattcatcaggtcctggatttgagtcccagtgggagtgaatttcaggcggaggttaaaaaggtcactcgcatgttcctctagttgtgtgcacacaagatagactgacttataagggatgaatcctcgtgtaggggctagggggctcaaagcacggataaaagatctgacctataggggcagaccctcatgatgaagggggcaattttcgtgacctttcttggttgggcttagtttgagcttcttaatatagtaccgtggggacagtctttccncacaggccgagttttcagagctctacaactctttttaatgcaatagagctctacaac

SEQ ID NO: 367158 - DNA, 246 bp, Zea mays
ggggcccaaaaaacacacctttttttgactacaaaaaaaataattcatgaacccccggggtggatttttttaccccgggctttaacaaaggggaggggaataaaaaaaggccccaaatttataattgccgagcgattgggccataaaaaaaggggggtttttggccatccatttatggggggggggggtttcaaaaaatgaagaccccccttttctgggcccgggaattttggttttgagcccccc

SEQ ID NO: 367159 - DNA, 397 bp, Zea mays
  unsure (1)..(397): unsure at all n locations
ttcactcgtccgcccacgcgtccgcccacgcgtgcgccacggcacgcgccgccgctcctgccctgcacttttctaccaccgaaggcgagggcgagggggccaaagacgagcgctttttcgtgcccgcctgcctgcctgctggtcattgccgctgctcacgagcctcccgccccgtgccgccctgccctctacggctctgccccaacgagccccaggggagccaggaaaaggagccgtcaaaagccgtcgtcgaggagagcgcgcagggtaacgaagcaccatctcctcttcttgcccttcttcgattaggttgggatcccagctcgtcgtcgcttgcagtcaggcatgggcattcaaccgttaccttcaacncaagtgagcgcccaagctgcgctga

SEQ ID NO: 367160 - DNA, 279 bp, Zea mays
ttcattcgtccgggcttctcctccccctccgggtcggggtcgggttcgtgaggttctccggggttcgggttcgtgggtgagcggatcgagatggcggcgtcggatgttgagtaccgctgcttcgtcggcggcctcgcctgggccacggacgaccactccctccacaacgccttcagcacctacggcgaggtcctcgagtccaagatcatcctcgatcgggagacgcagaggtcccgcggcttcggcttcgtcaccttctccacggaggaggcgatgcgg

SEQ ID NO: 367161 - DNA, 327 bp, Zea mays
ggaataaagttgagcctccaatacatacatttcatgttttctgtacaacaaaatcgcacgattaaagaataggacacttagcaagtcataagcatctcaaggaacatcctactccatctgctatacaaaaacgatcacgatgttcataccagctgaagctggctgggcattgtgatcaacacatgattatatagagaaaaaaacattgaaaaaaaagaaacatctgcagactgttcccttgaaaaaacaaaaatggctccagggaaacgctggcttccaagtaatcgctaaatccccgcaaaattgatcgttgaccaatcagcccca

SEQ ID NO: 367162 - DNA, 164 bp, Zea mays
gggccccaaatttgacaagagagagggccctatttttagagaagggaaatcaaaggctttagcaacgtggttcactcaaacttaacttgtttcaaacttctaccacaccgtaccagtaaatgaaacattacagaccgggcacaaccaaccaacaaacaaacttg

SEQ ID NO: 367163 - DNA, 421 bp, Zea mays
cgaatttacttgcaaacttaccgggcgcgtccgccggggcagagctgtgtgacaacctgggcggggccactcgaccccgggctgcaccgggaaatttgtagggttagtgttaaaacaggcagttaaacagttagttatcttgcgtcttatatctggcggcctatctgtcttttgtggtgactactgggggaactactgggtgacgtcgctgtacgccaggtgctaaggtatttgtcgagcccttcctcgaagagtaggcaacagagaagcatggatgaaaaaatggctaatgaagagcgagttgaagagctagtagagaagctgcttgctagattctgtgatcatgctggcaaaggtgcgaacttagaatatagctatgcacactgacttgaccactatttcaccagaatatactactgat

SEQ ID NO: 367164 - DNA, 410 bp, Zea mays
tttatttgtccgcaaagttacccggaacctcggggggggcacccttcgccacaacctgggcggcaccgatcgagccccggctgcaccccgagaggtgtagggaaatttttaaaattggtgttcaaacagtcagttaactcgttccttatatttcgtggtttatctgtctttctctgtctctattgtgggaactactgggtgacctcgctgtacgcgacgttctaaggcatgtgtccaggtcttcctcggacagttcgcaaaagagcagcctacatgaaaacatggctcataaaatagcaactgaagagctagtagaaaagcttcttgagaagctgtgtgatgattcttgggatcatgctgactaaggttagaactatgaagatggccatgcacactgcttcaacataata

SEQ ID NO: 367165 - DNA, 398 bp, Zea mays
ccctgcgatcgctctcccatccgcgggtgggctgccactaggggagcggggggtaggaatcttactaagggccgcttgattcgagcttaagtagctatgcagcacaaggagactgtgttccaggcccacgtgggacccatgctgtgcgtcaataactgtggctgcttctgcagcgcggcgaccatgaacatgtgctccaagtgccacacggagatgattacgaagcatgatcaggccaagctggctgccttctttatcgacagtatccataacggtagcgacgccatcatggagccagttgttgctggcagcaacacggtagtagctgttgcccaagatgaggtgctaacaatgaacgtgcagcagcccgctgatgttgtcggacccatccagggggt

SEQ ID NO: 367166 - DNA, 377 bp, Zea mays
  unsure (1)..(377): unsure at all n locations
gtctcctttcacgatgaccagcttctctggagcacgtgcgtggccttatatcaagtcatgaaacctgttctccgtgactgcatcgagctctaccacccctctcgcctccctccaccctcaggagggtcgccacactcttggaccgttcgtgttctgcagtgtcgagattgtctccataacgcttgaggccttgtcgtctccaccacccatgtccgtcatcagcatgctcactactgtcgaccctagcacccctctcgatggctctgtgggggtgccttcccttgctctcttctcgtatcccatgtcttcgcagcccagtcctcctaccgactntgttgttgactccgacgtctcgtaccacaccactcctaacccta

SEQ ID NO: 367167 - DNA, 405 bp, Zea mays
gccactttttaccatacatacacactgaacattataggggaaggcatattctacaactggtgagcgatacttcacgaaaaaacatgatcttatgatgtgcccttacataaataacactaatgatcactacctatctggagactacaagctagaccactacatgaagatcccgccctggaccatgtctatggcacaggctgtggttgacgatcttggtcagactagtgtaacaacatacaaccctgaatcatcataaacagcgtgcgcatcatatgcttacactgctggtgatctactacaggctagtacttgcaacattaccacgtgttctacgacacattcgtgatgtcactccttatcaacccgcctaggatcttgacagacctcaacacttacaaggagcac

SEQ ID NO: 367168 - DNA, 394 bp, Zea mays
ctcactcgtccgtgcacgcgctcgcccacgcgcgggaggcctgccaccagcggccgggggggcgaggaatcttactaggcgacgcttgattcgggcatgaattgctagccaccccaatgagagattgctccgtacccacctaggtcccgtgcggtgagtcaatatactgggtctgctcctcgaggcggcgaccatagacaggcgctccgatgaccacactgcactgactgctgcgcatgctcatgccaccctggctggcttacttatcgacagtagccataccgatagcgctcaccaactggcaccacttgtggctggcgggcgcacggtgtggagctgctcaccaagaagctgtgctacaatgaacccgcagcagccccatgaagtactggga

SEQ ID NO: 367169 - DNA, 279 bp, Zea mays
  unsure (1)..(279): unsure at all n locations
tttccgccctttntttattttctttttttttttttttttttttttttttttttttgttttttttgggaaggcccaaatttaaccacatcctaaccaggttccaagtcttcttgaggcaccaacaaagccgaagcgacccttaaaaaactaacatttaacattgtcccaacttgagccttcctggaccacaactagggcgttatccaagagcggttaccgacataactagaggggttcaccatccaccaaaaaagtaaaaccccggcttaacaaaagaac

SEQ ID NO: 367170 - DNA, 440 bp, Zea mays
ctgagtcaggcgtcttcgtactcgcctatctccgggactcaaagctttccccaattgccccccttctcccatttctcaccaccgccgccgctccccccgttcaacaacaccatgagggagtgcatctcgatccacatcggccaggctggtatccaggtcggaaacgcgtgctgggagctgtactgcctcgagcatggcattcaggctgatggccagatgcccggtgacaagaccattgggggaggtgatgatgctttcaacaccttcttcagtgagactggcgctgggaagcacgtcccccgtgctgtttttgttgaccttgagcccactgtcatcgatgaggtgaggactggcacctaccgccagctcttccatcctgagcagctcatcagtggcaaggaggatgcagccaacaacttcgctcgtggtcactacaccat

SEQ ID NO: 367171 - DNA, 329 bp, Zea mays
gcatgaacgcctctgcccgtcccacgcaaacgtgcatgtttaccggcaatccggcgctggagcccaccagtgattcaatacgcaacaggtgttgctcatggctgaccctgtacagcatgactacgctcagatgtctggatcatggtcttcttgaggaccagcctatctgtgcaggagctcttgaccaaagatgaactgatcgccgacttgcttttggtggatgaacaactgaacggggctgccattctgacagcaaccaacgacacactggactgctcttggcataactgcataggatctagctgacacgaggcctaagctgggcactg

SEQ ID NO: 367172 - DNA, 500 bp, Zea mays
  unsure (1)..(500): unsure at all n locations
tatctcgtccgaccgtatattaaccagaaccagaacaagaccggaggaaccagacgacgcaagggaaaggagagccaccggagcggaccgccaccttcccttctgccggcgacctccagccacggcgcccatggcgtcggcgaagctgctgtacattgtggtggttgacgagaacgcctcctccttccgatacacgcgctccctcctccatagcaccctccagctcatgggatgcaagccacgccacgccttcgagccgcagggtgtttgatgtcatccggggtgaccaccagggccacggcgacacggccacctccgcccgggtacaaaggtacgaggtcgccgaaaccaccccgaccgcaagcccccgccagttccagttcgagctatacaagcgccggaccaccgttctnctccagggacctcttcctcgacctcgtnctcgacgccctcgccctctacaagtacgttgcccccaaccagcgcgccgatctcatgct

SEQ ID NO: 367173 - DNA, 276 bp, Zea mays
ttttttttataattttttttttttttttttttttttttgtggttttttttttttttttgggttttttttttaaatccgggggagtttattgcccctcctttattcggcattcacgggtatagatacaaccaggtgggttcgagcttccagctccaaaaaacttttggtaacagttttggggggtgaaacaaaacaactgaaatttaacgatccctggcataattttacaaattttcccatgaccggggcatttatgaaaaacttgggctcaccaac

SEQ ID NO: 367174 - DNA, 398 bp, Zea mays
ggtcttgcatgaaatgcacagagagggtttttaaaccactcaggggagaaagctacattgttacaaagcatcaataattacaggtacaccctactacatattgatctaattgtttacattttttttgtcaaatgctccaacaagataagcgttttttacaagaggaagaaaagtttcagagagggctttcttagagtacaagtgttacaccggtccgtctttgtagactaagaatgcactggtcttgcagtaacggcatgctagccccttgccagaggaggtcgggggagagaaagcaaactgtgaaatccccaaagtcctgccttcgcagaaggttttccttgcaacgtccattagttttgaggcaattcgttttcttctgcacgatggtgccaccc

SEQ ID NO: 367175 - DNA, 281 bp, Zea mays
cccatgctgtcacccacgcgcacgaccacgcttccgagggcgcatgggtaagccacggggcggggctccccactccggtatcagcacgctgactgtacaggcaactgccaggcagagccgaaaaaccgcgagaacgctgacaggcagtaggcgcccacctgtgcaggacaggactacaggacactggcatagccatgccccggggtgagtcgcgtacaagaggcaagaacttcactcgcagtcatgaggatgccttgcggaccaggcgcaccgcgaggcgc

SEQ ID NO: 367176 - DNA, 485 bp, Zea mays
cggatttcctggttcgacttatgcgtccggagtattcttgaccctgctttttgttcaccatcaagagtgtgcttatagttcttaatagttgacctcctgtcaagcgcgaaaaacatgccagttgcaaacaaattatgttcaagtggcacacgcacatacacaaattgaaccaagatgaaaaattaatcttttgaaaaataggcaagccaggaaaggtaatatgaaagcatgttgtggcatcctttttcattggcgatgttttgttgacgaggagccagaattctctagcgtctgatattttgcttgatcaattacatttttagtgaatgcttgatcaagcattgccctaacctagcgtctgatattttgcttaatgagttgggttcaacgcccattttattgtttcaaaatcttaatcatcattgaacactcatgtgtagttagtgtagcatgctttgtgtcgcactggcagttaaaaagtttcc

SEQ ID NO: 367177 - DNA, 390 bp, Zea mays
cccactttttcgcccacgcgtccgatcgcgagcgccgccctttttttttttttttttttttgcataacttctcaaatataacaaaggaaactaaaaatcttccgtaatgcatctagatacgtttttaaatgataatgacagacaagttcaccgaaggacattacacgcatgcaggaacaactgtagctaataattttgtatatgccggaacgactcaactagcgaatattttttagtacgcaggataattatgacgtttttatcatctcacatgagaatcgaatctggaattgcccagattttcagacctagttcgttatactagattcatatattccagatgctatctccagtcaaatgtttttcttcaatggtcaataaaagaccccc

SEQ ID NO: 367178 - DNA, 330 bp, Zea mays
gaacatatcagccgtattgtcataaacaagggatggatgtcctcatcgttagccattggctacagattctagagcaaaaaacaagaagaggagacaaagggtaaaatcagtaacaaaatatttatctcaaaaggaaacaacataatgctggggattaaccagatcgacgtaactagagaggggggagcggatcggcggtgggccaaacaataggataccttctcaaaatcttggccacggacagcctaatttttctgcttgcttatctgccgaagctttttgtccagctctttggcttaatcagggagctgtaacactgggcatgcctta

SEQ ID NO: 367179 - DNA, 452 bp, Zea mays
  unsure (1)..(452): unsure at all n locations
cgttttccctctccccgcaactcgcaagcccgatattgtcggcgttctcgcacccaccgatttggcctgcctcccccaggattgccggcgttctcccccctccccgtcgcgccgcgcgatgccagccgtgattcccgcgtccgcccgccccacatctacaaacttgctctgcagatgtcctcccgcccatcgtcatccatcccctgccgccgccacggacgaccttcctcggccgccacaagggggcttctgtaagcgagcgtgcagggggagctataggcgagcgcgcagggggacccgcacacgacgacgcccgcgaggatgctggaggacgtcatcgccgtcgcgctcaacattagggcctccgacgcgctctttttggcctagaaacggaggaggcgatgncgcgccgtctcgcccgtcagccggtggccgcaccaatgagttccacg

SEQ ID NO: 367180 - DNA, 382 bp, Zea mays
  unsure (1)..(382): unsure at all n locations
aaaaaaaaanannaacnaaaaaaaaaaaaaacaaaaagaaaaaaaaaaaaacaagaaaaaaaaaaaaaaaaaaaaaagaaaaaaaaaaaaaaaaaaaaaaaaagacgaacaaaaaaaaaaaaaaaaaaaaaaaaaaaaaaaaaaagaaagaaaaacaaaaaaaaaaaaaagaaagagaagaaaaaaagaaaaaaaaaccaaaaaaaaaagaaaaaaaaaaaagaaaaaaaaaaaaagacaaaaaaacaaaaaaaagcaagaaaaaaaaagaacccanaccgcccgaaaaacatcaaaaatgccttggtccttgaacgaaagctgaccgaaatgcttctctcgaggaaaaaaaaagaaaaaaatgaaaaaaaaaaaaacaaaa

SEQ ID NO: 367181 - DNA, 504 bp, Zea mays
aaaaaaacacaaacaaaaaaaaaaaacaaaaaaaaggaaacaaaaaaaaaaggcaaaaaaacaaaaaaaaaaacaaaaaaaagaggaaaaaaaacaaaaagaaagggaaaaaaaagaaaaaaaagaaaaaaaaaagaaaaaaaaaaaaagacaaaaagagaaaaaagagaaaaaaaaaaaaaaaagcaagaaaaaagaaaacaacggaaacaaaaaggaaaaaaataaaaaaaaaaaaaaaaaaaagaaaaaagaaaaaaaaaaacaaaaaaaaaaccaaaaacaactgaaaaaaaaaagaaaaagggcgtcaaaaaaaaaaaaaaaaaaaaatttcgagcaaaagaaaaaaaaaaagaaaaggcaaaaaaggagaagcaaaaacgcaaaaaagaaaaaccgaaaagggggaataaaaaagacaaccaaaaaaaaaaacaaaaattaaaaaaaaaacaaaaaaaaaataaacaaaaggaaaaaaaaaaacaaaaagacacagag

SEQ ID NO: 367182 - DNA, 375 bp, Zea mays
cccacgcttccgcccacgcgtacgacctccgcccgttgaagcgacggcgccgcatcggaggaactgtagctgttagtccgcctcttctcggcagcgcggggcggagatccgaccggacttgggatcgattcctgcccttttctcgattcagggcgctaacagttactgagggaagcttctggggacatggacatggcattgcccgttgagaatgccacagcggcggtgctcgcccgtgtctcggctgccttcaatggcccccttgcccgcgcagtcgtctttggggtccatattgatggtcacttggtcgtggaagggcttcttattgcagtcatagggttgcagctctccaggaagagctacaaaccaccaaag

SEQ ID NO: 367183 - DNA, 437 bp, Zea mays
  unsure (1)..(437): unsure at all n locations
tttttnttttttttttttagagcagggagtcagaagctccaccagttgatttgaagtgtgcatcggcgctaatgcgctgtcatgtgtttaaattcttcctcgtatccacttctgaacagaagacataacatggacacttggccggcccatccagtttacagtaccaaaattctccgtatatctattatctagtatttactgttgattacccctattgagcaacaaaaccaatatacctcagtaccttaccaagctaccatgctctggtgtcagaggttaccttcctggtgcgtcatgtactatttggttctacttatatcacaataactagggattagggaatactatgttatcttctaaagatcgatccatgtagctgttagatcactgggacagcatgttcgaatttctatttgcagattgacgagccaaccact

SEQ ID NO: 367184 - DNA, 251 bp, Zea mays
ggcccacgcggaccacctcgccccaatgatagctacgcgccatgtatagcaagccttcgccgattctcacacttttgtctagcatcaatgtcacgttcttctatactactgagtaagtgtaaggcaaactctggcaggatgaccgttccatagaccgtgaatagttaccgtgcacagacatactgctgctcccatagaccttgatacctagagggaactcagcgctgaaagaagctcgtcgaaagtgaact

SEQ ID NO: 367185 - DNA, 287 bp, Zea mays
aggccaaggcggccaccgtcagcctgggctccactgtctgtgattttgagataacatggggtgttggtcgcaatgttgtatactataatgtggggtaaagcgatcgtacatgcttagcaggcgagggaatctcaccgtcggatgacacgtggacttaaggtgcgggatttccgtgaggagggacatgccaacggtcgtatacactgtgatataggaggccttcaactctggatagagctgatcttatgttcactgcacgggtgcttttaaggctgtggtcgatataa

SEQ ID NO: 367186 - DNA, 327 bp, Zea mays
gttgtgcgcaacccccgccggctcgcaacctcagaggggcctctagatccaggagggacggcctgaatgagacctggcagcacgagtgctctcggtgagcaactttgaggagaacaatcaggaaaatggactgccccgtcttatgcacggtcataactgatggctggattcagcatgttacggggttgaatggagtaaaaaacgtgagaaagcaacataccacactgggatccgggatcatgatagaccttgaccagaaggtgcaccatgcaccagacagacgcccgagcattgggcgtcaaagaatgtgagaggagatctggagaa

SEQ ID NO: 367187 - DNA, 417 bp, Zea mays
gaattttctgcctgccttcaggtttctgaggacgcatcagttgggtcatatattattgtcaagaatgaaggccagcatgacattgacattaatgtcaaagaaccgtcatcaaatacagataatgataagaagtctctacatcttatcaagggtgcctttggacagatgaacataacatataccacttcagatgctgggaatattactttaagtgatggaaaggtagactgcatcatacatgttgggcagccagtagagaggaaatcggtttatgatttgcaacaacagtttcagcagcttacagcctatgcaatgcgtttgaatccagcttatggagcctctttttttgttttcactggtgttttggttgctgttggatgtgccttgtgcaagtttgcaaagagaaaaggcaatgat

SEQ ID NO: 367188 - DNA, 393 bp, Zea mays
tcgcgatcatagcgcagccgcagcggcagcctccggggggccttattcagtcatacagggggggggagggcatggagatgagcatagggtggcaggagctcggcgtcgtcgacaccatctacgaggacgaccacgaggaggaggaggaagacgacgacgaccacgagggacaagaggaggagcgcttcgactcgcccaccggcaccatgtcgtcctcgccgcccacctcgcgctcctcctccccggaggtggaggacgccgcggcggtggcggaggcgcacccgtcgtccctgccgccggcgctcaggcgcgcagtgcaagcgtggtgccgggagaacgggtcgcgcaagcccgacgtggtcgtccgcgtccaggagcatcgcctccctctgc

SEQ ID NO: 367189 - DNA, 280 bp, Zea mays
atcgctcggccgccctttgttttttttttttttttttgttttttttaacaaccaccctgggggtaatccgaccaacgaccaagaaatgcaaaccatcaaacatatgtacttaccccttggtcaaataattaggctcccaaggagtttgcatctaccaaacctgtacccgttccaggcatttaccctagaaagacaggaacgagggaacataattgaactatgtactaggggggttaattcatttactctataaccaatcgctattaccaattgtgtgaat

SEQ ID NO: 367190 - DNA, 511 bp, Zea mays
  unsure (1)..(511): unsure at all n locations
gtagatancagcgcaggaacgaaactagcaattcaattctgtgactacaacagggatatgtcttaatgttatatcatttttctttttcttattgagagtcgagtcaaattgtttttctagcttctgagttctgagtgaaaaaagagaatcgaaatattactataccttggtgaatttgaatatgtgcctttttatggatatgtccacatttttattgcctttaattctactaagatgtatattgcactaagagacgcattgaagattatggcatttcttgtcactgtaagccttctcctggttcatcagttgtgtgtggcagagactgccattgtggttaagtttccaaacttgtaagacacactagagcattgatactgctaattccgtaaccaggnctgatctctatatttatttagaaaaactggatgtgaaaaaacatatgaaatctgtagctgctggattattacacctgtgagttctatcattattgagatattctgacatgctg

SEQ ID NO: 367191 - DNA, 354 bp, Zea mays
cttatgcgtgcgcagaggcacttgtgatgctggaagtgcctgtgctagcaggtcagaatcttgagtcatagatgctgaaacacggagtatacaagagacacctgtcactgagtctgaggcagcactatgtactggggatttgagtgacggaactaacagcacacgtggtgactgagttcatggcacatcactgtgaacgttagatgctagatctgataaagacccttgcgactatcgtaccaccgactgcctttaataaacatctagtgagcttgctggtgatgaacatactcgagaatctactgaggagaaccaatacatcatagatgcagaagcgatcatggatgcctgaag

SEQ ID NO: 367192 - DNA, 399 bp, Zea mays
gagaatacgaccagggcatcatctctctaccatgtggtgtgacttgtatggtaaaacagccgggctgccccgcgaacaaagatgagcctcttgaagctcacctgaccctgacaccagtaaaggggtataatgaacaataccgagaggaatgccaacccgacttatcgcacatgcagaaacaacagtacctagaaatcttgtatatgccggaacaactcaactagtgaatattttttattacgcaggataaatatgacgttttaatcatctaacatgacaatcgaatctggaattgccccaaattctcaaacctagttctttatactagaatcatatattccagaagctttctccagtcaaatgcattttcttcaacggtcaatagaagacccccactgc

SEQ ID NO: 367193 - DNA, 328 bp, Zea mays
tttttatatttttttttttttttttttttttttttggttttttttttggaacaaaagagcagccacatctgatgttcaagcttagacttcagacaacattcgctttctctgttcctctcctggcatgccatatatagttcatgcatccatctcaagctattatgtcatctcataaatggcatgtaattggccatctttgggaaacctttaagatcagggatccagttagacccaacttgcttggggctaaaaagttttggtgttgatgtcgttgatatagttggacctaagcatttaggaacacaaaacagctgacgtcagtcatttg

SEQ ID NO: 367194 - DNA, 108 bp, Zea mays
gatcaatggcatctgtaacgctactgacagcatggtcggcggcggcggcggtgatgcttccgcgaaaggtggacgaggctccaagcagagcggcaggggaggggaggg

SEQ ID NO: 367195 - DNA, 393 bp, Zea mays
  unsure (1)..(393): unsure at all n locations
tntataattttttttttttttttttagagataggggcttatatattattcatgtatcccattttattacatttcacctctgttatgcattcttgtatgaagaccttccaattgttgacgccttcgatgcggtcgattgagaccctattgttgcttcctccttggagttgctgacagaggcataatcctgccttccggtaccatcctgtccacccgacgcactctatggggtggccagattatgtggtgtgatcttcccttccatcaggtccagaggaacctgaagcttgcaaagttagaacgtatataccgaacctacgtatagatggctacaaacaaatttgattagtaccacattttgtctttcctaataacattattaccctgctgggct

SEQ ID NO: 367196 - DNA, 72 bp, Zea mays
cccatgcgaacgagcgctgcccgccctctggttggggatggctttcaacgccagctacgtcgacgcccaaaa

SEQ ID NO: 367197 - DNA, 303 bp, Zea mays
ttaaataattttcttgattggaactcgctttgggagttttcttcacaaaccgctcacttgtattctacagttaccccctggcgctcaggaaccggaatggatcccggccggcagcaagatcacaattcacaccactctggtgggtactcctcccgtgcgcgcgtacccgtggccaatggcgcggtggcccagcaccagcctcgtcgtctcgtacactggcagctcgtcactgtacgcggcgccgccgtccgggtcaacggccgcgaaattcttgaggtcgaacagatcggagctggcgtcgct

SEQ ID NO: 367198 - DNA, 459 bp, Zea mays
gtctaagagatgcctatgatgtaatgtagcgtttgctcatattgatatttgcagtttaataaactcttactgtgagttttataatcgtcgtgtgtgttagacaatgcacttgtttttttcactgtattgtcacaatctattttggtgatgattgaaagttctgttcgttgtgaacttcaccactgctaattgtgttttgccttctaacaccatctaatctaatatggatggagctctggaagggaaggcaatgtggattgcgaatggtcaatttttgtttgtatctctatgactctactttggttgattaactttcctggatgttaaatttaatgttttaccttctgcttctgcagttgggacgtatagtggaaattgacttgaaaattccaccaaggcctcctggttttgcttttgctgagtttgaagacgcacgtgatgctgaagatgcaatatatg

SEQ ID NO: 367199 - DNA, 305 bp, Zea mays
tttattattttttttttttttttttttttttttgggtttgtgcagcgatttatgaaatgcaacattaccggagtagatagatttatacaaccaccacacgacttttagaagatcaaacgcccacaacgcttggtgctgctactggtaacacattttttcatttctagcagccagtgggggcagacttcacaagtaaaaaatctggaagcttacactccacgactatgaagaggaacaaacaaacttttcacacaaagaatagtgaagaactgcacgagaataaaggaaggggggatcaccacatt

SEQ ID NO: 367200 - DNA, 474 bp, Zea mays
cctatgcgtccgcgagaaatgggcacatgcgcactgcggccctagcggaggcgttgcagatcccgcaggagcaggctgcgctcgcctacctctgcgccccgtccgaatcggatagcgtcgtggatctgttcgtcgggtggtgcctcagtggagatggtggatgacgacggtggtcctcttcatggagccggtctgcgaccacgttcgaagtccatggaagagaaggggaggctcgggcagcgaagggaggttacgctcagatttgtcccggagcgcgacgtgagcctgaggttcgtctttctaattggttgagatgatggagggaaggcgccaccgcggcagcgtcgaggagcaggccggcaccgttcctgaccaagacgcaccagatggtcgagccaaacaccagtatctaacccacctgcaccgatcgattcatcagttactggtggtaggactcagcttacaactggtatt

SEQ ID NO: 367201 - DNA, 255 bp, Zea mays
gggacaaacaggagccgaaaattttacgggccttccaggtttccaccagggtaattttttttccctaacccaaaggggacactggggaacacaaccgggtttactttaggacaactacaaaaacggcgacgacgacgttttttatccacgggggaggggggggggcacaaggggggcacaggccccaaacccggggggggcttactttttttacacaggaatatggggggggatttttttggggctttgggttgg

SEQ ID NO: 367202 - DNA, 509 bp, Zea mays
  unsure (1)..(509): unsure at all n locations
ccttgtgctggggacatacatgactttcaaaagttcaactctggatagtaccaagtcattttgcgcaaggagttgacaaagagtgatgtcgcaaattccggacgaattgtgcttcccaaggtagcctatcctattattctggggagttagggcactttgtcaacgatgttttgtaatgtaactgcctgttcaatcttctgcagaaggatgctgaggctggtcttccaccattggtgcaaggggatcctctgatactgcagatggatgacatggtgcttccaattatatggaaatttaagtataggtatgctctcactctcagattaccttatgacatctttgaaatggcacatctgagaaaggtaatagatgcaaatatgtttctgaatgataatgacctattgngatgtcctaacttctttcctgtgaagagccaggaagttgaaggcattgtataaattgatttctctcttaagtgttgccatgttcttaaaagtgaaggtcatgaa

SEQ ID NO: 367203 - DNA, 300 bp, Zea mays
tttttaataattttttttttaattaataaactttatgggaaccatgttcgtttgatcaagggtgatatatatgacatttagaaccagcaaatttagtcaactttgcactcctagccatatgcgtgcatcccctaatactgccgatcgttccatacccatgcccagttgttgagcagggcgtccggggggaagaagaagcgcggtcgtcgtcctctggcgacgacggtggcgagcgcgccccggcgaagtacgactccgggctgtcgttggtccctgccgccgccggcgctgcagcgctgc

SEQ ID NO: 367204 - DNA, 55 bp, Zea mays
  unsure (1)..(55): unsure at all n locations
actgtgaagcccaccttcttatccggcggcggggggatggggttttngctgtacc

SEQ ID NO: 367205 - DNA, 118 bp, Zea mays
  unsure (1)..(118): unsure at all n locations
ctgattcgtactgacccgtgatgngacgcggcagatcagggacctcaatcggggggaacgtgttaaaaaaaaacgcgggangaaccaaggaaaaaagaccgaaagggcggcacgccaa

SEQ ID NO: 367206 - DNA, 391 bp, Zea mays
  unsure (1)..(391): unsure at all n locations
tttacgcccccgcgactaaacaccccgacgagaacacgcaaacagggtgtgagtttttacctcatcacgccactgctccaaggcggagcgccttcaaaatataatttgaggcaagttagattagatttgtgacaactgtattaccacatagatagttgacagggcctatattatgccgcgctcagtatacgaaaccggatcccgccgcctcgaattataacctcgctgtaagaaatagaattcgcgcttccggccgccggagctcggtaatggcggatataatatctctgcggacttaaagatctagcctcctcttttcctttccatattctcttttttgctggtaccccctcacaccccntatgttatggttacggagatggcggctcgc

SEQ ID NO: 367207 - DNA, 412 bp, Zea mays
ctgatgcgtgggcggacgcgtgggctcggaccgacgacagagtcgttgcccgcgaagatgccggccctggtgtacatccctactccgctttgcccggtgccagagcgtttctcccggagtagcggttgcgccgcctcatgatctgccaattggaacccctgggcgtgcgcagaggaggttgctctgcagctggacagtgatcgcgtttggtgggtgtggcggcggtggaggaagacgacacgacgaagacgaggaggtcaggaggccatgaaggaggcgggcgaggagaggtgccttgacccgcagctgtggcacgcgtgcgccggcggcatggtgccagatgccccccgtgcgctcccgtgtctactacttcccgcagggccacgcggaacacgccacggcggcggcggcg

SEQ ID NO: 367208 - DNA, 116 bp, Zea mays
cacagatagaagacccaacctaagccgagcaaaagcaatgtacacatggcaaaggcaaacggcgaagcacccaggaaaggaaatgacgggaccacacatgagcattaggaacaaga

SEQ ID NO: 367209 - DNA, 63 bp, Zea mays
tttcgtcccaccagctcaagcgccagcgagagaggtacggcggccgatctggtttttcaggcg

SEQ ID NO: 367210 - DNA, 414 bp, Zea mays
  unsure (1)..(414): unsure at all n locations
gcgtccggtaatcgcgagatgtgaggaattccatatttgtgtgtttatttagccgngcgacacgtgccagatccacgaccaaatgatcgaatcggatagcgtcatcgtttgtttttttttattacttcttttattttcttttttttttttattttatatcttatttctcttatttcctatcttttatttattttatacctattttttttttttattttttaaatttaattttatcaaatcacctatttactttttcttattgtttctttcattatgtcctattttttaatttcaatatttttatatacttttaatttttttttcttataaactttttatattttcttacattcatttatgtcattaaatactaatttcaattaatttatttatcttctcttttaattttaattt

SEQ ID NO: 367211 - DNA, 388 bp, Zea mays
aaaaacaaaaaaaaaaaaaaaaaaaaaaaacaaaaaaacaaaaaaaaaaaaaaaaaaaaaaaaaaaaaaaaaaaacagaaaaaaaaaaaaccaaaaaacaacaaacgaaaaaaaaaaaaaaaaaaaaaaaaaaaaaacaaaagaaaaaaaaaaaaaaaaaaaaaaaaaaaaaaaaaaaaaaaaaaaaaaaaaaaaaaaaaaaaaaaaaaacacaaaaaaaaaaaacacaaaaaaacaaaaaacaacaaaaaagaaaaaacaaaaaacaaaaaaaaaacaaaacacaaacaaaaaaaaacaaaaaaaaaaaaaaaaaacaaaaaaaaaacaaaaacaaaaaaacaaaaaaacaaaacacaaaaaaaaaaaacaaaaacagagcaacaac

SEQ ID NO: 367212 - DNA, 273 bp, Zea mays
tttaataattttttttttttttttttttttttggggtttttaaggtgccgaaatttggatacttaatcgcaattcatttcggggggaggagatacgagcgtacagtacaacacaagcatgtacgtatgcatgggcccacgcgggcacacgtacgcgccggatcggactctctttgggtctttggagacccacgacgacgaacctggcacacaacaataccataccatacatacattacaggctggtctcgatcaagcagcttgccggcccaac

SEQ ID NO: 367213 - DNA, 112 bp, Zea mays
  unsure (1)..(112): unsure at all n locations
gcaatgcatccagcggagccacaccacaccacccttggtccggctactagcactagctagtccagtggagacgaagatggcgacggcgcggtggctgcaggntgccgccatg

SEQ ID NO: 367214 - DNA, 300 bp, Zea mays
ttcttttatatttttctttttttttttttttttaaaggggagttttttaaataataaggcttggaggacaaccctagatagtatgtagaagtaacttttggctcccggatgaatcttcaaatcatctcgaggagacatcgacgcatacacacacacactttttttgatctcgccacacacgtttcaccccactttcagttgccgccacccttagcgcccttgcccgccttcccctggtgggccttgcgcgcgcgcacgaacgccctggagaggccctgcagcctccggctctgcgtggcg

SEQ ID NO: 367215 - DNA, 388 bp, Zea mays
aaaaaacaaaaaaacaaaaaaaaaaaaaaaaaaaaaaaaaaaaaaaaataaaaaaacataacacaaaaaaaaacaaaaaaaaagaaattaaacacaaaaaaaaaaaaaacaaaaaaacatccaaaaacaacaaaaaaaaccaataaaaacaagatcaaactataaaaaatatacaacaaataataacaaataaaacacaacaaaaacaaaaacacaaaaaaaataaaaaaaaaacataaaaaaaaataataaacacacaaaatcaaataaacaaataaaaaatcaaaacaaataaaaacaaaaaaaacaaataatcataataaaaaaaacaccataaaaaaaaaaaataacaaaataacaaaataaaaaaaacaaaaaaacataccac

SEQ ID NO: 367216 - DNA, 104 bp, Zea mays
cacacaaccagatctcccccaaatcctgttcttcgttacctccgcttcaagatgcagatctttgccacaaaccctgactggcaagactatcaccctcgaggtgg

SEQ ID NO: 367217 - DNA, 344 bp, Zea mays
  unsure (1)..(344): unsure at all n locations
tntataattttttttttttttttttttttttgggggcttttttcaattcgatgggggtgaatttgattaatccaaaacctcaagtacagggtttgtctagtcccggggtttgggatcagcatcccacagcttcagacttttaccccgtttgccagactgaaaaggactccaactacataaaaataattgcttggcaagaatgacaagggaccaacgccgggacgatattagttgacaactttcactccctcggttgccactcagcctgaaaatcttgcagctttccaataaaacgaatataccagctcggggggacccccaatgaatctaaaaactttgattgg

SEQ ID NO: 367218 - DNA, 97 bp, Zea mays
ggtaccggcccgagattctccgcgttttaccttttcgtcccggctagtcctttgccttcccaagggaaagaagttatggtttttttttagggtgtta

SEQ ID NO: 367219 - DNA, 338 bp, Zea mays
tgttcagtcagctagaacccttctttccatgtttgagtttagttctgaatgtgttgctcatcgccctggaagcagcaaccagacagcagctcagaaggtggacgacgagcctcagccttcgttggactcgttcgagaaaaccgtgttggattcagaggaggccaaagatgacgggcaatccgtcaccgtgaccccacctttcaaggaagggccagcatgtcggatcaagctaaagagagggaggggcatgagaaatttccagagggagatagttcctgggctccttctagggaggcaggagatatgccaggacctgaaagctataggttacgaggcat

SEQ ID NO: 367220 - DNA, 218 bp, Zea mays
agagcggcaaacaagacctttgtctcttccatgatgatgattgaacaagacccataatggggccatgttgggtctctcctagctaggtccccctggtatgcaataaccctttcacctattacggcagattgggctgaaaatgacctgcctccaggctccaccacatggtcaactgggctcaaaaaatggccccacacatggatgaatttcgacgatta

SEQ ID NO: 367221 - DNA, 521 bp, Zea mays
  unsure (1)..(521): unsure at all n locations
cccacgtttccgcgtttgcgtagcgtatccctctgccctcccggctccctcaagcgctaatacggctggctgcgcgtcattctcttcctcttccggtgctcgtgctcgtgctcgtgctctccgccctccccctccgccacttcgcgcggaacggaacccaggccgccgccgacccagccaccgctaggcgtctaggcgaccgcgcggcatggtaagcgccatctctcaccccaccttctctctcgcgcccgatccaccgcgcctgcggatctcgcttgctagtgtagtccgccgcctagatctcgctcctcgtcgctgcttcttcacactcgttatttattcgactcgggtcaggtggggggctgcgcgtgcttcagcctgcgttattcgatactattcatcgnttcaggccccgcccgcgcgatgatgcatccgctcccccatacatncacanacccaacacacacacacacactcaggaggtggagacgatcgcgccatttctggggatgagcttcagc

SEQ ID NO: 367222 - DNA, 154 bp, Zea mays
ggtgttcatgtccggcaccttgcccctgcttccgctgacgaggtatatcttggacaaggtcgcaccgtttatgcccaaggaggagcccaaggacgagccggcggcgggagtgatcttctggaccgtggatataacaactacggaggtggaggcc

SEQ ID NO: 367223 - DNA, 294 bp, Zea mays
attattcatggccggacgcttgatgttgtctagaactccatgtgcagctcgcatactgggacacgaggctctccgacaagggtgaacgggctggagctgatcgagatcgagatatccgatgatgagtacggttgcttggtaaggagtctgaacagggacactgacacacactctttctacatcgtgagcagaacctactggaaagggcatgactgcaggaggatcacttacaggtacactctaaggtacgcaggatactacttcgaggcgagcaccactgctgacgcgaggcac

SEQ ID NO: 367224 - DNA, 99 bp, Zea mays
ccattcataactacgtatgggtgcgcaatcagctatgcaccgacttgcaagattacaatttaggctagcacacaagtgctaccgcacagataacacaca

SEQ ID NO: 367225 - DNA, 257 bp, Zea mays
ctagggcttgagaactctatcgcggggccagcctggagtcccagcaaaaggcaacggccggtagggtaatagccgacgactgcgttgctgtacttgtacacggggctgacacagacgctgccacccggagccttcccgcagcgacgccatgtgggctcttcgccgagctgggaaccccctcaggttccgtgcccaaaaagctgcaagtgcccatgtctgtgcgagtcttgaggtgctgctagctgctgatgcaaaga

SEQ ID NO: 367226 - DNA, 178 bp, Zea mays
ttctctttttttttttttttttttttttttttgggcctttttttttagccacgggtaattctgatcaacgaaatgcctggtagttggcacaactgatgagaacgaacaattacctgtttgttttcaacaatgattctcagcttaccttttttttttaaagtgaagacttggaccaacc

SEQ ID NO: 367227 - DNA, 322 bp, Zea mays
  unsure (1)..(322): unsure at all n locations
ttntttctttttttttaacgcaaaatgacaatcctcaggtatcatcaaccaccttttaacgcagaattgtactggctgaatacagcccagacgtcggcaaaccgtccttgcatattttcatcaaatgatatctcacaaggcatgaactcaaaaccttgggggaaaaaaatctaagatagccacgattgtcgaaggggtgatgaagtgtagtgctccagatgttcatttagatgactaatctatagaaatgatttgagtccaacagcatgacatgagcaagtcttccagcgatttatcaccttcgaacggatagacccatctc

SEQ ID NO: 367228 - DNA, 369 bp, Zea mays
aagtttcagacccccaaagaggcaactgatcttggggggctatttttagacatcaacgagatgacgcccgtgagcaactaagactggcccactggtggtgaagactacaacgacaacataagcacgacaggaaagctgggcgtcacctggaggagcacaacagtcctctgcgaccaggatgcaaaatctgcaggttgacgtaaccaaaaatctggaaggggcaaaccaacgagagccttaagagtagagagggtatggtttctcaaggcggtggacgaggtccgaagaggaaccatggggcaaatcggcctgacagggaaaccacaagtaccaaacctttaaaaaggtacaacaatcagaaaggactaa

SEQ ID NO: 367229 - DNA, 228 bp, Zea mays
ggcgaggcaaaacgaatagcccgcacataaaaaaccgggaaacacaaccgacccggcgcgagagaacaccaggagacatatagaaccgcagacgcggcagcccgacccagacgagaacgagaccgcacaacaggcgaaagcaaggcccaacagggccaatgaacctcagaggaggagcccaagaccaaagacgaaccgagagcccgccaccccaaagctgggcgaaca

SEQ ID NO: 367230 - DNA, 56 bp, Zea mays
cccagtgaccgcttacgccgatttctaccagctcgcgggagttgtttccgaggagg

SEQ ID NO: 367231 - DNA, 248 bp, Zea mays
atggttcaaaccaccgcggagacgagggacactcgggggagatttaaaaaccccccgaggcggagctgcccccagccgaagctgcccccaacgccgacccgcgccccacacacctccggacatgagcaccatcccagagaatccctcaagacccctgctcatctaccatggtggccgcagggagctcaggatccatggccgaagacctctgggcgagagcagaccttgactcactccccagcaacaga

SEQ ID NO: 367232 - DNA, 112 bp, Zea mays
gctgttgttttcctaaccaaataaccaagtactactggcgtgaggggtccttatgaacacatggaggggcaacggaagctgatgcagtggagaaccgatggctaaactgatg

SEQ ID NO: 367233 - DNA, 355 bp, Zea mays
ccagccgacacgggcgcgccacgggggagcccaaagcccgcacgcgcagtccccggactcccgctgcgccccggcccgcccaccgctcagaaccggcgccaaccgccggcggagggacgctaaccccgacagacataggcaacagagcaggcagcaacctcaagcagcccgcggaaatcaaccagaaggaacgccccaacctaaggacaacccaccagggactgcacccgagacagaagcagcaaacaccgcccagacccccgatagaagcgaccacaacaacggagaagcaagcccaacaagacctcgccactgcagcccaacaaggaaacaagcacaaccgggacaaacacac

SEQ ID NO: 367234 - DNA, 147 bp, Zea mays
gcgtattaggcagtcgaccaccactggccacctgactacaagctcggggattgacaagcggtgatgaaggtcagaagaggccggagatgaacaagcggcattaagatgccggtgctgaaagctaaggcggcggagagaggttacaat

SEQ ID NO: 367235 - DNA, 191 bp, Zea mays
cgccggaatagacccccccgaagacgaagagagcctgggggtggtgtgagaaccaccagctggaccatccatcgcgccaccaaccgacggccggcgggaggaagcgggagtggctgcggaacaggatggcgacaaacgccgggacaccgggcgcgcgcagaccgaaagaaacctccacgccttcccacgag

SEQ ID NO: 367236 - DNA, 315 bp, Zea mays
aaaggatgaacctcacaatccactgaaaacaaagaccatcgttacacacagtgcagttgcggccacttgtttgagctatggatgctacatatacacagacgaatgtactggggaagtggaacacacctcacaagttcagagcataaccaagcgtcatggcattttttatcgcctagtttattaccctaaactatgtcttgaggcagttgtcgcaggggctaggcccgtctcggcaccttcgcctgtcgtactgttcgccgaagtgctgcagaagtgcctgtctccggcactcggtcttgagctcgcagtatgcct

SEQ ID NO: 367237 - DNA, 62 bp, Zea mays
gaataacaagccatcgtaacggcacgtccgggggggacattttagagccaccgcgatgaaca

SEQ ID NO: 367238 - DNA, 192 bp, Zea mays
cacataatctctggctcatccttctccacgagctgagctcgcccttccctgcttgccgccatctcccaggacgcgctcgcctcggccaccgtcgtcggccgccgttcccagcagctcccaccttcgacggaccactgacttcggccgtgcacgcgctcagcttttacatgctgcccaagcataaacgctctg

SEQ ID NO: 367239 - DNA, 305 bp, Zea mays
acccaaaaagatgcttcttttttttttcttttttggcatgagtgaataattggtcgttcgtggaatgatttcaccagcaaaattctactaccaatccgccgttagtcaacaaggtgaagcgtgtgtgtcggttgtctgtcttgcctactgctgtgtatgatcaagtcaagtgtcgctatgttgcctcctcgtgtttgtcgtccgatccttggccgccggcgcccacggcaggccgtcgtcgtcggcgcaaaggccgccgggcagccgcttgctgccgcgccactgccagatcttggacacggaga

SEQ ID NO: 367240 - DNA, 236 bp, Zea mays
cccatacgtccggagtgccagagacgtgacctgcctgcgacgagcgagttggtactttggtagcatagcaccgaatccatccaaagcttcgttagattgctcacggtcccaggctgacttgttcggttcggtgcctccttccgttccgctggccatggcttccttgttccggtttaatttggcgtctgattgctcgaccttacctgatccatcgccccatcgactacacagttgct

SEQ ID NO: 367241 - DNA, 99 bp, Zea mays
ctccgatgggccaccagctttgaccgccgcctccctggggctccgttactgctcctccccaccccactcccccgcaggagcggcggcggcggcggcgag

SEQ ID NO: 367242 - DNA, 240 bp, Zea mays
aaaaagtatacaaggtttgctgtgggtaatcaaaatccatggtgtggacatggtgaaatgtgtatgctcttcatcaattacaataacgatgggactaccatcaacccaacttatattgctccataaaatacaaaagaaccatcctaagcaatatcttaatttcatgagctatgatacaaatggaataaattaaaggaaaagggccctactgtaaatggggaaaaaataacatttcctttc

SEQ ID NO: 367243 - DNA, 484 bp, Zea mays
gtttcttccttacttccctgctcatccgagggtgaggaaggagtcgggcgaggaatccaccgccggggtttcttgatccgggcgcgtgattcgccgcgcccaggcaccagtgagaaatcaaatcaagaacggggtgggggaagtgagacgagggcgcggggagcaatcaagatcgcttcttggagctttcggcccccccgagccaatgccggatccggttagcggcgccccccgctcccacggcgccgggctggcatgccccctctgagcgcccccgcctgcctccgcggctcccgatgctcgtgtggtcttcgggagcaggagagggagcagcggccgtcgtgggcggcggccaggagcgaggatgcagatccggctgtcgccgagcatgaagagcatcaccatctccactagccatggcctgctagacttgatgaggttcaaggtcgccgagcgacacttctcctaccgtaccgtctttcac

SEQ ID NO: 367244 - DNA, 362 bp, Zea mays
ctcaagcttgcgttcactccatctctctgggacgactacgggcagggccggctactcccccacgtacgccaggcgccgtggccttctttggccttttggccggtgacgagaacctaccatactgggagctagcctctgagcatgtcgcggtccgcaatggacaatgatgctggtgttttcacggtgctgttgctgctcatgcagctggacggtctcgaagtgagcaatcacctatacgcactgtattagtctatgttcttgctcaagggagaaggttagctgacactgcaccccaccgtttcccttacatatacagatagatcacgagcacggcagatctgatctctgtgcacaccttagcg

SEQ ID NO: 367245 - DNA, 233 bp, Zea mays
gggaaaaacttcaacttggggggctcgggggtaaaacagtttacaggcccatacatacaacatttcatttacgagggtttattttcatttaaaaataaataaagaaaagaaaggttccttccgatgcccaatttttttttaacaatcaaaatgggctttaaaattgggtcctattcttttccaaaaaggtaagggggtcaactggagttctaattggatttgagggggcattt

SEQ ID NO: 367246 - DNA, 329 bp, Zea mays
gcttcgtctgcgctacaccaacctcctaatagctggggggaatctttaagacagtggcaggggtcagcccctccctcccctgtgcgatgtcagagggagctacgactcacattttgagcacacaatcttactccggacaaactcgcaacgagggaattaccagaggcgatgactactgattgcggctggaggaggctccttgcaccaagttgtgtgtgtagagcaccatacacttatggaccacactcgagtaaatagtgagggcctccagactcaagacgtagcatgagcactatacttactcgctcaagattgtgaatgtacaaaca

SEQ ID NO: 367247 - DNA, 437 bp, Zea mays
  unsure (1)..(437): unsure at all n locations
tgtgtacgttcattccgtccttctgcaccgactacgggcagaaggagcagcgatccatccatcctatcccctgtgccaaaccctagccctctatggagcatcccgccgccaccttctcacctgatccgactccgtatcacctttgcctgtccctgtccacagatccctccgtcttcctggccctgcagctcaacaggcagcaccctgccccgaactgcacgcgatacgtatacgctatgtactagtccatgctctagctaggggcaagggtatgaagctcctagactccaccgtatcccttacttgcgcccatcgctgaccaatcggtcagatcccttctctntgcgttcgttggtgtttcgtgccgtcggcatggcctgcgttgtgacagtgaggtatgaggcggagctgacgttgatgcaaaattcatgtacatg

SEQ ID NO: 367248 - DNA, 200 bp, Zea mays
gtcttttcgttgcccacccacgactcgtcgtacacccgggccgccctccgtcgctgagttcgttccccttcaccctcccccacccgctaccccgatcgcgcagctacggcgaaaccctagcggctagcttcccaccaagtcgaggatcccaaggttcatagatgctggtgttcttacgcagctgtcgctgcgcgggcgac

SEQ ID NO: 367249 - DNA, 263 bp, Zea mays
tttttatatttttttttttttttttttttttgggcgagcctgctgcacaatatctactgatgatcagcctcctcgcccaaggcatcgggatcagtcaagagaaactccaagaacacacacacacacacacacactaaaaaaagagaagaagcaaagatcaaaagcatcatcatctgtagagccctacaggcagatgatgcttggtcgatcgatgggtggtgtgtgattaatcaggccctcagatcagaaactttttctgaagc

SEQ ID NO: 367250 - DNA, 137 bp, Zea mays
gccgttctaatattttttagtacacattatgctatgagtggattattatgacaatacttatttatgagacattggatgttatgtatctatagtacatcaatcatagtggtattccagtgaacatggtaagtcctcag

SEQ ID NO: 367251 - DNA, 354 bp, Zea mays
ctctcatggcacacagccacacttgaaccgctgcccgcagcggagggagcttgcacgggccaacgcacacataacacaagctcgtcgtcgatggcgcggtgggctgcggtgctggcgctggccgtggtcacggtcatggtcgtagttttccatagtggctaatgtggcttggtcagtccatgcgtatggtgtgaaggaaattctttcattgtttcacattacatggttagtggacaggttcacgatggggttgttcgatgttcctgtattggtgtttctcgttttgtcttctttgttatttattgtttctagttttggcattctttctcttactctttttgttgtcccttcttc

SEQ ID NO: 367252 - DNA, 66 bp, Zea mays
gctaatttcactctacttcggaaccgccgccgctcccggcgccgtttattatcaactaccgcagga

SEQ ID NO: 367253 - DNA, 244 bp, Zea mays
attactagtgacacagtcacacttgaaccgctgcccgcagcggtgggagcttgcacgggccaacgcacacataacacaagctcgtcgtcgatggcgcggtgggctgcggtgctggctcttgccggggccaccgttcatggcggtacttttcatagtggcttatgtggcttttccctgtcctagctaattgtgtgtgtaggaaatttttacactgtttcccttcacatggattagtgtccggttc

SEQ ID NO: 367254 - DNA, 106 bp, Zea mays
gggacgacccacacccccgaactcctgtcacacaggaccacccgaaccagagaggggagcgtttaaaaaaaagcacgcgccaggtccaacaccacccacgccggag

SEQ ID NO: 367255 - DNA, 192 bp, Zea mays
ttggttttgggccttgaagagctagaagcccagagtgggtctacaggtatcaccacttcgaaccctggtaaactagaagtgccagacagtaaggaaaagaaaaaggtcaaggtagctaagaccattaaatctgtagagtcgctccaagccaataacagtagctttaatgatcacataagttcatcatttatt

SEQ ID NO: 367256 - DNA, 198 bp, Zea mays
gtcgtagcgtagtcgagaggactttaattaacccatcgccccatcggcacggtacatacagcaggagtagtactagtacaagaattagccacgcacggtagcccgtggtctgctgggctgttgcatgcatgcacacagaaccgcggcggctggaccccggcctggcaagcatatgcagctaggtagcccacgcgtccg

SEQ ID NO: 367257 - DNA, 452 bp, Zea mays
gtttcttcacaccgcccggtctccgatctccgatccccgatcccctcgtcgatccaagatgcagatcttcgtcaagactctcactggaaagactatcaccctcgaggtggagtcctctgacaccattgacaacgtcaaggccaagatccaggacaaggaaggcattcccccggaccagcagcggctcatcttcgctggcaagcagctcgaggacgggcgcacacttgccgactacaacatccagaaggagagcaccctccaccttgttctccgcctcaggggaggcatgcagatcttcgtcaagaccctcactggaaagactatcaccctcgaggtggagtcttctgacaccatcgacaacgtcaaggccaagatccaggacaaggagggcatccctccggaccagcagcggctcatttttgctggcaagcagctcgaggacgggcgcacgc

SEQ ID NO: 367258 - DNA, 391 bp, Zea mays
acgttagatttgcggactccccttgcactacaagtacaaatgggaaggcacaggcaaccgaagattacctggtagaccgtggtttaatctggggaatggaggacagctctacgaagctgaaagaagtacccacttgggagagagttctaaagagcacagatcctaacagggatcaagagagcgatagagatgagtcggacgacgaagacgacgactgtaaagtgctgattcagcagattgtagagagaactaaacaaggttcccctgtacttgttaacgctcaaaaacttctgttttctgtggatcaatagggcacttcactatacaccatttatttttgagatatagcatgtagtgtcgaattattattgagaaaggaaaattatttatc

SEQ ID NO: 367259 - DNA, 426 bp, Zea mays
ttagattttgagcggccgccctttttacatgtgcatttgggaaggctcaggatcaccacactaacccattaatctatttaatgatctaattatcacgaatccccatctcggtcaccatgaccaaaacgatttgataaattggaaatcgacggcgaatcatgtgtcgggcgttttgccaaacacataacggacgctgcatggaccttcactgactacacactgtagacttacacgacagttgtatgctgttacacacacataccataccaccacagggatatacagatcactacacacggattgagattttggcgatcatacctgctgatctaaccacggacatcagcaggggttgctggtatgagaccggtgtggcgccatacgaacacgcagaggcgagctcagatgtgagggagaacagggttt

SEQ ID NO: 367260 - DNA, 123 bp, Zea mays
aagctcaggcgaagaagcccgccgtggccagtggcgggttgtatttcaaatcaggggggtgcaccaacaaccccgggttagtttattctccctagaagcctatctaactttgcactactattt

SEQ ID NO: 367261 - DNA, 554 bp, Zea mays
  unsure (1)..(554): unsure at all n locations
gttcgcccaagcgtgcggctatttcaaggcctgttgttgatccttcacccagtctgtttagaggcattcggcaatctttgctctcacacctcacccttgtgtttggcaatgacgagcttgcaacccagtgcttgctgtgcagacgcgctgcctattctgcaatcgggtggatgtggtcaccagttggctgactctccttgaatggcactcgtgatgacgggtacaagcgagtagaaatcatgttggaagtaagncagaaacctagcgatccagatacctggatttcaagatcctggtactcgccaaggagtcaaggctagaaccttaagctatgatgccctgttacctggaatttgaacgagctggtgtgcgcccagaaaataacgcaagtaccttgagctatgaagacgaacttttcccgaaatttaagatgggcagtgcagtccctgaaattcagccagtcaatcaaacaccattgcatacccatgatcaggatactgtgaggtacaatataattcatgctggagttagtaagaatactagtcatgatggag

SEQ ID NO: 367262 - DNA, 98 bp, Zea mays
  unsure (1)..(98): unsure at all n locations
gtctcgtctttctcaccaacgacgagnaccgcgcgaccgacctaggtttcaggagcaggccgtacagggagaggagaattttttattatttaaattaa

SEQ ID NO: 367263 - DNA, 230 bp, Zea mays
catccattcagataaaaaaggacagacctagtgctggtggggatagttataagacaagcgtgggccttcattgcatcgaacccgaacctttggctcagtggaaaggcttcccatcacttctctaggcccgttcttctgttttgcccatatagatgtcttccttttctcatggaactcccactttagtttcagctttatctccatttctttgtcttttgtcattctttttt

SEQ ID NO: 367264 - DNA, 380 bp, Zea mays
gactttatccgtctggatgagaccaatgctcctgatgccatgaagagaatctttgtgacaatggcatcgttcagccgtaccctcccatgtgcagacgtgagaggcagctccgtctcacactttgaccacacagtcgtagtgctgccacaacgggcgcaggggctggtgccacccgatctctactgtttgcggctggcagaggcttcttgtaccaggttgagggtatcgcacgccatccggttatggatcacactcgcctgactggcctgtccctccacagctcatgatgctagatcgagctttataataacgctgctgcagatcgtgggctgtccactctagcagaagtccgcgagctgggaacatggacattgttaggc

SEQ ID NO: 367265 - DNA, 84 bp, Zea mays
cgatctttatttcttatctccacctagtccagctctgggagggtctttttatcacttgggcggacacacacacccccaaggact

SEQ ID NO: 367266 - DNA, 383 bp, Zea mays
gttggcttttacctttccctccggttcgggttcgggttcgtgaggttctccggggttcgggttcgtgggtgagcggatcgagatggcggcgtcggatgttgagtaccgctgcttcgtcggcggcctcgcctgggccacggacgaccactccctccacaacgccttcagcacctacggcgaggtcctcgagtccaagatcatcctcgatcgggagacgcagaggtcccgcggcttcggcttcgtcaccttctccacggaggaggcgatgcggaacgccatcgagggcatgaacggcaaggagctggacggccgcaacatcaccgtcaacgaggcccagtcccgcggcggccgtggaggcggcggcggtgggtacggtggtggcc

SEQ ID NO: 367267 - DNA, 129 bp, Zea mays
tcgctcgaacttacgcatctcgccacccatgctgcgctgccacacgccaccgcaatgcgcccgcgcgccgctccgccaccacggaaggtgggagtcgcctccggcggcggcgcccgcggtggtagtgcg

SEQ ID NO: 367268 - DNA, 208 bp, Zea mays
gcttctctctcggaagaagggggccgagatcatccgtcggattgccttcaacaggggggaacccaaccagagcaacggggggtagcccgcccacctggaggttcacatgcaaaaggacccagaaaacaggaccaggaggagcgcgcatggcacactcggccgcaccgagagcggctatcagcaccaccgccgcattgaccacgccagc

SEQ ID NO: 367269 - DNA, 348 bp, Zea mays
cacgccctcgcttccggagccgaacccagagggaaagaggcctgggtgaacatgcaaactgccggggcctcaccagacacaggcccagacacaagcaatgggcaagagatacacgaggaaagagcccgtgcatgacaagagtgaggacggcccaaagctgggaggaaggcccgccctccggaaacaggtgcaccccggaaacccaactgccatagaccgcacacgagagcagacaagaacgtcccctcgggccagcagacaaagaagcgctgggatgacaaccagggataccagaggcaccaacaccacaccaaacagaaaaagcagcacgaaaggcctgtggaaaga

SEQ ID NO: 367270 - DNA, 430 bp, Zea mays
  unsure (1)..(430): unsure at all n locations
acccagccctttcgtcccgttttactcctggtgcgcggcggccgacagcaaccggcggttctccttcgtgagggtttaagcgacgaagagaaaggggaggaagcgagcccccagggaggtgcacagggagagggcgggagatggctgcaatggctggagcgcctatggcgctcttggccgctcggctctctacttgcgggaccatcggggggtcaggcgggcctgctcacctctacggcccatcgattccccactcatgcgcacctcntgactgcaggaggctccagacccgggtttcacatggaagggttggtacctttgcatctgaagggacgagaaaagattatcagcgtgagcggggacaaaacaaagcatgtagctacactgactcccgttggtacggctactatctccaactttagagagatgc

SEQ ID NO: 367271 - DNA, 335 bp, Zea mays
  unsure (1)..(335): unsure at all n locations
ggncacaaccattgaagattaaaactcgaccgggagggtaataagaccaccctcgtggcttttcatgggtagaaggtcgcagcgaacggtcccgacgagaaacccccgaatccaacaactcctgtcactaacgtgtcgactcacaggctgcccacactgcaaaggcccacccaggtgtgggtgaggacgaggggatttttctggtgagcaacggtnggggggcgaaccccccaacctggtcaaggggacctcgccgccttcaccacccggactacgcccggtcctcaaccattgaagattatattacaacaaaattttcatcttcgattttatca

SEQ ID NO: 367272 - DNA, 281 bp, Zea mays
tttttccctcatttttttttttttttttttttttgggggaataccatcaccattatgatagggtatagttggactgaaattcatgttacaggcacgcattacaacacaaaactaccaatggcaggcaagatactaagagtcagatttggagtctgctcataatcatgtcgaactctccgttggcgtgcacctgccgaaccgttttgtcgtagtcgacgtcatcgtcatggccgtcttcttcttcctgttgctctgcttcgccgggcctggacggtggcttg

SEQ ID NO: 367273 - DNA, 321 bp, Zea mays
tttcctccttttttttttttttttttttttttgttgttttttttttttttttttttttttttttttaggacaaaggggtaactaagcttcatcagaatgagaacatatggggggtggcaacaacaacaacaacaacgaaagatccaaggccccttcaaaactgccccatttttatgtagctcccagtcaaaatgggcgacacaaacatatgcaaagccttttttcatttacccctgctactatttaaaggcgatataggggacattcatgctagcgtactggttttaataccccccccccccccaaaattttaaacagggg

SEQ ID NO: 367274 - DNA, 318 bp, Zea mays
cgtcagcttcttttcgtgcatcgagatagtgtaccggctgatacacagtcgctctgagatggacgggcacatccgcccaggctgccctagactatccaagtagccatcaacgccagatacttgatgggatgagcttgaagaagatctcctccagagcgtcaacacattagaagatagatctgattgggctgtctatggagaaggacgaatttccatgcggacccactccaggccgcatgttcatgtggcggaacacaccttgggtctaaattaagcacaaacgggtcatagagaggcttctgccactctgtagcacag

SEQ ID NO: 367275 - DNA, 293 bp, Zea mays
cccacgctttcgtcacccggcgatggatcgccgcatcctcaggacctcgtcgtgcaacggcagcggtaagaacccgtccccttcctctcccgcggcggtctcacggcctgcgtcctccgggggcatcggctccaaggacgacgccggtgccggcgagcgcaaggcgctgctgccgcggcagcctcctggcggcatggcgcggaagggccgcatggggaccaaccgccgagtgcagtggaaagataagcatgggaagaaagctcaccgatgtcagggagttacagcctagtgac

SEQ ID NO: 367276 - DNA, 100 bp, Zea mays
atccgctgtgcctccccttgtacatggattagctctaaagacaacagctgctgcggtgcgtgtgaatgcgttgcgctgcctaggagatcttgagccatcc

SEQ ID NO: 367277 - DNA, 181 bp, Zea mays
tttttcctccattttccttttttttttttttttttgttttttttttttttttttttgccttttaggccaacaacaaaaccaggttataagcaagggggggaggcatagctggaatacattcttaaaccaaaagagaaacaatggacccgaaaacaaaacgcttccaggggggcccggggga

SEQ ID NO: 367278 - DNA, 354 bp, Zea mays
  unsure (1)..(354): unsure at all n locations
ccccgggctggattgcggcaaagnacancacgaggaccaaggggggcatctaccggcaagagcgccccgcaccccccaggaagcaatgcatactaaagggtgcccccccacgccagccaaagaagaaggcggaagggaaccacaagacctacaaccacacaaaggataatgcacaccccgcccaagaccctacgaccgagaagctcagggagaccaaggcccaccgaaggaaggccaaaaaggccgacgccaaaaaaaacagggagcccgcacacaggcagccgaaccggccaccaaaccccacaagcccgaaaggcccgcccccgaaaggcaccccacaaaccgcgaagcccc

SEQ ID NO: 367279 - DNA, 399 bp, Zea mays
tttttcctccttttttttttttttttttttttttgggttttttagcaaaacattggacatcactgctttcaaaaaacaggaatacagcacctactgaaaagccaattcaaggacctacttcagttagaaatgattcaaaatatctgcttttcagcaccacatgggtaactcgctcttccttcagaactaaaatatattttacaccagctctttgcacttgaatgacacacggtagatccaccagctgcccagcattccaatgagatgcaggaccctcccatctactaattcaatggttccaattgaaaaaaacttggaatcttcagtaataatatttcttggacgcatgtactgcaaaaaaatatgcaatgtttagttcaaataaattagcacataaag

SEQ ID NO: 367280 - DNA, 203 bp, Zea mays
ctagttcctgatctcgagggccgccctttttttttttaaggcggacattttaccagaaagttggcctctcaatcgttatgaagctaggcatcctgaagggagacggtctcacgtgagccaaagaagaaggtggaaggtgaccacaagacctactaccacacaaaggagattgtattccttgcttatgaccccttgatcgagaa

SEQ ID NO: 367281 - DNA, 492 bp, Zea mays
ttttcactttctctccctccaacaagctaattaaggccggtcatccctcttctagctcgtttcattatccatggcggaggagaagcaccaccaccaccacctgttccaccacaagaaggacgaggagcagctcgccgccggcgggtacggcgagtccgccgagtacacggaggccactgtgacggaggtggtgtccacgggcgagaacgagtacgacgagtacaagaaggaggagaaggagcacaagcacaagcagcacctcggcgaggccggcgccatcgtcgtcggcgccttcgcactctacgagaagcacgaggcgaagaaggacccggagcacgcgcaccgccacaagatcgaggaggaggtcgcggcggcggcggccgtcggctccggcggcttcgccttccacgagcaccacgagaagaagaaggaccacaaggaggcccatgaggccggccgcgagaagaagcaccacttcttcggctgattgat

SEQ ID NO: 367282 - DNA, 356 bp, Zea mays
ttcctccttttttttttttttttttttttttttttttttatgctatggacatccaatttcatccggaagataaaaaataccatatcgtacaacaatatacgtgaaaaaaaatcacgtccaacgtatagcattctttagttttctactacatagctaactaatagcctaaacaaatcctttacagaacccagcccttttaaaaaattccttggggggaaaagtaaaaaaaaaagcaaagcccagcaacaatttttacatcccacaatcccaccagggtaacagcaaccctttcctattaattaccttggtcaatatatgcatcatgcttgtaggtaacgaactattttacagaaaac

SEQ ID NO: 367283 - DNA, 107 bp, Zea mays
cgcacacctccctgcggcccccaagaaccgcccgacccgggggggggttaatttacgaacaaagctacctttcacaacaccaaaaacagaaatacaacaattaaaaa

SEQ ID NO: 367284 - DNA, 268 bp, Zea mays
tttttccctcattttttttacggctcaatttgccggtgaataaaattacactgcaagaacaaagcctattgatcttccttgttacaacattctttactcctactagtcctagtagtactaattattattattattattattattattattattattattattattattattattattattattattattattattattattattattcttcttcttcggtaaaagatggtaaaataagaaagggagcagaaaagaacacctcatcaac

SEQ ID NO: 367285 - DNA, 103 bp, Zea mays
actgcggaccgcttgggttcacacacacggagagaacaatcagaggcgcgggtatctttacaaaaacgtcacccatacatacaccccagcgagacaacacaaa

SEQ ID NO: 367286 - DNA, 142 bp, Zea mays
cccacgcgtccgttcacgcgtccgatttcaattatttacacctttgctgttgtttgcatcctgaagtatatgattttgcactattcgttaacatagccaactgtctacttgctaattgggagctttaaaaagagcaacccca

SEQ ID NO: 367287 - DNA, 328 bp, Zea mays
ttttctttcttttttttttttttttttttttttttgttttttttgagagcaatacctccacttaacaacaattagaccagatcaaatcccaaaaaggatcgtacttgctggtttcagcaatctaatagatacaagtaggtttgggaatttaacaggaactttgaaccacggtaaccggggcttcagtagctgagattgcaagttagcgatgttcgatgctcaaagaacatcaaaacaaccagtacgctctgctgcaaactcagggcattggactcagtaaattacggcacaagcctctgcgggtcgcgagggaacatcaaggtcttcc

SEQ ID NO: 367288 - DNA, 253 bp, Zea mays
tgcgttcgcggacgcttgtctgccacccggggggaacagcaggatgagaggggagtcagtaagacctatcgcagcaatagggccagcccaacccttacaactaacctcgtagaggcccctcggagtgaggcacgatcttgagaaggcggacccggccggagaaaaacacgttcgggatggccaagagacccgctagaaccccagagctaatgatccaccaacaccctcaaaacaagcacacagcccggaccca

SEQ ID NO: 367289 - DNA, 80 bp, Zea mays
cactactttcctcggcatcctctgcgccttcgtcggcgcgggtgtaggcagaggttcttttcaacttcttttacagctac

SEQ ID NO: 367290 - DNA, 289 bp, Zea mays
tttctcttttttttttttttttttttttttttgggggcatcaaacagagatttaactgcagggacgaactttatcaaaaagaagggaagagtcggagagagacagagagagttgaaaaaaaaaaactcgacagctagacaaactgggccaattaactgggggggcagcagaaccgcactccaggccaggccggcaggcaggcacaggcacgcagccaccacacatggggcaatcgactctgcaaactatactggtactacgtactagctactgatggctagccggacgg

SEQ ID NO: 367291 - DNA, 285 bp, Zea mays
aaaagaaaaaaaaaaaaggggggagggcttaaaaaaaaaaaaaccggaccaaaccaaccacaaaaaaaaaacaacacaaaaacaaaaaaaaaaaccaaaaaacaaaaaccaaaaaactacaaaaaacaacaaaaaaaaaaaaaaaaaaaccaaagaaaaaaaaaacaacaaaaaaaaaaaaaaacagaaacaacgaaaaccaaaacaaaagaaaaagaaaaacaaaagcaacacaacaaaaaaacaaaacaaacaaaaaaaaaaaaagaacaaaaaaaacaacaa

SEQ ID NO: 367292 - DNA, 98 bp, Zea mays
cccacgcgtccgttcacgcgtccggtttgtttggcggttggcggagttttgcactgaaagtttcgtacacatcaagcaaacaggattggtcgtttaaa

SEQ ID NO: 367293 - DNA, 171 bp, Zea mays
cccacgctttcttcacaattctgttggaactgatgatattgaacccagctggcctgctaagaggtcatctgtcagcccagttcatccgaaaaattcacctcaatctgggagctctggtgatgagactagatgtaacaaccaaataaaaagggctcctagtgattcgactgt

SEQ ID NO: 367294 - DNA, 254 bp, Zea mays
tttctctttttttttttctgaaaactcactatgggggattcaactggctgataaaccatagtcacgcaattaatatcgatacatctacacaatgcaaatcaatgtttcaagaaacagatggcactatccttgagatgtctccgtatactcttctcctaatgttggctacaatcctgtctgcaatttggacgtcagtttcttcaggatctctgagctcgcgcagtttcttgggatccttgcaatccttcagaacg

SEQ ID NO: 367295 - DNA, 61 bp, Zea mays
aggaaccgaaccggaaaacccggaacgacccacacgcacgacctcccctccaacaccaacc

SEQ ID NO: 367296 - DNA, 353 bp, Zea mays
tttttatacttcccttttagcatgctgcgtgttaagtgactttacatggatgtgggttgatatggatacctggcaatctaaacaagccctaaagaagaagaagaaaggaagccatgtgcaggcttcaattcaacagcgaaagccaaagtccatgacgagggaaaggatctgtggggcttcacatatcaacggaagtacgaaacaatctgtgtacagcagtggcgatcactcttctcccaaaacaatcacttccaattacatgctggtgtctagttcttcatcgctgaggacgatctggtcttgcatctcatctgcagcaggcaaagaggagctccttcgcagtccacgtcacc

SEQ ID NO: 367297 - DNA, 353 bp, Zea mays
ttctcgttcagcttcttgctggaaatcagaggaaagccagtgccgcgtcccttaacctgatgagtgaactcgtctgccttaacagaacaagcaaaatcgtggagttcgtcaaggagctgaagaacagcgggtgcttgaacacgatgcacgttctgctggtctacctccagcaggctcctctcgtccagcacccgttagcagctaccatgctactccagctcgatctcctgggtgatccttcgcagtacagcgtgtacagggaggaggccgatcgaggccatcgtagccgctctggagcacagcttgcagagcgggaaggtccaggaacagtgcgcccgagctctcctaatctt

SEQ ID NO: 367298 - DNA, 388 bp, Zea mays
aaacaaaggggagctattaagcccttggggtttccaaccaaagcgacacccattgaatgtaggagggcctcagccaaagatgaccagacaaggcgccgaccatggaacacatgggcgacccatacaatcttccctgtaggtacactgcgatattttatgctatcctgtagacttaacagccccgaggtagctcgagacagcacataatccagacaacccagaccgatacacgaaatcccgaccacgtaaatccaagggaccacttcattccactgggcaaccacgacaccacagcagagtactctctagacgcgacgtagagagaaactcttcctaatctagatccctagtgttctatggagccactatttgctttagaacatgggag

SEQ ID NO: 367299 - DNA, 116 bp, Zea mays
ctcacgcgtccgcccacgcgtccgagaaatgtgggctgaggaagttgatctatctcgatgaacgggaacgaaaccgtacaccaaatagattttaaacagtccttttttaccactga

SEQ ID NO: 367300 - DNA, 161 bp, Zea mays
  unsure (1)..(161): unsure at all n locations
ttttaatanatttctttttttttttttttctttttggttttttttgaaaaaatttcggttgaacccaaccgcggcattgacatacaggttgcagctgcaggggggttcatgccaacctcatgtttcctttgcatcaaatattaccagggttccatgggcaa

SEQ ID NO: 367301 - DNA, 139 bp, Zea mays
ttttcgtcacgcgtccgcccacgcgtacggaaaagactgcaattatcatgtctacaagttctatatactgtgacgatgtttgttataaaatgttgtattataatataatatcttattatatatttcattttatatattt

SEQ ID NO: 367302 - DNA, 249 bp, Zea mays
tgctcgcctcgtctcgtctcgtctcgcttcgtctccgtttcctccgcacaccaccacagccgcgtcaagccgtcaaccaaccaaaccctagaaaggctctcggcccccgttctcaatcctttgtcgttccccgatccttgccgtccgcaggccaaaaccccacgcctctccctcgacgtcgggtatattcagagtattcactctgtcagaaatgtcttttgcattcatgtccaagttacattgatttga

SEQ ID NO: 367303 - DNA, 118 bp, Zea mays
tggtttcagcacgccgcccgttgggaagggagcttctaggtggtccgccacagagcgtaggtcggacggtctgagccaatggcacggccgccttggggcgctaaacaacccaaacgtg

SEQ ID NO: 367304 - DNA, 145 bp, Zea mays
ttgcgttgaggacagttctgaagatgagtcggatgacgacagtgatgatgaacctgcaaagaaggctgctgctaaacccttgggtgccgttgctaaaaatggtttgaagaaaggtaagtttgaaagctgtatctatgggagcagt

SEQ ID NO: 367305 - DNA, 127 bp, Zea mays
ttcccctgttgcgccgctgccgctctccccgtccgaccgcgacatccaggccattgtggatgcgtacaaagaggaccccggtaattacacgttattgctttcaggctatttgtttgttcattgtgac

SEQ ID NO: 367306 - DNA, 55 bp, Zea mays
accgttcatcttgttcgaacaggcactggggcaaacagtagagtggtttttaaac

SEQ ID NO: 367307 - DNA, 303 bp, Zea mays
tttcggtaagggttcctcttatggatgatggcagccaattactcaaagcactaaatgttttgatgcttaaaatactggataatgctgagagaacattcctcgtttgttgtgctgcttaaaatttttttttcttttttactctacaatctttctcattttatatattttatatagtttttacttttatttattttctttatatttcccttttcttttctgattatatattttttctttcttttttcttttttttatacttttattctactcttcctcatttatttatttaattaattttatact

SEQ ID NO: 367308 - DNA, 134 bp, Zea mays
tcagtcaccaccactgccgcgaccgagagagtcagagagagcaggcggcggcaatggctggcgctggggacgagtactactacggcgggccgggccagcgcggcgcgccccacggcctgctgctggcggtggtg

SEQ ID NO: 367309 - DNA, 183 bp, Zea mays
  unsure (1)..(183): unsure at all n locations
gtccactccgctgctgccgcggngccctccctctgcctctggtctctgcgtgtgacgtgcacgtccatggcgctagacttcacctatattccacagtcctcattgattcgtcgatgatcgtcgcattcagtaaaaagccacctaccctaccctattgtgctgttactactaactaacttacca

SEQ ID NO: 367310 - DNA, 87 bp, Zea mays
attcattcagacgtccatatttgggaggtttccatactttctttcgagcctgtgtatatcaatccttgcagtaattgctctaatatg

SEQ ID NO: 367311 - DNA, 95 bp, Zea mays
ttgggttgaagaaaacctcgcgcgggggaggcgcgagagtaattaaagtaactcatcttatctttaatcatcctataaactaaaatttaatctat

SEQ ID NO: 367312 - DNA, 479 bp, Zea mays
tccacgcgtccgcgatctcccctcgaagctctcgcggcgccccgcgacgcgggcggtcctcgctagtgcctcctctcggctcgtcgccgacgaggtgagcggcaccccgtcctcccctttgccttcggcgactccgtggtcgtccattgccagcaccctccctgtgacgtccgcattattcacgtgcaccgtcgcgccgtcgcgcagggtgaggacctccccgtcggatgctaggagtcctccgcacagcagattcgtctccttcccgattcgatatggagtgcaacagagatgacgcggtgcgatcaaaggatattgctgaaacaaagttcagggagaatgacattacgggtgcgaagaagtttgccctcaaagcaaaggctctttttgagacgcttgagggcattgatcagatgattgtagccttagatgtccacgtaagggcacagacaaagaatgcaggggaaaatgactggatg

SEQ ID NO: 367313 - DNA, 181 bp, Zea mays
  unsure (1)..(181): unsure at all n locations
tttctgtcacacgtncgctatataagcggagactaggtacagtttatgcatccctacttcagtttacaagaaataaattgttaatctaattacaaaaaatttaaatataattttataatattttttctaatatatttttatattttttaataatatattatttaatcaaataaattataaa

SEQ ID NO: 367314 - DNA, 90 bp, Zea mays
tttcggtccgaggcgcgctatcacttacggggggatacggctttataaatacctttagttaattactacataagtaatgagaaaaatatt

SEQ ID NO: 367315 - DNA, 107 bp, Zea mays
tttctgtcacgcgtccgagcttatcatgagtggagatattgactttacattcaaaagacttggtgagtggccttaatatgttacttaatagtatttttataatattt

SEQ ID NO: 367316 - DNA, 86 bp, Zea mays
  unsure (1)..(86): unsure at all n locations
tcacgcgtccggacaacgagtactctgaccttttctatggcattccctggtcccagggaacactggggttccttgnctctgcggag

SEQ ID NO: 367317 - DNA, 193 bp, Zea mays
tttttaattattctttttcttttttttttttttggggggattaacaaatcccatggatcttcatctttcattattgggcaaaaatgaattggtaatgtaattttggactcacctgctaagaggaagaggaagaaaagaattacacgctacaaaaacctttctttcatcaatgtccccttgcctgggactggga

SEQ ID NO: 367318 - DNA, 354 bp, Zea mays
tttcgccctttttatacttttttttttttttttttttttttgggtttttttttttttttttgggggaaaccaagatgaaatcaatggtggccatggtacattggcgatgccttggttttattctggcctcttgattcatccggaccttgatccgtaaatcgataccgactgtttttgcaaagttccccctccctgtatgactccctgcatatccagtttttgtccatggcagtttgcaggaagcagcaaagttttttttaaaagaaagtcgaaaggggtcgcgcttcaggctgctactgcgagaggttgcacatacccgggtgcattgggcaccacagcggctggatcggttcg

SEQ ID NO: 367319 - DNA, 315 bp, Zea mays
tacgggtatgaacacaccagctacaggggtgaaagataacccggggctacccaaagggtatattgtatgacaagaaatgagaactgtaggggactctgtgccgtctgtgggctggtactctagcatcgatgccaaatacacgcgtgctgaggtggagtgtggtgtagaatagataaaggtacacgctactgtaactcagtacaggtggattgagctcaatactagagtatgcaaactatgactctaagatctttgcgatgagcgctttagataatgcgccagggcacacagttttgagcgatgtgattctggaaa

SEQ ID NO: 367320 - DNA, 202 bp, Zea mays
gggaggcttaagggaggacgatgttcatcatgctgaatcataggctttactttactctacaaactacctttttcaggtacaaaatatttagtatattatgggcctactacgtctgaggctgcactgcttttcttctagactgcaggatgcaaattcctgctcagacaatcagggctgcattgcatcccgacggctagggcgc

SEQ ID NO: 367321 - DNA, 248 bp, Zea mays
gtgtctcggcagccgcaatgctggcgcagctgctgctcgtgcacctcctcctcctccccgccgcgtcctcggccgaccaccaccgccattaccggggcagaagggcgctgcacgagccgctgttccctctggagagcacgcccacgctgccgccgccaccgcccgcgccgttcttcccgttcctaccaggcgccgcggcgccgccgacgccggtggcgccgccggaggttgagctccccttcacgcca

SEQ ID NO: 367322 - DNA, 141 bp, Zea mays
aagactgagagtctgcgagatagagagacggatagtggagaggagtcccctgcacacaaagacgttgcttttgatggggatgaggctttactccatccccgcattggtaatagaagcctatacccctgttccaaaaaacat

SEQ ID NO: 367323 - DNA, 248 bp, Zea mays
gagaaatctctatctgggggtttttttaaggaaccggagtttctcaaacaggtttccacaagaacatcagattttacaggggttcaaaatttaagcgcccccgactaacaggggctcgttcttgctacattacattgggaaaaaaaactgggagccctgggtttgaattgcaactacacaacagggacaccattggcaagacatttacaacaaccggaaaagaagacttcgagggtctaaaaccaaca

SEQ ID NO: 367324 - DNA, 221 bp, Zea mays
ctcacgcgtccggcgaagacttcctgctgcatgacaagagtcacaagatggtgctgaaaagctatatatgataaatgaggcaatctaacaggtcagatgtgtaacgttcatacaagatggtgtaggatataacataatatcattgcttcgttttctatttctatcatttttatatgcacacgcttgttcagagaccagaaacgtggataatttttgcgttt

SEQ ID NO: 367325 - DNA, 517 bp, Zea mays
ctttgatgttggttatttcagttgggcagcatcagtcatgtatagttatgctatcattgtgcccgtcgtgttctttttcctgtttcagtattttggatcacgcccaagtcttgttcgattttggtgtatgtggggctattctctgtttatcttcatacctgcatctgtaagtattcgatttccatctgtttgtttcgttatttatatcactggcaagaatacacagacattcaattttaacatgatgtacattcataggaattttcagttctctaggttgcaattatatataacggtcctaaaaattgattcacttaatgtaaagaatccatgacgttatcatggttgtgagcgcttggaactcacttctgttcttgaagatgaatgttgccattatgctaacatgagctgccctcctattttgtctggttaaggtacttttgcttattcctgtgggatttcttcaatgggtcatcatagctcttgctggtggtgcattatcttggttcataacttt

SEQ ID NO: 367326 - DNA, 524 bp, Zea mays
gttggaacgctcatgggtgaaattttgacttttaaacgtttaaactttgtttaaacgtagttttaaacaacataggaaaaataccaatatatcataatttcagacaataatatgaagttaaataccaaaacaaagaggttagtggcttaccaaaaattcacccatgagctggattgaaccccaaaagtaactaatagaccgggcccaaaaatagctaatggtctaaaatgcataaaacactgcgttttacagtttagaacgccaaaacgctaaaacgtgatttcaacctctaattagagttttgacgtttaaacgtagttttaataacactgttgatgatgatgccaaaaattagcagccttccacgagttcgaacagattaattcttgatgttaatgttggggtaaattatcgtaacattcctacaccatattcatatacacaatctgcgaacccaagtatactgactccatttatattgtttattgcagtcactactcaactttgaggaacagaaacgacat

SEQ ID NO: 367327 - DNA, 197 bp, Zea mays
tgctttagctctaccaagctcctgattgattgggaggagtttcaagatggtgtgatcatgaccataaatcggatgaactggatattcagagccaaaagaggaagcttgatatagaagggtgccgggttgaacctgaacacttggatacccatcatatttctatcattttaataggagagcgcaattcgaaagactga

SEQ ID NO: 367328 - DNA, 513 bp, Zea mays
gctgcttcctttcccagcgagcagtagaccctcagcagtctacggcaccttcggtctcttctacataaaaaacaaatcatctatcaccagcaatcagcaacaccatccggtattcctccgttccctgcccgacggagctgcttccctccttgctgtgctgtgcttgttccagattctactccatacgcccttgatttattttacttcgtgtaagatctccaatctccacttttttcgcttgctgtgttagctactatttcccctttgtgttgctggatctggcgagaaagaaaaataattggtttgtgcttcatttttttcattcagattcattaattttatgtgtctgcagagaaaaaagaaaaaaaaagcttcttactgaatttcatggccgacttggcgctcgccggcttaaggtgggcagcatcgccgattgtcaacgagcttcttactaaagcttcagcttacctcagtgtggacatggtgcgtgagatccaacgactagaagccact

SEQ ID NO: 367329 - DNA, 137 bp, Zea mays
ataggggggggcagatttctattgagaaggaacagtataataacgtaacaatctagtgcctcctttgcactatctttcccactgtatcctttgtcaacaactgaacaaaaaaaataatggccccttgggccttgatt

SEQ ID NO: 367330 - DNA, 242 bp, Zea mays
ccgaattccggggaaggtttgggcactgtttacgtctgtcacgcgggccctgcgccaagtgttcgttctcatttggtttgtcgcgcgcgtgcagcagaggcagagacgacgacgacgacgacgagcaaggccgtgtgcaacacggacggccccgtgtccgagacgtgcgacctggacggcgacgtccgcaccaacggcagcgccctatctgtgacgttcgtcccggtgagcccgtcggagcg

SEQ ID NO: 367331 - DNA, 533 bp, Zea mays
ttcccgggtcgttccacgcctgtggtttcccctccacccacgcgaccgcccacgcgtgcttttacgcgtccgatgacggtggatatggtggtggctgggttcctttggcagctcttaaaaaggtgctgagagggatcctaaagtacctaggagttctatggttgtttgcacaattgcctgaacttttgaaagaaatactaggatcaatcttaaaggacaatgaaggtgctctcttgaatttggatcaagagcagcctgcactccggttctatgtcggaggatatgtatttgcagtaagtgtacatcgggttcaactgcttctacaagttttgagtgtgaaaagatttcaccaccagcaacagcagcagcaggctcaaagcaatgcttaggaagagctaggcacagttgaaatcaatgaatatgtgactactttagcagacgtgttgcctccgaaccatatgatggctctagagttgctttttttttcactttgcttacattcccattttggttctgcgcgagtttttaaagct

SEQ ID NO: 367332 - DNA, 318 bp, Zea mays
gcttttacgcgtgggaacgccagtgctcgatatggtgcctgcttgaggtagggtggggcccgtgacccgggaccgtgaccgcgcggttctgggacacgggcggaggcgatcatggcgtggcgcggcccgctcggatgccggagaggaggccctggacagcggcctcgagctcagcctcggcctcccggcctacttcgcccggccttcaggtttggacgccgccagggaggagcccgccgaggcctctgcctacgctatccaggccgccagtgggagcaatgtctccaaggcaagggtcaggccagcgggcgcggcgcc

SEQ ID NO: 367333 - DNA, 300 bp, Zea mays
tcccttttttttttttttttttttttttttttgttttttttttttttatttgtctgcttctttggcaatctaaacaaaagacgctttttataacccacacaccaacgacggaccaaagaccctcgaggctcacctcgccggcaaaacctatgtgggtggagaactccattactaaggatgacattaagggcttcgccgcggagccggcgaagcctggcgctgagtttcctaatgccgcccgctggtacaagaactcctttacgaggaactccccaaagaaaccgggcatgggggacgcaa

SEQ ID NO: 367334 - DNA, 401 bp, Zea mays
cgtacgcgtggggtttctttaccctaaccccgacagccgccgccgtttcttcatcttcctcgcagcgccggcgctccatcttccgctccctccccgactcgcgatcggcacgcaggcgacgtcggggcagtctcggactcggcggcggcgtcagcggctccccctcccgccctcgccagtcgcttccggtcctccgcacaccaaccggcgactctgcgtgcgcgcctcctgcttccggtggaccgtcgacggcgcccgggccccggtggccggcgggcagcgagagccagcagccgggcagtgtccctaattggaaaggaaggacaatcagagccaagagtttcttcataaacctgaataaaaggacatgcgagtacggaatacagacagggcaccgcgta

SEQ ID NO: 367335 - DNA, 316 bp, Zea mays
actctaaatatcgggggtgttaatatttatttttactcaaatactcgaagaattcgcacgtatcatggggaatccctatctgaaaggtatccgatacaggataccggacgtccgcacctaataggtgtatccgaacgtgctacataggaggccgatcgccttccatcttataaatagtgtacggacagggacagcaagaaggagcagagaggttttacagcacatcaaaaaggccgttgggtatttaggtgcgaagaaactaaactgcttggtgaccgcacccatcggtaatcaggtaacaaaaacttatgtgcct

SEQ ID NO: 367336 - DNA, 181 bp, Zea mays
gttattcattgaagggaaagcccccatacatgtagcaaatggatcatccacggaaagctcccatctccggactaagggaaaaaaaggatcaacaggcctggagaaaacaactaacccatgactggaaacttctcgaacaactagaccagtactgcaaacttggcatatgacttcgaacacc

SEQ ID NO: 367337 - DNA, 376 bp, Zea mays
tctgtctcccgctctctacctctcctaccaatttcagctcagctctgttctgctcccgcagcaccagtacagaacaccccagaggcagcgagtcctgttcggtgtccggctggaaggccatgggggctagggctacctcccctccgccatggaggcgtcactgcctctgccgcgccctccacttcctcgttctcttgctctggggtacttccgaggcaaacaaagaacaggccatgttgcctccaagagggtggaactcgtatgattctttttcatggattggagacgaaaatgcatacctgcaaaatgcacagatcatgacagagaagttacttccacatggatatcaggttattcgccttctaactcttttaat

SEQ ID NO: 367338 - DNA, 174 bp, Zea mays
gttgaacaaccacaaaggggggttttaaagggtgcccggacacaggaaaaatcgacgggacatggggtacagggttcaaacaacaaagccgcaaaccctagggaacttggctctactgactactaggggaccgggttttaacacgaaggaccagtttacaaacatgaaggcaag

SEQ ID NO: 367339 - DNA, 88 bp, Zea mays
ccctcgcatatgaccacgcgtacgcccacgcgtgggccgggtcttttgtacataatgtaaggccagcgcaagcagaggcagcgcaatg

SEQ ID NO: 367340 - DNA, 233 bp, Zea mays
tcagacccacgcgtgtcgcgtttgtgcacgaggactgtatatatccgcatagggtcgggggtctagcggggccggcatcccccacacgagggccgcccctggcggtgccgaactggctcagcagaaaggccacatttaggccagcttaacaattgaaggtggaatcccaccacttgctcaatggctagaatcacaggcacttacggtgccaagagcaattgctgggaccttgc

SEQ ID NO: 367341 - DNA, 337 bp, Zea mays
  unsure (1)..(337): unsure at all n locations
tttttnttttttttttgctctgagattatccagcggggtatatttaaacaccagtctggttgcaaacaggaaggagacgctatggtctctccactgcaacagataaacaaaactgcgagaagcaaaggtggtgtctgctgaacatcatcaacgctcgatcaatcttagaccatcattctgcttcgaaaacatcaatcacctcccgcccttgcccttacctttccctcctcttccaccagcccctttgctaaacccttttccggtccctttcccactaccccttcccttaccgtgcctatcaggctgctgcctgctcttctggaacttgttctggaat

SEQ ID NO: 367342 - DNA, 318 bp, Zea mays
actgcaatcatggtagtttggaaaacaaaacatttactggcttccagcaaaacagaacacaacattgtcatcatactcaacagagagatttgaaacgctagactccagctctgcctcagttaacgcatgattggttgtaggggcgtctcgcaccagcatcgtgccagcctgggccgctggaaacgagggggagacggggaggttgagtttccgcgcatgcaggctacccagtgggggaaaaaatcaacgctgcatgcatgggagcaggcggtagagatgctctgcagccatccaaacacgtgccaagcgtgatcaacg

SEQ ID NO: 367343 - DNA, 83 bp, Zea mays
ccctcgcatacggtcactcctctcaaccctagcggagagggaccagaaggaatggccaccggtagacaaacccctaaggcact

SEQ ID NO: 367344 - DNA, 300 bp, Zea mays
acgcttttctctttggttcgaccactcttgcagttccacccgggatttaatcttaggctcttagctctagggtctaagctaggcccgcccactctttgtggagccatcaaccctctaatcgccaccaatggccactgccgaggtccagaccccgaccgtcgtggcggcccagaaaaccccctcgtggaaaaccccgccgccggccgatgtgcccgaggagactgcccccgcccaggccgaggcccaggccgaggctgaggctgctgctcctgctgatcccgaggagcttcccgcggccga

SEQ ID NO: 367345 - DNA, 97 bp, Zea mays
tctccatcatctgaaggaggagtatgtcgttggggaactttaaaccatacttttcctcggcaaaccgctcgaggaaattatatcttttttatatcca

SEQ ID NO: 367346 - DNA, 79 bp, Zea mays
tttctctctaccgtccgagaccccaagcaccagcgcggcggcgatggcgagtggtgaccattgctgtcccaaagaacac

SEQ ID NO: 367347 - DNA, 275 bp, Zea mays
ggacgaaaagcatgcatgcatttcagcatagtctagcagctagatacatgatacatccgatccatgaaaaagaatgatatgattggagcacgcagatgaacatagcaagagtgatctgagcatattacatatatagaaagatagataatatgcatgtgatgtgtgtggtggcgaggccagagctgctagcttagccggagtcggatcatcgatcgcctccgaccccctccctcatgactaatcaggatgcggcggcgagcgtgcctggtttgtcg

SEQ ID NO: 367348 - DNA, 292 bp, Zea mays
cacaacactcgacaaacatttagcagtttatgttcactgctatgaagaatattggttaattcctctatttctaaaatactttatcaatcggttttggagactactactatataatactactaaacaatttagttcattccttcgagatacgcactggaatgttaattacagaaatgcttagcagaccaacatagaagactgtcacaaaatggaagtggacttgtgttcatgtacctctcggcttgcctcatgagccagattggtgccctctcaacctttttccctctgattg

SEQ ID NO: 367349 - DNA, 90 bp, Zea mays
ttcttattataccgcccgatccccgtgtccgtgccaagggagccgagtccaacccccaagagccagctgctcggagctccacgcgatggc

SEQ ID NO: 367350 - DNA, 416 bp, Zea mays
gccatttgtctcctggacttttgtgatattggtggagctgtttccttctcagctgttaacttaatgcagtacttcatggttttgctatttctcggttataattattgctactcttcctctaaagaccaatgataagtcaatgtggttcgtgatgattggcatgatcatatgaaaagtttgaagagatattcttttataatgacatgttccctcacatgcttggatgtttggttttttctattcatttatcatatcctatgacattacatgtctacctgatctaattagtttccgcctgttttctttatgtatttattttttatctatatttttcttcttacacttttcctatgattcttctatgcagtttttttatcctcttttccttctatcttcatccttttttttttcttttt

SEQ ID NO: 367351 - DNA, 73 bp, Zea mays
tttccataccatccctcgcaagctactcgatcaaggacattattgtcacaacgagctagcaagaataatccgc

SEQ ID NO: 367352 - DNA, 83 bp, Zea mays
tggtctgtcgcaacccttcacgtatcgtctgggtgggacacgtttacaaccctgtcctgttccctcccccttccagaaaagac

SEQ ID NO: 367353 - DNA, 236 bp, Zea mays
  unsure (1)..(236): unsure at all n locations
ttggtttccggtcctggcgtcggccatcacggggcaggcgaattttaactgtttttggctttcgaacccttcaaagatttgagtttttgaccttatccaactagtttcccgngtccttcttttccccgcgcagcagcagagcaccacccggtgaccgagcaatggaggcggggggcgtgggcctggcgctgcagacgcgggcggcggccttcggctccggccagcgccggggcggc

SEQ ID NO: 367354 - DNA, 307 bp, Zea mays
ttgtcatataacaccactgccgcgaccgagagagtgggatagattagaatgcggcaatggctgacgctggggacgagtactactacagcgggtcggaccagtacggagtgccccacggcctgctgctggcggaggtggagggccttgtggtggcggtcccgctgtttctgggtggcggttggtaaggcgttgacggaagccttggtggtgctgctgagcccggaggggctcttcctccttcctgtgtgcactgctgtttctcatacgactactattgaccgaccgcggtgccgaggtgctcgccgac

SEQ ID NO: 367355 - DNA, 98 bp, Zea mays
agatggcgtagcaccaggagcagcagcagcaccagcatgagtcccatctgcaaatccaaatccaccagccgccgccgccgacgtaggacgggggcggc

SEQ ID NO: 367356 - DNA, 155 bp, Zea mays
ccctcgcgtccgcagctggtcgctcactcttgcagctcggcccttcactcagacttaggctcttagctctaggctctagctagccgcgccactccttcgtgtagccatcagccttctcatcgccaccaatggccactgccgaggtccagaccccg

SEQ ID NO: 367357 - DNA, 85 bp, Zea mays
tttccatgcgtccgcagcgagacaccactgagacgggagtcatttcgacaggtgagacagttcataccaaccagctcttaagacg

SEQ ID NO: 367358 - DNA, 89 bp, Zea mays
ttgtcctcgcgtccgcccacgcgtccgcataccctggggaagatcactagggccgtcgtcgtcgaatctcaagttcttaacaccttggc

SEQ ID NO: 367359 - DNA, 325 bp, Zea mays
ggggggccacttcagatcaatatatcagcataacgttttgatccctttcaggcctaaacaatcttgacggtttatctgctacaagacgcagcagcagcagcttacccggggaccggggctccatgaacacaagcagatacaagattcacggcaacttcatgaataagaaaccctaaaaacaaccattacagtcacacgatgtatcctgctgagaattctgagggaacacgggccagcggcctttgggttatctgtcaagaccattattgactgctccacaggcaaaccgggaaaaaacattccaatgcacttttacttgaagcag

SEQ ID NO: 367360 - DNA, 211 bp, Zea mays
ctgataacatgccccaaccccaaccccaacccagtggtggcagcccttgcctgcgtacattatgcactctgcagctggcggtgccggccatggcgcgcgccccgagctcgtggacgccgcacatcgccatggcgctccttgacgcggccgacacggccgaggacgcgttggctgagaccgacactgaggaaaatggcggtggcgcatgtct

SEQ ID NO: 367361 - DNA, 205 bp, Zea mays
attcccggttcgattcacaccttttaatttcatccccccatggcagccgccgcgccggcaagcttcagaaggaagtgcgtgccatctcccctgacctccgcctccgagcccccttctctctttgatggcaccaccaggcctgacgctgccttttatttgccttaacgcgcagcgcgcttggattgccaggaactaccaaggtttt

SEQ ID NO: 367362 - DNA, 281 bp, Zea mays
tctccctttttttggatatatcctcttagcgctttctgttcttgggggcgatttcccagtttacagactgaagccatacatatggcacaacgactgggccacactattacagtcaacgaacccactctaggccggacacctagctattgggcttaagctttctttttaatcttggctgtagcagcacaccatcttcgctaccagtctctggcgcaggtttacttgaattggcatccttgtgtgtgctaacagagttcgataatgtgatcttgattcccaac

SEQ ID NO: 367363 - DNA, 179 bp, Zea mays
cctagtgttaaaatatcactatcggctatacagcaggctgctgtacttgcacaatgcttgtatgtgagccggaggagtcgtgttgatgaaatgtctgggtgggagatggcaccatacatagagtcgattgattctcaggatgaatcttactttgtggccaggagtttgtgcgatatact

SEQ ID NO: 367364 - DNA, 92 bp, Zea mays
tttctctcgagtgcccgcttttgctccaatccaatcggtgccgtctcgggcgagatccgctccgtgtgccccgccgctgccgagatagaggg

SEQ ID NO: 367365 - DNA, 338 bp, Zea mays
ccggggtatgatataccccaagagtgaaggcccgaggagggggaattaaggtagagaccccacaacacctcaagagcagacgggcccaaagatccgaaccaataaaagtcaaaaccctacaacaaccattaagcactcacaaaacctataaactaacaacccaatcacaacgcaccaaaaacaactgaacgatggaaccatagtggaggacgcccgctcgtaggaaggcagcgtacgtggccatcagcagcatgcagacgtcgtcgtagcagagatgtcctagctacgcgtgtgtcatgcatcagactggcacataataaagaagtagatcatgcacc

SEQ ID NO: 367366 - DNA, 390 bp, Zea mays
atgttctcttcttggctattcagggaagcagctctgaagcacggggtcgtacactgtgaaggagatgctagcgacgcgtttggccaggatgcttactactctttgttataactttttgttaatgcttttttatctttttttctttgattattgtttcttttttactttttttttattttttatttattatcttctttttttttatttttattcttttttattcttatttctttttttctttttctttttttctttttttttctctttttttttatttttaaacatacttctatctttttttttatttttctattttttttctttttttttttctttttttttattttaatctacatttttattttaattttttacttacttcttttctct

SEQ ID NO: 367367 - DNA, 85 bp, Zea mays
acataatcttgtggacaaaactgacagctacaagaaagggtatggttctagtaagaagtgctatactcaaacctcccctcatatc

SEQ ID NO: 367368 - DNA, 386 bp, Zea mays
  unsure (1)..(386): unsure at all n locations
gaaaaaatatatatatacttaagggcatttaccatggagtgcccacagtacaaatgcaaattgcaaaacatcaatcatgatgggtaattgaaaaacactaagtatactgctgaatgtgactatataattattggtgtatgagaactgaaagggattgtttggttctttcaaattcaatacttacctaatgttttttcttatcacttttgctctgaaactcaaaattatgcacaaggcaagcaagacctgaattgttaccaatcctttacttgccataacattagtgcagtcctatcctacccatagcaagcattgggacctttgaggttctacatttttggcatactaaagaattctgattgaaaactggnggaagcctttctggg

SEQ ID NO: 367369 - DNA, 57 bp, Zea mays
cttgtaaaatacccacagctgggctctgagatgagaaagggttactttaaaaaagag

SEQ ID NO: 367370 - DNA, 393 bp, Zea mays
  unsure (1)..(393): unsure at all n locations
ttttnnttaattttttttttttttttttttttttgggggtttttttacaccagtgtaccataaacccagttgatagagaagtttgagtcaacataagattaattaataggggagacattttgcattttaaacggcattccttccattcccaacaaagtcagcaagaaaatgcaaaaccccaggtacagcacaaccatttcactgacaacgtccatacgaatctgcttcatcccacagaaaggggcatttctgggccagcctgacaatcatccttggagcaggcacacgccacaaaattcactatgccccaggctgaccgaacgatggggttcattgatgctttaaggttaacatggacgggacagatgatagcacggtaacctactatggagc

SEQ ID NO: 367371 - DNA, 245 bp, Zea mays
gggagggtcattttcatatgtattgtattatggacgagtctacaatgaaatgtttgtcttggccatagaagagtcattggatctctcttaaaaaagcaggattcgaatctaaagccttcttagctaaattacgtgtatcttctctcggggactccctcgatatgcgaagcagctccttgattccgccagaagcaatgatgtcacaagggttgtcttcgttctgagctaggtggcaaaaagcaagc

SEQ ID NO: 367372 - DNA, 63 bp, Zea mays
ttttccactcgtccgcccacgcgtccgagaaacgtgtgtatgagtgtagatgcattgcccgtc

SEQ ID NO: 367373 - DNA, 338 bp, Zea mays
  unsure (1)..(338): unsure at all n locations
tttttnttttttttttttttttttttttttttttttgggtttttttttttttaggggccatccatgggttattcagacctatcacgaacaattaagtacaccccctgccacagcgaatgcagagtttcagtctttcaaacaccatttgcaaatctagaaacacaagttgttgcctaagagtaacttttcgatcagtcaggtaaaaggggggggggctgcctacacatcatgttttttagcatacacaatcaggggggtgggggttttaagttgggggctgaaatcaacaaaggatgcctgtacatgcgacacatacccactaagtacaggataattaa

SEQ ID NO: 367374 - DNA, 403 bp, Zea mays
  unsure (1)..(403): unsure at all n locations
tttttntttttttttttttttgtctccaacagctctgctatcacatgttatattttaaacttcactctgtaaacagtattgtctgtagtggtttacatgaccatattcaagctaagaaagtagcatccacaaaaagtattatgtttgtaaaattcagaatgttttacatccctgtgaactatctttgcacgatcaatatgttctacagggttacttgtaacagctacacttctcatatagacaggagtgcttgctatttttagcaatttatacaaaggtagacacaagcaccacaaaggtagacaaggcaggtactgatctcatttgttggaaatatatcacttttgaacaatctcttgcatttgctctgggctcaagatcgatgcattgatgtcaaaattag

SEQ ID NO: 367375 - DNA, 434 bp, Zea mays
ggaagtaaggcgtctgttgctgcttggtttacgagccagagacgtctcttcacggagagacggctctaagatttttttacaaataacccccttaaacaccttaagagactccacattaaacaccactgtacatgccctaaagcggcgcggatggacgtagtgtgaaccattaacatgctgaactcgagcgtacaggccagcacttttatcgtgaagtccgtccatatgctagaacctcgaagcggttaactatatttggtggtgctcggtgcagctcatgcatctatctttcatcatgcagtcatgccatgcacaagcgaacaattaacacgttctcaccctagctaataatcgcgtcctgggcgatatacctgtgacctgtccttggataagcagacgcggtcttgcagtgttcctcctacttgagcttctca

SEQ ID NO: 367376 - DNA, 169 bp, Zea mays
aagggcaaaaatcaggtgaattattcagcaatgcatttatgcgtacacgacaggattggacgacacaagtcagggtgctacatcaaattcatgctgcaatcttacagccccagacgatgaatcaatacaatgctctgaaaccaagaagcccacaattcagctgaaacca

SEQ ID NO: 367377 - DNA, 580 bp, Zea mays
  unsure (1)..(580): unsure at all n locations
cttcggatggaagcgtcgtctaaattccaaccctaggccatggcgaatgcggcttcatccgcatcgtcgccgggggcaggtccctcctcctcgccgcaggccggtggagacgggggaggggacgcgcacacgccgcggcagcggcagggccggcccccgcgcgccggctccgacccgctcctcatcgtctgcggctgcttcagcgtcgtcacggtcgccaccgcgcttctctgcgtcgccgtcaccgtcgtctccgccgtccagtccttccgcgccggctccgatatattcgggggcatattccggtgctaccgcggtcgtcttctcgctattcgtcgccgtcctcgagaccgagtgggggttcatcatccgtttctggaagatatttgaatactggcctgcacggggaatgctccagatctttgttgctgtcatgacgaaggcatacccaagtattgaaggaatgatctcaaatgctcaggagattggcgctacagcttttgcatgngagctgctatgttgtctcgggatattgtgattggtggctaaaacgtctaggcgcagaagcaatttacggagc

SEQ ID NO: 367378 - DNA, 237 bp, Zea mays
cgaaagggacaagccaaattggcattttattataattgtatatggcacccagaccgccacaaagcagtttttggcacttgcataatacaatgccacaacaaaactggggttactatatgctgggggaataaagggggttatttattacgccgaccatataaggcgccttttttagggggggagaatttgggctaccgattggtgaaacgtagttttccagccattggagaagggggt

SEQ ID NO: 367379 - DNA, 387 bp, Zea mays
gacgacgatcagggtgggcgcgaagtcgacggcgtccagcggcggcgcgcccgggccgaacgggttggccacggggtggtcgggcgtggcgccctccggcagcgacaggcgccagtagcggtcgttgagggggcggtcgaggaaggcgtcggcggggcactcggcctccgaccgcgtgcgcgccacgccgccgaagaatggcatgagctggacgtatccccgcacggcgacgggggccaggtccgcgggcgagccgccgaagcgcacggcgaggtggtgcgcgatggtgccgccggccgagtcgcccgacacgaagacgcggtcgaggtcggcggtctcggcgacgcaggggtccccgccgtcctgcctcgccagccacaggaccgc

SEQ ID NO: 367380 - DNA, 366 bp, Zea mays
tcgcttacgcgtccgcccacgcgtccgctcgaccactccagccacgcgccagcgcccacccacccatggcgtccgaggccgcgccgcgggtcgtcgtggacgagtgccggggcgtgctgttcgtgtacagcgacggcacggtggtgcggcgcgcgcagccggggttcgcgacaccggtgcgggacgacggcacggtcgactggaaggacgtgacgttcgacgaggcccgcgggctggcgctccgcctctacctcccccgggaccggcgggccggggccgggcggcgcttgccggtctttttctactaccacggcggcgtgcttctgattcgggtcccgcgcctggcccaactgccagaactactgc

SEQ ID NO: 367381 - DNA, 444 bp, Zea mays
  unsure (1)..(444): unsure at all n locations
tcgtttacgcgtgggcggacgcgtgggtggcaagctgctgcaccaacaagaagttgtcttggatactccttcctttgataaagacactttgattgatagagaccatgcttggcagttctctggagaaatttcatttgaattaaaagatccagcctgcatttacgtgatcttaaagaagccagatgacttgaatgcgctttcagcagatatcacaagatggctttctgaagtagaaaactcgaagatcagtaaattggtggcgatgtnttgatctagcaaacttttgctgtcaaagggttgccaaaggactgattggctgttctggcttcccagcacactccgtgcattcaaaggaagatcatacagtactttagtaaggaactactccaacctagacagtggncaatgtactcagccacaaaggggcaggccattcttgcaagc

SEQ ID NO: 367382 - DNA, 400 bp, Zea mays
gggcagtgcaacttgagctcatgcattgacaccaaaatctatcggaacaagcaaaaaaaaaaaagagcagaagcacacgggggctatgggaaaatgacaagctaaggaaaaaaagaatggcacatttcatcatgaccatcaccagtcactggcacaaaaccctagctatatttactagtaagtactatgcaaaacatattcgagcagtattcaagtgtatagttgggcaaggattgaaacagctggttacttggatatatcttctttcttctcatccctggcccctggcgtcatggtcagatattgcagacgactcccttagtcccttcaaagattcaggaacaggtctgcatttgcatgcgaagatagaaagaagaaagcatgaactgcggggttagac

SEQ ID NO: 367383 - DNA, 434 bp, Zea mays
  unsure (1)..(434): unsure at all n locations
cttgaagccatcgtctcatatcgaatccttcagatctcacacacggagaccaagaaaagcacaattcccatccatctgatctgcatgcccatccctcatccctctcccccctccatggaatcccacaaaagccgcaaccctagctccactccctctataaatagcgcgccccgtaaagcagcacatacattacagtgcagcaagagccgcagcagctgtggtctgtgagtggatcgctcggagcaagcaaaggaactagtagtggcggccatgtgcgcttataaagggtggcgcttactgagagttccttggcattctgtccacctcccttttgacgatcttgagaaagtttgctttttttgtttgttgngaggtgggcatactgccaatggagctgcgtaggcctccctttgtaaagcccgcatgacataagt

SEQ ID NO: 367384 - DNA, 348 bp, Zea mays
  unsure (1)..(348): unsure at all n locations
tnttttttttttttttttttttttttttttttttttttgttttttttttttttttttttttttttttaacaaaaacgggggggaggggaccaaataaaacccaggggcaagaaaacaggacataaaaaaggtggaaaactgggaagccaaaaacccgttttagggggaccaccataaatgggggttacacaaaatagccaaaatgcaaattattttaaaactgaccaaatgcagaggcaggaatttttggggggggctaaaaaagggggcaccgggcactggaatgcccaaaaacaagattggagcaacaaacatggaaaaaaaaggggcggggggcaagggaaaaat

SEQ ID NO: 367385 - DNA, 176 bp, Zea mays
tcgctacgcgtccggatctgacgaggcggaaacctatctgactcgccctgccgccgaccctccccgcccgcgcgtactacgccgtcgtcccccgaaaggttttagccacagggcatgtggatcagtgagttcactgtggtgcaagccaagtgatagaaaagaggagctgaccagtg

SEQ ID NO: 367386 - DNA, 199 bp, Zea mays
cgcctgccggtgccgtaccggtactctgaattcccgagcccagacccacccgtccgtttcttgatcgggagcgcctgccctgggtcgtattgtgtctgcttattcacctactagaggattatttctggttttgctgcttatgtaatggcttttaaaaccatgaaagaagctacaggctcctacagctgctttgagaagt

SEQ ID NO: 367387 - DNA, 99 bp, Zea mays
ttccacaccttcgaataccttatagcttgtcagccatggccaccggcgccgcgtcatagcctcctcaagtcctccttcgcgggctcccggctcccggac

SEQ ID NO: 367388 - DNA, 58 bp, Zea mays
cacccgatactgtctcaaataaggagcacctgccctgggtcgggtttaaattgaaaat

SEQ ID NO: 367389 - DNA, 80 bp, Zea mays
tcggctctactccctggacgagatcgtgtaccgggccagctcgtggggcctcctcgacgtgcggcacgacatggaggcgc

SEQ ID NO: 367390 - DNA, 233 bp, Zea mays
cgcctgccggccggaccggaacggaagggtcgagccaggccacccgtttctttcttgcgggccccgaagcgttcggacagggggacaaagggaggcagctcgaccttaccatgcgagccagagaacagggatggcggcggcgcgggaccttacaattacatctggcatttgttcgagccaccttgcatcctccgaatccgacaacgaatgtcaagatgaaaggggtacagacg

SEQ ID NO: 367391 - DNA, 173 bp, Zea mays
acgcccacgcgtcctcatgagatatggctaggccttgtgctcgctccaggagcatctgcctcgatgacgagctgctgctgagcggcgacgcgccctgtatcaggctggatgtgcgcaccaccaccacatgcacgacgacaggagcatacgcacggaccgagatcattaccact

SEQ ID NO: 367392 - DNA, 306 bp, Zea mays
tttttttttttttttttttttttttttggccacagaactagccaaaacaggcaaactgaaaactttccaagtcgggccaacctggcaactagagatgttattggcaatctggccataaagtgccaaaaaggggtccatggaaaattgtcaattcaacacatgatcctcgcatccaatgcccttgaggcatctgacttaaccatgacaagggggatgtccatagattagggggaaaaaagatgcagggtggggcagagaatgtaagttgaaacatacacgatgcactttggtgcagagacggcaggt

SEQ ID NO: 367393 - DNA, 234 bp, Zea mays
aaaggggaaaaatgcattgcatggggggctcaaacctttaaaagactttaaaaaactttccaggggaggcatccctcatggtcttagggcatgcttctttaaaaaaagaaaaaatgaacctaaattggtcaaaaggcatttggggcccccgggacaataaaaaccgggcccttcacttgttagaggaaacattttattcaaaaggcccaattaaaattggcgacccaggaaaac

SEQ ID NO: 367394 - DNA, 307 bp, Zea mays
gccgcctcgcctgccgggaccggaccggaagggccgacccaggccacgcgttcggtctcctcgtccccgatctcctcccacccgcatgcaagggtttccttctcgaccgtgcggaacgagccagagaacaggtatggcggcggcgcggcacctcagatccggcctgcccctgctccgcgcccacctggcatcctgcgaatccgcggccgtcgctcaggtttcgaggggcttcgcgtcgcaggccgccaagcccaccgggaaggagatcaaggttccaaaggctctgtttggcggcacaggcaactat

SEQ ID NO: 367395 - DNA, 375 bp, Zea mays
acccgttcgtccacgcttccttatgagacatcgctagtccttgcgctcgctccatgagcatctgcctcgatgacgagcatgctgctgtgcgggcgatgcgccctgtatcaggctggagatgcgcaccaccaacacatggacgacgacaggagaatacacacggaccgagagaattaccactgattatgcatagcggagtactcgccggaggacctgacgcagcacgaccgagtcgtcaagctgttcaaggagtcgagagcccaagtaccagaaggcgtacggacactctgaggtagaagctgcgcccggtttaaggtgttcaaggacaacctgcaccacatcgacgaggccaaaggaaggaggtcaccagctact

SEQ ID NO: 367396 - DNA, 259 bp, Zea mays
cccattcaccgcttcgtttgggcccaataaaaaaaaaaccccagcgggggcgaattagaaaaattctcgccgacgttcctcaccacggcgacggccaccgcgacctcggccccgacgttgcctacggcagccaccatgtcggcgagctccgttgtccccacgctgctgccagatgagcgggccgacatcctgtcactgctcgacgcctgcgtccgcccgctcgccgacgttgtcgccgacttgcttgctcgggttcccc

SEQ ID NO: 367397 - DNA, 411 bp, Zea mays
actgtacaaaggaacacatgaatcatactgatatttcaggataagccatagaccatgccaaagctcgcgcatctcgcaagcaaagggaaaggcaggagatgcgatgatgtatcatgcacgtcctattcgagcgcgtgcgcggccgactccacaagcacagaaggagctcgtaattagtttatagctagtggtgattgatttagctggctaggtcttgatctgcgacagcatgcagcggacgtccttggcagtgggccgctccttggggtcgtccttggtgcagaacaaggcgatgcgcagcagcagcaggatctgctcgtcgtagccggcgccggcgatgccggggtctatggcctgcgcgtgctccccggcctccatgacgcggcgcagccacttgacgaggccgaccac

SEQ ID NO: 367398 - DNA, 509 bp, Zea mays
ctcactcgtccgagccgccccccgagttgacggccatggcgtcagcggcgaacaccatgccaggcaagtctgttgtcctcctctcgctcgtcacgcttctcgtcgtcctcatctccgccgcggagagctactacggccggtatgccgtctcgcactcggccatggcgcgccgctcccgcctggggacccggcacgcgcatcaccgccggacaacggtgccgcaccggtacgtgctcgcggagaagagcagcgcgcccagcggcggcggtcccaagaaccacagttcgccggcgaaggccaacgccagctcgccggcgccggcgcctccggccgccgagcagactggccggcaccacctgagccacaagaaccgggtgcgcaactggatcatcggcttcgtggtggggtccctcgccggcgtcatcttccggatggtgctgtcggtgctggtcaggctggcgctcaactgcattcgcgggcggtaccggacgcggtccggcgtgatgatc

SEQ ID NO: 367399 - DNA, 116 bp, Zea mays
gttcccttcactcttcagtagcctctgctcatcagaaatgaccgaggagacttcctgtttcacctacctgcgcatcgggcgcaagaccctaaagaccgccccctcaggggccacag

SEQ ID NO: 367400 - DNA, 278 bp, Zea mays
  unsure (1)..(278): unsure at all n locations
ttcctttttttttntttttttcttaacaaaagataccatgctagatggattaatgataattattggagcaagaaaaaagatacttatctactaaggtgaacataaaaacatttttcttccatgtcatctatatttaggtgaaaatacaagtcaattaaccatgcttagtagaacctatcagcaagcagcctcccggagattatgattatccataatctattgaggtcaatgatgctggatccttccagttagatagctatcatcttcagtctttttca

SEQ ID NO: 367401 - DNA, 237 bp, Zea mays
gtttgttttcgcgaaccagcacgcgtgcggacagggggtacagattgagggagcatatcctgaccatgcacccttttcctctgatgggcacctcaaattcttttgctactattacatttggaacttggtaaacctctttttcctttacccggtaagacaaaagaatgacgagaacaagcccctacaggccttgaggccatataacaaggttaatccgggatcaaatggggacattcc

SEQ ID NO: 367402 - DNA, 180 bp, Zea mays
ttcggtcacgcgtggcgcagctgtgggtgtgggggcgagcatgcaacaacaacgggccgtacctgctcttgagggaaaatctgtataattcatgcaagtatgatgagtatggacgacaattggcgccttacagctacaacgtcctcgctcttacattagtaatgaggtggatagaaaaac

SEQ ID NO: 367403 - DNA, 259 bp, Zea mays
aagccgcctcgccggcccggtccggaccggcatggccgacccaagccacccgttcgcctcactcttcactagcctctgctcctctgaaatggcggcggcgacttcctctttcacctacctcggcatcgggcgcaaaaccctaaaccccgccccctccgtagccacagccgccacctgcgtctgcttgcccgccacgcagcacccatgcctcgtggccgcctccgcggaccgccgccgcgccgtggctgcgaaggtctcg

SEQ ID NO: 367404 - DNA, 409 bp, Zea mays
aatgctggctcgcccgcacggaccgacccggaaataacgggtcgtcccacccaaccgttttgttttcctttacgactatacttgatcctacgcaagtactaacacacgagccgctttacttgcttctaactgataatagcacgacctcttacaaggaactccagcatgggcgcaaactgctgcttactggatctacgcgaatgctcacatgcactaaacgcgtgagcaaaaaaacagcccggcaggatcgctgacttgctctgcctactatttccaggaactagatcatgtcgctgagggcacagatgcacgacgatagtttgaattgaacgtagactattgctagccacagacagagggcagtgtggagggcggtacacgcagaagaacttcaaccaacaccactgca

SEQ ID NO: 367405 - DNA, 99 bp, Zea mays
cttacgtccaagaggttgggtcggcacagcaccattgggcaacaagctgcgctcataccctgctgcatgcgagcatgatgagaggccgagcaggtgctt

SEQ ID NO: 367406 - DNA, 299 bp, Zea mays
gtcgccttcgtgcccccgttgcgcaaatgctccttcggtccccaattgggccaatagcccgctccgctgccagtcgcggcgtgggtcggggaagaagcttctgtcccgtgccgtagatcgggagaggagctccccgctcccgcctcgtggttcgattccccgtcgacagactttccgggaggcggctacgccctcggctaagagctgcttcctctgcttcgggtcgacggcgcaggactaggagcctaagaagcccgctgccatgggcgctagcaaggacgccaggcctgatcgcgcag

SEQ ID NO: 367407 - DNA, 240 bp, Zea mays
tcgttctcgcgtgcggcggcttggggaccaggctcgtgattcctgccacaacgctccttacctctcccatagtaaatatctgcataggccatacaaggcggcagagcatagacgcctgtcgcacctgcgaggaacacgcgattcgtcttacaaggggcattggggctagaggacgaccgcggactggatgggactccggtataaaggacagctccctgtcaggctggcactctctcggct

SEQ ID NO: 367408 - DNA, 279 bp, Zea mays
gtcacccgtgactcaactgttcgtttgggctcgatcatgcacccacaacgggccctacttgcccctgaggcttaaaatgtataggtcatgcaagtattatcagcatggccgacaattggcgccttcgagccacaagagcaccctttcattacaacaggttgaagcaagcggcatcggacagctactgggcacaggagtcagaacggcagacggcgtgcactctctaaggttttgaatattagccagcccatgggccctgccagatcataggcgtaactg

SEQ ID NO: 367409 - DNA, 269 bp, Zea mays
ttcggtcacccgtcccgaaactgttcgttcctgcgatatgatggacacccaaggcgcactacttgcccctgggtcaagacatctggaagcccggcaaggaacttcatcatggccgcaacctgacgcctttcagcactcaacgtgcacgctatgtcaggtatacacaggtgtacaacaaaaacgcaatccggtcagatatttcggccaggtgaaagaaatccagaacgcttccaacctttcaggttatcacatctgaggcagcgcaaggg

SEQ ID NO: 367410 - DNA, 277 bp, Zea mays
ccgcctccccggcccgtatccggaccggcatggccggcccaacccacccgttcgttttcgcgttcggttttgtgtattacagaaatgcacaacttggatcgcatcctataccaaattaagaaaagcccagcacagctctatcctagcaaccatgtgacagctattgtcctttatgtgcgaaccagattgactgctgctttgcatttcttggcacattctttgaaagaagccgtggctacttctactcttattgactgcttgcttgaggtgaaaagga

SEQ ID NO: 367411 - DNA, 201 bp, Zea mays
agaacccaaaaactttcaacctttaaagagggtttcaatttgaagatgcccaccccaagaccccagaatgggttccagggctatcccatttcatggttatttacatgcatggatgaagcaaaaccccattaattattgtaccaattcgggcgcagcttttggcttttcaggaacaccagctgggggagaagccttgctggg

SEQ ID NO: 367412 - DNA, 164 bp, Zea mays
gtgaaaaaaaaccaaacaacgggacccagaatttccgaccgaaacagggtcagggggggcccacccaaaggggggtacaaaattttacagaattatacccaacacattccgaattggggaaaaaacccaggagggggtatgaacaacgaccaggcgcaattttt

SEQ ID NO: 367413 - DNA, 81 bp, Zea mays
tttacttccacgaggtggcgtcggcgaagcaccaatgttcaactagctgagctgatattaatcttaatgcgagcatgtgta

SEQ ID NO: 367414 - DNA, 214 bp, Zea mays
tttacgtccaggagcttggggcggaaatgctccaatggttaacgggctgcgctcatattatccttaaagcatagtggtgtcacggatcagcagattgcattagtgaaggcgaacccaaggcactagccagaaacaaggtgatataccaaggaatgaaaagcggtccagtcatctgatttggagggccgttccactgaactctccatatagacct

SEQ ID NO: 367415 - DNA, 337 bp, Zea mays
ttcactttcagcagattactgcgacaatgctagatagtttatcaaaacgagctaatacgagccctaaagccttacctttatgagtctatgcatgttgcatgcagttatggagggcacgaggcgccgttgagctattagtgatcactccgcagcattatgagtgtgacacagacttgaccaggttgaccaccacaattggctcaggcttctgaccctcaactcctttgcagcttgcgggggtcgcaaccgcagctgaagaccgatctgttctttatcccagaacaatggccttacatgacagctgcatgactgccgtttcttgaagccattgcttcac

SEQ ID NO: 367416 - DNA, 235 bp, Zea mays
gtcacgcgtgggcccccggttcgggtgggctcgatcgtgcaacaagaagggcccttacttgcccttgagccgtacgtttgttaggacctgcaagtatgatgagtatggacgacttttggagcctacgagccacaagtacaactctatgacagtgctattcaggtgtaaagactacagacagtctggcttcatcatgggctcagaggcaagaactgcatatggagagcacgctctg

SEQ ID NO: 367417 - DNA, 346 bp, Zea mays
ctctggcacaaacaaatggcataaaagacgtccggctccggccggaaccaattgtaactcgcgtcaaatgtgtaaattttatctcccttatgagcatttaagcccaaaagaatcgtgaatccatcgatcgacgcatcgagacaggcacagcaaccatatactactacatacatcacatcgaatgctagctatgctatacacacggagacgaattagcagcaacaattgactgtggagtgtggactaaacgtagccacactgagctctagggcgcatcatcagcatcacagcaggagctggtcgtagcacaggtccagcgtcttcttggcgaagaactggttcacct

SEQ ID NO: 367418 - DNA, 281 bp, Zea mays
tcgttcacgcttgacgcaactgttcgattggtgtcgagcatgcatacacaacaggccctacttcctcctgaggctgaaatattataggtcaggcaagtatgttcagcatggacgataattggcacctgctaactacaagatcattctatgacattactaatcaggtggacaaccatacgacagtcgggacagcatcttgacacaggtattcagaacgccagacggtatccaatctctgaggttcccaatataagccagcccttggccccttccataacata

SEQ ID NO: 367419 - DNA, 263 bp, Zea mays
aaaccgggcaggaaggggaaaaaaaaaaaagggggggggggtttacctaaaaaaaaaaagggccccccaaaggacaaaggggcccccccaggaaagggttaagccccaaaaaatggggaattgggtttgggaaaacccggtggggcccctttttaagggggaacggggaaaaaaaaatggcggtaaaaaaccggaacccccttttaaggggggggggcccaaaaattcccaaaagggggaaaattaaaatttttcaagggggg

SEQ ID NO: 367420 - DNA, 133 bp, Zea mays
tttacttttaggagggggcatgggctacggaggctagtgtaattatctgttcacatattacaccaactgctagcatggggacatgccgaacagagacgatgacgatggggaaatcttggcgcatgacaaccac

SEQ ID NO: 367421 - DNA, 142 bp, Zea mays
ttttctttcacgagcttgcagcgtctatgctccattgttttattggatgttcatatattacccccacagcttaaaggtgtagatgccgtgcaggcagaaccaatatggggagcacttggcgctagccaactacaagctaata

SEQ ID NO: 367422 - DNA, 212 bp, Zea mays
gtcacgcgtgggccaacgcttgggttggtgtcgatagtgtaatcagaagggccggtacttgccccagaggcttaatatatataggtcatgcaagtatgaccagtatggacgacatttggcgcctgcgaggtacaagttaacggtttgacagtgcaaatcaggtagatagacaatcgccagtcgggacagcttctgggctcaggattaagaac

SEQ ID NO: 367423 - DNA, 234 bp, Zea mays
accaaaggcaaaacaagcaactggaagggaaaaatcatttgggtttaaacacccccccaaaaattccccggactgaaacaatccttaaaaaaagcatttcccacaataacaaacggggttcttggagctcactctggctccttgggtaaaaaaagtttgggcgggcaagggaagggccatggggcgtacttgtccgaaactggcccccaagcccttgaaccctttccataaccc

SEQ ID NO: 367424 - DNA, 539 bp, Zea mays
cggacgcgtgggcggacgcgtgggctgtgacggtccatgcaagaggtctttccaccccacaaagaaagatggcagagaatctaaatgtgaaagtcttcattacacttcagcagaagtaaagagaattggtacttatctatgtgcaaactgcaaaaataagcaacaccaatgttttagatgtggagagcttgaaccatcccatgggccaaatgctaaggtctttcaatgcaatcaagcatcttgtggatatttttaccaccctaagtgcattgcacaattattggatcctaatgccactgatggtgagttggaaagaaggattatggcgggaatgtcatttccgtgccccatacattggtgtttcaaatgtggccacatggagaacaaagctcaaagagcacttcagcttgcagtgtgtagacgctgtccaagagcatatcacagggaatgccttgcagggacttatccttgggacaaaggacatgatggttaccaaccgcttggagctttcgaccaattttattactgctagatcatga

SEQ ID NO: 367425 - DNA, 190 bp, Zea mays
gttacttttacgagcgtacttcggatacggacaagagtttctctatctgttcagatattacaccaacagcttagatggacagatccttcccatacgggctgagggttgcgcacatcttgcttaagacaaccacatgcggagacctatagaccatcgaaaccattctgacccgctacttacgggggatgga

SEQ ID NO: 367426 - DNA, 455 bp, Zea mays
aggcaatatcgattcaagaactattgtataaaatttgcagagcaaagctgcattatttatttccatggttgtatagtgatcagagatcacaatcggctcagctgctgacgaaattggaagatgctcctaagtttgattttccttgcatgataaagagaagtgctgctgatttttttgtgcagtttgataaagccaaccctatttttatttccacgaattctcaaaattagtattcctgaaagtccttcaagacttcaatgcgcccatttttcctgagacgttgccatggagtttctaggcccacttggagaaccctaggtctctatccccagtgtcgtcctcaccactgatctcgtgagagaagaaggggttgcgttgggagccgacgagctcgacgtggatgaacgtgtagtacaggctgagcttatattaagagccctgcaagaagggctgac

SEQ ID NO: 367427 - DNA, 238 bp, Zea mays
gggcggagggccctcgctttttcaaaatttaacaagaaaaaaaaggccgggcacaaaagaaaacccccggtgggggcattgttctcaaccccaaaatttgcccccaaaatcaaggggttgggcttattaaaaacccccttattccaagacccccaaaaaaaaaggggtttccaaattacggcccaaagctttgaaaaaaaaactgggcaaacaaaccccgggggtcctggggccccgg

SEQ ID NO: 367428 - DNA, 298 bp, Zea mays
gggaacaaccgggcctgttgcaaaaaggaccccccatcggggggggttttccccttcagggcccccattttttttttttcggtgggggccaaaaggggcccccccccccaataaggaagccacgggcccccaatacccaactccggggcccggaaccttaaccccggggcctttttggtgggggaagataattagggttaacaaccccgcaaacccaccattcttctaagaaagggggggtttaactccgggacgggcccccgcttaaacctaattaagggccgggggggggccccct

SEQ ID NO: 367429 - DNA, 144 bp, Zea mays
tttgtgataactggccttccacagctgtgtggggggggattctatgaaagttcctttaaaactttgtcccggcctattctttaagcaaagaaaaaccttgctcatgagctctgggagtatggctgaaaaaaacccaaggttctt

SEQ ID NO: 367430 - DNA, 246 bp, Zea mays
ctgttcgacccacgcgtacagttcgttcatacagaaggtgctagtgccgacgtcacaatcatacatgacgttccagggctcctggcgcgtcaccacgatgagttcgtgtcccgacacgtgccagtaatcctgggtccttacgggcattcgttcctcacctacaacacccatctcagtaagccataactagctagctattctaacgttgataacatgacatctaaagcgagcagtcagtctgaccag

SEQ ID NO: 367431 - DNA, 365 bp, Zea mays
ttttttttttttttttttttttttttttttttttttttttgggtttttttttttttttttttgggtttttttttacgggctttttttttccggacaggtcaaacatgaacataccccaatagccattcacattattttactttaaatatcgaccacaaagataccatgggttcaaaaatttttttcgacaaacaagttggttcgcagcttatcactagaggtttctatgggtactaggattattattggcgatcaatctggcccatttattggcattttgggcgtagggggggggataccatacgatcaataccaccgggagggtacgggcgaccgagcaaagctcttccttcttcttcttcttc

SEQ ID NO: 367432 - DNA, 387 bp, Zea mays
aaaaagaatgggcctatatatatctcgtgtgaatcaaacacttctcttccgatagctatgacaaatttaaacatttcgatgaggaaacatggtagtgaaatcaacaagagtgtaatgacatttgagcgtctctctaactctgttttcttagtagcttctgccaggctttacataccttaacctatgggggaaaaggatcacgctgactgctttcctttcctaatcctatctaattctgcctcagcttcttgcaatgcagattttagtatagttattctctcctccagctccttgatggggccccttttacgagcagacttgtatggtgtaaggaagcggtgggaaaagttttgtagagcttgaacaccacaaaccttttttgaaagc

SEQ ID NO: 367433 - DNA, 368 bp, Zea mays
  unsure (1)..(368): unsure at all n locations
cattttcactgacctcaaactttcttggaagtttaaatctatcacattcagtttaaaattttgttacggcctattcttcaagcaaagaaaattgttctcatgagctctggtagtatggctgaaaaaaactcaaggttctttgtttcaaatgacaaaatgaaaggagagagagatgcatatagcactgcagtgaacttatgttacgtagtctaaccctaattggcctcttgtgctgggttttaggcccgtcacataatagtctaagggtctgtttggttgtgctgtgggcctgtggttgtaaaaaaagctactgtggattgtgagctgtgaaaanaattgttgtggatgtgagctgttaaaacactaaa

SEQ ID NO: 367434 - DNA, 461 bp, Zea mays
gcctgcccggcccggaccggtcttgccgggccggcccacgcgaccggtctcgtttgcgcccacgcgcacgagctcttcctggccgatggactggcatctacctatactgactagtctgagccccgacctaacgcctggtgcatcttcacagagaacactgaccaccagagaatggtggtcacatggaccctacctcctagcgaccgatgtcttactttcacgaccatgactgcgtcctcctaccctggctgatcacgatatcttcggcgaacctaccatgccaaaccatgtccggatgactagtggagattactacaggcagccccaccgatagcttgaggtgccatgaaagaaagcctagctgtactgtgacatggctgacttcaacctattcaaggcccgtactctgcacatgatagaccatcattctgatcatgctcgaggcgggcttaaaaaaagat

SEQ ID NO: 367435 - DNA, 377 bp, Zea mays
cccacgcttccgcggacgcgtgggcggcagccgaccaaccaaccaactccccggcaggcgcaaatccttccgtcccaccgggaaacatccctctccctctgacgctgctgctactcaccctctcggatccctttccaccccacctcccagatgcggctggcgacgacagcgccggcgcctccgcctccggatccgttgatctagatgctgctgcttgattggggttaggaggaggcggaagaggacggaataggcatacgactgcttggccggactgaggaggcacgggggagagcaccgagccggcacatagcaccgggagcgaccagcggacaggctggacggggccgtgctgtggtcaccagcgagggggacac

SEQ ID NO: 367436 - DNA, 355 bp, Zea mays
caccgcgtcagatcgcgagtaagcactcccatcctcaatccctgccctccgcggctccgccgtaaaccccgctgttcttcgccggagcactccctcccggaacccccgccgcccccgggcccccgacctcgatatcgtgggagcccgccgttgggggcctactgcatgctcaaatcgtcgacactggggcggggcgaggtagagatccggacggactacggatcgatttcttcgctcgctggacggtactcaagttatcattcatcacactattatatatcatgccatatttgaaccttcatgagtattggatgtgatacataatgtacacataatccacatggaactattctta

SEQ ID NO: 367437 - DNA, 292 bp, Zea mays
agaagagacgcctcgccggcacgggaccggaacggaagggccgggccgacccacgcgttcgatgtttgtggggcgtctccgcggccatatattcctctttttgggcggcttactcgacaccgcccccctagttgtagtacacaggtgcctagccagcgcggggggagaaccactcgatggaatcggactaaatggatggggagggcacaacgctggatgaacaaacacaaaattcagattgctgagagggactccctcaatgtaacaaaggtggaggagagactggggacca

SEQ ID NO: 367438 - DNA, 460 bp, Zea mays
gcgttcacgttgttcgtccacgcgtccgcaccacgcgtacggccacgcgtgcgcccacgcgtacggacatgttgctcccccaaaggtattgaacttctttgttgaatctgggatggacagtggatgtcacagaagatatacattcagatcatgcaaagtgcaggtaactgttttattcagacatatatgattaatgatgattcatcaatatgtgaactccattgagcaagtatattataaagtcagaactaaaaagaggaacatttggttccaccatttcaccttattatgtactaaggggaagtatttagagattgaattgatggcaattacttcagtctttaaaactattattagtgttgataatgatgattccattcagctctgtttttttctgcccaccgaatcattcgttcctcgcgcgtgtgcgattctgactatgtgtcatggtggtgcctgc

SEQ ID NO: 367439 - DNA, 363 bp, Zea mays
  unsure (1)..(363): unsure at all n locations
tttataaaaaaaaaaaaaaaaaaaaaaaaaaagaaaaaataaaaaaaaaaaaaaaaaaaaaaaaataaaaaagggaggacgtttttaaggttggggggtcccgtcttcgtgccggcgccttccttcctcttgtttgctggcccctttcttttttttggtggccgtctgttaccttcgtggggccgtgggtttcccgtggggttgccgagcttacaggccttggcccaaccccccttttcgccggttggcgcccttttttaattggccggcccctttcggctttggccctgctcgtcccgccttctcttccaattggctccccccctggtctggggcctggccctcgcctggggnagtgttttc

SEQ ID NO: 367440 - DNA, 564 bp, Zea mays
gcgtccacgcgtacgcccacgcgtccggcgagtacttcttaaacatgacctgatctacagattccaccccaaccgttcgtggttacatttgtcacactatcactccactgctcccgatgtcgaggactcgaggcccacgtccatgtcgtagtcaaggacgtggtaactgcacagaaactgggtcgaccagcgggcgccatcggccgacactgttgcctccgccatgctctccgactcctcgtagttcactgtgccgtcgcccatgaggtcagctgggaggttcctgacgaaccaaggatgactctttacctcaggcatcgtcgtgattctctgcaaagagcatgcgttatggcacatcgatctgaaagtcctgaacaatcaaagtgactgacgctgcacaggggaataagctagtatggcatcattcacatctgctgggttgggcaaaaaaaaaccttcgcattctggagatacggggcgtagacaggaaccgcgtactgaacacccagtatattattctgcaaattggcatcggcatttagatgactagcatttggatatacg

SEQ ID NO: 367441 - DNA, 293 bp, Zea mays
gatggatatgactgccaaccctgggactatgcggaggctgaggacccgtggtgtgaggggccacataacgttctgtagcactgccccaagcactatggacattgatttgctatcctaggggatacgaggtacacttgtctattactgttgcctgggtcgaatatcttaagaacatccatctgagcacgggcgtgcatgctgacacgaatcgtgagaagattgcctatgtgggccacagcactgtgcatgaccgtgaccttaccggagactgctctatggttctgatggtgcta

SEQ ID NO: 367442 - DNA, 639 bp, Zea mays
  unsure (1)..(639): unsure at all n locations
cacattcttggcagttgttcaagttattgagcgctgatctaagtgccatctgaacagctgaagtgacatcgaagcttgtaatgttatcctctgagcagtatatgcatattgcatccaatgagtttcccaccttcatacagatattttccccctgaataactatcaggaacttcatatgactaagatattgatctcaagcaagtctgcagctaatatttcatcaagtttgtccaggtgtatgtcatgcatttcaacttatgtgacattgatctctctttctgattcttctactagaaatttggtctacaatgccatcagtgtaaaattgtgggatctaaagtgccaagtgaaaactttatctttactgtgactgtaaactttggttggagtttccacctggggagttaacatcatgctgatgagccactttggcgtattgtagcctctagatcacttaaaccatatgaatcagctatgtgaagatctgaggatattaggatatcacctatgngagatgatataactgaatatcaatccaaattgactttcttgtgttcatgtncttagtgatgcagggcattttcacatgggaaacttcagttgctgactcaatgataatctgtcaaagacactgtctac

SEQ ID NO: 367443 - DNA, 602 bp, Zea mays
  unsure (1)..(602): unsure at all n locations
gtcccaccaggtcaccgtccccgaaccctctcgcgcgctgcccccatcctcgcgcctccccgccctgccgtcctcctccaaccatgtcagcgcgctccctcgacccgcggcggcttccttcgccttcgcgtgccactgcaaagcaccggtgcgggaccacgacgctgagctcctccgcgctctacggtccaacggcaacggcaccctccacggggacacagcactgccgcaagtgctcgactcgcgctccgacggaccgggcggcgacggcagcagcaagaggtcgcgtttctgcgcccgggattgcgcgaagcggatcatggagctgcccgtggaggagcgggtgaaggtgctcgacctcttgcagcgcgacgacgcggcgctcaccgtctccgattacaacgacatcctttcggcgctggctcgcgcgggagaccacgccacggccgtcgctctgttccgcgccatgcccgtcgcccccgacgcacactccttcgccaccgncgtgcagtgcctctgccgacagggcgcgcccgacgaggcccagctcgcgctcgacagatggtgcgcgcgggtccgcccagcgttgcacgttctcagcg

SEQ ID NO: 367444 - DNA, 397 bp, Zea mays
tctacgtttgcgtccacgcgtgcgtccacgcgtccgagcattatggacacgcgcggctgggtgtcaaggccgatagactctgggagagtagctgctagcgtaaccgcgcgcggcggacggtcttgcgctgcgctgttgctccatgtacgtcaccgccaagagcggtggggatctggcggcattgcgccgaccgttgaatctcaccaacaagggggccgagtgcaccttcaatgctgaaagatgctggggaaatatctacagatgaagaatcagctggggtctgtgacatgccattcgaatggttacactgacgtatgctgggaaactattagaggcagtcacgatggtgattgttcattaatggcggaaactagttgcattatggaacctgacgcat

SEQ ID NO: 367445 - DNA, 457 bp, Zea mays
gcggcttcctttccgtcgcctcgccgccgcgacgagacgaccccgaccctacaaatgcaccgtcactttggccgcgtcagccgtcgccactgcccagatcccgatgtcccgcgcccagattccactcgcttgttgcatcgctactctgatcccagctcggggcctatgacgtggcccgaggcgcaagcgccaacctaccggcccgccctaaggtttggggctgctcgatccggctaggtcttggcggcagctgctccaatggcggatcgggaggaggacgaggagctccagatggcgcttcgaatgagccttcagggttccccgccggcgcagcctgagcccaagcgcagcaagcccccgccccccgctgagcacactgcggaggcagaggcgcgccggaagcagcacgagctcatggtcgccgtcgtcaagaagcgccggctcggtgcagcctcac

SEQ ID NO: 367446 - DNA, 485 bp, Zea mays
ttggagcttgcctgccggggcccgagctgctgccggtgctcgaagcgatgaagctggtgacgggggtggatttggagacggaggtggagctgtcgccgatcgccaaggccgaggaagcggccgtgtttagcccctactccagcccgagcaccgccttattgctgcagaggagagtcgtgtcctggtccacggagaccgggtctccggcgacggtccgcgtgcgcctcggtgacagaagcttcgacctgcacaaggaccctctggtgtccaagtgcaagtacttcagcgaggcgtcgctccagtccggcggcgacgtcgtcgagctgcccgccagctccccgggggtccgcgaggcgttcgagtcggtcgcgctcttctgctacggcgacgccgtgtcgctggaccccttcaacgtcgcggcggtgcggtgcgcggcggagctctgggcgtgggcggactcagcgcgcgctgctacctgtacatta

SEQ ID NO: 367447 - DNA, 582 bp, Zea mays
  unsure (1)..(582): unsure at all n locations
attgagttgtgaaccaactgagcaaaattcttatattcctgtaccagcttctgataacatgtatcacttttcttgtgatcagactggattttgacatacgatgtgctagagtgcgtattcttgggtttagttttcactcaagtagtggtgagtgcaatatatctgtgtcaccagctgaagatgaccaaatagagttgcttggaaagcaactgcggctcgggagcggagatgatgtctttgagaaaatattttctaacagcttacatgctcttcaggtatgttcattctttgagtggccttaatgtttgctgtcgactgaaagacgtcaacatcatatatcagtcgtccttccatcatttgataccaacacgttgcaggttcaggatgcacttatttaatgctattctctaaatgaggtgtaaactactattgtcaccttttgtnctttgtttttcagcgaagcactacncatagtccataggtgcacaatatgtcatgcttagttcacatgtctttggttgttacatctatctacctcttaaatgggtggtgcaattctactactggacaaacatgagctgg

SEQ ID NO: 367448 - DNA, 411 bp, Zea mays
gtgcgcatacacacacatcccgatacctcacaagctcgctcgcctgtatctccgggcggagacggacaggttaacggaacaccgagcttgccatgagtatgatcttcgagggggcctccagagacaactgggcaacatgagaggctattaaccggaaacaagcagccaccaggcgaaagcagatacgacggatgacaagtggaaggcaactaactgactggctcccgcggtgaaacaacaacgatccgacgaagatcacggtacacttagaactctgattccagggatgcatgagaacattcgaaacaacctggtgcgaacagaatttaaacctggaagtggaagggtactacgaccgggaggatatgcagcccagatccaccttaggagggcatacattcagacggagaa

SEQ ID NO: 367449 - DNA, 590 bp, Zea mays
gtgcgctcacacacacaaccagatctcccccaaatccagccgtcggcacctccgcttcaagatgcaaatctttgtgaaaaccctgactggcaagactatcaccctcgaggtggagtcctctgacaccattgacaacgttaaggccaagatccaggacaaggagggcatccccccagaccagcagcggctcatctttgctggcaaacagccttgaggacgggcgcacgcttgctgactacaacatccagaaggagagcaccctccaccttgtgctccgtctcaggggaggcatgcagatctttgtgaaaaccctgaccggcaagactatcaccctcgaggtggagtcctctgacaccattgacaacgtcaaggccaagatccaggacaaggagggcatccctccagaccagcagcggctcatctttgctgggaagcagcttgaggacgggcgcacgcttgccgactacaacatccagaaggagagcaccctccacttggtgctgcgcctcaggggaggcatgcagatcttcgtgaagaccctgaccggccagactatcaccctcgaggtggagtcttcagaccccatcgac

SEQ ID NO: 367450 - DNA, 336 bp, Zea mays
tctgttaatctgtggcagcatctttaccacacgaacagagtgactgcttaaggtacacgctatccgtggcggcgctattccatagcctaacgctgctgcacatgactcgcgcgcttccgctcatggcgactcatacaatcctacagaacgcacacaccctatctatgctcctactgccatggaaccgatgcccgccccgatggctctgccgctggagacagccaggaccattaccacaggcttggatgccagcaacgccacgaggacaccgcttatatccggccgctagctgcctaggagcctcagccggcttgaaatggactagaaacatctgac

SEQ ID NO: 367451 - DNA, 242 bp, Zea mays
gttttatttatatatacaggtatggtattaaaggatgggagacaactcaaccgcctcctatatacaactattacacaaaacacatgtatggaaggacgaccacagggaaattacactcagccaaagaagtattctaagagcactagagctattataacactttgctaaaaaatttgctaggacggactagctaggctaactattagcttaattttgctaaaaatagctaatacttgaattat

SEQ ID NO: 367452 - DNA, 505 bp, Zea mays
cggacgtgtcctcccacgcgtccgcggacgcgtgggcttgcccgcttgtgccgacgtccgtgggggctgtgcccacatcggtgtgcatagataacccatccattgggtttttttgagtccttggagctctgtgttcctcggtctctgcgaaagcagtttccttcttcctcatccttttgtttaggagtatttttcattttgcgaaacgagcacattttaaccttccacaaccccactgcaaattttcaagacgataatcgatttatcgttggttagtcgctctggagtctggtgtgttcaaaggcgagacgggcgacgaatcttggttcccgaatcccaatggcgctctgtgctcaataaaagtgtgatggtcacatcgatcctctcgccagctcttgctcccctcctcctcctctgcttcttattccttcttctaaagctgcaacgattccaacctttaccttttttgctttcgcgatgtttctctttcccttttgatcggttt

SEQ ID NO: 367453 - DNA, 402 bp, Zea mays
cccacgtttgctttcacgcgtccgccctcgcgtccgcccacgcgtccggtgcgctaagctacgtagtcaacgagctcgcgctcgagggcctcgcctacaaccgtgcattccagaggttcgctgcgaagaccaacaggactcttgagagcctatcgtctaaagctcatgcagtgagggaggagttatcggaacaattgaaggaagctcgtggccagaaagatcacttcaagcagtgaagctggttcccacatcgattcagcaagatgatactgacaatcttgttacgagttcagtccttgtctgggtactatgtatgaatgacattctggatgtcattcaatggaaattagtcttaagtttctctgcacttagattagtagacgcagagcacttgggctcatg

SEQ ID NO: 367454 - DNA, 495 bp, Zea mays
cttacgtttccgctgcttggcggccgggagcagccgccgcttcgccttcgtgagggtttaagcgacgaagagaaaggggaggaagcgagcccccagggaggtgcagagggagagggtgggagatggctgcaatggttggagcgcgtagggcgctcttggccgctcggttctctcctcgcggcaccatcgcggcgtcggccgcgccagctcccctctaccggcccatggattcgccactcaggcttccagctgaaagagtttgtctacagtcttgggttccacatcgaggggctggtacctttgcatctgaaaggactgatgaagattatcagcgtgagtggggacaaaacaaagcaggtagctacactgactcccgttggaacggctctaatctccaacttcagagagatgtcacttcagctggttccacaacaggtactcacaaaaataagggtgcggatggtgttggtggcaagtctgagcaacattacagaa

SEQ ID NO: 367455 - DNA, 440 bp, Zea mays
gcgacgtttcgtttggcggcgggccgacgccggcgccagcaccgagcgggcacgtagccgtcgacgggttcaccgtggtgccggggttcaagctgggccggacggtgatacggtgccgggtattcccttcccacccggagcaccgtccatgaggaccgagtcagcctcagcgatgggcggtcttgtcgcatctcacacggtgggaggcggcacggcacggcacgtctggcagcggtgagtgtcgatcccctaccgtcgggacggatcggggctcggcgtgctgtggggtctaagggtggcaggcggcaaggcaatggtcgctatgcagcttggtatgtatgtatggatggatccaagtatgtatgtttctacctaccagtacgaatgttttaatgcatccgatttgggaactaataatcttttgcaaataaaaaatataa

SEQ ID NO: 367456 - DNA, 421 bp, Zea mays
agcgtcccatgcaggaacttatttgcggggcgctctcttgtcgccgctcgcgtgccttccagcccgcctcacactagctgctgcgggacgatcgaagtgggcgtgtcagctagctagctgcgccgagtccacgcacatgacccgattgcgctgcggtgctgatcaagggaaagtgatcggcatggcagctggagctcgggttcgcgcctgccaacccgcatcagccgatggctgccgccaccgcgttcgtccgtctcctcagcagttcctgttggctcgtgcgggaacaagagggttctcggctgactcgttctgggccgtcatggcggccacgcttccgctcttcgtcttgcaggatggcgactgatgcggcggcgaccgtgaccgcgacggcgtcgtctaccatgtacagccaagcaac

SEQ ID NO: 367457 - DNA, 108 bp, Zea mays
cctacgctgtccgctcctcgtccttcggactcggcacagaatcttttgtctctacgggcgacggaaccgtgagaaagcgcagccatgagtgccccctctgaatggaga

SEQ ID NO: 367458 - DNA, 548 bp, Zea mays
  unsure (1)..(548): unsure at all n locations
gtttagtctaccacccgccgaaggccagagagaaatatctcatcttctctccaccggatcggttcaatcgagagcgagggagaaagggaggtggtgcgtcgaggggggccgagattttgccggtttggagccagataggggtatgagctgcttcgcgcaccgccgccgctccgacgtcgcccgccgccaggacggccttctcgtcttcgtcttctttctctcgattcccatacgtaccagtagttttaatttaagtagtagtaattgtagtagcaatctcttgtaaactgcgctcgcctttgcgtgttcgtggtccttttgcgctttctcgtccctctttctctcaatctctccttattcttctccttccacggcgaagccggcggctggtatggatcccaatggcctcaaaactggaggtatngaaatttcgtttcatctctctgtttttatgatgtttacctctctctttgtgttctgaatgttccggatagaaaggnggattttgttctggtccgatcttgttattatgagctcgagatattttg

SEQ ID NO: 367459 - DNA, 587 bp, Zea mays
ttttcttttccgcccacgcgtccggcatgccactggtttttgttctacctgatttgccgtcgataaaagaggtatcaactaggtagagtgaaggagaattatcgctggatggtaatatcaaccaaaaatatcgaacttcggtccattgactgaattccttttaacttgtttttttctctcgccaggatttcatagcagcacacctttaagaaatgtttctcgcaactaagttctttggaatgtaattagctacaacaagcatgggtcaattatgattctggcagtaacttgtattcctttcaactagtttggctgcagtaccggagaaatacttagtgtactggtcattgacgacagtaaatttcgtggatttaattggagacctctttataatgctaacaacatagttatcttatgaagcttattactgcagaaaatagcaagagagggtccaaccgtgattattacatttttggtttcagaatttaaatttattaccattttcaaactacatattaaaagagaggctttagttttcaggttgtgctaacttccacacatttggccatagtattgaatatgctgtt

SEQ ID NO: 367460 - DNA, 506 bp, Zea mays
tatcttttaactggattggcaacaacagtactccgtacaacactgtgaccaaggaatcgggctttagggatccctatgtccagtaccaccacctcgcctccgccgccggccgccggggaccatccccgcgttctgctccgaggtttcctctcccgtgagacatgcaaggagctggagttcgtgcaccggagctgcggcgcagcggggtaccgcccctcggtgatatcgacatctctgccgcacctggcggccaccggctgcggccacctcctgctcccgttcgtgcccgtccgcgagcgcctccgcgacgctgtggagtccttcttcgattgccacttcgatctcttcatcgagttcaccgggcttatcagttggtgcaagggagcttctattggatggcacagtgatgacaacaagccttatcttaggcaaagggcattcacagcagtttgcttacttgacaatcatggagaggactataaggtgggattttgcagttcaggatg

SEQ ID NO: 367461 - DNA, 445 bp, Zea mays
aagaaatcttgtatgaaaagaaacagatggctactttgaggtaaatatttcagggccatttgtatttacttatgaggtttagatcaaatgatagatgatgtcctgcatgattttggaattgcatttgtattgtataaatcctgcttataaatgccattattaaatttgtgaagtagtccgatcgcatcaaaaatttgtgaagtagtctgattagcaacagaaactataattaattgagtcttattactcacactagatcttgtccccctccgtctgatctgactacttttgagctgatttggtcaggataggtgccatttttacccagcggctttctcgccaccaaatttatggttgcattttgtctccggtctcaccattcccattttattctctgcgtgttgctgtctgctccagggcgacagtggtcatgctgctcggcgtc

SEQ ID NO: 367462 - DNA, 122 bp, Zea mays
cccacgcgtccgtccgcgcgaacgctcaatgcatgaggtgtagggagggacttacgtcaccacatacagaatctaacgctagtgccgaatccaaagctcgggcgacggttcatccattcgac

SEQ ID NO: 367463 - DNA, 390 bp, Zea mays
cccacgcttcctatctcattcgcccctctcctcccttcctcgagtgggactcttcccgtgcccggaatccttacccgatccgtcgttctgcaggccgcagccatcgccgtgatgctgtccctgtcgagggcgatccggaggcggctcttctcgtccgccgaggccgcgtcgacggctgcggtgaggacggcgcagaacccgctcgaggagttcttcgaggtcgagcggagcaccgaggagggcaagcctcctccccactacggtcgcagctggaaggcttctgaactgcgactaaaatcttgggatgaccttcagaaattgtggcatgttcttctaaaggaaaagaacatgctaatgacacagcgtcaaatgctgcattcagagagcatg

SEQ ID NO: 367464 - DNA, 392 bp, Zea mays
acccgctgagcttgcttgctcccctgccgcgggcgctgcttggccaggaccagctgcttgctgccgtggtctcgtctgcggctactccggcctgtcatgctggccacgccaccgacgctgcgatacgaatgcgccgaggtgggcacgtcggaaatggcatcgtcgctgggagtgggtggtcagcagcaggggcacgggcacgggcacggcgaggccagggcgcggctcaagtggacgcgccagctgcacgaccgcttcgtgctcgccgtggcccagctcggcggggcagacagtgagtcctctcttctgtccacccctccattcacagacacagcctcacaggcagtcctttgtctgatgctagccgaccgacgacgtaagctttcccgttc

SEQ ID NO: 367465 - DNA, 83 bp, Zea mays
tgggccgcctggccggccggaccggtccggccgggccgacccagacccatcgcggccgctcacgcttgccggccacgcggccg

SEQ ID NO: 367466 - DNA, 489 bp, Zea mays
gcttgctcacagcgcacacaaaagcctgtttactgctgggaatggtggctggcactattaagcgtctccggctcttgagtgatctccaaggtaagcagcccgccactcccttggaagaatgggaaatagataggaatgtcttgttttctcggctggaggagcaaggaattaaccactccacatccctccgcgatttctgaagcttatggctagaaaatctatgaggttgctcggaatgaacaaaatagtccttccttctatctgatcattcaaattgctctcttcgcttcgcttctatctggatttgcttgcctcagtctagttgcaagatctgtattcggtttgacttgggttcttgtcagtttgtttgatgtgagtagattggcgcacgaaatgaagtattaacctgactgaactgcggcagtttggtcatgttggtagccgaagcattcattcttgagtagtcactcttcggaatggattatcagt

SEQ ID NO: 367467 - DNA, 302 bp, Zea mays
ttgactctacgcgcccttggttgctgacccgaaagttcaaaggatggccggggcttcattagcttggtggtgacgggcaacccctgtacaagagcggatcaataggtcagaaacagaacttcggctgtcgatagtgagaacctcttccaaaaaggcatgggaactggacaaaaggcactactaatgctgcatgcttagctattagtataccgatacaacaccatgtgatgctggagaaagctctcaaaactcatgtgtccaggatcgataacaagaagtgccctgctcctaccgatctgact

SEQ ID NO: 367468 - DNA, 465 bp, Zea mays
ttcgcccgcgttatttccgtacgtccgagtgagctagttcgtgagggggttttataagataatccacggccacccacgcccaatggttggctagcaaggagaggacatagctctggagattagtacacgagcatggcggaactggatgtgaggacaagcctggacccactgtcaagtgaaatatggaagacttgagcgaagaagggggtgatgtgactcctccaccagaataagatcatgattgagcagaatctgaagaggactgatatttgtgttagatcttgcaacacctgtctaagggaaaaaaaccccctagtatagaaagctgattttggttgataaataaagagcgtgagttgtcactaactccaccttgaaatgacataggaattgatgattgggcattgtttggctgcaaggcgaaagtaaaaagctactttaaagatagagatgcttacttgaatg

SEQ ID NO: 367469 - DNA, 495 bp, Zea mays
ttctcgcgtccgcccacgcgtccgcccacgcgtccgcccacgcgtccgcccacccgcctcgccgtccccgcaggccgcagcctgctctcggctcccgccgccgtctaccgcgtcctgcggctgcggtgttgcgtcacctcgggttcgccttaacttccacaatcctcgccgtcctggtgctccgccgcccctccctttgtactcgcgctggagctgcagatccaccgcgacctggcgaccaattcctcctcccgctgaagaattggcgaccttggcctccgcccccgcggcgcggaggagtcaactgtggtagcaaccaccgcggaggctgcaagccttcggtaagggaggaaagttgacttgttggaagccggtccagggccgcgatgacgtcgaccgccgccggcgcgtcgtcgtcggcggcgaagagcgagtcctacctgcgggccgacaagatcgacctcgagagcctggacatccagctggagaagcagc

SEQ ID NO: 367470 - DNA, 215 bp, Zea mays
aaaaaaaaaaccgcccatcagcttcaaattcaacgggttaagggcttccaagagggtttgctccaaagggccttaaaaacggggggggggccccttttgggggggatgcatagaattcttggccggggcccacattttttttcaaagatccccctgcccaatcatgttgcggggggcaaattttttaaaaccaggttgcatgttgcaggtttttt

SEQ ID NO: 367471 - DNA, 247 bp, Zea mays
gcgctgcctccgcctccgccaagcattgcggcggcagagtcgacattggtgaggagatattcgtagatcttcttccttaaccgctctatcgtctcctcgggcacgccgcagccgtcgttcggggggacaggggcggtgctcgtggtggtcgcctcaccgtccgcgtcggcaggcggcagcgactgagtctcgctgcgctttgcgatctcgccgagccagtcgttgacccgctttagctgcgggagca

SEQ ID NO: 367472 - DNA, 313 bp, Zea mays
cgggagaccggcaatatctggtccaccgtaaagtgatatactgatatccgggaacaaatggatgcagagtcgggtttttttttttttacattaggagggggggtacagaacaatcaacttgctcaggcacatcgcacatgctgggtttttttttttttttctccgaattgaccatgctggaaaggaaaactttgttgggaatttaaggttcgttccacgcaccacgattcacgcgctttgggaatattcaccatgcctggtttttttaatcgcttgacatgccaaatgctgccttacctgaagcactggaagc

SEQ ID NO: 367473 - DNA, 257 bp, Zea mays
tggtctcgtgcgtgtgcgagcaagaggccatgtggcacatgtgagggagaaaacggcagctcccaacgatgaccacagcatggtgagcaggagctacacaagcagaatagggtcaccagaaccgaaccgtaccagacagatctattgttggcggaaatgaccgcaaacgctacaaaggctgactccagggcggataatgagcaagatctggtcataactgacgtggttacagaggaagaaaacaaaccacagagacc

SEQ ID NO: 367474 - DNA, 239 bp, Zea mays
ggataaagtaaaaaaactggcttacaattcacgtttgtacaggtgataaattctctctcgaaggccagcgactgccgaaacctgaagcaacaggtttttctatggcaccatacgctcatggcattttcactctttgctctgaatataattttttatatgaactaatcttcacttacggaaattatagttacataaaaacatgaaagggtgtgttcaccacaaattggacctacaacaga

SEQ ID NO: 367475 - DNA, 191 bp, Zea mays
ggaatatatttatctattcccaagctagataactgaacaaccgctacagattcttttggaagcaaattagtagtttagtacgcttgaccaaaaaaaaggttggacagtacaagccaactatgttttttaaaattaaaattaagagggaaagccaccagaccacaaacatgattggggatgttcaaaaatta

SEQ ID NO: 367476 - DNA, 313 bp, Zea mays
gagaaaggcctctgcattttttatattacagttctcgtccatttatcttcagaaggaactggacatctggtaaatgtaaaatgaaaacctaagagcctatctggtatatctaactaaaaaataaacctcaagccaagaagcaaacaaaactgagatgaaaagctcagcagaaccaaaaccgcagctcaaatttggagtttattgaatccagaactcgctgctgcggcgctgttcagatctctctctccatcatggctctgggcagcaggtcttattccagtggtagaattcaccacgtttggcctggctgagc

SEQ ID NO: 367477 - DNA, 362 bp, Zea mays
tgtgttctttcgctgatgattacggcggcagagaagggcccctaaagggaggaggaggaggaggaggcgaacccgcgcgcggaggcttttctggagatcatctgccgcgtcccggcgggggaggtggaggcggcgctgtccgtttgcggcatcggccccacggccgaggtcgaggaactggtgctcaagtcccgcgaatgctacaagcgccctaagtccgccgtccgcttcttccgctgggcggggcagtccgtgtcgcacaccgtctacgcatggaacctacttgtcgacatacttcgcaaggccgccatgttcgagcccatgtgggacgccatccgctccatgaagcaggagggcggcgg

SEQ ID NO: 367478 - DNA, 532 bp, Zea mays
cgcgtttttccttgcttgcgcggcgacaaggcgaagaagtgggtgagcattaatgagccgcacgcgcctactacgagagctagcagcggtagcgctctgacccatggcggtgcggcatccggacgtgtacccaagttccagcctagaggcctcatatggaggggtccactgatcagatcgccgccggctggagcgctcacgagcggtgttgcgagcggccagagggctacaagcgcaacgacactccaataggcttagcgcgcaggcgccggagtcgtgtgccatacggaacacgcacctgggccggcggttgtgctgccgcctccgcagatgtgatacgcatgttcgccgcgcctaccccgccgacgagagggggctttttcttcgcgccgaaagccccggggcgttcgagtactatgcgcctatcggtgaacgcagcggatttgctggcaggagcaacaagcgccggagctggaagccgagatgctcccgccgacggggtgaagacgagccggtggtggatgggctcgac

SEQ ID NO: 367479 - DNA, 438 bp, Zea mays
cccttgctttcgggcttctcctccccctccggttcgggttcgggttcgtgaggttctccggggttcgggttcgtgggtgagcggatcgagatggcggcgtcggatgttgagtaccgctgcttcgtcggcggcctcgcctgggccacggacgaccactccctccacaacgccttcagcacctacggcgaggtcctcgagtccaagatcattctcgatcgggagacgcagaggtcccgcggcttcggcttcgtcaccttctccacggaggaggcgatgcggaacgccatcgagggcatgaacggcaaggagctggacggccgcaacatcaccgtcaacgaggcccagtcccgcggcggccgtggaggcggcggcggtgggtacggtggtggccgtggaggcggcagctactgcggtggcgggcgccgtgatggcggtggc

SEQ ID NO: 367480 - DNA, 128 bp, Zea mays
catagaaaaagctcaaactttatttgtccatggacggttggacataacagatcattgtcgctcgacgtttaactcccatgcatagagggcgccccgataaaaggcccataaggcaaaagaggaatacg

SEQ ID NO: 367481 - DNA, 244 bp, Zea mays
ttctataccaaatgcagggctgggcacctgaagggggagtactacatcgcgtacgagatccgccctgagcgtatgggacgggccctgggcgggggaacgcgctacaggggtgacgcgtttgcggcgagtacaggggaccggtgctagcttggagactacctgaaacgcgcgcagtcataattcgagccacagatgcttcgcgccactggcttctaagaccaaacgcaaacaccaatgtgtgtga

SEQ ID NO: 367482 - DNA, 209 bp, Zea mays
ggaaggaataaagacaacagtgggcttcggtgaaacgaaaggggaacagctttggtgccaccatttttttccttaaatctccgttctgtcctttttttcccccgaacaaaaaggaaaagaaaaaaaaaaacctggactgaaacactgctgctgcgaggggcaaagtgctacccctactctcaattcctagggcgctaatcaggcaatcc

SEQ ID NO: 367483 - DNA, 125 bp, Zea mays
gcacaccgcacatgacacattttttatatatcgatcaccttttaaacctcatcgtatatgtttgatacagaatgcatatcttggcaaaactcaagaatttacactttgatgaggagactttttaa

SEQ ID NO: 367484 - DNA, 101 bp, Zea mays
gaatgggaatatgcagctatatccatggatcagttccaacaggggcaacagctatttcggatgaaattgggctaaagcccacgcgtccgcccacgcgtccg

SEQ ID NO: 367485 - DNA, 101 bp, Zea mays
cggtctcgttggcggacgcgtgggctttagcccaatttcatccgaaatagctgttgcccttgttggaactgatccatggatatagctgcatattcccattc

SEQ ID NO: 367486 - DNA, 81 bp, Zea mays
aaacaaacaatgcccacctggggttacataataacatcctaagacggtccagaacttcagatccaaccaatttgcaaagat

SEQ ID NO: 367487 - DNA, 79 bp, Zea mays
atctttgtagttggttggatctgaagttctgtactgtcttaggatgttattatgtaacccgaggtggacattgtttgtg

SEQ ID NO: 367488 - DNA, 477 bp, Zea mays
ttcacgcgccctttgttactagccagctatgcttatatatcctgcggaatcagcggagaccaggggaggcgggttcctccgaacgcacaacgattgctgccatgggtgcgacatcgaagcccgactttggaaggactctccggaggtggaaaggaagcggtaggtgctcgtgtccctggacgactgcgtctctgaggcggaggagcccatcacggaggcgatgatatcggactgcgtacgcatgtgcgacattaacctctacatggtctacacgcccaagctgcggacaggtgccagtgaccgcaccgacgatgacgagccggtctttgacccctggtggtgccaccttcagggagaggcaatgcttggagacagagctgcacaggaaataacaggaatttatgggcaatgcgccgttcattttcaaggcgtgtgagcaacatcgcttataagcttgaggttgagacagatcaccac

SEQ ID NO: 367489 - DNA, 561 bp, Zea mays
  unsure (1)..(561): unsure at all n locations
tcgtgatctgcaatctacagatccggcgccttccttctcctcgccgccatccttgcggaggtcgtcatccctgcatccgccatcggagacaagtgcgccgcctgcaaggccgttgctgcggagctagagattggaatttcgagtgagaagccgagaaatcacttggacttgcgcaaccgcttaaattctaaaggccagagggaggggaaggtcattgattatagggtcagtgagcttcgggttgtggaacttctggatggcctatgcgataagatgcaagattataccttaaagaaggcagggattaaagatttataattgttttataatttgcacttgacactatcttattggtgctgcatcccttttctatgtatcaagtgttataaacatgccataaatatgaactgttttttcactttttagcgcactttgaatacgctaaacatttagctacctaacatgttttttgtatgcagttggaatcaggcgaaaagggatgggttaaagtaacagactggaatagctntcaaactgaaaataaggcagcagcaagagctc

SEQ ID NO: 367490 - DNA, 161 bp, Zea mays
ggcaagagaggaataaaatcactttgttgccagtcttaagctactctgcttttttggtttaacaaggaccgttctgcaaaggttcacggtaatttccaattgtaaccaggcgacatttttacttacgggtcaaaaatttatttgaccttaaccttaggggg

SEQ ID NO: 367491 - DNA, 194 bp, Zea mays
tgcagcctgcaggagtgctctgtaactttgtgcgctatcaaatcacactgaaaaacaaaaaaaatggagggtatcatgttaaacccacgccaatccttcttccagataattaatctcgacgtagcatcctatccatgctaattaatctcgaataataagatataagatggcacatcactgcgacgacgaaagct

SEQ ID NO: 367492 - DNA, 267 bp, Zea mays
agttaacacactctcctgtctcctatccttccagccaccgaagctagccaagaccaagatgtctcagttgctgcacctgccggacctcgcggcgccgcggaccaggatgggctcggcgctggcggcgggggcccgcgtcaagcagggggaggcggggacggcgagggggcgggtgctcagggtcgccgaccccgagcggcgggagtgcctggtgccggtcccgccagcgccggtcctcgccgcagggaggcgcggagacaacaacca

SEQ ID NO: 367493 - DNA, 280 bp, Zea mays
gcgatcctcgtgcagccttcttccacctcctgctactcttgtttggactggctcgaagcgacaacacacatccgtagcatacagagtgctagattgcagagcataaagggaacgtctctctcgcacaagtatgagatggtgacatgctcggcaagcacctttgcaagctacatgctctaagctagcgacttgggaaagtgtcttgagcaaagtgattgctacaggcaaggttatgaaggttggtctcagtgagcaaagacagggcgacatatctgtgagg

SEQ ID NO: 367494 - DNA, 319 bp, Zea mays
  unsure (1)..(319): unsure at all n locations
ttnnnttttnttttcttttnnnnattttgcttagggtgtatttttgcaactgatcaccttataaatcgctatattacatgacaatacatagatattatatatagcatatcgagggtaaggtttgcttcatagaagaaggcacacataatatttatagacaaaatagtgaggaatatgcttcgtttgttgaagtttgggcgtgatgttcaaaagtattccttactgtgttgcacacaacgtctactcttgttgattcttaaggtcttgtttgatcctttttgtaggtgattcaagtgttgttgcaggagctctattttta

SEQ ID NO: 367495 - DNA, 525 bp, Zea mays
ctatgcgtgggcggacgcgtgggcaagaaattacacctccacaacttccacaacgagaacatcatgaccttaaatacatattacctctaaacccacatgatgtaccggatgaaggatatgaatgcacagtaaccattacaagtattcctgaaggcaagacttggtattatattgcttgcaatacttgcccaaacaaaccaagcattgatcctatcatccgtcaatgctccacatgtggatcaacaaaatactgcttcaggtacaagctcactttcaaggcatcagatggaactgcagaagctgaaatgtttgctttcgacactgttgcaaggacaattattgggaaaccatgtccaatgtgttgttgcatcattttccagatgcatcagctatcccacctgaaattacagcaatcgtttcacggaaatacacattcattgtagtgttcaacaaccaatcatacagatttctagaaaaagcattgctcataaaaaggattgtagcatcatatggaagaatgacatc

SEQ ID NO: 367496 - DNA, 389 bp, Zea mays
  unsure (1)..(389): unsure at all n locations
ttnnttgctcnntttttttagattaaagncaagcaaggagattgtttaagatatgttggcaagttgtgcataaaacacacacggagactagccgagctcaatgagtaaacggtctgctgtatgagataactttattgacacctgccacatatttcatagatgtcttgtcggagaaaacaaaaacacaactgatccatcaaacacaaaattcttcaatagtgcacattccgcaccgatagcaaatcagagtcatccaccatcaaggcattattaaccaatcacgctaagatttattgcgactggccttctcctcgataccagactgcgaaaatctcttcctcaggacctcaaggacttgttccatctttacatgcttgactctgagcagc

SEQ ID NO: 367497 - DNA, 304 bp, Zea mays
ctgctagctatctatcagggatccctcgggaacgatttgggacgggctggagagcgcggcgaccgatgcacaactgaaggctctggacgcttgcggcctcatcaccatgatcgggcaggcggcgcggaaggctcggcagaacaccaaggactgcgagcacctatcccgcctggaatgtattgacgaggtgtacaacaggaaacaaataccttgggttagacctgctttggaatacatactactctgacggcaagacccctcatgcatccaagtatcatgggcctcgcttaggaggagagacacc

SEQ ID NO: 367498 - DNA, 396 bp, Zea mays
cgagctactctcagctggtcgctcactcttgcagctccacccttcactcagtcttaggctcttagctctaggctctagctagccgcgccactccttcgtgtagccatcagccttctcatcgccaccaatggccactgccgaggtccagaccccgaccgtcgtggcggccgaggaagcgcccgtggtggagaccccgccgccggccgtcgtgcccgaggagtctgcccccgccgaggccgaggccgaggccgaggctgaggctgctgctcctgctgatcccgaggagcttcccgcggccgagcagcaggcagccgccgagcccgaggccgctgctcctgctggtgccgaggagccccctggcggcccgatccggccgccgaggctgaggctgctgct

SEQ ID NO: 367499 - DNA, 439 bp, Zea mays
catgtccagcagcggtcttggagtacattgacacagccagacgacactgtttgtggcgtaattctgatagcaatgcaaaatttaagcctctggtggcttggaataaatgcacacgaccgaagaaaaaaggtggtctgggggtcatcaacctaagaagccagaactcgtatctccgaatgaaatttcttgacaagctctacaacaggaaacaaatcccttgggttaacctggtttggaatacatactactctgacggcaagacccctcatgcatccaagttcatgggctcgttttggtggagagacgccctaaactttgtgatctcttcagaggaatctccaactgtaaggttggagatggtaaaactgttctattttggcatgatttatggaatgacaacatccgcagaaacaaatttccaagggcttttcaccttcgc

SEQ ID NO: 367500 - DNA, 325 bp, Zea mays
  unsure (1)..(325): unsure at all n locations
caatctcaacccttccagccagatccctcctattcccccgctccactccgaatccgaagccagatccgagaatgctggggcgggcggcggcactggccgcgccacggcggcgcgggtgggtgccagaccttcgcgccacgctgctgacggagggcaagctgctgttgaggctgttcctggcggccgagctcgcattgacgctgctagcggagatccacagcccggacgatccgatgctcacccgtngctgaaccagctgaccgacttactgacctcggtcgctgacacctgcaccttcctcactgacgacttcgagctgcgcacc

SEQ ID NO: 367501 - DNA, 520 bp, Zea mays
  unsure (1)..(520): unsure at all n locations
gttgtttctctcagcgcaggcagctcagacatcggttcatctgaaaagagccacgacaaccacagcggaagtatgtttagcaagccaatcgctggtgcatatgggaatgggaagaagcaagaaaaacatggtcagatggatgaggagcacggcataggcacagcagacgacgcagccgccagtacgagttctgcttctaccctcgcgcaggatggctctgcgcctgcggtccaagaaaccgtgcctggtagtagtagtagtagttcgagaaccggcagctcgcgcccggtgacgacccggacctcttctggtccccagtatttaatgtcaggccccggtgttcgatgttcgggtcacatagcatattctgccaacgtctctcttcggtcagatagcagcacgactagcacccagtcctttgcatttccagtgttgcagagggagtggaccagcagccccgtcaggatggcgaaagcagagcgcangcgcagcggtggacggcatcgcgtttggaggaaag

SEQ ID NO: 367502 - DNA, 390 bp, Zea mays
cccacgtgttttatcgcgagcggcccccttttttttttttttttttttttttttttttttttttttttttttttttttttttttaaaggtccaagcatattattacaatgcacataaaaaataataactaattgggtgtttataaacaaagattgatgacaaaccccatatctatgatgataacgctcatctacatggggagaacttatgtacctaaaagttccaatcaatagtctaccggttgcagcagcttcccgagcgaggtccgctccaccgggtcaagaccacaaccatggatgcacacattaactttttatgaatcattcttctgcagactcgaaacgttatcagttccagcaaaacactgaaagaaagatagatgtagctttg

SEQ ID NO: 367503 - DNA, 403 bp, Zea mays
cccacgtttctttccacgcgtccgaagatctttctgcaaaataaaaaaagtttacttgtgaagtacttcataatatgaaattgtgcagtgtcatgtttttgttcacatgattattaaactggatgctaaagacatcgcttgagtaaaccgcagagtaggaacgggccttagttgttctctttgaagttgaatagatcaatactgcgcccattgatacgtgagggagattgacccgtaactactcttggtgactgattgatggaaacacgtcaatttgggttgctgataaacctgtaatgtcattcaacgtcagtgtccaaacaacgactaaatcaattaatctattcacatcaaagttgtttgtaagaaacttaggcacacaatcgcttgttgttgacattct

SEQ ID NO: 367504 - DNA, 361 bp, Zea mays
  unsure (1)..(361): unsure at all n locations
cctacgtgtccggctaccgctccttgctcgcctccacccgcggtcaccaccggcctgcgggcgccgccgatagctcgcatccagcgcgcggacacgaacgccgatgctgatgctgntggacctggagcacgggaggacgagcatgttctgtaagggtcccagcccgaaggcgaccatagaaaaaaccaagcgatccacagaccccaacgttgatcgaggatacacagcactcattccagattgataccgcggtaaaagatgctcttgatgtcgctggggcacagcaacgagggcgagaagtggatcgagcaccggcggatcctgaaccacgcgcttcatgttgagaagctcaagcacatgc

SEQ ID NO: 367505 - DNA, 346 bp, Zea mays
cttacgtttccgcacacaccatactactgaccatactcttgccagtacgttgacaagaatcttgacgttcattgtggcacacaaagaggtacacctagagctatggctagccatgtagagcgactctaagtgcaattctctgaagactgttctcaagatctttgtgaacagccttgatgcccagccggatgtcctccttcttgtctacttcctgcacgacgccggtgacaaaccccttgaggaacaagcccaagcccagggccgattccgtaatggtcagccacatggacatatccctgaactgaacgctggactgtaccctaatttatatccttactgatttgct

SEQ ID NO: 367506 - DNA, 165 bp, Zea mays
  unsure (1)..(165): unsure at all n locations
ctcacctgntaaaagataacgcaggtgtactaagaggaggttaactttaacagaagtgagctgtggaaccttaggttcagagctcgtttgatcccacattacagaccgaatacaagccgtgaatgctgtgggaacctgaccagtatgcttcaactttacgtgaaa

SEQ ID NO: 367507 - DNA, 363 bp, Zea mays
  unsure (1)..(363): unsure at all n locations
gaccggtcgaattttggttgactttgcgtcctttttttgnttgacacagctatccatcacacagtgtgtgattatttacacgcgcacgagctccactccgcactccgcacccaactcaaggcgccactgccatggacgcgggcgggcacgcgtcgatgttactcctgggcgccgtactggcctacgagctggggtggctgctcgtggtctggctggcggtctcagggctgttgctgtccctgttggcgtggctgacgacggtgatgacggagatgaggatcatatgggagacgatgcggttgatatgggtgtacaagtcgtctaacatggagccgtacatttaggagagcatcgactggcact

SEQ ID NO: 367508 - DNA, 436 bp, Zea mays
  unsure (1)..(436): unsure at all n locations
tttgtttcgatctatcttttccgcccactttgtctacaaatcgcangataccatgaaccaagttagagttatccttcctgtggcggcgttcacatcaatgtcaatggctgggatatattttcatgattcctaatgctactgttgttgctcctcctgtacggtcactatttacatggcttgagtatcatgactacggggagcgcaaatgacggtgtcaactttgggacattgttgaaccatgtgcattgaaatatgtgtggaactaaacaccctagactacaaaaagtgagggccttagaaactaagaggatgcactagatattttcaatgaacactttattgcttctgtttaattttatttcaaaacatggtatgtactccctgacttcacttgaaaagcgagaattgtatccttgttttgatgtgggtatggtga

SEQ ID NO: 367509 - DNA, 230 bp, Zea mays
ccggccggatttctccgggtcgtcctacgcgcccgtttctttcgccccaccgagccgccggcaaaggatgtcgtgctcggcaaccgcgggcgagaacacgagatagccatcgtgggcgagggcaaggccaacgatgtgagtcaacggacgactatctactagacccgctgtgctgccacacgacacgcatcagaacattgccaacaaccagtgtaaccgcaccacgccct

SEQ ID NO: 367510 - DNA, 269 bp, Zea mays
tcggtctgttctccttgacgactcacgagcacagcaaggctcgctcgctcgcacacaaccaaggcaggcaggtcgcaggcgtctaaaaggttttccgccgtccccaaacgcgcttttccccggcggccatgggcaggctgggccctgggcctcttctggttgttggccggggggggttccccgtggcccgggcccgggccaggcaacttgatcctggcttggggtttcttttcttccgggaacccccgggggaaggccccgggaccggg

SEQ ID NO: 367511 - DNA, 463 bp, Zea mays
cttactttgtggcggacgcgggcgtgctagggttgagcggctacacgagcgtgctagggttgagcggggctccgcgggcgtgctaaggtttcgcgagcatggcggtggccggcgagcaggtgagggctcccgcctctaattccctcccgagctcctcgagcggccaagcgtctgtgtgtggccgtgtgggcgaaccacatgcgccagccaccgtgcgccctgggtgagcacgtgaggccagaggagaagcgcatgtacaagcagctgcgccagtttagcgcgagactgcagggtagtaggcaagccgcgagcgtgtgactgcagctgctagccaagtgagcgtgccactacaggacagcaaacaacgacgacagcaagcaaggatcatgtccagactcacactggggctcgttgctcggccttgttgagctagagatccttcaacacagcggcaccgacacca

SEQ ID NO: 367512 - DNA, 385 bp, Zea mays
ctcatatatacgtacggggtcatatcgttctatctattaactatcaagttatgtaattattatggtttgttatattttgagttgaatttatttttgtgtgtttgtttagcattttgagtgattgatatattagaatttgagacttcactagcgggtacagttacccaatagataaaatcacccgcgtgcgtacgaatatgggtaagattctacacccacgagtagatatggtaagccgacgagtataatttgtgcatctagttgatgattatcagagttcactttttgtacttaaggaagagtagttgatgatcattttttaaagccttcaacagttcaagcactaatttatgcatctagttggataagaagctctcaacatgag

SEQ ID NO: 367513 - DNA, 373 bp, Zea mays
  unsure (1)..(373): unsure at all n locations
tccgaccttttgttttcaacgagactgactgactgnatacggggtggggtgaatgaaagaaacggggcacgccactgaccaaccgaatataccactgtactctcctgtctacgctcctgtcgagactcccaaagcaaccaaaggaggacgaacagggggaggaagagaaagagatagagaaaaagaacgggttcaagatccagagacagaaacctagccaggcacctcctgatacacaggtatccagcgaggccagaagggaggcccagaggcagagacagagaccggaactgtgttcagggacctggtcaaggacttcgacgacaacgaagggcccctggcggcgccgtaggaggcattggatgatcccatg

SEQ ID NO: 367514 - DNA, 158 bp, Zea mays
  unsure (1)..(158): unsure at all n locations
cacgcgtcctttgngtgagaacatttagctttagggatctcaacaagttgttcagaacgggggggatggagcacagttcccgctgctgatgccttaagttgtgttagaacatcaggggtcaatgtctatcacctgtgctcagtatggaagcaaaggag

SEQ ID NO: 367515 - DNA, 353 bp, Zea mays
  unsure (1)..(353): unsure at all n locations
cccacgtgtcttggttagcgtaaaggtacttgatatattcatgtccaaaactaatctctttagtatgcaaacataattaattatcatgatgtcacagttgcagatagcaagtccttgtgcttttgaatgctcatacattcatatttgcgtacgagactacgaatacaaggccttgctataagggtcatgttgtatgtgatttttctttttttttgggggagtcatgtctctgctgtcttggcggaaagtcataacaaaagcattttgggaagattcacatatttatttattggntgtccaggagcattgtgttatagaatcaaaaccagaccacttctttgattgattgcgac

SEQ ID NO: 367516 - DNA, 251 bp, Zea mays
tttacgtgtgggcggacacgcggaccgacgggggggggtactctttatcgcggtcgcgttcgcaccccctgagacagaatccatcctcaaagatatatcagaaagggccatgggcaagggaaacttcctctacaggcgcactctttgccgagcgcgagctctgggcccgctggcgtgcaagctcaggacgatcgcgacgctggagaccgtcaacatgagcggtaaccatctcttaggcgaggtcctacggg

SEQ ID NO: 367517 - DNA, 407 bp, Zea mays
  unsure (1)..(407): unsure at all n locations
tttaaccttccgtccctgtctttcttctgactttccccaccctcgtcctctttcggcgactctgcaatccagcgcggcccaaggatgacaaggtctacgagatcttcctccatgcagggttgcttgctcttcctctgaggcctgcccctggccctgtcccggtcttgtccgtctggatttcgctcaggcggngcctttcctctccttgggagtttctgcgacgactgctgctgctgctgcctctgctagctctcgtcgtaacgtaaccgccgctcctgctcctggtgctcggtcgatgcacgcagcgtagcaaccggcggcgagaagaattgcctgcttccctccttcgcggcgctcgcgngtcgttcatgccctgcaggaaaagagccgtcttcttcccggatccc

SEQ ID NO: 367518 - DNA, 451 bp, Zea mays
atggtgaaagccatgtcccgggcgggtcccgatccctgattcctgccacgcccacgtttactttatgtgcgcatgccatacacatgggagagggtgacttagatggatgtgagcatgctataaaagttgtatgatggaggcgacattgattggatgctagagctgaccactcaaaacctttgctcgttgacgtacttccttccgaagatctaaacgtctacagtatcctccagcatgacacccttgtaatgactcgggccgctatcaacagaatcgtcgagcatggtgcatacgcctcatttatcgttagcaggaggggctgtctttgtgtctcgggactactttgcttagaaggaacgcttgcacaaaggatcaaccgagccttttctgttctgacagcaaactcttaagtgatatgatgatggagaacctactgctatatgttgacata

SEQ ID NO: 367519 - DNA, 470 bp, Zea mays
  unsure (1)..(470): unsure at all n locations
agaagatgcaattcttgttggctcatctttcagataccaaagtagcctaggtaacaacaataagagggttgggctttttgatatgggtgatggaagtagtgagcctgctgctgaggacaacaatcaaatgcatcagatttcacgatgctgatatgtgctaagcatggaaacagaattgttctcacatgtatagctggtctaagtgatggcaaaagattgacacttgtggagttttttctgtgccagacatggagtcccttggaaaaaccgaatggtttgggatagcatatatgcatctttgaatatttcactctttactatcatttttcctgtgccagacttgtgtttgcctgttgcttgtctgtctaatgttgcaggtctatatgggttttattctgcatacgataatacaactctactatatgagatcctgaagtctattaaatgggcangacaaacatatgtaaatc

SEQ ID NO: 367520 - DNA, 349 bp, Zea mays
ttgaagtttaggaggaggaggaggagaagcagcagcgcagccggtaggagggagagcgaagatgcgccgcgtcgcgctgttgctcgtcgccgccgtgtgcgcgctggcggcgccggctgccgccgtcgtcactgacggtcttctcccgaacggcaacttcgagggtggcccgcccaagtcggcgctggctagcctctgagcggtgtcgtgctcccacagccatggcgtggtgggcgcacagccatactgcatggagtgcatagccatgtgcgcacacgccgagcgtcatcctgctgggggcgccgcagggggcgcacagtgggcgcctgctcgatatatggaatcctgc

SEQ ID NO: 367521 - DNA, 436 bp, Zea mays
gttggcttctcctcccccaccggttcgtgttgcaggggctggttcgtgggcgagagggaagagatggcggcgtcggacgttgagtaccgttgcttcgttggcggcctcgcctgggccaccgacgaccactccctcaacaacgccttcagcacctacggcgaggtcctcgagtcgaagatcatcctggatcgggagacgcagaggtcccgcggcttcggcttcgtcaccttctccacggaggacgcgatgcgcagcgccatcgagggcatgaacggctaggagctcgacggccgcaacatcacccgtaacgaggcccagtcccgcggcggccgtggaggcggcggtggcggatacggtggcgggcgccgtgatggaggcggctaccgcggtgggcggtgaggctcagcggtggtcgtggaggctacgcggcggtggg

SEQ ID NO: 367522 - DNA, 433 bp, Zea mays
tggacgcgtgggcgaggacgacggccccaggtggcggcggagtggaagtggagccggggacctggaccgtggctcaaagtgggacgacaacagggaagccaagaggtcggggtgggacaggaggagccacagctttgacgagaggcgtaaatacaacgatggcggtgacgttgaccggggtggccgccggacacgcgactacaatgagctgaagagaccaccaatgtcaaggtcctattcgcataacgatcgccgggctttggctgatggcacagttgatcggaggaggagaagtagaagcaggagcaggacgaggggctactacactggcagagggagagatccagatctgcgagcaggcactcgagattatggatcgcaccaaggtgacagactctggcgctgttcctgctgtggtggtgatggaggcatg

SEQ ID NO: 367523 - DNA, 76 bp, Zea mays
acgtttactttcacgcgtccgcccacgcgtacgggtacgggtcaatttaaaatgagatgggttatatacagggccc

SEQ ID NO: 367524 - DNA, 521 bp, Zea mays
tccacgcgtccgcccacgcgtccggctccacctcccctccgcccgctgccctctctcgtcccgggcccggtgttccgctgcgcagagcccagacgccgtggacaaggagtacgccgacctcaacctccggcctctgtaccccaacaggggccatcacatgcgcatacggcagcacgtgaacccgctcagctcatccttctcggagcccacggggccgccagagtggaaggaggtgttcgacgaccccttgcttcccctcatggtcgacatcggctgcgttggtggagcgggcacagttctgggtgaatgaattggagcttatgaacgtctattttatgtttgcaaatgcaacagtgtcttttgagaaaatcatatcgtcataccctggtcccttgtcacttgtttaatactgtgtcctgatccacacttcaaaaagaggcatcacataagaagagttctgcagcaaccattggtcgattcaatcataaataatctctgtttaggcggacaggttttcatac

SEQ ID NO: 367525 - DNA, 500 bp, Zea mays
caggatgatggtgatattgatcctgaattccttgctggacttccccctgatataagagaggaggtgctagctcagcaacgtactcaaaggatgcaacaacaatcacaagaattagaaggacaacctgttgaaatggatgctgtttcaattattgcaacattcccttcagaaatccgggaagaggtgcttttgacatctcctgacacactactagccacactcacgcctgcactagttgctgaggccaacatgttaagggaggagatttgctcatcggtatcacagtagctccctttttggtatgaactccaggaacaggagcaggtgagtcctcccgacgtgacataatggcagcaggacttgatagaacacaaggtgatccctccagatcaactagcaagccaattgagactgcaagtgctactcttgtcgatgaagatggccttaaagctctatttcgctacttcgagatgttcaggctctatacagggtcagctgca

SEQ ID NO: 367526 - DNA, 489 bp, Zea mays
tcctacttaaagacgatcaaatcttgaatagtgttggggaccaatgcaaaggcattggcgtgccaactgttcccaatcatacggatgaagaggcggccgaacctgatgatgacgaagatgtccctgctgacaaagaggttgttgacgctgaaatggttgacgatgtattggccggagatcctgagttagaacagattctttcagactagtatccatcatcagagatgtttgcacaaaccaatttttggccgagtgattgatgaattttgccacgtccctcgatattgtacatactttttttttgcgatgtaaatgtacgtatacatccaatctactctagcttagctcgcagtctccttacacagtagctcttttgtaacgtttgtggattgttatagcttgtatcatgggttttgctttttgtgtagcaactctttgacgccctttttgtgtaagcatcttttggcatgtaggatgtgaggtgcttaa

SEQ ID NO: 367527 - DNA, 318 bp, Zea mays
tttgctttacggacggcgctgagcaagaaagggaagggtaaattctacccagccttcaaccccgcttaaatgcccgcctgtattcttgcgcgttgaaagatagggctgttttatcggtccgactagtgaactcttgctacaaaaggccagctgctcgtttgctccgtcgcgcgccgtcggaaggctgctcgctcgctctggctgggcggagttggatgctcggatgagtccggccggggagcgagcaatgcacattgtgacctgcttgtggcaagagaaggcgtatgccggcggtatgggcatagctgctactgcagg

SEQ ID NO: 367528 - DNA, 416 bp, Zea mays
  unsure (1)..(416): unsure at all n locations
agaacgagccagcactccattttctcatacggttggcccggaattaggcgcctcgattgcttgctagccgccagattagtctttcgctaccctaagatcggtcggaagaagaacagttcaatctcggttcatcagaagtaagtcgggtttttttttgtgtggggtggggtgaggngancacagcccctatattgacaaggcgagttgattgggtacttgggttggtttgcttcaggtgaaactgcttagatcagattttggggattgctttcacttcaaagtttgcatgtatgtaagttgtgtccggaattcaatttgagctgctgctggctggcttctttcagtaattcagttagacaatccagattttgtttccccagatctatggttaaaagagactttttgaagtgatttat

SEQ ID NO: 367529 - DNA, 487 bp, Zea mays
gcagggtatccattatctactgacagagtcggtcaaaaagtgcaggcacagagaaacatgtattcagtcaagcaacagctctacctattagaagcacaattgtggttcatgcaaaaaaaaaaaattctcgaacgcggcggatgcatgaaaacgagtcatgcatacccggtacctcgaggaggacttggaaggagatgagctgctggtcgcgttcctggaggaggacagcaaggacgcggcgctccctcatcttgtgcaggatgccgacgctcaccgtggcggctccgacggccagcagcaccagcagaaggcggattttgtgatgctgtttactgcaaaatggggcaaatgctgtggcagcggcttgaaggactgggggtttcttttttcgttgcttcggttctggaaagagaagcaagcttgcttagaaatggtgtaacgaggcctaggtggcgccagtctcttgctcaggtggtgatgcacatgc

SEQ ID NO: 367530 - DNA, 465 bp, Zea mays
acctggtcgcccaacctactgcctatacgaggggagggggatagggagtagcagtagccagtaggcagcgtagcactgcggctcctactaccaagtaccaaccacacctccaacccccgccgtataccaatccgccggaggtctctattcagtccacttgcctttttccctcaccggtcactgcatcgagctatcggttcgtctctccctttccctcaggagtggtagatctgccgctgcggtccccagtttggatcttgatgatttggtgacttgagtggccgattttcttcgagcaaactggtttttgggaagatgcggtttcctcaatgtctatttgaatcacagcatactgaactgaatcaagtgataattgtgttctggtcatacactaagatatacctgaaacttctgcttcatatgttcacacatcataaatattccaccaaggtcagatgaacagcg

SEQ ID NO: 367531 - DNA, 53 bp, Zea mays
aaacgtcaagcatggagcacattaactaaaactggatcacgcggacgcgtggg

SEQ ID NO: 367532 - DNA, 54 bp, Zea mays
ttccacgcgtccgcgtgatccagttttagggaatgtgctccatgcttggcggtt

SEQ ID NO: 367533 - DNA, 167 bp, Zea mays
caccccgcgtcgactcatcgccaacaggggcctttatcaggcagggcagaacaagctgtagactgaccctgatgagtatgcgaccgtactaagtccgggactttctcctcccgccgctattgacgccatggcggggagcgacctcaagccggtgagcgcgagcgcgg

SEQ ID NO: 367534 - DNA, 346 bp, Zea mays
ctctacaaatcacggaacgtgcgcaaaattctcatcagaaaatggaagagcatttgagtgcacatcaatcaatgaagaatataggtatgcatggttcaaacagatgttctatttttatctagctatgaacctccaccacccacaaatttctaaactaggacaggctgagacatactaccagtaccagacatgccagtacttggttccccatcttgctggctacattcatcaggttctttaccagttaatttccgaaagttctcaaagcattcgtccatgcctgatatatacagattcatcctgtcaaaatgccgagctagatctagacccatcttcatccattttc

SEQ ID NO: 367535 - DNA, 418 bp, Zea mays
  unsure (1)..(418): unsure at all n locations
ttggctttaaaggtgctaaaagaggacaagggtgattattgctctgaattctttgagcttgcagctgaatttttcagctcaggtaatggtgaagatggtgctaaccttctcttgatttgcaaatcattgatcatgagtgtcagtagtatgctcctggctgacgacctaaacaagtctcaattatcagattctgaccttaaaaggggcattgagatgctcagaagagctgggaaggtaaaatagagcttgccaattatcaagagtcgctgataccagtgtgtgcggatttgcttttcttggacattattttgattcatttgtactgatttgcagctattacccttgactntgtcttcagctctggtgacctctgatcaaattgagaacaacttgccctttctcatacattcagcttcta

SEQ ID NO: 367536 - DNA, 513 bp, Zea mays
ttcgcgcctgtctcggattgttcggccttaggacccggattgtccggcgtacgcaggacaggtgaccgtgatcgggtgtccgatcgtgcttgcccctcggtgccttcggtctttcttttgtccggagccttcagagtaaccattttgcgtgacatatttggtgtgcgaggatcaccaatgacgatatttttatttttacttttatcgaccgcacaaggccgaattatggcctttttgctcgttggctctaatgtggtgacaggaacaggtggcctgtcaattttcacctctttttgaaacctcaaccggcccttcgtttatagccgattgtatttgccgacggaagacaacacaatcattggtgttatggagaaaggagccatgccatttgcaataaacacgcccttttaattgttcaccggaggaatacatgtgacaatttaatttcccatgttaagcaactcatcaaatatttatcaatttagtagattaatgtgacttaacttttctttt

SEQ ID NO: 367537 - DNA, 157 bp, Zea mays
gaccaataaaacagcgaccaccaagcctctgtacaggcagctgttccagtttctctctcatacagcaggcttgtttggttggggacacttgctcggaaaaataccatgacctgaccacaaagaattcccatgaaacaaagacaagggtgactacgat

SEQ ID NO: 367538 - DNA, 306 bp, Zea mays
tctcccacgcgtccgcccacgcgtccggttggaaaaaaatactatcggctggttcttaaggacacataaaggactagttcggaagcaagagaattagaggagagatggctaaaatccccttcctaattaaataggaagggaatttgagcaccctcaatcccctctaattcccttgctttcaaactagcccaaagagtgtcactgcatcctctgaattatgatatattgaacatgctgttatgattgtgaaccgatgagtataacttattttctccatattctgaacaacccattacttaaacagat

SEQ ID NO: 367539 - DNA, 510 bp, Zea mays
ttaggatatgaattcaagtgcttcagagttgataggcccagaagatttcgagccaaataataagggtataaggtttagaaaaaatggctaagaggtcactggttgatttttgaggcctgaattctttttatttgcgctatgtgctcacccgtagtcccatactgctatagattctggcgttggttggaatgttttggagaatgaagctcaaagaattagagagatacaaagctttaagatggcagaagcatgatggttaggcagacatgcagtgatacagggtcaagaggacctactgacctgaatgggcatttttgctgcatcattttaagcagctcacgagtcacgagaaatttgaagactcacccatttagaccacctgaaggctgcatctgtgatcattgatcgctttatgaacatggcacactgagattggctgtggcctgtgacatggcgatatatctagcagaacatgaaactactgtttgaatagtttttctggaatttagc

SEQ ID NO: 367540 - DNA, 343 bp, Zea mays
acatctagaaatagcatatatacacacgaatgagtacatcagtttattagaaatagcagcagaagtggcagcacagaaaggccatgcaagaatgtacaggcagcagcaggagctggtcgtagctgaagcaataccaacagcaagcatatagtctggttgcttattgcccttcttattatttttttagagctttagatcatcgtcccaatcttttccaggaaacaccaaggactaaaccaacatacaaaaacagaccaactcactaatcaaacccttaggtattaacagacggtcagacctcaccagggaacttgtacagttcttctacccttgaaaatgtaca

SEQ ID NO: 367541 - DNA, 71 bp, Zea mays
ttagcagatggacccacaaccaagataggagcggcttttagaaccggaggctttatacaccgcaggaacaa

SEQ ID NO: 367542 - DNA, 138 bp, Zea mays
ccctccttttacacctgcgcacaagcgcatacctttggggcttttttaaatcataaggctcttacacaccccacaaatcacctccctttaaacatatacttctcttaatttcacaattctctcgttcacttcctacac

SEQ ID NO: 367543 - DNA, 226 bp, Zea mays
tctgatcctctccccctttccacagcgtcagaaacagttgagggggatgaactttataacaacgattgattcaacttcaccatctttttcacccaacacggagatctccctaccgttttcacctaaagtcccatctgccctaaaacctggacctccattggttccatgtacatgcacttttattacaccaccaatgctatgcatgatcacctcttaccacacttac

SEQ ID NO: 367544 - DNA, 311 bp, Zea mays
  unsure (1)..(311): unsure at all n locations
gggttaaaaaccaccacgcagccaaaacagggggggcaagatggacaacaaatgccgtataaaaccccaagcacggcaaagcgacggcacagaacagcaagcagcccaagcgacgggaaccngccaggcgacgaccaggaagcccacgaggagagagangacgacaagagcagagggagccaccaaacccagccagagggagcagccggaaaccccgagcgacgggcggagggcccaaccaacgccaagccacgagaccccggcaagccaagagaggacagccagcaggaggggagcaaaaccgccaccaa

SEQ ID NO: 367545 - DNA, 367 bp, Zea mays
gttgttcactctccaatctccactcccctgctggggacaccttacaccggagctgactcgaggacgctgtacgagcagcagcagcatacataaggcacggcagctgagctggctcctccacctctgtccatccatcacagcttcgagactcgtcctccatgggttctggcggcgtcagatggaaggctctgccgctgtgcctagctctcgtggctctgcaagcatgcctccctgctcgcggggcagctcccaagacttacatcgttcagatggccgcgtctgagatgccgagctcgttcgatttccaccacgaatggtacgcatacactgtgaaaatccgtgagctctgggcaagctggaaggagac

SEQ ID NO: 367546 - DNA, 449 bp, Zea mays
tttttacgaccatcccgccgccggcgccggcgggggcacctttaagagcgaggggggtgattcgccagccgaggaagccggatcggacgaagacgaggagtccgctcctccaaagccgccccccaagctccgccgccgaccaaaccctaaggggggagatgccggcggcagcgacgggggctccttgctgccctccgcgctggaggccttcgctgatgtctcgggaccaccagattttttgaggcacagggttgccgagccagaggaagggacggaggccctcggtgtacgcgattgccgtgggaaagaggggagcaaacagccgtctccaggatcaagcgcttctactgggaaaccttagttttatagtcgagcgacagattccacacctggataccacggtcttgctgggctgcaccgtgacttttttggagtccctgatatgtttg

SEQ ID NO: 367547 - DNA, 395 bp, Zea mays
ttcgtggttaccgtcccaagaagaagcacgggggcggttgcggcggcggtaacaagaggaagagagcggcgcttaaggacgtgcgctctgactcggaggagtcgtgcaccagcaccagcggcgcaaatgccagcgacgggcgagagcggtaagcacacaccagcggtgcagcccgtgctgctatagttttgcttctttttcgcgctttgttacttcagttggtactaagttttgcagccttgtacattgtaatatactagtactactctccaatgctagatgtacatatacatacacagtgttggcagtatcataatgtgggggtagcagtaggcagcgaggtgtgttcgtatgcgcatcatcagctgtgtaataaaaataaagaaatgcttgct

SEQ ID NO: 367548 - DNA, 451 bp, Zea mays
tttgggattcagttgtcctgtgacggcctggggcgaccgtagaccccgtgacacatcactgcctaccaacccgcccctagctgctcctgctgcgtgccgtgtgcgcctcgaaggggttcattcagcgctaatggaatgaattccatttacgccacgcaacaaacttaaccaacttatcaccgggatagtaatgaccgcagcatccgttgaatctcccgtacgaaagaacaggatatagagcagcagaccccaccctgacagtgtctccaactcgtcgtcgtcggcgctgcctgcctctgattgccgccactcagagatacttctgctcagacatgacagctgtgaccgattcatcagcgtcagcattttactggttctcctggggccctggcgggccttctctctctctctctctctctacaactctattaaataaataattaaatgtttc

SEQ ID NO: 367549 - DNA, 246 bp, Zea mays
tcgtagcgaccaaccaagcaagcgacaccgagggggagctctaccgatctggcggccgtcatgcccggaaagcaccagcagcacatgacggcaacggcaacggcggcggcggcggcagcagcgcccaaggggtgcgtgacggtgcgcgtgggcctggagggggaggagcagcgccggttcgtggggccgttgggccaccttaaggacctgtttttcggcgcgctgctggaggaggactagtgcgag

SEQ ID NO: 367550 - DNA, 319 bp, Zea mays
tctacgcgtccggggacggcaagcctctgcggaggtgtttttgaatgaggtggggggtttcaccggtgccaagaggcaagacccgcaagaggaggagatgacaccgtacgcgcgcgaggaagaaataaagaagggagtatttcggtattctcaagcaggctttatatcgattgcgatctgaagatcattatatgttgttcctctgtactcatcttttttgtttggagcttgtagcattgatcgtgtaaacgtgtattctgtctgttgctcttggctttctcatctgcaatatgtttcggaattaaaatatactactact

SEQ ID NO: 367551 - DNA, 490 bp, Zea mays
gtgggatcaggtaaaataggaaagtatacagaggggctttatgatggttttggttatgagaaatgggactcaggggacgatgcacgtagacttctgtgcagagctttatggatgggatgaggaagagatagcatgaccacagcttgaagagatgcggactgttcatgtgggatcaatgggctaagaatcattgtgcgactagaattctgattacatagcaggaggaaagactgagattaccttggatactcgaacaaggtggggacttctggggatgttgactgaaacggattatgtggattctgagagtataaggaggaggacaatgcatgatgacatggaggctttaccgagggtcattgtactagcaagtactacaacgggcattactgtgccaaagatacctcgcagtgctctgaagtcaggagagtcagattatgttgtgacaggttactgatgcgatgatcatggcagggaaccttcttggctg

SEQ ID NO: 367552 - DNA, 391 bp, Zea mays
tttcaaggttagatataagaatatatcataggccgtactatggagagtgtggagcctactgaacctccaagcagaaagcgatgaaaggagggacgcaagcagttaccctggcggtgcaccttgctgtgccatgggtctggctaggtttttgggcagctctgctaccagctctagtatctggaattgcgggtgcagcagctgcgatactgagagcagatcacatagaattgaacttaaacaccgatttgacgacccctgacaagaacaagagcttgatcgctactgttattgctggcttggtgagcaaatcggtgagcaacagcagggggatccccaggctggtcgacgaagacgaccacgtagagctcgaattggtgctaaacatgactct

SEQ ID NO: 367553 - DNA, 360 bp, Zea mays
gggacgggttcggcattcccggctcgtttcacgcgcactgggtgataacgcatgagaggtcgcgtacatggggaccttttatggaaacccgttcttagaagatggctgaaacctactgtttctacgtgttgctgtggaagtaagagctgctgctacagatacatgatgctctgtggaggctgctatggcattagagcttctttttgcttttgattagatgaccccagaacgagggatgtcgggatttagcctgtcgaatacctggaaataactggctctccgtgaggcagaactgacagaggtgcaagttgacacgaggcctaagcttggcactggtcgttggttgacacctgtatgggg

SEQ ID NO: 367554 - DNA, 269 bp, Zea mays
caccagctccagcaccaaggcgcaggggagattttgacagcaaggggggtcaccaacacccaagccggcagaccatagcttacctgatgccactgggccctaaccatgcaggcagggacccaagtggctacaacaggcagggcggcgatcacgcggtggacgatgcctccgcggggcgaggcagaagatccacgagctgcgaaaccggccgaggaaccggcggcggaggctacaaccagatgcaggggggggaggagcacccccgaaca

SEQ ID NO: 367555 - DNA, 459 bp, Zea mays
tttttctactcagaagctatggggaagctagagtgggcttttgtgctggttataacattcagtcagcaattaagcaggctgtctttcactgtccatttcttcgtggtggcataaaggacttgaacaatgtggttttcctctcccttacaactgctcgggtgttgtctgaaagtgacttgatctctattctgcacatcttccgtcgagttactgggttcaccaaagatattatattttctagaaattctgaatctgatttagagccaaaactgatagtagtttctcttctaactatccgaaaccactatgacggaagtgtttccacagtacaagagggattcctttcaagtttggccttgcattttccttttatatcttctcttatgggaggagatacccctgagcagaaacaaattaggtcgaagcattccttaatcgactgcctgacaacaagattta

SEQ ID NO: 367556 - DNA, 467 bp, Zea mays
cgttgtttcactctcagctggtcgctcactctggggggtcctctctacactcaggggggggctctcagctctaggctctagctagccgcgccactccttcgtggaggcatcagccttctcatcgacaccaatggccactgccgaggtccagaccccgaccgtcgtggcggcccaggaagcgcccgcggtggagaccccgccgccggccgtcgtgcccgaggagtctgcccccgccgaggccgaggccgaggccgaggctgaggctgctgctcctgctgatcccgaggagcttcccgcggccgagcagcaggcagccgccgagcccgaggccgctgctcctgctggtgccgaggaccgcccgggcgcccgatccggcccccgaggctgaagctgctgctcctgctgggcccgaggagactcccgcggccgagcaggaagcagcccccgaggaggaagctgctgctgct

SEQ ID NO: 367557 - DNA, 468 bp, Zea mays
gttgttcccacccaccagtctccctagcccggggggcatcatttatccaaatgtgggctatctcgaaccacagcgcgcggagggccgcgtacaggagaagagggggggatggagcccgccaagcgaattctgtgcaggacggcactggggaagcggaccaggagcacggcgctgcctcggacgcccagcatggtgaccgggcctgcaggggcgaagcaggggcgccaggagcggcgcgccgcctcgctggcggctgccgggactgggacgggagccgctggcgccatgccggtgggttactggtactactacggcggctcattcgccgcggtggagacggcggccttcttgaaggcgtgcggacgatgcagtcgtccgctcgggggccggcacgacaccttcatctacagggtgctccaatccgggcgggcgtcttttcacgctgcttttacgtgggactggaacttt

SEQ ID NO: 367558 - DNA, 475 bp, Zea mays
cgggaaacgaccttcagtctttacaggtatgaggtcttattgtgtgccatcattttcttttgctattcattcccgaatccccactgtgccctccagtgatgatggggtatgagctctgaataacaaacaaggtaaatgtttactcttttgagtagctgaattttgctatgatgtagtaaattatactagtaaattatacttgtactgaatatgaatataagaaaaaaatactgcactaattatttttctacgctctatattgtaaaataataggaatataataaaaagctgacataaaagctaatttacaacatccctttattttactatgttttatgataaataccttgattttccttgtaagctgcatcttttagtggatttaaagaaaactcctatttgcttggtgctttttctgtaagcctatgccgattaaacctttgaggatttttctgtcacctaaattaacttatca

SEQ ID NO: 367559 - DNA, 127 bp, Zea mays
ttccctcgcgtccggcgcagccgtagtcggacaccgtcgtccaatcgtcccacctccgccgcagtcgtaccacaccgacagtgcctcattatcagtatgatcccacagctggtggattcgctcgaca

SEQ ID NO: 367560 - DNA, 410 bp, Zea mays
  unsure (1)..(410): unsure at all n locations
ccctcgcgtccgattacaacagtgtcaggctgagagaagatccatgtcaaggtcctgcaatgccagttgtcatcaagactgattccaatatatccaacacaaacaataacgctcaaacaaaagcaaaggaggtgaagaaatcttcacacaggtcaacctatgacgacacatcagttaaattggtcatggctggaactggatgttctgacattgccatagctgagcattgtcaaatttgctattatcatacaggttctcggagaaatggatgtngatgttgatgctgctattgagtacctgatagcggagcgacttgcagtcagtactgatgatgcgggaggtagacctttatataaaccatgcatttaacggagatgaacctaccaagaggcaagaggatattaacatga

SEQ ID NO: 367561 - DNA, 168 bp, Zea mays
tcgtttcttagagagggtgccaagggaagctctcttctttcttcctcctcctcgtcctctcgaattccgtctcttgtctctgtcctcctcgctcggcttccccggttcttgagaggggaaataggaggcggagccgaggagagggatggggagggacgagaggttccc

SEQ ID NO: 367562 - DNA, 93 bp, Zea mays
ctcgtctgccaacgccgctactcggcgcacctgggcttgctatttggccaacaacctcctccctctttaccgcggcgtgccgcgtgcggagga

SEQ ID NO: 367563 - DNA, 86 bp, Zea mays
tcatgcttctcctccccctccggttcgggttcggattcgagaggttctccggggctcgagattcgaggttgagcgaatcgagatgg

SEQ ID NO: 367564 - DNA, 97 bp, Zea mays
ttcttcgtactcgttggcggacgcgtgggtgctgtttttattcgtttgccacataagcatcgttggtaggtacgccggcgacactgattagccatat

SEQ ID NO: 367565 - DNA, 171 bp, Zea mays
tcttttttttcactggtcttcacgtccccatgtcctggaggggagtcctgatacgaatccagtctattctggtggctgccggctcttgtcctgaacgctggtgcctactgcgtaggcaagagccggcaatggcggaggcgaatgcggcgaaggagaagaaggccgtggtgc

SEQ ID NO: 367566 - DNA, 468 bp, Zea mays
  unsure (1)..(468): unsure at all n locations
atgacatccctgtaacaagtggaaatgttgcttttgcaagactagggaaatgcctaactggtttaattcgaagtactcaagtaccaactgtcatttcactcactcactaccacaaaagtgagagtaacgatactgcaatgtggaactctgaggaccttgagtccttacttcaagatgctggtgctcacaagattggtttcaatccagtaaccacaaattctatcaagaagatccttgttcgagtatgcaaagaagaaagctgccatgcatctgaagaattattgcatcaaatagccacctctagcggaggtgatattagacatgcaacaggtgnctcttcaannctattgtcttgacccctgaaggcatagttctgcattggcaacaagttctagnnctactggcccaaagaaccttgattctttggttccagggcatgagaagcagggcctagcagtgcattacctt

SEQ ID NO: 367567 - DNA, 398 bp, Zea mays
tcgcacgcgtccggcgatattgctttgtgtgattagacagaaaaaaaacctgtttcgaatacataagcccaatgtcgtgcctcaagtgcatgtgccaatgatggtcgtctttgatgactgtatcaaagatccggggggactatgtgcagaggttattttacttttgtccaccttcttttggtgcggaggaacctagttcgccagtggttgcttgccactgacgaatcacgttcgggttgcgttctccgatccgtcccagcctaattctgggggcgcaggggaaggattcgggacggaaggaactagtttctgggcttccttggattccacggcaaagcccggctgcgacgtcggcgtcgtctccaccgcattccggtacggttcccaagcaaccttgc

SEQ ID NO: 367568 - DNA, 360 bp, Zea mays
gcggttctatgatgagggttatgcgagggcagaagcggggagcgaactacatgatgctggacaagctgagggacgacttggtgagggttcactcggccggagacgaagaccctagaagctgcgataggccacgaccgcccgaccggtagcaataaacaaaggtccttactgagctatactgctgatcgtgtcggtgatcgggatggagtcgaacacgtaccagcggcaagcaactaataacagtaggaaattaatgaatggatctctccactctaactaacaataatatgtgtaaattaaagacgcggacggcggcagctacaagcggtcgcattcgatgccgtcgaccccgtcgacgcc

SEQ ID NO: 367569 - DNA, 427 bp, Zea mays
  unsure (1)..(427): unsure at all n locations
cttgtcaaaaagaaagaccactcatggcgattctgtgtagattaccgttatttgaatgccacgacggtgaagagtaaataccctatgctgatattcgatcagttctttgtgctcaggcactaggcatgtagaggtattttttgttgttattttctctttatgtggatgtggctacaaggctgttgacaaaatattactactccatcgtcctccctctcacccataagatatttgatatattactttgtccagtcgatgcagcttacaaggctgttgacataataatccaggtttgttggcacacttttaatctttcttgtacgggtacactacttctaacaatggaaanngaatgttgttttttgcgcaaaagttgcctggcttttaacatccgtcgatgggcgaggacacacatcgcctccaaata

SEQ ID NO: 367570 - DNA, 336 bp, Zea mays
gtgcagcgaaattgctgtgcgtgttaagattccagtcgttcctctttcgtatctctgagcccggtgtcggtcctcgattgcgactgcgaaagaaactcgtctttgttgcaatctatggcagtagcagggaggactctgtgcagagtttattttccttttcttcttcttcttttggtccggaggaacctagttcgccagtggttgcttgccactgacgaatcacgttcgggttgcgttctccgattccgtcccagcctaattctggtggtcctggggaaggattctggacggatggatctagctcctgtgcttccttggattccacggcaaagcccg

SEQ ID NO: 367571 - DNA, 278 bp, Zea mays
gttacgacgggtgcgatcctaatctggaaagaaaggtatgcccttgtttgatggctgtgccgcattattagttacaagagaaaccttgctgtgatttgagcgaaacgtatggactatatttctgcggaggtgagcatgatggcgcatgtccagcatgtatggacagtggagctggtccctattgatactggtgagttctatggggagcttgatttaattcgtcacctgagcttgggctcggagatggacgttcctggttatttgcttggcctgcgcta

SEQ ID NO: 367572 - DNA, 297 bp, Zea mays
tggacgcccgcgtgaccgacccggaacttactggctggacccacccacgcgtccacgcatacgtggacccccttcgcgaggggcttgccaactacgtgtgagcactgggccgcacaaattgtgccgcgttagagaaggcgacttatatggcctggagtgatgaatgacagaccttgactgcaacagcattatagtatactacaggctatgcactcggcactagcatgatgccagtgcgagaaactgctttgcaggtgagtgggtgacacataccattgtttgagtcagaaacacgtt

SEQ ID NO: 367573 - DNA, 103 bp, Zea mays
cggtcgcgtgggctgcagctgggatcactcaattcccgctagtggttgttcaggattatgctcaagtttatgcgtagtaaatagcaaaatctttgattagcct

SEQ ID NO: 367574 - DNA, 81 bp, Zea mays
ttttctacgcgttcatccacgcgtccgtgcacacgggtctaggacaaccacacagcatgagagctgtacgccgaatggcaa

SEQ ID NO: 367575 - DNA, 313 bp, Zea mays
acccacgccacgcttcttctcatacgttccgccgaattgctagtgtgggttcagaccagagaacagatcctggtagcgaaaaccaaaggcagattgtcatgccacgagtgaatgtgcccctgtactgtcgtcattcaacgacctgcatacaaaactcctgaggctacaaagcgcccactgtataaaacatttctcccacaacggatctcccaacacaacgaagattgtcacacggctgtatcaggttgatagaaaacctgaagcagctgaatgcattcactgacattgctgccgtggcaacatccttgagatc

SEQ ID NO: 367576 - DNA, 446 bp, Zea mays
gggtcaaacgagtcctgaaagctaccattccagactatacgagttacattctggagtcgcaaatgggaaatggtaagctaacttgcaaagtcagcacgagctaacgcacatagtacacgggtttcctgctggctaacatcgccaacaccatcactttgcacattcatctgacgcgggaggctttgatgcttgaaatctacaaacacaggcatgggacgcttctagtctctcgcgtccctcccagtcccaggtgagcggctggggggcctgtcatagccaggactagcttcccggcggtcacgttcataatagtcagggctgcgttcgtcgtcctcccctggcgtgatcacctttgccgccgccaccaccgccggctgggcgacctcccctgccattatcagggctgcggcctccctgccgtagtctgggctgcccctttccttgcc

SEQ ID NO: 367577 - DNA, 185 bp, Zea mays
ctcaaactgaaatttactatttgctttcttcatgtatttagttttattattatattgcttatacacgatttttgggcccttacacactggtgtcacatcccggattctcggggcaccaagacctcgggctgcgaacagtaatcaccaggtgtgctgggaccaaggtctcacacatatgatgaatc

SEQ ID NO: 367578 - DNA, 217 bp, Zea mays
gggaaaccgggattaaaattggaattaaggggctattgggatgggaatgaaacttggcgggacctggcaagaaaccttgacggggggccccccacagggcaggattcccaagcaaagattggggggggatgcgggagaaaacccccccctttgggacctttccttttaggcgattgaaagacagattcaagtctgtcaaggaggggaaattggcaag

SEQ ID NO: 367579 - DNA, 278 bp, Zea mays
aacaaaaaaagggccaaaattttggggcccccaatttttttatgatggggtaaaattggccgggggaaagagaaaaaacccccatattccctggggacaggcaaaaacctttagcccaatgtcggaccaacccttggagcaccttgaaagggggccttgcttttttggtggttccacacttccccaaggggaaaagggactggggaaaaattaagcccccttatccaaaaacctaaggggaaacccggaggggcctttatggggggggattttttttt

SEQ ID NO: 367580 - DNA, 447 bp, Zea mays
agagtaacctgcactgcgaatagactaatcactggaccgtacaaactttattttcttttttcacaggcaaggagcatatggcatacacgacgtctttgtttgctgccctttcagtagagcgcaaagtattatgtttttttaacagcgcgaagtaacaaatccccctcaatcctcttctaaccaaacaacaaggcccaaggttgctcggaagcagccacaatattagcctccaaaatacaaaaaaaaaaaagcatcttttgatagtaagtttagtccattccagatcaacagcatcgacttctacatcaatgggcatgatcactgcccatataagcttacatgctccgcctttagagtccaattcaatacttcacaagcagagaccgttcaagagcatggagaggattcttccagccaaatgaaaacaagctcaagttcttttatgat

SEQ ID NO: 367581 - DNA, 180 bp, Zea mays
aaacaaacacagaagggcctttttagggggggaaaacaggggcttaaacagagcatgaatcaccaccgtaccaggacggcacccagttatccatttttcctaacataaccaacaccaacagttaaaatacaagtcctggcctttttacgtccaagggcccttttaacataaaaggaagaa

SEQ ID NO: 367582 - DNA, 237 bp, Zea mays
ggccccaccaacccaaaaagatcttgggaaaaaattttcaaaaaacatggggggggacaaactttttttattaacaggggaacaagcccctagggggccgcaaatagcattgggcaaaactcagggggggcaaaaatttacggaacagtttttttgatccatcacccacccttggggggcactggtaaagggggggccccattgggctaactgggaaaaaacaaaaccccccccatc

SEQ ID NO: 367583 - DNA, 277 bp, Zea mays
gcacataaaagttccagggtgaaaccaactgtatcattgttctgaatgatatactatactaattaataagcttaacaaaagatatcgtttttttttttcctacgtactcaaaaacatgcaagcaaagatctggaatcactgcctttaaagctactgggagggtaaagaaacaagcccttatttcgccattggatgataatgtccttttcggggatgcacatttgctacacagggggcgctgccactatccgatgcattaggggatgtacaacctaaa

SEQ ID NO: 367584 - DNA, 342 bp, Zea mays
gaagaacaactgaaattttatgtatgtatacgtattggcaagtttgtattgcattgtgttcaaaacctaggaattttatgtatatacgtatcgggggcaagcagaaacttaaattcgtatccatacagctcagggatataaaacagaaaaaaaatataacatagtcttttgcaatgcacattatccttcccagaaggagccaagtattatttacttcatggttgtttattggaaggagaccaaagtggttggatctttacgataaccactgatcaacggtggcaggagatggcccagaagaaccaggaccaggagggaaaaacggtaacggcggaaacgtcc

SEQ ID NO: 367585 - DNA, 253 bp, Zea mays
cattcataaatcatagtgacgctggattgatttcggaacaatccggttgtttattccttgacttcgcacatcagcagcaagaacgagctcactctcaagacagtaaagtaaatcaattaatcaagcacaaataatacgctgcttcaatcgaatcttttggtcatgtgttgttgaaggcagcagctgcacctcggatcggaatgccaatcagacattggcgccgacggcatgcgcaaagcacgaagcaaatgca

SEQ ID NO: 367586 - DNA, 368 bp, Zea mays
tcgaacttctcggatcgacacctcatggtcagccggtcagggacactgtcaaagatctgaaaccaagttgcagttcggcactccggcgacacgccatgaggggattaagaaaatgcagcctctgaggtcagacgacgggtgcgatcgccgttgccgtcgccatctccgggggaggcgatggcgcgtccgcgtgcgtgccggctgcagaatccgaccttgcgcctgtgccgccgggtgcggcttcccgcaatggacaacagctatgggcctacgggctacggcgtgtgctgctccgcctctttaagattgcgagaaacgatcacacgagcaagcggggatgtttctggtcgggcagtggacggagatct

SEQ ID NO: 367587 - DNA, 362 bp, Zea mays
tttgattagtaggttgacttgatcacttgcggaatttgtgtaatggagaacattatgccactctgggccatatatgcgttactaatgctgtcaacaagtgtggccatttcatgtcatacacatgagctactcagtacataaataaattacaggcatgtggatagtagcagattctgcttgaaagcaccagctttttactgcgcactaagtcattgcaatattatgtgcaggcactggaccttgggtctctgataaagactatgctgcaaaagttgcctgatcagcttaatggcccaccattcaattgtatagtccacagagcaccatttaagagtctatcatcctgcctgccttatacacac

SEQ ID NO: 367588 - DNA, 244 bp, Zea mays
ctctagcctccttcccctttccgttccccggagcgagagcgaagccagcgcccatcttcctcttcctcctccatgatgtacgatcgcagctccttcgtcgtagcgtccgatacgccaggtttcctttcgcgagcaacaatctttggcaatggcgtccacgtcgagctcgacgccagcgccggttgaggtggacgagaggggccggaagcggaagcgtgcggccggggcggaccccgcggaagcc

SEQ ID NO: 367589 - DNA, 196 bp, Zea mays
ggggcccaaaaaacattttattccttacccaaacccccggggtggtccttcccaaaattaaggggaaatttacaacgggggcgtttcccttgttttaaaccggggggcaaaaagggcccaatttttaacttaacttggggaacacttttttgcccccccagctttttggaaatgggggcaaactcaaaccgggaaa

SEQ ID NO: 367590 - DNA, 371 bp, Zea mays
ccttccaaacggtatcgtcattatatacagcaggctttttatcatatacaagagacgcactctgtgcgcagcaatgatgcattggccgtatagcaaaacttggcctgaatgcacgtgtttctctatctctggcggagtagactcctaatatccgcattcgatgtaccgtccgtcatcagttcatcacctcatggtccaattccgatgaacttcagctgcaacacaaaaccatcaagcgaagctcgttagatgccgacaaaatcggccgggtcccgactttcagttgcactaaatcaactggaatctggctgaaggaaggttactgcatgcatcggtcaaaactcacaggttgttttggggctccttccaat

SEQ ID NO: 367591 - DNA, 283 bp, Zea mays
aaaaggggggggggggccttttactcaaaaaataaagccaacaacaggttcaaaccagtgctgaaagctcccattgaaaaaatcctcctccctgggttacattttgggggcgctttatactgaaagggggggaaaggaaaacccgagctaacgcgcataggaaacaagtttcctggtggttaacattaccaacttgcacattcatttgaggcttgaacacaggcatggaaaggaaccctgtttttacttttttgcctccctcccaagggagcggttgggggac

SEQ ID NO: 367592 - DNA, 232 bp, Zea mays
aaaaaagggcttgccccttttgggcaaaactaaaacccaaagggggaatttgggccaattgaacaatcgaacggggatcctttcccccccgaggggaattccttttccccccaaaaaacggatagccgggggggttccagaccccaaacaattggggaccctagcccccccgaccgccccgaaaggggggaagggacccagggccccccccaaaccggaaaggggggggggg

SEQ ID NO: 367593 - DNA, 496 bp, Zea mays
gattactgtcatagaacagagtcttttggctgatactcacatttgcttttcaagaatagttcatgccataccagtaccagattgaaaaatgatataggaaatgtatgtgagatagtagaaagttaactgatttgaataaggtgtcccccatgtccaagttgaggtcacttttgtttttcctatgggcgagatcttttctagttttctcttcttggcatgtgtggatgcttgtatttaggtctttgcccctccttttcgccgtgaaccaacgatgacacttctgaattgactgcctcatttttgataaaagaccacattagagtagaaaaaaatatcggacattgcatttaacagcttcatttgtgatgtgtcatccatccgctaccaggcagtctctgcacgccacgttgctccatcttgcttctcacccgctctgcatcctcatgcatgccacgatccgagtagatgtttgcaagcgaaacaaaatttcatgcat

SEQ ID NO: 367594 - DNA, 355 bp, Zea mays
tctcacgcgtccgaacgccgcccgccaccgcaacgagctcggcgcctcctcctgcatgtttaccgcccccgacgtcccgccgctcatcgacccctcctgcggtcctgcccacgtcttcccgctcgcgctcaagtccaccaccgcgctccgtgcccagcgccgccgccgcttccacgcgctcgccgccaagtgtggcctcctctccagccccttcctcgtgtcccttctcatcgcgtcctacggcacacacggcggcggcagtggcggagccttctacgaactcacccgccgcatgttcgacgaattgcccgcccgcacgccgtcgtttgggccttggggcgccatggtctcaggt

SEQ ID NO: 367595 - DNA, 471 bp, Zea mays
tttcgttccgttcctgatacaggcgagcagggacgactgcaggcctccccctctttctcggcttccactcacccgccaccactggaccacccccaacggcgagggagtgagagagatcggcagcagctcgggggcctggcagggcagctgcattgcgctgcggcgggcggcggccatggccgattcgtacggcgacggcaagggcccatcactcaagagccagagccagaaccagcagccgcgccctggcccccgcctcaagcccgccatcgagattggaggatctcatcaacctcctccacggatccgatccagtccgggtcgagctcacccgcctcgagaacgaactgcagttcaaggagaaggagctgggcgatgcgcaggcggagatcaaggtctcgtgcgaccgccgcaaggcgacggacaccgaaatgcaagggtggagcgagtacaacttctgagcaaactgac

SEQ ID NO: 367596 - DNA, 74 bp, Zea mays
ttattgatgcagctcaggttgttccagcctggctcagctgattgcctataaaagacgacaaggttgaagctaaa

SEQ ID NO: 367597 - DNA, 269 bp, Zea mays
aaaacgggagactacagattcgatcaaaatatcagggcaggaaaccccatccttgcaaaacaggaaattcaggggctggggccatacaagttaggcgaaccacagggccgatttcatgtctcactggaaaaaaactcctcgggtttgtccaaaaaagaagcggggatctttttatgcaacatgaagttcgaggcagctttttgggctttttgtttaaggggcccatcggcaatggctcttggtcccctaccatccttttgaaccttatt

SEQ ID NO: 367598 - DNA, 249 bp, Zea mays
ataatctcctggtgtaccaaaggagggcatgccaatggctgcagaaagctgaccataggagacctcatgccttgtcttgggaggtcagaagaatgacaagttctccacacaggcaagaaatactgtcttcatctctagaggccttccagagaattcaattggaactggcatgcaagcaggctggtatttgatcagaaagatttacatccagttttttttgaaaagttttgtggagtttatatataaact

SEQ ID NO: 367599 - DNA, 145 bp, Zea mays
gtaaaccaccaccacacacgggagatagctatagctagcatagccagtcagcgacttagcagcagctagctagccatgctgccgtccttcgtgtcgccgacggcgagcgccgcggccttggtgacgccttcgccgcggtcgctac

SEQ ID NO: 367600 - DNA, 185 bp, Zea mays
ctgatacttctcccgccgccgccaatcccctgccgttcttcgccaccgtcaatcccctcccgtcctccgccacctatgctgagagcgagaagagatggccggcaagggtgatgggccggcaatcggcatcgatctcggcacgacctactcttgcgtcggagtgtggcagcacgaccgtgtcgaga

SEQ ID NO: 367601 - DNA, 76 bp, Zea mays
ctcctgctttgtggtggaagggatgccaatggggtgcccctatcgagtgcatatgggcttgctaagcatagagatg

SEQ ID NO: 367602 - DNA, 276 bp, Zea mays
ggcccgcgctcaaaacaggaaagattgcctaaaaatagctgttccaacagtaaaaatcacccggggggggtgatttctgcgccaagaaataaaaacgggttggcacatcgatcccaaaagcttttcaacaaccggggcccaaactccagggttttctaactaaaagggtcctactactactactgaaacttgaaagaaactgggtcgcggggacttttggcatttccagacaaccaccggtggaccacggtcagtgccgccgggacgaccacgacg

SEQ ID NO: 367603 - DNA, 248 bp, Zea mays
tcctcacgcgtccgctcgaggactgatcatagcgagcctctgtggtcatggctcataaatcggcgcaagggagctgatcaggaaccattctagtgattggttttctaaaggaataggaattcttactcttttcttagttgatgccttgatgatattgagcttccgtaatcaagattccataagatacaaactgtcaccatcttgaataactgtaacatcattaatttctgcttatttttgattgaaca

SEQ ID NO: 367604 - DNA, 135 bp, Zea mays
tcctcacccccttctctctcgtagcaacgtttggggcgccgtcgctgccgctctactcgggtgcccaggtcttgttcgggcccttcgccggcgagccaggggacactttctttggtatgagaggatcaatgtcca

SEQ ID NO: 367605 - DNA, 146 bp, Zea mays
atgagatcacacgcacacagcacactcgcatgccaggcagaaccctcgccgcctccgtcgccgatgacgttcgtgcgcagctgtgccgtttctttaatcttcgtcgttctgtgagtttttttagtttttttcaattttttttttat

SEQ ID NO: 367606 - DNA, 94 bp, Zea mays
ctagaggaagatcaagatcaagatgataatgcttggattatttctatgagtggtggaacatgccttggactcatttctagaactgtaggtgatg

SEQ ID NO: 367607 - DNA, 61 bp, Zea mays
gtaggcgctcgagaaggtcgacgacttcttgcagcccttgtacttaaagccgggctccttc

SEQ ID NO: 367608 - DNA, 139 bp, Zea mays
ggaaaaatggcaaatatggccaaattcaggggaaacaaccctatctcgtcaaaaggaaaatatgcttttgcaaaaaaacaagggcaacccctagcgacaaaaaggctgatgggcccaaactcaaatttgttcccaaggg

SEQ ID NO: 367609 - DNA, 204 bp, Zea mays
gggagcttcgaggcggcccgccgcggcgcgtgggccgttcgggctgagcccatggcacaggccctttgggggcccaacggcctatcttggtcgtgaagaaccaccactaggggcatccgccgcacgcttagcatctagcgcatataggtctacgcggcgcgggcacgcggccggttcagcttccccctgccccccatccttctt

SEQ ID NO: 367610 - DNA, 403 bp, Zea mays
ccgtgcaaatgtatgcagttttgtatgcattgacaaaggctaacaacacagccaaaaacactacgacaagtcgataatgttgtcttgtgccttattctacgttctctatttgtattttgtattgtatgtataggtcctgaaaacaagaaaaacaaattgcaaacgcaaggaagaacgagcggatattagctactcctgcatgttggtgttctgctgtggagccctgtacgcggcctccagcgagttcgcaagcgacgccgagaacgcggccatcgactggaacacggcaggcagcttcccctgcacggccgtgaccgtggccgtcctcgtggcgtctatggccttggcatgcctccgcatctcgtcctccaccatcttccggcaagccgcgatctcgtccctg

SEQ ID NO: 367611 - DNA, 424 bp, Zea mays
  unsure (1)..(424): unsure at all n locations
tttctcacgcgtccggctcgcctcgcaatccagctccagccgcgaccctccctacctacatacgctaggtcgtcgctagctacctagcttgaagtttgcgacttattagtctcgaagcgagaatgggagctgcctcgtcgcgggaaggggacgctgcccgcgcggcggcgcgcgagcacacgaagcggtgccgggagcggcggcggctcgcgcgggaggccgtgcgcctgcggcggcacctcgcggcctcgcacgccgcgtacctccggtcgctcggcgtcgtcgcgtacgcgctcacgcgcttngcggacggcgagccgttcccggagtccgaccacaccccagccgacgtgatcgcgcaccgaccggtcgtcgtcccgtcctcgccttcgacgttgctccgcgccatcgcacaccgagcgag

SEQ ID NO: 367612 - DNA, 267 bp, Zea mays
gggaaaaccccccccgggcccaaaaagcccggggggggaacaaaaaaaatggggggggttaagttcgaacttaaaccccaatggacccaaaaagaaaaattttttttccggcaacatttttttcccagcttagggggggaaaacaagtttccaaggggggggccagattttgaacccggggaacgaactacccttgttgagggggcaggaggaaaaacatgggggggggggttttgtttggggcattggaaaaacccccaggggaaa

SEQ ID NO: 367613 - DNA, 364 bp, Zea mays
tttcacctgcgatccgaagcgagtccgagtcacacggccacgccccttggtctccttcctccgcttgcggcttgcctttttcgggccgcctccgctcctctctctctctctggctctctccctctccaatggcccgccccaggaagccgccgccgccctcgccgcctaaggcggcggcgccgtccatcgctgacgcgctgctgctggccacggtctgcatggtgggtctgcccgtggaggtgcgggtccgcgacggatccgcctacgccggcgtcctccacactgcctgcgtcgacgccgataccggtgtcgtgctaaagaaagcaaagaagattgcaaacgggaagggaagatgtgaatctct

SEQ ID NO: 367614 - DNA, 195 bp, Zea mays
ccgcgaaaacaagcccatgttgggtcgcttttcggagctcacagggggaagtcccaccgatagatgccaataagagccctccatggcgtcgacttgcatttgcctcagccgacggtaaagacgacctgccaagcaactgagtatatactgggtacgccgtcgcaaggggttgcactgtactgctaaagcctacct

SEQ ID NO: 367615 - DNA, 476 bp, Zea mays
ttctcacgcgtccgcccacgcgtccgcaaacactcgagcaaagctcagcctcacacagcctctcctctcgagctagagtgctactagcttagaagaagcagaagcttacagctgaagctgcagcaatggcgaaatcttacaccttactgttcgtcgcactggtcgttctggcccttctagtgagccccattgcttgctcccgcaagctcgccaagccgaacaagcccaagccgacccacaagccggcggccagggtcacgcccggcagcaaccacaccgatatccctgcagtgtccgccgcctacggctccggcggcttggttgtctgccggcgcgacgtactacggcgccccaaacggcgacggcagtgacggcggtgcgtgcgggtaccagaccgcgcgcaggcctttgtgagacggcgggccgtctgtaggaggagctgcgccgacagtaagcacgaccgatgtcgcgcgccg

SEQ ID NO: 367616 - DNA, 223 bp, Zea mays
aaaaaggggaagcatacttttccattcaagggaaataagtaaaaataaacttaggaccattacctcatgtttaacttatggaacaaaaataaccggggtccttttttttgctcaaacccgggaaaaaccttttaagggggttacctaatcgccgggactttgtcaggtacacacacacacacaccagataatcccaaggccggaagggggaaaatgaaacaaa

SEQ ID NO: 367617 - DNA, 244 bp, Zea mays
aaaaaaaggggctcttgcacctacaggtgaacacattatccatacacagagcgcaacagcagtttccacataggggagaaaaaaacagctagaaaaagcgactacagctagatgccaactggatggcaggggcagcccacaaggccggaccgaatggacactcacactgttagggaatgattgctgcactaaatccagcacatgggaaatgtcctccaaagcccaaaaccccctcaaggaaagg

SEQ ID NO: 367618 - DNA, 344 bp, Zea mays
tgctgcggcccgacggcggcgcgctggtggaccgggccccgagcgccggcagggcgaagaagaaggggacgagcgtgggcgtgcacggcggcggggtccaggtggtggacgtcaagtgcggcaacccgatgagcatgagcagccggctcaggaagctcggcttctccaagctgtcgcagacgtttgcgtagcttcaattctgtgcagtggagcatggcgaggggccgagggcaaaggaccagcgccagcatcggaattgaagggtctgcttgctgctgccctttccttgagggcgtcttctgctttggaggacatctgccatgtgctggatttagtgcagcaat

SEQ ID NO: 367619 - DNA, 87 bp, Zea mays
gatacttggaatgttcaatcatctgttggctacatgaacatgctgcggtttattagtcttgcacacacttgtcaccccacgcgtccg

SEQ ID NO: 367620 - DNA, 88 bp, Zea mays
tctgacgcgtggggtgacaagtgtgtgcaagactaataaaccgcagcatgttcatgtagccaacagatgattgaacattccaagtatc

SEQ ID NO: 367621 - DNA, 134 bp, Zea mays
cccacgcgtacgctttaatttcgctgtgacttgtgttttgaaatagatatagtgttttctggttctcttgcaaaccttattgttgcagccctaacatttcatggtgtgtttgatttgtggggtggtggtggatg

SEQ ID NO: 367622 - DNA, 123 bp, Zea mays
cccacgcgtccgcttgaatactgctgtgacttgtgttttgaaatagatatagtattttctggttctcttgcaaacctcattgttgcagccctaacatttcatggtgtgtttgatttgtggggt

SEQ ID NO: 367623 - DNA, 428 bp, Zea mays
cccacgcgtccgattcaggaattgaggtttgcaacccaaatggtcattggtacccagcggatgtgggctcaagccctgatgtcctgttgcttttgactggaagagccttgagtcatgttactgctggcctacgtctaaattctcagtacaggatcattaataatgaaaacagggcatcactcatgtttaggctcatgcctcgtgccaatgcaatattggactgctctccaatttcagctgctgggcattgcacaccacagatccaccggcccatatctgcaagtcagtttatggatgatttgcgtgctgaagagaatgtttaccatcacttagaagcaccgcctgaatcacagggaaactttgttaatgaaccatcgctcagaagtgtactgtcagaccctttgtctggggcttttcttgaagatgct

SEQ ID NO: 367624 - DNA, 325 bp, Zea mays
cccacgcgtccgcccacgcgttcgatcatccagaggcaggtctgcaaactatcctggagaattcagaagggagaacacaacctgccgttttcccacgtggccaaagctttggacaaagaattatgggcaatatgatggataatattttggtcagaagtcttacgtccaaatcaaaaggtcgaacagatgatattgctccaccctcacctgtgaaggcccctgatgatgaggctgacaaggctgaagaggaagaaagccctatgatggaaactgtcaggagcaaatgtattacacagttactgctgcttggggcaattgagagcat

SEQ ID NO: 367625 - DNA, 395 bp, Zea mays
cggacgcgtgggtaactgtatctggtaatacacaaactaaaaattcttgttactctgtttgaaatatcgttatttactgtagttgtttctggtgttataatgtaataaaaaagacagatccagtatcagtggcttccacatgcgtgaagtttaggcgaaggaataaccgaggcaagctttgccctgtatcttgcagagagactacactgactgaatctaggacttctggattaatggaaaggcttctcaccactttgttagacttgtccttctctggtgttatactgtcatctgataaaataattcaatagcaagctaagcaacagtatacttcatacatggcagagctcaactttgacttctcagggcttaaaattgaatttatatgacatagc

SEQ ID NO: 367626 - DNA, 274 bp, Zea mays
ccaatatatatatggacacacacacacacacacacctcttttttgcgtctattatttgacatacttcaaagtttgcaggtttgttttaaccctgtttgattgtgatgccttgtcgctggcggaattttttttaagtttaaaatgatccacctgctgtaggtaagttttggttaaaagacattcctatttttctgtttagtgacactggtattagtaatcctttttttttatccatctatttaagtgtcagcataatcgtttgttaaacttgctt

SEQ ID NO: 367627 - DNA, 467 bp, Zea mays
ttaagactatcaccctcgaggtggagtcgtgtgacaccattgacaacgttaaggccaagatccaggacaaggagggcatccccccagaccagcagcggctcatctttgctggcaaacagcttgaggacgggcgcacgcttgctgactacaacatccagaaggagagcaccctccaccttgtgctccgtctcaggggaggcatgcagatctttgtgaaaaccctgaccggcaagactatcaccctcgaggtggagtcctctgacaccattgacaacgtcaaggccaagatccaggacaaggagggcatccctccagaccagcagcggctcatctttgctgggaagcagcttgaggacgggcgcacgcttgccgactacaacatccagaaggagagcaccctccacttggtgctgcgcctcaggggaggcatgcagatcttcgtgaagaccctgaccggcaagactatc

SEQ ID NO: 367628 - DNA, 341 bp, Zea mays
tttagttgcggttgcaggcatcctctgctcgccgtcttgctgccgttgctgctagtgctagcaatggtgcccgagtcggcgcagctgcagtcgtcgcagacgtggtcgctgctcaagatccagcagctgctcagctacccgccggtgctccgcacctggggcaacggcaccgacttctgctacggcggggactacaagaccgcctccgccttcgtcgagtgctacggcgacagcgtgacgcagttccacatcatgggccccggcggcgccccgccgctgcccaagacgtttaacctggacgcccttttcacgacgcttgacgaggctccccaaccttcggg

SEQ ID NO: 367629 - DNA, 88 bp, Zea mays
tcgaacatggcgtcaacggggggctacagggcgagatggagctgcagatcgggtaagcacgcggactccctattactacagaggcact

SEQ ID NO: 367630 - DNA, 223 bp, Zea mays
tctgacgcgtgggccgccctttttttttttggggtttttttaaattaaatggccggccaaatacaactagatgtcggtagtagagaagcattctagtgaaacggttcaactaaattatagtccagttgtacgatctgcaaatccttaaaatttgatctaataatttttgacacaacaaagaggagtaaatacgggcccttaatttgaaatgatgaattacata

SEQ ID NO: 367631 - DNA, 303 bp, Zea mays
tctgcgtgatgccggaggaggcgcacgtcgtcgtcccggtgcatcatcgtctgatgagcgccgcacacgatggcaacgaccagagcagggtccctggtggtgccgatgaagagggagcggcgacgctcatccagtccgcgttcagagggttcatgtcgaggaggcagctgcaggaggcgagggcgaggacgaggacgaggacgcgcggccgagagccagaaccggacggcgccaaggaccaagagcccagcagccccacctggtggcccgtccgtcgcgacgttcggtgctggtccaggtagg

SEQ ID NO: 367632 - DNA, 168 bp, Zea mays
ttttataatccacatgtattgggtgggattgagctggtttaaatccataacaagtcaaaatccaccccaatcccactcaatacactccaatacacatgtaatatcaataaccgaacaagcccttagtggtttggaactgagaaaaaatataagggtaaacacattgcg

SEQ ID NO: 367633 - DNA, 556 bp, Zea mays
ttttaaatataacacgaaacgaactgctctagcattgaggaagcatgtcattgctgtcgatggcgagatccgccatagcttggaacaccaagggcaactgcggtgggtgtgaccgagtctgttgagcccatatgaaagtgcaggttgggcagaggcaggcgcgcacatgggcgaagcgaatgacctaggttacccatctttgaagtggacctagaggtagttcattgctgatttatccatcgttctccgctcagtgtgttggtacgcctgatctcgaggttattcagacaccttgtaccactagtagtttgtcacgatatacctgaggatagcttccagcctccaggccacgaagggaaagcatgcccaataggagaatttctgggccagaatgggtcctgtaagcggtgcagtggagagttttttctttttctgttggcagtagtgaacgggtttattatatatatgggagaatggttggtgaaaaaataaaaaatggggtggtcgctttagtggatccttctttcgttagctttcattctatgtataatttttt

SEQ ID NO: 367634 - DNA, 464 bp, Zea mays
tccacgcgtccgcccacgcgtccggccgcctcccttcccctccgctactgctcctccccaccccactcccccgcaggagcggcggcggcggcggcgaggtcgtaccccacatcggcgagcggcggcggcaccgccggaggcaaaggcaagatgttcgggcgcgcgccgaagaagagcgacaacaccaagtactacgagatcctcggggtgcccaagtcggcgtcccaggacgatctcaagaaggcctaccgcaaggctgctatcaagaaccaccccgacaagggcggtgaccccgagaagttcaaggagctcgcacaagcctatgaggttttgagtgatccagagaaacgtgagatttatgatcagtatggtgaagatgcccttaaggaaggaatgggccgggccaggatcccaagttgatccatttgacatcttctcatcattttttggaccctctttgagga

SEQ ID NO: 367635 - DNA, 411 bp, Zea mays
ttttcgcgtgggcggacgcgtgggcggacgcgtgggattatattcttgttggtgcaacctgaaaatgaaaagccaattactgaaagcggagatgaaatctcttatgaaggagcaaaggcaaaaagtccaatatatttattatcgggactacgaaggagatcaacgtaagttcagtttggtccattttatctattttcctttcttatggtatggagtcaacaaatggaattaaatagagcccatgctaagtttggaccaagtcatcacgagagaaaggaatctattggagcacctataaaattggatgtggaagcttcatgctcatattcagaagcataggtatgccaatctataaaattggatgtggaagcttatgctcaacattcagaaacataggtatgccaaattttt

SEQ ID NO: 367636 - DNA, 219 bp, Zea mays
aaaaatgtgaccacatttcccagatgtgctataacattcacatcattccaagtgcaccacaatacaagcacagacgagtttcatagtcgcaaaatttcaacaggctttgtcacaacaaggtcctcatactggcgctgtgaatagcaatggtgcaacaaaaaaaatctagaataactttaatccaggtcatttccagcatcggccgtttggaggccaaaa

SEQ ID NO: 367637 - DNA, 462 bp, Zea mays
ttgtcagagccatcaggattgaatgtgcttttcttgatggtggtgtactcaaaattttgagaaggctgtagttccgttcaagtagggcagagagatatgtttaagtcttaattagcaactacactggaggcaatttttgtatgcattctttatgtataccaaaatgtactaatgctaagatctctaccagaaagggttgttgctagtattttcatccatgtaggtataatattcattagcagaatgcaggcgggtacctggatgcaggatttacatacatattgcaattagaaagaagtgtgtcaaaacctttggtctcaactccctaacctcatgtaaagtaaacccgaaagcaaaaccttgtggattggccctgtgaggctacaatgctcttatttatctttttaatagttgataatttcttgctgcaatgcctactatattaaaatctatctcatacct

SEQ ID NO: 367638 - DNA, 262 bp, Zea mays
tcttggaccccgggccatactcctgggcggggggatgtgataacgtcgacgcccgacagtcagatcaccatagctttaggaaccgggtcccaagggcatggtcgcctactgaggcggaggacaccgacggaccagatccatttgctctatgtcacatgtagtgcaataatgaaggaggacaggatgaagacaacgcccagcaattcctcaagtaagaagggggcagggacgacgtagttttcacaagggggcgtcttccaga

SEQ ID NO: 367639 - DNA, 250 bp, Zea mays
tttatttttttttataattttacccaatatagctcttcatatttgggggataggcactacagttcgtacattattattggcaaacagaccataatttacaaggagcgtattgttactactcattaacgcggatcttattgtaggagtcttatttttcacaacaacacatttttcaaagcattgcacggcagtaaaccttattcccacctacagggcaaggtttctgcattaattcactttggaatgcttg

SEQ ID NO: 367640 - DNA, 335 bp, Zea mays
ctcatcgcgtgcgcccacgcgtacgcggataggggtttgttacattccgggcgccgcacgcggcgatgagagcttgcgttgatcccgcaccggggatggatgggaggaggggtaactgaaatcttgttctccttggtgtgaaaagacctaggactgatactccgctgtatggatgagctggatactgtcgagtcacgcattccttgaatccgatcttcgaatgacaaggcggactttgggcgagcatcttttagcctgacggctttaacggttatgccgttcgacacggacttgcctgggatggttatgggttctctccttagatgcgagagtag

SEQ ID NO: 367641 - DNA, 447 bp, Zea mays
tttcaatggtaaaaactgatatgcctgatgctaatgatggacgcatgtacagagataggtatagtccggaaaagaaaatagccagacatgaccatagcatggatgttgaattttcccattacactgattacagattttgcgagtggcggagtctggaggtaagaggcagatacagagataaaggaaaatttgccaaaagcactgatgggcatttcagacatgctaaccatgttgagttggattctgggctcaacagttttgagagggacaaacctgctactggctttcctgttatgagctcaagaaacagatgcatccataacaaagaagtctgcaatgctccaaagacacaaaatacttgccctgggtatcatgaaaagaacaagcagatgattcatcattttgtattgcaacattcctgatatgcttgcgcctgatactatgctg

SEQ ID NO: 367642 - DNA, 276 bp, Zea mays
ggctgggacaggtgcgttcatgatggcctggcaccgtaagctggagccagactaagaacaaatctgttatagtatcagaggaagaagatttggaacagactttaaaggagaaggctcatcaataggagttagctcggtaggcacttgagttagataggaaggcagaggagttggcgcgtaaggaggaggaactaagaaaagagagggatgcagctgaaaaggagcggcttaagatggagcagaaggctaaggcttatgatgctgaggagaggaaga

SEQ ID NO: 367643 - DNA, 314 bp, Zea mays
cctggaccgtgcgaattttgggtgacccacgcgtcctttttgtgacgagctcagtcaataaaaatttgagatcagtatgttctaccacagtggggtttcgaagatgagacacccaagatgtgctgagttgcatgagaagatattccgggtctatacgatctgggcccagaggcacccaacaacactgatagcagagatcacgaggaggagatccacagcgagtttcttcgaagcattctggcacgggggccataagcacaccctctagagatgccctttccaaatgacatcaaatcaaatgtgttgaaaaaggc

SEQ ID NO: 367644 - DNA, 452 bp, Zea mays
gggcaaggccgagattattgggctggggcagagttgcagagaacaatcttctactaagccactgaattaggtcttgaatatatcctcgtgtacaatttggtcaactagtgtgaaaagcctcagctgaacaatgttttacggtaccaacctgaagctaccctcagcatcaggagctttcgtcaaacaagtctacgagaaaatttcacaagttagggctagttttatcaaggtatgtgatcaccatttgaacgtggttcgtaggctcaccaattaatttgtattcactccactttcaggactatcttcatcaactcataaacaaaatagctgatcgatgctgatggtagaacctgaacagtagaagaaagaaaaccagaaacttgagacaatttgaaacagactagcatacactgatcacaacgaatactaggaacaaaacgatacatgcagat

SEQ ID NO: 367645 - DNA, 382 bp, Zea mays
tcgtgcaacagctgtgtttttgatggtctggcacctcaggtggaagctgtccttcaaaaagtggccgatgagtgcactgtttggtgcatggctggagccattcatcttcagaagctcctagccatgttgttgccccttaatccttaggatttatggcggtttggttgggttccttccttttgggtgtggcttgtaattagattttcttgtgtttttgggttaggcttttttagccttcccttgttttctttttctatcttaatgaaatgacacgcagctctcttgcgtagttcgacaaaaaaaacttgcgtaagttaagtagaattgtctgaattgagaatgatactctcgagtcttaaccacaccccaaattttttttttt

SEQ ID NO: 367646 - DNA, 270 bp, Zea mays
actactcctcaggtacgccggtactggacagggacaatcgaagacacacagccagagatccgtactactgtaaagtaggtaaaaagaactgccagatggcttgataggagctacttccggacgaaagcgctgatatgggcacgcacgtgtgccaggccgcaagggactacgaggacggtctgcttgtccgctactccctgaacggcgagggcctgtgcatgccggctccgtgcgccgacccgctgaactggggcaaggccgtggagggcc

SEQ ID NO: 367647 - DNA, 361 bp, Zea mays
gagggactggaaaggcgcaaacgtccattccggatgagaacctaaccatatcatatacttttggttacacccctttacaaagacaaaatcccaggggaaaaaaataaacgaatgaagcctggcacaaccaggacaaaacgggtgagaactcatttgtttatatctcacagaagggacagcaaacgacatttttttttgcccgctttttacaatgatgcacaaacggggtaacctttagcggagtccaaaacaagaaaaccctcaaactcatcgatcttcaacttacagggggcgcctaaattatgtagggatgcagttttttgtttgaccactggaactcaatttccaggtttttattggg

SEQ ID NO: 367648 - DNA, 82 bp, Zea mays
ggcaccaaacccaacatttacatccattatttgggggtcctggatcctgaacatttggatactggatacaaaaccttgttca

SEQ ID NO: 367649 - DNA, 296 bp, Zea mays
gatgataacaaggtgtcgtatgcagtatgctaatgttctggatccaggatccacacataatggatgtaaatgttgagcttgtagtttcccccagctagctagctagatttctacttccgtccgcgcgcgctcatctgcgcacgcacgtgtgcccgtccgcaatggaggttcgaggccgacctgcttgtgcgttcctccctgaacggcgagggtctgtgcatgccgatgcctcgcgccgacccggtgaactggggcaaggccggggagggcctggtcgggagccacctggaccaggt

SEQ ID NO: 367650 - DNA, 254 bp, Zea mays
aagcgggcaaacaaaaatgggcgtataaaaacaacgggggcaaggcatcagcggtttcaaaaaccttttggggggctcccctaaaaatccatttttttaaggccttggttccactgacaaaacataggggctttctggggctagaaagggccagggatttaaacccatttgatttttcgggaaattccccctacaaaagggggggcccctaaatccccaatagccccccaaagtttgcctaaaccaagggaaaa

SEQ ID NO: 367651 - DNA, 387 bp, Zea mays
tgcagcgcaccgcgccggaatcgccgcgaccgaccacgccgcctccgcactccgggaaacaaaaatcactttaggggcacttttacaagagccctattcacagaaattattagagaaaaggccaacatacaccaaaataagggcaacgttgaaagggtcttattgaatagttatattcgaactgacaagtctcatggttttcgagctttggttgtaatggaggatcattcactcttgttaattcaacaaggtgaggttgtttggagcagagacgatgggctggcttcaattgttgatgtaacaacatcagaattggcttgtgagaaggatggtgtatcagttgccggtgtggaacacaatctctttgagtggcttaagggacacatg

SEQ ID NO: 367652 - DNA, 58 bp, Zea mays
  unsure (1)..(58): unsure at all n locations
gtanntgtagtctccaagccgtgcgacgaccggacgggaaggggaagagaggcatttc

SEQ ID NO: 367653 - DNA, 239 bp, Zea mays
tgcaaccagccgcgccataattggctcgaccaacgactccttctacgcgtgcgtagactttgtacgctggaaagtgtaaagcatccaacgcctcgccaacaaacattgatgtcacgaatggtccataccaaataactaaaccactgttctttataacgttcagtaagaccatccacccgaggttcaggtactcttaaggtaccaggagccacaacatcagcacttgtttctcaccttat

SEQ ID NO: 367654 - DNA, 267 bp, Zea mays
ctagtctgcacatatagtaagaactgggggggccactacataagctgaccgtgcggtatcaaacgagatgaacattgcaatcaaagaaactgagaagagctacaatgcttttatgttcagagaccccctgaatactgagacgtatgaccatcaattgtttagagacgagttctagtgtcttttgaggcgtaggactcatgacaccgcgatactacctgggccagttattgtgtgccacttcacagcttacctcgatcatttgcccac

SEQ ID NO: 367655 - DNA, 313 bp, Zea mays
ctgcttccacgcacacgctgctgctgaaactgaagcgtactgcaagagagataggaggcagtagtatgaatggaggggacgaattcaggaatgctgacacatcccctgccttggctcgaaatcaacttaggctgggagccagcgctggtagctcgggcatgggctttagcaatggcgctgaacaccacggggacgaggtcctctgggcataaagactgcgatggataggagagatgctaaaccaataactgagctcatggagtctatggttcatactagggcatcaaagcacagtacctgcattgatggatga

SEQ ID NO: 367656 - DNA, 307 bp, Zea mays
ttttacgcgtgggcggacgcgtgggcagaagctcaaatactgatctgactgatccagtatggctatggcaaaggcaggcgcgccgagggtctcgggggcccagctggcgactctcgggctatcactcctctgcgctgcacaacggaccggccttccggctagaaggctggcccactgcctgacggatgctggcacatgagcggctactgaccgacgaccgacgcccactgcagtgaccgacgcctgtggggagctgataggtcatgtcgtcaccgtctccggtgctggcaagggctgcacgtctcac

SEQ ID NO: 367657 - DNA, 216 bp, Zea mays
gaattgccgggacgacaccacgcgcgtgaagacgcgtgggccgacgcgtgggaggaagggagtgaggaatgtgtccacagagccacggaccagctgtgtggagccgtgatggttagagtgtgttcgttggaggcagagagatgctttataaacttaattatggttggcccacagctttgcaagagatcattttgggctgatcaaagaaatttatgg

SEQ ID NO: 367658 - DNA, 224 bp, Zea mays
tcccacgcgtccgaccacgcgtccgcccacgcgttcgtccacgcgtccgtccacgcgtccgcccacgcgtacggccacgcgttcgcagcgacaccagcagccagacccgatcccctacctcgctagggttttagcccacgcgccgacgagctcccggttactaccgaatcaaccatgggcggcggcacacgaatggtattgctacagaataaagtgcaagtagg

SEQ ID NO: 367659 - DNA, 257 bp, Zea mays
gctgcccacgcgtccggcggagtcccacttcctgagcttcgtgcagcggttcggcaagtcctacaaggacgccgacgagcacgcgtaccggctgtccgttttcaaggccaacctgcgccgcgcgcgccggcaccagctgctggacccgtcggcggagcacggcgtcactaagttctccgacctcacgccggcagagttccgccggacctacctcggcctccgcaagttccggcgcgctctcctaagagaactcgggg

SEQ ID NO: 367660 - DNA, 188 bp, Zea mays
gggaaagggaaaaaaaggttaccctttgggcctaccagacttggttggtaaatagccccaaaggaaaagggtggggaaacaaaaacccgaattttccttccccaaaaagggcggttttggggttgtggaaaaacccaccgattcaacggaaaagcaaaaaaccggccctttttacaagggaaatgggg

SEQ ID NO: 367661 - DNA, 329 bp, Zea mays
gcctcggacgcgtgggcggacgcgtgggcggacgcctgggatggctatctgaagatatcttgtaatggcggtctgaaacacaggcgctcagagatatgctacatctcagcgaaccactcgtccattaaactctaccatgactactacctagccttcatgcagaacgggccctccataaccacgcaggtcggtgccgcgcccggacgccggggcggaggtcacacgaaccgactttctggcgagcgtcacgcccctcacccaggcgctcggctttatgtgcaactcctccgggcccatagggctcaaaggcacggaggtgtacctggggc

SEQ ID NO: 367662 - DNA, 368 bp, Zea mays
  unsure (1)..(368): unsure at all n locations
tttctgcaacanccggccacttctctgtcacttgacgatcagaaagtgaggagccgcactgaagccagcacgccgatgaagtcgcctcctctcgcggcagcaccttgccggcgtccgtgagatctgcaccctttgcgtgcgtgtccaggtggctgcacacgccgacattcgcgactgatgtctacgcaagaggtttaaaactaacagctagacggagtgctcaatctcttcatcgagaagctgcaagagatacactacctgctactgaagggtaatgacgaagcacggggcaaggttattgagggggggcaaaaatacagtgagatccgtagacctgtctatgttaagaggggtgacattatcaagac

SEQ ID NO: 367663 - DNA, 235 bp, Zea mays
gtgaaaaacaattcaggggatcttaaaatttaattggagctaagctctaaacaatgcaatacactacaaagtgcttgtttttaaaaccaaataaacatcaaagcaccaaggattctcatgatccacgggcatgtgacctaattttgacaaaggcaacaaaaacaacttcaagagcaatggatcatcatgcatttattgtgacaaatataagataaagcattttaaccttaactaa

SEQ ID NO: 367664 - DNA, 335 bp, Zea mays
tcttccacgcgtacgcccacgcgtacgtagacagcgtggaggtgacaattgtcggaatgtcctcaccaattatgcaactctaacaaagataaagcactcaaaattgcgagtaacaaacacaaattagaatgtgactcagtgtccgacacaggaccaacgtcagtggatcaagatgagcgtagcatatttgacgcattgtatgccgtgatagcacaagtttaaaaataagagcctgcgagaacacaagtttgatgacatggaaaaaccatttactatgaatgctctgataactatgctaataatcaacgtacggctatatgacccgaactaagtta

SEQ ID NO: 367665 - DNA, 309 bp, Zea mays
tttgttagtccgacacccgcatgccacaaagcgcacgctggttggtacaggaatgctgtgaaatggccgaccttgccggaaagcgcaacctaggcagtgagcgaaactgccaccgaaagcacctggcggaccgagagtttcattactctcgccaccggtgttgcaggtaaagttaggctacaacaaccttgtctaagatggaacatcgaacaacggcaacatgtggtgcggcaatcgacgattctgaggcaggggtctgttagagcgtgctccacgggcgggactagctggggcggttgctgctgcacg

SEQ ID NO: 367666 - DNA, 375 bp, Zea mays
ggcaccagcgcggaattccgggacccgaccaaccgtgtgtccacccgcgagccggctcgtgaggacacgacgactgattgagcagccggttaggttgatgtgtgtccgtcgtacgttggcttcgtgcaaacaggcagacagcggcgacgtaagcgatcacggcgcacccaggctagagctacccggccgacccgtgagggcggtgcgtttgcccttcaacggcctcgcctcgcctcgaggtgtgagctcctccgacatctgctgcggcgccgccgtttctgcaagcagggttatcttcccttctcgccgccaggagtgagtctgtgagtgggtcgtcactgggcggggctctttcaccacctgcagggagaaggg

SEQ ID NO: 367667 - DNA, 169 bp, Zea mays
tgcacaatatgcctccttttagggataaagcgtatcaatggcgaatcgagcattcgctatcctttttatttttttagctttgaatggaagaaaagtaatgaaacctgcgatggctactaaataacctccttctattttattaatttgaaacccttttacctttttcttc

SEQ ID NO: 367668 - DNA, 276 bp, Zea mays
ctttctttaaaaccgtaagataggcagagcttggcaatggagctcccgtggagaatgctgctgccgatgctgctggaactgtcattcgaaaccagactcgtggtaatgtgcaggcacgctcgctgacacctgttggaacggactgtctattcgttcttctcggaatgctcaagacgccaaacgtttgctcatcaacgactgcttcgaaactgacacgcgagggatgaaaaagaccgtcatcgttgaacgacaatcactgacggttgtcacgatgca

SEQ ID NO: 367669 - DNA, 121 bp, Zea mays
tccgttttctgctcctcggccttacgcttgggcggtgtccatgccacgccaatgacctataaaaaaaaggtccagttagtcctagcttcaactaccctcactccatggaggaagtgatgcc

SEQ ID NO: 367670 - DNA, 406 bp, Zea mays
tctctttccaactaacctgtttcaatttgtgttgggtgccttgccgtgccggaatattcccctccggcagcctccctggcttcctccccgcgccgccccgccaaccaaacccaacggtggcaccacctcttccttcctcctcctttccttccgcgacaggagaccccctcgcccccgaattaattgcagctgaaggaacccaaggcggcatccatcgatgatgatgctcaccaaggagttcgccctatcgccgccgccaggtgtcgtgccgcgccggaggccgtcggcgagggtcgcacccaccgccgctcgagggggttcgccggggcccgacctatggctgcggaccgacgcccccgtccccgcttgcgacgccgccggcttcgtcagcagccacagccacgac

SEQ ID NO: 367671 - DNA, 411 bp, Zea mays
tcgttgcgcttctatccaccaccgctcaatcgtttgattttttttcgcgcaagcttcttacctcctgcgcgcagattgcttcttcctgctgcacggcatgccggagaaagatatgtctctcagattttttcttctctaccgattgctttgctcctggcgtgattttttttttctctgcgattgatctcatccctgcacggctctagtggaaaaatcccgccgcccctgggcgcttcaaaaatccagccgacgcttgcccctatcttctttctcagtccagccgtctttctgggcaaccgcgtcttcttcttcctccccctgcgtccctgtttcggttcctgcgcacgctggcttcctgcgtcgcgagctttagctcggattcccccttccatgggttgcccagcagctttt

SEQ ID NO: 367672 - DNA, 260 bp, Zea mays
tgtttcacggatatctctatctggctgggggcgggttgaaaacaacagagtcatctttatatagagaaatcctatgcggcaaggcatgtgcagcaaggggctgtaggctcccctgactggaagccataggccaaagtcaccatatgcccaaggatttcgactacaagagtaaataacataggtgataatggatcaccttgccgcaacgcttgctggtgtaagataacaccaacatgggtcccattctgtagcacccatgt

SEQ ID NO: 367673 - DNA, 210 bp, Zea mays
atataggggggggctaattgttgagtcgggggaggataacttcgcgaaaaactatctatatcaactccatgctagatagcctatacttacaatcccaacacaaaaaaggaacaatttgttcactccttaacgccaaccttgctcaacacatggccatgcatcaatcacccctcaattgctatctgcgaaggctgcgtcaatgacattccc

SEQ ID NO: 367674 - DNA, 455 bp, Zea mays
  unsure (1)..(455): unsure at all n locations
ttggtatgctgtatttcagacaagagacttgcatgcggaaaggacatcaatcttatgttccgagtgggtggtggacatgttgaagctcacctgtctcgatcacagaaacttggaaagtttttttgatgttttattatctgagggggaacattggccgctctggttgatgccatctttacaaaatggacatttatctgtgaaggtccagctggatccagatattacagatgaaattgaactcaaacacgagcgatttgttgcctttgttgataggcttattctcaaacttggctttagtgaagtggttttaggtattccaggaaatatacagtctgccacatcacaatcaattgatatcacttcacctgtctcttccttgtccaaagtatgggtggctggtgaggtcctttgcacttggacatggaaagggngctgtgcattgaaaacattcttac

SEQ ID NO: 367675 - DNA, 288 bp, Zea mays
agacaggtgacgcgccaaatctattgctgattccaccgcagccagaagttggtaatcaacactgctccatacaattttttaaagcaaggtatagcctgcacaagcttcttttacaacctggaaacatctcaggatccaaccaagaacgacggcatgtggcgctctagtgccagcacgaggtccttcccctggctctccgggccaacgggctcaccgagccggtgcaccgcctccagcagctcccccctcagcctttggggcaacagctgcccacccgcgctcaggcac

SEQ ID NO: 367676 - DNA, 311 bp, Zea mays
tttattattttttttttttttttttttttttttggggggttttttttacagcaatcgggtatgactcacaagcgaaccagtccaaatgcaaagacacttgtagttcattacaagactaggacacattattatcccgccgttttctttagcagaatgcaaaaaaaaaaaaaaaaaggcagcacatgcgttgcacggaaacatgatggatctaacactactccataacctaatcgagcaagtcagatatcgttttcttcttaacaaacggatcggaagcggcaatcaaagttgacacaacactgttggggaaa

SEQ ID NO: 367677 - DNA, 236 bp, Zea mays
tttcgctttctttgtcacactattcctaggggggggaggtgcactaacaggagcctctctctacactacgcctacaacaacagcagtgccgccttcgtcgccgtcgccacttaatccccgggatcgtcgccggtggaaagcgccatggatcggtaccagcggttggagaaaacgcctaccgagcccgccgtcatcggctagaatgaggtccgtatcaccacttagggccctattcg

SEQ ID NO: 367678 - DNA, 426 bp, Zea mays
aagtctccctaacttttagcagccacgcatccgcggcgttcgatcccgcatatatgcgtgaggcgagatcctcccccaatcctctcgcgcgcgccatcacactactttcccatatcaatttttcgtcctcgcgcgcaatttggttggggtggcgccatggcgggaggcggctgcggtagaggtttcaactgtcccagaggtagcggcaatgggagagctttcaacggttctggaggtggcggcggcgggagagctttcaacggtgtcgtacgaggcgacgacggagatgctagggagtgtgaaagtgtgaagtcgtcgtctcctgaaccggatctacggcctcacgttcgccgcgacggctagaggatgcgggaggttgaggccgacaacggtaggttcctccaatggcagatgcgttcgggaggt

SEQ ID NO: 367679 - DNA, 429 bp, Zea mays
  unsure (1)..(429): unsure at all n locations
gtcagaaaaaaaaccggacaaatctggtattggcaaacatagatccaatacaacagccccaccaggcaccaagaattccaactgatgctacagcagttaatcgacaaggtcaaagcctgacgcacgccacgatgccacccacaagaaagaacacagcactcttcgtcccgatttaaacaatgctaaactgctaaccagtaaaaaaaaaaccctctcaccctgtcacggggggagacaacgcattgatccgccacgtaccaccagcctcgccatggccagactcccgatccctcagcatcntcacgtaacgctcgagggtgtgcgctctctcctctacgcggtcgctggacaccgtgtcctcggccagcttcactgcggccctctgggacacttcgaagctgtctgcagcctcctgcacccgacgggccg

SEQ ID NO: 367680 - DNA, 180 bp, Zea mays
ttttttttttttttttttttttttttttttttttttttttttttttttttttacatgtttgatgatgtatcatgtcccctgaaaaaaaatggaactctgaaaatttcaacatgtaagagatacatgatttccgacagcttatagatgattctaatttattacattcagaatctcgtgttt

SEQ ID NO: 367681 - DNA, 291 bp, Zea mays
  unsure (1)..(291): unsure at all n locations
ngcccttttattttttttttttttttttttttcgtggatgaaaaggtaggttgcccgaacagggcaacactcatctaccggatcgatggcatgaatacaacattcaatacgtagaatgatgacagtacaatgcatgcagtcaggacgatgaattgagagccgctgcatgagtagcttaaggaatgaatccacccaggccacagcaaaggatagccgtcttacatgctatgagtccctgaacccaaactgaatgagaaaggaagttattctataacaggtgggacagacaat

SEQ ID NO: 367682 - DNA, 253 bp, Zea mays
ttgtataaaatgaataaaacaagataaccggggggaaggctttaaagacttggaatatcccaaagagcccccaaaaccattgtttcggctggcgacccgaaccaaagggctcgcttaaaccccccaatggataatcccaaacggttccaccgggcccccacattttttaaagagacccaataaaagggaataaaatcttaaggcgaggggggaccatccctctgtagagaaaagcccttaaaacacccctttg

SEQ ID NO: 367683 - DNA, 469 bp, Zea mays
tttcgttaaattcctacatcatcacactatgatcgcacacctaggaaagataagcatacttcaccaaaacaactgtctgaaaaatctccctcttcaggtgatcagaggttttcaggcaggcctagtggtgggcgcagtctagataataaaggagaaagaaacagccttacgaaatacagagatagagatggcgacctagcccaagaacgatcacatcatcaagatcgaacaccagctaaagttccattcagagagctaacaccatcaaattcatccataagtagaagttgtcatttttcaggcagttcaccaaatcatcctctgccaccttctgcaaggaatagcgactcttccttccttagtctgcatgatgatgaccgtaggcctcaaaatggagataggagattccatggtcatcaaaagaggaatgacatgattcgggtcgtggacatggacatgcctggaacaa

SEQ ID NO: 367684 - DNA, 409 bp, Zea mays
tcctctcgtccggcaaaacccccctctaagagtcggttatatttgggctcccgcctccgccgtcgcccctacagtcctacaccaggtgccgaggccttcgccggtcaagagcggccagcagatccgccactgggtttttggatttggagacatggcggaagtggatgacaagctcaaggactacgagatcaggaaggagggagaggcagagatcctcttgcacaagaggaacgccgtcttttacaatcccgtgcaggttcacaacagagacatgtctattgctggtttaaggacctttattgccaagcgcatggaagaacatgaagcgctggtggacaagaggaacacatcgcatggaaaagacaaactgagtgaaatatcccgtcaaaatggagaggatgcgtcaact

SEQ ID NO: 367685 - DNA, 129 bp, Zea mays
tccatgcgtccgcccacgcgtccgcggacgcgtgggtgccgttggggatggtgtcaccctcaatacaaaggcattccagaatgcaatcttctatcttaattcatttgcggacaagggtggcgcgcatct

SEQ ID NO: 367686 - DNA, 271 bp, Zea mays
ttttaaaaaaaaaaaaaaaaaaaaaagggaaagattttttaaaaaaaagggttaaaaaaaaaaaaaaaaaaaaaaaaaaaaaaaaaaataattaaataggaagggctgttttggggatccattttttggggcgcccgttttcgttgttctcagtttttttttagtgattggggggggcctttctttttccggggcctttcggccccccgttttgtgtggcccctggtgtttccttgggggggggggtaaaccgtgttttcccccctttttt

SEQ ID NO: 367687 - DNA, 393 bp, Zea mays
tcttgaaacgagaatggaaaattaaatcgcatgacatacgatgctgcatgtctcatttttatggtttgtgtcttcagaaaacctcatacgatgcaaatatggacgtgccatctgtagacccttcagctgctatctcggaacggcccagtccagcttatgcgttggactcttcatttgatcaggaggatttgttccctaccagcaggactccaaattcacttgctgttgatgatgagcgcgaaacattagaggaaccctggaaaccatctgtcgctatacagtccaagaacaataaactcgcaaatgttgcgagcttgcttgagaagctccagcagcttagcgtgaacaaggatgaggatgcacctccgggtggccatattgctttcttgtgtg

SEQ ID NO: 367688 - DNA, 381 bp, Zea mays
cctgaaaaagcatgtcatatgcatttaacagttcacatctaaccctaaaattggcatggcccttgaaattcctggagccttgaatgtgccattttaacaaaggaaaaggcactgcaaaacatcatctgctggctggcactaaggaatgacaaaatatatcatatccatgctacaaggaaatgaaaagatgacagacatctcaaaggatttttatggaatatatctaaatttccgacaggagcaagtcgagcaaatgacggggatatatgttctatcatgtgagcttagtcctttgtcaccactcaccacttaccaggtcgccagcatgccacaatcgccggtttttggtttcagtctccctgtgcatttccactcctacag

SEQ ID NO: 367689 - DNA, 371 bp, Zea mays
tctttacatcctgaagactgtaagaatatttccttggcactaaagaaacagaaggtcaattttgtgctgaggtcaactagggaagtggtctcttcaatcactagggtatatatggttgatactttagacaatatgcttatcattctgagacacatggagcattagctaacagcataaaataccatgaaaaacaggggaattaagaatgctttacagggtcaccccaattgcagttgttggtggttcatttctacctggcttagccggccataatttttctgaggctgctgccgctggttgtgcttgtatgactggaccccacgttggacactttttccatttgctggtcgaaatgtggctaattaatcctt

SEQ ID NO: 367690 - DNA, 214 bp, Zea mays
ttctccctctgcgctggcgggccgagcgccgcgagcgagctgggccgcgggcggaggaggagtcgaggctgaccgaccccgcggccggcggcgacgagcggacgcagattcggcagccgtgcgcggaatgcccgtggaaggaggggagagagggaggcctcatctttcttttgcatttttcatataattgagaggtttcttctactttctcctt

SEQ ID NO: 367691 - DNA, 978 bp, Zea mays
tcgtcctggtctcgccgggcctggcggcgagggagagatggggaagaaccagtcgtacaaggcgatgcagcgggcgcggttgtttgtttttttttcttatttatatttttttttttctttattctatttattttttatatataattattttatatatatctttttattatatttttattttaatattatttcattttttattttcttatttatttttatatatttatattattatacttttatttttattatttatcatctattatttttttattctatatttttatatttactttttttttttatattttatttatatatttaatttttttctttttattttcttctatattatttttaatattttttctttattttatctttatctttattttttatttatttcttattttcatttttattcattttatcttattattttatttattattctttttattttctatatattttatttacttacttatttttttatttttatttttatttctattcttttttatttattattttatttttattattttctattttttttttcttcctttattattatttatttttttttttttttaattattttttttttatatttttttcttattttttttaattcaactttttctttttttcttttttttactttttttttatttttcattatttatttcattttcttttattttttctttctttttttttttcttttttcttattcttttttaattatctttattattttaattttttttttattttttatttctctttttttttcttactcatttttttctttatattattatcatttttttatatttcttatttaatttttttttatcattttcttctatttatttttattatttatttttttattatattctttataatttatattatttttttttattactattttttcttttttcttcttatttttattttttattaatt

SEQ ID NO: 367692 - DNA, 201 bp, Zea mays
tcgtgtccccagtactccgcagtccgcacggccgcatccgtcaagatccgcgatgagcaacgaggcgaggcgaggggagggaaaacaagtgagtgagagagagagagagaggagggaaaatgcttcgccacgccgcccgtcgccttgattcccgggccgtttctacgtccaccgtgcgccgggcgcttgtcacggaggagg

SEQ ID NO: 367693 - DNA, 336 bp, Zea mays
tctttcacgcgtccgcgatttccctgaggcactcgttcccaacgaagcgcggtggggggaggccttcacccgtccaacaaagcgcgagttcgtcggcgcttcaaagccacgggattctttgccgacgagttcactccatcccacccccccgtaccaagataggtgcacctcccccaccgtgcacaagaaatacctagcagctataacccctaatccccaccagtaatcccaccatgggcttgtctctgtcggcgtgcatcttctaccagatgatggagatcgcggtggccgctcgcctggagatgggttacaacaaggcgtctcctctccggaacg

SEQ ID NO: 367694 - DNA, 350 bp, Zea mays
cacgacaatctacctatatattatgttttaactaaaaaagatcagtatagtttcttacacttctaacataaatcgaacatagcttatgattgttcagatgaaatgccagatttgaacaaaaacatcatttatctggcaacccacttatttcgagctccttccatagccttttctcgcacccttgtcaattcatctcaaccaaactgaggttcaatcaagacaagctccccattcagcacatcctgattatcaggagtagatgatcgaagcactgctggccattggccaactccaagagaagtgatcttgatctgtatggaaaattaacctcgatccatcatttacaacat

SEQ ID NO: 367695 - DNA, 246 bp, Zea mays
ttcattcgtccgattccaaaacatcactccctcgcgaaccccaagaactgcagcgacggcaatggcgatggcggcggagggcgcggcgagcgagccagagctggtgtcgatcccggcgacgccgcacggtctgtcgacgccggagggcgcggccacgccgaccggagcgggcgggggcggcggcggcaggagcaagggctccgggaccccagggcgtctcgtggtggagggcctgcgcggctacct

SEQ ID NO: 367696 - DNA, 157 bp, Zea mays
ccccgggggaacagaccgaggggcctgttcatttatttatagacgcgggcccccccccacgtaaaattacatttatgcccattacatttggcaaggacttatggaaatctgacagggcccacgtagtttttttatctttaggggggttccccttttt

SEQ ID NO: 367697 - DNA, 115 bp, Zea mays
tttcgtcctctcctaggcctattcatccccggggggggcaattaaagagactgatacgtcctcacacaatctcgccgtagagcgccctgcacaacagcgtatccaaagcccctcc

SEQ ID NO: 367698 - DNA, 67 bp, Zea mays
cgtgcggacgcgtgggcggacgcgtgggagagatgcagataagaggaaatagggagagaggagagag

SEQ ID NO: 367699 - DNA, 375 bp, Zea mays
atcctacaaactgacaagtcattctagcaaagtttaattaatacaaaaatgacagctaaaacaactactttgcactaacactaattcactccagactcagtgcaaaaagttcaaggggcaattcccactctatttcgattttttatacgtccacacgaactgtaattcaatcagagagggttcaaccaaaactgtaaccaaacaagctaggaactgacaaatcaactaggcagcctcgcaggtcccagaacgctagtgcctgcctaaacattatctccgtcctagcccacaccttcatatagatcctaatgatctcgttcgaaccatctctgcctggaatctacatagcgccaccagcaacctctaaaccatcag

SEQ ID NO: 367700 - DNA, 232 bp, Zea mays
tcgttcacacgtacatcaaatcgtacgaatcaaggatggctcgctgctgatggacctcgaaagtgcagctccgccatccatgcattgtcctctcctactcttttgccaccactgagagcaccaccactgcgagacctttgtgcacgtagatcgccgtaaggggcgcgtgcacaccctttcagtggtacgtggagtcctgccccgataaccatgcagtggacacgttctgctt

SEQ ID NO: 367701 - DNA, 235 bp, Zea mays
gaaagagggattctcagctaacctttttttttaaaaatcaggggtgggcccaacccctttttagcacaactaaaagcacagaagcggacgccaaaaaaacacaacccccgccggtaccagggaattgtgttgccgaccggggacacaaagacacaagaaattagggggggggctaccacctccttggacattttaaggaacgggtccatgttgggggggccccagccatttggcc

SEQ ID NO: 367702 - DNA, 334 bp, Zea mays
cagcttcctgttaaacaagcatttaaaataatgcatgatgtgggtcttgctctggttcctttttgggatgaccgtcagggaaccataacaggcatgctcactgcatcagattttgctttaatcttgagaaagttgcagagaaacattcaagttattggcaacgaagagcccatttctgcttggaaagaagcaaagctacagttctatggtgggcctgatgttgctgtcatgcagagaacgccattaatccatacaggcaacattgatctcagggccaagaaagaagcttaactcgggatgctttctgttttgaagcaagggcaacaaacttacc

SEQ ID NO: 367703 - DNA, 88 bp, Zea mays
tggacgcgtgggggtgggttggcttctcctccccctacggttcgggttcggattcgtagaggttctacgggattcgagaacataggtg

SEQ ID NO: 367704 - DNA, 435 bp, Zea mays
tttcccacgcgtccgtagggattaccgccatcgtagcccgagtcgcagctacagtcctgatgattacaagaagcgtgggagagacagtttgtcacctgagcgaagaagccctcgtcgtagccgcagtcctgatgattacaagaggcgtggcagagacagtgcatcaccagcaagtaagagccctagtcgctccccacctcgcaagatgtcaccttctcctgagagatctcccgtcaggcgcaacaatgaccgatctccacgctctcggagcccatcgacataagcgcaattcacttgcaaagcatcttgagtagctcaggatgaatggacttgctctgatcctatgtgtacgcatttgctcgatggtggccctttagctagtggaggccgttagtgtgttaactgatatctctgtggaccgacgtataaactttg

SEQ ID NO: 367705 - DNA, 446 bp, Zea mays
  unsure (1)..(446): unsure at all n locations
ttcccacgcgtccggtttttcttcaacatgtcaaggcatgttgcttgcatagtattgagaactgaaaattgatacaatgacaccgcaaaatatagtacaatatattgtgttttgtgctatcactgtttcaattatgtcaacgcatgaagttgtatttgatacttcttgtagtatgaatttccacgcccacaacattgctatgattcatccttgagaaaactaaataccttttctgcagtgggtgctctcaatactattttggagaaacagaagctctacagccaagtacacctttggtttgtcgactacgttccttggcctcctgctgcttcttgacagatccgcattgttgagttcctggcgacgtntgcaggccaaataatgcaccttcatacacagcatgcctaatcaaattgacgaacttatgctggatgatttggtttttc

SEQ ID NO: 367706 - DNA, 296 bp, Zea mays
gagaaaccaaattttcctagaacaggtcagtttttaaaacttgaaaaacaccggcaaggcaatgggggccccattattggcaaaagcagaactttaacatgccaactcacaaaaaccgggttaggaatagctgaacataggggaattatatggttcctatttaccggccccaaaaaagcaaccttttccaagggacagaatgggggtcctttaaaacagacatgtttgtcaaccacttaaaattggtctcacttagagcccacattaaccccccttttttctaagaattcctttgc

SEQ ID NO: 367707 - DNA, 389 bp, Zea mays
tgaggtccaatggtgtctccagcaaagaattttggttcattttcgtccacctatgagcaggaggtatcttataattattcttctgctccaggtactgggaataatatgcttcaatatccaaactctcaagcacagccatttccaaccacggcagctgttcaaggtggattctcacagggttgccttagtatgcctgttcccttgacagaacagcctctttttgggcatgaaagacagccaattgatccaagtgaccaacctttggaatttaacagtaggaaagctcctgatttggcagtacatataaatgtcaattccaatatcccagctcctcaaacactagcacctaatcatgatgtagctgcaaccctacacataggcgcttgtca

SEQ ID NO: 367708 - DNA, 53 bp, Zea mays
atttccacgcgtccggcggacgtgcggctcgttttggacagctccagactcca

SEQ ID NO: 367709 - DNA, 243 bp, Zea mays
tggaccagcggcagcggcaacggtgccggcaagaagcaggccgcgcgctccactctccgaccccggccgaaacaaaggtgatggcgcagctgccgccgagggcgccggggggcgccgcgccgcaagaccactggtcggcggcgggggagttcctggggttggcagtggacaggcgcggttggcgccctcgatgcgttggtgtcatagccttgtcgttgtgtgcgtaaatgcctcttgtagcct

SEQ ID NO: 367710 - DNA, 305 bp, Zea mays
  unsure (1)..(305): unsure at all n locations
tatattaataaagagtaaatgagcatggtggatggtttatactagtcatcagcggagcttgttggtaggcacttgctggagtagttgcttcgaacttctttttttcgtgttagatgaggtaaaaaaacaattttgtgttattgactctgctgtgagcgagtgaaccttgcacattttcgttatctcaaatggatagatctgttctacgcttgttttgtgaattgtatagctgttcgtttcggcnnanaaaaaaaaaaaaaaaaaaaaaaaaaaaaaaaaaaaaaaaaaaaaaaaaaaaaaanaag

SEQ ID NO: 367711 - DNA, 306 bp, Zea mays
gcatcaagaaaataagtaaataaacccagtaaaactgggaaatttaattgggcaccgaaccgggcaatattatgttacccattccacccccacctatgctctgttttgccttgggctaatccattaaaagccgatccaggaccccccaaccggggtaattatattcctggacagtttttaaaaacatgttttcctgggcggggcgtcggggttttatcggaatattccaacacctaggaaagagagagagagagagagaaaacccctcacttttggagtatgggagggggggagggaatccgtttt

SEQ ID NO: 367712 - DNA, 361 bp, Zea mays
tcaggaatatatgctcggggatcaagattcgttttccatgaggaagagcgggggaagggacaaactagctgattggcgctagtttgaagctgctccaggaaaagcggattccctccctccctcccatactccatagctgagctgttctctctctctctctctctctctcctagttgttggaatattccgataaagccacgacgccccgcccaggagaacatgttctgaaaagctgtcgaggaatataattaccctggtgggggggtcctggatcggctttgaatggatgagccagaggcagagcagagcatgtggtggttggacatgggtcacttaatattgcccggttcggcgccagatg

SEQ ID NO: 367713 - DNA, 364 bp, Zea mays
  unsure (1)..(364): unsure at all n locations
tttgacgcgtgggcactggaacctccgtagagaaggaacctgtaaacggcattgacccacctcatgagcatactggcatctgggtccctgtttctgtcccgccaatgacagcgcaagaccgcgaggagtggcacagggggtttagttgcaatggcaggaacttcccagaagaagagttcagctgggagctggatgaagagaacaatgagatgacaatgtgggatgtgttgctgatttggttgttgcggcaaaagataaggtggtatcttctgcaacatatgattttggggaccnggttgtcgccccngggtgtccaaccttttttctccaagaggcttggaacgatatggcacaaacacttgcg

SEQ ID NO: 367714 - DNA, 203 bp, Zea mays
tgtcggctccactcacagcttgagccttccttttcttttcttgcatatgacctattttcttgccaggggagagtcgcctggtgcatgtctccctaacttatgaacccacgagatcccatgctcaagcgttcgtatgatgaacaagatggcacataatccaaacaagacctcatgctctgcgtttgtggacctgagcgtattcc

SEQ ID NO: 367715 - DNA, 237 bp, Zea mays
ctgacgcgtgggcggacgcgtgggcgcgcacaagttcgccaacccccacgccccaccccccaccccccgcgtgctgcgcgtcgttggaaccaaggattggattagcctcgccgaggaggaggtggtggtcggcgaggggctcgcggggatggggatctcgaggccccttgtgatggcgatggcggcggcgctgctgatcgccgtcgtcggtgcgaccggcgaggagcaggagcccct

SEQ ID NO: 367716 - DNA, 305 bp, Zea mays
ggtgtggggttcgcaccaggaggcggcggagatactcggggaccggcggcgagccatggcacgggcggcgggaccaggcggcggcggcggcggcggcccctacaacgcggttctgcgggccgaggtgcggcgtatgagcaggcgcgtggcgaaccgggagagctacgagaggtcggggcgcgcgtacgtgctcgccagcctgagctcgcacgcgcagcagcgcgcgaccacgaggcagctgtccccccagcgtggcgtgctgcagccctcggcgggcagcgctgggggtggagaggcgaccaact

SEQ ID NO: 367717 - DNA, 294 bp, Zea mays
tcgttactagatcgcgagcggccgccctctggttttatttttttttttaattttttttattttttttttttttttatttatccgtttaaattcgagggcccaaattattcagagcaaaaacaacaaaattccaacaccgtaacacggggacatgcccccaaaaaaattaattactggtaaagcggcattttcattcaaccaaaaatcccggatcctttattcaactatgcaaatcagatggtaaaaacccgaagccttcagggacagactaaaaccaaaagaaaatggccccca

SEQ ID NO: 367718 - DNA, 153 bp, Zea mays
tcactctctctcccgcggtctcggctcgtgttcctcctcctcttttattggccgcatctttttctccggttgttgaacgcggcgggtctttgctccaaatccaggcggcggggagggggtgaggccattccctgagccgtgaaggagcacgct

SEQ ID NO: 367719 - DNA, 361 bp, Zea mays
tggggaaattactactctacgactcgtgcgcccactcctccactgttcttgggaatctcgggggagaagaggaagaaagcagtgggtctcagcgcaccactcattattcctggctccatggcttcctgacgtccctgtgcggcggggacccggcgatgaggatcgtggtgtggttccggagggacctcagggtggaggacaacccggcgctcgcggcggcggcgcgtgccggtggggaaggtggttgccggcgtacgtctggtcgccagaggagggaggggcccttactaccccggcccgggtatcccgggtgggtggatcacgccagagcctgaaccaccttggacgcccttgctccgcc

SEQ ID NO: 367720 - DNA, 65 bp, Zea mays
actgccaaagggtaacctcgaaacaaactttccatatcacagccgtgcaaaaccggacgcgtggg

SEQ ID NO: 367721 - DNA, 312 bp, Zea mays
aataacattataattaatataatatagataggtatcattcaatctctcataaacaagcattgtcaaataactcatacatatgtgtactctaaattcaaactaaaatactaattgaaaaacttggtcatcaactggctccacacttgtgcgaccactaaaatttgagttccatttcatcttttctttttcatcatcacgatattatagaaggcattgttgatatctttgttggggctatcatctgaaatgattggagcacggttctcgccagcccggtgctccaacacaaacctcttacatgcattccataag

SEQ ID NO: 367722 - DNA, 294 bp, Zea mays
caatgccctggcatggaattgatactaatatagtagtatagtacaacatacacaatactttgtcaatttatcagtaccagcagaacagaatttccttggagttgtaataattatatcaccaatagctcaattcaggcaattgaagcaacaaggagaatggggagccggatgcctccgtaaccagaataacaaggttaaccttgtacggtaagaatcgaaccttcagatctaacaacaaacaacaaagccaccggatgcgaacgggatttcacctttgaggccaattctcacacc

SEQ ID NO: 367723 - DNA, 287 bp, Zea mays
ggcggtgcctgaggaggacgaggctgagggaggaggaggagctgtccgtcctgctgggcctcatcgacctcaaggtggtggcgcgggtgctgcgcgcgccggaggtcaccgaccggcagctgcactggtgcgaggagaagatgaacagggtccgggtcgatccggagggcaagatgcagagggaccctgcccctctcttctaccctgcacactgacagggacctgctggctcctgttgctgctgctgctggtgctggacaacagtcttgtgtgatactgatcttcta

SEQ ID NO: 367724 - DNA, 365 bp, Zea mays
gatccatgaagcggtcaatatcctggacatacaaatgcccatgcaacgacaggagaatccagaccgactaacagcattcgtatacactaccaacaaaagaatccagaccgaacctccggcaacttaacgttaatattagccagccactgttacccactcatcattaggagttaattaaaagctacgacctaatgctacccagtatcgactatcgagttaatagggggcaggcagaagaacccagcaaccaatttgctcagcgctttctcttgtgagacttccactgcctcatgacgtgctggacggcttcttcagtgttgctttacggccctcttgtagttccacagctctggtacaggatagcg

SEQ ID NO: 367725 - DNA, 213 bp, Zea mays
ataaacactgttttttgttgaccaataagaataacataccataccatatgccacagtgaaagatgggacgcaaactgtggaacataacgtatcatacaaatccacggggggttttgttagatccaaatttcctaattgggggcacttggccctcagcagggaggaagtaaaatcttatttcacgacttatttagcaaaacacgggggcaagcc

SEQ ID NO: 367726 - DNA, 195 bp, Zea mays
  unsure (1)..(195): unsure at all n locations
aggaaactgcggttttttcccggaggtgttaattaaagcaggagggaggtgaaatacccataacacttgttactcaaagctctgaacaaactaggtaggctactctagcttcagtccatgtcgatcccttgtgtaaagagggggggggcgcgccncataattctccaccttnttttccctaaacccactaaattg

SEQ ID NO: 367727 - DNA, 383 bp, Zea mays
  unsure (1)..(383): unsure at all n locations
gncaccattggttgggttgttttaaagaaacacaggcagaaattacaaaaactacagtttgctgtcatcactcaacgatcgtaataagcgtcaaatataaattaaaaaaaaagaaactacaatttgcagcctttgctcaacgaccgtaataatcgttagaagagatgagacatttcgttgaagaacatctgcatcactttcaccgacgacccgttgcggtcgttctcccctgctgcgcgaatcaacttctccgcctcggccgccgcattccgtctcagcgctgcaagctccaaggtatcgccaagcaccattgccaccacctcnggtgatcctctcccttctcacgccgtcgctcccgcgagccacttccacgcacaccccca

SEQ ID NO: 367728 - DNA, 191 bp, Zea mays
aattaacctataacaccgaagcccacacaacctaacaataacaatcttgggttctcaacatatcaatagactagctaacaaaaccataacgataaccctccttccctaaaaccaaagcaagctctcgctccggattagtatccataactcgactagtatggtgcaacaccataacttccaccggtgtgagg

SEQ ID NO: 367729 - DNA, 313 bp, Zea mays
aacacaaaggtcgcacaagtccaaatttttaagttcacaaaattcacataagtcaaatacataagttcacaaattcacacaagtttacatccatagttcacatttttagttcacaagttcaaacacacaagttcaaacattaactccatcgctttcgatcaggacatcggattgttgttcgtagctccaccactaaaattgagacatttgtccgcaaagtcaacatggggggggaggagtcacttgatgagagccgaaatccagttgcttacaaagtttttggaagccacacaacttgaccaaacccttttaa

SEQ ID NO: 367730 - DNA, 271 bp, Zea mays
actagcggaaaactgcagtcattctcatctatgtggatggataatattttgcacatttttgccttttgcgtataataacaaatataaaaatatacatataatgaggtcatgcttaatcaggagctactatagatgtgccaatagtaaagaccaagggtgccttgcaaccaagacagttcaacagaaggaatcagatggaagcgggacagtgagcttgttcgacgttgaatattacggccaccacatttgcaagaagggatgtcgtcaacca

SEQ ID NO: 367731 - DNA, 330 bp, Zea mays
gaaacaaaaaaaaaaattgaagattgcggaaaagatagtctggtgaaaatacaaaggaaaaactggagggaaaaactcctagaaaataaagatcagtttttggttgcgctgaattattattcctgggctattggatcagactctagagagagcaaatgaccagacggcgtccctagatgagctgacggaagtccggccctatgtggctgtggaccaagaagtcgtcgccgatgagcggcgccgccggcccgtcgaacagcagcgggctcggcgcgtgcatcaagttcaaggtcccgccgcgcccgacgtgggcgagggcctgctgcggct

SEQ ID NO: 367732 - DNA, 294 bp, Zea mays
ggggggttgaacagaaaatgcaacattatccatcccagatagttctctttgagtacattcaaagaaaggcgaggagccaccctccttatatgatgtgccaagtgctcacaaagggaatatacagtaacaatttattcaatgaaatacatttcagtctgtcctggtgatcagttgccagattaaacttcctgacacgccttgcccgaactggaggtgtcattgatttgtaattttaacttttgcaagttcagctgcggcgcgagcagcaacaaatgcccggggggcagctgcaat

SEQ ID NO: 367733 - DNA, 361 bp, Zea mays
ggcacaggcgttttctcgcccgctcgccgcgaagcacaaggacgagccgtaccccgacgacggcgggcagagggtcactgtcttcttcggcacgcaaaccggcaccgctgagggctttgccaaggtccctactcaaactctgctcctctgtttgctgtgtttgcggtcccttctacagactacagccagagctcggtgctctgctcgcttgcttgcaccgctggctaagatcggatttgacggcacttttgggcgtggagatcttggtaccgtccagaagaagctcaaatctatttcatacacaagtgcatttgattttgttcctgatgttaggctgacctttaacaatgcgatgacttac

SEQ ID NO: 367734 - DNA, 224 bp, Zea mays
aaaggaaatggcgccaaatctcgcaattcacatagaccggacataccgtttattcaaaacaacatcaacacgatgcatgcagctttacccatcctgaaaaatttgtagctcaatctaacgctggggaagcttgatcaggggcaatggcccaatgaggcccccttaacttcctgattgctgctgcttctgggcatcccccgggctgggggggttgaacggggcct

SEQ ID NO: 367735 - DNA, 272 bp, Zea mays
gggtgacctaccgggacccaaattaccggattttaaggaggctaaacactggtcatgctatgggaaaaaaggaagtttaatttaaaattcccttatgttattgattcaccgagttaattgtttaccctgggcaatggtgatcaactaaaagggattagggttccatcagtttatataaatttttttaacaaaattattttgttaaaaaccaattgggtcattagggcataaaatttaaccccctgcgaaacctttcccgtttttttttaacc

SEQ ID NO: 367736 - DNA, 303 bp, Zea mays
gttaagccctacagttcgtgcggtattattggcaaacagacgacaagtcacaaggagcgtattgctactactcattaacgcggagcttattgtaggagtcttgtccttaacaacaacacatttctcaaagcattgcacggcagtaaacctaattcccacctacaaggcaaggtttctgcattagttcactttggaatgctggttcaacaaactagtggcgggcatgggtgtgctcaacctctccaattatccttggacttcctgacctctctcattgcttcaactggagaggtgacactgaat

SEQ ID NO: 367737 - DNA, 304 bp, Zea mays
  unsure (1)..(304): unsure at all n locations
ttttnnttttnttttaacaacaaaacttgttccacggaagagtttattaaatgtgtggaggctacacaaccaggagaatacaccaaaaccaggaccatgttcacactgacatgtacctgcacaatatataatacttacattacactggtactgctagtaccgctagctaactattagctatagtatacaattcatcggagctctccatggccatggcccatccagatagattcagctgcttgcggacctagccttatgtgcatcaatgaaatgagcctggtggccaaagatttttcttgaatcc

SEQ ID NO: 367738 - DNA, 245 bp, Zea mays
aaatggaataaacatttccggggggggttttttaaatacatgggggctacaaacacaataaccacaccatctgcctgcgttagcagatactcaaaaggccttccctgtatgaaaacactaaacattcaatccttcaaggggatcgaccaaggtatattaaatttattggcactcaaattccgtaatgaaatgtggccacgaataatgacaagccaactttgattctcctcccccggggatatttt

SEQ ID NO: 367739 - DNA, 229 bp, Zea mays
gaaaaaaactattgtactttcaaagttggcattatcaaatgtcagggcgactcgaccaagaaaaaaaaaaaaaaaaaaaaaaaaaaaaggggcggccgccctttttttttttttttttttatctaaacaacacatgtaaatatgacctttatagatcatgtggtcttacaattaaggaagaaaaagtgtaacaagggctttgaaaaagagaaacaccccacaggaaact

SEQ ID NO: 367740 - DNA, 357 bp, Zea mays
  unsure (1)..(357): unsure at all n locations
tcccacgcgtccggcggctacaggcaaggaaacaggatctgtcacggaaggtatgtacacattacagtaaacgttgttcgtagaacatgcactttgtggagtggtctttgaatgagatgcgtttagaattaccttttcatgcagatctcttgttcagaacctggttgcttagtccattcttgttttgggttgctactacaaaaaagcggcaatgctttatatgaatcgcctcttactaatatccagggtncaaatggtggtccttcagtgaccagactaatatttgagcattaatcttatttgtttcacagtcatttcttgtttatcaatatgaatgctatttttctgcgagtggac

SEQ ID NO: 367741 - DNA, 299 bp, Zea mays
  unsure (1)..(299): unsure at all n locations
cccacgcgtccgcccacgcgtncgnggaggcnttcactgccgcgagggggttctctagcgaccagcagcctcgcttgctcatcaaggatatcatgctgttcagacttcacatatagccactcctggcgtcccatacatgctatgaaactccatcagatgcgtgctgtgagctcaatacgtataagttgtgctgcccctaaacctgcaaagactcctgctgaagaagaatggaaagttaagcggcaactgctatcacaaaagcgggtaccaagtgccgatgtgaaggaagcactgcgcct

SEQ ID NO: 367742 - DNA, 204 bp, Zea mays
tcccacgcgtccgcggacgcgtggggccgagttgtgtagacttgagacaggactgtgctgtgctgtttggctggtaggtgagctaaccagtgttcagctggtgggtgagctgaccagcacgtcgggttcggctgttcttcctgatgtcagcgttgtacgccaaggttggccaacggcatcaatattactaatagcatctaggct

SEQ ID NO: 367743 - DNA, 359 bp, Zea mays
aggaaaaactggtctttttgtattgcttaaaagaagggcccaggccaaatatttatttttttagattacaaccaaggaccatgccagtctgatcctgaaaagatggccacgaagtctcctgggaacctaaaataatgggctaccaagtggccggaaaactcggtttgaaacaagaaaataggatctactaacagacgctttacattatttaacagcccccctcaacctgtaaaatctggagctggcttgatttgcaggttggaccgaaacttcttgaacaatgatgaagagagacctttggtaaaaatatcatccaactgaagagatgaaagaacatgtttcaccttcacctttcctaa

SEQ ID NO: 367744 - DNA, 239 bp, Zea mays
ggggaaacacctaaactaaagggggggggaaaaaaataaggggaaagccaaactggtttgttaaaaaaacacaggggggggggccctccccaattccattaaaaaaaaagggccccaactcaaagggggaaaaaaaggggtttggactagggcccagcctatgccacttggccttggggggggcatacaaccccaatttcccccctggcccgggggaaatcccaattcctaacccctaa

SEQ ID NO: 367745 - DNA, 230 bp, Zea mays
caactgggaacaaatttataccggggcagattataccgatttttcaatggacacaccaaaaagctttaccataacttaccatatttatggcccgaaacactcctaaaatatatttctagccgcaacatgcagctgcgggggttttacccacagcctagaaatcttaatcattacttgaaaattgggggctgaacatacgggccattcaaccagccattggcgaccttttt

SEQ ID NO: 367746 - DNA, 395 bp, Zea mays
ggaaagcatgtacggtgaagagcttctgtcaatggccagcagtatccttgtgcagctatactggcgcaccagggatttaggatacctacttgaagcaattttgatactggagtttggattgactgttcgcaagtatgtctggcaatacaaggttactctggtccatctgtactcttacctgggggcacttcctttagcacataaatggtacacaaccttggaagtgaaaaacattcttctagagtctgttttgcatcacatcttgccacaaatgttaaattctccctttttgcaacaaactgctgatcttgttaaggattatttgaaatttatggatgatcatttgaaagaatctgctgatttacgtgtctcgcatatagacaccgtacttactc

SEQ ID NO: 367747 - DNA, 189 bp, Zea mays
tttccacgcgtccggctgcccacggcggaagggcgcacaccaaacctatacggcataccatatggagcaaaaataagacgagatggcggacctgcgctcgcctgaaacggccggcgcccgcacggctctcgccagagacactgaatactctgcacagaaacacgcccgcgatagttaggtgcgcctgtg

SEQ ID NO: 367748 - DNA, 445 bp, Zea mays
  unsure (1)..(445): unsure at all n locations
gaaaaacgacaggaaatacgttgttgcgattaacaaaagtactagcatacgttgttgcgattaacaaaagtactagcatcagcacgtagagtgcataaacaaccactgaaccagggtaagtaccaacgagacgaacgaacggttgaccagtaggaatcaacctatccacaccacaccagctagcacgaggcgacgtcagacgtaaattctgacggggacggaaatcgagccggcggagccccagtatgcatccggcacgaagagaaaccctttggcctggaacccatcgagccgccgggcgaacggtatggtgccagacgccgacagcgtgagcgctcccggcgcaccgncgctcaccttcattttatacttcagctccacctccacgccatcctggaagcgcgggccaaggcagagcagggacagcgagcgcccctgtagcaaa

SEQ ID NO: 367749 - DNA, 356 bp, Zea mays
tttctttttttttttttttttttttttttatccaatgggggagctctttaacagggtgggggttataacatttagttaaaacaactcgagatgtcacagtcctgaattaagcatttcaaacacgatcaaccaacacgataaaataaccacagctcaaactccagagagaacatacccacaaacacacaacatcacaattgatcggggtagctgtcctttgttcccattttggtagccaggcactgagccatatttgaaccattgggccatcccaaacactaggcgattcttaaccaaatggccccctccccgctcaggctcggctctggagatctcaatgcttctgaagcatgtcc

SEQ ID NO: 367750 - DNA, 199 bp, Zea mays
ttctcgcgtccgggcggaggcagcagcgccggcgccgcagtagcaggcgggcggccccgcccgcgcgccacggagtcgtggtggaggaggaggaggaagaggaggaggagcatcgggcggcgggtgttccagtagagcttggcggaggcgttggactatgcccagacgatcgaggtctttagggagtacagggtaaaaa

SEQ ID NO: 367751 - DNA, 247 bp, Zea mays
ggccgcccttcttttttttttttttttttttatgaaacatttttgggggaattaataaaaaccctgagggggaaaaaagcatatttgttttcactgctgaaccatgtgctatatttgagagcagcaacattttacttgctcaaattagtcagcccatgcgtatcaactactatacatggatgtggttcctacaagctgggctctccattgctttgggattggtcgctctgacacaaaacaccgaaaa

SEQ ID NO: 367752 - DNA, 94 bp, Zea mays
tcctggcccggaccctgaagcaccacaagagggggggctttaaaacccatcgtgggcaccatcaaacagaaaaaaaaaggccactacacaggcc

SEQ ID NO: 367753 - DNA, 389 bp, Zea mays
ttcttcacgcgtacgcccacgcgttcgaccacgcgtcctgttggagcattttgtgagggctgtaagttcaagcaacgataagtattcattggaagaaggtacagtagcacggtgtcggcaggttgatgtagccattgaggatcagatatctcgtgtagagaaagaaataaatggttctttaatggacaatggcgggcaagggctcaactgggtgaaattagatgacgaagagcgagatgatctagttgctttgctttcaacacctggagagttctattcagaaatgaagagcacagacatcaatgaccgggttctatctagacgaaagaatgtgccaattggcaagaacgatcagagggatccacctttaaatcttaaagacatatatg

SEQ ID NO: 367754 - DNA, 274 bp, Zea mays
ttttagcctgggagatccggtggcgactacggggagtctaagaggagggaggcagagcttgcgtcaagcaggctccttgacccggagttcaagccctcgaaactatcccaggaccggttcgacaagtctaaggaatcacacatgaaacgggtactgataactgaaaagcccaagatataaaagaaaaccgataggaaccactgagagaagtatcaaagtatccagcaattatatatttcactgataaggatgcatctgatgatagttctgctag

SEQ ID NO: 367755 - DNA, 78 bp, Zea mays
ttttatcgtaggatatcagcagtggaaaggggggttttttagagagtgcaagcagtgcaaacgtccatgggaataggg

SEQ ID NO: 367756 - DNA, 308 bp, Zea mays
ttttaacgttcgttatcaggtttagggaccttggttttttaaatgccgcaagcagagcttacgtctaggggaatagggtatgactactgccaacgcgacgaatatttgcatcaacccgacatgataacgaactgtggtgcccacaccgaggaagctgagataggttgtagacgtttcatccccaatgcattgtacgtcaaacgggatataggtatgcttggatgttgacaaagcctcaaacatgttgaggaggaactaaatgtggatatcgcaatacgttgatctcagatgaggcgagacacattact

SEQ ID NO: 367757 - DNA, 373 bp, Zea mays
cactatattggctgctgccccggctgcagccgccgcgccgtaaccggcgcgaccaaccccgccttcttttcgttcggcgagagcgcaccccgcgggcgcccatattcatatctcatggaggccaccccgatcttaatgaagccaccgtgttcggctgccgattgttccacccccaaccactctggcccccggggacttgccaacctatgaaagcgtggggaccgagactggggccgtccagcatgaactaccctcgcacttacgggcggtccccaaacgggccaacgctggacgaacaagcggactggtacgggtgcaagcattgggcctgtaaaaagtcctgatgcgggaagagatatggcccttgtttttc

SEQ ID NO: 367758 - DNA, 171 bp, Zea mays
tcgtttaattgttcgttagcacgtctcggggggttcgttttttcgatgccgtagacagaacttgcgtctacatgaatagggcatcaccaatgccaatggtagaaatattagcatcacttgagacgaaaagcactgaaggcaaagacttattaagttcagaaatgttgtaga

SEQ ID NO: 367759 - DNA, 92 bp, Zea mays
gccatgtcttgtgatgatatgtaatcgtgttgtacatgtcttttccttcctttgatgtatacagaaatttggaatgaagtgctcattgattg

SEQ ID NO: 367760 - DNA, 110 bp, Zea mays
tttaatcgttcgatttcagctattgaaacggacgcattttagatgacctaagcatagcttacgtcctgagcgacatggttgcattaatgccaaccgtcgaaaaaatcgca

SEQ ID NO: 367761 - DNA, 320 bp, Zea mays
tttaacccttcattttcagctctagggacggacgttttttagatggcgcaaccagtgcttgcgtcctgaggaacagggcatgattaatgccaatgctcgaaataattgcatcacctggaacgataagagctgatgtcatacaccaatcgagttcatatagattgttgccgcctcaacaacaatgtattgttcggcaaacaggatattgggatgcttggatctagacaaagctgtcaccttgatgagggggaacataaggtggatatcgcaaaagtttaaccttagatggggagagttacatttactgttggtgaggccgc

SEQ ID NO: 367762 - DNA, 318 bp, Zea mays
ttttagtgttcaatatcagcttttggtaggggggttttttagatggcgcaggcagtgcatgcgtccagaggtatagggtagaacgaatgccaaccgtagacaaaatcgcataaactgatattaaaagcactgaaggcccaagtcaatggaggtcatataggttacaaacgctacatcaacaattaattgcacgacaaacaggatataggctatgaacggatatggacaaagcgtctacaatgacgaggaggaactaaatgaggatatcgcaaaaggttaaccttagatggtgagtgatacattactgactggtgaggc

SEQ ID NO: 367763 - DNA, 322 bp, Zea mays
ttcttacatttgaatcacattgggggggctttttaattcggagcaggaaagctctgggagggggatactttgtaagcgagacaaattgcgtaacggactataaaagctcagggtgcacaaacagagtgcaggacttcaatattcttgactcgtgcgcatgaaagtaaactccctcaatgaggatatagggaggcctgaatgctgacacagtggcttcactgaagtgaatgcatttatggtggataccactataggctaacctcagatgttcacagagacactacctgaaggtgcccccccaacattgctcagattatttgac

SEQ ID NO: 367764 - DNA, 314 bp, Zea mays
tttttagcgtgtgcacaatcatccgtctgcgggggccctttttagatgtcggaggcagtgacattctccggcaatggggggcaagacgagggacaaggcgaagcccaactgccgcacgggcctttggtagctggggggggaccagaaggtccgggactacaaggtgcttgacggtcacggatgctggagttctctgtccaacaaagccgagggatgatcttctacctggcacagcagcttccactgtagagggcgtatggaatgtggttatcacaaaagggtgatcttagatggttacagatacactacttttt

SEQ ID NO: 367765 - DNA, 248 bp, Zea mays
tccttttttttcttttttttattgtttctttttttttgggggtttttttttttggagcgggaattccgtcccctggcgaaataagccatgcagatttacaaaaacgtcatttttcagaattaacaaccctaacccaggtgccacacattgtttttaccccagttcaaaggaatataaacattctgcttggcacttggcaggatcagttcatcactgagaaggttcttttttgacggggttatcaacca

SEQ ID NO: 367766 - DNA, 362 bp, Zea mays
tttaaccgttgactttcagcttttgacaacgtcgtattttggggggcgccaccagagcatacgtctataaccatgggatataactaatgccaaccgtagacaaaatcgcatcacctggacatgaaaagaactgaagtcacacatccatcaagttcagatatattatagactctctcatcaacaatgtattctacggcaaacgagatagaggcattctttgatgtaaccaaagccctaaacatgtattggatgaaccaaaagtcggtattgcaaaactttgatctcaaatggagagatatccattacaggtagatgatgccactgcctaggtaataataatgaactgttgagtgtatttatag

SEQ ID NO: 367767 - DNA, 344 bp, Zea mays
tttaattgttgaatttcaggtatgggaaccgtcgtattttagttggcgtaaccagagcatgcgtccttgggaatggggtatgactaatgccaatgcgtagaaaatattgcatcaactgggattaaaagcactgtgggcacacactaagtgagttgagatagattgtagacgtttgaaccacaaaggattgtacgtcaaacatgatataggtatgctatgatgtagccaaagcctcaaacttgttttgggggaacttaatgtgggtatcgcaaaaggttaacctcagatggagagagatacattactggatgaggatgacgcaacctagcgcataagattgaacg

SEQ ID NO: 367768 - DNA, 290 bp, Zea mays
tctttaaactctggatttccaggtatagggagggacattttttagctggcgcaggcagagcttacgtcctgatgaatggggtagtattaatgccaatggtcgaagaattcgcatcgattgacatgaacagaactgaaggcacagactgagggagttgagatagattgtagacgtctcaacaacaaagtattcctcgtcaaacagcacatagggatgattggatgtagacaaagcgtcgaccatgatgagagtgaacacaaggaggatatcgctaaactttaaccttagat

SEQ ID NO: 367769 - DNA, 393 bp, Zea mays
  unsure (1)..(393): unsure at all n locations
tccacgcgtccgcacccagtccgctgcgcaggccagacatccgcggcgtccgcctccccggccccgatcgatcggaagcttcggcttcccctgacacaaggccggcgcgaaaacgcccccacaaacaaacggcggaccattgccgcgcgtcgattcgaacccgccggggaaagcgccgacgccgtctcaccccgcggaggcgaaaccctagcgatggcggcgtccgtggacgctgcggcggcctggcggtgacgccccccgctgtggaggaggcgggcgccgctgttgagcaggccaggacgctcatcggcgcgctcaacctgctttcccgcaacctgccgctngcccccgacgtcctgggcgcggtctcgtccatctaccacgatgggggtg

SEQ ID NO: 367770 - DNA, 438 bp, Zea mays
tttctacgcctccgtgctctcgctcgccgaggcctcttcgcgggccgcagcgcggttccgcctcggtggccgccggagctgctgcctggccacaagaagccgtcgctctcccagctttgaaccggttccgatccgcaccacggagaagcccccgcctcgggagtctcgcgtcgccccgatgaaggtggagctcgccgcgcagacctcccagacgagcacgcccctgccgccgtcccctgaagccgcttttgcgtcgcccccggcggaggatgcgccgctcctccccgacgcgggcgtgcggcgccgggcggcgtgcgggcggttcgcgcagcgcagcggctccttccgccgcgaagtcggccgggccggcgacgagacctttcttctcacgaggctcaccctgatccttctccgctaccttgggctacagaaggattt

SEQ ID NO: 367771 - DNA, 231 bp, Zea mays
tcctttttcctctttttttttttttatttttttttagggggaaacttaaaacgcttgagtgtctccatcctacacatgataacagagttcaaggagcttgtaacatgggtagcaaaatttaacgatgcaacaaaaataccaaatactatcagagcatgcatgaggtaggttccacagtagcagaacatcaagttgtatgtgctcaacggtagcggcggagggaaagggcct

SEQ ID NO: 367772 - DNA, 304 bp, Zea mays
attcgcaccccaaaaaccactgggctttattataccccgaattaaggggtcccgcccaacaggggaatgaaaacccaaaacaaccttgtccaattccccggccgcataaatcaagtatagtaatttgattgatgcaagcctcaatggaacaacttgtcaacaatctgggtctacttgcccctcttggaaatcttgggaaggaaggacttaaaaacagtttggactgccttgctcggctgggccccaatgtcggcaaacaacttgttgaaactctccctctcgtaccaaaggaaaacccccccca

SEQ ID NO: 367773 - DNA, 251 bp, Zea mays
accgaaaaaaaaaatgttttaccaaatcccatgtttttttttttaggggaaacccggccccctttcccccccaagggtggggggctttttttttgtttttcaaaccgggcgggggcccgctcaggcttggttatttttttccccgggtgccccagcaaccttgggtggggggggtgcatagctcaccctggtttccctaatgtttttgccctggctggactgctcgtagcggacaaagccttttttaattt

SEQ ID NO: 367774 - DNA, 218 bp, Zea mays
aaccaagaatttccccataaaaaataatggtgtactaaaacaaacatttgccctggggggaggacaaaacttcccaagttttttatagtttttacaaaatcggagccccgttagggttttttaaccccaaaatttaaacaaaattttaccccgcgggaaacattttctcaactgggccgggttttttaaattataaaaaaaccgtggaacaaaggccg

SEQ ID NO: 367775 - DNA, 179 bp, Zea mays
gcaggtgcagtgcagctagctcgatcgctggccgggacctcggttaatagcgtctcggcctcgcgtgagctgtgcgtgctttcgttaatggtagaaataacagtagccagtaggacaagacagactgacagagactaactagctagctaggagcctaggagtagtacgtggttaataca

SEQ ID NO: 367776 - DNA, 239 bp, Zea mays
tttttttttttttttttttttttttttttttttttttttttttttttttttttttttttttttttgggaaaagccaaggttttcctaatttacaaccccccatgatgtccgcaaaatttaccggcctgtaaaatttcccctttcctcctggctggccaaaaacaaaccgggtgggaagccaaccttatatgggctttgcatcatgggagccgctatctaccctaacaagcgacatttcc

SEQ ID NO: 367777 - DNA, 151 bp, Zea mays
cccccccccaaaatctgggaactttaaatttttctttaaaaggcttgatggaaaatgattttttcccctaggacaaattctggaagcaaaaaaaccaaattttccctcaggttaaactttgggtgggttgcataaaccattgggctttcca

SEQ ID NO: 367778 - DNA, 92 bp, Zea mays
caatcaatgagcacttcattccaaatttctgtatacatcaaaggaaggaaaagacatgtacaacacgattacatatcatcacaagacatggc

SEQ ID NO: 367779 - DNA, 188 bp, Zea mays
caaaattgggaagggcccaaaacaagggcccggttttttacccaatggggccaaagaaataacaagtcgggggtcggaaaaaacccccccccacctttgaaaggggaagggacccccccctaccaaagggggggatcttttgaaacccccccaaatccttcctttaaaaaccgggggttttttaaaaa

SEQ ID NO: 367780 - DNA, 293 bp, Zea mays
ggaatatgaactgatttatttatattggactatatggtatgagatattttaatgctaggtacagaatttaatttaatagtgctataggatcagggagatacggttcagctgttggttattgacgatctttctcccctcagtcgctatgacaaaaacatgaccatgatttgaagtcagatgtgtttgagtaggatattctccaccatccgaccaatattattgtaagatagcccccctggttgtgcactgacttgagccagcctcttccactgcagcgtcttctcccttgcgtg

SEQ ID NO: 367781 - DNA, 363 bp, Zea mays
acagcaaattatttttattttggaatctgctatgaccattaactggtgtttgagtcacagaagatatatatatatatatatatatatatatatgctagcggttctgaactgctgatgcttctccacacagcattataatcatgtcactcaaagacagatatttgaccagcccagctacaagcagcgatcacattaggcattactgggtggtacgcgacatcagtgcacgcctctttgaaggcttctattttcctcaaaagccttgccgacctgtaatcatagaagtaaatggacccatcggatgaaccagatgcgagttctctcccgccaagggaaaagctgcacttcacagggaaaccccac

SEQ ID NO: 367782 - DNA, 269 bp, Zea mays
gtctagaaaattatgagtactttctccgatcacaagtacatgtacatccatgtttgtcttaagataaaaaaagaaaattcacaaatactagtcagtcgtggtcgcaatcaaacttagaagcaccttcagaaagggcttactctcccagcaagcttcagcatgaactcgggtacaaggcgccttgcaacaggcacaacgacgaggtgctgggcagcagcgtctggatcctcactgtgtatcacacgggcgatctcttccagcattttatc

SEQ ID NO: 367783 - DNA, 238 bp, Zea mays
aaaccaacaagggtcgctccagctcccccttcaaaatattatgtaagggatggcaacccccccagcaaacttttgctaagttgaactacctcccccatttacatgttttggacaattggattggttccatgctttttttttttttggcctaaaccacccttacaacaattgtcatttgggaccaaatagctcaattggcttttttatgaaggaccaccaatcggggggggccccatgc

SEQ ID NO: 367784 - DNA, 341 bp, Zea mays
ggataccaaattagttgcaaaacttctgtacagatcagttacatttttctgccaagaaacaagaaacagaaaacctttttgagcgccaacacagcccagactgagctgaggatcacctctgacggatatcatggatcgcccgattgttagactcatttcaccagcgcatggtactgtaaacgttttgctaccccgttggtggtgggtaggtgatatcactagccttaaactgtacccatgtggttctttgcaagccactccggatcagcagttcacatggggtgagtgatgaaccagtcctaatcatgatgctggactccaagctgcttcagccaggagtc

SEQ ID NO: 367785 - DNA, 170 bp, Zea mays
aaaaaaaaaaactgcccccaataaacaggggttttaccctttggttccttgggggttggaacccggttttaaaccccaggggttaacttgttcccccggcaaacatttttgcccggcccaaacaaatggggtgtcctttttcccatgaccgttttttgaaaaagcccccc

SEQ ID NO: 367786 - DNA, 476 bp, Zea mays
atgcgtccacgcgtccgctttttggctgcccagctggagtgacagaaaggttgggaatttcaaactgcaactagagctcgctcgagaaactttgctgcagtctgcagtgacaaacgagagcacaatctcttaatgttttggagacatggctgcttaggcgcttgaagaaatgctctctggctcttgcctccttaatccgctcgatggctaggactagatcaagaattgcctggctcaaagatggtgatgcgaatacaaagctcttctactcttggtctcgttatcgaaaaagaaaaaatttcatagccaaaattcatgacggggagcagctagtgaccagtcatagtgataaggctgaggtgtttcggtccttttattctgatttaattggtacagggcagcaaaggtccagaactgtcaaccttgacaccataggactgcagcacattgaccttcagggactcaaacagcaattc

SEQ ID NO: 367787 - DNA, 319 bp, Zea mays
tcaaacacagcacattgtgttcttgttcttaatagcaatacttatctgaaaaatgctcttgttccttgtatcgttgcatccggtgattctgagctgtgaacgtgattactatatacttatttcttagtagccgtgatgagccacgcgatgctgccttgtgagtggggacctttctctaactcgcaagggggcattgtctttagcctgtccaagagttgtgaggttcgagacatcccaacatcatcgtgattgtcatttttttatgcagccatgtgtatccgtctgtgatatttaaatgctctacattagtttaggcatt

SEQ ID NO: 367788 - DNA, 480 bp, Zea mays
tggctcctgtgctccttatttccagttttccacccgacgagaggcaaaagcctcgcgccccacgccggtccggcggcgacccccgccgtttcccgcagcgaccaagacgcgggctgtggtcgcctccgccccgtgcctacccggccgcgggcgtagcagcctcctggaccgcagcgccctcccccctcctttctcccgagcgacttctgatccagccgcgtcgcaacaactggtcgttcgagtctgatctccgccaccgcggcggaacgaggcgtctccggtccccgaggcgattcggtgaattcgaagctcgtacgacgggatcctgttgagttttgacaatgcggggctactggtacgagaccaatggtaaccaccaggaagtggaagatgagtacggagatgagtactatgatcaagatgagtatgatgaggaaggttcgggtgctggggatgagtattttgaggaggaagagccta

SEQ ID NO: 367789 - DNA, 450 bp, Zea mays
aaacattttccctatgtgttcttgattcatctaaacaagatgtggctaataatgtcaaaaagatgatagttgagttggttggtgctcgtgatcaagcattggccaggagctctcctcaacggcatatcttctttgaaacccaacatctctcatctagttttgtttcttctgataatttggaacgccaatggattccgttaatcaagagtcctattatatccgtccttgatgttgcaccgcttgagttggtcctcgactatttaagtgacgtcgcaactgctgtcgtgaagtatagaaaaagtcatgtggatggtactgctgacaaaacccgcaggaaagagcccctgtttccttcagcagcgattaacagttgcaaacaagtgaataatgtttctcaagatagatcaaatggtgtgcctacagcatcacctccatctgggcagttgcagc

SEQ ID NO: 367790 - DNA, 538 bp, Zea mays
gcgagagcctgattgttagcaccacctaaggagaataaagaacttgaggataaagatgagggtccgactgaatatttatcttattggaaaccaaatgtaacagtaaatcttgttgaagacttcacacggtattcacaaaatcaagctctgtttctagattggattatgttcctgcaacattggcaattgatttgtacttctcacccagcctttttgacagcttcaaataataactattaatcatgttaccttgcctcgttagttgacatgcagtactaaattgtagtattggccctatgcctcattggcagtttggcactcctgttatacagttgcgagttggtgataaaacactttcagttcccagtgcaatgtttattttaaacaaggtccacttacaaccctcatccatttttatataaaaactgtgcatcatatgggaatcacaaggtatcccaacaataatgtacctgccatcgttgcttcatatctgaatgtggatccagctacaggcgattattatcctacagtattcttc

SEQ ID NO: 367791 - DNA, 506 bp, Zea mays
gagaccactatccttgttcggattctgtctccatccattatagaattttatcgctagccacctgctcatatcatcatgaatcaacagtaaaagctttgagccaaccaaacaaagaataatgtatagataaacctttcttcattaacaaaatactttacaactagtggtgctggtcggtaagagctctgactgagcaaccatggcggagatagtcaccggggcgatgggcactctcttgcccaagctggccaacctgatcaaggaggagtataacctgcagaagaaggtgaggggtgagatcatgttcctggaggctgagctcaagagcatggaggctgctctcatcaaggtctccgaggcacccatcgaccacccacctgacatccaagtcaagctctggacaagggaggtgagagagctgtcctacgacctcgaggacagcatcgacagattcatggtgcgagttggcgatggcaagccacatagtttcaagggattcattgata

SEQ ID NO: 367792 - DNA, 469 bp, Zea mays
cggtcatccaccgtgcgccgttggctactcgcctgctcccatgctccctccggatctgccctctcggtgatttggcacggtggctctgcgcctccacacctgatcgtcggcctcctcacctccacaagcccacaccgtcgccatcgccccgctcgcctgctctgccaatggaccgaccaacctgggctcctcgctctgcccctccctcccaactcctacgatcaaagtgcacagcttcgccggccccaatgtggctctgtcgaccctccgtcggcacccacgcacaccacctggactgcgcgtagcctctgcggcaccgccgccagggccgcctcttccgcgacggtgcgtcgcccttctccgcctccgcagcggtcgcctcactggaggttgcgctgcgatgggatctgggaaacgcagacagcctcaaccacccacgtggattgttgccctcgcggctgagatgcag

SEQ ID NO: 367793 - DNA, 311 bp, Zea mays
cccacgcgtcctttacgcgtccgctcgccgcagcctgcgccaagattgacgagtacgctgccgtgggagcacccatgagcggcgccaaaatcgtggccatctgcgctataatcgaagacggcgccaccgctcgcaagcaccgcaggaaaaagaggaggaggaggctgtgcgtggacagcacccgcagctacaagcagataggcgaggtcggcattggtaatttcggcgccgtcatcctggcacgccaccgcaagaccggtcaggccgtagccataaagacattccgagggcgagacggcaagaaatccccc

SEQ ID NO: 367794 - DNA, 313 bp, Zea mays
cccacgcgtccttctatgtctgttgattcttcctagggccaaaggcacctcaagtgttctggttgatgataaggatggagggaactacaaattctgttacattgatataacattgagttttcagaaagtagtcgaaaagtggtgcactaaaaagagtgccaatactttctggttgaataacattgagttttcagaaaataactgaaaagaagaactgacaatatgatgttattgatttctacattgatatgcatcctccaccttctggtattttaaacatatgttctttgcttggagcgatacaggtttcatt

SEQ ID NO: 367795 - DNA, 311 bp, Zea mays
ggtcctgcaattattaggaacagtgcatggttgcaactgcaaccccacatgcaacactgcctatgcatgagcatgatatgtgtcttttggtgtgcatacatgctagtatagatgtgcccaccaatgtccccctacacaaatacacccagtgtgtgtgatctgtatatctattctagatagacagtgtttttgtctctcctgtctggtacatgtttccttcagttgaattgcctggcagcgaactctgtattttcgtttggtacatcaaattgttctgcactgtataggaattggtttctgaacatgtcatt

SEQ ID NO: 367796 - DNA, 320 bp, Zea mays
cccacgcgtctggttattgaaaaatctgcctccgacaattcctagcgcgatccagcagctgcctcggatcggatcggattggaccggcgccggaagaggagaggaggcgtggggggttcggggcctgcctcgctgccgcccatgtcccgcatgaaacacctgctacgcaagctccacctcgccgggggccccgccggggccgggggcgcagcgcccgaccaccaccgctcgaggcaccgccgctcggggcatccgacgccgacgccgacgccgggggcggcggcggcggcccccgagccgccgcaaccggcggttactcc

SEQ ID NO: 367797 - DNA, 304 bp, Zea mays
ttattaagttttgccagttttgatcatagccaagcttttgattcatcataatctgatcctgtaaccaatttctctccctatgtctagagcagcctagtggccaatgcaattgatgccctggaactgccgaagggatctgcaattgctattgacatgcctatggatgtcaatgctgttgtgatctaccttgcgatcgtgttggcgggatatgtggttgtctcaattgcagacagttttgctgcacctgcaatatcaatgaggttgaagttatcagaagcgaaggcaatttttactcaggattaca

SEQ ID NO: 367798 - DNA, 73 bp, Zea mays
cggacgcgtgttcttacgcgtgggtgaaaaagtaatggaattatttgacatgcaagaataggcctcttgaggt

SEQ ID NO: 367799 - DNA, 298 bp, Zea mays
ccccttctctgttttccttcaccgcgccaccggtggcgaatcgcggacgccgctcacctcccccatctcctccccaccacgtcgcaaacccatcgtcaccaccaccgcctccggccgcggctcccatccccgcgtggccgtcgcgagccacagcgagcttctctcgtccggtcttccgagtctcggctacctgctccgacgtcgaatcctcgggccctgctgtcgccaccgccgaatcctgctgcactcgctgcagccggggaacgcggacggcctgcgggagcttggcgcctcctcc

SEQ ID NO: 367800 - DNA, 278 bp, Zea mays
catagatgagcttttttatgtttttgccgagacgtgttttttgtgtgtagacatgtttcactggaatgtgtttcttgtaattctgttgtgccatgatcagtgtacaattctgcattgactgatggtacatgaaactggttccccagtattccgtgaaactgcaagccggatttgctgtgttcagattgtgttgttgcagactggttgcctttcgtaaatcagccagattgtatccttattaggtcgttttcatatctctgaggaatggatgattctag

SEQ ID NO: 367801 - DNA, 317 bp, Zea mays
ggcggccattttttcgcaaccaacccctcttcctcgcccactgaaaggttcagaggctcccgttttagcatagcgaccgagacgaaggagtgggggggcggagagctttgggccctggccaggatgaagtttatgagactcggcacccggccggacaccttcttcgccgccgccgactccgtgaggtctgtctgcacggaggtggccacggacctgcagatcctcgtggataactgcctctaccatctccacaaggtaattagctcaaggatcgtcagagatcgtgcccaccctttggcctttattcaggaatttga

SEQ ID NO: 367802 - DNA, 317 bp, Zea mays
gcgagaaatccttgttgtttatctatctacttatctcatttgcttctaccaacctatctatctattatgatacacatttttcttcactcaagtttttgttcaatctggtcatttgtgcttaaaggaaagcctctaacgaagtactgaattgcagcgatacgtttgcagtcttcaatatcttaactgtagtgtactgtaaacttatcatatctactgatccacataaactgttataacaatgtctattcatgctgtccgcagtttactatgtcagtcagttgaatgctctatgattgtgtgatcacagaaatgattct

SEQ ID NO: 367803 - DNA, 313 bp, Zea mays
cccacgcgtctttaaagccgtgtccatggcgcgccgttctaaaccctaaacctttcgacctgctttatactagacctcatcgagaatctcacgcgtcggcgaccatggcggcgtctccgtcttctccccatgccgcccccggagttagcggccagagcctgtccccctcagcgccgtctccccacctccccaactatttcatgtggagagaatttgtctggggaggaatggcaggtgcatttggggaaggcatgatgcatccagttgacactctgaaaacaaggcttcagagtcaagctataatgacaggggc

SEQ ID NO: 367804 - DNA, 116 bp, Zea mays
cggacgcgtggttttgaactggcgcctccactgtacaacccactctgaatcgcgagactactcgtgtgcatgtttatgcgtgagaattgtgatgagatcatgcgcattgattaact

SEQ ID NO: 367805 - DNA, 315 bp, Zea mays
cggacgcgtgttcttggccaccagctttgaccgcctcccctcccctgcgctcctgttcctccataccccacccccccgcaggagcggcgcggcggcggcggcggcaaagccaaaggcaagatgttcgggcgcgcgccgaagaagagcgacaacaccaagtactacgagatcctcggggtgcccaagtcggcgtcccaggacgacctcaagaaggcctaccgcaaggcagctatcaagaaccaccccgacaagggcggtgaccccgagaagttcaaggagctcgcacaagcctatgaggttttgagtgatccagag

SEQ ID NO: 367806 - DNA, 290 bp, Zea mays
ggagtagatctttttgatcggctcttcataccagttctgttttatagccatcaattcatgaagactaatgtcacgacttgctttctcaacaaattgaccttctggatggtttgcggcgcggaggccggctgcggggttccggggcagcgcgtctcgcggaggtgcgtagacgacggcggagcggcgtcctcacctccatggcgtcgctgtcgagcaagcaccacgttctaatccaggtgctgctcgcccgcggcccgctctctgagcgcgacttccacgctttcatcgat

SEQ ID NO: 367807 - DNA, 199 bp, Zea mays
ggaactgctgccgccgcagtttaacaggtctgaacctccccttcgccggagacagccgcgacttctcgagcggcatggtactgcctccccttcgccgacccaggaggctgcccggcggcggcgctctgccgcgacggccagggtttcctcgtcgcccgttgacgcgtccggctgctgattgatctgataaagaatggta

SEQ ID NO: 367808 - DNA, 466 bp, Zea mays
tgatgactcacagttcaggaatgtattttcaagagcatatatcagggtgagggagtatgatgctagatcacgaagcagaagccgtagccactcgtactctagaagccccagctacagcaggagcaggagtccaaaatctgtttctcagtcaccctcatctgtggatgaaagatcgctatcaagatctcgatccccaatttcttctccttctcatgcaagatatgcgacaagccctaagagcagaagcgcatcccgttctcggtctcctgtgagatccgattgaactttgagagcccttgaagcagtgagcagccccagggagaagaaaggaacttgagagtatgccgtgccatcacaatggtccgagtgattatgctgttgccactgctccctcacatttaagaggtttcctcttatttagacggagcatttaattaacattatcttgctaaagagagacttatgc

SEQ ID NO: 367809 - DNA, 151 bp, Zea mays
ggaccaattcgcatcggcatcgaacacctctgccctctgtaaggagacccaaccccaccgcgcgcatccatgcccccaacgacggcggtgcgtcgggctccctcgccgcacgccgcggccggagcgaggctcaccgcggagcaagcctctg

SEQ ID NO: 367810 - DNA, 495 bp, Zea mays
  unsure (1)..(495): unsure at all n locations
cccacgcgtccgcccacgcgttcggggcggcccacgaccggatcggcgacttctctccatccgtctcctctctcgccggcgttctgccgcactgcaaattcgaattcgaacccgaatcctcctcccccctcctctcggcgagaggaggctttgtgagggccgccaggatcgacaggatgcagaagaagccggatgacgccatggaggaggaagcngtgccngcttccgctnctgggccggagatagggttctggttggcagcacggcggcgactcgccccagaagaccccttcttcgctgccggggacctcgagcgcgagctcctggccaagcaccttgccctggatctttctgaagatgaccgcaaccagcttgagaagatggaagtagccagcacgtggtaagaacttatatttgatgacattgattatccattgcagggattctagtggagaacaccgtagtagctaatgattaagctgaaatcctgtctct

SEQ ID NO: 367811 - DNA, 503 bp, Zea mays
cccacgcgtccggtgcagtgctggagcgctccccttctcctcccttctgaacagcttttccgcccgtctccactgttcactctccagttgcgacttgcgagtcttcctgcaactagcgcgcacaccgaattgttggcaagagagaaacccttcctcgtcccgttcaaccggcgccgccgactcgcgtgttcctgcccgcgtccttgttcttcttgctgctggacccgctagtggggatcgacctgatttctcctgtgctgtcaattggatattacccaggctttcaaggtagaaaagaagctttttgttccatcatggccttatcaactccagcgtctattttggttgacgagaaccaacagataaatagaggtaagagggccgatggaccaagggccaaagggctgaagccatccgagaatcctggcaatcaagggaggagagctcttaaggatttgtccaacttctctaaaggcactggtttgaaggacacttccaccctg

SEQ ID NO: 367812 - DNA, 462 bp, Zea mays
gaggttacaaagggtgcttggtattctccacgtcagtgtgtccaataatcctaaacaaggcaatatgtatttgctctttattatcaattcatgtgaaaatctgaaagaacgtggagcctgaaactattgtctggtgggctggtggctgattttcattcaattgggctggtacacctctgttttgactcccatacaccaagaatcgaggggcgcctgcatccgtgggagtaagactcttcggctttgaaggaggagacaaaagcccgaagggcagacacattgccttctgttcatgttgcttgatgttgaaacaccaaccactcaccagtcatttactctctcacttgctcattggatcatgtgcaccaccatagttagaaacctttatgtcacagttagagcaatgcattgggattttttttgctatgcacagaatacttgtatttggatctggcataatta

SEQ ID NO: 367813 - DNA, 183 bp, Zea mays
cggacgcgtgggcaaacgcgctttttaaaatcactgatacaatggccatcaggggcaggatcggcttcgcagtgctctgcgtcgcgctgatgctgcacgccgcggcgacagcggcggcggccaggaccgtgcctatgccgggcgcctcctcgacgtccaccggcagcaccgcgtggctcccgg

SEQ ID NO: 367814 - DNA, 422 bp, Zea mays
cccacgcgtacttatttttcaagaagtgaacaagcatctaattgccagcccaatgggcaaacacagaagcgtgtaaacaaatctgctttgtcacctgctcatctccaagcggttcttagattggattccaagaacggtgtccaggtttttgaattctgtgtcgacggcccaggagaatccatttccgccaggaattggaaaaacggtgatgagttgagctctatatacaccttccatagtggcgggaaacggtccagtgctgctggaaggatctccaaagatggaggctgggatttacccccaatcgttgggcaggtgcaggtttcatcatactgatgctctgaagttggaaaagacggtacggtgaataactctgtcgtcaccgagtttgttacggacgacattggccatgctaggcggat

SEQ ID NO: 367815 - DNA, 435 bp, Zea mays
tcgcccacgcttccgtttacgcgtgggctgctatcagctggttgctgggaaggataaccaccagtggcatgttagcaaacgccccagcctgcattcgatgggccgccatgcgcttgcgaaatcggcagctctgctccgggaagtcaagaacaagcaaaggactactaaccttgtgaagcgactggagcctcttggaggagggacaccagtgacatacttggggatcccacatccaatgacagggatctactaccccaagggctttgaatgggtcatggaggatgtccccacaagcgcagcttcattccagcagtcatactggttcaggactggggaggcagagccagcaagctctactacatcaaagaacgattctgcttcctttgaccatccatttgcttgatgtatgagaggctttgcactgggaaaaaacac

SEQ ID NO: 367816 - DNA, 348 bp, Zea mays
cacaaatatatattttgaggatgaatttctgcatagtgctgccgacttacaatatgaaatacttttaaactgcttcttggtatcatttcaactcatctgatgcagatactacaactgggcatcaagcaaaataacaaggttcagcaaaaactgcatggagttacccactctagtcgtattcagatgcctatatcttcagatcctcttaccgggttgttccaaactgtgtacctaccacttgagcttttcgcgatgtgcatcttgtcttctttcttctttctggtatcgactgaaatatattctctgggcaggtttatatgtgaccacatcaggatttgactcagaaat

SEQ ID NO: 367817 - DNA, 346 bp, Zea mays
cggacgcgtggtcggacgcgtggggttcccaaggcaggcagcaccaccaacataaaagaagaagaaggagaactgaagcgaccaataagaattctctccactcaggccactcgctcggcccattccccggaccccgatcgacccacccatccatccatcatccatgacgacgggggagggggcagaggcggcggccgtgccgcgggtggtctccatcctgtcggcgctgctgcagcgcgtggcggaacgcaacgacgccgcggcggcggcgccgccgccggctgctgctgctggccccccggtactgtcggcgttccaggggctcaccaagccggccatctccatc

SEQ ID NO: 367818 - DNA, 187 bp, Zea mays
aggacgcgtggtctgacccgtggggttcccaaggcaggccgctggaccatcatataagaagaagacggagaactgaagcgaccaataagaattctcttcactcaggccactcgctcggaccattccccggaccccgatcgacccacccattcatccattatccatgacgacgggggagggggcagag

SEQ ID NO: 367819 - DNA, 115 bp, Zea mays
aggcggcagtcatcgtaaccaagcgaacccatccatggcctacgctgctaccgccgactacctcaacgtcggcggacagatcttccagaccaccaacgtcacactttcccgcgcc

SEQ ID NO: 367820 - DNA, 184 bp, Zea mays
gagagccaatattttttgatctgtgttgcaccctttcgcttgaactaatggcagatccaaagtttgtggcttctgtccaaacatataaacggttttccatccaaaaagggcctcactagagctacaatggctgcccctagacacgtcaaactttgggacacagaatatttgataagctaactac

SEQ ID NO: 367821 - DNA, 406 bp, Zea mays
ccacgcgtccgcggacgcgtgggttcgggttctgatcacaaatttttgcaagatccgcaagacaggggatgccatgaatctgttccagcgtatgggtgagtggggctgctcaccggatgctgacacgtacttggtgctcattaggagcttgtaccaagctgcccgaacttcagagggggatgaaatgatgacgtggatgcggtctgcaggatttggagataaacttgataggaaggcatattatggattcatcaagattttatgtgggattgagagggttgagcatgctgtcaaggtattccgtatgatgaaaggttatgggcatgctcctggagtaaaatcatatagcttgctcattgagaagctggccagacacaatttaggggatcgttctaatgcacttttc

SEQ ID NO: 367822 - DNA, 456 bp, Zea mays
ggagaagtcacggtctgttccgtgggcggctgctagggacgagggcctcaaggttgcgctgcggcgggagaagaagccgcgggagccgacgcgcgcggagaccgagctggagacccacgagctgcatcgcctgcggcggttggcgcgtgggataggcaggtgggcgcgggccaagaaggccggagtcaccgacgaggtagtcaaggaggtgcgaagggaatgggccagtggtgaggagctcgccgccgtgcgcatagtcgagccactccgccggtccatggatcgcgccagggaaattcttgagattaaaacaggaggcttagttgtgtggacaaaaggagacatgcattttgtctacagaggaagcaaatatcagcaaaacgcaaagcatagtcacacttttctaactaatgttcataaagatgatgcttttcaagaaaatgatcaaagcatttg

SEQ ID NO: 367823 - DNA, 460 bp, Zea mays
gtttgctcactctctcgcatggccagctgagccgtcactaaattggccactccatgctgttgctggatcgggatttgttattgctgaattgatggccatcactggactcagatagtcaggtttgccagcacggcagcaccaaatcgacctctgctaccatcagattgatgttcctaggcactgaattgaccctcatcactgttgaatcgagctctgttattgttggatcaagctacagtttgaggcatggcgagcgatggcaagggaagaaaacacctttggaagattaccttcctttgcctagcaaggtgaggcgagcaggctaggctaatgctatatacagcagctctcctatcacatttcctgtcacaccttctatttcaaactccactctacaaacagtgctatctacattgcaaaacagtattttgtatgatcacatgcacgatctgttggacac

SEQ ID NO: 367824 - DNA, 312 bp, Zea mays
cccgtctcctcttctctctcgcacaatgccattgcgcggtgcgtgagagggagtcagacacacagacgaggaggaagagggggtagccagccagccaaaggcgaaagcgagaagaagaagaaaaaaggacattgcgcccgtgcaaggcgtgcgggcaggccggcgatgctgcggaggactgtgcccgaccgggccgcggactcgtccggctccgccgggggcggggacgcccggccccgcgccgactgctcctgagccgcgctcttcgccgtgccgcgcctcttcgtcggattcgccgccaagcgcgcgccg

SEQ ID NO: 367825 - DNA, 335 bp, Zea mays
cccacgcgtccttccacgcgtccgcccacgcgtccgcgcttggcttggctgcgctgcgctgcgcacaccgaacccctcgccgtcgcggctcgcctcggctccgccccgaccgaccgatcgatccggccggcggtgggcgccatggcctcccccaaccccgaggccgcggggctgcaggccgtggctgtggcgggggcaggggagggcggctcgtcctcgtcgctcagcgccgttgcgggagcggctgcgttgtccggggagctggtgcccaggagggcgttggcgctgcgcaaggagcgcgtgtgcacggccaaggagcgcatcagccgcatgcc

SEQ ID NO: 367826 - DNA, 307 bp, Zea mays
gggggcctaaactagatgggtaatattaagcaacagggggggaaaccacccaacaaaggcttgtaaaaagtttgttcccaattagctggtgaaaatcaagtttccgcaaaagttttggcccccccattgttgtcaggagctggcgcaactgttgttccaggggccccggcaggtgcggcaaaatgatcctgggatgcaacaggagctgctgcttcaaaaatgtaggctgaaggctgcccataacttccactaccataagcatcgccataagactggtggtggccataacccggggggcttgcagggg

SEQ ID NO: 367827 - DNA, 375 bp, Zea mays
tttgtcccctgctccattctcagccgccgccaatcccttcccgtgctccgcaaccgctgagtgagaagaagagatggccggcaagggcgatggcccggctatcggcatcgatctcggcacgacgtactcttgcgtcggcgtgtggcagcacgaccgcgtcgagatcattgccaacgaccagggtaaccgcaccacgccctcgtacgtcgccttcaccgactccgagcgcctcatcggagatgcggccaagaaccaggtcgccatgaaccccatcaacaccgtctttgatgccaagcgtctcatcggcaggaggttcagtgatgcgtttgtccagagtgatatcaagttgtggcccttcaaggtcatttctgggcc

SEQ ID NO: 367828 - DNA, 412 bp, Zea mays
tttcttttttttttttatatttttgtttgtatttctttaaacattcaggtatgttttctaatttctcaggcattcaaatataaacaaactgaatgagacgctattagatattagtccaaaggcattttcgttacagaacaagctattagaatttgcagaagcagattattttgcgaggctagattcacataggcacgcacgagatctgcaggtctattcataataagcacgccgtgtcaatataatgcacagccttacatcacttggataatgccataggcatacattgctcgtctaagctttagaggctaataaagccttttttgggcacaacaccttacagcaaccatacatacgaccaaatcataacgtacgagatgtttttcagaaccagcaagatgctgattaccta

SEQ ID NO: 367829 - DNA, 497 bp, Zea mays
ttcactctccacctgccactcgacggccacagcagcaggcgcaatcagcagtgctgccatcgtcgtcggcttccaccaaccatgaagatgacctgtgcccgaccgcgcattcaggctcgtccggcaaccagtcccctgaacctgcaggaagaaatgctccattgtcagaggctagctccccgggaccttccgaatacagggtctgcagacccatcggagctcaggatgccgcgacacaaacagatgacagtgagagggatgttgctaaaacccatacttgcgtggtcggagtgtccatggatacgacgttagatgctgagattcaggaatgtcatcaaaggagctcactgctgtcaccaaaggtacccaagattgttcaggaatcaccggccctgtgttcctctgatgcttaccgggtgtcagagttgagacttggagtccctaatagagcagaagctgtagagaagtagcttagaacctagaggaggaacacatgc

SEQ ID NO: 367830 - DNA, 256 bp, Zea mays
ggagtcactcccaaaggcgccatacatttcatctcactggaaagccaccatacaatttcatctcattataaagaacaagagcgaggcagcgtgggtagacttcacaggcaaaaaaatctgaaaacctgaactctgtgacaatggaaaggaacaaattgtacacatgaataacaatgaagaataacacatgactaaaggaaggggtttatatcacggatgacaccaaggacatatcatcagatccctgccttgccaa

SEQ ID NO: 367831 - DNA, 457 bp, Zea mays
agctgccccgccggcacgggcccggacttactggctggatccacgcatgcgttcattcacgcgttcgggcagccgttatctaaccctgtttcttgctgacacaccatcgataccaccgtccgccctgagagggcccggtgtcatggaccccctcaagaagatgatggcgcggggagtgttctcggacctacagaacttctccggccatatggagcacctggtcagcgccgacgacctcaatcgcatggctcgacggtaggttgctggctcattctttggatcgtcttcgattcattcgtcgccttcgaggctctggtccgtgcccccgccgtccccaccaccaagcccccagcggctgccgctgcggtccgtcgtccagtgcaacgcggtcttggcgaagtcgctgatgcggcggaagcagaagctgctgcagtgccacgcggagttgtcgaggagc

SEQ ID NO: 367832 - DNA, 57 bp, Zea mays
tgagtcagtagaggatcagccatgtcatgggggggcttctaagaatggtcggcgtta

SEQ ID NO: 367833 - DNA, 404 bp, Zea mays
ctcacgcgtccgcggacgcgtgggcgacgtcggcgtgctcatcttcaactccagcctgctcagccccacgccgtccttcacgtcgctcatcgccaaccgctacgggatgcggcgcgacgtcgtcagccacaacctcagcggaatgggatgcagcgccggcatcatcgccatcgacctcgccaagcgcctgctacaggtacatggtttatacgtcaatctttcttaggcagtgcatgagacactcaggcacagtgatttcaccacgtacgtacgtagtaccaatattctgcttccaggctggtttttgcagattatttatgtgcgtgcccatgcatggcttattctatttccatgcgccaggaattatatatttgaacacatacatattgctacgtttgttgttt

SEQ ID NO: 367834 - DNA, 159 bp, Zea mays
tcgtatacccgccccgcgctgccctcgtcccgatctccgacccaaatacccgatccaccatggccggaataaggcttacgcccgaggaacccgagatgcccgttggcacgccaccccgcccccagctcccacccttcgtcgccgcggcagctggtggcg

SEQ ID NO: 367835 - DNA, 205 bp, Zea mays
ttcattcatgcgccaacccggactccaaggacagcgatttcttgttgaaataggggggcaacaacacccgacgacggaccagaagaatgacacgagggcgcacagtcagttggctccctccgactaggacgccattcacgttgtaaacagctgcgttgacccgaactagttcggcgaagacatcttaaacgaattgacatatgtg

SEQ ID NO: 367836 - DNA, 70 bp, Zea mays
tgaacgcaagcgacaacagggacttcttgggcagcaatttcatattgaaaggccaaactatcattagccc

SEQ ID NO: 367837 - DNA, 187 bp, Zea mays
tcatgcgtacgccaacccggactacaagggggggggtatcttattgaaaagcggtgctaacaacagccttagattaaaaacttatattagatacagttatgtcataagcccttctgatcgtcacccatggccactgccgaggtccagacactgaccgtcgtggcgaccgaggaagcgcctgcggtgg

SEQ ID NO: 367838 - DNA, 141 bp, Zea mays
ttcgttcggacacgcacccgatcgctcacgcttgcagcttgatcatgatttagctggtctagctctagccctagctagtagctagccactcggccgtgcagacatcaaggctgttgaccttaaacatggccactgccgagg

SEQ ID NO: 367839 - DNA, 136 bp, Zea mays
tgacgcgtaggccgacagggactacaaggggggcaatttgatactgaaagacggtgctaacaacagccgacgatgttgagccaaaacgacacgaactcgtacagccagatatactgaacaaatatgatgttagaac

SEQ ID NO: 367840 - DNA, 179 bp, Zea mays
gtcacgcgtgcgccaacccggactacatggacagcaatttcatgctgatggagggaggtgacaaagcccgtcgctttgcaggcattacgacaaccattgcacacggcatgacggctcccaccgaccgaacaggaatacagggcatttactactgagatcaaccgaactggtgtggccca

SEQ ID NO: 367841 - DNA, 67 bp, Zea mays
atcggtcggtggcgaagcaggggcgccaggagcggggctttgttattgaagaagagtgttgactaaa

SEQ ID NO: 367842 - DNA, 56 bp, Zea mays
tcgtcgcgcgtgcgcgaacagggactacagggggggcaatatcaaatagagaaccc

SEQ ID NO: 367843 - DNA, 276 bp, Zea mays
gggataccgggaccagctgtagattttagcagaagcccagattcgggaccaaaaaaatgatgggggcctagccctgtaacccatctgggtggcttttccgacgatatcatttgtcaatttgcccaccttaatatacctggtatatacaactcaatcctgtacaatgttctcacgaccacctaaaaatttgggagagattcatttgttagaaagcactttgcccagacttggaatttaacaaagagaggcgcatcggtctgattaccacatgaaaat

SEQ ID NO: 367844 - DNA, 915 bp, Zea mays
ttcgttgcagatacagttatcagaggcctgctaaaatattggccaatcactaatagctccaaggaggtgctgtttttgttggttttttatttttttatcttttattttatttttttttattttttttttttttttttttttattttttatttatttttttttattattttttttttttttattttttctttattttttttatttttttatttatttatttttttttttttattattatattttttattttttctcattttttcttttatttctttttctaatatttattaatattttttttttttatatatttatctttctttttatttacttatattttttctattatttattcatatttttattttcttctattattttttattttttttttatttcattttattttttattatttttctattcatttatttttttttttttttttttttttatttttttttatactgtcttatattattattattttatttattctatattataaatttttattttcttacttaattatttatatcatttaattttttttattttaatttctatttatcgtttctaaattattattctctatttcatgttcatatttcttatttagtcttctttattatcttatttctttttttattttcttaatatttttatatatttaattctttttcacttttatttttttacatttaatttatttatattatcttattatttttctttttttaatttttttttactattatttttttattaattttttttctatttttatactttaatattttctctttatttatttttttattttatttttatttctttttattatttttatttttattattttttttctttaatttttttaactttatttttctttttcttatactatcttttttt

SEQ ID NO: 367845 - DNA, 308 bp, Zea mays
aaaaacttgggaattaaccaaaagtttaatgtttcaacaattaaaaagtacaattgtttgtacccaaagaacaacaattatttaataactaaattgaacactatcatgggttaaacagaactgaaacttagttttgaactgaacctgaatttcaacattttttggctggactttgaaacactggatctcaaacagggtactttagagccctgggtccctttattggacaagggttggatatcgttggccatccacgaacacttttggggggccaaaaactgcaattttagctctttagttttcatcca

SEQ ID NO: 367846 - DNA, 68 bp, Zea mays
ggcatgcgtaggccaacagagactacaagaggggggatttcataaagaaaagcgggggtaccataagc

SEQ ID NO: 367847 - DNA, 133 bp, Zea mays
ctgatgctcctgctggtggcgctgctccgttattgggtcgtccaaccactcctttgttgtggctcccaggaggccggctagaccagcggttgctttcaagcaactgaacaggttgcagcccatgccagcgccc

SEQ ID NO: 367848 - DNA, 120 bp, Zea mays
tggtcacgcgtgcgccgactcggtctacaaggggagcaatttgttcttggagccgggtggtgacaaaactcgcagcgttgcaggcatcacgactagatggcaaagagtatgatggctccc

SEQ ID NO: 367849 - DNA, 430 bp, Zea mays
cataaggagatacatatcatctgacttgaattagttacaaaggtcaaggacccatggcacaaacaatgactcgtagtctggtactccatagtaaaactgtacaaaggaacaccaaacttgtgttggactcaataaatccacaacctcttaagatgatctgaggctgagcggcttcaagcaaacatgcttaaatttactttaaggccaccttaaaaggagttttatagtcagttcacaacaatggtaaaatttgcctagtacctaggttaaggtccctcaaacagatcatgaaaaactgtacaggtggtacagtagccccataaaattattgtacgtagcagtgactgtatccctgttataatgttgcacctatggatgcacatttttgaacatttgatggattaatgatgtactgttgcccctctgaatg

SEQ ID NO: 367850 - DNA, 454 bp, Zea mays
ttgctcttcttgtaccgcgggggcaaggagagggaggggggttgaggagagaatacccactgaggaatactatatttatccagcgccgttacaccgctaaacccctctcgtgctcctcgacggcactgacgccgagtgcgatgccaagcgaggttgtaactcgtgagggggaacccttatatcgtaagatctagagcggtcgcttacgatctgtccggtaaagtggatgaggatcctgccatggaacaggagacgcggcagctagaggaccggctcagggatgtcggggaacggctgatggcgccttacgacgacgcggaggacctgctcaacctgctcataggaagtgaggcatgtttaattaaaagttgagcagcctcctcacgaaagcatattaaatgcttttcgcccagcaactggagctttggtcaatatagagctgctgggccatgct

SEQ ID NO: 367851 - DNA, 452 bp, Zea mays
ttgtttcgtgggttcgtccagaccttgtccaggttctcggccgcgccttccaaccggagcaaagaggtgtccttgaaccgctccatcgtccaggcgcaaactgccaacgaggtgctggacctcacggcagaggtgatcactgctgtcgcaaagggtctcagcccctcgccactcacgccgcttaacatcgccactgcgctccaccgcatagccaggaacatggaagcggtgtccatgatgcagactcaccggcttgcctttgcacgccagagggacctgtccatgctggtgtgtacggccatggtggccctgccagagtgctcgccacagggtgtcttcaacatcggctgggctttgtccaagattggcggtgatctgctatacctgccagagatggattggatagcttgtgtggcccttgccaaggttcaagactttaaatgccagaacgt

SEQ ID NO: 367852 - DNA, 314 bp, Zea mays
ttcttttttttttttttttttttttcatcactaaacagacttgttttattccagtagcacatcatgcacactgtgcaaagtactaccacaccgttgccctacactctagccttttattttaaaatctgcagagcttagttttacgaaatgtcaaaggtaaggcattggacaagtgtgctgataaacagatacccaataatttgacatgcacattgcacgcaaggcaaggcaaggtcttccaatgaagcttatatatgcaagcaaccatggggagaacactatccagatagctgtccggtgaaggaagccaaacc

SEQ ID NO: 367853 - DNA, 415 bp, Zea mays
ttcattcgtccgctcccggtgtttggcggcgctcaatcaccaaaggttctgacaccacgttggactccccttcctcctcgtccgcgacctccgcagggtggctgttgcacttgcacctgcaccgtagtggggattccagcttccaccactgccccccgtccccgtcccggcgccggcagtagctcggaggccgggaccacgctcggtggcgtgtcgtacgtcagcacgcccatcccgacgacgacgcgttcgattcaggcggcgacaaatacctgctggccaagacctatttcgactgccgggagtaccgccgcgccgagcacgtgctgcagaaccagtctggagggaagcggaaaatgctggtaatcaggaactagttgctttggagaaagagctctaacacaccgaaaaactg

SEQ ID NO: 367854 - DNA, 193 bp, Zea mays
gcgccgctcatgaccggccgcgtttttgacatagtcgcgcggcccaacccctcgggtcgcggaccggggtaccgctactttggcgcggccaggaagctccctggcgtgcgggagctcttcgacaagccgcctgagatgcggaagcgacgcacccgctacgagatccacaagcgcatcaacgccgggtactacg

SEQ ID NO: 367855 - DNA, 352 bp, Zea mays
  unsure (1)..(352): unsure at all n locations
tttaatcaatttttttttnttttttttttttttggttattttcgggtatatcggcgtatataccagataaataaatagcaatgaaagcgaaaatcttttttttttgcgcgctgcagcccctaaaggtgtctcctctcctcccgctgcccgtacctagaaagtccacttccagatcttgacgcggaccctaaccttgcacgagtgcgccgccgtgctcaccgtggccgttttcgccggcgtcgcgtcggcggcggacggcgccagaacaggcgcgagcgcggcggtgctgttcttccccttggccctcttgggccccggcggaggcggaggcggtgccgtcagcttgatgccc

SEQ ID NO: 367856 - DNA, 250 bp, Zea mays
attgcttgtgtggccgcgactcccgttcggggcgggttctcttcctccggcgaaatggccccaagcgaggtggcagggcgccgttgcctgccacctataagaaggggttgtgtcttacactttagtggaatataggatgagatttagggaaaagcggatggagcgggactttgataagaagatccgatactctgtccgaaggaagttgcacttaagatgcaacgtaattttggtcaattacatttttaaa

SEQ ID NO: 367857 - DNA, 66 bp, Zea mays
cacggccagaacacacctcctcacgggcagcttacataatactcccccccaataaaacccaccgcg

SEQ ID NO: 367858 - DNA, 556 bp, Zea mays
  unsure (1)..(556): unsure at all n locations
ttggttaagggaaaacaagaggtctcagtcttactggataagaaaagtaagaagggaaacagaaagtcagttttggaaatacacaaaaaggatatggcaaacagtgttcaaactcaaagcatttgtaaggatcagtcaaaagcaggttctagcacagcaccgaatacaacagatatgaggtgtaaattaaattcttgttgcaaatcaaagcatgttaccttttctgatggcgctgacatatttggaaggaccgcacatctacctgcagataatacaaagcaaccacaatctgtacagacattccagcaagccactcaggaaggtcgtgaccaccgtgatagagatgatcaacagttggtttatcaacaagctgaagctatatcccggactgttgagattaccaattctttgtctgaaaatgtagtactagctggtgtttgccgtacaatcccacttaccaaaccaaaagatatcactatactgngaaactcagtggatctgaatcactgcatagaaacttgtcatggcagtaactgtttgaacttcacgagtttgg

SEQ ID NO: 367859 - DNA, 525 bp, Zea mays
  unsure (1)..(525): unsure at all n locations
tcgtttacgcgtgggcggacgcgtgggcggaggcgtgggctactcagcctctcctgcacgccgccgcccatggtaccaaactcgaccgccaaagcccctggccgagctcccccatggcgtctcccccaaccatggtgctctctgctcctccacggcgctgagctccaccagccgctgctcttgaacgctagcgccaacctcatctttgctcctctctcccgcatctctgcaggtcgcccaggtcgtggcctcgccggatcccgcgcgctcctgtgtcgtggcgttgtccccatgttttctccgcgccagcgcgccaccggctctacttgagctcctccctcgccgtagctcacaggtcgccaccccatggctgctgctcctctctccctcatctctgcaactcggcgcctcctctactcctccacctgcagttcgccccatgttctggacgccaaccctncatccncctacccttcagccatggacgccctagctcccttttggtgctcgctagggaccagctcg

SEQ ID NO: 367860 - DNA, 209 bp, Zea mays
  unsure (1)..(209): unsure at all n locations
gaccaaacgggactaatagttttttgttgagggtcaatccgtacatgtcctcgntctctctaacatcagcagccctctcagtaagcaggaggggggggggggggggggatacatgtggaggcaaaaacatgattttgagcctcacttagggacaggaaaggaaccaacctgactgatgatcaaagcaacgaagcaacagataaaacaaa

SEQ ID NO: 367861 - DNA, 420 bp, Zea mays
acggaattcattgaatggtgagcttggttcgacaccgaacatcacgcaggccttacatacatgtggaggcaaaaacatgattctcagcctcactcagggacagtcaaggaaccaacctgactgatgatcaaagcaacgaagcaacagataaaacaaatacaatcatctgttgaccaatgctctgataaaaggcacactgttggaacaaaaaggctttctgtgtcttgatttgcattttccgctcaggaatattgggtgcaattcgtctagcacccaagaggttggatttccatccacgatcttctttgtctgaaagtaatagaacacatttttttgcttgtgtcacttcaggatttggaacgatcgatgagtttatcaggggccgaaagttcatctttgagcataaaggacaagtcatgc

SEQ ID NO: 367862 - DNA, 570 bp, Zea mays
  unsure (1)..(570): unsure at all n locations
tcgcttacgcgtgggttttgttgaaagaaaagagatgacttcttctcttccgcaaactcataatgcggagcaggaaaagaaaagaactgatagcaaaaaccatgaatctagactggaggtgcttgctgcatctaaaagcttaattagttctcaaagaacaaatcagattgaagctactccagcatttgcaagttgggatgctgattttcagtctgctagttcagaaagtgctgcaaaaaaactccaaacaaactgatctgtttaagagctcttgtgtccccgagtcttttagtttcccagcttcagatactgccatcaaacctgtagtaggtactgaaaataaaacaaatacgagaagtgtcatcctagaacatcattcagaagatttggcttcagcaaatggcacattatttggtgatgaccattctaatcaaaaggttgcccagcatatctttgagagcaacattgctcctgagtccactgaatcccctctcaacatgaannttgctagagcgatcagttacatggaagggaatatactgcagtcaatgatgatgaagctttgatgaa

SEQ ID NO: 367863 - DNA, 55 bp, Zea mays
tcgcggacgcgtgggcggacgcgtgggattggagcgaatatatatatatatatat

SEQ ID NO: 367864 - DNA, 324 bp, Zea mays
attaggatggcatcataaagaaaaaatgacacatatatgatactatatcacaaaggccttcagtttctagaccaagtgcagatcgatctgtgggtatgcatgtctaatattttactaggttggatatgcatgggcgttcattcagaatcagtttcacacagtttatcgcacttctgattacaaaacatggatttcattgctctgtactggctacatgcgtaaggatcaacttgtctaatctaggtgtatcctccttgacaagcaaacttaacaatttgcaaaaaaaaatgcagcttttatatgtgaacccataacttaatatgg

SEQ ID NO: 367865 - DNA, 378 bp, Zea mays
ggaaaccaaaccccccacccaacaatcttcgaatggctggctacagaaccaaatatcaacctcacaaaaagaactagcatccttcaagcgcgaaaccacatatacctggcaccccaccggagtgatgagatgagaaccttggaagccttgacgccactacaaacaaacactggaaaccgaaacaccaacagctcgcagtattttcttgcaattgccttcaaggaacgtgcaggggggttccgttcccacccagagccaacgaaacacagccctgcagacggaagctaaacatgctaatctatccagtggtgatgcgatgcaaccgtgcagagagaatactattagcctaaacagacggatccaaacctgggacataca

SEQ ID NO: 367866 - DNA, 323 bp, Zea mays
cttcaattagtggaagcaaactgcctctaccattacagctatgaagtatatagtcgtgattgtgtcagacgtggtgtgtttttgggagataaaaggctcttttggtcgaggagctaggtatcagatgttttttatggtacctgtaattttccgtgcttctgctttggttttgtgcaaggtataccatgtctgactgtgtgctcgccactgtctgagtcgttgtactatcccgggccggcctgtccggctgtctcttggcatagcaaaatgatcgcctaaaaaaaaaaaaaactgactgtctaacaaaccaaaataataaaatg

SEQ ID NO: 367867 - DNA, 321 bp, Zea mays
  unsure (1)..(321): unsure at all n locations
agaatgaaaccacataggtcactctgtgtacaatttatactacatcatacagccaagaatgtctctgtgccctcattggttccaccgattagtaaaaggtacaagtacaacacgtcatctgaacccatattgggtagactcgaaatactacatgtaatgtgatggtgtcgattctccaagaactctccatcgctggtgttgaaaggtcactaatgatacagcagtatggaaatgcnagtcgacgacaaaaccagtgctctaattggagtatcaccgccatagctttttcaagggccaaaactgtttcggtttctattcttc

SEQ ID NO: 367868 - DNA, 325 bp, Zea mays
ggccccggtaccgttctttcatacatgcttagattttggaggcccaagtgagcaggccttcctgttatctagaacacaaaggccatttactccattgcagtggatggagttggagcaccaggctctcatgtacaatctcaatgcaatggccccggtaccgtaccttccagcctgctcatttcaatcagcaagaacttcatatcatccaatagagatatgcatattctgaatcataaggctaaggttctctacttcaaaactactagcatttgcaataaaacaaaaatagaagataaaaatattatttgcacaaatgaatgccttt

SEQ ID NO: 367869 - DNA, 273 bp, Zea mays
gcgcttccaacgttagctaactccaaggcaagcatccttggtccattgttggcctcgctcatcaatcagctgtgtctcagcaggaggcgttgcggccatggcggcttcgaagcccatcttgtatagcgcgtggatcagctcctgctccttccgagtccggatcgccctcaacctcaaaggtaactggatcaaaccgctggcgcttgtttcctgctccatagatgacggcgaatcttgcccaaaacagggggtcttcgacgtctcgttcccggg

SEQ ID NO: 367870 - DNA, 472 bp, Zea mays
cttgaaatgttttttaaatttgctagaaatgccaaggaattgctaagatttaatgacgctggtgttgaaatagttgtgaaggtgtgtggagagacatgtgtattcctcctatgacgaattcctcaggctccatgaaggatattaacggtatacatcaacaattcattctattttaattgcttgcaaaacttttttggcccttcaaatgagttccacgcatcaagaagtcaagattccaggaggcctaaaataggagaggagggcgcagcttgattcaatccatgtcaagtcaaaggctgctgcgaagtttgcacatgcaagtagaatttagatggtttattcaatttcggttctaatgcttctgacagcagttgtatcagtcctcttgttcagcttacataataatgtactaaacttcagtttggtgtctatctcagtgtacctacactcagttggaaaacttcaaccacac

SEQ ID NO: 367871 - DNA, 464 bp, Zea mays
cccaacccagttttcatactcgttgcttttgattttattaccatttcttctatctgcctaaggagatatactgtaggaaattgtcatggaaaccaaaactaaaccaaaatatagacgactgacggtaattccttccaatccaaacctctcggaaacggacattgtggcatgcattgatgcgagtcccctctcgttgccatgtgtgatggccagatcacattgaagatacccaggctgacccagccagccagggccacggatttcttgtcacttctctcaccatggattgcgatggacggaccatcaagaagtccatgtctctctatggagtggcttggcttgggtagctctaccctcctccatggatctgccgtgcatgcagttacccaaaggaccctttggccccttgccttatttgttgctgtttggctttggcaggctggacgtacatgcacgcctcatgc

SEQ ID NO: 367872 - DNA, 372 bp, Zea mays
cccacgcgtttttcaccgtccagcacacaccagcattgtcctgaggcctgagcagcgctgcgccgcccaaccagaacgacgaagcggagccagcgccaacgaaccaactaaccaacggacggaagtggcgaggcaaggccgccgcgaagccgagcaatagcccacctactatacccgttcctctgctgccttctcgggatctgcccgcccgccttgtgcccccgcggttggagctccggctgcacgacaccatgagcccccgcgcgtagaggctgggagagagggagcggggaacaaagttaggcaccaacaaagttaagtggggaggccagagctggccagctgggtcgctgttctaccagagggatggac

SEQ ID NO: 367873 - DNA, 402 bp, Zea mays
ggcggctgaggtgttgctgcttcgtccctggtggcggctgagggctgctgcttcgtccctgatggcgcctgattgcctgggcgcgatccgcccgtgcttcccatagcgtactccgtccctggcgcccccagtgaggtccgtccgtggcgctccgcctcccgtcgtcttccgtcaccacgctctggtcgtatccccgccgtagcgtcgtccagtgctgccctgcagaccgcacatctgtccacctgctgtgtggtttggttccctccatggattctaccaatccgaaccataaagatgacgagttcccatagaattcgaccgcgaacgggacaaattttggttccaatatgtacaaccagctgaagaaaccggttatattatggcaattgagaccttagattt

SEQ ID NO: 367874 - DNA, 120 bp, Zea mays
cgagtcgaggactcatcctagctagttgtgctgtttgacagcgcagcagaccgatacgagtacgacgatgatgagtagcaccggcggcgagagcaagctggagagcccgctgctgggcct

SEQ ID NO: 367875 - DNA, 245 bp, Zea mays
ataaagaaaaatggggttttttataaatgcctaattaagccctcatcgccatccaaaatttcaatgatagattaaggcaagtgacccaaatgatgctgaggagtgagtgaaccacatattgagacttcagccatgctagctcgcagttgcaagtttgtaggacaaacaagtaaagtttttacttggagcctcaacgtggggggtcatccttaacatctgaaataatcttgaaaaggtcaactgga

SEQ ID NO: 367876 - DNA, 357 bp, Zea mays
tggtatcgcccgcctgcacgtacccgtacttaattgcctattcgacccaaactttcttgcacacgtacgaactgtcggactcgttagcctaacaatgacctgccaccattatactgcaaacgcatgatgttctacgatgacagatacctggcctcaggagtgctagagaccagctaacttgatctgatttatcaggaacccacagagcttgatggaatgcaggctcaaatctgattgctggaatcagcatcttacgggcttgaatagagcctggactcggagaaaacaacaaacccgggttggatcctgcatcggatagtccttgccttcaaggttcatgttgtcttgttttggagg

SEQ ID NO: 367877 - DNA, 300 bp, Zea mays
atgcgttattacacacacacacgtgtgaaggctcagcattaactctacctatatctatataatccgaagaggaggttccctgcggcctcctatgcacacatcaacttgtccgcatggcaacggtggctcacgctcggatccctagctcgccccacgtggcgcacaagatcccgcccggcgacgggccttagtctagagctaggcactctcagctggtggagaaggacctggacacgtccatccgtccactgtggaaagggatcagcgggagcatcaggtcggacagacctctcaaggaca

SEQ ID NO: 367878 - DNA, 406 bp, Zea mays
caggtcgactctagaggatctttatagatatttaaaagaagtttcttcgttatttttttgtaattttttcgatgacttctgacaaagaatttgataactatcccaatcagaaatagataccaaaggaaaaccaatttcataactatttttatcttctagtggaattaaaaaacctggcgtttgactcaattcttcatcgttatctaaaactaaaattggccgatcagcactatcaagaacagcgtcaagcagttgtaatggctcattttgtaaataggttccgaggttagcgtaaattttcataattagctgtacaacatccccttccattggaattgtccgtatcgcccttgcttagctcgatcaaaagcttctgtgagtgccggatccccgggtaccgagctcg

SEQ ID NO: 367879 - DNA, 250 bp, Zea mays
agtgaaaatttgaatatggggatatttatgaggatactggtgaaaatagctttacaaacgcacgtactacacgactgcgacatgcgtccgatccatgcaaaatatccacagatgcatataagaagcgtatatacagttatacacacacttgcacgctttaaataccttgctgctgatgctatgctactgcacactgtctccgatccacagattcacaggggcacacacacacacgcgcgctttacctttc

SEQ ID NO: 367880 - DNA, 250 bp, Zea mays
ttaatttctcgtggaggcgagcagatagacaggagagagaacgcacgcaagaacgcgctctcctcgcgattggacagggcgcgaacaccccgaggacgcgcgcgatccccgaggacacgggggtgacagcctcgccgtcgccggggcggccgtttcgagctccgtcccgcctcggcccggctcagatttggtgggatccggccaagaaatcccgcagttggtgaggaggagaggaggggagaggaaggag

SEQ ID NO: 367881 - DNA, 401 bp, Zea mays
tgcctgcggtcgactctgaggatcactagtatccggggcgtactgtcattgtgcgccgattccgatcgccgtgtgtgaaaccaccccgttgccacggatcgaggtattgtagcacacaacgctcacatgcccagttgacagattgctttttatgcccagccaactgagcccactcagcgggatcacggtcatcttggatagtgaatcctgaggcattgttgaagccttagtcttgatagggggacttaacacctgatctgcagctctatgctatccagcttatttgatgcgagatagttaccagaagctacccagcattcaagactcgatgccgctgaatgacaggattgaatagctcaaggatacgttcacactcttttacgacccgtatagctgagcta

SEQ ID NO: 367882 - DNA, 317 bp, Zea mays
  unsure (1)..(317): unsure at all n locations
tttnnatttatttttttttttttttttttttcttttgtttttttttgaagagntttcgggttgaccccctcngaaacaataggcgacaaatattcaaaaacgggggtagtatatgatacaatttccaaaacctcaaactgctacaagatcaataataatgggttcttacagctctgccttgctacatttacctcctgtcaacagctacaaattacaacagcagatgatggatcgttcctgcttctaacctaactaaaaagaatcaattcacggggctaagaaggttcctgcacatcataacaatccgacgaaactac

SEQ ID NO: 367883 - DNA, 146 bp, Zea mays
tcttttactgatggggcgagcggttaggcaggggagtgaactcacccaagaactgacctttctcgggattcgaccattgcgcgcacacgcctgagacgcccgcgatgcccaccgacagagggatacctggcttgccatgagcgggg

SEQ ID NO: 367884 - DNA, 206 bp, Zea mays
  unsure (1)..(206): unsure at all n locations
ttcctctcgtccggggaacatgaagccatggctggagctagcaatgaccatgtaccgaccatattgtgaccaagatatatcagcgtgttgatcatcccttacttcncgtggtatgcacgctcgagccgagtaccatagatggacgctaaaaactgacagattaggaagagcttattggacagaagtgttccactaccatgtccttg

SEQ ID NO: 367885 - DNA, 288 bp, Zea mays
ccgggccccgttctcgacttcactgaccgaaattatacatcgcagccgttttcatggccgttacgcaaccgaaatcaatcgcatggctagacatgactgtcctgccagatgacgtgctagcgtagaggcccgccccgatcgtcctgaccatcattcgcgctgaccaaacgtcgattgaaaccagaacattaccagccattgacgcatcattgcgttagacaccaccgcctacggtgatctactagctcaatatgctgtgatgccggatatacaatccagtgactacac

SEQ ID NO: 367886 - DNA, 600 bp, Zea mays
atgcctgaggtcgactcagaggatccttgctgtaaccttgacatgttcactaaagcaggggctgtttttaagattatcaaacaaaaaatcaaaatcttgaattgcagcgattttatattgtttacctatcaacagtaaattatcgttgtaaatattgaaaatttgtccacgttccttcccttccgtatttgggtgacgttggcctaatgtaaaaagagctttttgtaaaagtaatttaatttcgctagaaataattttgtttgtaatctcactgactatttcattgcttgaatttgtagaaacatgttgtaaggcatcatttttcaaaaaagataagtagttgcttctaacaatactttgtattttcgataacttcagatctgtccgtagttttatattttttgaagactgcttaatataagcatgtaaagctttggctatctcgtctaatccgtgtgaaaaatcacttataaattttaaatttaaacataaattagtagtcgcattattttcttttgtttttctaccctcaataatattttgaataggaataaatcctaatttaatttcagggcgatcccgatagcgtagccggaacta

SEQ ID NO: 367887 - DNA, 325 bp, Zea mays
  unsure (1)..(325): unsure at all n locations
ttccttaaataantttttttttaaaggcggcactataggtgagattcatgatgaatctggtaaccgaaactttacagtgtcatttacattgtgtacatgaaaaccaaaagaaaggggttccagttttccagtacgatggccagaaaacagagagcgagcacacacgcacggctataaactcgatctctgaagagagtgaagattactccagtaaaaacttctgaagcagtccactaaaatccagtgtgaagccaaagagagggaattccataagctggcatcaaccaaacctggatcacggccatattatctacgtttcacagag

SEQ ID NO: 367888 - DNA, 352 bp, Zea mays
gtcgactctagaggatctaccaatgccgcttcacagagagcttgtatgtgaattttcacgcggattatctgccggcagggcaaacgcattgatttttcctccttgcgcctccggagcggatagcaccgattctatcggtagagatttgccaattgccatttcatagccctgtcgccaggggataaagctaatatatgcaaaattgactaacatataagccggattttcgtcggattgcaccagccctaacatgatgattattaaacccaaaccagtgatctcccaccggatctgcccattgccacaggacggtgtaaaaaaagcgcgacggtaaaaccaactcatcttgaac

SEQ ID NO: 367889 - DNA, 365 bp, Zea mays
ttttctttaggtcactatcgtcaccactaccgggggctttcgtgctcccaagctccctctgcctgcctttataaatcaccggggcatagcgccacaatgacacacgcccttgctccaagaaacaaccgtcgagcccaaccgcacaagcgcgcgaggcaggagagcgagagaggctgggagcagaacacaggaacggaaagcgcaagacgttcaccgagctgcacgcgggcgccggcttcagcgagaccgtgccggacaccgtcgtgttcgatgattccgagagggttacacgcacgggggccacagtgagctcgtcgctgctgcttgggatcactgggctcccagacaactaagttcaagagtgc

SEQ ID NO: 367890 - DNA, 499 bp, Zea mays
tgtttgctgttccagtcacaagttgatcgatccgttcggtccctgtgtggtgctgtgttcctctgatcgctgtcaaccgtggcctggtgcttgggctccctgctgcgcggtgttcatcttctcgggctggtgccgtggacgtctccctcggctccggcagcggctctagtatctccgtcaacctcccgccgtgcaggcccggacgtgggcggcggaattggttttctgggacagaacttcgtgttcgctgagctggtcttcccacgtagacaatctacgtgttgtgagttacccgttgcctcgctttatttattgagtaattttgtgcaatctgctagtattatttacttgggtgtgattgcacaatatgtgggcggatttgattgctcgatgatgatagcggtgtagtgagacgacgtgacagtctgggtttagtgtggtgctatttcagcttgatattattggcctagtatttctactattgtgcagctgatattta

SEQ ID NO: 367891 - DNA, 344 bp, Zea mays
ttccacgcgtacgtccacgcatacgctcacgcattctatcacgcatccgcgcaagtttgcgcctaaaccctaactcgattcccaatggtgccgaagaagcgcaaggacgatcccgacaagtgaccacgactctagggatgcagacgccagcaaccaccgacaggagccagcgccctaagagcccaagccgaggtgccaccatgtacttccccatcaccgacaacccgacttagcccgtctccgaggaggaccaggaggatggcactagcaaagacaaagactaggtgtaggacatttgcaagctgcatcagccactgtcgggagagcatctcgatgggctgctc

SEQ ID NO: 367892 - DNA, 460 bp, Zea mays
gcggagcttgagaggcttgcagcgagagggggcaggtcagggtgtaccaggagaagatcgccatgtggcaggcgcaggtcgaggagcggctcagagtgcttggtcagagaagtgctgaaggtgccactgctgcagtagtgcctaagaaggttgtcatggtgcaatggtctacttgttaggctatgttgaggtgggggtgaggcgtcctcttgtgctcctggggtacaagttttttcagttttcaaatagttacaagtattttggatttgattcagttctgctattttggatttgatatccagtatttggcagctacttcaatttcaatgtaatgattcttaagttcaactcctattatttggcttcaattacttaagtaaccttgggtaggatatgtaggaattttgcttcgtttttttgcttcttggggtgtcagttctgtggtctgtcatttttgaaa

SEQ ID NO: 367893 - DNA, 280 bp, Zea mays
tcttctcacgcgtacggttctagatcgcgagcggacgcccttgaagtttttacattttttataaccaacattgctatgatctatttatataaataaacctgttgttgggaagaaaaaaagaggagattatctgcctgcgaaggagaactaggccagaaggggaagggacatgggaaaggtaggtcaaaaggggagagaacttagagggggtctgaaaagagggaaccttaaattggtgttaccgtactttgccggctcttgacctggcccaagaaagata

SEQ ID NO: 367894 - DNA, 427 bp, Zea mays
cacccactgccgcttcaactctctcgctccctgccttctccaaaccctaaccgccgacggcgatgctctcgacggcttcggtgccctccacctcgttcgccgccgctttcctctcctcccgcgctcgccgccggcgccgcgccccctggctgcggtccgtcgccgcagccgccgcgtccggggtgggggacgtagaggttataccggttcgctaccagtagctccatcaccgactacctccgctaccgccgccccgagcttggctgtgccggaggggcaggcggaggcgggctgccaggcggggagctgcaacggcgggtggtgcgcttaagaaagcggttcccgtggtcgcttctccaccccttcttcacgttgattttggtttctacagtccacattgcagacaaagaatactttgatagactgc

SEQ ID NO: 367895 - DNA, 307 bp, Zea mays
ggatcaccgatgaaggagcactagcacaatatggggaagtgactaagcttgttttcttagaaggggatgaggaactgggtcacggtgagctgatccgggcgggccaaaattaagcggtggggatcttaattgcccagaatttactaactgctgaaatgctgaaaaattctgaacatttaccggcggatctccatgcccaggtggagcagtccaaggtggcgatcgccccaaagccccagaacccgttagtgatagcttgccaatggattacgaatgggaaggctcaccagagcaaccagaaccatgg

SEQ ID NO: 367896 - DNA, 530 bp, Zea mays
  unsure (1)..(530): unsure at all n locations
caggtcgactctagaggatcgccccgacttttatattgtgcccagtgcgattgtcgccacctatgtcctttcatcccatcaacaatggtcagcggggagtaaaaaggatggaactgctaggcgagattcatccatgcgtaaattttccgacccagaagaacactaccgagaagcatgaaaaacaatacaattataggacaaaatattttaggaaattgcaatcttattcccattgacccacattttcgccaaggtgaaatgtcgcctgttcgcctttttgacttttcacccattcagacaggagaaaatccaccaattcagatttatcggcggcttgattatcccgcttaaggcgatgaagttcttcctccacatcntaggtctgtttcacgacgaatgtaataagtgcgcccaatccaatctgggtcacttcttttacccgagcggggtcgtccccgcttaggcgatagggcattagatttcgattccccttcacagaagtggtctgtgggcagaatcaccacaatgag

SEQ ID NO: 367897 - DNA, 363 bp, Zea mays
tcctttctcacagaaggacacttaaggcatgcggacgctaatagagagccccacccactctcggagcatacaatcagccattaccagggctgtcggacccacgccggcttatccgaacccctgccggccaatgtacgaagctaaggagggaacggccaagtccgctgaaggcgtcccaatggccgacaatgaagtgagtacgtacgagtacggattcttgcaatatctgcagaatgaagaaaagaatgaggaaataagcacctgaaggaagcttaaggccaatgtcacacgaatggcggcgattgggtggctcgggttctgaagaaaaagaggaaagaaaatgagactgggtcaccccgtctt

SEQ ID NO: 367898 - DNA, 379 bp, Zea mays
ctatatccctccggcaaagaggctgacgagaaaattggtcagctaaacaagggtacgtagagtgaaaatccgatcatctgcaggagggtggagggatatggtgtatagtgtgcaggaaccagtgtgccgaagagaggctagctcatcctgagcgtttgcctgtcgatggtcgcgcggatttgccatcgccacagttttgctgcatcgagtcatcttaggaatggctttgcaaactcctttgtggagtgctagagcctgcttctagccttaaccctcttctcgtgttcgaatgctactgcggcgcgcacaacttcgccagccggtacagctgcttcaagtgctccgactacaaggaggaggccgttgtgaacagtggcgc

SEQ ID NO: 367899 - DNA, 136 bp, Zea mays
cggatgtcgctgaccggcaagtcagtcagacgtcgtggcgtggactacgaggcagacatcgtacccctgcacctgttgttaccagctcggaactacggttcagttgcgtgcaggcactctggatatatgccagagc

SEQ ID NO: 367900 - DNA, 313 bp, Zea mays
  unsure (1)..(313): unsure at all n locations
ggctggattgaataattnggggggttaattaaaataatacaaccaaatgaaaaattagtttttggggacacctataattgcaacaagagattaaataaaacccgggaaaaaattatggagggttcaactacaacaatgggtgcttcaaaaaaaagcagtgcctaaaaagcattaccaaagtctgaaaaacaaaccccttccaaggaactccctgggaccaaaaccaaaagcacgcaacaactcagcctggttcactatggtcatcacaatagtattccacaattcaacctccttcactgattccttacaaaac

SEQ ID NO: 367901 - DNA, 124 bp, Zea mays
cccataaaaccccggggggtcgggaatcactatcgggggggggccaggtaaattcaacaggatggcccccatacaacagcaaatgcctccaagggttttaaaaacttcctacaggggttaaaag

SEQ ID NO: 367902 - DNA, 227 bp, Zea mays
ggccagagagctattattattcattggccacctcgaaacttcatttatttttatgcaaatttacacaagaggggtcccagggtaccaccaaaacgggggcaaaaaaaaggcgccaccattttttttttttgggggagcagcattacgtataccaaattgggggggggaaaaatgaactttatggggcacaaaaaccgttttgccatggcccgggggaaaaagggacc

SEQ ID NO: 367903 - DNA, 307 bp, Zea mays
ccggaggcatgcattcctgtgtccgttacccgacaaactgtgttgttctaccggcgatccatccgcgtgagtggcgccgctatgaatcaggcaccgccggtggtgctgacggatgaccctgataaggtgcagtacgtgctactgactgattcatggccatactgggccattgattttctgtggaggtgatcctgacaaaagatcaattggttgtgctgctacgctagattggtgaacaaatgcaccgtgatggtctgacggccacgaatgaagaactggtgctgctactggcagcggtgatgaagga

SEQ ID NO: 367904 - DNA, 287 bp, Zea mays
cccacaggggggatttgataacattgggctttataagcacaaaaacattgtcttcagttcaaaaacatgaagaacagtccaatcaacaccactggatgccgtggaacataaagtatggtacaccaggcgcataaatcaaaggatgaaaaactacctaacttcatacctagatcaggtctctgcatctgctaactcctatggccttggcaacaaaaaataccaattttgaacacacttgcagtagggattgtacatttttcctcactcaagtttttcccttcaagagg

SEQ ID NO: 367905 - DNA, 431 bp, Zea mays
ttccacgcgtccgcccacgcgtccgcccacgcgtccgcccacgcgtccgcccacgcgtccgattaatgagtatcgtgatcgtataattttgaatcctatcaacccatatggcaaggcaaagaaaatgacagtggacatcattctagattttacaaaatcaaaggagcaaccagacatggctgtcatgatctaagatacttcaacgtgattggatcgaacccaaacatatgactaggagaagctccaaggccactttgtcaagggtctctgcaatgcacctactggtgcatgatttactggaggttgtgcgcatgaatgtgccacacattggtatggggttgggagttgaagcaggtgattttcaccaacattggtttgcgaactggagttgaagcaggagacatgattgttattcctatcatgtgcacact

SEQ ID NO: 367906 - DNA, 868 bp, Zea mays
  unsure (1)..(868): unsure at all n locations
ttctttgtacacgtgggctgacacgtgggcggacgcattttctttattttatttttaattaatttattttttaatttatatttattttaatttttttaattaaaaaattatatttataatatataaaaaaaaataatttttttttttattaaatattaaaaaataattttaaatttttttaatgtttttttttttttttttgtaagtaaaaaaaatttaaaaaaaaatttttattttttaataatattttttttaatttataactatatttttattaattttttatttaatatatataatattccttatttttattatttaattttttttttttaaaaaataaatattttatttatttttattaatataaaaatttttttttaaaaaaaaaaattttatatttataaatattttattttttttttttttaaaaaaagttttataaaatttatttaaatttttaaaatattttaataaaagtattattttattattttttatattataaagaatttaaattttttttattattattattttattttttttattaaaaaatattttttttaaaaaattttttttataaataaaaataaatattctttttaaaattatataaaaaattttttttattatattttattttttttaattttataaaaatatattaatatatatcttttttaaatttatgaaaaaaatttattaaaaaaatattattaattttttaataaaaaaattttttttttctcacaaaatttttttaaaaaaaaatnctaacttttttttttaattttatttataaaaaaatatattgaaaataaaaaattatagtaaaaaaatttttttaataaatttttataatttt

SEQ ID NO: 367907 - DNA, 427 bp, Zea mays
tttcttttattttctgcccatccctgatgcttctgatttgtaaaattagtaaataattctggttccaattttaccttttagtcacatgaataataactcattacaaatcccatctgagttgtccaacttgccttaactccttcatttgtaagtagacctcaactttttctaatattttctattttgcaagttgcagatgacttgtaagttgacatgtcttgtgctgtgaacttgcagccttgttgataacaataattgatctgggcctgttccaatcgaattaggagatacacgtagtctttttgctattttgacttcaggctgattaataacaactttaggggaagcttcatcctgctgatttcaacaacatacaaacacttttaaagccgttagtgtatcaaccttttcgctcatgttctttctt

SEQ ID NO: 367908 - DNA, 291 bp, Zea mays
gcaacaaaaaggataaacggggtcgatatatagccgttggggctcttatcaatggagaatggaaatagcactagatgctaaattggacgctctatagtctatccaaccatcctgccagcgaatttcagtacaaactctgaactccatccaaaatttcaaatacacacgctttccttctaggcctgccaccttttctcttgatcataagtacatgggaagccatttgtaaacagggtctaactttggtgggccacgctgactgggtcatcagggggttcgctaagactcaaa

SEQ ID NO: 367909 - DNA, 440 bp, Zea mays
ttggccggcgagctcggcgtgccgtgcgttacgttcagcgtcgttggcatcttctcgacgctcgtcatgtaccacctcggccgtgacgtcgtcatcagagatggccaggaggtgaccgtccctgggttgccgcttgccggggccggagatacggatccccgtatccgagttgccggagttcctgagacgccggcaggagcacgacggggtcaggcggtgccatgtggagatgggcaggtgcttcggcgtcaccctcaactcgttcgtggatctggagcagccatactgcgacatgtgcgtgagcagcggatacctgaagcgcgcctacttcgtcgggcccctcttgctgccgttaccaccggccggagcaagcaccaaagattcgccatgccttgcgtggctcgacaccaagccgaggttttcagtggtggacgtatgct

SEQ ID NO: 367910 - DNA, 227 bp, Zea mays
agggggaagacacccaaaatatattgaaccttttaaggaaaacttaaagggccaggaaacttataggagtaccaccattttgaaacaaaatagcgccaggaccaaaaataggatcggccaaaaacatacttttaacaaaaggttaattcaataaaaccttggggccaaaacctagcaaactttacaaaagaggatacttagaacaccctggatgggttccccatggg

SEQ ID NO: 367911 - DNA, 548 bp, Zea mays
cacacacacacacacacacagacaagtggtttccaaagccaagtgtgtgtactagcaaccagctagctcgggcggcagcaggcagccatcatgtcggaggagaagcaccaccacttcttcaaccaccacaagaaggacgaggagcagcccgccggcgagtacgggtactccgagaccgaggtggtcaccgccaccggcgagggcgagtacgagaggtacaagaaggaggagaaggagcacaagcacaagcagcacctcggcgaggccggcgccatcgccgccggcgccttcgcactctacgagaagcacgaggcgaagaaggaccccgagcacgcgcacaggcacaagatcacggaggaggtcgctgccgcggcggccgtcggcgccggcggctacgtattccacgagcaccacgagaagaagaaggaccacaaggacgccgaggaggccagcggcgagaagaagcaccaccacctcttcggctgaccggaataccggccggcgcgcgaccgagctagctagcttcggcgcacacaaccacacacctg

SEQ ID NO: 367912 - DNA, 493 bp, Zea mays
tgccgcctcccttcccctccgctactgctcctccccaccccactcccccgcaggagcggcggcggcggcggcgaggtcgtaccccacatcggcgagcggcggcggcaccgccggaggcaaaggcaagatgttcgggcgcgcgccgaagaagagcgacaacaccaagtactacgagatcctcggggtgcccaagtcggcgtcccaggacgatctcaagaaggcctaccgcaaggctgctatcaagaaccaccccgacaagggcggtgaccccgagaagttcaaggagctcgcacaagcctatgaggttttgagtgatccagagaaacgtgagatttatgatcagtatggtgaagatgcccttaaggaaggaatgggcggtggaggatcccatgttgatccatttgacatcttctcatcattttttggaccctcttttggaagaagtggtggaagcagcaggggaaggaggcaaaggaggggagaagatgtagtt

SEQ ID NO: 367913 - DNA, 479 bp, Zea mays
tgaccatcgtcgtcgtcatgagcagcagcaccacccaccaccatgcatgcatggttgtccatggctatagcagctcatcagcgcatgcatcagctagcaaaagagcgggacgggacctatatggaaacggaacttccgttccattattccacgccacgcatcaacgtggtcgctctcgctcgctcgctctttagccttctgtataggaaggagtacactgctgcgtcggcgtcgtcgccaccctgctacactctcttggacggtgcttccccccatctggctctcctgaaaacaacgacgcaaaagtgaatgatgggttagcaatgcaagggcgcacaccggcggtgaaccgaacggagctagcgaggtcagtgttcgatgatgggacccatatatgcatgcatgcatgcatgcgattgccaagtaggagtacgtactagctagatatacacactgcatggtcgatctgtactcgtggc

SEQ ID NO: 367914 - DNA, 346 bp, Zea mays
ttcctttttttttttttttttttaatcaaagtttgggtggattttttaaacaatccggctttaaatagcttcgaccctccaatctgatacaaacgaacaaggactcagtgtcctaaactaagggtctatttcgcagagctccagctcctcataaaaaggctccatctccggctcctctacggaagtaacttctttataggacaaactgtttagcaaaacaactccttcccctttagacatttccacgatcaccttatgcacgtatcccgcgacgcgcctgcaatgagccatgaccgccgccctggcccaggcctccgggttccttgacagggcctttgcgacaaca

SEQ ID NO: 367915 - DNA, 445 bp, Zea mays
aatcggctctagagctgttttgagtgttgagagccggagctaaggaaaaccggctcccaacggctccgcatcgctctcgtgctttttgccactgacagctacatgcggatgggggctgtgcttcgtgaagatctcggcggcagcggcgggtcacatctcgacgccgacagcaacgggggcggcgtggagaagggtagcaagaagccacggacataggcagctccatcccgatggtgcacaagactggccttgtacgtgagggaggcagtaggagtgtggccattaagaagacgcgcattctagctcccgcgcgtagccgtgctgcatgaaggtgatgttgtcgcaaaggcgctgtcaaggaacgcggaggcctgggacagggcggcggtcatggctcattgcaggcgcgtcgcgggatacgtgcataaggtgatcgtggaaatgt

SEQ ID NO: 367916 - DNA, 332 bp, Zea mays
aaagggaattaccacctccccgagactttatttgaaactgggggttccattccattcgaatcgaaaccgaaacattagggggttcaaaacagggggtttcaattcaaattattcaggggaacacacccctactgcctaaaaggcggggtcatccctgggaaggggttcgggtcccccctgggccatgaaaaggccggcataaaccagcccaggggggggcccaccgataagaggccccacccagtaacccgaggggggggcccacaccccaaccacaagcgcggggcccaaggagcccccggggttcatggacccccccgaaaagggccccc

SEQ ID NO: 367917 - DNA, 363 bp, Zea mays
ttatttttcccaccctgcaaaaaatacagagctgggctttggttaaacattcttggtttccaatgcatgtttctattcatttgatatactgtgttctttcaccgacacatgtatatctttatatgtggccaaagcttcaaaatgaaatgatttagcgctttgcactgaaaaacgaacattctgcatgctaattctataaaatgtgtatggctgagatcgatatatttgcaacatacgaatgaccttttttaacaaatttgatggagcaagaatggagggtaatctaccagttaatgttcgggaatattaagaacttgcttagaaattaattctaaaaaaaaagttcattacacgcttagaaaa

SEQ ID NO: 367918 - DNA, 345 bp, Zea mays
ctcaaaaaaaatgtttttggcagtctttactagattctgggttgagtgcaacaaattaaaatcgatgcaatacatcctctcgaagaaataaaaccaagaagttacaagtctatagattctgtgtcaccgtgaacgattaccagatggggttttgagtctgtcattcccatgtggggggctatcatctctctcccttggcaaccgaagtgacttaaaaaagctaatagccatctcgaggatacagctacctcctgtgtaatatgcgtagtgacataaaacaaaagctactcagcctccttagcatctgaaatttcgatgtcagatgctttgctttcaggaagagac

SEQ ID NO: 367919 - DNA, 471 bp, Zea mays
tcttccacgcgtccggcggagctcggcggcgggggcccccgacccgccgcccgggaggtcggcctcgccaccgcccacacccgtcgccagttctgctggtgcctcgtcgccccctgcacaaactaatgtagctagcatagactggctagacagtgaccaagtgtccaaagcaggatcctctcatattgctccgccgacgtctcggcctgcgcttagtactaatgctaatggagctgccatggactgccttcaatcatcatgcagaccatgggaacgaggcgacctgcttcgtcggctggctacttttaagccttcgacttgggcttctaagccgaaggctgctagttcactggcttgtgctcgaagaggctgggtgaacattgacatggacaagattgagtgtgaatcatgtggtgcacatcttatatttattgcattgacatcctggtcccctgcttgagtataagtgct

SEQ ID NO: 367920 - DNA, 432 bp, Zea mays
acaatgaactttaggctctgtcatagcaaagtctcataccaaatagtttcagttactgtccagcagcacagtgagaaaactcggtttagaaacctagatatatcttgagatcaacatcaacaacaccttagctgcaatctgtacaggacactgaatgccaaaataagaaataacaaagcaacaggactaactaatacatcatattggagcatcaaaggaaatggatcctcacaaattgccaaaactccaaggcaagcgtggattggtcactggccaacaccataaacaagactgggaagcacccaaaggtttgggcagtcggctcgaatgtacacgggtcagatacttttttgcattgtaacaacgcaccgcctgaccaacttcgaacacaccccaaggctcattagaatctgcaagcgggctggcaatgta

SEQ ID NO: 367921 - DNA, 510 bp, Zea mays
tctttctattttgctcaagatcatccatttttcagtggaaggttggatcagacttttggtctgagcaccctttgggtgtcgagtgtattagtcaaatcgtgtcgttcaaaggtgagatatttgctattgacttacttaggaggcttcacagaatacagttggaacctcagctgagcttgcaggaagtagcagttgtctgggacgcggacatgtttctaggcctggatagtacacaatggttggtggtctgtggtgacatgcttctcatggttcacttgtcagtaacaatcgattctccctgttctggattttctgagacctttaatgtatgccgcctcgactttcaagttgagccagctaagtgggtaaaagtggataatatgggagacaatgctctatttggtggtactgatggcaggagtccaacgttttcttgcctgggtcccgagaaatggggcgggaacaggaactgtatttacattgccagcccgcttgcagattctaatgagc

SEQ ID NO: 367922 - DNA, 160 bp, Zea mays
  unsure (1)..(160): unsure at all n locations
ttnttttgttttctttttttttttttaaaacgcgggtttgattaatccggggggcctaaaaaccgaatgcgaacagcagcagcaatcctgaaacaaaaatacagcacttcacctaggcggtggctagcgcacagtacacaaaaggaactggcgatttggc

SEQ ID NO: 367923 - DNA, 264 bp, Zea mays
tcttagagcccagccgcaataatttgttagctagccgaatgaatgatggtctacgcttgttgatgagttggtgctttgtcgtggttttgtggatgtaataattcgatgtacaaataaaaaaaggggagacaaggtgcttgttcccttggtttggtgacaaaaaaaaaaaaaaaaaaaaaaaatataaaacttaaaaaagataaaaaaaaaaaaaaaaaaaaaaaaaaaaaaaaaaaaaaaaaaaaataatggggggggcctttt

SEQ ID NO: 367924 - DNA, 239 bp, Zea mays
  unsure (1)..(239): unsure at all n locations
tttttnnttttttttttttttttaccataaataagggcgagttttttaaataataatgattgtaaccacaatagcaaagacaggactacatgagtaccaaaacaaacagaaaagaaacagcgccaaattaaaaaaaaggatagagaaagtttccaacttctgcaggtgcgacggtacagccaccaacttcatttgcatagagaggtccaggtggccgggtgctacaagaacacccactg

SEQ ID NO: 367925 - DNA, 231 bp, Zea mays
  unsure (1)..(231): unsure at all n locations
ggaccggtccggaatccctcttgctacccacgcgtccgataattcgctcacctcctcgcacgactagggtngttttttatgccattgcgcggaatacacacccaatcaggaaagaaatggcttcaactggcggatcctggcggttcctcacccaacctccgctccacttgctactaccctactgcaccatattctcctgctacattgatcatgtgacacactccctgccaa

SEQ ID NO: 367926 - DNA, 410 bp, Zea mays
ctgatggagaagagcggagccaccggtaacggtgaggtgatgcccccttcggcgaacttgctaatccctcctgccgccgaggaggctttcttgtgaaaggcatgctgaacgctagacccttaccttgtgttaaatggcaaggctagcatgcgatggtccctggacagcgtaccgattggccttttggccgtaagccatgggagatgcattcgtattcacaacagaggcctggttatggatccaactcccagatgagtgaagatggatcattactctgatgcccaggacagctatgctccttcctatcaccagaatggaaaggcccctgattttcaagcggatgaacctaagcctttgacttacaacactggggttgaggaaagaccgccaccgcatcgccgcttggtgcc

SEQ ID NO: 367927 - DNA, 491 bp, Zea mays
ttctacgcgtccgaaaaaaacgatgataactgaggagcttttatggcaaccctgcgtataactaagcaagagggccacaacattagaaatcgcgaatgccatggaccagaggaagttgggtgtaaacttgtgctaaatgctactgaacatgcaatgggccaggagaaaggcagactcatatgatatctaagtgccacgagatgcaagcttgacggtcgtcatggttaactattgtgcactttgaagtctccttcaaacttctccataatcaattgaatgtgttccctctgaattatggaaccaatgtttatgctgatgttcatggcatacatgagctatctctttctgctgccccattttgctcaccttattatttgcattgatgcggacttgtggcatgatgatccagtactgctccatgattgtgtactaattgtgggcgaaataaatatctcgtaatcttttgaattaagagcaccgcaaactttgat

SEQ ID NO: 367928 - DNA, 467 bp, Zea mays
ttttcgcgtccgcccacgcgtccgcccacgcgtgcgcggacgcgtgggagcggatcgagatggcggcgtcggatgttgagtaccgctgcttcgtcggcggcctcgcctgggccacggacgaccactccctccacaacgccttcagcacctacggcgaggtcctcgagtccaagatcatcctcgatcgggagacgcagaggtcccgcggcttcggcttcgtcaccttctccacggaggaggcgatgcggaacgccatcgagggcatgaacggcaaggagctggacggccgcaacatcaccgtcaacgaggcccagtcccgcggcggccgtggaggcggcggcggtgggtacggtggtggccgtggaggcggcggctacggcggtggcgggcgccgtgatggcggtggcggctaccgcggtggcggcggctaccgtggcggcggcggctaccgtggtggtggcggcggc

SEQ ID NO: 367929 - DNA, 382 bp, Zea mays
ctcacgcgtccgcctctctctctcctccctggggtttatcttttcctcggccctgcctgctttttaccacttccgcccgtcgccttccacctctcgcactccctccctccctccctccctttcactccaactcaagcgcagcgctgtaccgtacgtccccgactccccccttcttctactccactcctggccgcactctccatgcccaccccgtgaaggcgaagcgaaaaccaaaaacccctttgctacatcactttactagctagtcgtccccgttctctccttggtcgcggcgccggacgagggcgacggcattgagagatatggactaagagaggcagcagggtttcttcgccgcgctcaaggaggaggtcgtccggac

SEQ ID NO: 367930 - DNA, 500 bp, Zea mays
tcttggacgcgtggggacgagtgggagcaggcgtaaccctaattgagcatcgcagagataggcgtcttcgtactcgcctacctccgcggctcaaacctttcccccttctcccaattccttccgccggccgccgctccacccgtacgacgacaccatgagggagtgcatttcgatccacatcggccaggccggtatccaggtcggaaacgcgtgctgggagctgtactgccttgagcatggcattcaggctgatggtcagatgcccggtgacaagaccattgggggaggtgatgatgctttcaacaccttcttcagtgagactggtgctgggaagcacgtgccccgtgctgtttttgttgaccttgaacccactgtcatcgatgaggtgagaactggcacctaccgccagctcttccaccctgagcagctcatcagtgggaaggaggatgcagccaacaactttgcccgtggtcactacaccattggcaaggagattgttg

SEQ ID NO: 367931 - DNA, 578 bp, Zea mays
tttttgcccaaaatcccacatccgcacccatacggccacacactgaaacacagctatgtgtcgttaaaggcaaacagacccaggattatgtctccaattaaattcccagaaaactctgctcaactcgttctatcgtctgtcgtctcgctctccacatccgttgatccatcccttccaactccaatcaactccgtcccaaactacaatccgtggcaacagaaaaaggtgtatcttttaccagaaacagaagctagattcccggattgctccgcttgatcgctggtgaatcgacccaaccgagtggcccatggccggaaccgagcggctccaccgcccgattgacccgccgcggcccgcgggcagccgctccttcgtggtcggtgctggtggcttgccggcgaggtgggacgacgataacgacgactgcggcggcggcggacgtgtcgaaggcttggcgggacttcacatatttgaccaagaggcagaggagtcaccaaccaaaaacgacatgggccacagccttgttactaactgcactcccattgctaaggatgcacactgaaacaaccgaacttttg

SEQ ID NO: 367932 - DNA, 352 bp, Zea mays
caaacttggcagcaggctcaaatttcagggagtagaacgttctctagaacagaagttgcccgagacgcaaacagcaaattgatatcttatgattcaaatcgacatgccttggtagaaacatttaactaaatagcatttgataacgctgaaaggattacattgcttacacagctcaacacacctagcacaggaattcagggtggaacctacaacagagctacagatttaccagacgcaattctattcccacccaagcttctggcttgtactacacacagttactcacacaacgggcgctactgaaagcgcagattgctacatcctgcctggaattggccaagagaatgcaagc

SEQ ID NO: 367933 - DNA, 759 bp, Zea mays
  unsure (1)..(759): unsure at all n locations
attantccgcgacaaaaatcatttttgttaattgcgatatggaaagagcccgtgtgaacaggaggggtgaggagaagagggggtaatgagtgtgatatctttggtttttttcttgtttccttgtgttttttgttcgcattctcctatttttcttgttcttttcttacttttttgctctttgaacggttgctgcttgcttttggatgctgatttttgttttgtcctttttaccttttgttatcccgacatggtagtttctttcttttatttgctttttcttttagttttctctttttctttttattcattttttttctattttttttttctctttttttttctttttttttttttctattttttttttatcttggagttattttctttttttaataatttctcttttttctttatgttttcccctctttctcttattctctttcttcttttttctcctttttttttttttttcttttctttttttcttttcttcttcttcttttttttttacttttgtttccttttttctttttttcttcttttctttacttttcttttttttttttttcttttttcattttttctatttttttttcttcctttctttttcttctttttcattttcttttcctttcttttctttttcttttctcttcttttttttcttttttctctccttttctttattttttctctttttttttttctttatctttcttttctttttttcttttttttttttttttcttattttttctc

SEQ ID NO: 367934 - DNA, 597 bp, Zea mays
tcttctctccgttcggcttggcttggcttggacggctgccgcgtcgcgcacctgcgggcgggcagtggccagtggctgggcggtccggggccggggcagccaggggcaccgaacagcgaacaacggaagaagagcagctgaacaggcaggggagaggttccagctatgctcaccgcgcagccgccacctgaggtagcgggtgaggatgacagcagtttccaccatgtcttcgtggagtttatgaccaaagccgctcagttcgaggagctcgctgaatctggggagcgattgcttgggagattccgtgaggagcttggttagttgttctgatatgctttccttcctcttttgttggcacagctgatatgccatggaggttcagtttatatattatcccggacaccgttgaattgttaacattgtgatggtattatgtactgttaattgtgatgactgaggcactgagcaatcttattgcagagtattttcgtaggccccagattcctaaggaatcagatgtcatgaatcagatacttaaatccaactgcactgtcagatgaggtctatgttgaagctgctgaggctcactaccaaaca

SEQ ID NO: 367935 - DNA, 340 bp, Zea mays
aaaaacaaaacatccccctccagggtgcacccaaccatccctggggggtttttttccttttgggttctggcaatcaaccaagcagaagcccccccacagatgcctcaatcaacaaccctttaaatctgcctactaactttgggctcgaatatttggcacttgctacttcattctggaactaaaaccccccaaataaaaaagaattggccataaaacatggaatgatttgagcccttcgccggtgcccattgaagggaaccccaacatgggccctggtgcaccaaacatttgggcccctttgattaccggacacaacttttaccatcgccactggtttttt

SEQ ID NO: 367936 - DNA, 286 bp, Zea mays
  unsure (1)..(286): unsure at all n locations
tttctnnttttntttttttnaaccaaatcaagcacaggggggttggatgataatccgtgagaataaccancccatctgcttcctcagtctggtggaacaaaccacaaaaaaagaaaaaagcagattcgacttcccctcggcaacacaggaccaaaaaatgtcttaaaaccttaacaacaactacaaccaacgaccaagcacacctaatcctaacttaacttaccctgagcgttcttctaccaaccgcacgcaatctgaaaacggcggacgggatcctcttacgcat

SEQ ID NO: 367937 - DNA, 263 bp, Zea mays
ccccggggaccggccggaatcccggtcgacccaccgccgctatctccaccgaggactcccacgagggcaattaaaagttaacgggttcaaaccacaaaccaacaaaacgcaacacaccgaaccgcgagccaccgacgcgaacacccaccccgaggcgaggaagggggaatgccccccaaaatccatctactaaagacgccaacctaaagaccagcaaaagaactcgtgcgggacaaccaaaaagaatcaccaaagaaagaccc

SEQ ID NO: 367938 - DNA, 486 bp, Zea mays
tcttccacgcgtccgcccacttacccctcgccgccgcctccgcgtccacctccttccccgaccgcttcctccgcacgccgtgcgcgctgcggccccgctcttggccccgcctgcgggcgggctccgtcaaggagtggcgcgagttcgaggacgacgcgggcgccgtcaaggagtggcgggagttcgaggacgccgtcaggaggaaggacctcccccgcgcgctccaattcctgcagtccgtggagcccgcggcggtgcaggtcgcggtccccgtgccgccggggcgggactgggaggtgctcgacgcctgcgtcgacgccgacgacatgcgcctcgtcggccgggcgtaccagttcctcgtcgaccgcggggtcctcgccagcttcggcaagtgcaagaacatcgttctggaatggccaagagaagtgacaccaacggttttgaaggagactgaccggttggaagctgaaaaacttgcgccgaaga

SEQ ID NO: 367939 - DNA, 303 bp, Zea mays
atccacgcacctccgcgccgagctcctccggtgggcttccgtccttcccaccgtgcgaggaaaaagccagcagcagcagcaagcaagcaactcagcggagcacggcaaagcaaacgaagagctcgcgttggcgttgccgacttgccgtgccttgcctagctagcttcgccacgacgaacctgacgtgagagcgcggcgaccacccccaccggccaccggcgcgcgagtagcttcctgtcgttcgttccctccgagagcgtctatttacccccgagagagccggacgcgcgagatggagatggc

SEQ ID NO: 367940 - DNA, 277 bp, Zea mays
ctgcagagacaggcgtcttcgtactcgcgggtgtccgtgactcaaagctttgcccaattcccccccttctcccatttctcaccaccgccgacgctccccccgttcaacaacaccatgagggagtgcatctcgatccacatcggccaggctggtatccaggtcggaaacgcgtgctgggagctgtactgcctcgagcatggcattcaggctgatggccagatgcccggtgacaagaccattgggggaggtgatgatgcttcgaacaccttcttcagtg

SEQ ID NO: 367941 - DNA, 252 bp, Zea mays
gggacgcgggcttacagttttaaacgggcgaatttgcccaaaaacagggcccgttttttttttaaaccccttacgactcctaccactgttaatttggcacattacatccttaataccggaatgactttgttctcctactttttacgggcccccatttctagtcccactagcaaaagggccgcaggggcaccccccaaaaaaggggccagggttggggccactcctggtttcctccactggggacttttacaa

SEQ ID NO: 367942 - DNA, 295 bp, Zea mays
gccgccgttctcaggggcaggcaatgaggccagcgcgtggtccaaactcttcctcttcgctcccggcgccatcaccttcgggctcggcacatggcagctcttccggaggcaggaaaagatagagatgctggattacaggacgcggaggctggagatggagcccgtggcgtggaacgagtccgccttatcctcggtccttcgtgatccgtcagcactggagttccgaaaaatcgtgtgcgagggcgctttcgacaaggagaagtcggtattcatcgggcctcgctcccggagcatc

SEQ ID NO: 367943 - DNA, 257 bp, Zea mays
ggacaagggaagggggtttgaacacatttgaattattagcatatacgtatactctgggggggtttgcaactaataaatatattggataaggccgatgaatgaataatgttctccgctggatcaaaaaaagatggatcgatcgacgatggccgggggtcactgcaacaaggatcccgagggcccatggagttgcgacttcggggacagcaggctgtccaaaaagttccagtcgatggcggctgcagcttggtttcctc

SEQ ID NO: 367944 - DNA, 255 bp, Zea mays
cccccttcaatttttcataaataaacattggcaaacaatgcatacataaggggcccctaaatctaaactaaaataccacgggttgcactaatgttaagcctaactttggatgaattaaaggctccacacttttgggacccccaaattggaattctattctatggttccagggccaacaaatgggggaaaacttgacatagcaaaaagctccaagcagcacggggatggtctaaaagctgcccttgggcttttccc

SEQ ID NO: 367945 - DNA, 254 bp, Zea mays
agcaacccccccctggaatttacaagctacagcagttgccgagacgtccgaacatttgttttgttcccaggacatacattgggcttttataacctcaacaaaggtgtcgcagaaaaaccaagctgaagccaacagacagttttacatttgccctgcaaaccacaagcccgattcttatgatacgggcattcacaatttgggggttatcctaactaggtctggtttttggatttgaccccacccctggggatttt

SEQ ID NO: 367946 - DNA, 255 bp, Zea mays
tttttccttccttttttttttttttttttttttggggttttttttttatttggcatgggaaaagaaatattttacattaatatacatacaaacgttcgttgttcgactcatacacgaattttacattttttagtgcacaagaattcagtcctctttcaatatcttatcgggggcttcatttaggaggctggcgacagcttcgttggggatccttatcgtttttaatgcttccttcatgggcggatcgacttcggg

SEQ ID NO: 367947 - DNA, 165 bp, Zea mays
ggggccccaaaatcatgtttttaattccttcaaaaagagaaaactttgctttgggtttctgggccccaaagaaaagaaaaaacccccaaaaatcccacttttgaaggctccctgggccatgggatatacatgggtctggccttggcaatttgtcccttttaaggg

SEQ ID NO: 367948 - DNA, 334 bp, Zea mays
atgtacaaatatgtgttatactgttctgagaaaaaattttgcaattcatttatgatcctagccacatataaatttcattgttttaatctacctattccaccactacattacagtaatgacacctgacatccatgcacagcaacgggggcagtcggatgagaatctctgtatggctcagggtaccggtctttgaagtttaatctaggatggtcagccttatcaattggtataaggttgcgacaagactgtgaatcacagggataggcgcagtcaatctccacgtcagctcctctttcaaagtaccaatcacctaccacctctgcggacgcgtggg

SEQ ID NO: 367949 - DNA, 354 bp, Zea mays
atctgttggtcaagaaaatggatgcgaccgattatagcattcgtatatcgtcattcgtcagtggaactctacagtgatattaaaacatacagggtcaaacaagtgggggaaaatgctcctggcctttatatgaaacaagctgcaacaaaagccctaaaaccagctatcagcaaaattctattctaccagtagattcatgcttcatactcatattccccctgaaaaaaaagttagggatattttctccggtgagctcttgagctctctcaactagctctcaagtgcctcgagactcaaagctagcaaatcgttccatgtatccgttggtcctggcaaacaccaatgcatgcaatc

SEQ ID NO: 367950 - DNA, 318 bp, Zea mays
cactaaggatacggcaactcactttagccgaggagaaattaacttgtattaggtgctgtttggttcagaaaatgtgacataaacgtcattgtaacaaagtaacgggatggtttccactcagtaacgtaaatgggtaacaaaaactgagtaacaaagcccacaagctctgcagtctgcagcaagatgtcagacgtagcacaatggcgaccatggtggcagccagtggcaccttggtcgatggcagcggccaagacaaacagaacgccataggagtatgtggagctatgctgctatccatggctgaaaggatgtggagac

SEQ ID NO: 367951 - DNA, 399 bp, Zea mays
tttttttttttttttttttttttttttttttgggggggttttttttttttttggtggttttttttttttttttttttttttttttttttttttttttaaaccaaagaggggggcccttaccatacccaaacgggcggggggggaaaaagatggacagaaggaagggggcccacccaaccaaggaccaaacaggggggagaagggggggggggggggccccgggccattggaacggggccccaccacatttacccccgggggcaaatttttttttggccaggttatttggagccgggaggggacacgtccacgggaaaggaacgggtgggtacggccggggtttcgtccgggacccccccccccccgggggggggccccagtaaaaaccggaggggacgg

SEQ ID NO: 367952 - DNA, 157 bp, Zea mays
aagaaaaagacatggtgttttctttacgaagataagtggtaataacgacgtctggactcttaactacaatagccataaacaaagcatccttcaacaagcaaccggagtgccgggctgaacttcaggcaaagggaaagctgcacagggcccttatttt

SEQ ID NO: 367953 - DNA, 345 bp, Zea mays
ggggggggaacaaatcacattccgggcaaatttgcaatcacacgggtgcagacagcaaaaatcctgattaacggggcacaccacacacagcattcagaacaaaagtcaacaaacataatcaaatcgtcgccaccaccgatcgacgaacacaaaaccgggcaacacgaacgcaatgcaataaggcttgtgtgccatgccatgccaccagctatttatgcaagctagatctagcagttcttctccgccttggcgagcttgcacgtgaccttttggaacacgacggcggcggtgcccgggggcgccagctgcagcttgagcgggcacgacccctggatcttgcacttg

SEQ ID NO: 367954 - DNA, 275 bp, Zea mays
  unsure (1)..(275): unsure at all n locations
tttntttttttttttttttttttttttttttttttttttttttttttggggacagatgaatatgaacattaagcatggacgatcaaactcatccaccatcatacatataccaagtcatcaccaagcgctcaaagtacttttagaggtcatggatgtccccaacatattgagttgccagcaaagggtaaaatccccagtagcaagtagtagtagtagtatgccaatcaacatgcttcacttagggtcagggaaaaacttgttaactgcaggcatga

SEQ ID NO: 367955 - DNA, 356 bp, Zea mays
gggtaaattgaacacatcagttcacttgtatgtatattaaacatcagattgttctcagaggaaaaacaaagagagcaacaactttccaagagcaatggagtacaaaacatcacaactaaccaacacgtcctagtgaggtacctaattctgcaaccctgaagcctgaagggatccccgtgtacgcaaatgtacatagatggccaacgattgaggcaaatgctcagacagggaacacaccacaatcacacacttggcattgaagcgcatacgacgacgtaggccaggtaccgcagggcatcttgtagcttgctgacagcgctggtctgatcggagttgagatggatggatatggactt

SEQ ID NO: 367956 - DNA, 328 bp, Zea mays
gagttaaatgaacagattagatagtacgcctcattgtttatatgaggattgcgcagctgaacctaaacggtgaactgtcaggcacagacaacaacccacgtcacagaacaacttgagatcatctggtatacacacgagcacatctaagccgacgatctcgacttcggtgaggtctgtgcaagcttcagcaggctaccatgggccagtcagggtgcggtgaagacaaagtttctttgccttcggtccatgttggttgttgattcgctccaggacctcatccttttgcttcttcagcatttcaacctgctttttctgcaactcgtcattc

SEQ ID NO: 367957 - DNA, 354 bp, Zea mays
ataataacaagccatttcgggctatcgcatcatcatatatatgaaagacttagtatcagtaaacggttcggctcgagcgagcgagagatataactataggagtattagtacgtacataaatgttgttattcgataggataggaaagcaaatttatgtgcattaaaaatatttttacaatcttcacggactaaggggcagccagaaaaaaaggagccccggaaaacatacgtgtatgcttcaaagctgtagacctgtagttgttttttcacagttctttctacgcttaaagttaggggtgagtaaaccaccaagacattaaaaacttgtaatgctgctttcttatctgccttctc

SEQ ID NO: 367958 - DNA, 223 bp, Zea mays
gacatgatgggatgatcacttaaataagtttgtttagttcaggatcaaggattgagacagaattattctagtattgtccccagttgttccttaaaattggagggacaagagaggataccaggggacattcctgttttggctatccagcaaccaaacgcacccttaaatctcagatccatgcaagcaacatgatagcacaattatgtctcgccccacgcgtccg

SEQ ID NO: 367959 - DNA, 364 bp, Zea mays
aatcccagcaaccttttttttttttttttgcatttctccgtctgtagatgttagacaggctctactgatgaaaggtttccaagtgatattgcgtgcttatttttctacattcttgccattctacgggttcgtgagatccggccagcaaacaaagatgtcactggagcactccccttatctcgtctctgacaccgccactcatctctgaactgaacacacccaaaaacctacaagtaccggatcaaattaaaaagcataaagcatcacggcagccatgcccatgctatcctcgcacctcctagagattgtccaggaagaagaggtctgacatgacatcgtcctgctgctggtgcccttcctcccc

SEQ ID NO: 367960 - DNA, 204 bp, Zea mays
gggcaaatgaaacaacctacattaactaatagtcataaatttggggaagtcccgccaggctgatagttggtggactacagcttatttactgatccttttcacagccccgcaaacaaagcaaaaatgaaatcctgggactcctcactcgatagtcaatacaaatttttatacaagcaacggacaaacttttggtgaacttatttt

SEQ ID NO: 367961 - DNA, 114 bp, Zea mays
gggagactgtacacagatgtgattgatgttgatctaaattacagttctttctccaagatcgatcagacgatctttttttttttttatggactctggtattagcggatagcggtt

SEQ ID NO: 367962 - DNA, 286 bp, Zea mays
aagattgaaggatcaatcacactcaggtcgcatgtagcacgtgagcaacaattctccattgaaaaaaaaaacaaactataactcttgagcacggaaattctattcaaatttgccagaaacaatttaaattgtgatgatgtttttacacaataaagcctgcgagcagagaccatatttcaggaaagcggaaattctattcaaatttcccaaaaacaatttgaattgtgatgatgcttttagacaatcaagcctgcgaccagagatcatatttcaggaaagcgatttg

SEQ ID NO: 367963 - DNA, 325 bp, Zea mays
gaaggaaatatggagctcctgttattattattattatttgcttacagtgacgagacatctctttcacagactgctgaatgcttgatgattttcccttgggaaaccatcgtagtaccagaaccagctaaacataggattagttccaaacccccctctctcccctcccccaaaagcacccacttattattattattactgtttctcccctccgcccccaacggacctgcgagagccacggatgattgatttcgctcttgctcatcaccaacccgtccgtcagtcccaaaataaccaatatatcacccccgcacaaaagaacacctaa

SEQ ID NO: 367964 - DNA, 357 bp, Zea mays
aagaaaagaaaccattccacagatatagcttgaaaagtcctagttttagagcaaactcaggtctgtagagaagccagtatctgttgaccataaaatggaatggaatgcggagcattattttcatgatgtaatttaaagcgcgattgtacaaggaaaaaaaaactcttctcattgatcagcaccgccagtatttacatggtgtccatcggccacgaagtttgttaccttctgtacagcgccttgatatcctggcggatcgctctggtatccaatagctcgtccccagagtcgtcgatatcgacttgaccaagcttgaagttttccgtggtacactgctcgctccattcaaaccacagc

SEQ ID NO: 367965 - DNA, 260 bp, Zea mays
ggcattataaattgtttcttacattaattataattcacaacatgttcatgttgcaatctgtaagggggatacacgctacatggaacaagcgaaactggagctccaaaattggcatcaacaaggtatgtttctattgctctcctgtaggttaggacatctgtatggcgacacctcgctgcgcgccttaagcgtctagtcgactcaaagggctaggtcgccacgctttaccttaccgacttaataacaatgcctacaacaat

SEQ ID NO: 367966 - DNA, 246 bp, Zea mays
ggagccggaagccgacagcacgatttcataatttactaagtatatctgtttgtttacaacaggagcagcaagccagcaataggaaactaggcaattaggtagtactacaagaacataagtttatctgttgggctcgaaattaatacggtacataaatcctacagtacaacacaacacagtcaataggttgctgcagctcctgctagcttcctgagtaatctgctggccgccttaagcccaacccca

SEQ ID NO: 367967 - DNA, 366 bp, Zea mays
gatacaactcaattcaatccgttttttaatgccccgacatcctaatccgcctcgatccttttaaaaatccacgggccaatccaagggccttcatatacaagcaagcaccaccacaagctaataaattagtaaaatccatgggctcacaaacaaatgatagaaaacaaccacaaagtgcaactgtgtagagaaatagaacttgacagccatgatcgatgagaaactgctccatgctaaaatgtttacaaagacgctccatgctaaaattcagtatttctacacagttttcattgatggatctagaacagcagctatgagcaacacaatattaggatttatccaatatttttggaacttggtatacat

SEQ ID NO: 367968 - DNA, 331 bp, Zea mays
aaaccaaaccaaacattcgttttcgctgatttcaaaaggcgcgccgcccctcatagtctcagattctcatgtgggaaggggacaaaaaaaacctattcataaaattgaccgcgtgtctccggctcggcgtccgcgacgcgcgcgcgcacagacacacacactaccaccgcgccgcgccgtcaccgccggggtagcccctcgatgtcgtcagtcgccgtttccgatccctccaggctacactgccgccgcgccgtcgccgccgagcggcttggcgctggcgacgaaggacggtgcgtcgtggtcgcctggcatgaacacaacgaccttgggc

SEQ ID NO: 367969 - DNA, 247 bp, Zea mays
aaaacaaatttatgttcccgggcaaaagcacttgaccaccatttttattttacgacaccaaaagaatggatcaaaattcataacacatgacaacagggtgataattacaagaaataaaaaaaaacatggggggggggaggaaattccagggaagatgcactacgctcaccgtcgccgtctggagactacaggagagcttgtaccagtctgctgccttctaaaactaggcgaggacctttgaatgggg

SEQ ID NO: 367970 - DNA, 128 bp, Zea mays
gctattttagttgtggcacagaaaagcgcccatgagccttatgggaacattaagtaaacacaggtggttcaaagatctttaggtggacaagctaaaactctaatgattgttcagataaatcctgatgt

SEQ ID NO: 367971 - DNA, 121 bp, Zea mays
aaaagacagaaagtggctgatctcaactagtacccttgtcttctgtacacctaagaacaagggctggagcgcaagtggtgaatgtgttggcctgttattatcagaagtcacggagggactc

SEQ ID NO: 367972 - DNA, 192 bp, Zea mays
cccacgcgcctgttgaaccgtgtggtccagtggaattttgcgagctcattgtactttgaaggcaaataaagccattctccaatctgaaggcgaaacaaggagtgcacaactttgccctctacaacaaagatgtgcactccttgatggagagggcaaagtttgctcagctgctgctggacattggacagcgca

SEQ ID NO: 367973 - DNA, 418 bp, Zea mays
  unsure (1)..(418): unsure at all n locations
cccacgcgtctgtgtcgctggatttcgaccggctatgccagcgacctgagcgcgtgggagagtaggaggtgttcgcgccggcggtagccccacctctgtgttgcggtaggtcctcccgttccccaagatccctcgcatcgccgacgctgggagggtggcgcctcggcgatctctctgcactttctggaggattctaggataagggagcagggacggcgtatggggccgtggatctgatcgcctcctgcatcgactccattccgncaagattggagatgagattgcagattcaatagtgtatattgacgaggcaccttgaggcgtttcagttcatggagggttccccctgcttctgaacttcgtgctcgtgctgtgtgcagcttggagaatgcatcctctctcgatgctgcagctgact

SEQ ID NO: 367974 - DNA, 248 bp, Zea mays
gtcggccctttatggcgatccagcctcggcccctccacgtcgccctctccccagctgcttccgccgcccctccccatcgcgtcgcccgtctgcaaactgccgcctttgccgatccgcctccacatctccgcctggaagacgagaaacgaggaagacgatcccacctcgcctggaaaacgcatcccaagacttcaaccttcctttccgcgagatcgttcgatctcgcgacagaccgggcaaacgggccg

SEQ ID NO: 367975 - DNA, 249 bp, Zea mays
cggacgcgttggcggacgcgtgggcgggggacagctggtgggaccagccccccgcgtgggcgctggacgccggccagcgcctggacaacgcctgggtggcaaggaacctcctcgtctacgactactgcgacgaccgcaagcgcttcccgacgccgtccgaggagtgcaagctccggcccgccgcgaccgcatcgtgatcatactattgtggatggtcgtgcatgatgatgagatggtttttttttttgg

SEQ ID NO: 367976 - DNA, 175 bp, Zea mays
tgcacagagcacgcgggtgccaccggccaccgcgcaaactccattgcgcgcagatcaagaccgccacacccaccaccagcgcttcagcgggagacgtgacgactgacgagacgaagcctctccccacggcgcctccccctccacatggcctgggctcgccttgcctcccgctccc

SEQ ID NO: 367977 - DNA, 189 bp, Zea mays
gctcggggtgtgtacttatgtacgccacgccatgtggcctcacaggctaagctagtgatacccttgtataagtcgtagtcagtgacgaagtcttacatttatcgagatcaggagaggtaccgagagcggggacttccatcatggaccttgaagtagtcttatggacagggattattgagcacgtcatgg

SEQ ID NO: 367978 - DNA, 201 bp, Zea mays
ggaatggaaattaaaaggccctgtcattgcccatggcctggcctgttgtcgatccggccggcggcggatctactgtagtgcagacctggcgcctggcattgctgtactgaatgctgacttgaagtgaaggcattgctgaaatgctgaatgttgctgggtgctggcgcatggcgttgctgaaagctgagttgctgttgctgg

SEQ ID NO: 367979 - DNA, 200 bp, Zea mays
gccttagctatgacgacgcccctgggcgccgcttcccttgttgagggcgtcgtgttccctagctttgtcttccgtgggcgaaagcccggtccacctcggaccggcgacgatggcgtccccgacgtcactccctttctgaaggcgttgctactgaagatcgtctcggccacgtcgttgccttcggtggttgctttcgtctt

SEQ ID NO: 367980 - DNA, 378 bp, Zea mays
cccacgcgtcctttcacgcgtccggtcgggttcctgggcgccgcgctggcgtgggcgctgttcgtggtgcccgtccgcgggatgcggatcgaccgcgtctacggtgaggggctcatcgccatctacctctgcttcttcgacgcgcgctgcctcgagacgctcgggctctggagctaggagccctccgcccgaggctgacacactttcttccccttgcccgcgttcgtttcttgctactgaatgatggtagatctagattgacggtaaatgacagtacgagaaggatgaaaggtagagataatcttgtatattactgtagtagtacatatggctatcctattgaagaggtagcactactccctcaggtaggggttgatt

SEQ ID NO: 367981 - DNA, 488 bp, Zea mays
gtcgtgattacttttgcaaccatgaatagtccatattgcttttccaggtgtgtggagagacatgtgtattcctcctatgacgaattcctcaggctccatgaaggtaagcctgtcttaatgggcttgattgttgaacctgacttagtacttttatccatgtcacgacattgaaccagacagtcactcatgtccttaggatattaacggtatacatcaacaattcattctattttaattgcttgcaaaacttttttggcccttcaaatgagttccacgcatcaagaagtcaagattccaggaggcctaaaataggtaaacttgctgttatatcttttgtgctctcagtagtcgcctattacttgttttaattcgctgatccatgtgcagcgtatcaatttgtcttagtatttttattcgtggggatgcctgactcaaatgaactcatgttcaacactgagcaacctacttataattttggagcctataaa

SEQ ID NO: 367982 - DNA, 122 bp, Zea mays
ggccattcctgttcttttggtggcacaggcatcggttgagcctctggaggaagagagagtccagatccctccctggatctggttcagctccgcgcacggtaagaacctgggctctggggaga

SEQ ID NO: 367983 - DNA, 353 bp, Zea mays
atgcctctgcctcccccaccagtctaggacgggtgacttccacctcctcagcgtccggacgacaagaagtccttcgacatacccaaacctgctactgctgatcgtatcgccaacctctatgcataccgaaaagctcaaggcctctgctataagtgcggactgcagtactctcgaggacataaatgtgcagaaactgttcaacttcatctggtggaagaaatgtggcagttaatggatctttctgactctgatgacagtcatgatgttcctcctgcacaagtgaactctatcctcttgtcataagctgctgtggatggatccttagcgccgaaaactatcaagttcctcgggtc

SEQ ID NO: 367984 - DNA, 328 bp, Zea mays
gcccccgtcgtttcatccccgcgcgcgtcttcctccggcatgcgccagcccccccgagctcgcccgcgcaccaatctcgcacgcgggtatcccgcccgcgagcccgcgcaccaagctccttccccgcgacaagctccctcccccgcgacgcgtcttcctcctcgccctagatcgccgccccagctctctcctcaccccgcaatccccgccgcccatgctccgctctctactcgccccagatcgtcgcccctgttcgcgtggattgggtaccggtcccaactatctccatggattgcgcgtccgcgacaacccaatctcctcccggtct

SEQ ID NO: 367985 - DNA, 131 bp, Zea mays
gaacacagggtgtgagaggaaagaagagaaatcggaaccagcctgctctttttgctctggatcgcggttcttgcgagttgttcagaaactctgggccagtttctggtcctttaaactactggaaagaggaa

SEQ ID NO: 367986 - DNA, 299 bp, Zea mays
cggacgcgtggtttttcaggtccacatgccgaaagcaatggcgacgctgaggagatagctgctcgtgaagcctgcccgagcctcctcgtgccagatctggccaaacttgaatcagttgtttactgatttctcccgagcatatgtgtgctgctggcaacttaccacatgggtgtttcgtatctgcctccaaactacccaacctaatgcagatgataaatatgtagctattgataaatatatggttctcattacttggattatttgtcaagtgctcctagaaaactctcagagattattac

SEQ ID NO: 367987 - DNA, 244 bp, Zea mays
tcccacgcgtccgtggagagatcgcacgcgccctctgccgcttgttcgttcctcgcgcttgccaccaggcaccaccacacacatgccaatctcgcgagggcaagcagcagggtctgcggcggctacaaactagcagacatcaccaataacgatttgctcgatatgcgtgcaaagtctggccactgcatcaagatggttggttcctacttccaagaagctaagtcaaagggatctgcatgcccta

SEQ ID NO: 367988 - DNA, 432 bp, Zea mays
  unsure (1)..(432): unsure at all n locations
tgcgccagaggcaaagagttcaagaaacctgagaagcccatcaaccataagggaaccaaggagcaggtgtccatgaagccaaggtctccaccacgtgaagggaagcatctggagaagccgtgcgagatcgtcgatgtcgagcagtatgaagctgtggctgaagcgctcaggaaatctgacgaagcggctgatgctaagggagcatcgctcaaagacgtgacgaggaatggagctgatgaagtggcgggccaagaacaagggcgagagcaggagcccgtggacgtggaggacgacgacgtacggcgtgcgctgcgcncgtgtgcgcgagcaccgacggcgacccgtcggaccccatcgtgttctgcgacgggtgcgacctcatggtgcacgcgttctgctacggcaacccgctggcgcgggccatcccagacg

SEQ ID NO: 367989 - DNA, 480 bp, Zea mays
cgcctctcctctgtgcgtaccggactaccggtaccgcgcgttcagtttccacttccacccgcgtcgtccgtctctctccgctcagcttgaggtgtccggatcacggcggttgcaacctgcagccgcaccagcaagccgctgctccctctcctaaccggccgctgcagctgccatgtgggagtagaagtgccagccagcattgatttcttccaaccgcctcgatgcgatcgctcaccattccctccttgtaccgccatggcagaccagccgtgttagatgccggcggcgccggccatccgcctggggcctccgcacccgtacctgaagacccacgggggcaaggtcgcgaggctgcaccggctggacgggccgtgctgctgctcatgccgcgctcgacgtcgggctcacctcgtcgagccgttccacgcttcgtcggcgaggacatgttcgcggaccttccgtacccgcttgagagcaaca

SEQ ID NO: 367990 - DNA, 403 bp, Zea mays
tcccacgcgtccgagcaggagtaccgagtactccgagatctggcctgtgtccacagccttctcttccctgacctcgacatcttgccgatctgcactgactccgcggcccgcgttcatggcggtgacctttccctctcccaccccgcggtccccgcgccggccggatgccattgtggctcctgacccctcgtctgctgacatgtcgccctccctcgacttcggcgacccgacctccttcaccgcgctgcgcgtcctcaccgacgggggtgccgccacccgccttctccacgagtgcgtggcctaccagcgcgccctcgacgcccgtctagacgctctcctcgtccgacgagccgacctcgaccgagccgatgcttcggtacttcgattccgcccaccactgctc

SEQ ID NO: 367991 - DNA, 394 bp, Zea mays
cggacgcgtggggaaaaatcggaatctctgaaaaatcctccgtaccatgaagctccggttgcgatctatgcaggcgcgcggcggctccgccgccgtggagacccaccgcgtggacctgccgcccacggccactctggccgacgtgaagaccctcctcgcgtcgaagctctctgcggcgcaacccgtccccgccgagtccgtccgcctctccctcaaccgtagcgaggagctcgtctcgccggaccctgccgctacgctcccgtccctcggtctcgcgtccgggtgatctcgtatttttcaccctatcccccctcacggccctagcgccgccggctcaggccctgccacggaaccctagcccgagctctggcgctcagcgttcgatcgctgaggc

SEQ ID NO: 367992 - DNA, 270 bp, Zea mays
tcttatcgcgtggggtcgcgcgcgcccctcgaaaagccacaccccgtcgtctgacctcgtggtgaccggtcccgcaggcggcgacaggagatggacggggagcaggcggcgcggtgggcggcggcgcaggatggggttcccgccggggcggaccttgtcggggcggggctgcgtcagatgagctttctctggttggggtaccgtgacagttgggtcttctacgagggcacgatgacatattgagatttaagcatttactatgcaccccaa

SEQ ID NO: 367993 - DNA, 287 bp, Zea mays
tattttcacatgtagaccgcagagctttttaatgcaatgtgatacctccagaggacacgcatcgagatccccagacgagtatataccacaaggcaatgagcttacgacattatatgatactaatacgttcaatccactggcggaattcttggtcttttgagtggtaccctgaattgaatgatgatgcacacatgcataaatatctttgatgactttactcgagcatttgatcttgagtgcagtaagaccacatgcataatgactgtccaatggctcgaatccaaaat

SEQ ID NO: 367994 - DNA, 335 bp, Zea mays
tccacgcgtccggtctctctccggcctccctcgcccacagagacagagcggaagccgccgagctcggagcccagcactttgcacgccgccgccggccatgtcggtggatacggagcggagctccaccgagtcgtccgcggcctccgggctcggctacgaggacaccgagctcgccctcaccctccgcctcccgggctccgaccccggccgttcctccccgctcgccgcgccctccgacgccgcgccgtctcccaagacgcgggtgtgaggtgcggccgccagtgaggtcgtaccgcaagaacgcgctcgacgactccagcaaggacaaccggtca

SEQ ID NO: 367995 - DNA, 201 bp, Zea mays
ttgtcttgtcctaacagtcaatgtttgtgtggaggtttgtgtttttatagtgaagacaaaacaataaagattatattatgagcatgggtggctaggagaatctttggcaattacattatgaaattatgatgtacctcatctgtgacagccttgacgacatccatgatgctcgcacttgcgtgtcagaggaacaagctgagt

SEQ ID NO: 367996 - DNA, 498 bp, Zea mays
  unsure (1)..(498): unsure at all n locations
ttgcgcaacttacaaaagaagtaaaccaaacatgggttgtgttgatcctggctaattaggatcagacaaccaaacacgcagctactgagtaattgcatcaactcatcctgcatatgctcaacctgcatattgtcttgaaccaggctgtactcgtcctaacaaccaaacaggcggatattgtgcccggccgtgcaaaaagtggaccaaaaagttcccggcggggaaattcgtgcggacgaacgaggatttgcaggataaggggttgaggaaaggaaacaccggtcaatcaagatgtggggttcatgggctcatggctactagcttccttttcttcattaagttgtctttcagcttgacaggcccaggtttgattacacttttttttttcggccaccaaaactgactgacacttacttgccggtggcgctggccaagattgttggattaacaataactntatttcccacacccccccccccctttttttttttttttttt

SEQ ID NO: 367997 - DNA, 529 bp, Zea mays
tattttgttagctgctacgccggctggtgccgccgcggcattcccggggggtcccacgcggcctttttatcaagggatgctgtgcgggcaccccgacgcgggtggttaccctcccgtggagatccactgatgcatatttgccggctggcgctggcggagatcctgctcatgcgcagtgtcccaacccgccgaccggggcacgttcggtcggagtcctccgatgcgattctgacgccctcgggtatggttgggaaatctgaacgctggggagtcggtcagcactgttgaaggccatgataacactgtgccagggcagcacaggaagttttggcacactgaatccatgagtgttggtcagcgtgggacccacggacggacaatgagggttgtaccgtgagggaagtagcagagtggtgccaaaaaaatttttgcccaacacaccatgcttgaggaccaatttactcttactgagatgacggaagggttatcatcggatggaaggatcacagagctcatatctgagatgcgc

SEQ ID NO: 367998 - DNA, 272 bp, Zea mays
aatgcaatgcgcgcattgcggaacaaaactgtgaagacgtgaaagcagaacattcacttttccatcccaaaggagtatttcattctgtcctaacattataacaagggacctgggtatttttgacagggtaaatactcgcaacttttgagtggaagaagcgcctcattgggattttcccccccccccccgcccaaaaaaaaagacaccttctaatctttcgaaaaggatgggatgtacacaccggctttaagtaccaaaggaggacttgcttt

SEQ ID NO: 367999 - DNA, 142 bp, Zea mays
tctggaaccttatttcaatggaccaagatacagatcataatcttttcgaggggagtgcgaaagcacagacggagacgtgcgccctctggctcccaaggcgggatgtgaaacttcgcatgggcagtcaggggcagatccaggg

SEQ ID NO: 368000 - DNA, 318 bp, Zea mays
tctaacacagaaaaaaaaaaaaaaaaaaaaaaaaaaaaaaaaaaaaaaaaaaaaaaaaaaaaaaaaaaaaaaaaaaaaaaaaaaaaaaaaaaatggcagttgtaagtttactgttgttttttaagtcgggttcagtcatccagggggtttagtttggggaacccccataaaaagggggaggggggaatcccatcccagggtcataattagggatgccttttttttgtaggcaaatgtttgatgtccaagggccggccggcagtttaaatgttacacctggcttttttgggggaaaaaaaaaaaaaaggggcggccgtt

SEQ ID NO: 368001 - DNA, 335 bp, Zea mays
  unsure (1)..(335): unsure at all n locations
tcctcacgcgtncgcccacgcgtacgccgccttgcgactccaaaaccctccctccttccccttccttgccccgccctagggttcgcgccgccgcgctgaccctgtcgtagccatggggtcctcgttcccgcccaaggaagccaacctcttcaaagtcatggtcaaatcctacgagactaagcattataagaaagggcttaaggttgcagattccatattaaaaaagtttccagagcagggtgacactctctaagtgaggggttacactctactgtgtggggaccgaaaatctgacgcgtccgatcttgttcgacgggcctgaaaaatgatctgaa

SEQ ID NO: 368002 - DNA, 395 bp, Zea mays
ttgttcgcgagccgcccttttttttttttttgggcactgagattaaatgactttacttggtcaccaatccacgcccttatgagtttgtgtacgggcaattgatgtaatcatggtcctacggagtggacagagtttacaagtcatcacaaaaacgatgctccaagtgaggaaacagccctcaaacttgaaccaaccacaaacaggagactcaagtctgttgccttttccggatgcagcagtcctttttttccccatagcgagggtctagccgtctccgtctagaacaggagactcaaagcatatttcttcggactcaaggcagccaagccaacttcataggaggcaagcccgagccctcgattcggtcaaacgtgttgcacacagccatacaggca

SEQ ID NO: 368003 - DNA, 347 bp, Zea mays
  unsure (1)..(347): unsure at all n locations
tgcttgacaattgaccatgttattccgatctcgcgtggcggtaaatgggaatgggagaatttggtaggcgcttctagtgctcctattctatgtactcgttgttttatccccagtttgataggcacgtgcatcttttaattttaactgaatctgtgcaggcgactgcctgtgcaagatgcaactccaggaaggggcagaagacactgtagcaggcatacatgaagctgcgcaagatccccagggcgcccaaggagtacgatatcatggctgtgcccttgacaaaatctgcgttcagaacgctcaagnaggaaccatggcctcctgcaggtgtggctgcagtaccttgc

SEQ ID NO: 368004 - DNA, 396 bp, Zea mays
ttgtggacgcgtgggcggggctcggatccggcgagtaggagcggaggggccgagatctatgcgcggagggggaggaggaccggtctgaggaggaggaggagggaagtttaccatgagagcatatggtgaggactttgactttgctcagatacttgcgtttaagtggagcatataggtcatccctgctatcacaagctcggttattaacgtgtgaagataagatggcaggaatttagagtgtgaaactagcggataccaataaatgcagtgcagtctttggaaagctgaacttatagatctgaaaggacctgccagggaataccccttactaaaggtgctaatgggcaatgtaaaagatgattgccaagtactcgtgctcttttcataaaggagtac

SEQ ID NO: 368005 - DNA, 319 bp, Zea mays
cccacgcgtccgaaaagtaaattatgtagtagtgtggagtatttattgcatagagcaatatatatatggggtgaggtacacagggattaagtcaagaacgaaccgttcgctaggctttgattgcttgagcaaacacgttttgctatcgctcaagcttgttatatgctcatgtggtggttcgggtattgacttaagtctctggcaaaagaaagtgaaacaccacctattagggcttctcctatatataaaatatatatgtagcagtttgttttcaaaaaaaaaaacattaattaattgttggtaaaaaagaaaaataaaa

SEQ ID NO: 368006 - DNA, 263 bp, Zea mays
ttttgacgcgtgggttgataggaagccagaggccttgctgctggaccaagattagtccaaaggttatctggttttggggaccatagatctgcagacaatgtggatagagtggtagaggaggagcttgcacatgcttctatggttgtgattgatttctcacagactgccaagtgatgggtcgtgagcaaatcgatactttgcacgacttgatagacggatgcgaagttgtgctgtagggatggattcaactacacggttcgaga

SEQ ID NO: 368007 - DNA, 144 bp, Zea mays
aactaactgtaaatggggggtactttgttgatatgggcattctggaccctggatggctatggaactaactcttgttttggtaagtcgtaagcatggcatggagtataagccaatctttcaaaatgttgaagctgggccctaggc

SEQ ID NO: 368008 - DNA, 311 bp, Zea mays
tcgcgcgaagacgctttcagagcttatcatttgatcctcctcttatccgcggtaattctctgacccgtaccgacaccgataggattatgccgacgacctcttgctcgattctggactccgtgaggcaaccgagcggaccggccggtcaaaaaggagtatgtggaggaagaggctatctacatggagtcggatgtaactgtattttctttatgcgccgataaatgcccgcatccgctgtatataaatgttgatgcaatgggggcattatagtatgcagctgtgatgcagctatgtaagcgaacaaatactaa

SEQ ID NO: 368009 - DNA, 102 bp, Zea mays
taaaaaaaaaaaaaaaaaaaaaaaaaaaggaaaaaaaaaggacgatggggggggttctagctggcctacgcttgcgtgcgcgggcatgcgaattctatggtg

SEQ ID NO: 368010 - DNA, 467 bp, Zea mays
aggacgcgtgggagtgacgcaatgaacggacgcgtgggcggacgcgtgggatcctatcgacgcgtccaataaaaaggggggaagagcataagcccttttttttgctgccttccaccctagcttttccctaatgtgatgcttaaaccctcgccgggaggaggactccacgcgcgagcccgtccgcgccacctaccgtcgcgccaggatccccgccatggccgccgcgccgctaccgggcccaggtccccgatgatagcacggctccgttgcagacggtgcctgtacttgagaataaccgaatgcaagagggcaaacgccaaggaccagattctttctggtacagagaatgggactacaggcaaagcacgtggcgctagctgcttgagatcgtcaaacggcctaccagagaaggctagctttgtcgaaaagctggagagcaaccttatctctaccgtaaaatgtgtatg

SEQ ID NO: 368011 - DNA, 334 bp, Zea mays
aggggaatagtataattgtataaggaaaaggttcctaaaaaaaccattatcacagccgttgtttctccatgaattcttttttttttgacaaggatcgtatctagaaatccctattgaattatgtctatcaaaatgtatgatttctgccgctcccaaggtatccccaaaaaatttaaagaaaatggaaaccacgtttatttgttttttttgcctttacagtgtacaatagctgtttattcgcctaacaatgctacatcaaatctgttgcctcacacggcaaaaaggagccttttcttctatcccctctcttctggcctacctcaacaaacaagtt

SEQ ID NO: 368012 - DNA, 252 bp, Zea mays
tcgatcgacggttgcgtgaaccgtctaggggggttcttgcactctgaagcggcttccagatctaaatatttatgctcacactagctgtggattcaaggccaaagggacaagaagtggatatgcattacttgcatgagatgttttaattcatgacaggaggaaaccaatacctggtgatagcatgtcttgaaatggagcaagggaaacatgcgaggtcgacactgttgcggaggaggagacttgtattattgg

SEQ ID NO: 368013 - DNA, 208 bp, Zea mays
cgccttcagcacctacggcgaggtcctcgagtacaagatcatcctcgatcgggagacgcagaggtacccgcgggttcgggttcatcaccttttccacggaggaggcgatgcggaacgccatcgagggcatgaacggcaaggagctggacgggcgcagcatcaccgtcaacgaggcccaggcccgcggcggccgtggaggcggcgtcgg

SEQ ID NO: 368014 - DNA, 563 bp, Zea mays
  unsure (1)..(563): unsure at all n locations
tcgcggacgcgtgggcggctatgcgggcttcgaccgtcattatttagcagcttctcctttgggttgcattcgaagttgtcgacttcggctgttgtcctcgttgcttgcacacagacgaaacttttctgcacactgcttcggttgaagccaggttagcttcgtccgctagtgaaaatgttcctggaacacacttgttcgtgccgaagcagcatgttaatcaggtgatcttcgacataagaggcccccaatagatgttttgtttagttttcagttttcaaaaattaaggtcggtttagatgccaatagatagcaatctatattatattgtgaacataaaccaggttaactcattgcccaaatagtaaattgtgggggtatcaatttgggttgcaagtagtcaacctatcaacactcatcaatagtttgtgtacttgagatcgaacttttgaaaatgaacctgcaactgacaatttgggctgcacgaattcaacctttcaacgttcatattggtttatgtacattgggattgaacttctgaaatggcanaatatgctgctaatcag

SEQ ID NO: 368015 - DNA, 344 bp, Zea mays
ttgtaacgacattgatggctgctcacctgctaaattgcgagggcaatctgactggggaacaaaaatgctactacctgcgtaccaaattacaagtcactccaccaaaattagagaagataattaattatactgtgaaaatatatttaatgaagaagcctccaatgatacttatctataattaccaatgttattatgttattattatatataaattgttgggcaatacttagtttggatatgtattggaaacccacaaatcttacacattaatcatgttgctagccaacaaggttgagaactgtctagcgtacacacagggagtggcagttagatagcgttaggtg

SEQ ID NO: 368016 - DNA, 278 bp, Zea mays
gaatgatgggatttttttagctctaagacaagtactactgatccttgcgcttcactcgccctcttgctccctgcgtgttcttgatttggcctcaaaatttgttgcttgttttctcgtgtttgaggtgacatctcggttctaaaaatctgccagatttcttctccctgtttgtatggacaaatttgggaacgaaccctagtctgtgtgtgaagcagccaaagtagtgttcttgcggagcaaagcaaagctaaagcggcagcagctggcgaggatacaag

SEQ ID NO: 368017 - DNA, 284 bp, Zea mays
gcgcggacgcgtgggttgtctcgtgggcggcgcgatcgttccgggatcggcagctttatcggggggcgagggatcacggtagcggcggcggcgacgaccgaccgaccgacccaacccgccaccagtgccccgcggcccgcgccgaggaagaaggaagggataaggagaccgagccggtggtcgcagtcgcagggatggccgggagcatgcaggcggcggacgcggcgggccggctgagcgcgctgctctcgctgctcgcgctgcgccggctcctcgccgtgctg

SEQ ID NO: 368018 - DNA, 478 bp, Zea mays
cggacgcgtgtgattaatttattattatctatttacgatttgagcgttgtttttttatatattacacttatgacatgaatacatatggaaattgatcctcacacaaagataccgtttggttcacgtagttataacataatgagtaaatgataatgttaaatcatatttgtttaacttctatcgtaattagatacattaagaattgatttcgacatattcaaacttattactgctagtagtcgagtgtgaattattatcatttacgttatatttcgtaaaccaaacaaaatcaaatatgttatgcattcagttttgtgactaaaattggatacgatactgtgcttgatttagattttaaatgtttgggtcaacatggttcgacacaaaattattaaagatcgtgttggtcctaaaatttttatcggaaagcacgatagatcgtgtccggcccccggttaactttcacgtccggatgcaa

SEQ ID NO: 368019 - DNA, 403 bp, Zea mays
tccacgcgtccgttttttttctgcggaactacaaagaaacaaagaggaggcttagcgaactggaaaggagaaaccaggagcatcttgaagaaacaaaggcagttatacgggagttaaggaatgcaaattccatgaagtatgttgagattcggtcactaagggatctcctggattcctcagaggtgcctccaagtaaagcaggtggtaactcaaacggattcttaagtttgaaatcttttagagaaattgacagatcaattgccactttgggtagagatatttctgccgtggaggaaaacagttctagtaacatcgagacacctaacaacacgtcacttcataaaatgacgaggttcagaaacgacattgacgctttggtggaggaaaatttgcagttcctggt

SEQ ID NO: 368020 - DNA, 413 bp, Zea mays
cggacgcgtggtttgctgtgccggccatggcgagctctggactcgcctaccccgaccgcttctacgccgccgcagcctacgcggggttcggcgctggtggggccacctcctcctctacggcctgcacagcaggccacagttggtccgtgcaatgtgcccaagccaagggcgtggaaccccgtggagcagagcaaatgggccagttggcacggacttggaagcatgccatcggctgaggcgatgcgtctttttgtcaaaatcttggaggaggaagatcctggatggtactcaagggttcctgagttcaactctgagcccattgtagatattcaaatgcataaaccaaaagaagagccacagattgtaccggcttcaacgaatggaacatcaatttcagaaccaaaaatcatttc

SEQ ID NO: 368021 - DNA, 345 bp, Zea mays
cctgcattatggttgacctcttctctctaggtcttacaaccctagacgtggaatcaggatcagtgtgcacggggaaccagcaacggcagcacgtacgtggaaccggcaccgacgaattgcacggggcagcagacaatcgtcgcctccttgactccatccgcgaccttcctccatccgtggtgccagcaaactgcacgagaagacctaggtcaggtgtcctttactttctttgatactgctttctttaaccacttattacttgttctatgtttgataataaattttaggcacagatgtaagtcactactagttgcccatgtttactagttagttgttcatgttcac

SEQ ID NO: 368022 - DNA, 472 bp, Zea mays
cccacgcgtccgtccttactctgtctcccgcaatcctcgccttctcgccccaaattgtcggggctctcggtcctcgcccacgctctctatggaaggagatcgcctccgctgcaccccagcactcttgccccggatcgtggtcgggagaggaggcgacatccgaaacacggtgagtggagaggatcccgtttggcccctgggtaggtcggcttccttgtgccccgaatctcggtcctcgcccaccctctccatggaaggggattccgtgtatcgcgagcggatcatggtcgggagaggaggtggcatccaaagcgcagcgagtggagaggatctagtttggcccctgagtaggttggcttccatgtgccccggatcccggtcctcgcccaccctgtgccctggatctcgatcctcgcccaccctctccatagaaggggatcccgtgtatcgcaagcagaccgtggtcgggaga

SEQ ID NO: 368023 - DNA, 339 bp, Zea mays
agacaatcagttttagcatttagtcagatgaaaagatggataatagggatgatcccacttggatcctaggcacaagattgagtgtgcaattgtgcatttttcattataatcgtatgcacctgttacttcctattattcacattatcaaatattgctcatgtagtgtcttgcactcttgcccgttcctgaatagacagttagggaacagggtaaagatggcgtttgtagactttttggctgggaatacaaatgttaagatgtaaccgcataaggatatgtcatgtgcccaagattctcgaacagaagttacctcaataatcgatagttcaataaatagat

SEQ ID NO: 368024 - DNA, 407 bp, Zea mays
gcttcttccgcgctcaacccgccccactgccctctgcccctcctcgcctactaaaactaaaaccctcttcttcctcggcacactggccaccctcccaaaggtgcattttgtgtgaggatccagacgcaggaggatggctctcaagaagttgctgcagctcttttgtgtcggaaagaaggattccaagaagaaaggtaaattcatcgatccactctggcaagcctctgcctcccgctcctctgtgaatgtcactgcaaacaagactcatttggatccctgttcaagtgggaatgacactgtaagcgtgcaaaaccatgaagttgaatcctcaagtacggtttcctcgtgggcaaggacagagcaaggaactgagattgctcatcatacgccctttagtcaatttgatg

SEQ ID NO: 368025 - DNA, 431 bp, Zea mays
gctcgcggtcgcggcgccctcgcctccctgtcactccctcgtcccccgccccatccacgccgcgtcgccctccgcctccaaataaagtaaacgcgggtgacaggaggcctccaccgaacccccctgcgcccttcaacccgtcgccgccccgcacgatcccctccgccttcttcgccgccggcctccggaccgcgcagctccccggagccgacaaggacccggcgccatggggttctgggaggcttttcttaactggctccgcaggtacgatgctcttcacttgggctgtttcgtcctgtctcgtggccgtgggattgatctgctgcgcattgcgccgccggggtgtggtcgtccggggatcggcgggtaggagatctgatagttttttttcctggtttttttcaagattggttaagatagttacggacgtg

SEQ ID NO: 368026 - DNA, 481 bp, Zea mays
ctctgttcctgcagcctacaggcttgcttgttgtttatatttgatgcgttatagttttgccttatattctgtaccctcttgacaaccatttatgtgatgatgtgttttactgttgtagcaatggcagaaaaaacataataaggatgttgcagaaatcatcctgcttgacatcaggtcttcaaccctcttgattgaagccagcaatggctccaaaacactcagatctagcttcagttgagatattacagcacagttgagattgtcagcagtttcctttcctgtatcttcaaattttgtccactaggatttcatgttcagttgctagaaatttggctgtgaagatctgatctgtatgttaataactgttgcccatctgtctgaaatagttttctatacttgattcttaggatgttgtatatttgaaaagtgttcacaaaaagatattgcggtatatgatgaggtggagttggactgaatttgt

SEQ ID NO: 368027 - DNA, 496 bp, Zea mays
caacgttgaggggaccgaggaccgaggccctcggcgaaatccgtccacgcgctcccggctcccgcaccccactccccgtttttctccgcaccgccctgctccccgaccccaactgctgtctccttcctcgggtaatgcgaccgcgcgccagagcatgctccgcccggagcccgcgctagggttcctcgccgccggccccgcgcgcgcgtgcaagccgccgcccgagcgccgccgcaagaagcagccaccgacgcggcggaggcgaccggccagtgccgcaacggtggtgggactgggaccacgcggcgcggccgatccagatcccgcgcactcgtccgcgctgctgcctctcaccagcggcggcagcggcagcggctttgcttcgcggggcacggttgcgccagacgaggaagaggtgagagacgaggcgagctcggctgaatcgcaggaagtggcagaagcagcaaacgattcgttctcctactcacttagagag

SEQ ID NO: 368028 - DNA, 409 bp, Zea mays
gaaaactattaacctggcagccctccggctgatccagcgtcttcctcgccatcgccgacacgctcaccggcgatccactgctcggctcacgtccggcgtaggcacgtcgtggccacgggtcgtcacagttggtatcaagagcctgggattcctcaaccgggttggatcgtcgactcggcgtcaggaaggcgggaaatttttttccgactcaagttgcaagctttcgccgcggcagcagcgtcttcaaccccgtctcgtcgcggccacgacgagaccaccctcgatcatccgccacggctccaccagggactttttagttaggcacaccctgtattctaatcttgggtcttcaccgcatggaaacattgatgtacagcaccacaatagagagtagattaagatgggtctc

SEQ ID NO: 368029 - DNA, 486 bp, Zea mays
ccctctcttccgaggaagctcactgggtcagaactctattcgagaaattgaaagctccaatgaagtaattcctcgtcagtcatcttcaaagagatgccatgattcccagaaagagaaccttgttgagggctcagaaaataaggctgattcagattcagaagggtcacttgctactaatgatggcgtggcagataaactgaattattcagaaaataaggctaatcattagtcactcttaacaattcttttgctttttagattgtgtgcttgggtcgtgattcgatggatgatgagacagtggaccaaactgaaaaggattctcaaggaggtaataaaggagcccattgtacagtggaccaaaaaaattatagaggcagagctgaaccgactaatagaggcagagctggacaagtcgaagttgtgatggtcaaaattatcgtttggtagctggacattttattacagaatgctctatttatatcgatc

SEQ ID NO: 368030 - DNA, 513 bp, Zea mays
cccatttttccgaaaatctaccacttacaataacatacaatgtaatgtaatatataaagaaacatatctattttacttaaataacatcgttttttagtaggtattaaataaaattttctataatatacttatattcaattttctctaaagcttcgctcttgagtgctattgtggctaaataatatgtttttgttgtaccatagtagaatacaaatataaatctagtagctttagtttagagaaccttcgttgacgagaagacctatgttagaatcatataaagactcattttttaattcatttttttaatgcggcgcttggtagttccgcttcagcacaatcgacatggtgttaataaaaataggtgctaacatatgttgtatgagcgcgcacggctagcatgtgccttggcctggcactcatggttaaccgttctccgcaaaaggttacacttctggaaataatcttggatgtgttaggtatgcgggcaacacacagctataaccattattg

SEQ ID NO: 368031 - DNA, 309 bp, Zea mays
cccactcgtctgtgcctctcatctcgcttcgcttccattgggtcgcgccagtcgccagactcacctgggagagtggggggaaatatcaattagaaacaacgaggaattagcaaagaaagaagaataactcccataagaaaaatcgccaaatacgccatccatctacttcgcccgggtttcagaacgtacggcagaatagccaggatggtggcgatcgagaaccagagccaggccgcggtggcggcggaggcggtggcagcgccggcgttgcggatccccagggaggcgcggcgcctgctgcacgagctg

SEQ ID NO: 368032 - DNA, 274 bp, Zea mays
cccactttttcgctcgaacgaacaaagcaggcggcgcggcgggtctggtcgccgtgtctgtctgggggtgcaccatcatcggcggttcgatcgaccggtccgtctcttcgtccagccacaagaaccagggagcttcctctctgacagggcgcctctcctcgagagtcgagaagaaccacactctctcggtctcggtgctcggtagatgcgcatgcgcaatgcgagcggcagcagctggtgttcccgcgtggcggtgctgcagcaagtgcttggc

SEQ ID NO: 368033 - DNA, 250 bp, Zea mays
aaggccatgggccgagacctacgtgttcacttcaaggaaagagatccctatctgcctcctgtccgagatcctatcttaacagatctcatgatttgttcctgttatttttgtgctgcgttcggctatagtctaggtataatacatctaggattcatctttactcttcaagtagtgtatgccgttcaactcacgctaccacctatcatgattccgcctctacacataaatgtgaatactattcaatataaac

SEQ ID NO: 368034 - DNA, 450 bp, Zea mays
gtcgttttcgcacctgcactgcatcctgcgcctgcccgatacccaattattctccctctctatggatcaccaccgcacgccgatggagaactcggcgtcctcgaagccgccgacgccggcgtccacgcccaactcgcgcctcgcatcggcgccgtcaccccgccactccgccacgccgccgcacgcgtccgcgccggcgtccgccccggcgccggcctcgcgcaccgtctacagcgaccgcttcatccccagccgcgccggatccaacctcgcgctcttcgacctcggcccctcgccctcgcccgccgccgccgccgcctcctcgtcctcctcccacgaggccggccccgcggcctcgtccggatctgcgcccgccgcggcgtcgccctactgcgcgctcctccgcgccgcgctcttcgggcccgacacgcccgaccgggtcgcgtcctc

SEQ ID NO: 368035 - DNA, 490 bp, Zea mays
cccacgtttccgatcttgggtcacctgttttataccgaggtaacacctgttttataccgagataattagtatgtattctgagcttcaatcattgttctttatggtgagattcaatgtctccagttaattcattttgtaaattttaggttacagaatgtctctcgagtgtgctagagatgctttgctgcaaaagaccatggacaacaaagaaaatacaagtgaattattttcccgatctcgtgataagctcagagttgatctcatgaatatttctatgactactcttagttgaaaaatactttcccaagacaaggagtactttactaaacttgtgattgatgttgtcttgaggcttaaggtgtacaaatggtttaatgaaagttggttatcatttacattgaactatgatatcttcatctataaaattttactcttaaaaaggtagcacccacttggaatctattgaaattctgaagatacatggagaatc

SEQ ID NO: 368036 - DNA, 268 bp, Zea mays
gatcggccaacagggtttcacattgctaccactacagctaaagtctcgatgatgatacagttgacccatcttacaacaccagaagaaaacaatcctgaggatacacaaggcaaggatgtacaaacgtaaacagcacacattgatagaccttcgaatcgaacgacaaatcctagtgcttgcctgacatgcagcgcgggaaaaatagagaagattgggaaataattctgattattccaagttgaagcaactcctgcaacatttggtatcc

SEQ ID NO: 368037 - DNA, 241 bp, Zea mays
tcccacgcgtacgatctctacagactaaggacggacccggcctgcctcctgttctctctctcggcgacgactgggcgaccgaccaaccgtcgatgcgctacgccaggagccaaggtacttttcggatcctttgccggctgaccagcagaaccaggcaaagactcgtgtacgaaatggatacaactgtcactgaacaaagacaaaaattaagaaggacatacacatacacgccaaggataag

SEQ ID NO: 368038 - DNA, 347 bp, Zea mays
tcgtgcctcatcaaaccgctctccagcacttgttcggaagaaaaagaaggtagaacacgctaacaagacaacaaggatcatggggcgcgggcgcggccacctcctgctgccggcagcagccgcctgcctgtgggcgctgtcgtgcgcgctgctgctgcacgcgtgccctcacggcgctggcgccggcgccggacaagtgttaaggggaaaactatcttttggggcatgttgggttcgataccttgcacgcaggtcactggccaggccgcccgaaatcagaagcctgggaacgctgcctgagcgaggcagctcctgtcatgagtcaacccaacagtcccttaattcta

SEQ ID NO: 368039 - DNA, 521 bp, Zea mays
  unsure (1)..(521): unsure at all n locations
ccttgatcatgcaggtaccatgccaacagaatgcttagcttttacgcaccaggtgtgttctctttaggatttgaaattgtcttgtgatttcttttcaatgaacagaattttgatttttcagacttcttttctggatgctaagttgtatatagagtagtttttagtgctcgcatgtgtggttaatcatacaacataggttcttcaagctcatattctggatgcatgctattgttactttgttagcgtgttcatagattttgtgttcagttgtgcaaataaccacctcatagccttatgccatgccacacctgttttagagaacatgaagatagcttgcctcacttcacagactgnnnagatgttcataangcgtaatgttttaccctagnncgttgtttctctaaactattttttagatgttttatgcatgtctattggatatctcagcttttatgactgggataatggaatcacattcatgtgtgctcgctagaaacatttgaagctgtttactagatgct

SEQ ID NO: 368040 - DNA, 58 bp, Zea mays
tctcgccaaccgccatcaataacagcaccggggggcctcaatacctcggacggccgga

SEQ ID NO: 368041 - DNA, 192 bp, Zea mays
tttatttttttttttttaaaacactaattgggggggtttttttgggttagcatgggtaaaagtggatgttcacataccttaaaagatacactatggcgtaatttgaatagtgtggcaaaagattcaatcatatacttgtgcaatacttattggcctatccagactccagagtcacataatttgtgacatacc

SEQ ID NO: 368042 - DNA, 70 bp, Zea mays
tgcctaagactcaaagaaggcaatcgagcagaatgcggatctggtacgcaaacgggcgatctccccctcc

SEQ ID NO: 368043 - DNA, 488 bp, Zea mays
tctgttaactgaatctgaatatggtgaaccccagataaatgtttgatctagtgctgattactccgtttggttgaataactagctgaatcatgaatatatcttttcaactccgaaattgtcttcagaaacatctgatatatacagttatacacacaaagcaaatggctcaatttttctattttccagacagtgccccccccttgtgtattgtacatacaactgtcctttcctttgatgctactgtcagttaacgtaaaactctttaggtgtttgtggatcagagtctgttccagaagcacaccatggatcccgtaaatcttataccacctgcgttcaatattgtttgacattttagacacccaaattggcctgcgattagttatattttttgctgtaagaatgccaagcggtaaatggctggagtgaagtcatactatcaattgtatttctgctgtaaataaaaaaatgtcaattgatgatgaccggac

SEQ ID NO: 368044 - DNA, 413 bp, Zea mays
  unsure (1)..(413): unsure at all n locations
gatcnggcaagaccatcaccttggaggtggagtcgtctgacacaatcgataatgtcaaagccaagatccaggacaaggagggcattccaccggaccagcagcgcctgatctttgctggcaagcagctggaggatggccgtaccctcgccgactacaacatccagaaggagagcaccctccacctggtgctccgcttgcgaggtggtatgcagatctttgtgaagaccttgactggcaagaccataaccttggaggttgagagctccgacaccatcgacaacgtgaaggcgaagatccaggacaaagagggcatccccccagaccagcagcgtctgatcttcgccggcaagcagctggaggatggccgcaccctagcagactacaacattcagaaggagagcactcttcacctg

SEQ ID NO: 368045 - DNA, 90 bp, Zea mays
gcctggaagcttgggcagtaagtgtggacttgagcagagtgtacagaagtaccacctaggcaaagactgtacgtataacttttctatgat

SEQ ID NO: 368046 - DNA, 68 bp, Zea mays
tggagcagggtctggattaagtgatgcaatttggttgttggagcctcttacatcagacgttagtgact

SEQ ID NO: 368047 - DNA, 377 bp, Zea mays
ataatgctctacaaattacatgtcaacccttttctcaaccataccgagagaaccgaatcaaggatatagttacacccgtcgttctaccaatcagagctaaatcagatcagagctactaccctcccccttgcctaataatttacaggcgctttacacaacggagaaaagtaataaaacaaactgctctcaggacgacaacgccagttaaccaaaaccgaagcgctagtgctgctcgtgcttcacacgcccttttaatatccctggaataggcggtgagcttgataacctaactgtgccattgtttggcatctccatacgctgtgcttgttgccaataaatatttgacacgtttgaactctcacctccatttgatatcg

SEQ ID NO: 368048 - DNA, 66 bp, Zea mays
catgcaggcagtcggccagggacggatggacggagactattgatggaagccgcagccactagccag

SEQ ID NO: 368049 - DNA, 52 bp, Zea mays
atcaattctaccaacttttcaaggagaagggaaggtacaaccacttgatcaa

SEQ ID NO: 368050 - DNA, 132 bp, Zea mays
aatgattcaggagcatctgatatatcatcatgaagatgagcaatggccaatggacacacatgtttctatttctccagtatattatgatcagagcccgcatatggtacaactcagcaacatgagtgggattaa

SEQ ID NO: 368051 - DNA, 188 bp, Zea mays
ggaggattcttttccctgcactacacaggggaagcaacatctaaacatcatcgttatcatcatatatgtacatggccagtttggaagcggtagcatccaaaatctgacatcagtccgctagccagtccaggttgtagcacttttcggccacctgcacccggaggtcagggatgacctgctcggcctcc

SEQ ID NO: 368052 - DNA, 373 bp, Zea mays
aattctacaaggcacggtagcgcgccaaaatctttgtattcgtagattaatacattgcagcacattcctataatgtacaaaattaactcaacgatctgctagcacagatcatctaacagcactaacacagattgggctgatagcccatcaagatacgataatggcctctccatcgttcacgacaaaccaaagacgaattccgaaaacaagcgaccacaatgttccttaacagcgtacgaccgcgtgcacgcgagaaatatagcaatggagcaaagttccagttacatctgatgtgatacaagtgcagcgcttcttctgataccttgcctgtcttcataccatggagaagcattctgggagcaatggccattgc

SEQ ID NO: 368053 - DNA, 242 bp, Zea mays
cgcgccataattctcgggactaaccacgccttctaggcgctcgggacagggctatagggccgaggcaatgatacaaaccgtgctactgaggtgaatgaagccccacaaaatcctgcttctggacaaacggatgatattggacaagttgagaatggacttgctcagcctctgctcatggattccgtagataaacaaaacgtagatgaagatgaagaagttgatgaaagttaaaaatccgtaat

SEQ ID NO: 368054 - DNA, 166 bp, Zea mays
tggaagtgatcctttgcagcaactgctacaagccagggcattttcgtgaggaatgcaccaatgagaaggcctgcaacaattgccggcagagtggccatattgcccgtaactgcaccaatgatcctgtttgcaacctgtgcaatgctgctgtccacctggtccttca

SEQ ID NO: 368055 - DNA, 273 bp, Zea mays
aggaaagaaccaatgtagggcaatcattccaagggccaattcaatcataaacttttcgggccccccctttgcttgatttcatcatttgcgaatggattatagcccccgggcattggggcccaactcataggggatcccggttaacaacatacaaaccccgtttggggaactaaactccctaggaaaaatgctaggggacatgacattgggggactaaagccctcagttttatcaccccaagaagccccattgacagggcttacacaaactttt

SEQ ID NO: 368056 - DNA, 467 bp, Zea mays
ttattatgggagaaggtacatttgggcgtggtggggaatgtatgaactgagaatcccactacactgaatacccggaacggaggtttcaacattcaatggaatatgagccttaattttaatttggggttaccaaacaccccctatgataacagtgcagcagtcatcgagaggtaggcaggtagctaagctaggcagttaactgtggtggacaggactagtaataatcgaactggatgaacaaaacaaaacaactgagaactgacgacgaccatgcatgcatggccatggccattgggcgcggtgcatgcacgccgcaattgcaatgcagctgggcatggggggcgccggtggagaacgctgtgcgggcagagcgtacggcgcgcacaagtacgacatgctgggcatctacttgcagcgctccaccatcctgctgatggcccgggggtgcctttgaccgggctctacgc

SEQ ID NO: 368057 - DNA, 241 bp, Zea mays
ggggcccaaaaaccaggcaattccgggccaaaattattccggcccccccaggaaaaaaaaaggtttttttccccggaacttaaaagggcctggtccatgcctaaaaaaaagggtttcccctaaaaagggtttttcccgggggaaagaacccctgggggcccctggaacaactggggggggggccctttggggcttccccccaaccatgggtgggggaggaaacccccttccagccccgggg

SEQ ID NO: 368058 - DNA, 249 bp, Zea mays
gtgaggttctccggggttcgggttcgtgggtgagcggatcgagatggcggcgtcggatgttgagtaccgctgcttcgtcggcggcctcgcctgggccacggacgaccactccctccacaacgccttcagcacctacggcgaggtcctcgagtccaagatcatcctcgatcgggagacgcataggtcccgcggcttcggctttgtcacctttctacacggaggattcgatgcggaacgccctcgtgggca

SEQ ID NO: 368059 - DNA, 175 bp, Zea mays
gtgacttgtaagccaacaaccatgggaaccaagttgccagttgaaacttcgatttatttagtcctaagtgatgggaagataatctggaatgtgggacatgaggtttttaccttattttttgagttataggttattttattactattatattaaatgagtgctaagtatcatcttt

SEQ ID NO: 368060 - DNA, 265 bp, Zea mays
tccaaaaccctaaaccccattccgtacctcaacgccgccgccgccgccgccgccgctgcgatgcagtccatggcgctcacctccccctcactcccggaggtcggccccgtttccggccgccgtctccagcgcatccgtgccaccgcggtatccgacgagctcaagctgaacaagtacagcgcgcgcatcacggagcccaagtcgcagggcgcctcgcaggccgtgctcttatggggtcgggctcactgacgctgacctccgcaag

SEQ ID NO: 368061 - DNA, 174 bp, Zea mays
tctatcacacgcccgaccacgcatccgttgggggggattaaacaggcctatagccctactacaaataagagccggaacggtcgcctaataatttcctgtaacttgagcaatattctatattgagggaaccaaacacccccaatgatcacagtgcagtaatcatggagaggtagg

SEQ ID NO: 368062 - DNA, 403 bp, Zea mays
gaaccagccaacatttctgtccactttattcctcggttcactttctagaacaacgctctgctctctgcactcagcattcctgggtctgctcgaaaatgagcatcattgatcaatcgacactgagtgacacacatcacacgtacactttccctagtactagtagcgctcaataacgtacggggcccacacgagagcataggcatgtggcactcgccgtcgttggcggcggagcgtcgtcgccgtcgaacgacgattagtggacggcggggccccatgccggatacacgacgtatcctggatccggctcccctgccggcttgaccgcgccgtgcatcttgtggaacgggtggccaggcgacgccgccgccgccgggccgagagcgtcctgcttctgctttcacgt

SEQ ID NO: 368063 - DNA, 227 bp, Zea mays
ttctccttcgtactcgcctacctccgcggctcaaacctttcccccttctcccaattccttccgccggccgccgctccacccgtacgacgacaccatgagggagtgcatttcgatccacatcggccaggccggtatccaggtcggaaacgcgtgctgggagctgtactgccttgagcatggcattcaggctgacggtcagatgcccggcgacaagaccattgggggag

SEQ ID NO: 368064 - DNA, 119 bp, Zea mays
gtcggtgcttgtactctgcaacaactgggttgtgttggcactttgccaagggcgggagtagaagtttgaggagagattagataactgttgatgaggaaagggtgaggcttctcaatgaa

SEQ ID NO: 368065 - DNA, 348 bp, Zea mays
ggggaggacctgttcgcgctcatctccgtcaccaacgacgaggatctggagcacctcgtcgtcgagtacgaccgcgcccacaacaacggccccgccgccggttccggctccggccgcggcggagccacgcccaggctcagggtcttcctcttccccgtccagccgccgcctcccccgccgccggccgggctcctcgagcccaaggcggaccagcgcctctatatcgtcgaggcgctcaacaccgtctcgctgccctcctccaagctggacccgccgcccgtgccctcgcaccagtcgtccccgccgcagcagcagaagcgggagtcggtgttcgcgcaacagtcgtcg

SEQ ID NO: 368066 - DNA, 293 bp, Zea mays
ctgaacctattgcataagaggcaggaaggcggacccagacacttcaatgtacttgatgctttctatgcagagccacagaggtatgcatacaccttgcacaatgatgtatttgtgacaagggacatgcaagagaaggaatctgcgtgtggaataaaacctcttaggctgatggaaagaagcgtcctcagtgaccgaacggattttgttcgtgctgtgcatgaagcaaactggatgaacgagatggaaatcagcatttatgactcttggtttgacccagttgtgtcatcactccc

SEQ ID NO: 368067 - DNA, 65 bp, Zea mays
aatgtcggatgatgatggttgttattgttctggaaatcgtagacatgtcctccagaatacctatg

SEQ ID NO: 368068 - DNA, 112 bp, Zea mays
gctgctttgacgttgagggcaggccgcctgggttacacttacacgtagtagatcatgccgacctcgatgaggctgatgtgggggatgagcagcgtcaccgacggccccctgc

SEQ ID NO: 368069 - DNA, 403 bp, Zea mays
tcggtgacgcggtgtttccactgcctcctcttctcgtcgtcgacgagccaaaccgcgtcgtggcaagcccgtcgccgcttcctcccgtcgtctacgagccgtaccgcgacgaggccatggcaggagccgacgccagggcgcactactgcgggtacctgccctgtgagagaggaggcctcgccacggcgtggcaaccgggcggcctcttcgacagaggcgtctactccgacgagcagcgcttcgaggagcccatcagcgccgacaactgtggggccgatgcaaggcaagaagtcgcgctcgcggcgcgcgtgcttgccgccgacacgtgcgcagccgggatcctcgacggcgccgcgcccttcgccgccaccagcgagaagcacatggcacctgtggcatcacc

SEQ ID NO: 368070 - DNA, 351 bp, Zea mays
cccacgcgtccgtttaatttggtgcttcttatttttgggcagtacagctcgatctccagttccttcttttgaaatagattataggccacgaatcaggcaacgaaattgcacgcttaggcttcgcctcttagccggtctccaacagcttgcatatcctaccttctatttcaaatccattcgataaattatgtagtctatgatgcaaaataatattttacaccatcatactcactatctaatggagacaaccttaaatatgaccccaaaaaaattgcaggctgagactggatgaaatgcctgctcgtttgtttttagaattgcaagtattgcaagccaaaaggttcgctcact

SEQ ID NO: 368071 - DNA, 454 bp, Zea mays
  unsure (1)..(454): unsure at all n locations
tcggcctactgcactctgcactggtctgcttctggtcgactcggcgcgaataaatgccacgcctcgccacaaaaccccgcttcctccctccaactttgcacagtctgcgcaccctgccacgacgagatggcttcctgttcctcatcgccacggccacccaccatccctctcctcctcctcctcctcttcctcctcctccacttctcctccgtcctcgccgcaccagctcctccagccttgtcacaacaggctggtaccggcggcggcaatgcgacggattcggcggcggcgtggacgccgcggctgaggaagacgttcttggacggcggcatggagncgctgcgcgggcggcggctggtgggccggttccaggtgtgcgcggtgtgcacctgctgcgggggcccgcacgggatgtgcatcccggcgccctgctgctacgccatcaactgcaaca

SEQ ID NO: 368072 - DNA, 345 bp, Zea mays
  unsure (1)..(345): unsure at all n locations
cccacgcgtccgtttaaaactttgcggatccgtcgccgctgcccttgccgccgatggtcgatgtggccgcgctcacggacgacgtcctggcggagatactcctccgggtgccgtcgccgcgggacctcgctcgcgcctctgtgtcgtgctcctccttccgtcgcgtcatctcaaacccccacttcttccgccggttcgtcgccctccacgcggcgcctccgctcggcgtcttctgctgctaccccgccttgggcggcggggttgngtggatcccagttccagccagcgctgccgtcgcacccctcggcgcccctcgctcgcgcgctcgccagttcagcagacttc

SEQ ID NO: 368073 - DNA, 119 bp, Zea mays
tccaccttatgtgtatgcgatgagagtacttccgctggatcttgaggaattatgggcctttgaagttgactctgagtattcgggtgggatactgttgaacattgaaacaaggcttgagg

SEQ ID NO: 368074 - DNA, 175 bp, Zea mays
agtcccctgttcaaatagtaggaaacacgtggaaccaatgttggccagaatggctgcacccgacatcaatcgcccaaacggaagccaataatccattatcaacaaactcgccccaccacacaagaatcctaaattcaccatggcatgtcgcccacgcgtccgcccacgcgttcgt

SEQ ID NO: 368075 - DNA, 198 bp, Zea mays
ccgacgcgtggtcttacgcgtgggcgacatgccatggtgaatataggattcttgtgtggtgggtcgagtttgtacataatggattattggctttcgtttgggcgattgatgtagggtgcggtcattctggcacaactttggttccacgtgtttactactatttgaacaggggactaaaatcttcaacgttgaatgatc

SEQ ID NO: 368076 - DNA, 192 bp, Zea mays
gggaatctatgcaccgggctttgcaccggaacaccgggaggaaaaaaaaaactttaaatttttttacaaattacaacattcgggggccaaatacaaaaaccattgtttgaagggcccccccccaaccataaaatggaggggccggtcttaatttgttttttcccccccaaacgataaatttaaaagatttcc

SEQ ID NO: 368077 - DNA, 279 bp, Zea mays
gggaaaggaaaaccccccgtttaacagggtacaagggggaacaaatggttggggggggggggacatttttttccggggaacgtaaacacggggttaaaaaaccggggcacaataaaaaattaatggccccccccccgtttaatttaactgggggggaaggggggggggaaatagggccccttgggccaaccccgggggatctgtttggggggggccctgggggggggggtgcccccccaattggggggggaccccgggttggagcacggggaccccccc

SEQ ID NO: 368078 - DNA, 487 bp, Zea mays
  unsure (1)..(487): unsure at all n locations
cccacgcgttcgctacagctccagacccctaggcccctagccatggccggagaggcgggaaaagacccccaagcgtggctagccgccaacgagacggcgtcggccttcctctcccgttcactctcctcgcggccccccatcaccctcccgccaccactgcaccgcgcgcctctccgcccgggcaacgtcgtcgagatcgccggcccgtccaactctggcaagtcccacctcctcctcatggctgcagtgcagtgcatattaccaaaggagtgggagggaatctactttggggggctggggagnggcggtcatgtacttggacttggactgccgatttgatgtgctacggctggctcaaattctgaggaatcgtattgcagagggctgccgtttagcacaccttaaaaatggagaccctgaaaatgatgtcactaaagatgagtttcagtgttcttttcaaaatacactgttttctgattgtatgcag

SEQ ID NO: 368079 - DNA, 110 bp, Zea mays
agataaaaatgaaatacccataacacttgttactcaaagctctgaacaaactaggtaggctactctagcttcagtccatgtcgatcccttgtgttgggaggggggggggg

SEQ ID NO: 368080 - DNA, 389 bp, Zea mays
ggggaagaacattgaatcgattatacaagagaatggacaccaaacagctttacacaagatgcaaaatgcattcctttcaaaaaaaatggtaactggtaagactgtctcagtctatcctaacgtaaactgccgtcgctgtttcctacattctagcaagatactattttacacgccgcacagtaagcaaagcagtaccctcctacctatgccaaaaacaaatgtaaccctacattctgtgtacaatgcatatcccatgccgtagtttgacttgaaactcttcaaactgcagacgaaacaaacttgaagatatccaaaaaattgtttgcttgccttccagttccagctcttttagaatcctcttaggcagggctgtatacatcaagaacgtt

SEQ ID NO: 368081 - DNA, 250 bp, Zea mays
  unsure (1)..(250): unsure at all n locations
gcgtccgattcttgtccanacatcatctattatattgcattggattctactttctaaatctggaagttcttattatgtgcgttaccttttttaactgtgattcgctcattgtcagatgtgttctgaagttcatgttgagggagatgcaagtgttggacagaagggttgcaaggatataaggcgttacaaatgtgaattttgcacagttgtcaggtcaaagaaatgcctaattcaagctcacatggttgca

SEQ ID NO: 368082 - DNA, 529 bp, Zea mays
ctttgttggtttttacaattttaggggcacccctggcggtgagtaaaagactgtttttttctttttcatcataatgatttctgtccattttcaggtctgtcgtatattctccatgtagtatattcagttcatttccttatttgcagatcacatacagtataccatatgcaatggctgctagtcgtgttgaaaatctcggtcttggccaaggtatgtccattttgagtttgtattatcatcatgatcgcacttcttaaaactctgtttctgcttgcaggcctagcaatgggtattctcaatttagctattgtcataccacaggtaattacctttgaagtttttttacttcgctttggttcagtcctatgcacatccggagttcagtcgtagtgtaattgactcgcactgaccagtagataatggatccaagtaatccttacttagtaacatttgctcaaaatgattattggttctagaacctgtttttataaattatttatattcttagtgtacaatgaatgcaaatgat

SEQ ID NO: 368083 - DNA, 492 bp, Zea mays
  unsure (1)..(492): unsure at all n locations
cgtacgcgtgggctcttggacaagcaaaggaggtctcttgacttgattagtggggtgaggagcgaaacgggaggcgatggtggtggagagataggggttgcagacatacagagtgatggggagctgcgcgggagaggagtggcccggcggcgtgacggggccggacgccgaggtcggagcgctcgtctgggtgcgccgccgcaacggatcctggtggccgggccggatcctcggcatggacgagcttcccgagaacaccgtcatcccgccgcgctctgccggcacgcctatcaagctccttggccgctccgacggcagcattgactggtataatcttgagaaatctaaacgtgtgaagtatnttcggtgtggagaatatgatgaatgtatagaaaaagccaaggctctagctcgccagcaaaagaggacacatgctgaagggagatatgttcgcagagaggatgccattttgcatgcccttgaaattgaaag

SEQ ID NO: 368084 - DNA, 273 bp, Zea mays
ccaaccaaacaaaaaatagaacgactttgttattcttgccaaacgtaaaatagaagggctccattctaaaatactataagggacccactctattccatttgactctccaaccaaacgcacctaagtgctgtgcaggtggctgacagaagctttcaggatgtacgagatggaaggcagagtcttttacatatagcacacagtctaacagtcacatgcatgaattatattttaatcagtaaacagcagatgcgcatcagccgacagtttttgctt

SEQ ID NO: 368085 - DNA, 222 bp, Zea mays
ccggccgtcgtcggccacctgagctgctgcctcaggctcgtgctcctggacatgtggctcttgctgccggtagcggcggcaagcagtcttcccggacctcgcacgtcgcagcgccgtccgaggcgcggcggcgccggcgacgacgacgtcggaagggaacaccatgtgcatgctgccgctgacgaacgaggagccccacgagagccgcgaggccctggacga

SEQ ID NO: 368086 - DNA, 439 bp, Zea mays
ggttgttctattgtagtaaagtagaccggcttccaccaatgtgtcagctagcagaactgcaagtccttcatttgaaaagattggaaaatttgcagttcctatgtagcaggtgtacatcctccacgtttggaaaactgaaggatcttaagctacttgatcttgacgtttttgaaggattttgtgaggcagtgcatggatgtgcagtagcatttcctcagcttgagttattggaaattgacagctgtaaaaatctagcagctctaccagaagcatcgatgctgggagaagcatattgtgtgggagatcatacagtggcgcgctctgcatttccagaactgaatattctcgtattgcaaggtttgcgtagctttgagagatgggaaggctgctgcccctttaaactgaagaaagacatgcaatattccctcgggttaagaat

SEQ ID NO: 368087 - DNA, 214 bp, Zea mays
ggggggggtcaaggaatgaattacaaccaagccttcccaatgatttttttcccccaaggggtttccctatacaacccaatagctttgtacaacagcgtacataaaaattcacaaattttgggctaaaaaaaaaataaggccccaattgatttaactgccaaaagtttaggttgcaaaaaaaacccaaaggggagcttcgtcatttttggcgcaa

SEQ ID NO: 368088 - DNA, 423 bp, Zea mays
acattaattaatttcatatttcattgtcttctcattatgccatacattccttcctggtgccaatctatacatgacaatcataaaaaataagctataataatttacaaatccaacttggatacaaacttgcctctcgccctattacaaccatgaatccaaaatctgaaatccataccaattatattcagttctgcaatggaactgctacagatgaatacatctagcacagggcgattattgagaaaacacatgtatgtcaaggaaaatgcgtttacagaggcaaatcataaaactgagtttaccaatggcagttgaactgttgaagaacatcttgttagcaatctaagaaccaaaggcccaaccgccccccacccacacacccactagactaagcatgggccccgcaatgcgaataacatttac

SEQ ID NO: 368089 - DNA, 337 bp, Zea mays
atagaatgtaatgacatagctgcgtccccttttcatccgtggagataaataccggagcggggctgcctagcttggtaactaatttactctaacctaatatactaacaattataatgctcaatatctcacattaaaaaggtgttcagttgtgtaaaaacaactgttcagatttgcataaaaggtatagaaaaaaaaagatcaaacaggagcttagaaccaggttatttaggctgtcagacttaggattatagtattatatatcaccctcgtcagaatttgcatacaacactttttttcaaccagtttttaagttgtgatgttgtgatctctgggccct

SEQ ID NO: 368090 - DNA, 313 bp, Zea mays
atcggaaaaaaccaaaacattttctaatttaaaatcaatgaagtagtaacgtttaaaatttaacaatcaaaagatttttttgaaagaaagggggcaccaacgccaagcatgacaatgctccctgaacccttattttaaaccgaagcataaacccttttcttttgggggggtgatcatccaagcaggggcaaaacataagccatttaacttttacagccactttactttgactggatagaggaattttgctcaccatttccacactaagcgggacaaaattcacttttcaggccacgaagcccctaacattttt

SEQ ID NO: 368091 - DNA, 419 bp, Zea mays
gaaaagaaggcaaggtgtttttcgccttggcctcaaaatactagaaatacttggtttcacacacaacaaaagcatttagagtaaaaaagggaaaacactacaaagagtaaaatgctatattacaataagcagtagtttaactgcataagtgttcattccaaaatacgaaagtcccttcggcctaatggttcacctaagcttcagccttttctcatttcttcgctttcttcgtcttcttctttactcttaatcaagcagccttttttcccttgagtaaatatgttgaagttgatgaagcctgtgtttccaaaactaagattagaatttactggaaaattaaaaagaaggaaaccataagaagcgaatgcatggataattcaatgatgagataccatgaacatcatgtatacagaaaatgt

SEQ ID NO: 368092 - DNA, 367 bp, Zea mays
aagatccgtgcccaaaagtctttcaaggatttttttcctcaaaaactatgcccaggggctccactaaaaatatttccctgaaatcttatctccacacagcggatccctaataattaaccccctcagtaatctaaacctttgacacaacaacatctttgaataaacaagacaggttgcccctttttggaactaaaagagagcagaacctacactacagccatcagccatggcccatggacaaggacgagtaggagactgcatgagcagcaaatgcttgggtatcgttcccaaacgggttcccttctttcaacgcatacagccgggacaatgatcagtagcaggtttccaaggtttcctgcattcgtca

SEQ ID NO: 368093 - DNA, 389 bp, Zea mays
aattacttcgattgaattgaattcaagaagatagcacttgactactccaatacaatattcttacaacctgaatatgcagaactaatggaacagtgtttgtcctgatgtactccaatgagtgatatgcttaacaatagcttcatgctcgatcacacacggagcgtgatttgccccctctctcgtcaaatgataccggcacgaattattctccgggaaggcgacctacacatgcacttgtaccatcatattatgccactggaggtttattcttgtactagtacaactaattaatccaccagcagctgaaccaaccccccaatcattgccgccaattaagcaagcagcttcaagcgtcggctccatcggggcagccgggccctgcggccacc

SEQ ID NO: 368094 - DNA, 255 bp, Zea mays
aaggacaccggagccgactgtgctcagcacctccgctgcctgtgtcgaagtctcactcgccgccgccctccctgtctgcactacctgccctctcacccgctcttgtcgccgctgcgcctaccgccattccttccgtctccctgcgccatcgtgcctcgccccactcctctgcttgctcccgcctatcgttgcccctgcctgcccctccccctcacgaccttcccccggcctgcccccctgcccaccctcaccacc

SEQ ID NO: 368095 - DNA, 285 bp, Zea mays
ctcacgcgtctttcttttcgtccgcccacgcgtccgtggacgcgtgggcgcgtaggcatcacctaacgacgatcgagtacgtacgtgcatgcatggtcattgtccatagatcacgcgatcgaatcgacagcccaactacctacctccagctgctttctaccacgcaataatcatgcatgcatgcgacagcacaggaagattttcgttgcgtgcatcaccggtcaccgcccacggctcaccacgcggacgcgggcatatgcaaatgcaatgcaggtgcccacaccg

SEQ ID NO: 368096 - DNA, 334 bp, Zea mays
tccacgcgtctcttttttcgtccgcccacgcgttcgcaggtttagtccagtacacatcatgcacacctcgaacgggagcaaccgtctgtgatctctccaaccagtggtacgacatctgtgagctttgcggtgatgcttgggccattggccgttcctccaccgtaataaggtgactgtcaaaaccctgaaggccttccaacaggcgccaagctgcacatccaggcacaccatgccagccatcgtctttgcgttgggcgggttcacaggaaacgtctggcacgacgtgagcgacgtccttgtccctctgttccttaccgcccgccagttcgaccaa

SEQ ID NO: 368097 - DNA, 356 bp, Zea mays
attaaagtccctttgttagctcctcaaaaacaatctgaccatattttatgctgttctccaccttatttttggactttttcctccagggactgattctggactttcaacttaatgcttctctacctgttgtcatactcgaggctactgctcctggaagagcatcaccaacatatccctgatggccctctctgcttcatgctccaagcacttggatgttcaccttgaaatataattattaatagggactgtccaaatacttgagctaagcaaaatagcgacctccataaaaaagcaacctgtaactatctctgaaaattttgaaaaaaactgatggtaactgataagctgctgctagc

SEQ ID NO: 368098 - DNA, 256 bp, Zea mays
gccagcggtgttttttttagtaactcgtaatcgctgcctgagctctccggccaatcgcgtcatttacttgctttactaatcacgcttagcgattttagtctcctcctcctcttcaccccacctctttcttccttcctttcccttcctgttccctttccccacccctggcctgagggccttccgcctatcgtctctgaatcgcggcggctcctgagtcccgaggcgccgcctgatgagcggctaggcgccggatcta

SEQ ID NO: 368099 - DNA, 168 bp, Zea mays
ttctattagcgccatcccaccgctataattacgctgccgccctgcgcgcgcgggcctatcagcgctagcttagctatccggccgcatccgctgctcgcctcctcacttgcgcgtgtgtcgtgtagcatttaggtcagctgctcctgcttgctagggttagggtttgcg

SEQ ID NO: 368100 - DNA, 458 bp, Zea mays
cccacgcgtctcttattatgctaaagagcaaaatgacaccaaactaatggaaaatgtaatccatgttctatcaagatatttcttaccgctgcaaccaggcacaactggcatagtcttcaggtatctcattgtctgttctcagttagttatattaatgatgtttactataggtttagtttgttgtttttatattaccgtagaccatgatctagcctctataaaatttattttagtaattcattgcatcatattactcctatctttttgcaatatagtcgatgccatgcagacggacatggaggttgtgttcgaggtgctgaagagcctagaggacgttgaggagctggaccccgagtggctgcatgatcctcacaagctgcacacgtgcgtggagaaggacacctccttgtcggactcgtgcggcgtcgacccattcgggctggtggtgatggcgcccg

SEQ ID NO: 368101 - DNA, 286 bp, Zea mays
cccacgcgtcctgtgttcgttagcctctcagcctcgctcctagcctataaatcgaacaccgcggatctacgtgcttgttactagcctctcttttcttctctcacgctgtcctatgtgctgctcacggagccgagccaccgccgtcattatccttcgccgccgtgccgtttcagagcctatccgccgccggtgaagacttcctcgtgaccttggacgcccgctcttccactttcctgtggtcggcaacgccccggttcgtcttgacgccgtcagccgtggtcccatc

SEQ ID NO: 368102 - DNA, 424 bp, Zea mays
cccacgcgtcctttcaggcaagccttctcccgcaaatgcagagaggttgcttcaacctacgacctggtttatcccttccccagaccccactcatgtggaaatatccggcactgggtctgcccccttttttttcaaaagcatggaagacttgaacatatatattagcaattcccatatcagcacgttttgatagactgctccatttgccttgccgttttttcgctctgctctttatggatttttgtatatgctgacttgcagcaatgattgtactggtttcctttttgataggatcttaacaaactgttgattttccacccaactgtaatcttggaagaagagaatgtgggttcaatgtttaaaaattggcatagttaacttctgctgaagccctgaaagggcgtaaacccttatttgttgaaga

SEQ ID NO: 368103 - DNA, 301 bp, Zea mays
ctatcttgtgcttgttgttgcccatttcggggcgtcatggtgcgtgacgtccctgtccatgaactacaagtttgaggagctagcgcagacccaccccgaggtcttgttcctctacgtggacgtcgacgatgtccaggtaaacaaacagctctttgatcctgtatatgtatatgcaggtctcatgtcttggttttccttaggtcccctttcggattcttaggaaaaactggttgaatcactgtgagacggattagacgagaaacatttcacctggaaattactagaaacgccttttttgctt

SEQ ID NO: 368104 - DNA, 222 bp, Zea mays
gggccacaaccaaaaggggggtaaccaaaaaaagaattttttaagctcccctctttccgaaacccctttgggaaaaaaaaaggtaaaaaagggcccaaaacccaagcccaaatttgttaaaaaaccaaaaacccccgggaaaaaaacccggaattatttggacaccgcccctgggagttttttccccaaaaaattccaaaaaagaggacttagggccaaccc

SEQ ID NO: 368105 - DNA, 156 bp, Zea mays
gccaatttgttacgcaccgcaggaagcggtgttcacgcacggcccgacgccaccgacgcctgctgggaagcttgcaaggcgcacgggtgaccacaacggggtaccaccagctgggagccactggtgtcacgcactgtggtggagccctacatcatt

SEQ ID NO: 368106 - DNA, 197 bp, Zea mays
cagggttggatggaagaaaggagtggtgcagctgtgagtgcaggcgtctctcgattccttgattgattggagccgagccggaatgtgatgcgagagaggtgagcagattagaaccgttcacagcacacaactgagcattcctttgaaggccaaacaccccctttcagttagccatctctgaaggaacatacaggctt

SEQ ID NO: 368107 - DNA, 341 bp, Zea mays
tttttatggagtttccgcaccaccaccaccaccacggccatcgccgcgacgacgacgaagacgaccgcagaggcccgcctcccccggtctacggtggctccgagtacggccacgagggccgaccgcaccacggcggcggcggatcccagtacggccacgagacacgcccgcaccacggcggcgggggcggcgccccgcctgtgaggcagcagacgtacaggatctactgcaaggctggggaggaccagtacagcctcgcctcccgcgacggcaaggtctgcctcgtgcgcacggaccgtgatgacgacgcgcagcactggatcaaggacatgaagtacagc

SEQ ID NO: 368108 - DNA, 118 bp, Zea mays
tcctctcgtccgctctccggccttcgccgccgtctaggcacgaagccagagcgcgacggcataaatcgcgggagcgcccgccttcgaatcggtttcccccacgccatgtcctccccct

SEQ ID NO: 368109 - DNA, 130 bp, Zea mays
tagcggcctgatcttttcaaaaccccgccgctctcatcttgccagaaaccccaagaagccgcagggggacggaactccctccccagctttttccccagaggaagcaaccgcagaggaggagaagctgctc

SEQ ID NO: 368110 - DNA, 274 bp, Zea mays
tgttctccgtcggcacgagatccttgcccgaacaaaaaccagaagatgggcgaggggagggggagacgagatctcactccccgcttcctctccacctctcaaatggcgccaccgagtgctaaccgtagccaccagcagctcgtcgtcctaccggtcctgctcctactcctgatccggatccccgcatccgcggtagcggcggcagatacctccctgtccaccttatcctactcccaccactgtcccaacctcccgtccgcgctcgacctgcccg

SEQ ID NO: 368111 - DNA, 324 bp, Zea mays
gtataattctttttcttacgtaaaagttagatagacacatggcacgacccaccagagaggtccattatccttgctgttgccgaccagcaacttttaaaaccttccatctccacttgctactatgtacacgtggcaacttaaacctagaactagaaacggcgatttaaacccctactccatttacaaactaacccatgcaccatcccatatttacacaaggatcccatggagcacatgccccccattgatcgcgtcctcacgagcaggatcttatgaggccaagactgaccaggttcttcttgacaaggctcccgagcgagaaga

SEQ ID NO: 368112 - DNA, 198 bp, Zea mays
cggaacaagctccacggacccgggtgttaagggccagccggccagatagcaatactgaatagagaggattccatattaccattgctagggcgacaacaaatatcgttctactaaactggagatgaggcaaactatgacaccaaacggacatggcctttgaacaaatcaattatgctcgccctttttactcacaagacc

SEQ ID NO: 368113 - DNA, 337 bp, Zea mays
aaagaaactaatttgatattgtagatgatggggggttttctataaacttagtcaaacttaatggttcgactttgaacaaagataaagtagcctttaatttggagggggtacagaacaatgttaacaatcctaaacaacaaaataggaagaaaacaaagctttggagcaaattagaataacattgtacccactggaatgcgccttcctgagatccatttagaacagggacccaatttggctgagatttgaaagaactgtcaggagaagttccctaacctgaagaactcatttttagcaacaacaaaaggaaaacaagcaattcaaaactaaaagagaa

SEQ ID NO: 368114 - DNA, 107 bp, Zea mays
cccatttgtatgttcgaccgacctccctctccaatgccgtctggcatcgacgggcccactttccgggcgctgctccggccgtccaccaacgggtgccggaccaagat

SEQ ID NO: 368115 - DNA, 320 bp, Zea mays
tcctttttttttttttttttttttttttgtttggggccccaaaaaaacaatgagttacaattactcgctctttatcaagggccacggtttacctcgaactcggagctggatcgaacatttggtgcgagccactcaggaaatccaccagagaagagaaaagggaaacgtctaggcgggtgctagattagcagcctcagcatagcgcgcgcaaagccttcttcttccttcaatatacccggagagaggcttcgttttcgtcttcgtcgttctcctggtcggctcttttttttgcatgcactcgatcatcacgcgcacaaaaa

SEQ ID NO: 368116 - DNA, 416 bp, Zea mays
tttcttttgtccgaatagttttcatgcctctaattatggatttcatttaggttcttaaaggatggatgacaagattaaagatgaactacttttaagtgtcaataagagttgagagacacttagagtagtatatgactttgtttttcctttggtcatactataaaggaagagtatgaactagtagtttgacctatgtgtgttatggattggagaggggtatcgatgggcatgaacgtctgcagggggcctctgcccacgaccgatcaagaggagggtttctcctttctaatttttgcctacattatttcttatccattacataaataagccagttgaccgcccctatctagctagagatttttatctcatttaaacttttctaaaaactctaaacaactactaactgataacctttt

SEQ ID NO: 368117 - DNA, 120 bp, Zea mays
tccacgcgtatgaaatgttttcatgcctctaattatggattttattgaggttcttaaaggatgagacgacacgattaacgatgaactactactaagtgtcaataagagttgtgagacact

SEQ ID NO: 368118 - DNA, 438 bp, Zea mays
aactccaatgaataacttcacctatatacagggttcttcttttccctatatgaaatatagctaagtcactacacactagtgttacatagcaaaacaagatcgcaagcagaaacccaactatattcatcatcatttgttttccttgtgcgccacatgtagctcggtcccatttagaagatcgggttgcatctatttcctataacctgagagtccgtcgtattcttcttacattgcagacgagcctagatacttttcagaacacttctaattagtgatgtggcttcggcaaaatcgaaatcctccgcactccacgcgacgtgccttgtttttatcttcccaatcccctgcgcattggaaatgacatgtaaaggtagcaccaggaagcagacgccaaaaccaaagcagagagtatcactgtgttttgatctccactggaac

SEQ ID NO: 368119 - DNA, 320 bp, Zea mays
cccctgggcaacacgggaccaaattattttttaaaaccttaacgacgacgacgaacaacgaccaagcacacaccaggataacttaacttaactggggggtttttttacgaaccgaacgaaatttgaaaacggggggcgggatccttttacccatgaaaggaaaggggcagggggcacttgtgcccggatcggcaaaactaaaggggtcctccgacacacaggggggggggggggttttttaagcgggatctaaagggggggggggccataaaaccagaaggggggggagcgatccgatctgatctggttggacggacgga

SEQ ID NO: 368120 - DNA, 390 bp, Zea mays
atcaagaagctaactaactcgatagcaaacatgttcagtaactgccaattgggttcacaaagaagcaaagccaaaggggcaatatcatacaaatttcacttaaaaattttagggactactagaatctaactgattcactttgcaattatactaggcttcccatttagctttggccaccccatttagctttgtccacgtgctgcaggtatcaacttggtgcgggtacaagatgagcttttagcttgcttcacatgggtaattagccaaggaataacatagccaatagcatcaattagggtacgaatttgattagatggtctagggacctcctcatatataatattgccaagaagtgtgcaagggaaaactccatatgaggcatggcatggc

SEQ ID NO: 368121 - DNA, 280 bp, Zea mays
cgcgcgccctttttttttttttttgttttttttttttttttttttttttttttttaggggggcatatacatacataaatatcgaacacgggtttgcacagcaataacatttggagcaacaaaaacattgtgtgcatatatatgcaacaacaatatggatggtgacgtgattaaagagcacggtacaccagctagctagctaggggcagcaagcgcaagaagatgaacctgctgaaccctagctagctaggccttgggtgtctcctcctcggccttggccg

SEQ ID NO: 368122 - DNA, 176 bp, Zea mays
ctaacaaaacaaataataaaggggggggtaagaagatgttctttttcattcctaaaacaagccccctttaaaacattgggttaacttctggggattcacaaaggggctaaaaaaccccccataatccccccacgggatctggaactgggccctaaaaaatattttgggccgggggc

SEQ ID NO: 368123 - DNA, 244 bp, Zea mays
gggcccccgaagcaaaatttcaggggcttattattaaaaggtcccaaccccccctaatgaggggccttttggatcccccagtacaaaactggcccccgggggggaaaaaaactttttttttccgccccaaacttccgggggggaacccgggaaaaccccgggggggggacttaaaacattggggggggggattcagggtttattcacaaaaggggggaaactttccccattttagggggggaac

SEQ ID NO: 368124 - DNA, 288 bp, Zea mays
gggaggaaggaaaaatagctttttcaatactgagcagcccaagagcactacatcccaaatacccccaagggggggggacagacttaacctacatacttgatctttcagggggcctttttgggcacttgccaccctttttggcctaaatcaatcgattcacaaagctaaaattcaaacagggggcacccctcaatgggcactaaccccattttttgcattgagcccgtacagcacacctgcatatttttttgttgagcccccaaagaacgaatccttaagcttccaaaa

SEQ ID NO: 368125 - DNA, 395 bp, Zea mays
aattgaagggccaccatgatatgatgctacttaatgtatagtgaacaatggtgtcttgcatgataggtggcctcgcatggcccaatgcatcagagtagcaggcaacttgcaaaaaaaaaagaaagaggtagcagcatctggaatttctctgtatgattcagacgactcaaagtcctagaccagatcatgaattagaagagatatatattatattcacagctcccttttaccaactactatatcgatacaactatctgcccaagggtcattcttcaacttctacagatagtagcttcctcaccaggtttaactcgaatttcacccctgctcacccagcttctggaaccgggccaagctacaagaacaaactagcatgattcatatgaacatatgat

SEQ ID NO: 368126 - DNA, 272 bp, Zea mays
ttcttttttttttttttttttttttttttttttttgttggtttttttttttttttttttgtttttaaggccccatcacaaagaaaatcccttattaccctggtggggctaaaagggcccgggaagccaaaaactaaagatgggtctcccctccatcgcccgggggggaaaacttttgaaaaaagaccccaaattacacccttcccttcggggcacaaaatacccaaggttaccccggtttgttttaacaccccctcctaacccctataaaaa

SEQ ID NO: 368127 - DNA, 398 bp, Zea mays
cggccgccctttttttttttttttttttttttttttttttgttgggttttttttttttttttttgggtaaaaaaaaagggtattgggttattgggggacgatcccatcggccggcgttttttgctggccccaaggtggtattaggcgaccgtatatgcatgcagcatgaatggatcgatcgatcggggatggaatcatatgttcctggcaatgggggctctgagggcgtccaccttggggccaacgaccctttccttttgtatgccggtcttgtacagcacgaacggggggagggcctccacttggaactggtgggccacagcatttttaagcttggcgatgcccaccaagcaaaatacggcctgcatttttttagccctggccatgtccctgaacgg

SEQ ID NO: 368128 - DNA, 369 bp, Zea mays
gaacaaataattggcgaaactatattatacatgggggggatggcggacacccgtaaactgctttccggttcccaaaaaaccttctttattttgcttttccaaaactttgggtggggagagaaaccgctaaattgacccttaacctgatctcagtgttgaaatccgttcccactagctcaaactgtgatcagcatccgtcggttgaactcaggtacttcaatcccaccccttgtgtgtgcacaaaatatgaggttatcatatcttcatgcagcttcatattcaaggaaacagcttctttaacctgttgatggcaacaccagccgtcttgttcattggttctagaacagggcggtggttgaaatcatcaac

SEQ ID NO: 368129 - DNA, 247 bp, Zea mays
ttccttttatattttttttttttttattttttcaaagggatgctttaacggagaaatgggtatatgaccaaacctggaggtaccttacaaaaaaaaactgaacaagagctcaagtgcacgacgttatgggtcagactctatacaactacagcatagtttgacatgggttactctctactctttttacaactaatgcatagtggtcggggggttgcttggctatggccctccaccaattgcctccccc

SEQ ID NO: 368130 - DNA, 341 bp, Zea mays
atcaaaaaatattgtctgctttctgctgtattaatacaaacaggcattgtatgttccaaaagaaaaataaaacaggcactgtcagtgttgcaattgtgcaatgtaaatgagcccagcccacaaacacaacgaaaagcacgacacatattcaacagcttcaaatctgccgcaagtagttattcaatctctgctatgtcaaaaaaccccaataaaaagctttttgctacaaggaacagcaacagctcccatggctgagggcaaaaggttcctcctcctcattagtacctgcttcgccacgcgttccagttaagcttcagctggtaccacagaggagagacccc

SEQ ID NO: 368131 - DNA, 307 bp, Zea mays
tttctttttttttttttttttttttttttaggaagaagaagataaatgggcctccttgaggctttgggccagctagccgaacgtacataaagatgaagaagatgaacatgcatgctcgatcgctcaagcaaggtagatatatatatcatccgatgagcacttgtccgtagttggcaaagatgtccttgacgatgatcctgtaggctctctcggtggggtggtaactgtcgaaaaacacgtgctgcgagacgttggcgcagacggagacgaagcgggagtcgcagagtcccgtgacctcgatggtgcc

SEQ ID NO: 368132 - DNA, 210 bp, Zea mays
attagggaacacaattagagacacatgcagggaaaacgaaccgagcacaggattacaggaacacgcctctgtcgacgaaggcccacgcccaccagctgttgtccctaagactaacactctcactgaccacaagcaagcatataccaaggtccggagagggactcattattgagaaccacaagccaacgcaaccaggcaaaacggaattaa

SEQ ID NO: 368133 - DNA, 221 bp, Zea mays
ggttttgtttttcccgcgggtcctcctggccgtgctggtcgtcacggtggcggcggcgtacgcgcccgcgcgcgcggcgggcgccggcgccggtgcctgcgcggcggagaaattgtccagcaaccgtgtgttccagacgtgcgccgacctgccccgcctcggcgcgtcgctgcactggtcctacgacgccgtggggtcgtccctgtcggtggcgttcctgg

SEQ ID NO: 368134 - DNA, 411 bp, Zea mays
tttttctcctttcccttttgtcgcgattgcagcagatccggcttcctgggtttcagatctccttcaatcgtcgtcttccacttcgcgtttccctctccgtactcatatggctttgtctgcatgaatgctttactggtcgcgaagccctttgttttctctagtttgcagttcgcatagctgcctcctttggatctaaggttagttgttgtccaccctccttaccctatcgattctaaatctggcgcgcctatgcctgaggtgatgcatcctgagcccttctaatatctcttgctactctatccgcggctccggttcttccattcccctgctagcctcacggactgctgcatgttgctacccccgtcgctttcattcccctgcaagcccacgctctgctatggatttcccacc

SEQ ID NO: 368135 - DNA, 297 bp, Zea mays
gccatgcagattctaacaatgatgggattcttttaatccattcaagagctagaactaggaacagatgaatacgctaggcctacgctacttgagatggatggttcggctacagccttgagcgagcagtcaaacggttacagtgaggttggggatcggggtgtaactcaaaaccacgcctgtttcgttacacaggaccattcaactacaggctaactactttaatttttacaacaggcaagaaagctaatgcgatccaaatgattacccctccttggcggcggcggcgctagtcatgtg

SEQ ID NO: 368136 - DNA, 285 bp, Zea mays
cccacgcgttttccctttcgtccgcgaccgcgcggcaggggaagcttagcacggacgggaccagctgacgaccaggccatggggaagtacatgcgcaagggcaagatgtccggggaggtggccgtcatggaggtccccggcggcgcgctgctgggtgtccgcacccgctcccgcacgctcgcgctgcagagggcgcagaggccgctcgacaagggggacgcggatgacgccgccggacagtacctcgagctcaggagccggaggctcgagaagcctcataaggag

SEQ ID NO: 368137 - DNA, 396 bp, Zea mays
atgtgttcttttgggttggcgagtgggcgaacacagggaacgacccggcgcagaagcaggccgggcaacctggcgcgctgaagatcgagacgctgtaccacgcggacaaggagaaggccgacgcatgcgtactggacctggtggtgtggctccacatcctgatcagctacagcaggccggcaaacaggtcgccgagccgatcccccgtccgttccccgacccacgcggccccgcgggtggtggtagcagcagcagccacttccgggcgccccgctgggctcacccgagaagagcgcgagatgctgcaggacgcctacacccggcggcggtcccccggggccgggaagagcaagagccaggagctggcggcggcccgcggcaacagggtggcgctga

SEQ ID NO: 368138 - DNA, 262 bp, Zea mays
ggaacctaacaaagaggcctgctccaggctgttcttatttcatacgtttgaataagaagtttttcatataaaaaatttgtgaacacttccatgtgcctttgggaaacagcgtcaactagcgtttacctggtggcagggcctgtctccaccattggcaccgtcccaaaaataccccccgtcacaaatgcgctgctgtggctcaagctcgcggtcgcggagccgttgtcgtttccgtcgcaaaaactttcgttggcggagcggc

SEQ ID NO: 368139 - DNA, 329 bp, Zea mays
cttaaaccaaaagtttagcctggggatttgatacaaaaaccaaacgaagtttatatcagcatagccagcattccagcatttgttgcacataattacaggttccaagctcatatttttacaacccacggaccaccaaaaagcttgagtggtctaccatacatctatctggcagacccttacaacctacacagaaaaatcgttgacgtgtggccacagcaacccgactgtgctactctttttttttcactcagatacatgtaattacaccagaatccctcaacatggggtgcaaaaaaggatgtacccaagaagcatatttacgtcaggat

SEQ ID NO: 368140 - DNA, 372 bp, Zea mays
agaccaacatcattttgatatccaaatggtgggtggtcccaatcatatcagcacaagctgaagctgaggacgaggtcacagcccgacacagctgccggggctgcggccagcagttataaacacgtaaatacctacggtataatggtgtccctaaacgcccaatatgtctcgcttatgtctttaccagaagatctagacagggatatatacatagactacctacagaaagcagttagacgatcggcagctcaggcatcaaacttgctgtgttgtgttgcatcggtgtggcccaactccccatcgaccgaggatagcttgaatggcaggtttatttccaacagcaagcccgactccgccttacagccttaacgt

SEQ ID NO: 368141 - DNA, 393 bp, Zea mays
atgcatcaactcatgaagcatagagtgactccacaaaacaaacacaccattaataatttataatttcaatcgccctggtacattacatgcatggacaatgggcgggaaagcatctgcaaattaacttggccttcctccatttcgttcccagtctccaactccgccgtgaaggccgcgcgcacgccaccaccatctaccagtaataatcgactgaggcacctcgcacagtgctcatcagtcccatgctgcatatgcagcaatacaatagcactaccaaactaatcaagcacaaggacgcagagctatcgtggtgcgcggcggccgccgagagctagtactggatgatggaacggtagtaggtgttgggaacccagttggccgggatgacctggt

SEQ ID NO: 368142 - DNA, 386 bp, Zea mays
gtttctgttttcgaacttagagaacacctaacatctggaactcttgtgattttgttggttatcagtaatgaaattcagttcctctgtatcagaaaaaaattgtgtgaattctgtagttctgttctcgaacaatgtaagagagctgcctacctcgtatggtgaaaggaagagaatagttgtgcagactgcagagcccctcagggataagaaaaggagagggacacaaattgtgcgttttatttgccttagttaatcacatagatgctgccacttttttagcaatgccattttgttcataagagtgtttttatagaatgccacataacaagcttcactaaaatgttgtgtttgcatttattcccaatatctgtagtctattattgact

SEQ ID NO: 368143 - DNA, 185 bp, Zea mays
cccccgcaacaaaaaatggggtggccgggggaattccgggggggtttaaagggcccttggaccaggggtaaaaaaacttccccattccccagtttcttgggggggtttgggccccttgttaaaccccacctggggggttaattgggacaaaaaccccagggtgaaggccttaaaaaaaggccccc

SEQ ID NO: 368144 - DNA, 338 bp, Zea mays
ccctctcgtctgcccacgcgtccgctcagcagtgacctcgttgctgtcctcctagcatccctctcgtccgccgccgcctggctcgcgccgccgacagtttctcggcccagatcgagacacgcccgccatcctacaccaggtgccgaggccttcgccgatcaaagagatcccagacagcagctatctagtcagtggatcatttgaccaggcggtgttgactgctttatccgtcgccgatgaaatacacatggcctttttggagagcgctagcgaccaggatgagctcctggagatgcttgaatcggctgggatggtgcttgtgcaggcactaaaagaac

SEQ ID NO: 368145 - DNA, 331 bp, Zea mays
ggcgactcctatacgcttcgccgatcgtgcgcctcctccctcaccgcgcgccgccgtcgctgccatcggttcctttcaaccggtggatcaccccgctttccataaccgtttatccttggttgtgctcagcgtctggttccgccattggtcccatggctgccccgcgcgccgcggcggcgtcggcgaagcaggtgacgaggcagaactttgcggaggccgtgctggagctgagggcccacctggaggcatgcgactacgtggccgtggcggcgcagaagaccggtgccccgacgggatggcgccgcgcgttgccggtggacactgcggaaac

SEQ ID NO: 368146 - DNA, 392 bp, Zea mays
cggacgcgtttgttctttcggcgcgtggagagtggaggcagggggagaaggaagcagcagcagcagcagcagcagctccatccgctcgcttccttcccccaccgccagcgtcgcctctccgtgtgcgcgccccgccgggggtggcgtcgctgcacctttgggcagcaggcacctacgtgcggggggagccacacgcctccctctcgcctcttggcatggacgccggcggagagaagtgcggcgacgcggcggcagagggcggagacctctacgcggctctcgggctaaaaaaggagtgctccgaggccgagcttaaggtcgcttaccggaagctcgccaagaaatggcacccggacaaatgctcgtcctccagcagcgtgaagcacatggag

SEQ ID NO: 368147 - DNA, 283 bp, Zea mays
aaaccccaaaacaggtctttttttcaaacaaacctggaacattttttttttttttttaaaaaaagaaaagaaacctggccactttgcctaagggcgggggggggggaggccaaatacggcccgccgggcctgggtatactccaaaagcctggccacgtcggggatcagccctttgacaccctccagggggcaaaaccggtccgcccacgccggcaggaggggggtcctgccggggttgggggccttcaccccgaaaagggcctcgggggggaacagcccccca

SEQ ID NO: 368148 - DNA, 234 bp, Zea mays
ggggcccacaggacagttttgtagcaactaacaagctctactgaaacacatgaggatgaaaaactttcatgtcattaagcatttgaccggggcaaacacaagcgctaccatttacacagaagggggttagttttgcaccatgcttgtacaaggaaggggtcaaggactactccgttttccctttccactaaaaaaggactaccaggtccgacaaacacaaaccgggttttaaaa

SEQ ID NO: 368149 - DNA, 392 bp, Zea mays
ctttcgctgtgtggagtatatatttggctggatggtgtagggttattattgaactcatgcatcatctatggccattacattacagttaatgactggtgaccaggcagctatccttgtttgaaagatcctgatccagagttcaagtctttttaactatggaacatttgacgcgtagtcaattctttgacgagttttcttgtggcaccttttcattctactgtttaaatccgcccagccttgtacctttttcaacatttcgtatcatgcaggtgaggacatacccaaggcgcacgtttaccaacagcgagggtgacgtattattcagtgatcttggcctaacaagcaagcaggaagccctgtttctagagcagatcacggggtagaggataatc

SEQ ID NO: 368150 - DNA, 140 bp, Zea mays
aggagaggagatcgagaccggctccccccgtcttgcttgtgcttgtcgcgtacgggtcttgtaagaacccgcagctgccgcgtccggttctttcaagaacccgctgcggggatggatctgtacgacaagcgagaggacat

SEQ ID NO: 368151 - DNA, 120 bp, Zea mays
cggacgcgtgtgaaccttgtgggatttctttctcctcaaatgacacgctgtcgccggctgatcagatccagcgcctaacccggcggctccggcgacggtgagtcgccggcgtccatgaca

SEQ ID NO: 368152 - DNA, 152 bp, Zea mays
tattttttttcctactttttgtatttaacccgcaagaagaatacggcatggctggttttgttgcacaatcctgatcgttcacatcaaaacacgtcttctccggccacggttgagccacgccacgctaacaccgcccttcaatatttacaccg

SEQ ID NO: 368153 - DNA, 104 bp, Zea mays
tttttatctctgctcggttagacagaaagcatggtacatgttcaggtctgaaaagctttgatgagttgatcttgaattggcctaaagaggcacaaggaattcaa

SEQ ID NO: 368154 - DNA, 326 bp, Zea mays
cattcatgtgtctgcctccggcactggatctgccttttgtaggatcttatgtgtatgctcctagaatatgtgtgatttacttccattaaagtatgctttgtgcatattaattagaggatgacgttttggacctatacaaaataaaagtcggacggccactgtcaagcattctccaaattcgctgcttattgtgacgtgtgtgtgcttgagttaacaactaataccatccccaactcatcctcatccatatagaattgcttgaaagcatgtgagtcttcctcaaatcacatgcacccaccatatgtattagtttatgggtgttaaaa

SEQ ID NO: 368155 - DNA, 105 bp, Zea mays
gggttggagctaacaaaggtcaaggcgccaactcatctatttgtacacaaggcgtctaagcaatgggtccaagaatggacccaagcttaaacattccttttgggc

SEQ ID NO: 368156 - DNA, 422 bp, Zea mays
tcggtttctgctatattgagcagctagcattcaaacatggccttaaccagagtaaatatgggctactcattgtagagtattgactactatcactgggaaggttgtgtggttttgtttttttggtaagactgtccattgctgtgatattcagccatgttctagagttttttccatactaagtggtgcatataccttgatcaactgcttaaaaaactctgactatagtctataggcgtctcttgtgggcctcacaattacttatgggttcctgttcttttaccgtgaagatagatagtgaaccttatgaaccaacttatacagcaacattgtgtgttgcatcattagatccgttgtaataagttctgcttcctggttttgagataccctgaaagtatttgtttgatttgtggtctgattacagg

SEQ ID NO: 368157 - DNA, 358 bp, Zea mays
atcgggttagagtatgccagtttcttcattcaatggataacaaaattatgcttcttatgcttgagcatataaatagatcccttcatagccacacacacataactaagctgttgctcgcattggattcaactgcaggccttgcacatatcaaggcaaattaatacccagatcaaaacagaagataaacaaactaatacaatactactactacaacaatgggaagatagcccttcaaatgacacctttcaaccaaacagtttaaacggatgggtggctacttgctagctcatgccttgcaaccacagccacaaccatgggcataaacacccatgcactggactgcactgcatatgacacc

SEQ ID NO: 368158 - DNA, 72 bp, Zea mays
aaaaaaaaatataataaacaaaaaaaaaaaaaaaaaaaaaaaagggaaaaaaaaaaaaaacaaaaaagaagg

SEQ ID NO: 368159 - DNA, 238 bp, Zea mays
ccggccggaattccctttcacccacgctttcgggacgcgtggtagcgctcagcacttaccggctctagaagagggttggttttaggaccggacaccgagtccgccgcgtggagggacgacccgaggccaccacggagaggagcgctagccccgcccgcggagaaaggacggagcaccccccgaaccggatgcgggcgaccagggctggcggcggcggcgccaatcgcccccaggggcg

SEQ ID NO: 368160 - DNA, 304 bp, Zea mays
gccgaccagcctggcgcgcggtggcactgtggcagcgctcacgcggcaatgttgaaggacgctgccgccgccggcattgcgccgggttcggcgcccgcgtttctctgcttcgaccttaagcccttcctcgccgcgctcaccgtgctcacgctcctcgccggcgcctggcagctccggccttaccaatccctcctcgcttccccattctccgctgcgtgcccgcaacccaccgtcggcgtctcgcttgcccgcgcgctggccgtccacgccaagaaggcctcctacgccaccaactccaccgttt

SEQ ID NO: 368161 - DNA, 280 bp, Zea mays
gaccaaacaaaaccagctgcgatgttgacaccccagtcagtgtcatcattcattggtggtcgccaatggtgagtgaaagaagaaaaaaggcgccaaaaggacgtactgcctgacgcgacgcctagttgcctaccctaccaatcactcactcactcactcgtgttcttcccgggaactcctcaggtacaggccgtccatccatcctcggatccatgtgtcacccaatcaagaacacagagaagggagaagggagaagggagaagggaaggggggaggggag

SEQ ID NO: 368162 - DNA, 215 bp, Zea mays
  unsure (1)..(215): unsure at all n locations
caantttttttttttttttttggtggttttttttttttttttgggcccaaacagcaccatttattccaggtccaccctcgccttattgagacgacggatgacaaacaacaactttgcagatgcagagcaattcatactcaaaacaactggctgttgggctcaccgatggaagtatccacccaccaaaactaataaagaatgctgaacaattgaac

SEQ ID NO: 368163 - DNA, 166 bp, Zea mays
caagtgggcgtaccccaaaatatagatcttataggcatacatcattcggacacacgtacgcgcaaggaaaagcttgaacatggtcgtatacccaggcccaagtttgctattaaaccatacacctactggaaaagataccggcattatattgacaccgctcctgtta

SEQ ID NO: 368164 - DNA, 290 bp, Zea mays
gaaggaccccagtcgcaagtttgccctccgaggacaactcacactacgcagcagttcacatactcgacacgttacacacaggcactacacacacgctgacacacgttcgcacccaaatgatgagaaccatgctggccgcgcggcgcggggcgacaagagggcggggcggcaagagggggtggggggggaacgagatcccggtgcagatcaagggaaacaaccacggcggtgccggtgggcagccgcacaatgcaaagggaggcgccccgggaggcggggcccacctgggc

SEQ ID NO: 368165 - DNA, 138 bp, Zea mays
aaccaagctacaaaccacatcccaaacataatttgaaaaggacaaggtgggcccctaccatgggaaagcattcaggtttttgtttcataacccttagacggaataacaatttttttcccaaagattcaaagctcacaa

SEQ ID NO: 368166 - DNA, 203 bp, Zea mays
tggtcagccgtatgtacgtaccggcgcagccatggcggaggagcccggcatcgtcgtagccgcctcctgcagctgcgaggccgacctcggcaacctgatggcgtacgacccgtgtcaccacgtcgcagccgccgcctacgcctccagggaggagctgaggcaggagtgcctgcggaaggggacggagctggcgcaggcggtgg

SEQ ID NO: 368167 - DNA, 368 bp, Zea mays
aacttaaagatgataccatacttgtttaataccattatattatacaaattcagtagttaagtttaagatgccctccccactgggctggcaagcgcaagccattactgttgctttccacggccatcccatggggcacacagactgaaactggactgggcaggaaagaagaggaggactgtgaccagcattcatcccgcatcacatgggctgctctcgtaaacgtctctcgtttaaataccaactggattaaccagcttcaacgagcaagcttttttttttttttttttggctccggccggccattttttaggtcacctgagtgggcattgccactctattatcctgcagagctccactatatcctccat

SEQ ID NO: 368168 - DNA, 326 bp, Zea mays
tcgcggacgcgtggtgtcctgcacgcgccagagctaggcaataaactggaaaggagcgcgcagcgcaagcttggggctcctgtctccgccgcggcgtcctctcgctttgttttttgcttgttgggaagcacaaaggctcaggtctttcaggactcgcaggctctgcgcagcgcgatctgattgcgaatgaaacctgcagaggaatagtccatcacaatgctaaggtggcttccaggctgaccacattgcgctggttgtagcctctggttatctcggatggaaaaaaaaacccagacatgtgaccgggtcagacgatacaacccata

SEQ ID NO: 368169 - DNA, 305 bp, Zea mays
tcgcccacgcgtcctgttaaactgagtggtcctggtgcatgcaaacaacctacagccaccgccgctgctagcggcggcaacggtgtccatgccctagcgacaatcacgcgcaggaactggagatgccggaatatggctaccacagcaagtggaacgacgactatggccgtggccggacgtcggcgagagaagaaggacgacgtggtcgaggggggaggacgaatggcgcagctacctggctccggagaggctggaaatgctgagacagatggagccgcgggtggaagagcacgtgctaccgttgc

SEQ ID NO: 368170 - DNA, 122 bp, Zea mays
gttgtgggaaaaaggaccttattagtagtaataatagcaacacaaaaaaaacctccaatttggaccgaacccccttccaaacctttccacccaacaattggggccttttgactgcgtaatga

SEQ ID NO: 368171 - DNA, 187 bp, Zea mays
tcctttttttttttttttttttttttaacacaaatcttatccatatattggtggggaaccctttgaatgccagtcgtgaacagaaccagatattgctgagtcaccatgttttcagcagacccaaagtcctccaagagggtaatgactagcgacacgactccaaattaccatggaagttatggtgcgc

SEQ ID NO: 368172 - DNA, 312 bp, Zea mays
ggggccaattaaagatgctggttacacatatacttagagaacacagtttggagccttaggatatagaggcaaaagggttttaacagcaggtggttgctttataaaagaggggattttttttgcccgcacataatacaagttgtgaaggcctaacattaggagaggggaggaaaggttacatgcaccatcttaaacgagatgcattggcgttggttagcaacttttgaaaatcgtagcaccattttccaagctaggttgggttacattcaaataacattgtgaaaacatattctggtcaaaagattttcaaaa

SEQ ID NO: 368173 - DNA, 445 bp, Zea mays
aagaaatggaaacaacaaacaagccatgatgtcatacattataactacccagtacatactcagaacagcgtcctcaacttccacctcctacccgaacaaggttagctactgtacattttcgagaaggaagcgaaaggacacaggatgcatctgctgtcagatatatgtccaaacaatgtactgctctcacatgggaataggacactgcatagtgcatacgtttcaacttattatctgactagtgttgttcagtccaacccatcagatgaaatctccctagcggcctagccatctgacacataaatatgttaactgtgcccttgagaagaaaatgtgcaaggcgaacttttattgaaataccagactcgagtgaaacccaagctgctcatagccggacagtgcacccacttccttctgttccattagttctgctctcagacgacat

SEQ ID NO: 368174 - DNA, 350 bp, Zea mays
caaaggactttgattccctgtctcgccacggaattaatactgtgagaattcctgtcggatggtggataacacaagatccttatccaccttctccatttgttggagggtctttggcagccctggacctagcattttcatgggcacagtatgccgtgcctccaaactcttctttgcagtatttaatatccctgacctttcctgatgctatattacttctgttggattagatcttatggtttgaaatgtataatcgatcttcatgctgctcctggttctcaaaatggaatggaacatagtgcgagcagggatggttctgtggcctggccctctcctgaatatatctcacaaac

SEQ ID NO: 368175 - DNA, 242 bp, Zea mays
acccaaatcgacctcgctccctcctccccgaactgatccgctgttgctgacggctaggatagtaggatgacgaagctgacctcggagctactgcggccggtggttccggcggcggcgctggacgaggcggcgctgctgcgctacctggtggccaacgtaccgggcttcccgggccccgcgcccgcgctatcgctgacccagttcgggcacggccagtccaaccccacctactgcatccacgc

SEQ ID NO: 368176 - DNA, 413 bp, Zea mays
ggggcaggaacaataatccttggatctagctttatcaaagtgccacagcgagaagttgacattagttgtatcgcataaaaagaactttacaaattggccctgtatcgcaaacacttaacaaagggacaagttatcaattctgtagccttctcaattttagtccgattaggctatctccagatactttactcatctcgcctccattttcaaactccactctgcaaaccgtatagtttgcagcgtaaaatagtgtgatgcaccgtcatatgcacggtctagtgaccatagctttagaaattgatgaagccacgaggaccaagcgtgctaggcgacggccaaaaagaaagacatttacagatttttccagaagtttctgatgccataagcaaaagatttcaggctgcccaaaagtc

SEQ ID NO: 368177 - DNA, 322 bp, Zea mays
cattagatgcaattattcttattcttatccttcattgggagtacgtactaagaatttcatctaatgaaagcaaattactagctgttgtttagtcgatcagcctgttgcgcactgctgactttgttctctcaagcagaatcagccatcaactggatttgcacctatcgtggagcctccagagtcctccgttgctatgctggtctcaatgggctttgatggcaataacgcaaggcaggcactcgtgagggctagaaatgacatcaacgtggcaacgaacatcctactggaagcacagtctcattgaactaacgcactgcaactt

SEQ ID NO: 368178 - DNA, 404 bp, Zea mays
caatgctgcaaaccttttataaagaaaaactaatgctgatgcaaacaccgacaggaattacacggctataacaattgtacaatcttacaacagggcgaggcctccaggttcctggtcttcacctcaccgcatgttccactacctgccccagttttcaggtttcctcctatccaattccaatatgttgaggtaacttccagctcggcgactaggtaaatacggcacactctacagtaagtacacaactgctgacagttgtacaggtgaatccgtgcatgtgctatcctggggatccacttcgtcaacaaaacgacaaacagcatggcactggttagagttcctacatggccaaaatttacagcaatctcaccccataaattcatgctagaatcctttcttgaact

SEQ ID NO: 368179 - DNA, 263 bp, Zea mays
agtccctttgaacttccttctgtatagtcctctttacacacttttacttggtctgaaacttaagaaagccaatttttaacatgcaagaatttgtatcattacatttaaaaaaggacacaataaaagctctttcacttggaaattaggtgaacacatcaaaccaaacaaaataggcagaaaagcagaaccaacgaggattattgttatataatcaaatcttaaatgactaaatagcctctagatcaatagccatcctgcaatgc

SEQ ID NO: 368180 - DNA, 460 bp, Zea mays
gaccatatgccttcttatatatattaagacaatgcttcatggttaagacttgagaacaatgtgtcaaaaagatagctgctccaaatatttcctaacagagcagcgggggcaaagttttgcacaacagttacgacagcttcctattgcagcagctggcagccaagttttccacaacatttaacaataatggccttttctcctttggagctgatgcctgtatcaactatgaacatgatgcaaaaactatggaaaatggaactaagtcgtgatctaaatgttgtcccaactaaatcattgagccccatgcttcgaccgatgagctgcgaacaaggggccacaagcgaacagcagcgacccatggaagaacacaactagaacagcacaaaattggcctgaagaatcgattggagcagggtgccctagaagatctcagatcttcatcatcacgatctttctagca

SEQ ID NO: 368181 - DNA, 367 bp, Zea mays
tgatgatgctcgcttttcctctcaggtatggtgtggagttagtttataagaaacaacctcttatacgggcacgcgggtgtttcatactgcaaaaatctactttctcctagatttgagcattctgaagctagcaatggagagttctcagagaatcttgacaagacatactatgtatatttaccacccgaattgtgccttgtgcatcctctccccggatcacttgatcgtggagctcagaggttaccctcaataatgagaagggtggagagcatgcttcttgcaattcaactgaaggacataattgggtatccagttcctgcaaataagatattagaagccttgactgctgcgtcatgccaggagacat

SEQ ID NO: 368182 - DNA, 400 bp, Zea mays
accccacccacctccgggaggcgtttgaaggagaagacacactatccgatgactatgattctgaccaaaattctgatggtcctgacacatcttcattcagagcatttctgatgtcctttgtgccttcctcaactgccagcaagaattcaatggagaccatacctgagcataatctagatgcggaatacccaactttaacacctgttgggaaggcgtgcagtgggaggaaaggcctgtttagtagagggaagcattcccttggtaggattattagcaaagcaggacttggtaatttgagacagaaacagacccacagcattgatggtgaaatcataggccaaaccgaatcagttgcacctagatttgaagtgaagggttcaaaagaatcaactttgcacga

SEQ ID NO: 368183 - DNA, 383 bp, Zea mays
cgaggcctcaccgggtccggttcgacgcgatacgcaccacacgcggagaccaagccgagcccatctagggttagcgtcccactgcggcggccatggacgaggcagcgacagcggccctggcggcggcgagggggcggtggacgcagtgggaggaggtggtggtgtccaacgaccgcggcagccgcctcgtgcactactacctccgcggcaacagcgaggagaagcagctggcggtggttgggcgggagcggagcccgcgtcacatgtcgtacgccgtgcaggggcggttcctccgcgcgctcgcggctgccgccggggcggtcgccgtcgcgccgtcgccatcacggtcgcctctgccggctgctggggcggacggcggcgct

SEQ ID NO: 368184 - DNA, 250 bp, Zea mays
  unsure (1)..(250): unsure at all n locations
ccaggnnggcctcnttgtttatgcatcagagcttggaaactgggcatagtataggggtgctcctaatgaggaggcggttctgaattattctagagttgttcttgatgtaagcaaacattgtaaccttggcaatgctgctcttaactccaccttaggaccatcatctggttgggacaatgttaggatcatctgctaaccatacaattaaatgtagtgtgcaactgctgatcctgatggccgcaagagagcc

SEQ ID NO: 368185 - DNA, 260 bp, Zea mays
  unsure (1)..(260): unsure at all n locations
ttgtcttatgtgatcttttttcgataattcgtcacagactttttccacgagcacacgtgccttcctccttctcacaatcttacaaataacgttggcagcagactttatctcagatagatcattgagcaatttggaattcattatctccgcactctattacncgttcctctcctgattcagttcttcctttgagccaataaaaatagtggcagcataagcattcttttaattaccctcccttgaacactattggctgataa

SEQ ID NO: 368186 - DNA, 275 bp, Zea mays
  unsure (1)..(275): unsure at all n locations
aactntaatatattaataaatcaatctgcaaatactcaaagttctcatgggactgcataaataaaacatataataattagagacaaatcctctcttagtctattatcatggtcttataccgtgttttggcaactcttctaggataaaaggggtaaaaattggttataactgcatattcaactccagaggggccactccttctagagcgaggcgagtcgatccacgatgagggcactagcctggacgtcgttgcagtcaagcaggaccttgtggat

SEQ ID NO: 368187 - DNA, 247 bp, Zea mays
gtgttgcgaccaatctttatttccaccaaacagaagcccaataacagggcaaggcgagcagggcatcctacactaacatacaataccaatttttgttttaggggacgatttttacatttagaacctggccgttgcgccatttgcacgggggaactggaaagggaacacagctcattttttatggattcgaatgggtccagaaggccaagagaaatcaagaaaaataagactgggggactcccccggg

SEQ ID NO: 368188 - DNA, 305 bp, Zea mays
ctggaacaaacgatgcaagcctccttgaggtccgcacaaagcaatcaactaccgaagcggaaagactcctgcatgagaacatgggtgcccttgaccgcagccacgagtgcagcgacaagttcctcaactacaaggccttcctgtcagcagatgtgatccacatggcctcccaagcacccagcagccgtggagacggtgcagggtgggcaaaccctgctgctgcagctagaggaggcacggccatagacgcggagctggagggcggcgggaagaaaaaggggaagaaggagaagaaggggagcgcc

SEQ ID NO: 368189 - DNA, 174 bp, Zea mays
gttgacgagaacattcagatgctaaattacaataccgcatacacatcacggatttaattgatggttcatggactcaatctagccaacaattggctataaaccatttcaacgttgacaccaaagcaggaaaccagcaccagggccgaataaacgactgacaacctctttctaaga

SEQ ID NO: 368190 - DNA, 310 bp, Zea mays
aagcaacgagagttcccctcattgggggggtgcgacatcatacagagggtcaaatacggcagattgaaatacagtaaaggacagagtgtattttcctcagggaagaagcataggccttttcaactagctgtttgtatccgttttaacaaagatggctggaagcgatcgcttctagagggaagcaacttatagaactacacccttccaggaggacatttagcctgaagctttcattgaggtcaccctgaacagcaaagaagagcagcattgcagcaaggaagaagatcacacagaattgcatgatgcacaa

SEQ ID NO: 368191 - DNA, 234 bp, Zea mays
gccctaagaaacgagccagacacaggacatatattacacaacatactatggtgctttacactggatggaaataggtaccgactactgaactgaaacagacaccttattacggacatatgaagggtggaataacaaatcggtcttcatggcacacgagtggcacagcgctaatttattattacaacctccatgcctgggaatagtatattaaagagcactaaggtctctgcgatg

SEQ ID NO: 368192 - DNA, 375 bp, Zea mays
agccacgaccatctcttcgtcctcaaccccgtggccgcccaggattcctttgccgaggaggccatggccacgatggaagcagccgcggacgcgggggatcccgcgaggctcatccagtcctctccgtccccttccctactcatcgcggggaacctgctgccaccctccctcacgatgccgcagctgcaagctgaggtggtggacaagcagtaccgcgtcgcgatgagtccaccgcctcctcttcccgtcgtcgacgagctgtaccgcgaagaggcaagtcctccgcctcccatccacgacgacgctgcggggttgatgtccttggactcgagcgcgttcaaggtgctcgaccaaatgtccaagagcgcaagagcc

SEQ ID NO: 368193 - DNA, 394 bp, Zea mays
ataacaatgctgtaagctgacagtttgattcttatatgtagaacgataaatttatgcatgactaactccacaagctccgcaaagaagtttgtagtgaggctacaggtttgtacacagaagtcaggatgtttaaaatgccgtgtacaatctatatgggtcagaaagataactaaaacaaagtcagagaatttacaatggagcagaggatgatggagacaatccagttggtctccaatctgattatagaggaagaaaaaatgtcatcgcttgcgggttaaagaagccgatgacgaaagcagaagcttcaatatttaacctctgtacttctcacctccaaacagtacccatgatgagaccaactactccatgcattagcagataagttgacgctttt

SEQ ID NO: 368194 - DNA, 388 bp, Zea mays
gtacttagttatgaaacaccttgcccgatgcccgccatgcgttgggactgaactcacagtcggaggagacaacattgaacgaggattggggaggggagtgttttcttgcttagctttgctgtaagaaccttccatccataaaatgcagctaccgtgctggtacgtcggtccgacatgctcttctataagactataattgttatctaagattcgttatgaggacattctcaccggtttcgtactagctgattcaatgtcgaacgatcggcatatgtaattagactgtctccagcaaggatctgtaaatggtcctcttccttagatttagcgtatattgacgtcctttttccctccagcaacgaccggtaaatggtccgctaaataatat

SEQ ID NO: 368195 - DNA, 245 bp, Zea mays
aaaaaaggggagtctataaaaaaaaacagggggttatacgaaaacatgcgccggggggcaaaaccaccaggcgggaaaataaaagaatatgcacttcacccaaaaacctaacccaaatacccccaaaacagagctccggggagaagaattacgtgggggtaacaacggatctactttacatttaccaagacattatttacgccctaaaacaaaccgggggaacccacatcgggtaactgacgaag

SEQ ID NO: 368196 - DNA, 323 bp, Zea mays
ctacttctgttttctctcctcccccgtatttcgtctccggttgcacccttacgagctcgcctgcggtgggagcccggagcggaggagctggaggttcctggtagcggctgccgccggccatggagaagaggaagcggatcctggagctgcgggatcggctggaccggacgctggcagatgcccgacctcgcgaaggaggcctcgctcagggcgctggtgaagaagcagatcctggcgtagtccctgcccgggtccgatcaaggtgacatcgatctcatcgatgaaacacggacaaaagaagtctccaagatccttgaaaggct

SEQ ID NO: 368197 - DNA, 383 bp, Zea mays
  unsure (1)..(383): unsure at all n locations
cccacgcgccatcncagggagaagctgaggcaggagtgcctggggaaggttacggaactggcacatggggtggctgacgccctcttcgctgtatcacccaccgaggacctcgacggccctattgtacacctnccaccgcccgctgttcgactcccgcgcgagaagcatcttgatgctgggacctcactgccaggattagtagctgcaaaggttggggcagatgtaacactaacagacatcgcgcagacattattgtttctttaattgcaggccactggtgctgtactacgtggtcctgacgttgcgggacagcgtgcacatggtcttctacgccgtcgtcgaggccagtgcagttcgcgcaaacaacagccatcttggagata

SEQ ID NO: 368198 - DNA, 381 bp, Zea mays
  unsure (1)..(381): unsure at all n locations
tgagacagnctgaaagcaaaccgggggcagttgtgtgcatcaactcctgcttcgcgcattgctagagtgagctacaggacacatggttcgcaccaaattctccatccatatataacaagaggtggtaggtgattggtactttgaaagaggagctgacgtggagattgactgcgcctatccctgtgattcacagtcttgtcgcaaccttataccaattgataaggttagttgcttccgtgaaaagaggttaactgttttggcaaaataattctactggctagtaactcttctgcctaaaatggaactgacaaaaaattcatcatttgacataggaactgaggatgtattatgagttcggcagacgattatactcaattatga

SEQ ID NO: 368199 - DNA, 268 bp, Zea mays
gattgcagagaacaacatagccatcaaactgaacttgtacatgctcagccctaaatgattttagggcatagtctcagtagggtacttgtacatagtcaggacttgccggacatgtgatgaggctcatgaaacatggcacaattggcaacaagggaaaattataagaccaaaaacattttataggcatattggaagatgtacgaaaccaaacgccaaccaaagggaaacattttttaaaaaaaatcactctgacatcagcaatcctgga

SEQ ID NO: 368200 - DNA, 274 bp, Zea mays
gccacgctcatcttcacactatactaggcacaatgaaacggggggttcatgggtcacaaccaagcgtgtagcttcataccttctggatgaacatttgcttatgatcatgcattcttggaatgctatgtaatgcactatcggacggatcacaggcatgcctttgcaacattgtcgtttatctacgagactttgctggcactttatgtaggtatggatgcattatatatagagaagtggaagattgtcggtcaaacttataggcatactctctgcc

SEQ ID NO: 368201 - DNA, 256 bp, Zea mays
gagccggtcgatccgttccaaggggggggtttttgagggcacgactcgggacttctcacattcccacagcgcactgtgccactgccgccggcccgccgcactagccgttgcttctcccttcccgttcccaaggagttgtcctcgccggcggatccggggcgccgctgcaagaggaggaaggaggaggagaggataccagaatggcgtcgcgctcggcgtccaaggatatcatcacgctgcgaggctctgccgccat

SEQ ID NO: 368202 - DNA, 198 bp, Zea mays
aaaaaaggcacccacaaacccttttttttacacacaagggatgctaaaaaatcttttgtacatgttcttggggggggggggggccccgatccttggttacccaaattaattacggtccagtcccgcccatcccagaacaaacaaacaaacaagggccaaagggcaaaaccgggggggcctggacccttatttaaggtt

SEQ ID NO: 368203 - DNA, 392 bp, Zea mays
  unsure (1)..(392): unsure at all n locations
aagaagctttattttctttctattgaagtatgcattgttgatgcatgtcaaagtgctgagaaagacattaatcctttcaacagttagacaaaataatggtgggaatataggctttgttgattgtgttatgagaactaatgtggctttgacaagagcaaagtatgttaacttttgttcctttttgttggcttaattaaattttattttttttgttggcaaaggatcaacctttggatacttagttaattcaagatcccagtacatactcatctaaataattatttcttccacaggcactggcatgtggatccttggacatgaattcaacatggtatgatttagtcaaagacgcgaaggancgtggaatgttttctttaaagctcgcgatgatg

SEQ ID NO: 368204 - DNA, 274 bp, Zea mays
caatggaagaagttacaatgttcctcggtttttattccaagaggaaaaaaagtgatacacaaattacacacattgtccgtatttacttgtaacaaatacattgccaacagaacccaacttagcaagcacagaacaactacccgaattgacgcgaacggtcaacgcgagttaaccgaatgcatcctgaattgctgatgcatattaatcacagctatgcaggcaaaatacacgcgaaacaaatatttttaacaatgaaacgaatgaatccatttcc

SEQ ID NO: 368205 - DNA, 426 bp, Zea mays
  unsure (1)..(426): unsure at all n locations
caaaactcgttctttgcctttaaactggctctttactgcgtnnggaaaattgtaggttcaaatatcgcttgttctcctgattacaaggttgcacttattgtagtttgcaattgagatgcttaattagttatacttcaaataaattgtatccatggctatgtttttgctatcttagcattgctgagtagtgcagttaccccaaaatcttacagacacattctgtatgctaattcttaggagcaatatcctatggttacaatgcatttatattattctgcctccatttttactgcaatagtgtcctatttcctttgtaactgatttgatgtttggtattcttcaagaagatatgaaatatcttgcagtgcatccaatactagtaactggtgaccagcaatcaaccttatgataaatagcaaacactga

SEQ ID NO: 368206 - DNA, 307 bp, Zea mays
acgcggccgataaatagcactaccttattttttattgttgtatgtgtatatgtatgtagaaatttatgtgaaagcccactagaagcagacacaagcgtacacacatacatggagacgtgcgaaaagctcgacgcaatggtgattggtaattgcctgactgacgatgacgacaccaaattcaaatctgagcagcacgatccccgggctcgtcgccccatctggacgggcagaacgtgatgatgtactcctgcgcgtagcacccgctggccgtcgtggcggcggtgtcgtaggcatagctgtagtatgc

SEQ ID NO: 368207 - DNA, 395 bp, Zea mays
aataataaagctctgtcaaagaggtcagaaaaaactgagtatccagaacatagttcgtttatactcaccaagtcacatatacaatggatttgtcttcaacgtgatagccagtcggggagcgacaagactaaaatgtagaaaaaaaagacaaatccaatttagactaaccgcaatgcagccccctccctgtatgccgcctgtagggggcactccaccgccgccgcggtgcccctactgatacaaggtgtgatgtccgtgataacttgtcacaagccaaagctaagcttggacaaataagttgctcacatttgttttaggttgcatgctggaaaaatgtgcaattttcagcgcacaatttcgaaagggcaaccagttgtagaccgtctagatgatgc

SEQ ID NO: 368208 - DNA, 382 bp, Zea mays
  unsure (1)..(382): unsure at all n locations
gcgtctttcgcgtccgggagcagcagactaaccaaaagnggggcagcgccaggctccgggcgacttctccaggccccgaccttcgctgcggccaagtgccagccggtgggtggccgggcatccgcgcggcgagcgccacggccactgttcgccgtgcgcgcctcggctgctgacgccgccaacagggatgccgtgctcaaggccttccgcgagaacagggctctcaagataatttccggtcttcagaactttgacaggagcagtgttgcatctgttgtcacagctgcagataaggtgtggacaatacatctacctgtcaacgcttactggtgttactatttcgttcttgcagacttctttgagactatatgatgtgaaaaag

SEQ ID NO: 368209 - DNA, 330 bp, Zea mays
aacttcctccgatgcacagggagtctgcccctgactccaacctttggtccgcgccggcgaatattacaccttcgccgactctcagttccatccacgccctagtaaaagcatccagagagctcgccaccggtgggaagcgccgcaaggaggaactgtcgacgcgccgtgcccagatcctcgaattcgtccacactggtcgttgggtgtcgccgtggtgcttcacatggacacgccaaaaaggtttgggacatcttcgggcgagatctgcaactgtcgctgtgtccaccaccaccctcggtgaagagcaggtagcctaagaggaggactact

SEQ ID NO: 368210 - DNA, 269 bp, Zea mays
cggacgcctcattggttccatcgcaggcagtcctggtgagaagaagataagtttgcaagagctgcttctccttgaaagtgcagaagagtcccgaaatacaggcgcagtaaactccgagagcagtgaaaagcataaatgtcctctgaatgaagaagaagctgcacagacttccaaggacggcgatcctgacgctgagactgttttggccaacacctttgagcatattagtgatggcatatcaagtaaggagaaagggcagtggttgccca

SEQ ID NO: 368211 - DNA, 477 bp, Zea mays
  unsure (1)..(477): unsure at all n locations
ttttcacgcgtccgctcaaacaataacctgaagaacngaagaccagactcataggggggcagttttctcaagaaatcgccatggttcaacatgttgaagaatgccaagtggctgaagataagatcagaagattagagtctgaagctgaagtttctgcctccaacataaatcagttagaaaaattagcttcagaactacaagggagaattcagaagttactagaagattctacctttgctgaaaatcacaagcaagagttgcttcaaaagattttgaagctagaatcagataatcaggaactcctaggacaaatgcagtccattatggaagagaaatcaaataatgctgaatctctgcatggagagataactaagcgtgaccagcaggttgatacacttgagaatcagatcaaccagcttcgtagtgttctggatgagaaggagcaactctatctttgctctgtacaaaaagagaaga

SEQ ID NO: 368212 - DNA, 280 bp, Zea mays
ggcctggcctcgggctcgggcgtagtccagttgccaccaaccgagccagagagagaacaaagaacgggtgaaagaaatctcggaaaggttccagatttcctcgaggtggaggcctccttttcctcggccgaatcgctcgttcgctttctctctctctttcctcccatcgagcatgcattcttttctgctgctgcgaccgtaggatcggcgtccagcagcctcgccgcgtcggtatggttttcccttggcccacacatcctagctcttccgcattcttgaa

SEQ ID NO: 368213 - DNA, 318 bp, Zea mays
tccttttttttttttctttgcagctctgaacaccaaaggaaagatatgtgtggcatgtttcctttaaaagggctaaacaacatacaagacaatttcaacataaagaagatgtgaaacatgtaatccttcaatttcactttgtcacagagggcgacaaggagataatggcccccatcaccatgtggcacaattctaaactcgctggcaatgcgcaacctatcatcatccggaagtggggcgctttcaagggacggtgactccgggtcgcctttgtcgtacaaacttgccgaccaagatgatgaaatccacaagctgatt

SEQ ID NO: 368214 - DNA, 276 bp, Zea mays
tcctttttatttttatttttgcaggaaaaacaatgttggttggagaccgttactcgtttgaccttaattcaggactgagcaatcgaagaacacaagtaggagcaaagatcacatgatggcacatgcactggaagggtactcctcgtagctgaacttggtctcgcgcacgatcttgcacccgttgcaccctctgcacagcgacgggccggggcagcacatcggctgtgcgggcggcggtgaccagcagccgatgccgccgccgaggcaccacgcgca

SEQ ID NO: 368215 - DNA, 388 bp, Zea mays
tttttttcttttctttttttttttttttttggttgttttaatttttttttttttgggctttaacaagcaatccaatctggggacaattttttctcaaacaaaccctttggggttcaattcagccaggacaactataggttgggatataataatagtccatagatgggccccaacaggggtaactaatttcgccgcacgcctagcacttgatctccttaagaccatgagagaaataggggaatggcggattaggggcaccatccttggaataggggaataccacagacgcattatccttcaggggctccccaacaaaactattaaaaacataaataacaatggcaatattagacatgtaaaggacaacaatggcaacattggatttaac

SEQ ID NO: 368216 - DNA, 360 bp, Zea mays
tttttatttttttttttttttttttttttttttggagaacgccttaaccattaatggttttttcagcaagggaaaaaaaagagtagcaccacgacgggcggtaggatgcgctggtcactgcactgcaccacgcctacgttttacaacctgcaaaccacggggcgctccgcaaatcaacatgagcagagcccaccggggctgcaaagccaggcaacggacgacgtactccacgattaatcgggtgggacacactaataagcagacagacgagaccagaccagatgagtatcgttacaaacgacgacgggggaaaatattttttttgcttgcagtagtaggatcattagtcctagctaaccc

SEQ ID NO: 368217 - DNA, 266 bp, Zea mays
ccagggaacatggttaggttattcccaaatcaaagaaaggggggcagcaatacaaaaattatttgggaacctcaggaaccaaaaaaaaaggaccctcatggccttaaaaagggcaaataacccgaccctggggggaaatcttaaggatgcgccggcaccttaaagggccccctggccaactttcaaaacttgccccctggcaatagggtctgcaaagttaccatgtcattcaggggggggcccaaggggaaggggaccggggcccc

SEQ ID NO: 368218 - DNA, 302 bp, Zea mays
ttttgctttatttttttcttttttttttttttttggttggtttttttttttttttttttttttttttcacggcggcacaggggaggcaacggagccatccttcttacggggcaactttcatattcagcaaagccaacggaaaaattaccacccttaacccgggggactttttaacaaaggaattttttcggggagggcggccccccactaaaaaaagggggcaaacagcccccccgggtttagcaccaatttggggggacatgctaagggggggccttttaaaataaaaaccaaaggaaaca

SEQ ID NO: 368219 - DNA, 370 bp, Zea mays
  unsure (1)..(370): unsure at all n locations
tccttttttttntttcttttttttaaacgaacaagatggatggattttgtcatcttataaacgaaaaaaatgacccaacgttttttttttccctactcggtccaactcgacatttgacgagctgtcgacggagccgcgccagactcccatctctgcctgcctgtttctctggcctccactccggcttcctccaaggagaatggcccacacccgtacgttgcagtccatggcccacccggacggggngggtggccggccggcgctgtcctgccctgcgctgcgcagcctcgatctgtctgtcggcttggcgtccgcgcacgggcgtgcggacgccgactggcccgtgttcccggccggccggtcgacatgc

SEQ ID NO: 368220 - DNA, 201 bp, Zea mays
tttttctttatcttttttttttttttttttttttgtttgttttttttttttttcttttctaccaaaggggaaaacaggaatttgtatcaattggaaaatgacatccagttaaaaggggtcggggggcaaaaaactctgtttatataccccaattacctttcaaatcattgaacaaaaggcaaggtagcatatttcattttt

SEQ ID NO: 368221 - DNA, 344 bp, Zea mays
tccttttcttttatatttttcttttttttttttttttgggttggtttttttttttttttttttttaccccccaagaaaataaccatttactaaaccagacataaactttggtttattggaaacatcacagttgagaccaaaatggtctcaaactttaagcgcggggggggactacatcaaaaatatgggtaaaaaacaggggcgttgggcccctaaaacaaaataaaattttggaggcgctggtattacaggagacaaattggggattaaaccgggggaggaaacagtttcaccaacagccaaaaattttagaggtgggcctcaaactcaaaaagggggggcat

SEQ ID NO: 368222 - DNA, 297 bp, Zea mays
  unsure (1)..(297): unsure at all n locations
ttttnctttttttttttttttttttttttttttttgttgttttttttttttttttttcggccaaaaaaaaacgacggatactggttcaattcagcactgcattgttcatcaaactaaatcatgccaactgaatcagggggaaagggaaaaaagaaagggggcatccagccggaattcactcatttttaaccggacattcggatctacaataagttaaactgcctattttcattgaaaaaggacgggcagttatctggtccggaaaaatcatcttattggctccatggcattttttca

SEQ ID NO: 368223 - DNA, 368 bp, Zea mays
ttttatattttctttttttttttttttttgtttggttttggggaatcaagtattcttagttacctgggagctacactcaactctagacaagccggaagcttcaacattacgtcgccatgcccagtaatactcatgtacgccttgctagttaaagggaaaaaaagaatccgttgggaatagaatcaaagctccagcctcaacttcaattagcaggagcagttttcacccaccaaggggagggctcatatacatactcttcgtcaatgataacatacagaaatcaagcaatgggccctgacactagtttcatggcttcagcatatacttcttttggtgaaagactccattgtcaggttggcagtgaaggc

SEQ ID NO: 368224 - DNA, 260 bp, Zea mays
aagctggggcatcgccagcggtgggtagttactctcagacgacggagaccgtgaggccggagccggcgcggcagctgctggtgaacgctgcggcggcggtggccgtgcttcgctgggtcatcgcggccgtatggcgcaccttgcaatgaacagtgtgtgtcgcttgtaactatgtggtgttttaactaaacgtctgttgtacaccatgtcaatggccaaagctaaatatgtaacaaaacagagtaccctgctgatctacc

SEQ ID NO: 368225 - DNA, 431 bp, Zea mays
cccacgcgtccgccggttttgtggcttttaagctagcacttagcgactcattgtgcttaaaccgcaatcaagttttgcttgctaacaactctattgtttaagtattcttgcatctacatgttgaagtgtataagtggattggctaccttctcccatcagcttaagcttttggtttgaactagttagtgcgttcattctaacatggtatcaaagttaggggtctcgagttcgagtcctggtagaggcttttttttgtgtctccacccatttatttccacgtttgcgcgtttctctcgggttgaacgtgagtgggggtgttgaagtgcataagtggattaactaacttcttccatcagcttaagcttttggtttgaactggttagtacgtcagttctaacactacagattgtagcactactaataaccagtca

SEQ ID NO: 368226 - DNA, 123 bp, Zea mays
  unsure (1)..(123): unsure at all n locations
tgtgtttgttcgagtaccttgaaagaccaatttcatctcctatgtatggctttgagatgaactttgcatcagttttgttgagccgtttttttatacgtgaggatttagagtactaacananaa

SEQ ID NO: 368227 - DNA, 392 bp, Zea mays
  unsure (1)..(392): unsure at all n locations
gggaagggcactcacgggggttacattttaaaaaggggtcgcggttcatgcccgtttggttcctcggttgctgcgtgaggcggccggaggagtcgtgaaccgggaatgacggnggtggtggtggttttccagcgcggggtgcaagggtggcggcggggcgaagagggccgccggcggcagaggtggcggggaggaggagcggcggcggcgggcggcggttctggagctgctgctcgcggccgtgcggcgctccgtggtggcgtgccgggtggagcgcggggccgccggagccgggtggccggcgagagaggaggacgcggcggtggcgctcgaggagatggagatcggttggcccaccgacgtccgccacgtcgcccacgtcaccttcgacc

SEQ ID NO: 368228 - DNA, 418 bp, Zea mays
agaagcgaaagaaaagaaaggggggggttgttcttctgatgctgatgaaatgatcaatctaaaacaagatcagatcggcgaagtagaaaatgagtttgatctcacactacgcatcaggcctcgacatgagagtgagctatcgatttatctcttctgcgcgggttggtctttcgagaaaaatctcttctgcgcgggttggtctttcgagaaaaatctcttctgctggctgtgctactgctacctatgagactacctactgcagtctgcatattcctggggtgttggcttcactgcttcagctagatgctctgctgtggctgacgcagttcagtctaaggagagatgcattttgggctcagcacactgatcttgattactgtagattactagattagattgcctgtagtgtacattatcg

SEQ ID NO: 368229 - DNA, 409 bp, Zea mays
ccgtctactctcgctcaccgggtggcgttccagcctcagccgagctccatcggcggaacctcccagaccccggcgccgttccagaccgcgcccgtcttcaccggcggaagcccccggaccctggcgacgctctccgctcagtccgtcccccgcgtcacgcggagaagcattgcgctcgtcgattggtgtttggagagggtggagggcgaggagggcaagatccgcgtcgctggaaccacctacaccccgcaaacgagcccgcaaacgaggagagaagcatcgtcctcaaagggaagcaggaaagtggcaggccgagtgttcagatcatctgctattgttaggcgccatgatcacttcagaattatgtccgaggatggttacctcatacggataggctgtctcttgaata

SEQ ID NO: 368230 - DNA, 449 bp, Zea mays
atattcgagaacggaggtggtggttcttacatgagaacctcctctctcatttcatctgctctgttgaggttcaaattttaactgttatcgacaagatggccaatagtgtatgtttctcacctggttattttatcgtgaaatgattattatttatcagtggttgtcagagttattgaagatggttctcttaatgtctggaatcatgtacagacacaatgctacgcatcttgtcactttgaacagaaaaccctttgtaggcaaacaactacatgaataatgtagctgcctaactgtaattcatattctagtaggttcataggaaccttgttttggcatatttagggtttagattatgcatgtgtttctcagaataaactagcatgccacctatatctttgttaatcgttgtcctttgcttcaggaacggttgaaccggtcattgatggtct

SEQ ID NO: 368231 - DNA, 403 bp, Zea mays
ccgtgaagaattatgtgggcgtggctcgactaggcgcacacgccgtggtccaacgtctcgcttcgccttaccgacttaagaacactacctatcgcaacgactcgtgcaatgttcacgttaatatctggcagctgtttactaaagtgattctcataaaagcggactgaatagttgggtgtttggcagtctgcatcatcttttggtggccaaaagctgaaacaaacagggccatacacttatgaattgcaacttgatgttatacacttacgaattatgggcaattctgtacatgcagtggattgcattgattgtgcagcagatgcatctgtggtgggagcagtgaatgaaggtattgaagtagcagcatcaattgtaccaacagttcaaaggccttggctgatga

SEQ ID NO: 368232 - DNA, 206 bp, Zea mays
cacgcgtacgcggacgcggggggtttttttggaccccagcgccgcccgactgctgctcgtgggaccacctacggtgtaacgacgccagacgcgtgaacaacgtgttcatcgacggcgcggacgacgtgcgcggtcaaattccgtcggcggtgggcggactgacggagctcatgtcactgaccctgtgccggctggcggggctgacg

SEQ ID NO: 368233 - DNA, 468 bp, Zea mays
cttctgagcttggagagcgagggtgttttggatacactggcctactggatcatgatatgactaactaacaaccatgaggcaatagatgatacttaaatgcacataggtacaaatgtgtacttgtgtagtgtcttgattgtttaaatcttgtgttccaacatttaataccttgctcgattagttgggttcatccagtggtaaaactaaggtgtatatagatgtataaaaatataagtcggtttgcttgcaagctgccaacgtgtgttatcaggcaatactttggtactctgaagttcattgtgatgtgactgtgctgcatctgttccatccaagcacaaaagggggaacggggatctacacggaggactgattttgcagcatctgtcaagcaagcaagaagtggtcatagcgaccgaaatatctggaacctgtgttgttaattgaagagcatacaagtcataagagcga

SEQ ID NO: 368234 - DNA, 483 bp, Zea mays
acgtcggaagaaatcaagggggtgttttcagggtttcctatgcatgccatttctgtggagatcagaacctaatattgggtagtgggaagggtgttgttcagagcctgttactgtcaagagggcatgctaccatgaactcattccatataattgtgagaggaaacggtagcaacacaagagcacatgataagaaagaagtgcttgagctttctcaagcagcaattttgcaagtggaatcgtcatctctgttgaggcagtcgactactgaaagtgacgagcatggcgaaaggttaaattgtaatcttgatgaacagatgcgtgaaactagccatatttttcctgagaaggttaggatatgtgaagctactatgcaagcagaacttgcacctggttcatcatttgtcacgcctcagaaaatgaaaccaccggtggtgactgttgcaaaagattcagcaggactactcaagacaggaagtggcatga

SEQ ID NO: 368235 - DNA, 145 bp, Zea mays
ggtcattacaccggagcgcacgcggggagcccccgtagagttccggggcgaccaggccaactaacgccatgaaggaggaaggcggcggcggagacgcggggtttgtgcggtcggaccagatcgacctcaagagcctggacgagca

SEQ ID NO: 368236 - DNA, 351 bp, Zea mays
gcgtccgcccacgcgggcgcccacgcgtgcgcaaaagagcggatactttctgtattcatgaactctgttcagttgccttcacaaaagaaggatggtgatagtactcatttatcgcattcaggaagtcctcagcagggtgagatcaaaactccagccaagggcgatgtacaggagacaacaggtaaggtcctctctattcttgggattgctgtgagtcagctatatggtgatattagagccaaagtggtctgaactctcaattaaagctattggaaaagctaaatttaggacagatgattctggtcttcaagctgatgctggaatgagcttgcaagtatttgaacaacatat

SEQ ID NO: 368237 - DNA, 375 bp, Zea mays
ttccagcattatgaagagggggtagtatagaacttggaaccacgttgtgatagctttgggagagcaagttacatgtatgataatgggcatacttccccagatcttctgtccatgcattctcctgcctctagcagattagagcgtgcacaaagtgtggagtctttagaaagtcaaaggtgcaacatcagatgaagaatatgaagtaaatgtgaagcatgaagtgattgttgatgatgaaaaagttgtaggatgggctaaggcacacaataacgaacctctacagattgtgtgtggttaccatgctcttcatctgccactcgtggtggtgaacttgtattccgcccccttgaacatctccaacctgtgaaatactcc

SEQ ID NO: 368238 - DNA, 281 bp, Zea mays
acagaatcttttttgttaatggcgaaaacgaaagagcccgtgtgaaccggataggtgaggaaaagaggaaaagggagacataaattggaggccattatcaagaaaccatgagttctaggttcgcaatccctaatcctgatctcacttaagcgctcgtgagctctctccagtggctaaagattgcagatttgagttatagtccaagaaacggggtggtggtccgccatggaggtgaggtccgagcaagggctgatggctggggagggatctattcggtatgc

SEQ ID NO: 368239 - DNA, 361 bp, Zea mays
tcattgtaccgtcgttggggttcgaacttctaacaggacgattaagcatacatgtgtcaggcttatttggatccttgagtgaatttaatggtaggagtcaaaacaatagcgctgagtatcgtcattttctttttgccagcctttatgtattctaggcattctaatcaacgattgcacaagtcaaaaataggcagtggatacattgtttgatcacacggcttttaagggcaacagcaattatatggattgatattgaacaggaagtgcagtgttccttgcgatgagaggtggtgttgtgtgagctaatattcttgtattgttctccaaatcactgtcgtaattgaagaaatgtttgcaccgt

SEQ ID NO: 368240 - DNA, 411 bp, Zea mays
atgctcaatattattgatatggggtcttataccaatggtcactttcttaatccgctaaagcactattggtctccattttgtcttctgtctagtttcagactagattcttagcgtttgttgaagttcatattgctatataaaactggaacacgggtttgctaagttccaaggttaactagacaccatagatctctaaccaggagcatgttttttatggaattttgcataagatatcatggaattctagttatctcagaaccaatctgaaacaaatgaaaaggttgagggattctgtagtattgacatatacaaatagagatatatctagaggaacaaaggagcatatacttaaaaaattatatgagcatgaaatggatatatctagaggaacttggaggaaaatgcgacatt

SEQ ID NO: 368241 - DNA, 413 bp, Zea mays
aatttggtgggggggcccacctacacactcaaagaaacgtacatagaaaggaaccatacagaccatctattattgtagataaaagatatatgtcgcagctaagattaccttgcagtggacattcctgtttcagaaaaattgtatcatggaccataaccataaggtctgttttaggggatgtttgatttgtagagactaaaaattagtcccaaaaactaaacaccccttagagcttgtttggttagctcttattacatgtggattgagccggattgtatgtgtttaaatcctaaacaaattaaatagaagcttaatttttttctaatcccatccaatccatatgtaattggaataaccgaacaaggctttagtgatttgtcaggatatctgaatatgaaatgttaaaccagatg

SEQ ID NO: 368242 - DNA, 401 bp, Zea mays
cactatgctactagagaagagggcacatgataatgaagaacaaacactaatgaaatccgtaacatactgtgagaacgatggaaatcataagggtcttcgtaatctgcatcctaatagtatcatagagttttgtggcaccctggagaagtttattttgcaccttacttcatatattgaggatagttggaaatggcaccatcagttggcctctaggatctctttgtctatggcaaagtgtttgttgtttgcaaaatttttgaagtccatagcgcaagaagacacaatatctagtagcagtgagcaagatgtcgctgtgaaaatttcctgtgagcttgcacaaaagcattgtcaaagtgctcttgaaggtctaggagataccattttgataaatcaggaaacac

SEQ ID NO: 368243 - DNA, 347 bp, Zea mays
tcccttttttttttttttgccagagttattcattcttattctgaagcctgaggaaggcgattatcaacaattttgttcataattaacataagggggcaacgaaacaagaagggaaatggtgcatggatctggcaaacagaaaaacattagcatttggcaacaagttggattgctatgactgacttggacactctcaggacaacgacgtcattgatccgtgaagcaagggttctagggcgatcatagctacaataagctctgcctaggatgatttgctattggtagcatcctgatcaattggacatcacacgaagagaacgtggacggactggagttttggaagggct

SEQ ID NO: 368244 - DNA, 131 bp, Zea mays
ctctgttgttaatttccgtgtaatttgctcctcccagatgggagaatcgaacgccgcttttttgttctatctgaaagaaaaaaaaaacaaaaaaaaaaacaaaacaaaaaaaaaaaaataaagataatact

SEQ ID NO: 368245 - DNA, 275 bp, Zea mays
ttcctttttttttttttttttttttttttttttattctcaaaagatttcagggggcccacttcagtagtacataggattaacatgtctggacctgtagcctatctagagctttcttgatgtctgcctccgccaaatcaagatcagcaagatgcatgtgtgcttgtgcccttttctataaggactccacatttgtgcattcagattccaggacctttttagatgtttcatcaacatgagtctggactcctttttgatacttggcatgcacaagggg

SEQ ID NO: 368246 - DNA, 256 bp, Zea mays
cgggctggaaatcagctgagcctgctggattcataagaacaacacgttcaaaaatatcatagcgccatcaggcctcaaaaagatcaggccagattttatacatacgctccccaggggagcaatgtctgtagtagacaatccatatgaaagccgacctactgctacaaccaaacacaagatctcctagtatggagcagttaaacatactgcccctagacagattcacgagagatcattattggcctgtccgggaatc

SEQ ID NO: 368247 - DNA, 135 bp, Zea mays
tctccacgcgtccgattcagcacgccgaccgttgggaagggagcttcgaggcggccctcataggcgcgtagatcggtcaacatgagccaatagtacgggctcattgatcaacgaacactcttaacgtgagtctat

SEQ ID NO: 368248 - DNA, 240 bp, Zea mays
tcaagacctcgagtgactgccatcgccgcgcgctgctttgctcgcgggcccatcttggctggcagaggcggcttggtctcgaccaggcctaaggcagggcccggagggcgcgtaggcagcgggtttgggcatgatgaccgtctggccgggcggaggaggcgcggccacggcggtgctcggctgttggcatggagcggaagatgcgaggagggcgttccttgtgtctatctcattgtttct

SEQ ID NO: 368249 - DNA, 177 bp, Zea mays
tgattgggatcgcgcctttgtagcggtgcatttaagcttcgtgcggtttgactggctctctgatactctcctactccctttctctttacttttttttcactccttttttattatttttaatattcttttttcctactcttcttatctatctccttatctttttttattcttcttttt

SEQ ID NO: 368250 - DNA, 134 bp, Zea mays
tacctaggcaactggcatcctctgctctgttatcatttcctgtgggacgagatgggtgcctacgaaaatgaagttatctgtgttcgcagggttgattcatccgaacaagtccgggccggatctgtcacagactg

SEQ ID NO: 368251 - DNA, 467 bp, Zea mays
gttccgcaggcgatcgcggtaccgccggagtccggccgttcggcgcccgaggcgtcccgcagggatccaccgtcccaccccgagggggccgatcccaccaatgcggcggcaaggaagacaacgtggagcgtgctggcgcagacccccgccgccgcggcggaggcgaccccagagggcggcggcatcatcggcggggacgcctcgtggccggcgctcgtggagtcgacgcgcgcgtgccccaagtcgggctcgtccgactccctcaatgccctctccgatgtttccggcccgcctccgcaggaggatacaattgctgcttcatcggtacttccacatccagttgtgggggctaatccgattcccactgcccaaaaccctacctccataccttctcgcacgcctgcggcttcctctcagcagaacggtgccacaacccagacatttccagttcggcgcagtggcaaccg

SEQ ID NO: 368252 - DNA, 322 bp, Zea mays
  unsure (1)..(322): unsure at all n locations
cggacgcgtgggttttttttttttttgggggtttttttttttaatngttcaacaggacacctaataataataataatccataatgagaaggcagggtggtcactttttttaggacaactattcagactgtcataaaaacatttgcttgccctaagtaaaattattttccctttgaataatgtgccttcatgtgcagcctttacgtaaaacaaaaatcattccgattccaattgaccctttcgcttgtacatcagttcattaacgccttgatcaagatctctatttatttatatttcccccaatattgttttcaattgtattt

SEQ ID NO: 368253 - DNA, 104 bp, Zea mays
tcagctttttagctggcaggtcttaagggggtgagagtttttcctttcaatttatcatggactaggccaacaatacatagcaatgaagtacatgaagctcggtt

SEQ ID NO: 368254 - DNA, 150 bp, Zea mays
tctcactcttcactagcctctgctcctcggagatggcgggggcgattgcctctaccacctacctcttcattggccgaataaccctaaacccggcccgctccgtagccacagccggcacctccgtctgcttatcccgtcacgcagcaccca

SEQ ID NO: 368255 - DNA, 308 bp, Zea mays
tattaatgtgcacagtaaaagcatttttacctataatgaacagtcttgtggttttattttcatttctggcgttaaatgtatgtctttctttctattgtatgagtttatttaggcataacctttatcactttctatcaatgctacaacagtagatatactaccatttatcattgaagtaattaagcggttgtatttcattttttatgttatcaaaatttttagttcttcaaatataattagatgaatcattgctaaatctaacattgctggcaatgtttttcatagttcccagaacggaagcattttat

SEQ ID NO: 368256 - DNA, 230 bp, Zea mays
tctttcacacctcctgcgacggtcatagtggtgcgctggtttggtcaccgacgaatattgcctagctagacgacattaagtataaaccaggtctaacgcaggatcttaggcgcgcgtacgcagaaccatttgggtctcgagagaccaactggactcataggaggttgacatgccacgacgtaactcggctgtagatatggcgcggaacaggcgaggagcacgagcactgt

SEQ ID NO: 368257 - DNA, 387 bp, Zea mays
ttcttttttttttttttttttttttttctggggacacagaattgacctccataccaaagctttgtggttgcacaaactgcaagagtagcaacttgcgactcacaaagcattaaaggaaccgccttagcccacggactctcaataaggcgataccatagcataaagctccaaggctacggcattattcggcctttttaggtacaaacaagtttgtgacacggcactaccccgtcgaatactgaaaatcaaacatccttaaaatacggtaactttttgacacgccactgtattggtttgtgcacgtaaacaacggtttcttatccacgcattactggaataatggggatgcaggagggtatcttcttggcgcgtcactcccatgattgg

SEQ ID NO: 368258 - DNA, 323 bp, Zea mays
tcgtagtcctccacctctgtccctcccacgtgtactctcacctcctttctctcccctccgacccccacgttactgcctgccacgttcttggcgcttcgtttctcttcgtcccatcccatgccgtccagttagttccgttggcctgataacattgtttcttggagctttcatcctctgccaaaagctcgagcggccacgaacgcttccggcgtggctcggagctggcaaccgtcgtggatttgatctttccggggcgcctcgtgcttgccggcgccagggaaggtggtgacgccagcgtccacggtcaggagatgacgaccgcg

SEQ ID NO: 368259 - DNA, 493 bp, Zea mays
cggacgcgtgggcggacgcgtgggcgggttagggtttggctttggggccttgggggcggcggctgtgtggcggctacgggctgctcgcctagtcgactgctcctctgctcgcgcggaccaggagcctgctcgcctgcttctctactgtgtggtggctgcgggcttctcgcgcggaccaggagctgaggcaccgagcaggggcagccggccgtcacttctgccggcgcaggggccacatgcgggcggccgggcaagcaggcgcagggggccgggcaagcaagcagtgcagcaagcaggcgcagcgcaggcggccgggcaagcaagcagcgcaacaagcaggcgcatggggccaggggccacacgtgaccagcagccagcaagcagcgcagtcgcagcccggcagtctatgattgcagattgcagctgcagaagcgaacagatctgccaacctcggctctaatccacgacatctctgttcgcgccgccgtccagc

SEQ ID NO: 368260 - DNA, 551 bp, Zea mays
  unsure (1)..(551): unsure at all n locations
cccacgcgtccgcccacgcgtccgctcttccttcgtcgtctcgtcgtcggcttctcgcatccgcctccgcctccgcctccgcctccgctccccgctgcgcgtcaccggaggagaggagagaaagtgagagaggggatccctccgacccgatccaccgacataacctccgccccctggatctcctccgtccccgcgcgacgccaggacagggttggcgaattgaatcagtaatatcagatattcagggatgttcccttcagttgtgccagctggttaattcgctattaccttctctgactgctcgtgcctgcatgtgtattgagaaactccaggacataaatcatgagcacgtgtttgatctggttaaggaggttgccatggagcttgcagcgacaagcgcagngagttctgtgaatctgctgaaactatcaagtttgttgagtctgtcaacgaacatggaattgtcccggaagctgtttcccttgagaatctcaaaacaagggcactacgatgcgagagtcgtgaagaactggatctagctgagcagatga

SEQ ID NO: 368261 - DNA, 223 bp, Zea mays
  unsure (1)..(223): unsure at all n locations
atgagtaaagnggtttttgtgcatggtgcattccaacagactccgaatttacactctatcgggggttttaattgcaccatttctcacacttgtacggagaggagagatgacgtgggaacgaggagtctaagtgcacagcgtgcttctcagggagagggatacggagtctgctggactgacgaatagtgaactgggcagcgaaaaaaggggatggagagccgta

SEQ ID NO: 368262 - DNA, 86 bp, Zea mays
tctgttggatcaccctttttggtgagctgtgggttaaggcacagctgtcggtgtttcacactcttttgcgcatcaggagacccatg

SEQ ID NO: 368263 - DNA, 221 bp, Zea mays
cctcagagagagagagccccaagccaagatccgcgcgaagcaagtcacccggcgaagcaccggctgccatggccgtgcacctgatgggctgctacgccccgcgccgcgccaacgaccagctcgccatccaggaggcggcggcggccggtcttcgcaacctggagctgctggtgacgtctttgtccacgccggcctgcgagccgcacagagccggtgttcag

SEQ ID NO: 368264 - DNA, 204 bp, Zea mays
ttagccgtcgccagccttggagctcttggacgcggaggtttctacttcactcccactagactcctcctgcatccccgacgcgacggctccatccccgacgctgagctccatgtcttccctcacctaggttctagacttccaggtgaaaacttcagactgtgacccagaacccataacgtgtgacattctgtcctccttgcagat

SEQ ID NO: 368265 - DNA, 179 bp, Zea mays
gcagcaccaagaagcaccattttttccttaagattaacttagaataaagcctgacgggggtaacagcatccatcgatccgcagtccatgctgtttgatgcatgggtctgctgaaaccgaggatgaacacagcactaacaactgacacagagcgaccttgcaatcaaaaacacagatggg

SEQ ID NO: 368266 - DNA, 375 bp, Zea mays
ggattccaaacacatggatatatgttcatatcacaatttcacacaagtccaaatacataagttcacaaattcacataagttcacatccacagttcacatttttagttcacaagttcaaacacacaagtttgaacattagctccatcgctctcgatcaggacatcagattgttgttcgtagctgcaccactagaattgagacatctgtccgcaaagtcatcgtgagggggaggagtcacttgatgagagccataatccatcatgttagacaaatgggaaagagtatgtgcttggttgtttccttgtgggtcctctattgtgctaggttgtggagtgttcatgtttgaataagcatgacttgaaactgatggcacgt

SEQ ID NO: 368267 - DNA, 406 bp, Zea mays
catacctatacagcgtccgccgcccaccggctacacggctacaccttcctctctccggcgacctcccgaaacagaactgactcgcatggtcttcgctccgtcgcgaggcccacgttagcggagcctcccactctctggctcaactgcctacgtctggaccagatcctccatgagctcgcgggagtgcattggtggcgcgacgcgaccaacgtcgtctcgaccctccttagcggcaaccgaagacctgaatcctacaaaggcacatgcatgtggtggccaggaggaggctcagatctggaatccagtccgaatgttcctgacaagccaactgcaacaacgattattgcttcaattttagcgatctattttttctaacttgcaaaccaacatgctcaaaattgcagtc

SEQ ID NO: 368268 - DNA, 333 bp, Zea mays
tttcttttttttttttttttttttgaatgttaaaaagggttttagtacaacgcaaatctgtatagtttagaagtagcaaagacaatcccgcaaacctcaggcttgcgaacaaaattttactatacagaaaactatcttggggtattgttttccatgatttctgtttccgatcgctcgcttatcgtcacaaataaaaatggtacatcgcaatcgcatcacagttaaggctgtggtggtatactgccgtactggtatgcaggcaatcatacctctgttttcagctagcatcctcgtccgtttcagatctgacaattggcaggttccttctgtact

SEQ ID NO: 368269 - DNA, 155 bp, Zea mays
cgcgctgagaaatatcatggctgagttagtgagggggagtggtgagtccctaccggctacttctccattatcgacaccacacaccaactctttctctcgtcagcttgtacgaatttccagcttcctcaggcctgagattgggggagggagagggg

SEQ ID NO: 368270 - DNA, 147 bp, Zea mays
ttccggaatttgcgtgtagccccacgcgctttgtgatatccagcgatccgcggcgtggggggacactgatacaggtagctgtctaggtcgaccttccgaaacagtgatggctcgcatgagcttattgttgggtgcgactagccacgt

SEQ ID NO: 368271 - DNA, 153 bp, Zea mays
tcttacacgtgtgcatttttagagacctgtgcgactcatggtcaccgccgcctagtcaacgagctaaaggaggtcgacggtttcaccagcgcgttgatgaccgggagtgccttttatacttgtaactttaaagggatcgggctagaggtgtgc

SEQ ID NO: 368272 - DNA, 116 bp, Zea mays
tttggtatccaggtcggaaacgcgtgctgggagctgtactgcctcgagcatggcattcaggctgatggccagatgcccggtgacaagaccattgggggaggtgatgattcatgtaa

SEQ ID NO: 368273 - DNA, 181 bp, Zea mays
gcggaagggaaaaatatgctgacagctgcataatgaccacaaactgcttgtgcatttcaacgaaaaatccaaacatttgaccaattacatgtccttgatcctacctcaaagtttgagggaaccttgcctttacacgctagacatatttacaaacatcttaaacatactctagagggggggg

SEQ ID NO: 368274 - DNA, 389 bp, Zea mays
caatccccaagacaacggtaaccatttaattttgtcacccgctgatccacaaaagactattcgacaccaggtacaaaagagttccagatctaccacacgacctcaagagaggaaaagataagggagttgccctttaacaacacaagtcctaaaggaattgctttgcggaaatcagagctgaaaacggtgctgcctccaaggtagtgacgccattgtccactcctgcagccactagcctctccctcggttgtctctatcttcctcgagatctatcttcctctgagatttcgcgttctctcgccgagccggacagggccgccaccacgcctatctcctccacggttgttcacgcgacggccaccgcgccacaccgggtagagccgccaccg

SEQ ID NO: 368275 - DNA, 106 bp, Zea mays
ctgacgcgtggggccaccacagcgtcttgatgttcgttttcagttcaagcaagcgaagagcaccccttgagatctattcctccccgtgccgccatggacgcagttg

SEQ ID NO: 368276 - DNA, 230 bp, Zea mays
gttaggacccaggcactctggacttaattttactgcggaacgaccaccacggatcaccggccgccaacaaacttacggaacagactcgaggtctgtggatttctatcaggtagtcgccaccttctactagtgtcagccaatccttcttatgacagactgctacaaggccacccgggccaaataaactcagccactcacagctcgggccatatcgctctattactccttct

SEQ ID NO: 368277 - DNA, 168 bp, Zea mays
tcgcgcatgtgtagagtgctgaatcctcgggcgacaagataacagacaagtttagtcttgcacagtatcgacacgcggctgctgcatacgcctcataagacgttcagtagagctagatcctgaacaaggtgtcctacaggaacttggagcaggctaccatgctctata

SEQ ID NO: 368278 - DNA, 562 bp, Zea mays
cccacgcgtccgcccacgcgtccgcttccccttctttcaccggcctcgagtcacacgcgtgagatctgtgccttccgccgcggccacatgccacacaacgacgcccggcgagcttcaccgcgatagaggtaggcccgcccgataccaaggaggatggcggcagtgggcgttggtgcagcggacgagcggtgggcttcgttgtgcaactgcgtggtgaacttcttgctggaggagcggtatcacctcacggcgctagagctattgcaggagctccaggaggacggccgctccgcgcacgccctccgcctccgcgctttcttctccgacccagcgcttttcccgcccgatctcgtcgcccgctcatcctctgcgccgcccggtgctgatccacagattttgctagaagagaaaatagcagcagaagaaaagttggcactcacggagtatgatctgcgcctagccaaagaagacctttcacagttgaagcttgaattacaaaaacaaaaagaatcatctcctgatgattcaaatgggctccttttgggggcttctatacgcgaag

SEQ ID NO: 368279 - DNA, 111 bp, Zea mays
aactgaaaagtataaattagatacgcactaacattacaaattttggcactacaaaacaagggcacatataaggtacttaggaacccgttggggtgacttgcacgctggagg

SEQ ID NO: 368280 - DNA, 236 bp, Zea mays
ttgacgcgaacatatacgcgtgcatagccatgtcagccaatgtggacagcgccattattagccacgtgctactgctgctcctgaggcgactattctgagcgttcgggagttacgaggacaagcagcttccgcggaccatggctcttgtggaaaggactcacttacttgctcaaactgctacctgttgtgtgctgacagttgaccttaagccatgcgtcgccaatgcacacacgtaa

SEQ ID NO: 368281 - DNA, 207 bp, Zea mays
tcggtgacctcggctgagccgccgaatgcgaggatcaggtctcaggtagaacggatcatactgatcagtgaccactacaagtccgagccgggctatctggtgtgatgatggagttatgggaggaatggtacctgggggttcagagcatgatgataggtactatgattgtaagatgcacgagctgttgaggaccaggtgagactgaga

SEQ ID NO: 368282 - DNA, 331 bp, Zea mays
cacccgttcacagattcacactccctgctgacaagttatcacgcccaaaaggtcatgcttatactggacgtgttgaagttgaacccgctccatacgctattaagatgaacggatcacacctacatggccttcacctaaccgtggccccgattaggactctcattcctgggactgaagcaaccccgacgagcgacgcttcactccatgccgcccacctggctataggccctatcattacggctctagcgtctggacataccgcagattccgccgaccacagagacctcattggggaatctcaggtgttcatatggttagcagaacagaaacg

SEQ ID NO: 368283 - DNA, 214 bp, Zea mays
aaaaacttaatgagtgataaaaaaaataagatacaaatatccagggaggtattgtgtacactgcaaaactggcgcaaaactatgaattatcatcgatgactatcacgtacgcagcaatttcttctatggtcgactaaaccaggccctgataaagagctttaacaaactcaaacggaggtccaagctacctacttgctggtggatgggtactcac

SEQ ID NO: 368284 - DNA, 112 bp, Zea mays
ataataggaaagaactgattcgtcaaacgaaacacctgatacatggtgaagttggtgagtttgcgttcaatccaccagaccattaataggatggaggggaaaaactgactta

SEQ ID NO: 368285 - DNA, 278 bp, Zea mays
  unsure (1)..(278): unsure at all n locations
gngcgaactgggagatgacggaaattaatttgccttttgaaaggaatcatggacatacacgaagatgagaatctaatatggattgggggggacgcaagaggattaatacgcatgcaaagaaattaggcgtgatgttttgtctccaacggaatcatacaatcatggtggaagaaagatgattagctagcaatccaagatacggacgagcacggtggaaggcggccgcggcccaccaaatgaccaaaccctaacagattttttttctattcctatttttt

SEQ ID NO: 368286 - DNA, 437 bp, Zea mays
  unsure (1)..(437): unsure at all n locations
ggnccagataaacacgtatggtcccacccgtgttgctggagaccatctaaacatatactacataaatatttgtcgtccactagtttattttttaaactaaaccacgacaaataaaaaattctttctttcgtggctttgttctcttcaagcttgcgagtaacatatgaagcagagccattcaagattgcgagatggaacagcaaatctagcagaagcttgtggcttgtgccgctggaccacacgccagggttaagccagaaggctcgcgcgcgtacctccgataccgaatcacatgccgagacgtgactcctaagtcctaagcccgccgaataattagagcttgccgctgaaggaactgatgaatagcttcccagcaactcagagcctccctgtcccatcatcctcctctttcacccaagagcgaagttaatcacaga

SEQ ID NO: 368287 - DNA, 454 bp, Zea mays
  unsure (1)..(454): unsure at all n locations
gaacttgataaggccaatattcgccacaaaatttatcaggacagtacataagagcattacagatcatgctactctaagattgaacacaaaaaatgtaagcatcgttaatagataaacatttctctaggaaattctagttttgctcttgcatcgttgctttgcaggtataggagcatcgttgctttgcaggtataggttctatactacaagtggccttttcaacagcttcaacattcagaagacagaacaatgaccttcaacaggagagtagttgctcaatatctccaacaatattttcaggtcaatagcctatttgttgttgtggtcaactatggattccattttcacaaccatgaattaaaactacacgaactagaagttcttacctcaaaatcccattcaccaaacaggtttggatcatgcttngaatatatgtatttataggacatcaacc

SEQ ID NO: 368288 - DNA, 417 bp, Zea mays
gccggtgcccgcactgcccaccacccgttcccgcgggctggccctttgcgcggttgaagaagcgatagatgctcggggcctctaggcgatccctcagtgccgtcgccgccgtccgcagtcgggtggctgccggcgctgcctccgacgtctccgccgacgccgtcgcctcaatcccgccccgacccgcgagcattggagcgccatgggctcatcagcagcagaagaggctgctctcagtgcttgtagcgcccaaggttgcaggaaccagcaatgttgtgtccctcaagctgatgggtggtgcccttactgggagacgctatgaatcgagtgcggcagcagttgactccacggacccgccagctgagaagcatgagtaccaggctgaggtcaacaggctcatggatttgatcgtacaca

SEQ ID NO: 368289 - DNA, 221 bp, Zea mays
aacaaggaggaaagggccttctgagctgcttttcaggtttgctgcaaattgcaatgcatactctatacatagttccatacataaactcgaaatgtgccaaagcaggcaaatggcaacacacacctacctaattttggtcgattcaaacctgacaattgtgcatcgacggcgaggcacaaatcaccatatcgaatcacacaaacatcaaaaccgaccataca

SEQ ID NO: 368290 - DNA, 150 bp, Zea mays
gtttttcgttcggtctacaggctggactggatcctatggttatggcaacgagcggcaggagggatcaatcatggtaaacagaggccctagatctggccgtttcaagaaccagaaattggtctgtcatactgagactattgctgtgaaagg

SEQ ID NO: 368291 - DNA, 342 bp, Zea mays
cgcgttgtggcgagcgggcgggcgggcgacaccgacagctcaggaagacaaggaggggagcgagggaggcggatgaaaaaggcacgaaagccatgggaagcgggcgcgaccaccgccacgccctacctcccggctttccctgccgcctagtccgagttgtggaatccccgtggactcccgccccccgttcatccctcgcgcgtcgccgcggcgcgccgggccgatctgattcgccgccccgcccgcctactcaggtgtccagccgaggtggacgtatagctgggcatataacgagctagatttgaaaaaaaaaaaagggaaccatgaagaaagtgttcgatc

SEQ ID NO: 368292 - DNA, 474 bp, Zea mays
  unsure (1)..(474): unsure at all n locations
gcctacttagccagcgacacgcgatgggagactacgatcgcgtccttgcttcgcttacatgagggaccagcgcgccagggtgtatatataagccctgaaccacctcctcatccatcaaatcgaaccatcgcgacgacccaattggagagcaccttcggtgaggatcagagagggagaaagggagaaggatagccgtcgtcgacatcattcgcctccgccaccatccagaatccccaatgtgactgaaggcgttctgtcaggtgtatggctgcgtgctcggggaagcagtggtagtgtgcggacccgaaaatccatggcaattcgtcgccggtgacgggagcgccactgcggaacgcacttctcgatgggcggaggacgacgcgatgtaatcctcggtaagagcacccatatcgatttcgccttagcacctgcatcatttatcacctagttgactntgggaatcgggcaccacag

SEQ ID NO: 368293 - DNA, 215 bp, Zea mays
ggggccatcagatagagggttactgcagagtgcaaagatgcaacctgctgaagaatttatggaaccctttttttcggggttcacccaaactgaaaggattcagataagcaggccatataataggccccattcagttcccgttaagtaacccccacccatcattaatcatccaaccaaagaaaaaggccctacttagccgtggggcatgcacagct

SEQ ID NO: 368294 - DNA, 337 bp, Zea mays
cccacgcgtccgaattcgtttatttcttcccaccgagccaagctgcgacgacggcggtcgcagcgtcgccttccctccctccgtaccgccgacgccgacgagcatattgggccgagcgcccgagcacctctcctgtcagcagcggcactcgccattccaagtacgaggtcgacgcgctgtggggcttgctgaaacgagcaggtctacccccaagtgaaatcagggtcttcaagatagcttactgagatgggggggttttgcatcaaacgcttgggcagctgggctgcagaagtaggagttccccaaaccgcacttcttcgagtgctgcttattctga

SEQ ID NO: 368295 - DNA, 385 bp, Zea mays
gttggtaaccaggagatgccgaacagatcatcagggtacaggtacagtacactccatgcataggagtgggtagatcaagttgaaagaccatcagattcaggcgagatcaactccttccagaggtgtcttgtgttgtttgggatcgtgaaccgtgctcatggagctaccgtgcacatgagaggacttttaatctggatcatgccttactcatccaacgtccagcagcaatttgacataaaccccctgccgccggagctgctgcactctctggttcattgcgatttgtccccgatggcccagtggaccggagcggaccgaactaggcgcactacgctgatcgcacaactgatggtcttactattcgtcctgcgtgatgggctgatgg

SEQ ID NO: 368296 - DNA, 207 bp, Zea mays
gaccaacagcttgggtagacaaagggggcaaacgtcggatagatctgttacaaaatattgtatttgggatcaatccaaggggtgcgacagataattcccaagggacaccccttgagaacgcaccccttcacctgtttataaacagaattctccctgcaataaaagatacaactggcatttgtctctctctgaactctttttgccact

SEQ ID NO: 368297 - DNA, 235 bp, Zea mays
ggggcacaacagggcccttaaaccaacgaagccccaaccccgatttatggcccccaaaccccaggtgttttttaaaccaccccctccatttagggggcccccaggggggcccagacgacccaaatacccagggaccggagcagtttaaaagaaccatgggttactggccaccggggggggggggcaccagggggggggggccctccttttggaagttgaaacctgctaggggggg

SEQ ID NO: 368298 - DNA, 232 bp, Zea mays
agaaaaaagccttttttggaaccggggaacaaaacaaggcccccattggttggcacccaaggggaacccttggggggcctcccacccaacattagttttttccggggggcccgggccaaagggggaaaaagggggttttggtccaaaaaaaaaaacggtttagttagggaattaaaaattgggttggccggacaaaaaggaaaacggccccttttgggaaaaagggggaggg

SEQ ID NO: 368299 - DNA, 270 bp, Zea mays
ggaaccaaaagaaaagatagtatattccactgttatagaacaaaatacaccacaccgggccatacaatacaaacattttatgacttcaaggatttccaccgaagttagaaccatgaccatacccctggccagtccctatacccaccaacccattggccgacccactacccttcccatacacagatcccgacccgttcccaccgccctgcccgtacccttgcccgccgccagagcccgcaaaagagccggccgccgacccagtggagcccg

SEQ ID NO: 368300 - DNA, 437 bp, Zea mays
ctctctctcccaaaccaaaagaaggcttccacttccagctgcagcggagcatcgccagttcagagttcaccaccacgcctttgacctccagcccatagcccaatcccgcaagcatacatccacgcccaccggacccgctataaaatgtccccctctgctcccgattcgccacctaaaggaggcgcctttgcccaaatccaccaccaccgagaaacaaccgcaggaaatccgctcggccctcggctccggtcactctgttgcggccacgatgaaagagggcagacccggcgccggcgactacattgccagcctgctaagctcgtcgccgaggctcgacttcggcggggaggaggaggtaggactgcctggacaggttctgcggcgacccggggttcgcggctcgcgcggcgcggctgtccagcttcagcgggcagcgc

SEQ ID NO: 368301 - DNA, 184 bp, Zea mays
aaaaacaggaaaagccttttttccttgcattttttccacatttattttgggtttccccccaattttgttggaataccatttcatccccgcacaaaacccctggtggtggtgttaaacccatggggccaaccccccggggagactttaaattaaacggccgggacggcaaaaaacaaaggccggg

SEQ ID NO: 368302 - DNA, 471 bp, Zea mays
cccacgcgtccgagcggattcggaagctccgcaacacgcatcccaaatcccccgaatcccgacgcccacctgaacccattcgcgcggacccgtggtggcggccccaggcagcgtggtgcatgacgtacacttacctcccgatatcctaaaggcatggtcatcctgtcccactgtttttttcacgaatctgagattcttggctgttggagtttgctatttttgcctgttcttgcaatgctgtcaccttcgttgcgtggtctagaagacgttccttttgcccagtatgaatggcagagctgccgtcgctttctttttgaaactgtttggcagtccgtgtggtctgtacatgggtcctatgtacaagacggcgataggctcccctggttccagattcagtcatggataagagaactcgcctttaatttcccactctcccaaaacacaacccatatgtcgctttgaggacacagt

SEQ ID NO: 368303 - DNA, 565 bp, Zea mays
ttttgaatgtccataaatgtaattgggatctgattacctatattttgatgcatggaagactggcatttgctgtttttcagtactatcatagtatttgaagatatgttatcagttcataggctttaagaaaaaatgggataaggtgcattaaactcagattccaattataagacgttttaggcattttttgatatatagtttttgttgtgccccggtttgtttttgtaactgttcctcttctttaatatattatcgcgcagttatcctgcgctttcaagaaaaaaaagtttttgctgtgcacttagatacacacactgtctacatacatacttacatagtaaaagcaatatacctagaagaggcaaatatatttgcgttgtgatgctgaaagttgtagatttctggaggttctgtttcgtgtattgcattctagtccccgttctaaattatgggctaaattgaaaataaaccccctcaatccccggggagattgagtttcaaactgcctttgcatacactagaactattatgttatatacatagaagacatgtgtacttaattaaa

SEQ ID NO: 368304 - DNA, 486 bp, Zea mays
gcgttttaactcccgtcgcctccgcgctcccctaaccgactgccccttgtctcatggtggaagtggaacaaccctccgcccgcgccgctgcgaagtgagaagggaaaacaagaaacgatcgagggaggggacgacggagcgagctagctagcggcgcggcgggcgtcgctcggcatggacgcggaggcggcggcggcggcggcggcgacggcggtggaggagagggagcggctgcggaggagcttcgcgtcggggaggacgcggccggcggcgtggcgggaggcgcagctgcgcggccttctgcgcatggccaccgagagggaggacgacatctgcgccgccctgcacgcggacctcgcgaaaccccttaccgagtgctacgtacacgagatatcgttggtcatttcttcgtgcaaatttgctctcaagaatctcaagaatggatgaagccccgaaaggtccccggcgggctgctgaccttccgtc

SEQ ID NO: 368305 - DNA, 325 bp, Zea mays
tgtccaagcgctccctgacaacaagccccttggagagtttgactcggatggtgtagcagaacgaccgctcaccagtatccaggaagaatgtgcctgttcacgctggactttacaggatacagcacaagggccagtataggggctgctgggccgctgcaactgcaaaatggggccgtacccaacaggcatcccataagcgaaacttacagttcgggaatatcagacgccagtatatgttgaccaccgccaccgaaagacgacgacgacgatagttaatccaggaagtatcgatcacacgacaatgataatgcagtcaaatgactca

SEQ ID NO: 368306 - DNA, 442 bp, Zea mays
  unsure (1)..(442): unsure at all n locations
gttgtcagacgcgaacgccttatggccgaaacggtagactcgccccggtcagatgtgactctccctgtcagcgcgtggttgctcagatctagtaggtgcgacgccactggcctacacacgccggctccggtgtgaaccttcatgacgtctgcaaccactcttcgatctgctggcgtgacctcatccagccgtgctgagggagcggagcggggatggctacagctctgattggcaaggaacgaagcatgcccctctcatattagcgtagatgcgttgatcggctcattctacagaatgactctccaataatgatgactgctatacgtattaatgtttggttagagtaggcatgtgcaacgaaagtcacaagaatggtagaactcgtccatgacttctgtatggtagtgctcctagatggtatgctgcnaantagagagttacc

SEQ ID NO: 368307 - DNA, 620 bp, Zea mays
  unsure (1)..(620): unsure at all n locations
ctggcgcccgtgcgggccgcgccgcaatttccgcgtcgcgccacacgtgcgttttaaggaccagatcgattcagcatccaagggtgacccaggatgccggaaaaatgattcctatgacgcatgtcgtgagcttgtctacaaagcaatcactgggggagtggtccctgcattttcaacttctggggctggtgatgagacccatcttccagctagagaaagtagctggagtttactgaggcacaagtttatcttcaggtcgctagctcgtgtttattcagattctgctctaatgaaggattttgatccacgggtacaacacctggctgctgaggcatcaacctcacctgctttgctttctccaagctccttatcatcggattcaagtgtcagctcgaagtatagttcagactcaccctacttatcacctacaactggctcttcaccatcatttggcctctcggctgcttcatctaatctgaccatgctttggtgccatcatccaggtctcccctttctaatcatctaatgaggagcttaaagcctttggcatggaataatacactttctttcagacctnttcatagcagaaggagaggggcttacacttctaagcttccatt

SEQ ID NO: 368308 - DNA, 89 bp, Zea mays
gcgctacgcgttcgctcgcggaggccaggatgggggcttatgtgaactctgagcaatctgtggcatgtgggaagaattcatgtggaaaa

SEQ ID NO: 368309 - DNA, 169 bp, Zea mays
tgaacctcccgcgcgcgcctaggcgagctcgtcgactcgctccgcccgctcgttgccgacctcctcgcgctccccatgcccaccgtcgccgacgtcaccggccacgcctccgagggcgggtacctaatcttgctctgccacgactaccaaataatgcccatgaccaatt

SEQ ID NO: 368310 - DNA, 389 bp, Zea mays
gtctcttttgagaaggttttgtcagatgggggtaatatggaagtagcacagggtatagacaagcttaagatcagactttgctcaggtgagtcatagggctttaggtgaaataagaaaagtcgtccttattcttactgctcctatgcactgggcttaatgagctgaatgagaggatgctaggctctggtatgctcctgtcctgctgtacgatctatgcatgctccgcgcatggtacagggtgtttttttatatttggttttactgtttatattttcatcttgtttttatctacacattttctttggcctgggtgtaaacttgttttattttttgtcttttcttttgtttatattgttcgttttaacttgcatattgggcaactgcctttt

SEQ ID NO: 368311 - DNA, 233 bp, Zea mays
gccgcgccgtaattgctggtccaacgacgcttttttgtctcctggcgcaactcgttggcaagggggccagtaggaagcaaaaccggttgcaccaatcgatcgacgacacgcgcgcgatcgatgtgcggagcgaaagataaggtggccatttccaagccgtctgacggagagcagagttagctagctgcccacccggagaggacgatggtgagactaggatgcgcctactgacc

SEQ ID NO: 368312 - DNA, 329 bp, Zea mays
ttttccacgcgtccgctcacgcgtgcgcatgggggagatgcaaatgccgtgggcgctgaacatggtactcgagacgagcggcttcttcaatgtccggagcaggaggacgtgcatcaactacagggacaggtggttgatgccagacgggtgcgctagccacgcacagtgaaacggcccatcaggtgcgctccgtgtccgcatcagcctacgacgcaaagatgatctacgccgacgacaccgtactgaaccggtcatgcgtgcgcctgaccccaaacgaggacagcatcctgcggtacgccgggggggtgctcgtcgcgagccaccagggc

SEQ ID NO: 368313 - DNA, 538 bp, Zea mays
tcccctacgcagccgtgtgccgtacaccgtgcacgcacgccgctcctcgcctccctgcaccatggacgccggcgagtgctccacctccaaaccccctcagccctctgccgcctccccgtcctcccccaccgtatgggctaggctggtgcccgccgattccgcgtgcccgacggtggaggtggccgaagacgactccgtggtctgctccctcgttgcgccgccctgcggcggggaggaggtcgcgtggtgcgagatcaggcggaatgccggggacgcgtcgtccgccactattcggaaccttagctcggatgcaattattgttgatggaagaattgtcgaacaagaatgcgtagacatcaaaccaggcagtgagattgtctctggaccccagaaagaagggcatttaatatatacatttgaaattacagaggcagaggatcatgaaaaaaaaatgtcaagattgttctagatatcgagaatgcaaaaagcagcatatgcctggaattgtggatggaagttgtactgttgctccatgcct

SEQ ID NO: 368314 - DNA, 86 bp, Zea mays
tgctcaataaacgccggcgcaaactctcgccggggccctttagatcctcaatgcgctattccacccaccgatcgaccttgacgcca

SEQ ID NO: 368315 - DNA, 335 bp, Zea mays
cgtcgcggcgcggcggtttttgacgcagcggctccggggacgccgatggggaagccagcggaccgcggctgggggggcctaccacgcccgcgcttggcggacggctgcggcacaggcacgggcacgagcagaggctccggcgcctcctcttcctcgtccacctggtcggcgcagtcgtcgccgtcgtcgtcgacttcgccgtcgtaagccggtgactccggcgccggctgcgccggcggcggcggcagcgcgtacttcccccccgcgacggcgacgagctcccctgcggcggacatgcacgagaggtgggcggcgacgagcgccgggtgcgaggc

SEQ ID NO: 368316 - DNA, 310 bp, Zea mays
ggctcctctagctggatattttttcttttgatgcgtatcactagaccagagaagacggatccgtatccgaccgcccgcccgaccatcaggcggcgacgatgccggaggtgaagaagatctgcccgccgccgccgccggcgatgtacggggacccggccatatccgagggcgaagtccggaacacgggggcgcgacgctagcgctacttctggtgctggaactcgtagataaccatggcgcggcaccggcactccatgctgcaaaaggctctattctcctgtaacatgaagatgtccttccggttcagggc

SEQ ID NO: 368317 - DNA, 404 bp, Zea mays
  unsure (1)..(404): unsure at all n locations
tttntttttttttttttttttttttnggangacaaaaagaacttgttttaagcttgccatttcgattcacatccagtcagcaggaaagaactgagctagaggttgaaacatctttagacaggatactgcatatctacatcagatgaggctaacatagtctagttgtccattaccacctgaatctaaagaacttcatgcatatatattacatagcacggcaacattcatcaaacatgctgcatcctatcttgaatctgttagttgaactttatgcttcactgtcaggccactttcatagatgtcttcagcctctttgcagcttgcacaaagctgacaatgacctgcaactcatccaattgcttccgcatgggcaaaagcatatattggaattaacacaacaaagc

SEQ ID NO: 368318 - DNA, 182 bp, Zea mays
aacaaacagaattttatattttttttggtgttatatacgcacaatatgcgcgatctagagctacaaaaaccagcattttccccgaaaagccacaccttgcgaattgaagaaacaagaaccgcaaccactacagcgaggcgcgagcgcaaccggcatagcctagccgccgaagccgcagaggg

SEQ ID NO: 368319 - DNA, 241 bp, Zea mays
gccgtcgtggcgaagcgctttccgcgagcgcgggagggcggcctcacgctgcggctccactcccgggacttcctgcccgaggagcaggggcggcacgagacgtaccgctcgctcgtgctctcccgcctccgccgcgactcggcgcgcgccgcggcggagtcggcccgcgcgacgctggcggcggacggcgtgacccggctggacctgcgccccgcgaacggttcggcggtgttcgcggcgt

SEQ ID NO: 368320 - DNA, 365 bp, Zea mays
ggctcaatgccactattaatgaaatagacaaatcctaaattgataatacatgatacgatgatataccatagccttcatataacaattttgcattgtagggtgaaaaaatataaaaaggagatcctaagcctattgaaaaatataaaagcagttgagccagctccgggagctcttcgtccgcttcgacctcgacggcgacgggagcctcaccaagctggagctggcggcgctgctctgctccctaggcctcgccccgcggccggggacgagatccacacgctcatcgccgccatggacgccgacggcaacggcaccgtggagttcgacgagctctcctccctggcgccgctgctcctggggccctg

SEQ ID NO: 368321 - DNA, 314 bp, Zea mays
  unsure (1)..(314): unsure at all n locations
cccacgcgtatcttccaatctcgatttcttcttttttttttggcgcgcgcacggngatggccccagcaatcccggtgaacaacggcggacacttgtcgccctcgtggagctagcactgtgctgacgcgctgtgcgtgcaggtatcgcgccgcagacgacgagcggcgacgggatggcggcgctgctggccggcggcggcgagggcgagcacaaggaggtgcgcggcaggctgtccgcggcgtacgagcggcacattgcgccggcggtgaagctgggacgtctgcgcccgggaggcgacgcccggcgggcagcag

SEQ ID NO: 368322 - DNA, 384 bp, Zea mays
gttgaaggaagtgatagaaccactgtattttaagggatatcgtattactcaaacataaagaggagccctggatcctgtagtgtcttgatcagatcaacatgaatcgtaaccactgtgtttgagtcatgccatatctcagaagcatctgattagtgtctctttgatttgaaatggaatcttatgtctttaggatgtgaagttctgacaagctgtttaatatgttcaatatgcaggtaaggtttatggtcaagatatgcccaattgaaatgagagtgagtaaaaaaaatctttagtccaaatatttgataccttttttatccaataatgtgaaatgtcctaaaacttcactttccactgcagcttaagagatgggagcgaaagaag

SEQ ID NO: 368323 - DNA, 142 bp, Zea mays
acccatcgagcgtttgttttaaaaaggaaaccacggaggctacagctcattccaattcccaatattccatgaaatgagcacttgaataaacattggacaatccctgatgttatttggacagccaaaaaatttatagaatatg

SEQ ID NO: 368324 - DNA, 351 bp, Zea mays
gaggcccctcacgttacctgggagataagacccaaggggggggcgcccttgcttgttatcctccgtgcaagactcatcgaaaccgccacaagagagagagtcgggagagctgtcgccgccgcatagcccgtgcggcttgagagataggcgtcgcgctgggcgaaccgccactgttaggctcgaccaattgggtcagtgggattcggcaacgctcgagaagaccggttgtcgcatcgactgacgaagtggtgatcggagcgcgtgacgatttcacgccggagtcggagctccatcgtcgattccattgcgtcctgcgagcgggctacttcacagctatcactgtgaggacac

SEQ ID NO: 368325 - DNA, 362 bp, Zea mays
gggcaaaccaaaccccttcatattgacaaggcacttgaggtggtaaggtaacacgacaccatacacattttaagggaaaaggaaaacaagaaaagagactgccttcctagactatccagcttgtcaccatttttaggtactcagccaatcctcctttaaaagagatagtccatgccttgttatacacctaacatattgtacccaccacaattacccgccagcagcagcaacgtaaaggcacactaccagtggtattctgagcagagtgaggggagcaggaacgaacatgactgccacaaaagtaagcttttccacagttccagcagcctgcatgctgccccccccccttcacaagcaatgga

SEQ ID NO: 368326 - DNA, 314 bp, Zea mays
acagaagggaatgggcgaatggcattccagaggttaattagcatacatcaggtctactgacgtggcacttcttcccccagtttttttagataatggaaaaaaataaggtcccagcctctacgccatccaagatagcgtacacagcgtatttttccccagtttcagcacaggattgtttgggtgggctgcaagctggacctctaggtcatgcttcagcgtttcctcgtaggagcccttcagccagacttccttgagttcagatagatgaagcaggccaaaaagccgacgtaactgcccactgcagcagtcaagtt

SEQ ID NO: 368327 - DNA, 351 bp, Zea mays
cggaccactcccctggaccagaacccgatcgggcacgggggagaacgcgacgaagcataaaataagccatcacaactgcatttaaagcaaggcttcccactgagccgaaggtcctgagttcgacacagtctctcttcaaaaaatacaggggtacccaggctctaataatttgtacaaaaccgatggaaacttctaaatctcctcaatcgtcaaagaacagtcatattgtggtgccttctgatagtaatggcccccgatttgacaatgatggtttttcttcagaagctgcatcaaatcaaatgggtcgttttcaactctgaagcaggagataaagagcaagatgaactgggg

SEQ ID NO: 368328 - DNA, 145 bp, Zea mays
aagcaaaggcaggtggtgtaccatgttagcatgacatcacaaggaatctggcggatgagatcacatctgtaagcatattctggagcagaattattcactgtcaaagaggggaacattacatttgtaagtgttgtctgaaaacatt

SEQ ID NO: 368329 - DNA, 458 bp, Zea mays
tttttttttttttttttttagagaacttcagtattgttcagggattccgatgccctttcataattatatattattctcaacaacctgcaaaccccttttttacgatcattcggaagaccggaacactaaatcatctacaggatatgcacggaaaaaaatatgaagaactgaacattgtaacaagtatcctaatttagagatacaacaaaactactcaagatacaaagcatcagtttctctgctatctaccaccctcctgtaccaaagcgtctaaatgagctctccctgtagaacaaatgaattcgtaaacacttgcaaaaagtgcacgacgcttcccctcaatctttcctccagcattaacctgtttccagcaaaagcctcatccactgtgtttgtccaggaggtagactcagaattcacattcacatctgatgcgattattaggaactggcaacaac

SEQ ID NO: 368330 - DNA, 290 bp, Zea mays
gggggggacaaaagtttggatgaaattccgcagcaacccaaaggccagcctaggtctggaatttatatacccccgttttttaaaaagaaaaaaaatgggggtaatgacaaacatttttggggggccgcagtctcaagttaccggattatccacactggccccaagcttttcaaattttataaagattcaaaaaacttaccggttttgaataacttggggccctacctgcattcttttaatatttatataggatgtaacgactggcttgcgaagttggggctccccccttt

SEQ ID NO: 368331 - DNA, 245 bp, Zea mays
atcagaagcaagctgccttctgtttcattaaatgttccaatacatgatactgtatgtatatcataagcaggctggtgtgaagcagcggaagtaatcaggaagtaactaatctacgcgaaagcaatcaggaagcaatggtctgtacatgtaaatcatgtgctctacagtccacttgttccactgtccgtacactaaaaagagagaaggatgaacagatgaaagaataacaacatttcctttacacc

SEQ ID NO: 368332 - DNA, 311 bp, Zea mays
  unsure (1)..(311): unsure at all n locations
gagcacccacangacaancnaccagcannngctaacaagnatannacncaccgncggggcattgggattgatcggacaactgactacttcttcatggagaaagtggatgtcatcatatcccgagcatggaggtcattgcttcgagtcacaaggatcgatagactgttctcaaagaaacaagtactgccaagaaaggacacaaagaagactgatggaataaatgatgatgtagaagagccagacctctatgtcgagcgtgttcgcctagagaaaatggagctgagcgtaatgaatctgttgagaaaaatgac

SEQ ID NO: 368333 - DNA, 360 bp, Zea mays
acgaattaaatctaagcgaacatagactaatagactcctctgttcatagtcagttatttattccgggaaattattagcatctctctctcttgaacgagcaccgaattccattccagcattgtgaatgaccaaccggtcttcttgttattctctagtagccgcagatcgacaggaaagccgcaagcctagtccttgttgctggcgcgcaggagcggggtaatttccgggacgaccctgtatatgtgcacccgcatgttgtcctcctcgaagagctcgaagacgcagacgtcggacttctccaggttgttccccagagcgaacctaccccagccgccaccgaaggagccggcggcgcggtcg

SEQ ID NO: 368334 - DNA, 159 bp, Zea mays
ggaacggaacaggtacaaaccctgtgtttcaattgagaatccaggttccacaaacaaagtgttgtgttaccttaaacatattaggttgcaagaacatggaattttccaattgggtagctatgatgccttatcaaaaaaaaacatgatctaactcaaact

SEQ ID NO: 368335 - DNA, 267 bp, Zea mays
cccttcgccgttttaccccaacccggcgcggcgacatggctccactcgacctgcgcagcgacggtgcggaccgacctgggcaacgtgcatcccgtgctgagcggcgcgcccacggctctactcccctgccgatgcgtcgcaggctttgccccacgtgactggactcgctgcccctgcagtcgcggcaccaggcatgggccttgagggctttcttccccaccccagatccgggctgcccgaatacgcgccggcgccacgtagagggct

SEQ ID NO: 368336 - DNA, 379 bp, Zea mays
  unsure (1)..(379): unsure at all n locations
ttatttacgcgtccggntntgccactcngcttaatcagatgagcgcggnggngcaggcggtcgattcccagcaaggtgggcgccaaacgctgggcaggcactggagaaactggagggacacgctggagggcgtcctacaatccactgctgggaagcagggctccggagggattcagagctgcatccgagctgcgctcagatttagtggttgccctcccacagaacatgggaacttagctcacgacggaggagcaggcagagatgaccctgttggagctgtacattctgaagagaatagtggtgccttggttcagttagaagacggaacagctgcacctttggaagccaacaaaacgatgtgccataatgctctctttga

SEQ ID NO: 368337 - DNA, 163 bp, Zea mays
gaaaaacatacatgcttaaccaacgttaagtttggcataaatataccatgttttaattttttaacacaaaaggggcaaaagctagcaaatgatggttatttaatacaacctttatttacacaaacggagggcgaaagggggggtaacattacacagaattttt

SEQ ID NO: 368338 - DNA, 420 bp, Zea mays
gatattgcatccatcaatctgttggtagacctttcttctaccaggggtatcccatgactgttgtttcaacaagccagattcaggggcatactaatatgcattctgagcctcagtgtgcatctcaggcctgcggcaagggctatgcacagcttgcagggacgtcagatgcgagtgcgggctgcggcgacggtgacagcggccgtcgctgcgatggaggtggttgtgcccgtggttgtgcggggacggcggatgcgcccgcctgtctctttcctcctctcccgtgccggtgagccagaccacgttttgggtcgtcgatcctgggtcacggaacgcctttgaccccgaaccttgtgactatgggattgaccttggaaagtgtcacagagtctagttctctacatgaatattctgcttatggca

SEQ ID NO: 368339 - DNA, 251 bp, Zea mays
  unsure (1)..(251): unsure at all n locations
cacggcgacaagcgcaccgngacacgagcagccncccgaaacagcgacggacacggcgcaggcgacnngagcnncgggnccacggcggggcccccggacgccgncgccccgccgcgcccnngggcgccgccgccngagcacgcggccgncnncgcgcagccaccagacganccgncgacgnngaccaagcngnggggaccgcccggcgaggngcccgnngccggcnncgcngcggcaccggaagggcgacc

SEQ ID NO: 368340 - DNA, 159 bp, Zea mays
aggaccaaattagagggatacattataaaaatgaaataaggtggcggctattcactccctatgctctacgtccgctcccactgacacaaaagcatgggtggaggggactggaggggccccaaccgtgaattattcgtctttggcaggtaaaaaccaccc

SEQ ID NO: 368341 - DNA, 248 bp, Zea mays
atcttccagcgattctcgccgacggcagctgcagtgccgcagtggagaaggggaggaactcaggaacatatcgacgttgcgcggggagccgaggcagtgggccacgggcaaggacgatgcgaagattctctccgaggcggaagctcgcgctggcggcggaggagagggtttgctgacggcggacgagggacgcgagttcgcctcgctctacagcatgctgcagtgggcaattggtataggcttgggac

SEQ ID NO: 368342 - DNA, 227 bp, Zea mays
  unsure (1)..(227): unsure at all n locations
atcacaacctccnctctgcatccacacacacttgagcccggcccgtgccgtcgccccgcatcccttagcgctgccgctgccgctgccgctgccgccgcccatgtccgccgccccgccccgccgcgtggtcatctgcggcggcggcgtggtgggcgcgtgcacggcctacttcctcgccacccacgccgagtgccccaccgtcccgacgctcgtcgagaggcgcgccc

SEQ ID NO: 368343 - DNA, 318 bp, Zea mays
tttcgtccgcccacgcgtccgataacgcgtccgcaacagcttaaggtaggacatgcgtgtcctaaaatcaggaaattctgattggctggatatctcttttaggctccggtcgctgtgtggctggaagccgctgcggctgcggcttttctagacgttcactacagttctcggaagcaggtgcagttgcagctggctgcagtttaagtggcagccgaacaacttgttaatctctagatcatggttgcatggtattatattatcggtggtattggtctgttatatgttttgggatgtacaattgtactgattggccatcta

SEQ ID NO: 368344 - DNA, 105 bp, Zea mays
  unsure (1)..(105): unsure at all n locations
cnncnaannaaacagcagcaactccagggattagattcctgggtgccaagccaactgccaagaagtccagtcatgagtccaaaccatgcatacaatcaaagagaa

SEQ ID NO: 368345 - DNA, 360 bp, Zea mays
  unsure (1)..(360): unsure at all n locations
cggacgcgngtcnctatactgcacgtcgaggtttggacgcctggtcaaccgtccatcaatttttgatatggagaatgaagagtatgctgaggatctttgtcgagatgtctgggctactcatttcccatccgagccatttgaccttgactcgaatgagattggtggaaacagtgttgataatataacatgtgacaatgtcaatggtgaaattgtcaaaatggtgagacagtacgctggcctagcagaccgttttgcctcactctttgtgcaggaaggggtctaccatgttgctgctaggcggcgatatgtgcgtctcctggaccttatgaagaaggatgcgtgtgcaacccaagagtgcac

SEQ ID NO: 368346 - DNA, 234 bp, Zea mays
gatgaaaaaacaatgtattgataaacagataaatctgtcgaaacaatatagttacacatgtagtgcttgaatctaaagaagtattatggtttacaggtaacagaaggataaatcagaacatggtctttatttggacgaaaccacacggcctatagcacttttatatatcttcctgactggtccattaacagtttccattgtattggttgcgtcctggacaatatttccttcaag

SEQ ID NO: 368347 - DNA, 144 bp, Zea mays
aagacaaacgggggtgatatctgatagccgaaatggttcatgaccccttacagccagggtttgggtgttacttgttaccacaccaccacttggggcacacgaccaatctacctgccaacatttacaagggccactccagcccaa

SEQ ID NO: 368348 - DNA, 197 bp, Zea mays
ataaaaccataacggggggcgcaaatataattccacactgtgaggaaacggtgaaatatgtcttttgccatgctctagaatttaccagaacggcacatctccgttctccagaacggtgtggtcgtaacgctagtttccgttttcgcgcgttaaagctgtgcgatactgcgatgcatggatgcattatgcaaatgcaa

SEQ ID NO: 368349 - DNA, 382 bp, Zea mays
catgctcatcgtggggcagggcagttccgctagagcttttctttcccttgcgttacgttgtgcttgtgtattctagtggccattatggcccgggggcacttaattaattagtttcatctgtgctctctgcctacacacagcatgcatgcagttttcagttgtattggaaatttagagcatatattttggttacagttacatatacaatatattcttcatgttctaaattctcctgtatatataaacgtatatttccaggaaaaatgatagagaatggcaaagaacaagtgtctatatatgcatgcgctagtgctggtgtagtgctagtgctatacccacggtgaatgcaaatgacagcttgcacaatttgcaggcgttatta

SEQ ID NO: 368350 - DNA, 372 bp, Zea mays
  unsure (1)..(372): unsure at all n locations
aatagaagatgttgtttgtaaaatatatagagcaaccattagatataaaatggatgatcacgactcacaatttaatacgtgcaccacacttccatagttccatatacacctgagatgaaactgtggtctatcaacaaaacaccataacactggttttgtacttgaattcaagttatactgtgtgcaagacacgccacactcatctcagcgttctaagcagcgaatcaaaattactgccaccaactgcttccccaccactgtggttagtagagcccaggccactagcaacatttgcagtacagatattgtcaatgcanagaggttcatcacctataatcatttttacttgattaatgcataccagtttgattt

SEQ ID NO: 368351 - DNA, 356 bp, Zea mays
caagacccagcaggggttgattagcaaatggggatttttcatgacaacctgacatgcggcttaagtcactgtcgcaagcacttgaagttcctcgtgttcgctcaacaaatttagcggcaaagatagcaggttaatctctcaaatgccctctaaaataacgaatcgctgctatcggcttgatgcaaagcgcaaagcatccttgcacagtttctccccgtgacccctgatatccatgaaggctttgcgcaacacttcctttgcaactctgaaggcgccggccgatacagttcccttctctgcacacttgatcgcatcacgaacgagatcattatatcttgatgccacagaatctggac

SEQ ID NO: 368352 - DNA, 176 bp, Zea mays
aacaccaaccgccaacaatgcagctgccaacagttttttataaggcatttggcccccaacagggtggatcgaccgtaataaagcaggggccagcaatatactcaaaccacttggggggttacaactttggacaacctggaacgcaaacctttcctggggaacctcaaaaccaaacc

SEQ ID NO: 368353 - DNA, 388 bp, Zea mays
aggattaataggattatgctattggcaactaattcaaagttcatcacatagacgaactcgcagacaaggatatctgcatacatgtgaaagcagcttgtaacaaaaaaaaatggaactccagaatcgatcacgacacgtattggccatccaaatggacgagcaatgtcatcaaaatagttcaaacggtccatgctatcgtttcacaatgcattattcaaacagagaacacacaaaaaaaaacattcccacaaacacttggctatgcgacacaccttaaacaatgtgttcagccagggccaggatcttgaggggcttcttcttcctcagctcgtgggggacggggccaaagacgcgggtgccgatcagctcgcccttcttgttcacgagg

SEQ ID NO: 368354 - DNA, 442 bp, Zea mays
ggcctgtatttcgatctgtattcatcttgtcatatgtcaaaacaggtatgtggatcaactttcagggagagtactcttgacttgagatatacaattgatggctatggataaccagcaacaaatcttgagaaaaaaatattttagacagcctaatgctaaactctgggtggtaaatctctacaggaacaggttttctttttggcagctgtatctcctgggcaccaaaccgcatcaggagttggagtttctggcaaagcaaaaacctctccacttggtgtggaaaaatagaagggactcaatgctattttctacgcttctgatggttgctcaaatcgggggtccacaccaaactgaacttttcagcgatcagccctgacattcccgggtggtgacaagcagtgcctctgactggtctcttcgccgttgtgctttcccttccctt

SEQ ID NO: 368355 - DNA, 233 bp, Zea mays
catggccttgttttgttcagtcatgtcttgatgaactcatgaacacatcacttcactggttcctatactactacaatcctggtgattacacggacgaaatctacttcaaacctaaaaaaagaaaaacaactacaagaactgaagctgcaagttgttatagatcgtcccgatggcagcaacttatcgctgtatgttcatatcatcacatggcactatggcagtgcagacacatg

SEQ ID NO: 368356 - DNA, 111 bp, Zea mays
aaggccaccaatcacacattttgctaattacacacaatacataataatgtggcctagcgttacacataatatcaagtttaagggttccacaaaatttgcatgttcaagcaa

SEQ ID NO: 368357 - DNA, 381 bp, Zea mays
aaaaacaataaattacggtttttttatttttctaaggggcaactatattattagtactaggagctggatcgatctttggtccgatccagtccgtaatccaccagagaagagaaaggggaaacgtctaggcgggtgctagattagcagcctcagcatagcgcgcgcaaagccttctccttccttaaatatacccggagagaggcttcgtcttcgtctacgacgttctcctcgtcgtctttttctctggcatgcactcaaccataacgcgcaaaaaaaaaaaaaccaaccaaatggacagtcccgtaactaattatccaatagctagccgcgcgcgcgctagctgttcatcctaaaaactggcccccctttaaggtttggcca

SEQ ID NO: 368358 - DNA, 148 bp, Zea mays
gcctccccttttctccggtgtacgtctccgtcgagatggccgccccgctccggcggagcctcccctcccttggccgcgcgcttctcacgccggctccggcgcggatgctcttcgcggaggcctttgatgcccttgttgagatcaagcc

SEQ ID NO: 368359 - DNA, 208 bp, Zea mays
ccttgttcaatgcctgaagccatgtccatggacgtataggcgtatggctgttgcctgtttatccactgcagttcaaagtccgaagccatgtccaaaccctaatctccctcccatcttgatctcgcgtcgcattggcgatgtatcctgttcccggcttccggcggctcgacggcgatgagcggctccgcgcatcagtgatgccgcgtca

SEQ ID NO: 368360 - DNA, 105 bp, Zea mays
ctcggttcgcgtactttccacagagaggcagacggcaggactcgcttcaagctcctcatctcgcgcagggggggtcgcctgagatcacagagacaatggtgaagg

SEQ ID NO: 368361 - DNA, 372 bp, Zea mays
aataaaacccaagatttaacatcatccataaaccacgtccctaaaaccattcaggtttaaacatgctccagcgccagttcggtacatggccatacaaaaaaacttaaccaatccagaagaaactaggtagcaaatagcaatgtaaacaagaagcaacagacgacatccaagttcgagttcatgaggactcaaaaacctgggtgatagctaggctcagtacataaccttattaaccaaacaggtccagtaatccttctcagctggaccaccacacataccgagaatctgacaagtcttaacacaaccaaaagggagcagatagccagcaagtcaacagccagggagctaagtaaaccaacagcctgtagaacg

SEQ ID NO: 368362 - DNA, 368 bp, Zea mays
cccacgcgttcggtttctattggtatgttttcacaaccagtgaaggtgggcaaagcagcacccctgctggaatgggtttctactatcccttcaacacaaccaatggcggggaaaatgtcggtggcgtcgcctctggcagtgaggtgccaagcagcaatgccccaagcggcttcttttggcccctcatcatggccagcagcgaggaaaacaatggtgaggtcacctacggcagcatggtaccgatcagcaaccctgcaggatacttctgttggcccgtggctgtgaccaatgaacacggggaagacactggtgagtctgccgatgggggcgaggcgccaataagcaaccctgcaggagacttctgcagt

SEQ ID NO: 368363 - DNA, 353 bp, Zea mays
cgcagagtgggtgatagtgtacgtggtaacatgctggagccaacagcaatggaagtggtcgttgctggctcagtgagcaatgcagtggtgcctgcgcctgtggttcacaacccacgggcacgcaagctgcggtctgcagtttggcaggacttcacgaaggagcgtcgtgccgatggtaactgtgtggctgtctgtaaccactgcaagaagcagctcacggcaactagccggtcaggcacaacgcacctccgcaaccatctcgcaatctgcaccaccacctccacacggcgtgctggtaagcgccggaagcttgttgtgcgccgtattcttcacaacaaatccttcatcgatgg

SEQ ID NO: 368364 - DNA, 384 bp, Zea mays
atcgccgtcaccttcgacatgcgcgacataggtgggtccacagggcgggtgtcgctcacgtgctccatcaagaacatcgagtgaggtggtgtgctgctgctctaaagaagggaggagaggaagtagcgacaatgtcgccaagaccacctggcgcgatgtctcctaccagatcaccaagatcaacatgtacaaggtgatccagtccgagccctctccctgcatgcttccattgattttttatttcattccaatcgatttgccgtgatatatgcaatgcaggatggtcggcatgtacaagatatgcttaagcatcagaggctccataaagcagctctgctagaattaactgattcactgtcaaggtcaaacatcactatgatattg

SEQ ID NO: 368365 - DNA, 229 bp, Zea mays
cggacgcgtgttttacgtatcttgcaaccccagaatgaccagaggtatcgcatgctcaagtatctccggagaccagcttgacgaggtgaagcggacacgaggggagcgtgtggaggacggcaccgcgcagcgcgacaaacccctcttccagatcctacaggagaacaaggagaagaaggacgccgagttcaatgagcgtttcaagcacagacctccaaaggctttggat

SEQ ID NO: 368366 - DNA, 446 bp, Zea mays
gtgccaaatcatacattacggtaaacaccatcaaaccaaacgagcagcatagcaaattagaacgctcatcccgccgtggatcaacaacaaaaaattacaccagttgagaaaagtcagtccatcccccaagccccagctccggctcctcgcatgccgcgccaggtgtgttcgtgcagggttagatccttcatctccacatggacttgtctgagtcgtcagtggcacctacgttctccgacagaagcgacggccgcgtggccatcgacgtccggtgagacgccctcggcgagcggtgctccgtgcggaaggggaactcgtcgccctcgagcatgtgcacgatctgccccatcttgggccgcttgtgcgcgtcggcgtcgatgcagcggaggcagacgagcagcacccggttgagcacccgcggcggcggcggcgcggcgatgcgcggg

SEQ ID NO: 368367 - DNA, 336 bp, Zea mays
ccctcaccattcctgccctgctctgctttgcttgcctaacgggtcggaggcggggacggccccaccgccccgagctctcaaccgccgatggacgccgccgggccgccatcggcagccagtggctccggctccaactccaagacctccctcctcggcatgccggttcccatcgcgatggccgccgccgcggcactcgtcgtcctgctcgtcctctccgcggttgtcgccgctgttctactcgcgcgcaggcggggcgccaggccgccctcgctgtcgcgcgtcgagcacgtggtcggggagggaggctacggcaccgtgtaccgcggcatccttgcc

SEQ ID NO: 368368 - DNA, 65 bp, Zea mays
  unsure (1)..(65): unsure at all n locations
attcaanaanaatttttttttgtccgttatttatttcagttacactaattacacgagggtggtaa

SEQ ID NO: 368369 - DNA, 352 bp, Zea mays
acgcgtccgtttgaattgagtcgttgcctatttctgatgaattatgtacatggctccgctctgctagagaatgtaatgcccttcgagtcacggcaagctgctgaaaaaactgctgaagcattaggtagggtcttaatcttggacctcgtattgaggaatgaggatagactgcgatgccgtccccttggctggcgtggaaattatgcaaatctacttgttgccaacagggaagcttatgccaaccttgactcactagatgatgtttatgattctgctatcattcgatacaagccagagatcattagaagccctcagaaacagaagcagagaagagctgtttcaattagtggca

SEQ ID NO: 368370 - DNA, 349 bp, Zea mays
ataaaaggccgaggataaatgccttagcccgctattttaaacactgagtaagacacggacagatggatgatatgcatggttatacacacacgcacacaagcatacgtttgcatttggctacagatcgactggttgctgtgtaggatgtatgtagtaggaccgtacgtactcacccttgtcgatctatagtagtcggtcgtcgccggagcctctgctcgacgacgacagtggcggcggcggcggcttccagctggtgtggtggatggtggtgagcattggcggcggcagcggtagtagtggtgctgttactagtagtgttggtggtggcgtggtcgacctcggatgacga

SEQ ID NO: 368371 - DNA, 398 bp, Zea mays
cccacgcgtccgcatatggcaaagagagtgagggggcatgatattgttttccaattccaagatctaaggagcaaagactattaattatcataaacaagatttctaattggtgaaagctttttatatatagcagactgtgatgatgtgtagaggcaaaggatccttcagagttgaagcagggtaaaagattttgtgtcaagcatcgagccaaagattttgtgtcaagcatgaaggacattgaaacccggtttatgtgtatagttgaagcaggaaataaggtttctagaatgcttgaaaccaagaagatcttgcttgacatatgtgctaaaataccaggattctaggttctccagttaagctacctactgcccgattgtgtcagcacttcaagtgtgctg

SEQ ID NO: 368372 - DNA, 395 bp, Zea mays
tttcttacgcgccggaatttttctgaatcattcatgggtagctccttcattcgttatatccacagcgattaaccctcttggtgtatatggataaaacatgtaactgtgtgtaagtcatgctatgtgcaaacatgacattttgtttagtccatgttcacatgattaccctggtttggtattgtgagaatttcaaatccatgtcgtgcccttttgagctatgagatgcgtaaggagccctgaattggtgataacaaatactctcaaaaaggcaaaggtatggaaaacggaactgtgcaattttattgaatatcttgaagttccattgatagtgatcatagctgtgttcttgcatctcattggtagcatcgcgtcttagaagacttaagccttaaaat

SEQ ID NO: 368373 - DNA, 258 bp, Zea mays
ggggggcatgaagaggacgacgccccgtgctccgcctaccgcgggcccggcaccattgttgaccaggttcagaagcagaggcatctctgttgacacaattgatggtcaggtctacaagcagactcatctggtagacagcgccgtgttgtaaacaaatgagtgttattgaactaccgaacctatttcttgtaccatgcatgacaagcaacgacactagttatgatcatgacgaatcatgtaacagacctgtttactgca

SEQ ID NO: 368374 - DNA, 418 bp, Zea mays
ctgccactccaattaaaaggggcagatgtagattacagagcatgcactgtggtctgttggagaaccaaaaccaatctggatcaggatttcacaagaaataagattgatgccttgattcattgctttgtattgttgatatcttagtcgtatcacatggctgattatcagggtttttttgtaagcagtagaattacaactggaatgacctttaggtggtaggaaattgcatgaaattgtggtaattgatgactgatacctgtccagcagtgtactctagattgatgcttttacggcctgaaggtatatcttatctttagaaggatggctggattttgattgtggagctagtttatttgattcacattcatacatcactaactatgatgttaggaccaaatggtagactacaataggaaat

SEQ ID NO: 368375 - DNA, 135 bp, Zea mays
tggtcgccgatgagtgaagcgagccatgtacatcatttttttttaagatttgatatcttctttttccttgatgactcctctcgttatacttgagtgaaaatgatatcttgtgtacttgccttgacagcttttcgg

SEQ ID NO: 368376 - DNA, 259 bp, Zea mays
atggccctccactgcttgagagttcaaaggctttccattcacgagaagctgcttgtgttactgcttcatcactgggaagggttttgatgcttgatctgatactgcggaatgaggacagactcccatgccgtcagcttggttggcgtggtaatcctgcaaacctgatgatttcagataaatcatccttacccaatttggacaggttggatgatttcaagagctctacagatagttccaaccaactaattacacatttttt

SEQ ID NO: 368377 - DNA, 83 bp, Zea mays
aaaaacctcaataaaaaaaaaaaaaaaaaaaaaaagtttttcttttttaaaaaaaccaaccttacttccccacacatacaaca

SEQ ID NO: 368378 - DNA, 384 bp, Zea mays
  unsure (1)..(384): unsure at all n locations
cggatccttttgcggacgcgngggngagnnggagaagcgggtctcggcgagggancacaggcgggagaaaaagcccacggagnnggctncatcccgngangagcgcatcgccgcgctggaagccgncgggaccgagctgtccgcgtggaagccgaaggtggaggcggctatggaagatgtcaagttggaggtccgcaagttgaacaagttgtgggatcgcgcatcgatggagccgatggtcgagccggcgttgctgcagaaacctggggccatcccttctcgacagctgattggatcggcaaacgatggtatgatcgaccatcgcgatgacacggcgttcagggattcaacttttggatcggtgctcacctacgtaccggaacc

SEQ ID NO: 368379 - DNA, 255 bp, Zea mays
tgactcagactaagagaggatttgcctctaattattgtatgttttatttatgcaggcccatgagaactttgagtatttgcagattgatttattaatatattaaagttaaagatgggctgtgtagagtatgtatccattcttgttggaagtgtattgcaattccaatccaaggatggataaaagactgcatgggctaagcatgagtagattcatgtatctggagtatatatactttatgttgcttgagaacatgta

SEQ ID NO: 368380 - DNA, 433 bp, Zea mays
ggatggcatcagaagtacatcaagaagcctttaaaaagcatcataattgattccttggataagcaatagctttgacttaccgttagttttgagtaattgtgagattacaaacaattgaatccttggataagcaatagcttcgacttaccgttagttttgagtaattgtgagattacaaacaatctggcacatcttctttttttatctttagtgaactttttattccttgctaaacaaataccctgctgcttgttctgttattgcatttgcatcaagtctttcttagaaagattttatttcctgtaaggcaaaataatttttgtctccatgttatgattattcgaggatatcttcgggtcctgagtattattccagaaagctactatcactatgagagcaacatccactatatatttctgaaatttggagatct

SEQ ID NO: 368381 - DNA, 382 bp, Zea mays
cccctaccaggaagttgcaagctaccgctagagctttgcaaagttggagtgcgaaaacagtgggctgtttgaagctgcagcttgagatggctagggaactacttcatatgtttgagatggctcaggagcttcgggttctgtctcctgcggaggactggttccggcgtgctttgatgaagcgcattcttgcgctctcctcctggactagatctgtggcgcggcttcggtctcgtgttacttggttgagagttggagacgccaacacctcactcttccatgctcaagcaagattcaggaagaagaagaattttattgcttccctaactaccaccgagggtgaggtcttgacttcacacgatgacaaggcaacagccctattcga

SEQ ID NO: 368382 - DNA, 358 bp, Zea mays
cccatcaatcgcccacgcgtccgcccacgcgtgcgggatttttcccttttctttcgcgatctatgtacctggggttggagtttttaggaagcattcaccaataaaacagtagaatacttgttggatttgtgcgttggggtcgggagcagacgtgagagcgagtttgggccgtggatctcgatccggcggtggggagcccattagtttccccccctaaaccctagccgccccctccctctcactctcccacccctttggccgccccttccctctttcttccactcttgcagccgccccaatccttattcttcttccccaagtgattgcagcgccacccctcaaccctagcccccccacc

SEQ ID NO: 368383 - DNA, 429 bp, Zea mays
cccaccactaacgatcgccgccgagctgggcctgccgtgcgtcgttttcagtgtcatcgcccccttctcgggtctcgtcatgcgcatcctcgccggcgccgtcgtctctgggtcgcgtgacgttaccgttcccgggttgccagggccggagatacggatccccgtcagcgagctgccggagttcctgagacgcccggcgaaggaccaaggcacgttcagcccctgcaacgcggcgcaggccaggtgtttgggcgtcgcctacaacacgttcgcaggcatggagcaggagtaccgcgaggcgaacgtgcgcgccaaatccttgaagcgctgctacttcgtcggccccgtctcactgccgctgccggcggcagcggcaggcaccagcgagtctccatgcatcaggtggctcgactccaggccaagctgctc

SEQ ID NO: 368384 - DNA, 131 bp, Zea mays
  unsure (1)..(131): unsure at all n locations
gactacttcacctgtcaccgtttttattatagaaaattaggtttccttcatcaagctttggtatccattagtaaagcagtatatgtatggaaacctaattttctataataaaaacggngactacttcacct

SEQ ID NO: 368385 - DNA, 58 bp, Zea mays
aagcttgatgaaggaaacctaatttaatataataaaaacggagacaggtgaagtagtc

SEQ ID NO: 368386 - DNA, 164 bp, Zea mays
acgcagtcaaactggggacatttgaatgcatccagccacacatactcgggagctgtttgggtacaatggacaaactctttggctattaacagcaactattcggagagggcagcgacagaagaacccggaacacggaagcctagttactcttgtccattttcttc

SEQ ID NO: 368387 - DNA, 246 bp, Zea mays
gtatagtgcatgttgagtgtggacatagatccagtacaggtttgtcgcaatacaaaaacaaaggaactcccacatagatgtacataccgagatacaatttaaattggttacttgagcccacgtggagttttataaggtgcctccacagatcagcagatcttactctagttccttcattagctattgctgaagactttgaaaccgctaaagtagtgccagcaaacagaatacggctttggaataagg

SEQ ID NO: 368388 - DNA, 133 bp, Zea mays
ccttctgaggatcccagggaaattgtggaggcagttctcatgacctttgaggcgttgcggcgtaagcatctccaattggatgaggcacaagagactagcaagcgtgcagatctgaaggctagtgctatcttga

SEQ ID NO: 368389 - DNA, 478 bp, Zea mays
cttcgatatagaaagttttattaatcttagacaattacatcaagaagatacaatagtactaagattactctcggtctctacacactaaaatgtacacaaccaaacagagatgaaaaaacaataggagaaacaaactcttcccaaaacaaactatcactcacaacagtctttcacgctaaccactaactagacaatactaggatcaaggttgagacactccataagaaacgcctttaggaagaatacaacatataagacgctgtcgttgcgatgacccaccaataaaggcccgatgacccaccaataaaggccagatcaaaggtttcacctaagagaaaagaccctcggtacttcagataatgcattcatcatggtcaaggccagatataaccaattaagatcagacctagagatttctccccgaagtcgatgagaccgactcctataagttccatcaaaatcaaagatcaccagcttt

SEQ ID NO: 368390 - DNA, 153 bp, Zea mays
tgaaggctttgggattgagtttgatgaacaaaccattaattgattatttcttgggtagtctcataccatgatggaaagaccatagttttctagagagcgtagaaggactaggatttgaaatgcttgtttcatcgccttctacaactgatgctt

SEQ ID NO: 368391 - DNA, 177 bp, Zea mays
ccgggaaaaaggggctgcaaaaatccccctatccagggggaaaggagctctaaacatttcccaatttttggcccaaaaaaggggagatcctctttggggggggcaaacaaaacctgtttttacggaatcaaaaaagcttgccccaggcgatttttgagggtttccccccaaaccccg

SEQ ID NO: 368392 - DNA, 225 bp, Zea mays
ttgctggtcgaggcgtgaggtcaccaaggaggtggtgaagacgctcaaggagtgcggcaggatcaccttccccatgtcccttaagcagatctagaatctatggttgaagaaatagccaaagcattcaagacaaagataatgtttatatatgttgacactgctgaagaaaaccttgcaaaaaccattcctcactctttatggcattgaatcagaaaagggcctact

SEQ ID NO: 368393 - DNA, 231 bp, Zea mays
cccgcaaccctaatcccctaccaccgtcggctctcgccggcgaagaagagggagccgcgcggcgtcgccagggagcacgcgccccctcccttcccggctccctccgcgccgtggggaggcgcgtccacccggatccgccctcaccgcgaggcagaggggaggagagggagccaggtccggcgcacccgctgtcgtccgcgccgaagagcgttaagagtctccccacaggct

SEQ ID NO: 368394 - DNA, 206 bp, Zea mays
gtcatggcttccgagtcatattattttaggcagcttattggatcgttcaggcgtatgttggaattagtgccaaaaggtaaaggtggggatgaggttgccaagaaacttattgtcgatggagcgaatggcattggtggggtgaagctcgaacaaataaaggtggagctttcaggcatagatattagtgtgaggaattcgcgcaagga

SEQ ID NO: 368395 - DNA, 399 bp, Zea mays
gaacaaatacaatattatccagtgattatatgattctggagtactcctgaagaaacaaaatggaaaagaaaaggccagatggccgatagcaaatattggacaaaagtagcttcgttttggtacagctagctacaacctacaaggcgacggcaaaaaagaaaagaaaagatatggactgattgagtgttccattagtgtgacttgtgtatatttggaaacagcccatgaatatgctccggcatgaaatcgtgcctcgtcaggattccaacaattggaggtctctgcagtggaacgataatgagattagctatcataaaaatatatgtgaaggtcatattgcaactttatatcatgttaaagaatagccagcactgcaatatttgatctctagagcaagat

SEQ ID NO: 368396 - DNA, 213 bp, Zea mays
gggaaaaaaacccaggaaaccatatttccattcccatttaaacttggggggcaacagacctttactttaaccacagttggggcttgccccgttgttttttcagcaggtaaacagggtttacatagcccccaccggcagggggggatattaccagcccttggcctgcccatgggtcatccagtttttcacaggcctggggtcccccttttgttt

SEQ ID NO: 368397 - DNA, 231 bp, Zea mays
tagcaaatatggacaaacatctggtgcaaataattcagttgatgacaatatacctcctgcttctgtagttgataagtattctgggttacctgtccgaaatgcatcagctccttcaattggaaatctgcaaggtggagaaacaaaatccatagggactgattcacaaataaaagagagccatgaattatgccaagctaatggtagcaggtgatgcagtgtaaatacattaaa

SEQ ID NO: 368398 - DNA, 400 bp, Zea mays
acgataaattttgttgggcataccattgaatcggggttagccactcatgagaagagatgtttgacatataagatctccattagagcaactccaatgaatttacactcaacagccttagatgctccacctgtcccctgcttggagactagcaagaggcccgatgaaggagaggaccggggtaagtcggtaactaggacttccatcctggacgtccggacatgaccgaggattctcggtagcctatccagcatcgactgggacggcaacagccttaaggccacgagcgtgtcatgaatgcgactagggatgtggggttgacgccaccacaagctttagaagacaaggagacatgctgcatacacgaggagcattcagttaggcctatggatacttgcacaga

SEQ ID NO: 368399 - DNA, 146 bp, Zea mays
ccagagctgggtcgaagtaagacaggagccaaatcagcccttgaggtgtccttatggggcgagcgtaacccagccatctccagcgacctatcaaacatatactgctggggcgaaggcggtctaggtgagcccaatggcccaataga

SEQ ID NO: 368400 - DNA, 229 bp, Zea mays
  unsure (1)..(229): unsure at all n locations
cctcgccgccgtggaccgttgccatctgtgcatctggattccataaaggcacgcgtgccctgacctctccacaccccgcgtcccaccaacttccattccctaccgnccgcccaccccactccactccgctcctcccactcgagccatcatggccctcgcctcccgcgccgccgcagccgccgtggcgtgcgtcctcctggcgctcgccgcctacgccgcgggggcgggc

SEQ ID NO: 368401 - DNA, 168 bp, Zea mays
tccccctctcctcggtctcctcgacggaagtagtatagcaggggccgaggccatgtggcccggctgcggtgggcggttctactgggcgccggaatcggcgccgccggggcaagcgaggggtgtcgcggtcttgttcgcgtgggtgtggagcgaccaggcgcaactgcg

SEQ ID NO: 368402 - DNA, 325 bp, Zea mays
acccatcgagcaaaaaacatcggtaattctagaacacgtttcaggcagctgctatgtatatcagtgttatttaggccacaacctgactgcactactatattatcagctaattaactacgagaggtctacatgaggaggaggaccatgcagtgcacaccctacgtacctgcagcgacggacatcacttcgcgtatatatataaagatcgattgacatagcgataacatactgcctagacatgccacatgcacacacgatcgaggagagttcttcgatgcatggatggatataatagctaaattcaggatattcagctgctgctgct

SEQ ID NO: 368403 - DNA, 262 bp, Zea mays
ccaaccaagtcgttcggttatctcccaagaatgtccaagcggttagggtggtgatcaataacaatcataacaccattgacaagcatctgaggatatgacaggacatgctgaatgcagatgcagctcaagactggacatgcacacagccgtttaaagtgtacaggctatacagagtgcacgcaaatcaacatgacgctagctgcgatgacattgatgagtggactgaaaatgcaatgagagcactagcatagtgaaacagcac

SEQ ID NO: 368404 - DNA, 150 bp, Zea mays
tctactcgtccgcggacgcgtgggtcgcgctccagctcaccatttatactctcctttccctaccctaagcatctcagcgtatccaatcggtccgaaggtgatggaccagcagggtgcggacggagacttggaggtgccggcggaagccag

SEQ ID NO: 368405 - DNA, 116 bp, Zea mays
agaagaaaaattatcgggggtaatccacaatgatatctccttaaattttaagcccctgggggggggcaaaaaaaaaaaaaaaaaagggggccccctcccgatctgaacggaccccg

SEQ ID NO: 368406 - DNA, 90 bp, Zea mays
attagtgccgacgtcttcgctcgctcgccttctacaacgtcctgctccagcgaggcgacctcgcggcgccacattcgccgcttgtgccga

SEQ ID NO: 368407 - DNA, 200 bp, Zea mays
tttacttgtgggcggacgcgtgggcacggccacggtcgacgtcgtcgactatctactccggcctgttcagcaacttcaaggtacgctacttgcgccaggacttcgcggacgccatggtccgcatgggctgcgtcggcttggtcaccggccgcatagcagggcgaggtccgataggtctgcttcaaggtcaactgactgat

SEQ ID NO: 368408 - DNA, 423 bp, Zea mays
gccgtttgacccgcccgccgccgccgccgccgccgcggcgaacgtgtcgcgcacctgctccgtcgtgtaggggaagcccgaacgggtcatggagttgagcagcgcggcggcgccctcgcgcagcagcgcgcccgcgccgtccgaccgcgtgttcgccagcgcgtcctggatgctcacgtccgtcccgcctaccctgccagccgcgccgaagaagtggcccatcgtccccatcgacgacgacgtgcccgggaaccgcccgccgatcgccgaccagatctccatcgggtgcgacctccagtagctgctcggtggtcacgtcacgatgaagagtagacgacagagcaacttttggtcagtggctgcatgcatggcgagttggccacaccgacgtacgcgtcatgaatcatgatgtatgactatgag

SEQ ID NO: 368409 - DNA, 132 bp, Zea mays
tttgtttatcttgtagctatgcgagagagttattttgaacttgactactgctacacaccatatttgtttctgtagttctaaagttttggaacttgtgaggttgtaattgagcttttttagtattatgtatag

SEQ ID NO: 368410 - DNA, 277 bp, Zea mays
tttattcggggcggtttgcatgataatctccggggcgctcacagagaaggactacagtctcaaattcctgaagatcgacatgcattcggtggacgcagtcttcttgctgagctaggccgccctgaatagcttgaggttcctgtggttccgggttgtctacttgtgcctctggaccgtgcactatgttgttttccagtggatcgatcacgcagttactccgatgtggtggccttacccgtttttcgacctgacatcgaacctggcacctatgtggtac

SEQ ID NO: 368411 - DNA, 101 bp, Zea mays
tttgttacgcgttcggctcggtacgtctctccgcgggcggtatgagcctgctggagctgtacaagccgtcagtcagctcgatcctgacgaactactatcgg

SEQ ID NO: 368412 - DNA, 418 bp, Zea mays
cctacgcgtccgccctctcatgccgctggttgatctctcgtcatctcctcctccaagcacggatcttctcgtcgtctcctccaagcacggatcaggagcactgaaattctatctcaaccggttctgccgactggataacttgaattctaaagatgggtgtgaaggagatgtatcttcaatattacaatagttacatccagtacctacgaagaagaagggtgcttatttacattaccatttgtgtggtttttctttggtacaaactgaatagattacataggaagagtgttaaatatggtcctttgttacaacgagatttggaacgagagaggcggctcaaccggttgtataatgggacagaagccaattgtattagtgagttgcgcatgcgcaaattttgtttccataggttatgtag

SEQ ID NO: 368413 - DNA, 101 bp, Zea mays
tcgctagcggtggtagctggccagccaccatgggtgcaccactctagatcccgctcccgcctctcctcatcctactcgttatagagcctctgtttcccacc

SEQ ID NO: 368414 - DNA, 460 bp, Zea mays
  unsure (1)..(460): unsure at all n locations
cggacgcgtgggaagaaatttaaacatcataacatacaaaatgcagtgaacaagggttatgaaacaacttcaacctgtttgctgtgcctcaaatggcatgtgacatagaaaaaggccaagaataaagtaatcaacatatagttcacttggcatttcgtctcccatatgtcaaagctcaggcctaaggtccggcctaaggccatgaccattcttacatgggctacgatgtncaatatggatgggtgtggggcaagggttggggggggtttctcaacttgtgtgaggtcttcttaacaaaatactcatgggatgtcttaccccggtaggttgaatttttctagttcattggcatttaagaacatcaattttgcctaaacatatatggtatttataagaatggtagctgtggtcattatcgtccatggtgggaaatacctgattagattttgcttccattata

SEQ ID NO: 368415 - DNA, 430 bp, Zea mays
taggaaggaggagaaggcaccggaaatcctcccatcccgctagctggaacctggaagggctgaagctggagctggagtgctggacagtgaccgagagtgagagaggcagcagcggtccggtggctgtggcctccttggttgatgctcacccaccctcagggaggcacgagcgttccctctccggcgagccccaccccggaactcctccgagaaatgcggcggggcagccacagatgacaccttcctcttcttcctgacctgctgcagaggagggcagcctcctgcatttccgggttcccttgcgcttgcgcctcctatttcgtctttccacgagagtgggaaggggaagccggaggatgccggccaagtacctcggcccggggggcgttggcggaggacagggcccaggacctccaccggcaggtgggct

SEQ ID NO: 368416 - DNA, 485 bp, Zea mays
  unsure (1)..(485): unsure at all n locations
atatcatggcagtcaacaagctaagcttatgaagagtttaggccgagggaacatgatgcagcagagtcctgtggatgttattcaagcaagtggcatatcaacaagctgtaaagatcaagttcctgataagaatatgatgcaacagggtccagggcattttgttgtaagtaaaggatcaatcccattgatacctcaacctgggaatcaaccaaatgtatacacttntcagatgcctccgtctccaatgcagacaccggatattagtaatcagggtgcagtcaagggttcttccaaccatgccttgttaacttcccagcaaggttcacttcatacgccttcacagttggcacagcaacatcagcagcaactacggttcatgaattcgccacagaataatatgcaaaggttgttaatgcaacagaattggcatgtgaacacagatggtaggtattgagtttacctggttgccaagtacagcttaccca

SEQ ID NO: 368417 - DNA, 160 bp, Zea mays
tttctcacgcgtccggcaatacttcatcgcgatgggggcggtggtgacccggtggatctccatcgtcaccctggtgagttcatggatcatcattgtgatggaatgcaagcccttcgtggccattgtttgtctgggcaggagccgatcgctaaacctcaac

SEQ ID NO: 368418 - DNA, 67 bp, Zea mays
tcgttagaacacaggaagtgaaatatcttttattatgaacattcccaaggaactcaggaagtttgat

SEQ ID NO: 368419 - DNA, 155 bp, Zea mays
tcgtttacgcgtccggcagggcaggttttgcgaagcaaagcccacgagcacaggatgaggatgcgtgcgcgggcggcatcggcatctgcgtcggcggctgtggtggtgctgttcctgttcttgcttctggagggcgttttcttgggcgccgtgtt

SEQ ID NO: 368420 - DNA, 413 bp, Zea mays
gcggaggcggaagcgatgctgcacggcggtgggtcgcgagcaccggcgaagccacggcgccccagctcccactctcactcccgccagcgggcgccgtccccgcccactccgtcgcgccgagcgagcggggctgtcgcttcggcttcccacgaatcgaaggagcagtcggcgttggaagctccggtgatgtcttccgtggaagagacatcgttcacgtttgagttcaaaagggcaaagaaggcaatgacgccgccgtcgctgctgccggtggatgagccgaggggcgaaaacaattcaagagagggcctctccaacaagccaagcgctgtccctgcgaagaaagacacgccgaagcaggtggagttcacccattgctcgcctggtattggtggcaggctgatgggcctagacac

SEQ ID NO: 368421 - DNA, 244 bp, Zea mays
agccaaatcattttctggtgacattttggcataaaacacacatgccttaaacttacaaatggggataataaatatgtacacccttttgaggaataacaatggtcaggatcataaccactcgtggcaaattgggaatgccgtcatgggcttatggggcaactttcccctccttgggatccttggacatttgggcgacccgatccttggaatacttgagcagctggggttttttgagcttaaaggg

SEQ ID NO: 368422 - DNA, 467 bp, Zea mays
cttacatatggtcggacgcgtgggcgcaggatgtcgaggatagtttaagcgtctttatattaattatatctttttattttatataattttattattttttttattatagttatttttatattaattttcttttttattatttttataattaataattaatttattttttttatttttttttattattaatttttatctaatattattttttttatatattatttttttaatttttatatatttctatatatttttattttattttttttatttaatttttttatattctttttatttttattttctaaattttattatttttataatatttattttttcttattttttatttattttttatttttttttttataatatttattatatatattatttttttttttttataatttttatattattctatttatattttttttttttactatttctttattttttttttt

SEQ ID NO: 368423 - DNA, 462 bp, Zea mays
ttcactcgtccgcacagtaagagaatataaaaccactgaatattaaattgaactcttattcctgaagcgttcactaaaattaattgtgatacctttcttggttaaacttattatgacacctgactttctgaatttttgagtctttttgttttttgtcaggtggttttatgactccaatagtggtctaacatgcatcatttttccttctatcgcagacactatttatcgtggccctgtgcaacaatcagctcttgtatcttattgaaaaggatttaatctagatatttggtcacgttcctgggttttttgcaaccctttcgtctgtgattgccagacttcatgctgtctaggacaattctgttcatggcaatcacagacttgttcatgtgcagttttacttaccaagttgggaagggtgatcggtattcatgagtacaatatgttctgcctttagtagaagag

SEQ ID NO: 368424 - DNA, 193 bp, Zea mays
tgttactggtacagagacatcaaagagcggtcctccttgtgagtctagagctagacgaggaggaggagagcgatgctaagattaatcgtgataccatgattggatgaaactattatgacacttgagttgctgaatttttgagtcttgttgttttttgttatgtggttttacgatatcaatagttggtttaata

SEQ ID NO: 368425 - DNA, 362 bp, Zea mays
tcgttgatccataccattaaaagaccactttggattcataccattactatctcacttacatgtgggttcacatgagtcaatgacatgtggggtccatggtatatatctaaaatttggatcttttaatggtatagatccaattgttcctttttttttctccgcagcatgttcatcggcacctgcaagcggctgaggatcatgaaggggtctgaggccagactaggcctcgggtcagccaagaacaacgactgagggagagggagacgacgaccattgtgcagacccgaccgagatccacgcacacggtggcttgtgcacgcgtgagcggcggattgttgtgcgttcgaggcatggtgtagtat

SEQ ID NO: 368426 - DNA, 117 bp, Zea mays
ttactggttcctcacagagcgtcgtcgcccggtcgccgtccgtcccaccaccggatcccgcccacccgccagatccaggtgtccagatccccgaagggcgaaggcctgaacccctgc

SEQ ID NO: 368427 - DNA, 218 bp, Zea mays
tcgttcacacgtaagagaataggacgaagggaggttttgaatgtacgatctagttgtttagacataacttgacctgaatctcaagcgcagagtatgcattttctgaaccgtgttgcatttgttcaaaagatagtatcatttgatgggctagggaacttgaggatggatatggtgttcacaggatggctcttgcctgactgcgttgtagaccctgtatt

SEQ ID NO: 368428 - DNA, 605 bp, Zea mays
  unsure (1)..(605): unsure at all n locations
tcgtccacgcgtccgcagatattgatttgttacaaccttcatcttctgccgcaagtacttttgcgtcatcacaaagtcatttaaaagcaataactgcttcaaaacgcatgagatcagctccaaatcaagtctggatgaacataccaataaacacattccagcctcgagcacggcctctttttcagtacagatactacagtgagcagcaacccttaagattgaatcctgctgaaatttctgaagtcatagctgaagtttgttcagaagcaacttcaaatgcaaatcagttgattgttccatcaagattgagcacccagagtcggcaaccttcagcagatgtggcattcagtgtccttatcaaacttgtcattgacatgtatatgatggactccgagactgctgctcctctgacactttatatgcttgagggtatgctgagctctcaaaagtcatcagccagaacgaaggctcttgatttgatcctaaatctggnggtacatgcacacctgctgcaacctatggttattggagatgcgccgcttatagataaaagtgaatctgtgaaccgttcttatctgaacaatgaatacggatcaagataaatg

SEQ ID NO: 368429 - DNA, 369 bp, Zea mays
ccgtcttctctcttctcggttcgttcctccctcctccctcccgtctgtctttgttcctctctcctgccacccatttgtcttcgttcctattcctctagttgcctctgttgttcgcgtcggtaaatccgcctcgttcgtcttgctcccgttgcctgcgtcgttcgcttagtcggagattaatcgcgacctaaatcgttcgatcagtgtaggaacgatcagcctggctggctggagagaaattgaggcccagtggcccacttcacttgcccagcggccctgcccagcttcctttatcccaattcccaccacttgtgtgcacacgacacgaaccacgcaaccagctgcggagggaggaaccctagcggaaca

SEQ ID NO: 368430 - DNA, 441 bp, Zea mays
gcgcaaaagcctccttactccccgagaccccccctcctccttcgttttgcaccctccccaaatctgcactactcccctctccctcgtccttcctccgccccgccccgcccatgaggatcaggaggcggcctccgggccagcctctgccctactcctcctcggtaacaaatgattcggccgcggatctcggggacggccgctcctcctcctcctcgtcggcgctcatcaggcgcccggcattgtcgccgcaggacggtgcggtggagcgcagcacgggtctggtgggtgcgcaacagcagcagcaacaggggcctgcagatggccacagcagcctagagaacggactccatcgccacgtgccggagccggtgacgatggccctgcaggccggagagcgtctctgcagcggcaacggcgtcggcgcagcagtggcaatggcta

SEQ ID NO: 368431 - DNA, 457 bp, Zea mays
ggtttcatcctcatctcaaccggcggcagcctagggcttcatcccccacccccaaatccatgccgctcaggttggagatcaatgtgtgcctgctcgacctcactggatctcagtccccatagagggtcaagttggtggacttgcaccccacggaggcatggatgttgagcctgtactcgaggagtgcctgcatccgggattatcacacacagtcaatttgtaggagaggggacgccatacatcaaagatgactaaagaagaggaagatgaagaatacctcgaagaggaagaagatgcccttgctggtgcaggggggaacacatttagtttcacaaccttcatattagactccgatggggaagtcactagcgaggtggatcaagttcgtgctcttcaggaagaagtcgtcatccaggtccagctccaccaaggccaagaatttatcgataagaatgct

SEQ ID NO: 368432 - DNA, 432 bp, Zea mays
cgccgccctgctggctgccgtcagtgctgcgtctgcgtgcgagcggagcgcatcagcagcagctcccgaattctccgccattggctcgccaccgccgcgcccttgactagctcgcctcgtctcgtctcgtctcgtccctaatctctctctctcccgaggatcaggaccgtgcgtgccatcgggtcctgagtcctgacggcgacagcctaccgcacacgcagcgcagcggcagccgagaaacaaacaggggaggggaggaggagagcagaggacgggcgctcaagcaagcaaagcgagcgagtaaccagcagctcctcagtcagcggcaagagggatcagggcgcttcccctgccagctttggtcagctctcgggcgcctgcggcagcagcccaatgaggccgctcgtcgccgctgtcctgctcgtcaccatc

SEQ ID NO: 368433 - DNA, 427 bp, Zea mays
cccacgcgtcctattttaatatactgtttgtttacccaaaaaagtactaaaacgtgtaatattcctattagtattgttttttctagaaaaaaatgacttatacatgtatctgtattctctcaatactagatatagtaccctatatctgttaccaagttggtgtaccccaaaaccaaggtaccattctctttgaaattgactggtcttcagtcgactattgcaattcgagggcaaaagtaaccctgcatcgcagcacaagaacctgcaaattaacccacatgaacaccgataactgaagcagaaaataaatgtgctccatggttccaggccttggatgcacacaattaccatctcctggtctgtttctttcaaagaatatttttcttggttatgtgctctcaaaagattttccactcccctttctctc

SEQ ID NO: 368434 - DNA, 436 bp, Zea mays
gcggccgccaccctcttctttttctccctgtcttcttccacacggcgtgcaggagggagctcagctccacctccctgcctgctctctacctcccatggccgacggcctccacagcgcagcagccatggcccggcgtcctccccttcctccaaacgtgtaagagcagggcgccccttcttcctcccgcatcacggcagcaagcagtttctccatgccgatctcgccctgcagccaaggacgccccctgcctctgctccaaatggcgagctccatatttgcatggagccgagctctcccatctccaccagccggctcccccttcttcttcctccaccagcagctcctctctatttcctgtacgtgcgcagggagcagaagctttttcttccacggcgccatttctcccagccggctccactttcccctgcgccctacc

SEQ ID NO: 368435 - DNA, 410 bp, Zea mays
cccacgcgtccttttacgcgtccgatcgattgcgacagcagccacgagcccacggctcatcaggcggcggctccaatcaatgaacggcagccacagacctcatggcggcggcaccaatcgacggctggtaggctgatagccacagacctcactgcgcgccggcgactggcaggctgacggtcacagaccttgcgacgcgccggcggctgctccaatcggtgactgacgggtgacggcaacggtggccacaaaccggcaaactacagtggaggcgaccggaccggcgaactacaacagaggcggccacataccgacgaactgcggcggttggggacgcacaagaggaggcagggaggtggctttgggcagtgattatgcgatacaggagcacgagtgtatactacgaacta

SEQ ID NO: 368436 - DNA, 122 bp, Zea mays
  unsure (1)..(122): unsure at all n locations
agngagggccctgcataggttctattattcagttgggaagatcacacttcgctgacaagaaaaacattttagaccaaaaagaataggccttccatacattataggttgctggctttgaaacc

SEQ ID NO: 368437 - DNA, 362 bp, Zea mays
cggacgcgtggggtccccagcagaatgtacacagaaaacccagacctgcgcttgctgctattgctcgccgacgcggcagctgccgccgggggggctgcggggaacaccaccctgacggggtccgtctccggcaaccagatcgagatcatctggtccggactcccggccccggacggactcgactacgttgccatctactcggcgccgagctcccgcgaccgagacttgctgggctatctctgcctcaacggctacgactactggcgcggaggctccggggagctctccctcccgctcctcccgacgctccgcgcgccctaccagttccgtctctttcgctggcccgccaaggagtactccta

SEQ ID NO: 368438 - DNA, 353 bp, Zea mays
aaggctccatgtttttacttttaaggggcaattcaccaaatgatgcagagtttattgaaaaaaggatgcttggaatatgtcatttaccacatggatggaattttaaaaggccatccatgtctttacttgcaaagtccaatcagcagcaaatgccccaaaatttattgggaaacgaacagatgacccatgcatgtggaagtgccaactgaataaaatttgaatccaacatatggccccaagccgggagattttatcgccgtttattaccaggggggatctcccacgcctgcaaaatatggttcacgatcccttccacgcccacttcatgtttaacctgtgcaaacacaaagggc

SEQ ID NO: 368439 - DNA, 521 bp, Zea mays
gcctgcgatctggacctttgtgggctcgtcaacaaaagagaagaggagcctttcttgttggtagttacaaccggtggcgtctcttgtggtgcaggtgcattttgtgtgaggatccagacgcaggaggatggctctcaagaagttgctgcagctcttttgtgtcggaaagaaggattccaagaagaaaggtaaattcatcgatccactctggcaaggtacccatgatgtccaatatcaagcttagcatatgttcttctttgccctgatgttttagctcataattgcatgagagtgtgacctggacacatttattataatttattttggtactggtgcagattatttattaaataacgagttatttagggacctaggagttggttgtgtagattcagctcaactgagctcaccatatcagggcttgataactattattgtataacttatatttaacaaataactcgttaacttcagttgaagtaagcactcaaaattcaaaactgtgaaaggatcgagtaact

SEQ ID NO: 368440 - DNA, 443 bp, Zea mays
gcggcagcctggaaacgcaaacgaggaagaggagcggtcgattcccaatctttatacgattgattctttaccaattgtatcgccattccttcctgttcattgggcgtggggtttcaacctaataaatcggtccttttccgcgcaactagtggggagtggagccgctgagaaatagcaccccttttcctgccccaagatgcctgtttccgcttcttttccacgccacaccttttgaaaatccttcgccgtcagctccccttttgcagcactagttgtttctcagcctgcttggagtttggagggggcagagaacaccatcctgtcgattcaagaaaaaggctgagccgatgggcagtaagagcggcgtgcgactgcaatgcgccgaggccaaatcggcgacggattggagctgctgcttactggccctgccaccggcagcacca

SEQ ID NO: 368441 - DNA, 407 bp, Zea mays
aggcacataacatcatttatatatccttattatataatcatggatgaataagaacaatattgaattacatttgtaccttcggcttgacagaaggcaaaagtacaagagtgacgcacgggcgagtacaagtcaacgtgaacagtacggggtactgttcatctatttatagggatagggcacagcctgtgtgaaatttcattcatgaccttcatgttcactattgacttaagaacaatctaccggcgactagatagtcttttcctccttaagtcagttcctttttctgctactgagccgaagcacccttgcgctctgcttcggcgctggttcaaccttcattccgaccctgctctccatattgggtacagcttcatcccgagtccgaatgttcctgtacatatattaag

SEQ ID NO: 368442 - DNA, 330 bp, Zea mays
cccacgcgttcgcgctgggcagccacccgcactcgttgtcggtgcggtgcacgtaccgcgacccggcgtcgcaagagacggtgcgcggcgcggtgcagcctctgctgatgaccgagctacatggcgagcggtcgctgtcgtcgtatcagcggctgcacgacctgttcgtggtgacacgcgccgtggcggagtccccgcggctggcggagctgcaggacctgcgcacggcgatccacctgctgtcgtcggtgcgggcgctggtgctgcagtcgccagtgacgccgcagcagcatgagctggtgggcagcctggacacggtgctgagcgaca

SEQ ID NO: 368443 - DNA, 148 bp, Zea mays
agagcgcgcgcccttttttttttttttttttttccacaagacgagacagtagtagaggaacattctagtattaggatacttacttagaaggaattgagtacgcaagatgtacttaaacacaacaacagtatatgaccttagaaaacgc

SEQ ID NO: 368444 - DNA, 455 bp, Zea mays
cgcacgcccgtgcgcgtgaaggtacgcggaagcaggggcgaggattctccgaagcggagggcgaggcggcggcagcgaccttgagggagatggcggcgggcggtagggtttcaatcccggcaggggcgcggcgcacgatcgcggacatcaaggagatcgccggcggccacaccgacgaggaggtctacgctatgctccgcgagtgcaacatggatcccaacgagaccgttcagaggctcctcctcgaagatacctttcatgaggtgaaaaggaagcgtgacaagaaaaaggaggttagtaaagagccatcagattctcggtggagacctgccgtgcaggggcaaggtggaaagaattgtcggaattgtgcttacgcagtttgtccagctctaatgattctgctggccgaagtgctatttctggaaaggagaatggaataagtttgatcatgggaa

SEQ ID NO: 368445 - DNA, 471 bp, Zea mays
ctgtgtgcactttgcatgaggatatttttgtagtcctccatacaaatgggacaaatggctcgtctaggatgcaacactctttaagtcatttatcaatgctgcaactcttgtcaatgttgcaacaagtacaaggctgtagtatgttaatttacaaaaagaatcctctgtttgcagggtgataaacaaagtggtagtaatgacagtggttcaacatccgcgggccagtcaccacgacttaaatcttttgcttgtagatctcttctggctaatgatgtggaaagtggactaagaagaccgttgaactcctaggataaaacagcgggctcatgttgaaggtggaccatattttggtaacctaaatcctgtagccatctttctcttaaacatagaggcttacacacccgagcagttcatttctcgaccagtgggaggggcttgtccagcgaaaggagcttggcaaatactgtaact

SEQ ID NO: 368446 - DNA, 397 bp, Zea mays
cccacgcgttcgcggcgggtcggactgcggagcacgggctccggcgagccgctgacgagggcctgtgcggcgaccgagctcgtggcgggagaagatggacgaagcgagcacctccgcgtccggcgccgcgacgaggcgcggcttcgtgcctgcgagatcgggagtttgttagttttgcagttttctataggttcacccagcagaacctcccagcttggaagccagcaatgacacctggatgtataatagcaatgttcttgattatcggaataattttcatacctttcgggcttctttgtctccaaacttcaaatcatattgcagaaatcatctaccgctatgatgttgactgtgtgcctgatgcttacagaggaaataggcaagcttatattaagga

SEQ ID NO: 368447 - DNA, 231 bp, Zea mays
cccgcggttgtataaaatgtggtgggctgttcttctcgttgtatactggaagtccactcttgtccaagaaattacttccatggttgaaatttggggatcctgatcagaatttttgtttcctgaagcttttcttttattgatttagtttgtgtgagcaacacagacacgggtgaattgtcggagaatccacgttgactgcggagaaaaggttaatttctttggactaggtag

SEQ ID NO: 368448 - DNA, 166 bp, Zea mays
gttcaaaaaactttttatttttgtaggggaacctggctgccgaattgaacccaactgatatcatgaacacccaccctgtaattgacatgcacacagagagtggggccaaggcaagcttggggtccttgaggagtcccgtgatgagcacgagtatctggaagtacca

SEQ ID NO: 368449 - DNA, 121 bp, Zea mays
acaagtttagttataaaaatatagcatcgcccgcgctctggagagtctggatcctcctgaacctccaagcagcaagcgatgaaaggagggacgcaagcaattagcctgatggtgcaccttg

SEQ ID NO: 368450 - DNA, 132 bp, Zea mays
acctccctgtttcgcaaatggcactccagcaccagcgaacgagtctgggtctatgtcgaactttctagaagcgcggcgccaaataaataccccactacctcaatcctcgctgcccctctcgattcggaaaac

SEQ ID NO: 368451 - DNA, 434 bp, Zea mays
cccacgcgtcctcttacgcgtccgcccacgcgtccggccaccggcgccatcaccggtaccgctacggcttcccacctcaaaaccctaaccctaaaccccctccgcgcgggagccctcgcccatggagaaccccaggccccaggccccagcactcacccctgccatggccccgctccccgttcccatccacccgccaatcgccccaatccccgtccctccgccccgcgtgcccgcccccggcccagccgacgccgattgcatggcctccacacccactcccttcactggggacggaggcgaggccgagtacgaagtctccgacgaccaccgcgccgcgcgggagcgccacgagcgcgcggcgcaggagctcctccagcggcgccgagcctacgccatggccgtacccaccaacgactccgttgtgcgggcccgcc

SEQ ID NO: 368452 - DNA, 298 bp, Zea mays
ccggggcccgttttccctgcctgccactcccgccgggtgctgcctaccagcaggccaggccaggcacccctgccctgtccgccaccagcacaaccgcgtgcgccggtctggtcggtacatgccaggatggagaccccttcgtcgacgtgcgacgagggctccgagctcgacgcgcgctcgcagtccgactacgccgacttcgacgacctggacctcccgccgcggggccgccaccgccgggacccgtcctccgacgcgtcctccgagtgcagcggggagcccgggagcccgtacgcct

SEQ ID NO: 368453 - DNA, 381 bp, Zea mays
cggaagcgatcctttttcgtgcctctctatctcccactcttcattccttcgtaccgcctcgccgttctcggagatcggggttcggccactgcgaattcccggttgttgtcgggttggggtttgggcgccgtgtttggcgggtgagattagattcctgctcctggccgcttcacttcttccttagaagatcgctcggggttgggttcttctggatgtgaggtgatgaggtgaggcttcaatccgttcctcctctagctccggtggttggtcgtgctggctctcagaagatgggagcttcccaaaggaaagcagccatggtggctagggtttgcgtcgccggcgcattctgagatgcgctgctgcttgcgcgcgcgcgcacgc

SEQ ID NO: 368454 - DNA, 175 bp, Zea mays
catgagagttgattgacagagaacatgaggcaaaccaaagacacatgctttagcggcacacatggtgcaccgtgccccactaccaccaccagaccagacgacttagactttattgagcccatgtcactcgcaggccggaccgttcagtgcacgcgacagccactgctatagctac

SEQ ID NO: 368455 - DNA, 177 bp, Zea mays
ggatacttaaacgaaatgaattgcggagggaggagatacaagcgtacagtacaacacaagcatgtacgtatgcatgagcccacgcgggcacatttacccgccgaaagggactttgtttgagtttttgaggacccacgacgacgaacctgacacacaacattcccataccatacatac

SEQ ID NO: 368456 - DNA, 148 bp, Zea mays
ctgctggtgtgggacccgctgctcgtgttcggcgagggcgaggacggcatcactaacatgtcctgcgcggcggccagggtcgggagcgcggacgtgttcaggctgctgctcgaccacgccttgtcgccgaggtgctcgacgagttgcc

SEQ ID NO: 368457 - DNA, 346 bp, Zea mays
ggaagcaagtgcaaagcagcattcttgtaggagagtgagtgagtttcttcgtaccgagctaagagaaacaaaagaacagcaagaaccggcagtgcaacataagactacgtagctgctaatcgaacctggcgtctactgtttcctcttccttttgcccaaaatcacagcgcctggggttcaatccaaactacttgcattgctatccaagtttttagttacaggatcggcgagctactcggattcctctcccacggcgttgcctgcgcgccacgcccggcgccgaacgtctcggctgcgccggccccggtcccggccatgccgccgatgggctggacgaacgcgggga

SEQ ID NO: 368458 - DNA, 296 bp, Zea mays
gaaacaatattttttattcatcccatatatacagataatttgatctatcatctaatgctgatcgctatgtgccacgcccacgctacaaagaaatgttacaacaattcttctcgctccattcagggcagagaactcgtttatgctataatgtttaaagaaaccacaaagtatacaacatcaaacaaatgcccaaatgacggaaatcttggatcctcaacctttgctacacaggtttctttcgttccaggttctaaaattcatcatcatcaagtggaaactcatcatctggcatcata

SEQ ID NO: 368459 - DNA, 119 bp, Zea mays
ataacaaaattccaactggaacggggtttcaaattaaagcaaattaactctggtactggaacattcgacttgaattggatccaaaaatcctcccgggattttcactggccacacaaagc

SEQ ID NO: 368460 - DNA, 198 bp, Zea mays
aaaaaaaagagagttgattgcaaagagaacctgtcttctatgaatgttcacgtacaacatcagcaattcgatcatctctatgtgttacttccggcctggagcagatgcaacgagcagctgctacaggcttgcaagctccttgcagcaactgaggggtggacccttccaagcaatcactgtacagtgtttgccggtgtg

SEQ ID NO: 368461 - DNA, 188 bp, Zea mays
gggacactcgttgcagcactaatattagggaaaacacattacgatgaaactacgagccgccaattgtgtgttttaagaaaaatgcacaaaatttgtacacaaaccaatcaaacaagcatatcaactagtaatggctgctaaaagacgaactggaaacgtaattgtgacagtgtgtgcctgttcgcccg

SEQ ID NO: 368462 - DNA, 348 bp, Zea mays
gccgcatccggcagttactgcgcgtgggcggcctgcaggtgcaggtacgccgcctggaacgacgaggccgtcgcaagcgccgcggcgacggcggtctcctgcccggacgccgccttcccctccccatccgcgctagggttagggttcggcgggtcgggcttcagcacgaccacccgctgccaggcaaggaccccatccgcccccggcgccggagagcgcgctaaccggtcggcgtactcgtcttcgtcctactcggcgaagaactcgatggtcttggtcttgaacgcgagcgcgaacttgtggagcatggctacgcccgccgccgcgcgctcggcgcgctctttgtct

SEQ ID NO: 368463 - DNA, 225 bp, Zea mays
ggggccctcaagttaagcatgtacgtaccatttattgaaacctcagtttgggtcactagggcctttattcctacctcttcttatctctcctttcttttccccaacacaacccattctaaagcctacatagttcacgtttaaatacccaatgcatgcatgatcgcatagaaaggtcctcaggaagatgacacgagaagtcgagaactatgtttcctactacattgg

SEQ ID NO: 368464 - DNA, 457 bp, Zea mays
aaaaaactcgtatcattgaaaacaaacttgagatcttacataattcaataatggcgtgaaaaggcaagctttttacatcattggtgacaagatacaaaagcacataatttagtggtccaacttgaccccccacaatattagtaatgctatacttgttttttttaaaaaaaaaggcttcaataacagcaggcatctaaatgccaattaatcccaggcagtactacagatcaacatctcgctcactaaagtcgtgcagaccaatctcaagtatacatgcataacagacttatgctgcataattgatcttctttccactcttttctgatttacagtttaagtatggttcctacagttttatacaaacaatgtgcaaaaataggaaaggcaaacgattacgctctttaagctgctaccaagagcctagtcccattcaacacatgcaagcacaatgtaatgc

SEQ ID NO: 368465 - DNA, 407 bp, Zea mays
acctcgaattgaagtagatacatacatcgaattgaagtagatacgtagacatctaaacaaggtcttagatggtcgattaatgattggcatacaaagtacattcacacatgtatctcgtggtcgtggcactacccttcagaataaataaatggaacatttgttccctggcccacgctttacgtttcgcagcagcagatcacggaattcttgtttaaaccttgtatattgaaatagatgttgccgcgccaaccattggattccagcttttgctgcgaaaccattggattctgcaaaaaagaaacattggatgccaaccagagcggtcacaccacaggcatgacgccggtttcgttcattcacgaagcaaacattccaatccaacctggccgtacagtttatcatgcacc

SEQ ID NO: 368466 - DNA, 205 bp, Zea mays
ccaacgcatcccaattggaatggatcaaacccccagggttaacattgttcattatttgaaatgacaactggaaaacagtttatatgttaaaaattaactaattaccaaggtcggggaccaaatgttgcactagcacaagggatgagaacaaacccccccacacaccaaattatcctgaaacaaatagatgaaagtttaaaagggt

SEQ ID NO: 368467 - DNA, 193 bp, Zea mays
gcgcataagcccaaaaaagggggcagtgttattgggttgaaaaattcaattgggaagtcacaatgtcctcaatgtcaaaccaaaaaataacctggggggctacggaataaatccagaaccccagggaaaagaactatttcgcaggacgtacgattattacatatcctggggggaaagccccaaaattagtttt

SEQ ID NO: 368468 - DNA, 88 bp, Zea mays
cagtaaaaaggggagcttgcctgcctgagtcatcattcaacagaagcaaaatcatgtaatactgagctcgcttacaaaatggtattcc

SEQ ID NO: 368469 - DNA, 300 bp, Zea mays
tatctgcatgacttgcaagcagctagctagtgtgacagatgtcctctacttgccaaaaaataacaaaggggttctcgttcttgaaagctgcatagatagcacctcaacttggccactaaaacaactaagtttttttatggacatgtctgatgtttttctcaataattgtgcaaattttcctttcataattttcgtcgtcggggggcaggaaccgggccggtgtacgtgctggcgcagagcacgctggacatgccggcggaccactggccgggccttctcgatggagccatggcagagagc

SEQ ID NO: 368470 - DNA, 474 bp, Zea mays
ataggcacgggacacattccaggtaaaagtacatttatgtccctggcatctatttataatcataacatgaatcattaaggactaaatagtcttttcccctttcggtcagcatcatatttggtcttcgtcaccatattaagtcgaagctctttggctatagcttcggcgaccattcttatcaccttcgggttacatcttcacactgtatgtctttgccatgagagaagacctttatgccgaagcccccttataataatcatatactatttcgaaaaggtaactctttcgggaacattattgaaaacatcatcaacaactttgtctactgttttatacaacatgtccagatgtgctagccaatcctgcagtagtgaatcttcatctggattgtactctttgggttctggcgaaagggcatctgtataagaaatatgtaatttcactctcaatgaaacataagaaaatatctgaagc

SEQ ID NO: 368471 - DNA, 302 bp, Zea mays
tttctaaccaatatagagatcatattctatgcatgttgcattgtctcactgggtatttaaccttgtgttgaacctttgttcattgatcattatacactattcaagtatgttcatcatactgatttttctgttcaacacttagcaaacttgttagacctttaaatgtgttgttatccaaatcaccaaagctcacaaaagggataaatgcactttcagcttttaaataaacaaagttttcatgatgtggttttaaatttactcttcgtgacatggagtgacttattttaagtaaagttttaaag

SEQ ID NO: 368472 - DNA, 273 bp, Zea mays
tccttatattccctcaacctccaatacacgggggggtttaatgaaaaatgggggggtgacctacatcagacgtgatcctatcggtccaaacgaatacctctctcctttgtgatcaatagtaatctataattgtctcactaactctataaagagacacactggattatcgaccaacgagtgtttcctgagtaccagttaaatacttcctatatctcaatgccacaagaccgtacattagtacaaaccacttacaaaaccctaagaacctacaag

SEQ ID NO: 368473 - DNA, 231 bp, Zea mays
tttccacgcgtccgcccacgcgtccgtgagttgtttgcggggatcactgatgagactgagcccgttgcgcagacaaataccacggaggaattggaggagtttgatgtgtttggcaatggaggtggcttggagcttaatatttgtacttgtgtatgatgtatcacattttggttttcgtaattttcatgattttgtcttacttttttttagttcacttttttttatttattt

SEQ ID NO: 368474 - DNA, 89 bp, Zea mays
ttgatgcgacgccgcggcacctcttctccggcgagtttaaatggcaaccgtgccaggggatctgatctggcaggttgtgaggaagaaca

SEQ ID NO: 368475 - DNA, 62 bp, Zea mays
tctatacatcccctcaacctccactaccgggggggtttttataaaaattcaggggtctacct

SEQ ID NO: 368476 - DNA, 193 bp, Zea mays
tttatacatcccctcaacctccaataccccggggggttttatgaaaaaacagggggttaccaacaccaaccgtgagcacatgggccccaacgaatacctcttccccttgtgcgcactagtaatccaagattgtcacactatctctatcaatagaccctctggtttatggactaacgttgatatcctatgtacc

SEQ ID NO: 368477 - DNA, 208 bp, Zea mays
tttcttccacacatccgctcaacctccaatggagggttatattgcatggagggggagaacacgacctacatcaaatgtgttcctatgggtcccaacgattacctcatttctttgtgagaactagtaatcgataattttctcactatctctatctagggacacgcttgtttatgttccaacgttaatattctagagaccatgatatatt

SEQ ID NO: 368478 - DNA, 120 bp, Zea mays
ttccacacatcccctcaacctccaatggggggttttattgaatgtaggggcagaaaacaacctacaccatacttgatccttttagtacaaaagaaaacctctattccttatactaactag

SEQ ID NO: 368479 - DNA, 188 bp, Zea mays
cagcgctggtgtgacgaagcgggcgagggggtctggctgactattggcggaaccgcggaagaagcgcgcgtgaatctcctggatttacagactcgagggggagctgagaaaagagatgggttggggaatatcaaggttgattggactgaaggctgctgggctgctttatgaggcgtgctttttccaag

SEQ ID NO: 368480 - DNA, 221 bp, Zea mays
taaatggacagatagttcgggcacatgacgaggccgttctcggtgcacccgccgcggcagcgcccgccgccgtctccccccgtcttccggctgccgtcgcaggcgccgcacaccacgaacccgaccccggtgcacgcgccgcacctgcttctcgccccggcctcttcgcacggcagcagcggggcgaggcggccctgctcgtggagcgcgagcacctggcc

SEQ ID NO: 368481 - DNA, 364 bp, Zea mays
ttcctcgcgtccgcccacgcgtccgcccacgcgggggtttgctcttcttgctgcccactttccccacaacaaccatcgccaaaccaaaacccacacgcatccagaggcaaagctggacaagaaaagcgccaggctgacagagagtccgttcctattctgcctggcgccatgatcatcgagaccctgaaagcgcgcatcctgcgcgtgctgaagccggcgacccgcccgccgccggcggcgcgggcgtggtgctgtacacgacgacgctgcgcggcgtgcggcgcacgttcgaggaccgcaacggcgtgcgcgcgctgctggagagcctgggcgcgccgttccaggagcgcgacgtgtccatgga

SEQ ID NO: 368482 - DNA, 194 bp, Zea mays
aggcgcaaacggcttaacggtgtaaattaattaatctaggcggactggccatgagatcttaatagtagcatgctagttgtaaaagtagcagcgctggtcatgactaaacaaacattttcacacacacacgcaccattagccaaagctgcataaaggaaggcgtacagctacagcctagttcatggacccacgcg

SEQ ID NO: 368483 - DNA, 62 bp, Zea mays
ttgcttacatgccctcaacctccaatacagggggggtttgaatgaagggggaggggtttacc

SEQ ID NO: 368484 - DNA, 165 bp, Zea mays
tatcaaacatacaccaaacctccaatggagggttattttgaatggagggggggaacacaaccttcaccactccttatcatttcggtccaaacgattaccactgtcccatatgttaatgagtaatcattgtttatcacactatctttatcaaaccacctacttgat

SEQ ID NO: 368485 - DNA, 74 bp, Zea mays
ttccaaacattccctcaatcgccaagggagggttatatttaatggaggggcggaacaaaacctacatcaatcct

SEQ ID NO: 368486 - DNA, 334 bp, Zea mays
gggaggaatcatgaattacatacaggcatgcatgtctaccgtcttcctcagcacagctacaagccatacgatgaatcaatcgaattcgctggcatatgatatgatacgatcgatatgcctcagctgcatgcgtgcgctcactttcatggactgtctctcgtcatctgttctctcccagtcccagactaccagagcccggacaccatggccaggacggcagccgccgtcaccaggctccgccgccgccggtgtctgctcttcacattgtacactgatgcggcagacacggtgtagtaccccggtgcccggcccgacgccgtcggcgccgccgggt

SEQ ID NO: 368487 - DNA, 115 bp, Zea mays
tatcacacatccccccaacctccaagggggggtttttttaaacgcaggggccgtcaacaaccatcctaaaccctgttcctaccggtcctaaccatttcctcatcctattcttatc

SEQ ID NO: 368488 - DNA, 77 bp, Zea mays
ttccacacattcacccaacctccaagagggggttttattgcacggaggggcatatcacaaccttcatcaacttttat

SEQ ID NO: 368489 - DNA, 400 bp, Zea mays
atagggggacatgcttccggttgcaagagtccagctgattaccgaggtccaactagccagaaactggttgtttctgcttcaactaaacaagacaattaatcaacttcgcagctcatgcagtagagcgtgcaaagaattttacaaggactgccaagaacgataggcttacaacttcacatacccttacaaggatgatgaccagactgaaacctgcacccttgccaggattgcttatgagcaaagaataagctccccttttgcagcactcgtcatttcaattctggtttccgtttgcctcagctcattgaaacttacatcagtggcattgcttgttctgcctctttcttcaccaattgcgttgctagcttccgttacgttctcagaggagctaagccactct

SEQ ID NO: 368490 - DNA, 211 bp, Zea mays
ttccttacatccgctcaacccccactacagggggggtttttttgaaagggcagggggttacctacaccaaacgtgttcccatcggccccaacgaatagctctcctccatctgctaacgagttatccaaatttgtcacactatctcaatcaagctgccacacatgtttacctaccatcgctaatactctgtataacacatacttactcctta

SEQ ID NO: 368491 - DNA, 249 bp, Zea mays
tctgtcacacattcgctcagcctccaataggggtttataatgcatggaggggcagaccacgacctatatcatacgatatcatatgggtcccaacgaatgcctctcctcattatgctaacttttaattaataattatctcactatctctatcaatgtgacacacttgattatcgaacaaagctaattaacatgtgtatccattaaattattccttttatctaaaattattttcaatcaaattattttttt

SEQ ID NO: 368492 - DNA, 196 bp, Zea mays
tgggatgaggcatgggcaaggaaagacggagtggccatttggagccacctatgagggtgagtattctggtggctatgtatatggtgaaggtacctataagggtccagataaaatcatttacaagggacgatggaagttgaattacatgcatggacttggacatcagacatatccaaatggagacatgtttgtaggt

SEQ ID NO: 368493 - DNA, 85 bp, Zea mays
ttgcttacccgcgcgcaaccaccactacaggggggggttttttaaaaaatgcggcggtttcacaaatcatatgtttttcccttcc

SEQ ID NO: 368494 - DNA, 356 bp, Zea mays
tgctttcaaccggcaaggctgccactcatggtgggcaggatggaatgggcaggcggaatgctaccacaggtgtgcaccatgctgttcaaggccatactgcaacacattggacagatgtgagagccaatcctaatggcccaactgatgccattgccattccagcttacaggtcaacacagactaatgatatatcactacatgatgatcatgacgacgacgatgatcagccttattctgctaacaggacatcatcatttggacgcaagaccaagaggccatcccacctcagtggatacaatgggagtgatgctttggtaagtgacaaatccaacaggatgaaggttaagtgccccaaa

SEQ ID NO: 368495 - DNA, 172 bp, Zea mays
tcgtgcacgcattggctcaaccgccactgggggtttataaggtaaggaggggctgatgtcttccttcataaagtgttctcctttgcgtccaaatgattagatctatccattgtgatgactactcatcattgtttattacactatctctatccagtgacacactggattacgg

SEQ ID NO: 368496 - DNA, 456 bp, Zea mays
  unsure (1)..(456): unsure at all n locations
tcnctgcagagggagaaagaaaacagatccaaagggaggatggcaaaggctccccgcaaacagcatagtatttccctacaaagctcagttggtcctagtgtgaataagcgagcagctccttctagtggagaagttacaaagaaaggttcttctggttccgccatcacaggtagaaggaagaattgttgactatgctgaatcttcaattccattgatgggtgatacaggcctccatgaacctcatagggccaccctcaaccaatgccgaaactcatacaaactgctttggccatcagcctatccagatccaggcattctctgacttggtcacctcgagtcctgcaaagcttgggaggggcttatttgatggccgccataaagggccatctattagaacttcattaacatggtttcctgggataattcacaaataaaccccccggtcattgccttaac

SEQ ID NO: 368497 - DNA, 258 bp, Zea mays
ttcctttacttatgccccccctagcttgccggatgagctctctttaagctgggcgtggttactctagcttgcactttctggttccgagccaccaggcgacaggtccaggcacacccgacacaccgactcccactactcgattcctctccccagcaacttctgcgctgcaggactacccaggaacacctgcgactcctccatcaaggaccccttcattccctcaagagcctccaacctacatgttggccaaatggctcc

SEQ ID NO: 368498 - DNA, 111 bp, Zea mays
tctttggaagcgcgtcaggcctcaggggtggtgatgttagaatgggggctagtcagggcaagccaccacatggatcctatggtcactcttttctgaagcgttcatgaaaag

SEQ ID NO: 368499 - DNA, 169 bp, Zea mays
agggagtatatatcatgtgggtgtatataaagtagatggagggaccatacgtccctttgcaagcggtaagcaatacaatcacgaggggaaacaaagaacaaaaaaaaggatgacgctgaaagctttgtttctcttaacgagttcacatgatccatacagctagatcctg

SEQ ID NO: 368500 - DNA, 196 bp, Zea mays
gaacgccacaaagaactggtccatgtattgcggtagagtacatgtccacaatatctcagaatcaaatcttatgaaacttacataatctaaaattaatcttctaattaaaacctgatacagttagcatttacatgaaacaccttaacaaaacatcaaattaaccaacaaattgtggaggcattccactaataacact

SEQ ID NO: 368501 - DNA, 396 bp, Zea mays
ccttctgatttctccatagtacacaaataatgtatttacacatctgtcgtcattaattgatggcatagggcatacagacatatatatatctctcttttcatttctccttctttttgaaggatgtgtactgagatggtactgctactatatgtatatatatacctactactactacggctacatgcaataccacacaggaggcacacacacccaagcctcttgtagcactcatctatatatccatcctgttatcgtcgaggcatttcgatccgcatcgctctccataacaataatatatatataatcttcctataaaacataatcaactaattgaacgaattccacatctgcgtgaagccactctcagctaagtactcaaacccatcctgagaaaaa

SEQ ID NO: 368502 - DNA, 323 bp, Zea mays
ggaaggaacaggcttgtaataacattcgacgagtacagagagccagaatttttgtgatgcccaattatgactagaaacaaaatacctacgtttgataacagagtacatgtacaagctgattttgccgaaacacgaaaggttttagcattcttccgttaagaaaggagcgtcctgttgggagtagaggaactcctgtagctccaagtacactgtattaacggtttctggggcagatcaaatgtgttcttcctgatgtaaggtaattcgacgagcttgctcaaaccaacagccttatgtagcagctacatgccaaaacgcttacc

SEQ ID NO: 368503 - DNA, 285 bp, Zea mays
atctacaaggatgctgagctcaataatccaaataatgataatacaaagtagtaggtcaaatccatagacgacaaatttcgagtaatttttggctaaaagtccgacggatcagatggcgctccaatttccatctcagctaccaaacacacgctaaaccaataagtctctgctacacgctacggtgtcccaaggcgcggccatgaacggattcatgtaactacctaaagacctcggcctggcgccggcggggtcattgtcgtcgtcgtcgaacaccacccactcttt

SEQ ID NO: 368504 - DNA, 224 bp, Zea mays
ggggataaactcccttctaccaactttataggccctatgctcccctgtacattaatttttcgtttcgggacgggtggtgaccagccccttttccgaacccaaatgaaaataacaagatccagaccacttaggctttatttgaattataccaaccaaggggggggcaatctactatttccaggcaagagaacccttggcattagctactggttggggaccccccc

SEQ ID NO: 368505 - DNA, 119 bp, Zea mays
gcctcgtttttcgccttgcgggacgcgtagcggatggggttgtcgaaccggcggatcttgcgcttctcacggtaccgaatcagccgcgcctaccgctcctcccctctgcttcaccacca

SEQ ID NO: 368506 - DNA, 232 bp, Zea mays
gggaaaaagaaccgccattcaaactataataactggggggggcatttatgttttttttacaagttacatggggccatccccccgccttttgaaacaactcccccccggaccaagggttacatttaagcttttcctgggaagcaccccccgggatgaacaagcgctaattctggggttatgatttttagctggggggcaatcctgttttgttgctcaaccggggctccagttt

SEQ ID NO: 368507 - DNA, 258 bp, Zea mays
ttcttttttttttttttttttttttcatacattagggaaaaaacaaaccaaaggttacatcaacttttttttcatgaaaaagcatgtggaaatgagagatgcgtatcattatattagaagcggtacatcatagtaagagagcagttgcacaatttctttgaacttggcttcttggtcgtgggagtacatgaaagcctactggaaatggtttcaaccctttttctacaagattaccattaacttttcctcaaaacggga

SEQ ID NO: 368508 - DNA, 301 bp, Zea mays
aaaaaacaaaacatgggggaacattattacacaacggggtttgactggtgaaaaattttttggtgaagaccaacatacaataagacccaggggccattcttgaggaggacacatcccatccacagatttagacacgaacatgcttaagcacacagggcaaaagaaaacccttctttttaagcctttttgggggacttggcgccctttttgggggacttgggcttcttggtgcccccggtggccggctttttcgccgcctttttgggcaagaacacggagtggattttggggaggacccccc

SEQ ID NO: 368509 - DNA, 265 bp, Zea mays
atcacattagtccttccaaactttgtatacattcttagtaagaaatcaaacaaaattagttttgctttacatagcacaaacaagcaaactataaaaagaaaaggcagatgcaaatgagagaagaaaggcttcaaacggtacatgcccagagggaccaaactatgacattcctaaaattactggcgggggagcttctgcccttcatctggtcattggtaaatccaccctacaccaagttcaacagataactagcttggatttcttt

SEQ ID NO: 368510 - DNA, 258 bp, Zea mays
ggggcaaaaaacatatattggacatccccctttatgaaaacccgcccttccccatagatggagaacattttttttgcaatatgcaaaggggcacgggataataactgggggtggcctaattattgcaaaaaagcatgaaaatccctttatcaaggaaaagggaaaccagaaggggtgaaactgggccttcggaaaaaaaaaagccttcatgggagaggaacacaaatggggaaaaagggggaagcccccatagttttt

SEQ ID NO: 368511 - DNA, 317 bp, Zea mays
ccaaaaagggggctactttacctggataggggattcacaaaacttgtctgcacggagctgatgtcgctaaatgaaccgcgcatgagaaaaagaatcctcttcaatgaatgaaggaattacattgaacacccaataataacacaggaaaaaggggggtactacaggggggggcggcacagttacaagaccaaaggaatttacaacggcccagccgcccgtcagagaagaaccgagctgcgcagcacgatctggccgtcctcgtccttgtcgaacactcgctcgatcaggtcgttccagctcatgcgctgcctgggccc

SEQ ID NO: 368512 - DNA, 250 bp, Zea mays
acctgtggtttctaagagagacggcgcaaaggggggcgaggtagacgacagcctactgatgtccaaaaaataaaaagagtcacaaagcgaggtcgagagcctacttgaaggcgccgaatataaaaaaaaaatttccaaataaaaaagtaggagccctgcgagcaatatatataataaaagataaagaatacatcataccgttcgatgacggcaaggcgctgaaaaatataaaatttaacggggaagagcc

SEQ ID NO: 368513 - DNA, 504 bp, Zea mays
tttagttttaatcattctatgttgtgccaaccgccagcaactaataatcagagctgggtcatatcatcatatcatagtagattgtatagctttcttccctgtgcatgcttactggttactagatgaaaaaggtcgtgttacgttatggcgcactcctctcctttgaataggacatgctttcacactctcaattcggcatatccttctagagactagctgtgagttgggtcctaaatgtttcttccatgttcaattcgaatggcattgttgtgttaattagccgtcctgttttgtatttttttcctacaagttatagtggttacattaatgactaaatcaagatcttgacccactttattgatgacacccttttttcttcttattgcttctcctatcgtctctgagtttgtcattccattcaaacacgaaatttgtgtcagtatagatgccatggaaattttggtttagcttgagtattttgtagatacttcattcttgagtatt

SEQ ID NO: 368514 - DNA, 562 bp, Zea mays
tcgttcacctcaccttctcgccccgcgtagcgtctgtgacccggatgctacgctgcgtctccactactccgcctcccgccctgccgtccatgtcacgcctcggctccttcctttcgcctcccgactcctgcctgctgccccttgtcctcttccccacctcctccggaatctggccgcgcacctactcgtcgccctctcgttttcccgtctccgctttctttatcctgcgggcggagcgggtagggtggggcggtcgttgctctcggatcaagagaaagggaggaaaaaaaaacagcgctttctttctgtggccggcggttcgcccgtcgctcactggctgaagcggctgcacccgcgccctcttgctgcgtggccactggccaagcgggacacggaactcgagctccgtttggggattccggatcacttcgaggctaaagggattctgatcatcacttaagctcaagatcatgagttggttaaacaaaatttttaagggttcagtaaacagagtttcaggggtcactatgatggagactgggcatgaggtcattcatctgat

SEQ ID NO: 368515 - DNA, 452 bp, Zea mays
ttcactcgtacgcccacgcgtccgcccacggggcggaccacgcgtacgaaccggagcaaatcttcttcgggaccggcagcgcccaaatccgggaatccgctgctccgaatggactcaggttacaatccccggacggtggaggaggtggtccggctcttgatgactcgttatgctctgttatacctgagctgctttttatatgatgctgctgttttattctactacctgttctatttgtcaattgtaaaacgcgtgaaccaacgtgttcattcgacggctgcggacgactgtgcgcgggcaaattcccgtcgtgcggtggggcggtgctgacggagcttcatggtcgctgacccctgttcccggcttggcgtgggctgactgggccccatccccggcctgcctgggcggcgctgtccaacctgcagttcctgaccgtctcccacaccaacgtg

SEQ ID NO: 368516 - DNA, 388 bp, Zea mays
tttttgtcaaaactcaagctctgacagaggatgtaattgctggatggcgcccaaaagtcatgggttaaattcatttctaaagttagacgttaaggtaaactgcataataagtgcatatatccccttttaatagaatgaataaatttggcatgcttagatttccttggttcgctattttgtgtctatggaaataatgatgacgggatacacacctcatgattacctagagaactggaaacatgggaggcttaagcttgtcgttggttaataagatgcaaaagtatatgtattatgtatttccaatgtatgtataactgcatttgtataaaaatacaaatacatttataaagaataatgaaatggttagcgagccattgtgaggaattct

SEQ ID NO: 368517 - DNA, 450 bp, Zea mays
atcaacgatacatactaggggattacaagaacattaaagctagggtctgagttaacagctagcaaggtagactacaatgcttctcttttcccagcccaagttggcttcagcagtttctaatgcgatcccttttccttcttcctcttggcctgtctcgccaagaaaatagagagtcctgtaaaggcaaacttcttcctcttccctgggaatttcttctgagcagctgcatcgctgctatacacgactgcatgcctgcggttcaggatatgtccgagcgacatagtagaagcttcgctttcgtcgtcccagacacttttgtcatacccatctggtcccattagcttcatactcagtatctgccctatcgacaacgttggtttcaaaggaccctttgaaacaccgacgatatccatattctgagaatctctggaacggggagctggatgtttg

SEQ ID NO: 368518 - DNA, 444 bp, Zea mays
  unsure (1)..(444): unsure at all n locations
tctcacgcgtccgaccgaaccgaaccgaaccccgccgtgctcgcttccactgccttcgattcctttggctctctctgtcgttggtcgtcctcgcccaccccaaccaaaaccccacggacggaacccaagaaagaagagaggggcacgagtccccatgaacgacgccggcgaggccgaggcgcaagaactcgccccacccggcgcctccgccgccgccggcctgcaaggcagggnggaaggtcgacacctcgacgcccttcaagtcggtgcgcgaggccgtcgaccgcttcggcggcagcgccgcctggagctccgacctcatcaagcgtatgttcgcgctgcccccgagcccaaaggtagccaatctgtgccctcgcccggcgccgccgccccaaatgttgtgtcttggaaacctacctctggtagaaacttgcgtgtggtgtg

SEQ ID NO: 368519 - DNA, 230 bp, Zea mays
gaaggggggggcaacatcctttattttgctccggagaacacaaagcattcacgaagggcagcaggagacaccaaaaacgaaggggagcaggcttgccacaggtttttttttatctacataaacgaaaatatgccattatctttcggggggaacaggctatactcctggacatctgcttggcccctcgagcaaagctgagcttgcacctgagccaggggggtccttggggc

SEQ ID NO: 368520 - DNA, 490 bp, Zea mays
tttcttctggcggcgctctcttcctgcatcgcccggccgtcctctccctctcgcgtctttctctctgcgcagcgccgtggcttcctcctcccatctccctggtgtttctccaagctccaactcggacctttctccctcgtgctcagcttgaagctccctgcccacgccgtgtccctatttttctttccctctgcgcgtcctcccacgcccagccgaagcgtgaccctggtcccagcatcaagctcgtcgcgcgccatggaactccctgcgtcgagctcagtccctgctctagcctcgcttcggtgtttccccggctcggatctccttcgccggcgcgcatccccctctctgcttgctgcatccggccgagcgttcctgcgcgccatgattttctgctcgacgcccctgctctctgcacatcacagccatggccgtcgtgtgcccagccgctctagcctttgttgaaattttgcggcgcccagctcctaat

SEQ ID NO: 368521 - DNA, 378 bp, Zea mays
aacaaggatcccacactgtcttgcatgaaattaacagacaacagatcacaggatgcagtagtggaaatgggtcgtcacaaactgtactgtttgcgagggcatctaacataccattcaattgatacatacagccaaaaattatctaccatattagcatttataagcacaaaacgggatatgcctttggctactaactgtttgtatgatccaagcctaccggcaacctgctggcacctttacatcaggaaagacatcagttccaaagaatatgcactctaggcaatttaaattacctagagcacaaagaattggtctaagaaatcattgaaaagaaaaggatataaaccatgcaccactatttgctgttcaggggtttat

SEQ ID NO: 368522 - DNA, 426 bp, Zea mays
attgaattaactacatacatatatattcaataagagttctcaagggatacatatgaaaacatattctgttcatttgaatctccctgcactgggaagaggtgacctggtaacaaaggtacacaagggcgcagcaatatggggacaatttataggacctaataaaaaacttatatgacaaacacatacatcacataaatgaattacagtgatgtgtttataaatgacataatgctacacctgacaaacctaagctgagaaaaaaaaaatcttatggacaattcccctatcctgcactagaaatgtttccggaggatgatctcagcaactgatggtggttaggagcaatcgaattgggcatgccagagttgaacatgtttgatgattgtggtgatggttgagtctggatggctgaaagtggtaggcgag

SEQ ID NO: 368523 - DNA, 102 bp, Zea mays
atccgtcgatcagtatggtgaagatgcccttaaggaaggaatgggtggtggtgggcgccattctcacccatctgacatttcctcataattctttgaaccctc

SEQ ID NO: 368524 - DNA, 237 bp, Zea mays
ctcactcgtccgccgaattcccaggcaggcaggtcggtgaggagggcaggaagaccgaataccgagccgtgcgggggctcgggacgggaacgggacaggaccccaaaatctcagatcctttctgcccgtctgaccatgcctgtcgacgcctgggttttgtacgttacaactactatcgtgctggtgcagttccagggtgatctttttcacccaatgtgtccaacctgcccaagggcg

SEQ ID NO: 368525 - DNA, 280 bp, Zea mays
tttattcgtccgcctcgacaaacgccagcggggactcttgaccgagcctggcagatcttcacttacgcaggccgcccaccgatcgaccttcacgccagagtcggtctcattccgatggcgtcgcgcgcgcttgctctagaggtgtggagctgaagctggatttccacattagttcacatgactctggccgtactccaatttgctcaccctggctgggccctttgctgcctcgagcgtggtattcagcctggtggccacattattgggagatttattttac

SEQ ID NO: 368526 - DNA, 296 bp, Zea mays
ttaattcgtccgccaagacaaacgcccgcggggacggttgaccaagcctggcggatcttaacttacgcaggccgcccaccaagtcgaccttagcgataagactgggactctaacgaaggcggcgcgcgcgcatgctaaagaatagagggacagctgaaattgtcgagcaggctgtgaatgctcgtaggttattctcagatgaattgggatcaattagcacgggggaattaatgggcatgggtgaatcaaagatcaagcatgtgacaggcataaaagcacattattcgctcaaaaac

SEQ ID NO: 368527 - DNA, 314 bp, Zea mays
ggggttggggagccttttaaaggaggatacaaaagggccttggcttaaacaggatacataggggcctcatttcaaaccggatgagggacccccttggctacaaacttggcagggggccccaattttttgaacttttacaaaactacaggagcatttattccccatgaggtccccccaactcataaaaaaaaaaaaaggtagatggcaaaaaattgcaccggacaacccatttgaggatatcatcaatgggacgctttattccaaagctgacgattgggttggcaatagacatggtatacacccaaaggcaggtt

SEQ ID NO: 368528 - DNA, 133 bp, Zea mays
tcgttcgtcctcgatctcgtctcctcctgggtacccaatccctcgcggtgggcgagggtggaagcgagtgacgatggcggcgctggaggcggcgagggagtgggtggtttttgtctttcctcgtcttttattt

SEQ ID NO: 368529 - DNA, 538 bp, Zea mays
  unsure (1)..(538): unsure at all n locations
tccacgcgtccggcaatttacatagtgcaaaacattcatcacaatggacgtggatcggtcgccggagaagggctcagaactcggcggtgttgccgagctcgcgctgccggcgcctgaacgacatgagcccgtccgacacgatgctcccgccgcagtcctcgcactcggcgctgctgccggtcaggtcgttgttatactcggtgccgccgtcgtcgttgtcgaggtcgccccgcatggcgcggagggtcttccgagccatctcgcgccggacgccgccgccctcgtcggccaccacgcgccggagcgcccggtccgcgccggccgcgcgcgccaggccgcggaaccggaggctgccacggctcatcgcgtacatcgccgacacgcaccactcctncaggcccgccgccgccgccgctgtgccgccgtcggagaggaggatggcggagacggacgccacggctcccgcgttcatgagcgcgttgcgggcctcggcgcaggctggcacgttgcaggccacctgagcgcaagccttccgacg

SEQ ID NO: 368530 - DNA, 329 bp, Zea mays
agaggcgaagtcaaccaaccatgtatgcagtatgcacgtacgtagcccaggatacaatagtcagagtctcacggatgctgctcaattcaagtgggtagcgaccactaagcacaatcctccacatatacggactagctcatgtgtaacaacgggcgcacacatccatcacacatgagagctttccggaggccggtcgccggcggcggcggcgacgggtacaggatgcgacggagacgcacgcgcggtcgctcttggccgcaatcgacgcacagaacccgcggtcggaccagcgacgggcatctcacaccaaatgatgagaaaaggggggg

SEQ ID NO: 368531 - DNA, 529 bp, Zea mays
gcagctttgagctcagtagcaaacaagaagcagcaagatagtgatcctccatgggaaacaccctcggctttggcgtaggtgtcggcctcggcctcgacctcgccgtcggcgccgctgctctgatccaggttcgaatccacatcggtcttaacaaagtactgccagtgttcttaatttccttccgctttcgcatcgcgccatattgcaataatttacattgaaaagatgattgctaaactcaaaattttatcatgtggcttacgaatttctatattagttgatctgattgagtttccatcgcatccagggttgagatttttaaccctattgatccctatttcagtagtcctttgtatgtgcttgttcagacaccgctggctgcagactgcagtggtgattttaactcaaagtgtcgccgttaaatttagtaaaatgttctgtccttaacatagagctccactagaaagaatgtcatttaattcacagtacttttttttacctttctaggatgaaggttatgatttctttg

SEQ ID NO: 368532 - DNA, 426 bp, Zea mays
tttggttgacgcccaccaaccaaaaaaaaagggagggcccacgcctatcctgcgggccggagctctccactctcgctccaacgccgacggagaagccgcagctctgctccctcgctctctcttccgggagcgcgaggctctattgcattcgggcccgctcgggtgacaacggggctgctgggcaacctggcaaaccaaggaccttgaagctggactgagccggagaagccaaaatgaattacgagaaaattttgatcctttcatttgttggacattggatcaactggtgctgttatacatagcatgcagagctaagtgaagagatgtgcctctatacggcagccacagaaatcaagggaaacgacaccgttgtaaatttcacattaatattgcgaagtaacaactcaggggctatgagaaggaata

SEQ ID NO: 368533 - DNA, 306 bp, Zea mays
ggggggcaaaactgagtcttttcaggccataaaaattaaacagggctgcccagggaaaacccaaacacgatgctggcaaggatgaagcacaagcatggctccattggttgattgggggaactaaaaacatgatcgggagggaactgaaacaagcaatggacaacctttgctggttcaagcattggtgggggataaacataagggtagacagctggggctgaagcaacggggggccctagggtttcgccaatagctggaccaaggcccttggctgagacaggatcagcagaggcaggggttttccct

SEQ ID NO: 368534 - DNA, 388 bp, Zea mays
gaaaacacctttctttatagcaaatattaggtatcaagccgcattcgagtgtagacggtagagtcgacattgccgcggcaaaaaataactatgtgaagtccctgctgttaccctataccaagatgtaaagggtacttcagtcacttacactccattcactatttagaggctgacaacggggaggtccagatcgtcagatccacgatccagggatgaaaaaaaaaggaaaagacgaactatacaaaggaggggaaattggtgtaggtgattatgaggtccccttctcgttctttgttgtccggagtagctcttttgccattgtggagaatgactgggcgccgctcgccatatcggcagctcgaaggttaatgccctccaactttttcat

SEQ ID NO: 368535 - DNA, 377 bp, Zea mays
ttcctttttttttttttttttttttttgcacatgcacgcagcgtgccattttacatatttgtataggacggaaacatccttttcatacatgaggccgagcggatccataccaaatacacacagacagtgcatctgacacttaagcagacaggacacgtacacagcgctgtcgatgcgtacacgcttaactgcttaagatcaaccggccgggtaactagaccaggcacgggggcgtacgtgcttttggctatagctaaacgcctaaaccaggcaccgggggccttaggtccttacacacaccacgatcgggaagcacgccggcgagggagagcagagcagagtatagaaaaccataccgggcggcttactgactccac

SEQ ID NO: 368536 - DNA, 290 bp, Zea mays
ttccttttttttttttttttttgggcattcttatatattgtgagaagaatagaacgagggtgtcggtcctccactgttacacagttcatagcctctaaagaataagaaaacaagaaccaaggctggggtggacacaaatttcatgccggtttgttcaaacaatactaacagagtctataatatacatataatcccatcatctagaggcagctatagaattgatctgtatggcccaagtgggctcgaaatgaccttttgatttaaaggaaaccgctcaagagatccactac

SEQ ID NO: 368537 - DNA, 235 bp, Zea mays
ggggccaaaccggggaaaaccccaaggaaaagggcttaaccccaaaaccaggggggtttccccaacatgggccccaaagcaattggcccaaccggggggggaaaaaagggaaacaatttttaaccattaggggggaaggcaataaaccggggcggatttttccaaaaatataatttaaaattgggagggaaaaaaaaagggggggcccttttaaaaaagggggatcccggggggg

SEQ ID NO: 368538 - DNA, 94 bp, Zea mays
agcaccagatgagtttattataaaaaatactatccaataatatattttagttcttgtacgtattgaaaatcccacgcgtgcgcccacgcgtccg

SEQ ID NO: 368539 - DNA, 325 bp, Zea mays
atcagctcaacaataacagaagtgatgatacagtgtttacatgtgacaaaattttgcgcagcgacaaggtatgacaaactggcgcagggagtccactacattactagagaacaaaagaaaatacaccattgccacaatccccgactctaaagtctacgtgcagctttcactttgtgctgcaatatcttgtagcccctttcaaccgttgacatgcttgaggacggatgttttgcattacttgagaaaaaaaaacaaaaacaatggtttgcttgtcacgagcgccaaaggccgatgttagcaagaatcatgtgccatatatatgtct

SEQ ID NO: 368540 - DNA, 167 bp, Zea mays
attgaggacaagccaaatccccattttattataatcggatatgtcccccaaacagccacaaagcaattcatggcacttgcattatacaatgcctccacataactgtagatactatatgccgttggaatcaagggcgctattcatcacgccaacctgactcgagggtt

SEQ ID NO: 368541 - DNA, 155 bp, Zea mays
tccttttttttttttttttttttttttttttaaactacagggacagagacctaaatatgacaaggtcaggcagggaagcaagacctcacatgaactaaatgagccaaggggggcaaagaatgccaaaacccttgggggacaaacactaagaaaca

SEQ ID NO: 368542 - DNA, 315 bp, Zea mays
ttccttttttttttttttgataaatataagtaccccatgatggggtacttgcaagttccagggggaattcacaaactgatagacataagtgtgcctctgctgcgtagcagactaacaacaagtagctgtagcaccattgcaccaactagccacaacccacatatgttatatcaggctagcagcaactagtgaaaagtggagtagcaggagcataggagtttcttgacaaagctacacccttaacatacaataaaatatgccacacgttatagccaaaatattacaaaagctacaggcatacaaccaactagacca

SEQ ID NO: 368543 - DNA, 191 bp, Zea mays
ccctcctttttttttttttttttttttttttttttttttttttttttcaagggcagggcagcagctgtattcatccgtaaaggttattaccgggaatgtatcaatgctgaaagagatgcaacacagatagaggggcagcagcagggaacactttgagcagttacgacccacgcgtccgcccacgcgtccgg

SEQ ID NO: 368544 - DNA, 291 bp, Zea mays
gggggggattcacaacgataattattgaccttcctcccgaccagtatccatttccgaaacagcaagggagggcacaaattggatatataattacatggatcaccaacaaactatccagatcctttttaccaggaactatgcagaaaacataaaccaaagtctttgttgcttggcatctaaaattctgatctatgatcacagaaggaataatcttgggtatggacaactggtcagttcgatcaactcttatggataccttcttccatttgatatgaaaatgctcggggaaaa

SEQ ID NO: 368545 - DNA, 312 bp, Zea mays
gctccttttttttttttttttttttttagcacaacataggggcacattaaacatcttagacacaatcacataacaatatttaaatccatagtctcatcaattacattataaaagtctcattcatagggataataagacacatcttatccagtcctaataagaggcagtttcacatacatcgaccgaatgggggtctcatgtttcaaaacacaaggttatgaaagcttacgggcgccgatcaccatcaggttacagtgaccagtgagggtcgataccttcactagtgaagagggtttcaacaaagtgtaaccc

SEQ ID NO: 368546 - DNA, 533 bp, Zea mays
gtgacttagtttgtcatggcggctcagatccagactcctccggtgtgggcgggcgctagttcccccggcggcgcggccctagcagcggccaccccggtgggcacggcttgtgcgcggccgtcctgacctgtgcgcgggcgcagcgtggccctcgacggcgcgcttgcaagcgccctaccggtgcgtgggcgggcagccacgatggcgcgcgggcgaagaccctcggcggcgcggcgggcccggctctgatccggtctcgtctggcgggcgcggccctgccccggcggctcccgtgaccctagtgcatggcaacggacaatgggtattgatgaagcaaatgtcatggttgaacaaccccaatgatcagctatgagaagaaatgacacgtatctttgacacaccacataggagccagacaaagaacatactaatgaaaagatcgatgaatgatattgatatggcctggggtgttttgaaaatgttggtaggttctgttatatggatttttggatgcaagattgcttggttttttt

SEQ ID NO: 368547 - DNA, 467 bp, Zea mays
gccggttattgttttccaccacgacgaggtgtgggagctgcccgccggcgccgaggtgctgactctgacggtccagacccacgtctagatgatccgtctgagggaccgcgccatgatcctgcacaggcaccggatgtacagcaaggacatgctgatgagcatcgctgaccggctgctccgggataaccacatactggactgctacgagaacgtggacgaggcgagcttccacgtgcgtctgcgcgtacaaggagctgtggaagaaggtgtgcaggggcttcctcaggggaggctgcagtcgcagcagcaatttcactaaccgctgcacaagaggaaattgggatgtcttacgttgatggttaattcacccttgatttgattgtgctttatagctgaagagttgtacatgaactactattggtccgagcattaataaagagagagggggcaaatggctcgttgttttt

SEQ ID NO: 368548 - DNA, 139 bp, Zea mays
cgtacgtgtgggctcgtccggtccggtgtggtgtggtggactgggtgggtgtcatctgagataattgacgatactaacttcttccacatacataaattagctctatttcttcctaggtacaatcctttctacttactac

SEQ ID NO: 368549 - DNA, 359 bp, Zea mays
tccactcgtccgcgtcgatccaagatgcagatcttcgtcaagactctcactggaaagactatcaccctcgaggtggagtcctctgacaccattgacaacgtcaaggccaagatccaggacaaggaaggcattcccccggaccagcagcggctcatcttcgctggcaagcagctcgaggacgggcgcacacttgccgactacaacatccagaaggagagcaccctccaccttgttctccgcctcaggggaggcatgcagatcttcgtcaagaccctcactggaaagactatcaccctcgaggtggagtcttctgacaccatcgacaacgtcaaggcccaagatccaagacaaggagggca

SEQ ID NO: 368550 - DNA, 428 bp, Zea mays
attcatgatcacctattaggaagaggtatgtaggaacgaataacaattattagggattcaagatctagtcattagaagtacttaaatttgtttattacatcgggctagtttatcttcatgtaccatcatgacttaatccctgctaatttattggtttcctaattttttatatgtgcgagctgcaatgttaagtttgtggtttatgagaccttttattctattgttcaaccatgatctaccatggagtctcattaccatccatttataactttgggtgggggttgtagccgtgtagggtcatgaatgttggtatcaccaaggagggtttttgatcttatgttaggcatgtgatctgtatacatgcttttttttgcaagtttatggcttgcttgtgaaattgcctatctttatgcttatgctctatggct

SEQ ID NO: 368551 - DNA, 459 bp, Zea mays
ggtggttgctttggcctgcacggctatgtgccttcactagattacgtcatcgaagacatcgtgagtttatacttgtgaaaaaagattagttctttctttatcaccgctgtaatgcctgattaacatttttatctggaaaacaggaagtgcttgttgacagaattctgatggagaatccaggggtcccttgtttcctcctcggccactccaccggtggggctgtcgtcctgaaggtatggcaatgcgaagctttccatcagcatattcaggccgggtttagacactgaccccctacttctctgggccctgtgaacgaacgaacggataccctgacggccgggcagagaaatggtgcaaaaacgttagcgaagtaacctggtcgttgaaacctgaaaaatggtctggctgctgctgctgctgctgcatgggtgcataagcttggtttcatttcacatgcct

SEQ ID NO: 368552 - DNA, 453 bp, Zea mays
cggacgtttgtgcggacgcgtggggccgcgcaccaccaccaccgctgcggctcacggctacgcagcccgctctcccgacccccccgtgccctcctctttttgctactagcacatagagtttcgcccgaatcgatcgccgactgactccgctagggttcggcccgatcgccgcttcgtcctcccgagcacaaagaagccaacaccgtcaattgaaatttgaagacaatgcaaaagccactaatgattctagatggcgcattccgatgtataaaatgccctatgcaccaccacctccagcagtgccacccccaggctatgtaccttctccacattttccttatccaggccgcctcttatcttctgggcatccatacggagatctcgctggtaacatggaaaactcagcaccacatagtctggatagatggattcagggtgatggctgtggagcgc

SEQ ID NO: 368553 - DNA, 367 bp, Zea mays
gcacggggatttctattttcagttcttgcaaaagtcattctacatactctaattcataaagcattaaaagagtacactacaaaggatatgacttttggtacagaggagcgtatccagcagaacccatattcagttttcacaattcaggaatgcatccattcttccctttcccaggtactacaagctggaaggagctccaatagtgtgtttccatgtgaatgaaaacagaagcgctactcagagctgtgacacatgaagtgtctccgatattcatcgtccggctccggccacaccgaaacaggcaaaacagaacacaaggagcagagtgatatttcaagctaccaacattgcatttagcgacttaacc

SEQ ID NO: 368554 - DNA, 443 bp, Zea mays
gagggtgtgaaaccatagctcctggccgttctgcctgcccatccaccgcggcgccggccgtccgtctcccgtccacatccctcctcctctcctgcaaggttcctgtgcggtatgtagcgcagaggggtcggagtcggagtcggagtcggagaagatgatgggcgggttcctctccagggtcctcctgttggcttttggctatgcctatcctgcctacgaatgctacaagactgttgaactgaacaaaccagagattgcgcagctcatattttggtgtcagtattggcttgtttcctgtgtctaggattttagttgccctgttgacagttttggagagattcggagatttcacaatatcatggctaccgttctactcggaagcaaagctgatgttctttgtatacttgtggtaccctaagacaaagggaactacgtatgtttat

SEQ ID NO: 368555 - DNA, 401 bp, Zea mays
cgcatttcgatcagatccaatccaaggccgcgccccagcccggcggatggattccgccgccgtggccatcgtgacggtgccgttcccggcgcagggccacctgaaccagctgctgcacctgtccctgctcctggcatcgcgggggcttcctgtccacttcgccgcgccggagccgcacctccgggaggcccgcgcgcgcctgcacggctgggggcccgaccccgcgtcggtgtgcttccgcgcgctggacgtgcccgcgcacgactacccctccccggacccatcctccccgttcccggtgcacatgcagcccctgttcgaggccttctgcaccggcgcgcgggcctcgctagccgcgctcctggcggagctggtcgcgtcgcaccgccgcgttgtcgttc

SEQ ID NO: 368556 - DNA, 82 bp, Zea mays
cattcactagcctattttttgcgaaaggcgcttaatcaatattaaaggtacatgacaaagtttacatgaccggacgcgtggg

SEQ ID NO: 368557 - DNA, 82 bp, Zea mays
cctacttgtccggtcatgtgaactttgtcatgtaccttgaatattgatttggcgcctttcgcaagtgctaggttagcgaatg

SEQ ID NO: 368558 - DNA, 148 bp, Zea mays
acaggccaaacctttttccgatggaaaaaacaaagctgagcctttgggaacctgcatccggggcaagagattttctcaaccaaaaaggaaaacagggcctcaagtttcaattacttggggtaattgaacttgacggggggtttttttt

SEQ ID NO: 368559 - DNA, 363 bp, Zea mays
gtacaagttggcggcgcccttgggagagacgcagcgcgtgtgaatattactgagagatgatgagatgacagacaactccgcctcgatcggttctattctgcagcgccgctgaggaaagaaatacgaaaaaaaaataacccccgtacatgagcgggtaaaaaataaaatggcggcaggacatgtctgacatctcgactgtttcagacatgctctcatgcttcagatcttcccgtgtggatcgaacgatctgtatcgacagcatcttcccccccctccttttgggcttttcgctgtgcgtcataaaattaaaatctggagatacagaggccgagcatgagggcaagaccacagtgaaatagtgaa

SEQ ID NO: 368560 - DNA, 286 bp, Zea mays
cctacgtgtccgcccacgcgtccgcccacgcgtccgcccacgcgtccgcccacgcgtccgccaaagcaagcaagaagaaacgaaggacgataatggctctggtcgggcaggtggcgacggtggcgcagctggtgggcgtggacgcgttcagcctcatcacgatgatcgcggaggcggcgcagacggcgcggcggaaccgcgccgtgtgccggcagctggcccggcgcgtggagatgatcgagagcctgctccggcggttgcgcgagcaggatgacagcgacgacat

SEQ ID NO: 368561 - DNA, 515 bp, Zea mays
ccttcgtttccgatttagacgtgaatttcatgaacttgtgatgaggacaggtaacaatatgactattgaagggtttgttggtgttgtgcggcttgcatggtctgttcatttgatgctaactcaagatcgaagtaattcaagagaaacgtcagatatttggtcatgcctggaaattatctgtcgtcaaaattcttttgagtttttgcgggagcaagttttgaaaacagctgcataccagaatgatgatgaggacattgtctacatgtacactggctacactcacaagctaatgatgtgctttatttcccacccaacttccagagataagataaaggaaatcaaggagaaagcaatgactgccctcagtccatatgagccaccacgaggtcaacgagaagatcttggtagaaatggggaacaagctgatcagcctactaaggagccttttgtatccctgctggaactggttagagaaatctatcagaaagtgcctgagctagggaatggaaatgagg

SEQ ID NO: 368562 - DNA, 486 bp, Zea mays
cggacgtgtgggcaaaagagcaggctaaagagagaaaatatatgttcttctggaggaagagtaaatcaaatagaaggcagatgcttgacgcaacagatggagctcagactgttagcaaaattgttattctgaagccaaatccagaaagagggattaatcagaaagcagctactgcaagaactttacatcaacagccatgtacatcgaatgctcctggatgcagtggaagggaaaactcaaagttttcaattaaggaagtcaagaaaagattcagatttgtgactggtgagagaagtgaaagaaatttgtcacctgcagaggaccttcaaggagacccacgtaagatcaaagattctgttgttgcaattaataaatattttagacatctccctgaagggagcttggcaaacaagtctgcatcagacattgagaatggcatcaaaccttttatcaacagtaagcaaaaaatcaaaatgggagcataac

SEQ ID NO: 368563 - DNA, 124 bp, Zea mays
caagtacagacgcaacaaccgaacttaaagaaaaaacagggagggttttcgtgaagccagcgtggctgaaacccacccaagcagcgctggaaggcataggagacgagcgcccagagcgcctgcc

SEQ ID NO: 368564 - DNA, 371 bp, Zea mays
ggttcgtgttcgtgggtgagcggatcgagatggcggcgtcggatgttgagtaccgctgcttcgtcggcggcctcgcctgggccacggacgaccactccctccacaacgccttcagcacctacggcgaggtcctcgagtccaagatcatcctcgatcgggagacgcagaggtcccgcggcttcggcttcgtcaccttctccacggaggaggcgatgcggaacgccatcgagggcatgaacggcaaggagctggacggccgcaacatcaccgtcaacgaggcccagtcccgcggcggccgtggaggcggcggcggtgggtacggtggtggccgtggaggcggcggctactgcggtggcgggcgccgtgatggc

SEQ ID NO: 368565 - DNA, 416 bp, Zea mays
cccactcgtccgcccacgcgtccgcaggtacagtatatactatatagatattgaaaacccaactttgtgatcctattagtataatagtattcattctacgttggaatttgaaaactggggcaaaaggtcattgcgccgtcgtcgtcgtcgttcgcaagcagcaaccaggcagctccgggctccggccatggcatcaccaccaaggaatgtcggtaccaggactaccagcaacccggagatcccagagttcctggtgggcccggctggccggccggtgccggccgtggggctcggcacggcatcgttcccgttcgtggaggaaaacgtcaggaccgccgtcctcgcggcactggagctcggataccgccaccttcgataccgtttcgctctaccgcttcgaacgtgccggtcgcgac

SEQ ID NO: 368566 - DNA, 464 bp, Zea mays
  unsure (1)..(464): unsure at all n locations
ttcctacgcgtccgcccacgcgtccgcccacgcgttcgcccacgcgttcgcccacgcgtccgcccacgcgtccgcccacgcgttcgtggacgcgtgggtggagaagaaccaaagctggatgctgcagtggccagaagcaatgatgttgagatagtaccttcagatggtttgagaaacaggaagcaacccagtgcaagaggaagcaggactgggagccccacttctcataccccagcacagggaactgaaactaatctacctcctgctcctgctagtgctggcctggaaactgcaccagctcagtggtggttgagcatcatcaaggttcaggggctagtgggtnggggttttggattggcaaagattgctgcctacttggggggggggggacccatcacaagtcgtatgctttgatatgtgggagctgccatatgcataacgggttggcccgaaggaagattacc

SEQ ID NO: 368567 - DNA, 179 bp, Zea mays
ctcaagctagcccaaaaatagtactcgaactagctttagattttaacatccatattcatatggttgattgtgaaactaaacatttttttacaccccataccttatttgaaaaacaaattttaattggggacagggggagttttcgccatgaacaaaacaaatgaaataccagggggttg

SEQ ID NO: 368568 - DNA, 205 bp, Zea mays
aaaccaaaacaactaaacatggaagtaaaacaaagttgcatacattttttgggccctcggcccccgatcatacccaagcccatgcatacccccccgtatacctaccaaagattcccgacccccccttattcgggcataaaacgagcccatacatacctacccccccacaaaaaggggggcccccgatatcactttaacacccccc

SEQ ID NO: 368569 - DNA, 345 bp, Zea mays
tggcgctatctacactacgatttagcacgggaccatggggccggagaggagaagctagctaactaggagcaactctgatggtgagagtgcgagaggaggggatctgcagccggcgctggatggaaaaggagagagaaacgacggggggtacgacggagctacagcggatcgagaacaagagcaaccgtaagacaactgaccccaagcgcccgagcgatctgctgaagaaggagcacgagcactgacggctctgcgacgaccgagctgcgcacagggtctgctgcagccgctgactgctataccagctctgtacgcggactaagcatgacgagaacacttgagagg

SEQ ID NO: 368570 - DNA, 210 bp, Zea mays
gggaccattgggggccctgaacaaaaaaaggcattattacccaatcgtccctttgccccaagggattcattgaaaaccttggatcgaagggataaaattagccttcccaaaaacaccacactagcaatggtaaaaaccccaactggtccaagcttaaaataaaataaaataaaataaaaaaaaaggggtggcatccccccccccatgcca

SEQ ID NO: 368571 - DNA, 390 bp, Zea mays
ttatacttcctaccctccccacctcttccacggttccaccccgtccctctcctctcgagaagcacccgcaccatacatcttccggcgcccgacgcggacggcgagccgctgctgctgctgccgccggaggaggaagggcaccagggccagcgggtgcaggaggaggaggagcagcagcaggccgccggccgcttggggctgtgccacatgccgctctggggggccgccgcgtccgcggcgccggcagccgacggcgacgccgcccgcgcgccgtcgggatcccggcggcggcgtcaagggtgatccggtcgctgcttcccacccggcgccgcctccgcctagatccgcccgccaagctctactttccatatgagcccggcaagcaagtcc

SEQ ID NO: 368572 - DNA, 317 bp, Zea mays
aaaaccgaacgaaccatttgccccctgtctctttattaatgcttcggacaatagtagtttatgtacaactcttgagctctgaagcacaatcaaaacaagggtgaattaaaaattaacctaagacatcccaatttcctcctctgcagcggttagtggaattgctgctgcgactgcagcctccccttgaggaagcccctgcacaccttcttccacagctccttgtccggctgccgcacgtcgaagctcgccttggccacgtccacttggcagtcctgccgacaccaaaacaagaagacactttaaattccaagacccgc

SEQ ID NO: 368573 - DNA, 199 bp, Zea mays
aaaaggggaacaaatcatataccccgggggtttttattaatgctacggacaatagtcgcttatgcacaactcttgagctctgaaccacaatcaaaacacgggggaattaaaaattaacctaacacatcccaatttcctcctttgcagcggttagtggaattgctgctgccactgcatcctccccttgaggaagcccctg

SEQ ID NO: 368574 - DNA, 438 bp, Zea mays
tttcttacgcgtccgcggacgcgtgggcaccttccaagaatgccaatacaacagaagagaaagtacctgcaagtggtggaaattcagatgcccaggatctggagctgattcttaggcagaaagctcttgaaaacttcagaaagttcagggcagcagcgaccatgggaggcaaaacagacagtggagctgcagggaaggaagcatcaatagacgatagcgtacacaatgctggcatggaggttgctgatgccacacattctcagagtcaggaaaccagtcttggagcgaggtattctgctggatcacctagatcacagaattttgggaatggtgcgaatcgttcttggaagcaggacaacggtgctggcatgagttgtggtgggatcacccggattacttgagcctgctgaaactggtggcccgactcactgaggggag

SEQ ID NO: 368575 - DNA, 296 bp, Zea mays
tggttacccccgccgatccggcacgtgagggcaccatgattcaggcagcgccggtgatgctgatgcttgaccctgaagagcgcgtgtccagacgaccggcgtaagatatggaccatcggagcctattggagctcatgggaggatgccacgaccaaagatgaactggagtgacccgcctccgctcgcaagggagaacaacctgagccgtgaggccaatcctgacggcggaccaaagaagatgctggcgcatacgtgtggcagtacatgaaagaggaggcttgatagcgcgaggccta

SEQ ID NO: 368576 - DNA, 269 bp, Zea mays
gttacgcgtgcggatacggcaggcgcgggcggcattcttcagggagtgctggttttacgtacgctagacattcaaacggcgcacctcataggccattcacatcggttacctgatcgcgccaatctgaccaatgtgcaaatggggcaaactattgatgtctggagaagggctatctgaccgaaaggtagcgatccgagcatgggggcattccggcagcgtaccttagatgtgctgccagaacacgggtcgtggctgcactagtcggttgc

SEQ ID NO: 368577 - DNA, 220 bp, Zea mays
ttggtcacacatcccgaagctataggtgcggacagcatgcttcacggagtgcaggttttacggatgcaagacaaccatacggcgatcaccgcaggctcttgatacgctatataatatgacgcctatttgacagatgtgcacatgcagccaactattgaagtatggagaaggactacctgatcgaaacgtaacgttctgagcatggtgccattccggcggc

SEQ ID NO: 368578 - DNA, 220 bp, Zea mays
tggttacgcgtccagaagctataggtaagggcggcatgctagaggcagtgcaggatttagggatgctagataaccaaaagagcggtatcgaaaggatctatcaaacgctataatactatgggggcaattggagagatatgaaaatggagcaaacgaatgaagtatggagaagggatatttgacagaaaggtaacgagttgagaatggtggaattcagggg

SEQ ID NO: 368579 - DNA, 80 bp, Zea mays
tcggttactcatgcggaaactataggtacggagggcattcttcatggtgtgcaggttttgccgatgctagttattcaaat

SEQ ID NO: 368580 - DNA, 222 bp, Zea mays
tgtttggtcacgcgtccagaaactataggtggggacagcatactacacggagtgcaggtattaccgatgcaagataaccaaaaggcggtctcggcaggcacttgagacgatataaagtatgaggcgaatttgaaaaatgatgaaatggagcaaactaatgaagagaggagaaagactaccagaccgaaaggtaacgatctgagcatggagaaattccggcag

SEQ ID NO: 368581 - DNA, 55 bp, Zea mays
tgttcggtcacgcgtgcggaaacaataggtggggtctgcatacttcacggagtgc

SEQ ID NO: 368582 - DNA, 400 bp, Zea mays
tgcggacgcgtgggccgcttcctacagcaatgcctgcggcggccatgcggggggacatcacgtacagcgggcgcgcgcgccgggtggccgtgctccgctgcctcgtggccgcggtggtggtgaccatcctcctcgcggggctgaccgcgctcatcttctggctcgtggtccggcccaagcccatcgactacaccgtgacccgcgccgtggcgcgccacttcaacgtgacgccgccgcccgacgccacggccaacgcgacgttctacctgaccctggccgcggccaacccgaaccggcgcgtggtcggtcctgtacgagtgggtgggagttcccgcgtgctgtacggcgaggaggcgcacgtggcggtggaggacgcgccggcgttccggcagccacgccg

SEQ ID NO: 368583 - DNA, 54 bp, Zea mays
tcggttacgcgtgcggatgctgtaggtgcggtgggcatgcttgaggcagtgccg

SEQ ID NO: 368584 - DNA, 275 bp, Zea mays
tggttacgcgtgcggaaacgataggtacgggcggcattctacacgcagtgcaggtaataccgatgcaagacaaccaaacgagcggttctgcagggactggcaaacgcgatatagtatggggggaataggagaaatgatgaaatggagcaagctactgaagagaggagaagggctatctgatcgaaaggtaacgatctgagcatggggacaatccggcgggggaccttagaagtggtgccaaaacagggggattagctgaatgaggaggttgaaag

SEQ ID NO: 368585 - DNA, 55 bp, Zea mays
ttctggtcacgcgtgcggaaacgatagggggggactgtatgcttaagggagtgca

SEQ ID NO: 368586 - DNA, 274 bp, Zea mays
ttggtcacgcctgccgaaactgccggtggggtcaccattctacagggagtgcaggtaacaccaacgctagatatcaatagggcggtcgctgcaggcactgcaaacgctatctatggtggtgcgtatgtgaaaaacgtgtacttggagccagagaatgaagtcaggagaatggcttactgtccggaaggtcacgatccgagaattgagccattccgtcgggggaccttagatgtgctgcctaaaaacggggttgacgtgtacgaggtggttgcaa

SEQ ID NO: 368587 - DNA, 320 bp, Zea mays
ggaataatacaaagtatatttcatggaaaactaacagagaatcacagattggatattattccttactacaatcagaagagcacaacacatcattccttattcccattgaaagtattatgccaggggtacgtaccagttttttagaaagtagtcaacaagacactacaaagcattataaattccaagagttaacttacagcagaatcaccatgggggggaaactaataacttcttctcaagagccaagatggcacacctccaccaattcccatgactccaaggttttatctggggtatctgttctatagagcgcaagctca

SEQ ID NO: 368588 - DNA, 415 bp, Zea mays
tcccacgcgtccgtggatggttcatgaggggatgtttggtggcataggaaagttcgctctatctatcaataaaatattactggaatggacgaaatgctgtatctatgttgaattttgcttttatcttgttgaagctgctactcattctggtctgtggatgctgtgcttgccaattgtgctaactgcagtatgaaattcttctgtttgatacttcgattcgctactataatcttcagaggaatgcaccctactcgcttccaacttggacgcatgtttagtctgttatgattttccagtacttacgaggatgtgctgaaatgtgattgattaaactgtcaattttaccgaatttaatcttagctattgcctgtgaatgaatttatgggagctatgtttcggcctgaaccctgacttg

SEQ ID NO: 368589 - DNA, 72 bp, Zea mays
tcggtttcttgtttaaatactataggtatggtcggcttacttcaactggtggaggttttgccgatgctagaa

SEQ ID NO: 368590 - DNA, 216 bp, Zea mays
gtcacgcatgcggaaactataggtggggacaccttacttcacgaggtgcaggttatacatatgctagaaattcaaacggctatctctgtaggatcttgacacgatataaagtatggcgcgtatgtgaaaaatgtgtaaatggagcaccccaatgaagtgcggagatgggctatctgtccgaaacgtaaagctctgagcatggagccattccggaag

SEQ ID NO: 368591 - DNA, 369 bp, Zea mays
accatacccaaactgccatgcatgagaatagatagacagaaagaacaggaaccaaccaacacaagacacaacaagctgcagcagcggcaggcatggggcaccgcgccactgacaccgggccccaccaccattaccacccgacgcacactttatttagcccacgtcactcgcagcccggaccggacacgttcacgccgacaggcactggtaggtaccgaccggggctacgtccgggacccccccccccccggggggggcccccggaaaaacccgaggcgtactgaacagcaaaatcccgggtcatactgccatgtccccgcgcgagcgattaccccgccacgcgcgcacgccgatcccctgggccctggc

SEQ ID NO: 368592 - DNA, 326 bp, Zea mays
atgctccttaccgaccaccggtctgctttcccgggggcattggtgcacggcacgcggtttccactcgcttcgtccgcgttcggatcgccctcagagtaacagtctagcagagcaagcatgtcgtcgtcggcggagaacgaccccacggtgactgtgaccgagcgcggaggcaaggacaagcacgaggacggcggcaacaaggagcagggcggctgcggcttcatggactaagggaaaacctgtcactcccttgtggcagagcttgaaagaggagctttgatgacacgaggcctaagcttggcactggctcgtcgttttacaaactt

SEQ ID NO: 368593 - DNA, 322 bp, Zea mays
taattagagctcatttaccatccgcaggggctcccttccagacgcttccgctcttctctctctgcttccggcagaaatcaaggcagtattaggatggtgacccggcgcctcttcgcgcgactctaccggcattgcgccggcgcagcggctgcgtcatcagccgcggggcggcaccggggggccctggcagcggcggccgaggagcactgtggccgagggcccctgcctgtccggtgtccaggcctgcccggaccccatcttgattgcgatcgctgactgctgttcgcatttgatgattccccacggccattcgagttgggat

SEQ ID NO: 368594 - DNA, 257 bp, Zea mays
tcactatttggaaagcacgcccgcagggaccggcccggaacggccgggccgacccacgccacctttctgctaaaacaaacaatatcatcatagccaagataataatagcattcggcgaggcttaacatacccgggaagaagatctaaacccctcatgtcataccaccggacttcaaggccagcaattatcttgttagaggcagactctactcccaaagtcactgactgtggaatcgcaggggaaccatccaaagcgg

SEQ ID NO: 368595 - DNA, 278 bp, Zea mays
ggagaggaaatatagcaagatgtataagggtttagacttttgtggaggcacccaggtttgcatataaatctgcaaagagagatgtttaatgtatagagaacaaatgctgcatcctcattcgttgaagaataggagaaaaagcacgttgctagtccgcatcaaccttcgtcttcaagaacatcagttgtctgaagatgtaactgcaagcactgataccagtatcctttgttgcctccactgccagactcaatgccagccgttgctttgttcctgcccct

SEQ ID NO: 368596 - DNA, 431 bp, Zea mays
tttcttcccagcctcttctttcctcatctgcatgctccataatcaaaggaaggctgggagaccctccataaaaaatgactctattacgatgcttccaaatcatccacgaccctaaaatgatgagggagtcaagaccttccctgaccagaccatttactgtctctgaaaccatctcccaccaatccataaaggaaactgcatctggctgtggggctaaactatgcagcccgaactttcttagtaggttgtaccagaaaatccttgagaagacacaattcacaagcaagtggttcagagtttccccttgctggtcacataaaggacatctgatagggtgattcaatccccttcttaccaagcgatcagctgtccaactctattttgggccaccaaccaaatgaaaaaacacattttggtggagcccaagatct

SEQ ID NO: 368597 - DNA, 261 bp, Zea mays
cggggattccgaaaaagccctaaaccagattacaccaatcagatgcatgagccgcatttttgcaaaaattaaacagaatttgccaaccccatcctaattgtttccggggaagaagcaaagggcaaacaagaagaataagaaggaaaaaaacccctacccccaaggcaggcaggcatgcatgcatgtccaagggtaaccacgaactaactggacactaactagcacggggcacgaatcatcggggggggatgacaaacccca

SEQ ID NO: 368598 - DNA, 249 bp, Zea mays
aaaaccccaacaggggggggggaaaacctttctcgaaaacggggggggtttggggtttccccccgatgggcccggggtgaacataccccatggcggggataaaaaaggcattggccaggggggttcctaaaccaattcccccctttttggggaaacccggggaggaaaaactaaaaccccgggatgggggaccccaatgttttgggggcccccgggggggcccaaaaaaaagggccccccccggggggg

SEQ ID NO: 368599 - DNA, 216 bp, Zea mays
ttcttagtgcgtcaccgcagttgatccacaggggctagcgaagatggggcccatgtccttctctgggaaggagacagccacctgttttcttgaccacaatacgagccgaacggatagaagaccgccatgggaggagggaatgaaaaacctgaggcggaagcaagcaaaggccgcccccttggaaacggagaaggaccggcagaagagggctaagca

SEQ ID NO: 368600 - DNA, 329 bp, Zea mays
ttgtctcttccgtcgacacgtccacgcccacggggacacatacacacacaggggctagccacgccatccacaggtacgcccatgggaactataggcatgccgagtgcaactgcacaatcacaccgcaaccgtcctgcgtgcgagcatacgtcgcagtaccctgctaggattatgggcactcctgatccgccatctgctggaggtgcttctatgcgagaccatgcatctcgagccagactaccaacctaagacctgaatagctgatacactgaactaggtcagtcctccagaccacagtacgcacagaagcacatgaatcggcatgactg

SEQ ID NO: 368601 - DNA, 212 bp, Zea mays
  unsure (1)..(212): unsure at all n locations
ctcgcagcagattgctcctgctgctcctcaagaggcagataaggctcttgctgttcagcatattccagcgatacctgaggttaagcaatcagattcggagacgccggcgcgggagtggaagccgctgtgcgacatcacctcgaaccgccgcatcgactggtgcgagctncgacgcgacgtccgcgtgctgggcgccaacgcgagcgtcacgc

SEQ ID NO: 368602 - DNA, 275 bp, Zea mays
ttccgtgcccggttgtgtaaatagaagataggcgacgaacacgaagcaagcaaggcagccgaatcccaactcctgtgtgtgcctgccaacgcctcgtcgcccgccgccgccgctgcttcgcccctctccgccagccgctcccgctcggagcacgccgccgccggcgtgggcgcgcaccgacggccgtcgtgtcgcatggatatggcccccgcggccgtctcctccaacccgcgctcggtcgaggaaatcttcaaagacttctccggccggcgcgc

SEQ ID NO: 368603 - DNA, 194 bp, Zea mays
ggggggaaacgaacccaaaattttgttcaaaaaatgcccacacaaatgctggcgagcagagccctttcaacaaagcgaatgcgggaaaaagaacagaaatcaatgctgaccagggaccactaaagccagtttctccctaccaaatcgtttgaagcgcgaaagatgaaaaaacccaccggctgctgacaagggac

SEQ ID NO: 368604 - DNA, 469 bp, Zea mays
ataaacttcccatgcaataaattatttacttgcgacagaaacagtgaaacattcaaacaataaatgaatccaggttccctcagatctcgcacatagcagaagagggacactgcacctacacgagggatttcgcgatccatgcatctacatatgccagattttaacaagttcatgttcaactccttacgatccggttcagttctgcacttgatcatagaccgtctggaaactaggcaaagtaaacgaggatgtcctgtcagctttagagctaacaaacttgaatcgcctcagacaccatagaagcatcatgggcgacaaactcagtgacatactaacatagcagtatagcagtttgaaccagatgcagtcctacatagaaaagctagcagtttatacagcatgtctctggaaaggagagaccataaacaccgccaggagtccatcacttcttttcaacatttggtaagca

SEQ ID NO: 368605 - DNA, 184 bp, Zea mays
acaaaaacagcctatcaggtccgtcgccacgtacccggaatatacatacataccatgccttccttcctgctcctataggagcaaaagcccaaaagatcagcgatgaccgagagacccactgcactggggctaacgatgctaaggtaaacactgtcacccatcccaaaagaacaaatcaacaggc

SEQ ID NO: 368606 - DNA, 317 bp, Zea mays
ggacccacgcgaagactacatgatctaaaaagacagaaaagcctcggttgcccgcagacttggttgtacacttacatttaacacttgattggacataaatcgttcccgcccgcttcgtgggtcaacaaaaacactacccctcttgacaaaaaaaaaaatgcgacaacacgggcgggaaaaaaaaatctccaaggcctggacgggacacactttgagctccgcactgtacactccagtttcagcaagctggaccctggagctcgacctttttcgttgccgcttcgttttcctctctgttctcctggtcctggggggga

SEQ ID NO: 368607 - DNA, 331 bp, Zea mays
ttctgggccaccagctttgaccgccgcctggggtcccctccgctactgctccggcccaccccactcccccgcaggagcggcggcggcggcggcgaggtcgtaccccacatcggcgagcggcggcggcaccgccggaggcaaaggcaagatgttcgggcgcgcgccgaagaagagcgacaacaccaagtactacgagatcctcggggtgcccaagtcggcgtcccaggacgatctcaagaaggcctaccgcaaggctgctatcaagaaccaccccgacaagggcggtgaccccgagaagttcaaggagctcgcacaagcctatgagggtttg

SEQ ID NO: 368608 - DNA, 190 bp, Zea mays
gggggttcaccctaattccctatatattatttgaccccatttcaaatcatctttagttcacataaaacactgaatatgcttggttttagtagtagaagacccctgaaccttaaatgaaaacccaaaaacaaagtgggacgggtgagtgtaacaacagccacttaactcgtcggaatggggggaatggacc

SEQ ID NO: 368609 - DNA, 407 bp, Zea mays
  unsure (1)..(407): unsure at all n locations
ttttgtgatgacacagcccccggggccggagcgggattgactggtctgtcttctacctccaccagccttgaccgctgccttggggtgctcgtcatcgtcctctctgagatggggctgctcgacgaggctttgtacgtgttccggcgcttaaggacgctaccggcgcttccggcgtgcaacgcggtcctggatgggctcgtgaaagcacgcaggcctgggtgcgcctggtagctgttcgaccaaatgcttaacgggnggtttggtgcccagatgaggtcacgctcaatactcttatcaatgcatggccggatccaggggcactgaggtcaaggctcaacaggtgggggagcagatggtgttacagtcacatcgacgcatgtgtggccacatatactacgatgatatgt

SEQ ID NO: 368610 - DNA, 457 bp, Zea mays
ttggagcccgacgccgcccaaaaccctagcgccagccccgaccccccggggagtgtccgcctactaccagacgcgcgccgaacaccacgccgtcgtaactagcgactggctcgcccacgccgccgccgcagccgcagccttccccggcgccgataccgccgatgccgccccgcccccgtcccccgggggcggcggcgtgatcgaggagttcaacttctggcgccgcaagcccgaggccgccgagggcggtggccgccatcatggctctcgccgccgtcatccgctccagcagggccaccaccatgatggagctcgagatcgagctcaagaaggcatctgacaagctcaagtcctgggatgctacatccatttctctttctgctgctggggatttggtcatgcgggttggaacgaggacctcacatctggaggcatgagaagttgatgcagcaaaatc

SEQ ID NO: 368611 - DNA, 339 bp, Zea mays
tttacgccgacaagcgcagctgcagaaagcgtctggacgggcacaatcgccgccgcaggaagccacagccagacaccatggcttctgctagctttatcgcaagccagcaaggcacgcgattctcaccatttgcgcatccaagactggaggcgagctggccgccgggggtgattgaaacccgaggggggtccatatcacatcactcaccaaatccttttgggcttcagcagcagcagcaggcagcagcatttcgtggctctgggaggccgcacgcctgcctacgccaggaaggccggcgcttccctttcctgcaggagggcgagataagcttcgccaccg

SEQ ID NO: 368612 - DNA, 371 bp, Zea mays
cttactcgtccgcggacgcgtggtctccgggggagtcatcagtcgtgcgtgccggtgcccaccccgttctgacccgctcccctacctcaactccctcactcttgctattacgatccattcaagatccctgcaggcgtacgtccatccatccattcatccgttaagaggagaggggaggccgtccggtcgtccggtggagctgcaataagggggcagacagagacagagcacggggcgaggactgtgaccgctttgcgttacagtgagaggccttggtggtcctggaaacaacacattcagtaagccctgcgcaggaagtgctgacggactccaagagggtcactgattccaacttgcacaagagcaggtga

SEQ ID NO: 368613 - DNA, 348 bp, Zea mays
gttgctgtggataaggcatgagtaggacgtgggggaggaatgggatgtaaaagggattttggatttgttacatttgatacacatgataatgctgttgcatgtactgaagggatgagtaactctgagatcggtgaaggtgaacacaaggcaaaagtaagggctagactgtcgagaccattgcagagaccacctagaatgaaacatggattgagaggaaattttagagttgggcatggtgcccctcgaggtggccgtttaccatattctcgtgctcctccacctcgcaggccttcgccacgtcttattcaccctgatgttagccgattaccatgcattagaactcataca

SEQ ID NO: 368614 - DNA, 390 bp, Zea mays
ccctcctttttttttttttttttttttggttttttttttttggggacctcaaagaacactccatatgtgtctcaataatgttttagaaacactggatgtaaacatgttgaaacacttaaaacaccatatctggtgtgcatgtacagaactgtggaccagataaagcatatccttacattacataaacaagccggaacgtcctcagaactactgctcgaaccaaatcgatggtctggcttcgttgaaatgtcttattggaaaacattgcctcacttgggggctgggcacttattttacagatctgtggggcttaaatcgaggagctccataaaatgcagggcctacaccaaagccctatgatgccaaatcttagtaatatgaactggaacc

SEQ ID NO: 368615 - DNA, 303 bp, Zea mays
gtctcgtgttcgacgaaaacactctgtgatggggtttctaatctgaagaatcgatgcccaaaatatttggacatgctcaatgatctaagatcctacctatcacatgtctatcccaagctgaatacaaattcttttcctggatgatgatatagccgcccagagggacctaactggactatgggaggctgatcacaatggtaaatgcaaatgttgaccgggtaacatggggtgagtaggtgacaccgactagatccgggcctacatgaatcacacccacaccgtgttcaatgtcaagcgcctcat

SEQ ID NO: 368616 - DNA, 341 bp, Zea mays
cttgaccgaccaccgaccagggggtgtttgacagaaaaagggggagactacagtctaaacactgactggaattacacagacaaaggacgcaaacgagatgcctgccaccaatgcaaaaaaaatcatgtatctacaaagcacagcagagcagatcaggagaggaagaagcacaggcaaagcaaagcacgagatgaagaaaaagcacacggttgtgcacatggacgacaatcccatgtactgctctctttagtacctacagcaacgaatgttcgaaaacaggcaagggagggaccgggagacgagagacatttgagagacacatggatgcatgcattgcatgc

SEQ ID NO: 368617 - DNA, 347 bp, Zea mays
ggctccaagtaatgaatgattctatataggattattgtgactatgtgccagcagtacggttacaaggcaagaaaaaaaaggtgaagcaacaagctacaagcccgcatgccaaacatacgatcgcagaagcgtgcggtaatgcatgcttttacagaggtaaacctcatggaaagggggagaagttaggacgatttcactaatctaatgtgatccgccggatcttgcagaccagatgggtagtagggaggtcgagctggcttgcaccatcagatttgatcagatcacggacctggtccctcggggtggagacgcaggcgtggaaggtagacaggaatggagggattggc

SEQ ID NO: 368618 - DNA, 309 bp, Zea mays
ctccgttgggaatgtgacggggcaatatggatgattaagagaggtgtaccaggggaagatcattgatgatcatcacattgggaccctcatgagatctctgaaagcgaatgtacaaatgcgcttcaagggcttcagagagtggcctttgaagcttggtacatgacagaattccattattgccacggttgcccagatcaaaggggacagggctcccgtaattgaagccctacatggaaaattggttatggacataatgcgtgagaagacaaaaaatgcggcaatgcagagtatgctgaggatctttgatga

SEQ ID NO: 368619 - DNA, 473 bp, Zea mays
ttcaagaagcttgctcgcaaggcgctagggaggaagaagacaaccacgcactattgctgttgcttgtgcttagtgtgtgctcgcggctagaagcagacaagcagctgcgggagcataagggcggcatggcttcttgcggtagcttctactttgttcccttgctcctgctgatgctcctgctcgcttctcccgccactgctgcactggtgacatcctcccagcctggcggcaatgccactgctgcaaggccgaggccggggatggagcagctcaagcgcaagaggatcagggctctgctcaccaagcttaacaagcctgctctcaagactatccagagctcggatggcgacatcatagactgtgttccctctcacctccagcccgcatttgaccacccaaagctcaggggcgaaaagaatctggatccgccggagaggcccaagaaccgcaacttcaccttttgccgcagcggc

SEQ ID NO: 368620 - DNA, 346 bp, Zea mays
tccagctcccacccccacccatcccttgggggttcgttctcctccctcccctctacggaacagaacagccctgcccaaccaaagaaccttgagagccttgaggtggggtagggtgtgtctgcctggcacagagagtagcagagcagtgcagagcaaagcagtcaggcaagcagcagcaatgccgtacacagctccgcggccgtcgccgcagcagcacagccgtgtactgagcggcggcggggcgaaggcggcgttgcacggggcgtcgtgcgcggcggtgccagtggaggcggtgcggtacctcgagcacgctgtttgcgcggggcatcgttgctcgaccttgttt

SEQ ID NO: 368621 - DNA, 259 bp, Zea mays
tttcagattggaggcgcacccattcatagatggagcgacctccttgataccatctacggaacataatcatacatggccaaccaaagaacctggagagccttgatgtggggtagggggtggctgacgggcacagtatgaagggaggcagtgcagatcagagcactgaggcagagcactagcagatgacgtacacagcttcgcggtcgtaacagcagtgacccattcgggtactgagcagctgaagatgcaagacggcatg

SEQ ID NO: 368622 - DNA, 345 bp, Zea mays
ttttcgagatctgcttcgctcgcccaaccgcgggggccaccgcctcccatggcaccgccggcgaggagcccgacagcggggcctcggcggcgcgccctcgtcgtcctcgccctcgccctcctcctgcttctgcccctgctgctgctcctccacctcatctcctcgccttcgcctcgacacctccccgcgccccgcacgccctcccagtctcaggcctgcgactactccgccggcgagtgggtgcgcgaccccttcgcgggctcctcgctccgctacgaccatacctgcagggggatcttcaagggatggaactgcatcgccaatggcaagggtaacgcccgcgac

SEQ ID NO: 368623 - DNA, 286 bp, Zea mays
  unsure (1)..(286): unsure at all n locations
canaatgatggtctaaaaacagaatagggacatcggcgtattgcaaaggcaaatgcaacttcaaaacctttcacctataataaataggtcgcaggtactgaacacgattatcctgaatattttcccctatgcctctatggtatgaccaaaaaaaatgtgtcgcaaattctacactgatatacaacaacagtttggtgacaaagcaactgcaacaaaagacatcaatctgatttcatgcgggaaaatgccttccgttctgataaagggacgaccacctcgcacaggt

SEQ ID NO: 368624 - DNA, 158 bp, Zea mays
gggttccaaaccacttcctttaccttatagacccgggattaaaatttttcccaaaaaagggggcctgggaatggttttcttcatgcaagggcgggcttaagcatccaaatccccccgaattgggggaaaaaacataaaccctttgttttgagcttaaa

SEQ ID NO: 368625 - DNA, 280 bp, Zea mays
  unsure (1)..(280): unsure at all n locations
tcgtacacccgcagtcgaaagaggacgnggatacatctatattcctatgggcattctatataatctatggctaatcaggtagagattagagtgattgacagagcggtgaaagatgtttagtacacagaataaactgcggtagttgatgggaagggtctgatgtgaatgccctttctgtactgtgtgcttcccgtacacagcacttcagttaaggacctaggaccctgtgcaacttcaccccagatgagcttgggacggaatcctttatcagccctagatc

SEQ ID NO: 368626 - DNA, 325 bp, Zea mays
gcaagttattgtatcgatccttgctttgccgatcaattttgggtatcgatcattaccacttcttccgggtaactctttcgcctccctgaatctctgtcggcaacaaagattctgaattaggattttgatccacccataatatattgtacataagtagtatcatgtgcgacttcttttggctgtcgccggccgatctaggcgacctctcggacgtcgtccgggagagcctgcagtcttcaccggcacaccaccaccgactgtcggcggccactcctgcttcctcggccatctgctcgtcgggctcccatcatctgccggaggaaga

SEQ ID NO: 368627 - DNA, 103 bp, Zea mays
cccagttcgtgcgcaccgtcgcgacgccgcgagccctcacggagctcgttgctggcagcgttctcaacgccgggggaagcacgccctgcgagcaagcctcccc

SEQ ID NO: 368628 - DNA, 194 bp, Zea mays
ttctttttttttttttttttttgacgcatggggggggattggataggctggccatgggtatttacgaaggcgtctgcgcatataaggcgaggcaataattctaaggtggtcaaacatgccgcgagcgcctatacatgggatgaaaatatgcacaatcacaatacaaaaccatgggcgccttcagcttgagctcg

SEQ ID NO: 368629 - DNA, 222 bp, Zea mays
ttcactcgtccgcccacgcgtccgatctgagcctacggaaaacagacataaaaaatcttcccaataatatttccaagctcaagtacctagagactctcgatgttagggagacagaagttaaacagctgcctacgactgtagggcagttggaacggataactaacatccttggtggtgataagagaagacagagaaccctgaaacttcctaaggagctcaagg

SEQ ID NO: 368630 - DNA, 122 bp, Zea mays
cccactcgttcggagccggatacggagaggagagagaatgggtcggccgtgcgttttagggatacggagtcgcacactgctggagttggtctaagggcatggaaacaggtacaaccactgaa

SEQ ID NO: 368631 - DNA, 181 bp, Zea mays
aatatcacggaactgaaaaactgctcagaagcgtttgtacgtttagatttagcattccagatttgaacttccgatataacttgtgttctgtgcttttaacatgaagctcatgaatcatgatctatgttgatctggttgcgaacccatgcaggggcctctttgtacagtttgtgaggaaagt

SEQ ID NO: 368632 - DNA, 331 bp, Zea mays
atcagcacagaagcactcccattatttggagcccacgttacactatatgcatgctctcatagcagatcaagagatgcccatggtcttgaacgaaaccggcaacagacacgcagacttgctacagccagaactgagtactcgagacacgatcacacgacactgcatttattccaactgaatcatgtgtctaggctactgatgtgacacctacccacactactgactgcgactgatcagataaccggctggaggccaccggttctgaccacagcacgatgggcttacgcgttcaccttgggcgcccatcccgcaatcacgtgctcctgggatg

SEQ ID NO: 368633 - DNA, 377 bp, Zea mays
gtctactttcattctactgctatgagtagcaattccccgcgcgcgctctctccgccccggcactaggccaacggcaatcaccactcaccaggtgccaaggtgtcttgtcggccccttcaccaagtgttagtcgggtccttcgccggcgacgggcaccaccagtatggacgaatcacgaaaaagagctgtctctactgcaaatggtaaaaatataagttcatcccttgatgaagactttggaaatgacttcctttcatcttggaagttaccaaaatcaggaaaagacacgattgacttcagtgttgactcagttcccaagagtagcaagaaattcagctttgacaacctagatgattttgggcttaatggagcctttg

SEQ ID NO: 368634 - DNA, 304 bp, Zea mays
tccttttttttttttttttttttttttttggtttttatgcaaaacgggtgacataaatacttgcactatatagctcaattcatgaccttattgaaacaacgacatatataataataatgtaaaagaaagtacaaaccaaagcgtttgcgcacacagcctaacatatatactccactactagctagcagtacgtgtcgatctagtgacgacgacgaccacaaaggtatgaaagaatcatatctagtgtataagttgcgtgctcttaattagcactttagtacaatcatatttgtactatcatcac

SEQ ID NO: 368635 - DNA, 130 bp, Zea mays
cttagtcattcgcccagctgccaaaacccacacgcaggcggggatcatatgcccaagatagcgcccaaggtcggccggcggcctaacaagctcgatcttccagtccactacttaattggatagatcaagc

SEQ ID NO: 368636 - DNA, 168 bp, Zea mays
ggggaaaaaagaaaaatggtcatcttagcatactaactcaaggcccaatcattaccaacccaaaagcattaacattttcaccgggtaaaaactaccgctcgtcaaggacatttggggcagacaattttgacccccccttcctgggagccgcatgaatataccctccat

SEQ ID NO: 368637 - DNA, 137 bp, Zea mays
acacacctcctggcaattgttgtgtgagatcacgaaggtgactctgggtggcttttattgaataccacgtctcggatgaacagcttgatgaactctattaataactcaaaatcctaactttaaaatctaactttatt

SEQ ID NO: 368638 - DNA, 246 bp, Zea mays
gtaaaaaaccccccctccagagagaacaacattggggggccgggtacaaacaactgggcacaaggggatgcacaaagggtccaccaagcccgtttaaaaagggggggaatcataaaaccccccaagttttaggggaaaaactaaaaacacagatttttacgatcacatccccgggccacagttaaatcacatgaccgggttcggccccgaagccttgagcggggttttaagtttccgggggggggg

SEQ ID NO: 368639 - DNA, 237 bp, Zea mays
aataaaccaccgaacccacttaggattcggatgctttcagttagttggggaaacaaatatttattttgaaatgacgggggtggctttattcatagggtaggatcctactaaaaaaacggggcccgctaaaaaaaaaatcctttaatgggggaatccaatttggggagctataattaaacccaaataacttttctttgccaaccttgaaaaatggtcacgcaaagaaacatgaccctt

SEQ ID NO: 368640 - DNA, 175 bp, Zea mays
gtctatgcgcccccggcgcggctgcccaaccaaggggtgttcagatctgaccgtgtagggcgaggtgaccccctcctggcggtgagcgagacagcccccacttcaccctatcttttcaacagtcaccgtatcagttggagcgcacttcaaaactgtctggatttattcttggaac

SEQ ID NO: 368641 - DNA, 158 bp, Zea mays
ttttaacaactatggcggtgataccgatactgcccgtgcagctacccccacaggaagcaagttacacctcaacgcttcaccctctatacctcttaagtgccttctaaatgacaatccctaaacataccaaatactctgctagctgtattgaattacct

SEQ ID NO: 368642 - DNA, 472 bp, Zea mays
cccatgcgtccggcttctcctccccctccggttcgggttcgggttcgtgaggttctccggggttcgggttcgtgggtgagcggatcgagatggcggcgtcggatgttgagtacccggtgtttcgtcgggcggcctcgcctgggccacggacgaccactccctccacaacgccttcagcacctacggcgaggtcctcgagtccaagatcatcctcgatcgggagacgcagaggtcccgcggcttcggcttcgtcaccttctccacggaggaggcgatgcggaacgccatcgagggcatgaacggcaaggagctggacggccgcaacatcaccgtcaacgaggcccagtcccgcggcggccgtggaggcggcggcggtggtccggtggtggccgtggaggcggcggcatccgcggaggcgggcgccgcgtggcggtggcggctccgcggtggcggcggtactgtggcggcggcg

SEQ ID NO: 368643 - DNA, 219 bp, Zea mays
ggccacaacaaaacagcatagcgatggggttgttccatggggcatgttacaaccaacacatattaaaaccttccccaagacagatgcgaaccaaattatttgaaggaccggagaggggacacatggcctgaccccgaaaacaagaccccagactggcggcccaaccacccgtgcggggggggcatagggcaagattcatatgcccccttgcccaacaaa

SEQ ID NO: 368644 - DNA, 536 bp, Zea mays
gtcatatttagataactgttgcgatcatgatggtccacaatggaatttcatgtattggcgaaccatatattgtgtagcaactggagtcaggagacaacagtaagctgatatggtaattttataatttctggtgtgatcttatttcatgcgactatttgccatgtcttatttagttgatcttatctgcaacaagatcataagaagtaaaaatgccatgtataagctgaacagcatttgcattacattcagacagtataagggtcatcatatatgttgtgtagatagtcttataatagtattagactttaaagagattttttagccaaatttaagcttaaacattgaaagaaaattaagctctggatatgtgctttggctggacttttaggtttggctcttagcttaaacttccctgttactaattttaaaataaaaccttttaataagtcttgttcttaccatttgttcattacctaaaatgccatcaaattgaacttagtgcacatatattgatcgtttggatttattatgtgatg

SEQ ID NO: 368645 - DNA, 294 bp, Zea mays
cccatttgtccggtgcgcgtgcagtcgccgtgctggggggttgtgaccctgcctctgtgctctccggctctcccaccggccaccggtcaccggccgtcaccgttgccgacatgtcttatccgactccaggttcccatggctcaagaacccaactacaaacggtggcaccttcaacatagacactttccatagcccccacttcctcaaccccttcctccttatccaagccccatgtcaccttcttcctatactccttcccccgggcgctcccgactccgtcgtcctgggcgcgca

SEQ ID NO: 368646 - DNA, 403 bp, Zea mays
gcagagttctgaccatgagaggagctaccacaccgggacagatggacagctcgcgtggcctaaccccaaaggcggcggggcactgccagcacgccgacctaaccaggctgccgtggaattcaagaatgtggtgtttggggggcagattaacggagggggtcccacggccctcaacaagacgaacaggaagacgagctgctcggccaaggggaaggcgacaacacgaaccgggatatccaaggccgagagcgccgacacaactgcctaccaagatcgctaggctagccaggtcaccttttcccaggacgggaccgctcctaccaggagggcaacctaagcggctggcagtggcacggcaccaggagctcagccataccctccagagtgagggggacagtcagat

SEQ ID NO: 368647 - DNA, 190 bp, Zea mays
gttttctctccttcactgacattggcactaaccagtgtgcatgtgtggagacaagaggagcgaggatgtgcaggtctatggtgaagatatggacggagtacagaaggatgaacacagtccgagatcggaacatggtccaggtgagattgacgaagggaattatgagagggctaggaagaccataagaagc

SEQ ID NO: 368648 - DNA, 81 bp, Zea mays
tttattcgtccggcgagcctagactgatagggatgaaggactactatgggctacgggtttatcaactctgcctccctgagt

SEQ ID NO: 368649 - DNA, 210 bp, Zea mays
gggggaacaaaacgttttatacaaatcccgggggggttttttttggcatcctaaggggaacccaaacgggcctttttggtttgcccccacatgtcccatttgacccatgggccaaaacaatagtccaggcgggcccttttatttaaattatttttatttccaagcagtttgcttgcgtgcccgcaaaaaggcaaccccccattggttgga

SEQ ID NO: 368650 - DNA, 290 bp, Zea mays
gcgttcttaatcgtggatcgtgcacttcgcctcctgggtgatcctcgaatatggccgcttatggaccgagcgccgggacggcattcctttctatcttgttgcagcagatctgtggccccagccttcgaaaccatatggagaccttgactcagactactgaggcaatttgcgtgctggttcctacagtggagcatgtgcacgggccatgttggacgaggggggagttgagaatgatctgttacatgggacacgtggcacttggacacggaagggctgaccgacgaccttgt

SEQ ID NO: 368651 - DNA, 459 bp, Zea mays
  unsure (1)..(459): unsure at all n locations
gcttgacccttcccgaccagggcttggattcttggacttggtgcttcccttctcctacctcacatcacccgcccagatccaatccacacgagatttgcgacgctccgggcttcccggcacgaaggcctttctagggatcgccactcgccacacgccggccggggcgaaaaaagctcttcttggagcccttctgcttggcctctccctctcttctctcccggcgtcattgtcgccgctgcctgcgagcaacaacaattatggccgccgcgacgtcgcgcgggccagcgtcggtcgccatctgtgcgctcgccgtgctccacgcaatggctgcgctgtgcgactccgccaccgcggcgggggngacgtgcgcgggcctggccccggccaagcaccggccggaggtgatatccatcgccgacttcgccggcgtgggcgacgggcggacgctgacactggggc

SEQ ID NO: 368652 - DNA, 397 bp, Zea mays
tttttgcgtccgcccacgcgtccggaaagattcggtaccgcatcctcttttcccataccgaccttcaggaatctactttttcttcttcttttgtgtgtttgtgcgctttcgggataacagacgatgcctgaggaatctactatgttgctcttgtgccttcgggataacagatgccttcagccatcttgatcctgtctgcctgcgcgtgcctatctggtgatggtatacgaatctgtttatgaggttttacttgccttggcctttgttccattggattgctttgatcggggagacctgtaatgtatctttgtccgagggcataaataatctgtgtggattatttggatcctgtccattttaaagggtgctgtttgcatcttgtatccgtttctttcat

SEQ ID NO: 368653 - DNA, 217 bp, Zea mays
ccgatgtttgggcggacacatgggccaggcacggggaggttcaatgagagctgcatccctctccagatctcccactatgcctctcgagagggaagccagggaaagagaaagtcacccgaggggcgcatccgtacacaggccgacccaccggattgtgtcctgagacactggggctggggggggcccactgctcgatctgaggcacgctcgctgcacc

SEQ ID NO: 368654 - DNA, 454 bp, Zea mays
gccggcacgcgcccggacggaccggccggacccacccagcgcgcgcacccactgggccgaccagggggacagtcacctgggcctccagggctgtctgcatccctctccggctctccgcctctccccctcgcgaggaggtgaggagaggagaagcaaccctagggggcccgggcgaccgaccgaccgaccgacgtggcctgagtcctggtgctggaggtgggtgcttctcgttcctggcgggtccatacacggcggggcgctagctaagggagaggagccggcgtcggcgtcggctgcgaggagcaggagcagcaggccaccgacggattcggagatctcgccggagaagatgaagagatctgcatctctgtttcaaggccttctggttttcacagccgtgattgagatccaatggtccactgtatccagcatttactgcaaggacatgccgcca

SEQ ID NO: 368655 - DNA, 289 bp, Zea mays
acctgaataccttctcgtataaggaagctctcagacttagacatgtgtctagaagatgtacacactgacagacaccaaggaaatgatccgccaggacatgctacagcttgctagcgacctacatacactgacctaccgggccgggaaaaagctataccctcaatctatcaaatgtttctaatacaaaaggaaggaaaccatataaagtagaatccttgtataatgtacaaaaatcactatgagcattgtcagcgccgaaactcaaaaggcagccgaacccgttctcctg

SEQ ID NO: 368656 - DNA, 280 bp, Zea mays
aggattttacacgccaaccgttgagaagggagcgggcggggatattgagaaatgatgtgtttgtccatccccatgaaactttaactcagggtaactttgagaaagcttcattatcccgaggttcccactgcctctctagtaccgcggagatgtgttcttgctagatatacgaactgttacctgatctatgtaacttatgaagggtaatactctattgagggattgaacttatcaccaaaatacattggacaaaataattaaattagttgacaaatttttt

SEQ ID NO: 368657 - DNA, 315 bp, Zea mays
ctcaccactttatttgggttatacaaagtcgcctcaacttattaaccttttaaaatgtcataaagtcgcttcatcttattaactttttaaatgtcatgaagttcgtgtgttcagcttccaaacattggtgatctggctggtagtgaaggaagggcaattgacaatggtacagattgactgaaccacaactccacaatgcccattccatcaaatatccaccgctcatatatggtcctctaacatcaccctaaggctacaaccagcatcgtttgtcaaactcatttcttcaccctctttaggacttccttcagctcc

SEQ ID NO: 368658 - DNA, 182 bp, Zea mays
gctatatctgcttgcttgtgcggtggacgctgcggtgcgggttgttgcggagcgtagaggtgaaagaaggggatgaaggaggagatggttttcttattttattttattttattccctatcttctttttttttctttttatctctttcttcctttctttttttcctttctctttttctttctt

SEQ ID NO: 368659 - DNA, 407 bp, Zea mays
tttttttttttttttttttttttttttttttttttttttttttttttttttttttttttttttttttttttttttttttttttttttttttttttttttggggggaaaattttgtcccccccccggggccccccaaatttaaaaaaccccccctgtccctgggggggggccccaaaccggaaggccacctatggcccctttaagggggctaaaaaaaaaatccccccggggggaaaaaccaaacttgggcccctttaaaaaatttaacccccccgggggggcccccttccaaaaattttcccgggccaattttggccccccttggtgggccctgggcaaaaaaacaaacccacccggggccctacttttttaggcccccaccctaaaaaaaaaaaaccgcccccctt

SEQ ID NO: 368660 - DNA, 114 bp, Zea mays
atgcgttcgttttatcgttcgtgtctgcttcgccctgggcggggagctcttatcatggagggcgacagtaccaacctcgacaccgctatagagttgcatgttaacgttgagaaa

SEQ ID NO: 368661 - DNA, 456 bp, Zea mays
cggttgcgtgggtagattgataataatgcattctggcggttttactcgctggctacacgcaagctgcagagtctcttacagcacgattctctatttgaactaaagggctagtgagtggacctgttagttatttggttcggttgcttgaactgctgtaatgattgtgttcactgtgtgattcagaaaacagagtatgcaaggaaaattgaaatggaacctaaaaaataccccaaggagtttggttgcgtgcgatcaatgtgattaaactttaatgcattcattgatattatattggctacaaaagaaatgtttaccagtgccagtcttgtcaatggcctggctactccaggggatcacatatcaatctgaaattaaaatgcatctgagttctgaatgaaaaaaaatcagctaacactgtctgaactactaacagaccttaaacagtatactgccgat

SEQ ID NO: 368662 - DNA, 379 bp, Zea mays
ggggagaagagaggtgagaaattggatgggataatccaccctcctccaatcctggcatgctcgtcatcactcatcatcagagtgcaacaaatccgccatgattaaacaaaagcaataagaggaaaaagggcgtggagcaggaggcgctccctgatcaaaacagccactactggcactgatgagtactgaccttgacgagaccacgcagtccttgctggtggtccccttcccctaatctacaagaaccggcgagcggcggcggtgggccacagcccgatcagttccaggcgccccaaaccttctccccgatgaagcgcaccagcctccccaccgtgctcttctcggcgctgccaccgccctcgctgtccaccgacgcgtc

SEQ ID NO: 368663 - DNA, 435 bp, Zea mays
attgttgcgagtgatagcagaccgcacgagggagggaattcttgctacgaggaggccatgaagactgaactcgtcttgtactaccataacctcctggcgtgctatggcaacctccgggatcgacatggaccaccgctgccacggacagtacgaccgtgacagggaccgcgaccagcaggaggaggagaccagtagcgtggaccccgacgacccatcggtggacaacgagggcggtggcaacgccgacaatagcacgggggggaggctgctgcgcttcatcggggacaatgtttggcccccctggaactgatctgcctgtcccccacctgcggccgttggcggttctttgtgattacgggaaggggaccaacgaaaggactgcgtggtctatttaagggaggactcatcattgccagtagaggctgttttgatcat

SEQ ID NO: 368664 - DNA, 202 bp, Zea mays
ataaatgggaaccaacttacaaatagaaaaacttaccgacacatggctcgtcttacgaaaaaaacatgtgctcccatatacatacactgcaaacgctggggtacaccaaactaaatcacgattatacatgcactggcctagcacatatacacttggtgcaacaactggtacgtatacatacaaacaagagtgagctttgccg

SEQ ID NO: 368665 - DNA, 238 bp, Zea mays
tccacgcgtccgcccacgcggccgcttttgggggtttggagaaattttatatgggggtatcgtcccctaaatcaagtgagcgatgagggcgagcgagaacaaggcaagggagaaaacaggagcaccgggccagccggaaccatttctgagaaccgaggcgcccgccaaacgaagggccgtaaagagaaacaaaacaggggggccaatctagaggagccaaggaaaaccgcccggggaa

SEQ ID NO: 368666 - DNA, 95 bp, Zea mays
tgtcctttcttgctctgctcctcctgcttcgagctgtgcggactttaaacgtggaccatgaccaacaactgcggctacacggtgtggccggggct

SEQ ID NO: 368667 - DNA, 295 bp, Zea mays
tgcctcctttctcttaccgcacatgcgcgtggggccgggtcgacatagctgcttgccggcgacacccgcagccgcaatggccgttgtccacgcgccgacgcgccggggcgtgctccccctcctgctcgtcgccgcgctcgtggcggcgttgccggccacctgcgccgtgggtcgggagcaagaagtcggacacggccatcttaagctacggggactcgctctccgacgcccgcaacctgataggcaacggcacgcccaaggcgcttaccaccgtgcgccctccctacggggatga

SEQ ID NO: 368668 - DNA, 207 bp, Zea mays
tttgcgaggcacggccaccgcgggggcactttttaacccccttgcggtatccgtccctctcctgccttctcgggaactgcccgcccgacatgcgccccctgctttataatgttccaactgcaccttcactattgagtctctcatctgttcagccctattcatgtgctccgtccgcctacaggaagggtgcctgtgcgtgaaagaagg

SEQ ID NO: 368669 - DNA, 239 bp, Zea mays
ggcccccaggctcccccccatgttcaactgggctcaaaaaatggcccaacccatgggtgaatttcgaccattacatggggggcgctcacgaaaacttttattcctgtcccgttaataaaaatgggcagttccaagggtttttttactaccggggttttgcttttgatagctaaaggaatcccttgaatcggcaaatgcgggataaaccattgagcccttttttttttttttttggaacc

SEQ ID NO: 368670 - DNA, 340 bp, Zea mays
tcggcgatgcactagggcatccacctcggcggtggcggcggcggtctccatgtcgggcagcaacgggaacggcggcggcgcctcctccgcgctctatggcttatacggtcccaacgtgaaacctgatgttgtttttaaggaggctgctttaaactctacactaaacctgcaggatgttcagggtctagttacttgggtattggtgacggcatgctgccttcttgggtgtttgttaagaacaaacctcttatacccaaagtcgtcctactatatgttcctggccttgatgcagctttatatatgtcacaaactcgacttctctcttctctgaaagaattat

SEQ ID NO: 368671 - DNA, 388 bp, Zea mays
ggaacgaagggtgtaccaccttggttctcaatatttgtcgctcgttagtttatttttaaactataccgcaacagattaaaaaaatgaagagagttttatttatacaacgaacccacttgaagattcagtgaaagtaacaagcaaccataacatcctggtctagccataaataaattaatgaattcaactctccaaggacagcttggggtcaacaaacccaatagcctgcccgtatttgggattcgtcaggctggctgcatcaggatcaggagcacgtgcgtcatattgccatttaccgcacttccgtaggcagtggccaatgttcttccccgcatgaacagtctccctgagtgtaaatagtaagggccatattatgaatcgaaaacat

SEQ ID NO: 368672 - DNA, 518 bp, Zea mays
ccccttccacgctaacgctcactcttcctcccacgcggtcgtgtacactttcaatacactttcgagcccgaccaatcatacatcccgccagacaagcaccaccacccctaattctttctccacaataactacgatgatcttttcaacacccaacattacccgtagccctacctacttcacgtgagacaacgctctctgcaggtacctaatctcaaagtcggtaaccacgccgaaaccaccctagcaaaattcccaaacagcactaccacctatgggaatgcttggacttctgcctagattccaaagcaacaacgcgccgaacactcatttacataggttaatatggaagctgtctttttctattttgaccatagccaacaaaacgttacatgagattagctgagttggcaccaatacgaaaaatgatggcccctatgaaagaaacaccgttagcatatgttttgtggtcagcaactagagtcagtaatcaagaggtaatatttaaagtctaaaaaggt

SEQ ID NO: 368673 - DNA, 309 bp, Zea mays
aaacccaaaatccaaattttaaacattttcgggggggcccaggggcttttaaacaaaaaaaggggcctactccatggatttcgacgggtttttttgaaaaacaggcccatagcgggcccgggaagatttgcgggtcccctacatataaaggtaagcttgcaagaggctcaaagcctagcaacttctaacaagcagctcctggatgaaaggggaaaatacatagcttaattttcgccctcgggcttttgcaacgccttccatgggggatgagttccagtttttttggggtctcactgtttgtttttccgg

SEQ ID NO: 368674 - DNA, 364 bp, Zea mays
tccagagatcgagaagcaagagcgagatctgggaggcttatggcaagggaagtctgcgcaacggccatgcccggtggctttcggcagatatgacgagcaacggccatgcccggtggctttcggcagatatgacgagcaacggcagcggaatggaggttggtaaattctcccaagacgatgtttcaagatgtcctgagaaaacagtgaacctacaggatcttcagaacagcttgattgcatctaaggagcttgtaaaagtacttgcccacatatggggacctggagaactgaatccgtctagtgtatcactaatctttgctctacgttcaaagtttgatgttgcccgttctatgttagaaagcta

SEQ ID NO: 368675 - DNA, 180 bp, Zea mays
tcttccacttacgcctgcgctcacgcttggggggcatgtcaaacttcattggcgctatcctatctcctccacttaaaaatttccccaattccccccattctacaatatctcaccaccggcgccatttcctcccttcaacaacactcacttaggtactgcatttcgatccacatcccccca

SEQ ID NO: 368676 - DNA, 441 bp, Zea mays
aggctcctctctataggttgcattgaatggcaagatgggcatcatattggaccaactgatccatcatcagcgacaagaggtcgactgcgacggaagccgccctttcttgatcagcgaatctggcttgcgtgtttgaattgtcactgacggctgaaagcggtgaggcagttgggtgacggcgcgaccccatccagtggctgcgcggagtggcgctggcgttgggtgcgcgccaatggcggaccgctgccgttcggtcgaggctgttcctgattgctattacagaggtaggattgggcatctgccgctggaacaaggccgccaggtcagtgtggccgagattcatttcatgcgtgcatatagatgggtagctctctgttttacaagatggtttactagactgcaacctgatctagcttctaacatttcagatcgactagcgac

SEQ ID NO: 368677 - DNA, 172 bp, Zea mays
ttacgtccagatggtgttggcaaagccgcggggtagtggagtgttaaacaggttgacgagaaaacaggaaagacacgtgcctttgacgaagcttgcatttattctgtggtcgcagagctggctaaacatttgacccacatggagctactccattgacttatttgagatgtca

SEQ ID NO: 368678 - DNA, 477 bp, Zea mays
gggtcaaaaaaagacttgaaatttttcttgaaaaaatataataatttttccactcaagggacaatgtttttatcggtcggaactcagaagcatacatcacaacggcagcatatttgccaagccctatcaggcataactaatgtctggccttcttcttgggccctgaattactttttgttctagagggcgccttgtgcagaaatggctggcgcttgttcctcttcttcagcttcgccttcttttgtttcttatattcgctgtcagggtctacaaagtcttcatcactatcaccttcaaccggaacaaaaccatcgtctgcttcctcattgttgccatcctcttcatctgagctcaagaccaaatcctcaacccgatcctcctcagtcgcgacatcatcatcctcccggggtcgctttttatcctcctttggggttttgggtttcttattttcagacagccagttcttactgaaagcga

SEQ ID NO: 368679 - DNA, 117 bp, Zea mays
ttcccgctctcctcaacgacttcacatactggaacgggttaacttacttcaggttgcccactgcgccaatcatcgacctcgcgctgcaaatcccatatagttcgactaggacacatc

SEQ ID NO: 368680 - DNA, 141 bp, Zea mays
ttttccggagagagtgttggaaagatcgcaagtgacgggtatcattacaaacatgctcttcatgcaagcactggaaagtgcaaaccatgttcccactaaaagttggtagagagcaacatatgagcactgcttagaacctac

SEQ ID NO: 368681 - DNA, 180 bp, Zea mays
ttgatttgtttaccccccgaaatttgccgtgtgctcggggagctcctatgcgtgcgcagcccccagatccggcaccgcccgctcctcgatccccgcaccccacgcccgcaggccgggaccggcggggtcgcgcgccgggtaggaggaggagaagaggaagggcggccttcgactcgggcg

SEQ ID NO: 368682 - DNA, 188 bp, Zea mays
tttgatccttttggacaggaggagagtcagtggcacattataataacctttatatctaaaccaagaaagatacacatccctgacttatctggtggcatctcatatccttgaccgaacttgtgaaggtctccagcaaacaactattggcttttatcgatcctcatcgtaccccatttttcaaggaacaa

SEQ ID NO: 368683 - DNA, 465 bp, Zea mays
aacgcaccaagctaccagttatgcattgttgctgtaataaacgggcagttacaaggatttgcagtaaccaaaatcgcttgcacgtccacctgaaaaggactgctttatgcattcaaacatcttaagcctacatgcaaaaacaaaaacaaaaccaacactgttaatgcctactacctacatatccggatgatgtttacttcctacagcttgcactccagtgatcaggtcatcattgtaaccatgaatcagccgggataccatccggcacaatcttagtattgctgtgcgaccagattgcaggttccttatagaagccatggtctcgtctatgcttggctgtgctagcgtagtatgtgcttcaaaaaccttaatgagctcagatggttcagaagggtagaccgagcggttcaagtctgtcatgtcgatgatgaaagcaatcttcttgccactcttgaaactcatgaa

SEQ ID NO: 368684 - DNA, 120 bp, Zea mays
  unsure (1)..(120): unsure at all n locations
tccacgcgtccgagggggtccgaagcaagaggaccatggtaaaatttaacagggacctgattcatncatatgcatggaggccggcctgactcattctttcatgcattagagattgagaga

SEQ ID NO: 368685 - DNA, 424 bp, Zea mays
tgctccttccttgcaaccatcgggacccatgtgcctttttattcgcgagagccatggagaaactgaacactgcacgccatgaggtgctcagaaacggatcgatcaaccagcagtagcaagcgcggttgtgcatcatgcatgcatgtttgttcttcttttcttttgatttgttgctggtcgtttaatttgtcgccgccgccgccgtcatggttagttgcgacgacgatggctggatggaagagagcgtccttcagtccactcaggggcggtgctagggtcgaattaactgccgactcattcacccacatgccaagcaaacgggcatggaaaccaactttgcagatgagtgaatgaagcgggaggtaaaaggtttcaactcgaaccgtctttgcttggactgaaaggggctccctcctccctcgct

SEQ ID NO: 368686 - DNA, 375 bp, Zea mays
  unsure (1)..(375): unsure at all n locations
gaaggactcataactgctcagatttacagcttacaacaaagctttcagtttttggctcattggtctaggatgcaataaaagaccacattggcagctttgtcatggagtaaatccatgattccatttccatgttgcttcccttatcttccatgtaagttgttcgaacagaaaagaacagggggggggggngggagtagaaatgtaaagaaatatgagctagctaataagtgggggggaaaaggaagagcaaaggaaaaacaaaacgacatcaaaggtacacatatgcagcagtcactgaaactaacgaatggtgtttacttctatcttcctagttagaaatacaggaccttaacctgttcactctgtttcttgtat

SEQ ID NO: 368687 - DNA, 136 bp, Zea mays
ttgtacttccttgaaaccatcggggacccatgtggcttcttgttggctagagccatggccaaactgaacactagactccaagagtacctcaaaagccgctcaagcaaccagcggtggctagctcggacgagcatca

SEQ ID NO: 368688 - DNA, 139 bp, Zea mays
gtcaagaacttgccgatgcagctgctcttccggaactggtgaccaatcttaccggtgagctacccaaccacagcatgccgccgctcaccgcgctaaacgtctcctttaacaaccctcagcggccagatacccaagagct

SEQ ID NO: 368689 - DNA, 373 bp, Zea mays
ttcttcgtcaatgtcatcacaaggggaattttcaagaaagtcaccttgtaatggtgcacatgatgtgtccaaaaaggttggtgttcgtaaagatctcaaactctcatccttggcaatatcaagaagggtgtcaccagtaacaacagatgataaaattgatcggctggtctcttcgtcaatgtcatcacaagggggatcaccaagaaagtcaccttgtaacggtgcagatgatgtgtccaaaaaggtccggtgttcgtaaagatctcaaactctcatccttggcaatatcaagatgggtgtcaccaataacatcagctgcatcagatggcgctagaaccttatcaggaagcatggatcttactgaaaaagatta

SEQ ID NO: 368690 - DNA, 207 bp, Zea mays
ttttaatgttgagagattcaaccgacctcaggggaaatgtaacatccctcgggatgacacccgcacctccccaaacgatacaagaggctgacacagatacctccacacaaacacctgcccaaagtacctggagggtaacctggccagctaaacctattggtccaagaacagcacatcttatgaagacatgaccgtcttgaccatgtg

SEQ ID NO: 368691 - DNA, 371 bp, Zea mays
ctcaagctttcaccaaatctctaaaacccgagccctgggtagacacttatccggtgatcaaccagccagcccatcttaacgatccgccatggccaccgcgaatcacgagaggccccgtggcggcccctgaaaggaggccaaccacattcaaaacgttcgaccccactccataacagactgagggcgacctcgccacaaccatcagccgccctatgacaccgccctaggaaacctgctaccgcggctcggcgccctcgacctactacgacggaccagactactccgaactacgagcacgccccctacggacaccacgccaagccaaaaaccaactatgggttccggccccaacaggagcaacaaaccactta

SEQ ID NO: 368692 - DNA, 150 bp, Zea mays
cccacgcgtccgcccacacgtcctgccacgggtacaagctcctgctgtttcaatctccgagcacaatgggtccgccgtggtggcgatggtggggaagaactgcttcgcgattgccagcgaccggaggctcggcgagcaccttcagaccat

SEQ ID NO: 368693 - DNA, 284 bp, Zea mays
cccacgcgtccgtggctttgccgctttgggcaacgcgcgggcagtgggcactgctgtaccaggctataccagcatcagcgaagagccggcgttcttgagacttgagagaggagagcgaccgacgacctcgaagcttggcctgcgcggtggtgacgatggatgtcaaatgccggcgtctggaggggaaggtggccgtcgtgacggcgtccacgcaggggatcggcctagccatcgccgagcgcctcggctggagggcgccgcgccgtcgtctcctcccgcaagca

SEQ ID NO: 368694 - DNA, 302 bp, Zea mays
aagaaagaggcggagggggacgagccagcgcccggtgaactacacagagccaaggagttctccaaagctaagaataagggagcagcatctgcagtgattgaagaggaaagaactttatgaacaacaaattgagcacctcggacagtgctggtccggacgacaacggcggcgcatcatgttagaagcacgtgaacatgccacctttctcggcgatgccttgagacgggaaccagccaatcttcaaggacggcaaaggatgcgggtacctgctaccagatccggagcaaggcccaccctgcgtg

SEQ ID NO: 368695 - DNA, 447 bp, Zea mays
aaagctgaaaggagtgattgtaattctgctaccaacataaatatttacagactgaaacaggaaaattatgaagttaatctgaattccccgtacagaagtgcatggtccaacatttctgtgccttgaatatatgcagcagaagcagaaaaaaaaacagtgctgccaagagtcctccatcaacccctatgattgaactccatcaaggttttgcaacatttcctggctcaatcatccagacaggtctttattttccattttagttctataaggcaaattcacagccagctagtcagctacctctcaaagcttctgtcaaatctccgaggactcacccccctttggagatctggcgatctgggagcagaaatacgagtccgaaatttatcaccagtatcatttctaaattgctttactgcaccactccggtcatatcgcttgacagaatta

SEQ ID NO: 368696 - DNA, 424 bp, Zea mays
cacaatctagaaaggaggacattgctgtttcacctgtgtcatctaagtgttcatggttaacaaactgcttagatggtggatctatagctgatggaaagtctcaaagtattcatttgagaggtgatactaacatgtatgggtcaaacccaagccgtgtagcagttagatctgctacaacagtaagccagtctgaaaggtgcaacgatgccctaggtgatatgttaaatatcagaatgaagaacacaggttgggatatgatgcctgaagatcaaaagcactctcaacatgatgcaagggatgtgactgattcgtctaatcggtgtgttttgagctcagatgcggctagagacgatgattcactgcaaaaaaagggactattgaatagagatcttaaggagtggaactgcaaaaatcatttgacaga

SEQ ID NO: 368697 - DNA, 239 bp, Zea mays
gtggcctttttaatgttcgacattgaccacagtggttaatttatctcgccaagaaaaaagacctgctcgttatgagcatgttcaatcatctgacttgtttgctgcatggtcaaagaaggggtgctagacagagaagagtttaagaaaataatggcactgatgcggtcctttaacagacaagggtcgactcataaggatggtttacgtattggacttaaagttggcaagcctgtggaaaa

SEQ ID NO: 368698 - DNA, 331 bp, Zea mays
cccacgcgttcgcccacgcgtccgcatggcttcagctgcttctgaaccaggagaacaagcccatgctgaagaggggcgcgccgagacaagtcctgtcctggacgagcaggacgacggcgacatggacgatacagatcaccccatgaagtccttcgtcagagctgttctcgtcgtcgccggcatgtacgggcggaggcacaaccctggcaacgccaccatgtcagagtgcgaggtcaagcctatccccaagtgggtgctggaggaagtcgtgtccccgtcctcagccccggcgggcagcggcgcggcagccgtcatggaccaccggctcctc

SEQ ID NO: 368699 - DNA, 399 bp, Zea mays
agaaggggacgttccaaacgtttgcaggatagttcagatattgtcactccaattgactcaaaagatagtgagtcctctccccagccacctattgccgcacctgccgaaagtggtaagaggaagaggggacgtccaaagcgcattgatggttccgtgactccttcaagtcattctgttttttcaatagatgatgatgctgttgacacgatgaaacgtggacgacctaggaaaattgataccaaactgttacagtttccatctttattttcagatgatcctagacaaactgcagataatgtactcatgatgtttgacgccctgcgacgcagacttatgcagatggatgatgtgaaacaagctgcaaagcagcagcctaacttgaaagctgggagcatcatg

SEQ ID NO: 368700 - DNA, 425 bp, Zea mays
gtgaaccaagttaatactttccaagacttgataaaggagtacgaagttgtaatgaagggtccattcaactacacggctcgtgatgaagctggtataccccgagaatggttcatgatagattagcttgtattgttgagatggaaaaagagaatgcaagtttgggataagcagttgaagtctcatcctccaaagaacgttgaatcggaaatcttgcgtgagcatatcaagaaagagagggagacaacaaaggctggaaaatgaccatactatctgaagaaacctgaacttcgcgaaaggaagctgatgaacaagtacaacgagctcaaggaggcaggaaagcttgatgcattcatggaaaagcggtggaggaagaatgcctcaaagatcatcggttatgccgtaccgacgcatggagatgtataata

SEQ ID NO: 368701 - DNA, 285 bp, Zea mays
atccttaaaagaatatatacatctgaaggggctgatcaatgtaatgtgttgtacagaaagttccacaaatgtgaaaaattgggtgttttatgtgggaacaattacaaaaattacgtattcatcaatagagcattttttaagggcacactgggtgcaatagggagaacgttttactaagtcaccgggtcacagattcaaagcagtcttttcgtattcgcgagggaagtttgccttggtttatctttttcccataccccacatggccacatgagtgggggagccttt

SEQ ID NO: 368702 - DNA, 407 bp, Zea mays
ctaaaacattttcttttagtcaacaaagagaaatgggctaagagcatgttcttctagtaaacaaatagaaattggctaagagaaagcaaaggagctggggcgcaatatttactgaataattttttgaagggaaaaaggaggaaaaggattttgaaccaaagaacagtaaaaaatcaaccggcagcagcctcctcaataccgaccagctattctactgtctagcttaattcttttggatccctttggctgttctttcctcgcggcagacacatcgtgcagaaaggtgcagttcgcaccattgcggcatcctctggcgctgttgaagtaagcacaaggcctcgtaggcctttgcttagtatccctagctggcatagtaccactgctgacaatatcagtggcgctagact

SEQ ID NO: 368703 - DNA, 384 bp, Zea mays
ccgacgcatgtgtgcgctaaaaccggtaacgatggggccgaggcgctccaagcgcgtttcgtgggccaccggggccaatctctgcaaggtaaggttttttatttcggaggattccccttctcaagctggattgagaccgcaggacaatctccaagcaaaaggctcatggttaatgcatgcagctggcccaagctcagatgattcgctgccacctggcttcgaatcattgcagccaacaagctgtctcaaaattgacatatcccaaatccatgttattaggtggagatgcccaccaaaggtattgcataatcctgtttggcttgtagctgctggagaagaaagtgaggaggttgccttgcagaatgatagaatatttggagcact

SEQ ID NO: 368704 - DNA, 332 bp, Zea mays
ggcacttacagaggagcagatgttctttagaggcatgttgtgttgtactcttccacccactctctgccaggttgtggtggaaaacactcgtgtgggatctagctggctcttgtgcaattggtatgccacagctgctcttctcaccgtgtgaggacgagcacagtaaaagctaagcatttcttggtaatcctgcctgtcatggcatcgatcagttaattcctagagtcttgatcattttgttttgcatacatgttgagactgtgcacttgccaaactacatgataggtaaactatcgctggatgttggtttgaaatctgattcaggtcccaca

SEQ ID NO: 368705 - DNA, 249 bp, Zea mays
ggcatccctggccaacagggatctcaactacctcccccgctcgccttgcattagggcgaggggaactcaatcgagcaaacaaaatatgttcatccatccactctatatatatttactgcagatccccccaaagggaggccaaaacaaagaaaagcagcaaacagcaatgcaatgaaattgcagccatacaaccactctttgcgcaaagttagttgggtctgcgaggggatccatttttcccggcccttt

SEQ ID NO: 368706 - DNA, 201 bp, Zea mays
gagaaaaggccacaaaacaaaaataaatattatttaaattcaacccggggggtaaattgcacccccccccccggtgggtttggcccctatattcaagaccccaaactaaaaatggatcaggaacgagcatgttcctcaacccctgttcccaaaacaacccagggaaagcaatttgatcaaaacccaaatggggggaaccct

SEQ ID NO: 368707 - DNA, 423 bp, Zea mays
aacagatcaaagtcaatagtgattaacttaaaagcaaatctaaaaagacaaactcaaactcatgtccacagaaggtagtattttgctactgcaccggtttacaactactattgcaccggtttacaactacgcgaactgaactatctgaatacaacatgcctatgccatctcatttttgttttatagcatcctgtgtgacacctgaactacacatctcggccttggcagtgtaaaattatgcatgattatcacatacacttttccgatgaaacgttttttttgttacattagggtaataactgtggagatattcaaaaaaaatcctcgccctgcaaacaattaataaagatccatgaggacgtggatatatcatcttctcgaaaatctaggtcgccttctagtaacaagagaagctccgctctc

SEQ ID NO: 368708 - DNA, 442 bp, Zea mays
gacataaattggtccattgatttcaccagcacacccaggccatacattcagttcaccgttaagttcactagcacacccatacatgatacattcaacataaattgacaaaagtgcagaacaacataaagtgcatattgctgaataacaagcaccaataatgattgactgaagcagctcagcttgtctataaaaaaaagataatcctaatcttcctccacttgaacaatgtcattatcatcgacgttgtggtcaacaacatcggaagcatctccatcatgatcaacattatcatcactcacggtgtcaataatattagataaatcatcaagaagtgaagttacattatatggatcttttctttcggcccttatccaatcctttgtgcaaatcacatggtacagctaaatcgacagtcaagagtgcaaaagtagtcaaaaatact

SEQ ID NO: 368709 - DNA, 105 bp, Zea mays
atataaactcttttggggcgaaaagaacattttcaacatacagataatggagctgcccgctcagccctgcatcgtcaccatccagagtccagaccctatcccatt

SEQ ID NO: 368710 - DNA, 346 bp, Zea mays
ctttccccccatttcgcgtctcggggtttggaccagccacccggcggaggcggccgggcagactgggccgagcgaccggagcgccgccgccatcggcaaagccacgggacggcccatggagtcgcgagcgctcctgcacgcccggcccgccgccctccctcaccgcgccggcctgcgcctccatctcccgctcctgcgcccgcgtgcagtctcccgctcccccgccgccaagcccgcgctccagtccccgctcctcgcgtcgaggggccccttccttcaacggcacgatgcggttctgggcaacgggttcgtgaaacggagagcggccagcgctggcggtgatgtg

SEQ ID NO: 368711 - DNA, 350 bp, Zea mays
ccgaaccgtcctctaggctactgatttcgggtcggcccgacccattctccacttcttcagcactagtcgcgggctcgcggtcgcggccgaggatatcgaagctgcgagcaacgcgatcgagcgcgacgcgggtgagacccgagagagccgtgagggagccagggagggaaccccgaacccccgtcgtcgtctcgtgctcggtctctccggctggcggcatggagagtgccgtgctcgcctgcgaggcgccaaccgccgccgccgttgcggcgcctggagcgggaggggacagaggagccgagggcgtggcgatgctgaggcggtcgggcctcgcggcgtgcctcacgtgt

SEQ ID NO: 368712 - DNA, 327 bp, Zea mays
  unsure (1)..(327): unsure at all n locations
cccacgcgtccgtaacaggttcgtctcttcggctcctccttggcttcgcaagagtggtgccgccagtagctcctccgcgctccgccgggaccgacttgccgctggccgccaggggctccctcgcccaggaccggctccgccgtccaaccgtcctatcccctccggcctccgcccagtgcgggaagcctacaacactgggtacacccttttttaaagaagggtgggcctagcgcagcggtagagcctaccgtctgtaactggaaggtcctgggttcgagccacaacctcatattatgcngngtaaggcttgacgcttaaagataccct

SEQ ID NO: 368713 - DNA, 103 bp, Zea mays
accaacaaccacatcacatggatcagcaatgcatgatgctctctgttcgtgtttggtacataacagatgagttctcaaaggactggatgctgcaagatgcgtt

SEQ ID NO: 368714 - DNA, 394 bp, Zea mays
ggggaaccaagtggtttctgaataatagtgatggtaatgatacacgcggcctttatttaccaaatcacaatgccattatacacattactagcagaacgctgagctagctggccgcaaacaagaatatatataaaaacgcatgatctggctggctatcgatctcgaactctcgatggatcctattttcacatgatcgtaactaaaaactccgagttgcatgcatgtcagggcacaggccgtgggctggccaccagtccggtcgtaccgcaggaacgccatgaccgtcgtccaggccgtgaggagcaagaaggaagaggaacctgagaagcagcaacagcccgctgccgccaacgccttcgtgaaggtcagcatggacggcgcgccctacctgcgc

SEQ ID NO: 368715 - DNA, 447 bp, Zea mays
gaagaagaccacgacctcactagtagatgaatcttatgagttatttctgagccttgtgaagttcaaggatggtttcatggttattgaaccagaaccaggtgtcaccattgtatatgagcgagaagaagatatgccagctggctatgatgaatggagaactggcagttccacaaatgaactgtctttggtgtctccacttgaaaacacggagggagactacaccatgcaaagatatgattatggccttgcaccggctaacaaaatttcttctgaacatgaaatggctgcaccttcttcagagaacattgctggtcaggatattatttgcacagatgagcatggccttgtactttatgctgaaccatctgatttaaatgcatgtgaagatgaacaagcaacacctcttgctatcagctacggtggttcatctacatttgatgaaaaact

SEQ ID NO: 368716 - DNA, 241 bp, Zea mays
aaaggaaagaacaggaccagtttatttggaactaggccgttaaaaaataacatgtcccgtccggtggggaccgatttggccattaaagatcccgcccaacattggttggttatgccccttcacgtttacaggtacgggttaaaacaggggcccccattaatttagggggctgccctgggtagggggggatacaggcggcccacggcccaaaagcgttgggggggggctcgaagcactccca

SEQ ID NO: 368717 - DNA, 361 bp, Zea mays
gtttcttttttcgcttcctaagattcctctttcttccccaaccccaccctacgccttttgccacgccgcacggccgctccctcccttcatgcgccgccgtatctcaggtcagcatcgccaaccgcagctccacctcccgatcccagccccaatctaggaggaggaggaggaggagaaggccactttcaggattctgacgaagccctccctccctcggccgcatcgcatgctaccacgactgaccaccaccagcagtataaacctcagcagcaggaggaggagggcaggatgttcaagcttcaccgacaccgctcctccgaccgcgtcggcgagcgcttcgacttcagattctccaacttcc

SEQ ID NO: 368718 - DNA, 304 bp, Zea mays
accaccgcgcgcacgtcattttattaagaaaaagaatgtacatagagtgtaaagacacatggtcttgtattcagcgttcctgtaaatcctgaaaaaacccacctgcagcacccacaatacgacgactcagtcagactgaagcccaagctgcgcagatgcatgctattcctgaagcctttttgtcttccttttcaaaacaccactcatcatgtctgacttatgctgcagttttcctcgtaattcgatgtccttgcagaagcgaacaggcaaaggttgaggagcagctggaggaaaatcttcagct

SEQ ID NO: 368719 - DNA, 406 bp, Zea mays
cccattctcccattgcaatgagagagttgagtcccttcctaaacagcccattaacaatcccagaaacttcttcccaccaactcatgaaggaaggcgaatcaggttgaggtgcaaccatttgcagaccaacttgattcaggagcttgaaccagaaatcccttgaaaacacaagccactaacagatgatccaaggtttcagcttcctgatcacacagagggcatttagagggatgataaattcctcttttagctagcctgtccacagtccaacacctgttatgagctgcaagacaaaggaaaaatttacactttggaggagcccaagttttccacacccttttgtagtgaccaaaggaggttgatcctgaaaaaagccccttatacacagctttagctgaatacaaac

SEQ ID NO: 368720 - DNA, 232 bp, Zea mays
caaggggggggagaacaccagctagggcgccttgacagctgtaacttggaagagaagacaagtatcgtatatttcttacatgcccttctccaggcagctctcaggtatttatactagttactttcgctcagcccattaacccaggacggcccacaaactctagaattccttctcctcactctcccagacgtgcgtgctccagcgtatgccttggttgctgcagttggcccgg

SEQ ID NO: 368721 - DNA, 254 bp, Zea mays
agaagggggttatactgaccatttgggggccatgtggtcggacatgcctctcaaaacatacaggagttgaaatccgcaaaaccacaaagccacggcaaccatccccaaacaattcttcacaattccacaaaacccaatgcgacatccgtcaaacctcagctcgacttcagcgcgccatgtagcagctacaacagaatgggcaagcacagcaccaaggccaaaacagcaaggggaaaaggcacgagcgtgcaagt

SEQ ID NO: 368722 - DNA, 99 bp, Zea mays
cgtatagatgaaagctggcacgccggcacgtaccgcggacgtaccggccgggaccgacccactccgtagctatgatagctttatcggccagaagcagag

SEQ ID NO: 368723 - DNA, 142 bp, Zea mays
tcgatcattagtactattgattagtattattgaaacagaggcattgccgatactcacgccggcgaccgatgggatcggagggtgagatcaccggcccgctcctcgcgtcgggcgccggtgcgccggtgccggaggcggtgcc

SEQ ID NO: 368724 - DNA, 160 bp, Zea mays
tcgtctacgtgtgcggcatcgcttttttacaaatgcatgataagtttattatcatctaactaaatgctttaggcgtgacagaataatcattcggtaaactgacatgtaattctattttattttgtaacgtaacatatcatctcttatctactaacttgat

SEQ ID NO: 368725 - DNA, 399 bp, Zea mays
tttttaataatttttttttttttttttttggacccggaggcatgctatagtctcacacgtgcatgtccaatgctccgaattttacagcagaatacttgtcaataactcaatcgataccaatgctagggtccgaagcctctttgatttaggtacctatattatataccattgtctttagtcaacttaacacggcacgcgaataaagctgagctctgtgatcaggttggcgcaaaacacgcaaacatgctgcaatttttccttcactggaccttagtttgtctactacaggttatagctcatccttgacgttgtcaggggccgctactgtctccacgtctggtatttgcagcttctccttgatcagtttggccatgtccttgacactcgatttctttgaaa

SEQ ID NO: 368726 - DNA, 506 bp, Zea mays
gtcaaactctattaatgctacctaactttgtgaacgaaggattcacaaatatggccttgacaaaacagcagcttaactaacaacatattcgctattgttatcttacagtaagcaccagagcaaacacactgtgcataattgactgaagaaaccaatcacctgtaatggacagggtattatacttttaatcccaaacttcgaaaacctaactaacaatttcacctcaatgcaaccggaacaaattctcaatggaagggccaatggacataacttcatacacccttaggttcacgtggggcctggaaagggtaaacaaggccaggccattgttggtgaccttggcacagccattgatatgcacagcttcaaggcgcggacagccattgccgagggccagcaagctctggtcgcagatgtgccggcagcggttcacatgcagcactcttagcttactgcagtacagcccgatcgcagaccagccaggtagatggaccccatggcaaaca

SEQ ID NO: 368727 - DNA, 406 bp, Zea mays
tccttgcgtccgcccacgcgtccggttctcccaaatctgagagcgttcccaggacctagggttcttgagatccagccccaggatggatccttaccctaaagcttccctttctcctcgccattagttgttttcgcgtttgttatttccttttctaatctgtctcttttcgaagtttctttttttccttgttctgcctttttataaatgattccgcgcgcggctgctctccctactatttttttatcgtattccgccgtgtaaaaaggaaaacttgctcgatgtcctttttgtttgttgcttggtaataccgttcctgtttgctataattattcgatcagcggggatgtgaaagtacttgttttacatttgttcgggttctaataaaggactggtttggacttggctt

SEQ ID NO: 368728 - DNA, 266 bp, Zea mays
ttcatttgtgcggcatctcttttgtacaaatgcaggaaaaggtcattaacagcgaactgaatgactaaggtgtgatcgaaagaacaaccggtacactgtaaggcaatgggctgcatatatttgcacgaacgctacgactcttttctactgaattgatgagaacagtaagcaagagtacatggagcatgattatgagttcaggaaatgtaatcaatggaatgcttaaatagaatctgcgctaggagatacttactgttaaaagacag

SEQ ID NO: 368729 - DNA, 213 bp, Zea mays
tctttcgctcgagacgagagccagctctcccagcgcacgagcacatggcgtccaccaccctcctcgctgtcttgctgctcgtggctgcgtccgcagcgccggcgcggacttgctcaccttgcgacctgtaggcgctgttgagcgtgatgcttgctctagggaacccgtcaactctgttgacgtgttccctagctttttctgtcttgtttttcg

SEQ ID NO: 368730 - DNA, 589 bp, Zea mays
tcagctcttaacatcaagcagacccggccaggccagcaccagccgcagcaatgacgtccatgacggcagctacagacgtgaagccggcgccggccgctggcggcccgcagctgaagctgctggtggacaggcgttcgcggcgcgtgctgtacgcggaggcccgcaaggatgcggtggacttcctgatcggcctgctgcgcgtgcccgcgggcctcgcggcgcgcgcactggccaagcgcggcgagcccgcgccgggctccctgggctcgctctacgcgggcgcgctggccctagacgacgccttcttcgtctccagctcgcccaaccgcgacgcgctgctcagcccctcgacgctgccctccgccgcgctcccgctgctgctcggcgagggcgcggtcccgccggcgccggcgcctcccccgccgcagcggttctttcggtgcaacgcgtacgcgccctcgtgccgcgggaacccgacgaacgtgacggacgtggcgggcctgccgtgcccggcgtgccggcagccgatgaccatggagatgcggctgccgcccgggacgcgcacgggaagcaactggcgcttgcgcgg

SEQ ID NO: 368731 - DNA, 541 bp, Zea mays
tggttgcgtgggcggacgcgtgggcggacgcgtgggcggacgcgtgggcggacgcgtgggcggacgcgtgggctcctattagcatattatagtcacatgcaacataaaaaatcaactagcatgtccgacaaaaggaggtgtgccgcaaactggtgccgacaagcttgaccgacgttcggtcatgcccaacaggactttgtgcagcaaactgttacccgccagaaagcccgatggcgtcggctaggtcagtgtcgggcatgtacaacgagaccatgcgcaagaaactgttgtccgacaaacatacccgacaacgtcggatatgtagaaccagtgtattagtttccccctgtttactatttgcctaattaaccatgcaaaagaaaaacagctagcatattatagttacattcaacattaaaagatcaactaacatacctgggttaacctttcccacacagcattcgttttcagttctcaacaaggacaaatcgttcagcaacacatatattttgtcttcaactataaaataagaaatattttg

SEQ ID NO: 368732 - DNA, 229 bp, Zea mays
tctatgtgtgcggcatcacttttgtacaaaggcaggataaggtgattaacagcgaactgtgtgactaaggcgagacagaatgaacaatcggtaaactgagagagacaagggcatgtatattttgtaacgaacgctactacacttatgtaccaaattgatgtgaacagtaagcaagagtatatgcagcatgaatatcagttcaggagatgtattgaatacaatgtttaaa

SEQ ID NO: 368733 - DNA, 433 bp, Zea mays
tcgtctacttgtacggaatcgttattgtctaaaggcttgaattggttattatgatcttcctataggccttaggcgagtcagaataattattcggtatactttagtttcattatagtcttttttataattgtatttttattatttatctactctttttgtattaaacttaatttaatatcacttttatctttatttttatgatatttaaatttttttattttttattatattatattttatttttttttataattatttcttttatttttatttatattatttttttatttattaatttttttttttattaatattttctatatattatttttttttttacattaatatttatttttttatttttattatttatttatattttatttatatatttttaatattaattgtaatttaatatttttttacattttta

SEQ ID NO: 368734 - DNA, 120 bp, Zea mays
tcgtctacacgtccggcaacgatatgtcctataggattgtttaaattactatcagcgtactaagcgactttggcgtgttagaaaaaataatcgttaaatttaagatttataatatcttat

SEQ ID NO: 368735 - DNA, 300 bp, Zea mays
gggacagcaaaaccactgggggctacggttttttttatcacatattacagcacgggttaatcgctgggaccccgtcgttttaataataacactaaccgttcaccgaactgggagaaacaagaccccaaaggaaactagaaagagagaaagctaggggttaactaatcccgaggaaaaattcggggcgagggaaaaaagagacgggaaaaaaaaatttacaacgaatccacgaatgttggggcttcggtcaccccggcaaggaggaaggggaagagcccgccccggaggatgaggaggaaa

SEQ ID NO: 368736 - DNA, 237 bp, Zea mays
agggaaatgtagtaggcccgaattgaactgctaaccaacatttgacacagaggatatatattattcatgcgcgcgctcacactggaagaaagcgctctatggtggtctgacgacaacaaacaagaagcctgccaagaaatacagcaccctgcatcctaattagcaacacatgtacgtgcatgctctattccacaagctctcaggcactggctggaacagatgcagggtcgatcatcc

SEQ ID NO: 368737 - DNA, 61 bp, Zea mays
cctgctggatgcagacgcacagcccgaaggcatcaacgcctctacccgctacccgaaaaac

SEQ ID NO: 368738 - DNA, 110 bp, Zea mays
atgcggtctttctctcctggcacaggaaaaacgggagggagacaggcgtggctctttgttcgcccgatctgctctgccccgacgcagttgttactaccttctcagtcttc

SEQ ID NO: 368739 - DNA, 168 bp, Zea mays
attaaacttatctgtctcgggggtaactagatcatacatcgcatccatgtctacctctatattttgcataattatgcatctaaaatttaaacctcaatctctgactcaactacttcattattctaaaaacaattatattgtcacgtaacagcacacggacacaacaac

SEQ ID NO: 368740 - DNA, 388 bp, Zea mays
tcgctacagcaggcatggcaggtcctatcctagagtgtgaggagcctgctgatgttccattggagccaaattctggtacagatgatagatgctttatttcaaacatgtttttacttttcatgacttcagacaaaaagaatgctgctgaatgttccttatcgaatattgtccctacagaatcaattaccgagcatatttcaccaagggatctttgcattgtcatactgatgaaagatggactaataaatgaatcaagaacaagaatggcacatatagaggaattcactgacattgatgctaaccctttgctgtcatgcaataatttcggcttgcttggaacatttattgaagatgctgatttgcgattcttgtgaatcatgattttatt

SEQ ID NO: 368741 - DNA, 211 bp, Zea mays
gaaaggacttggcccaaatgagccgttcggatattcacatacatgttcatatccaacccccatgaatacattaagcgaccaatacggcccatacaccatacggaaataatcctttggctttcttgccccccggactaattcataacgcgacacttgctgacttccattatcactaattcataacagaaagcgggttccaaatctaataatg

SEQ ID NO: 368742 - DNA, 385 bp, Zea mays
tctttggatgatttggttgcatgcttgcacgcaggatatgtcccccaagttgagttctcttttctttgcacctgtgcacgcaggacgccacggatcttctgctgcaggagctgagccagatgaaggatgcggaatacaagataaacaaggtggagaaagaacagaatgctgctatgaaagcactgaagaagcaggagaagcgcaccaagaagactgccatcatgatgatgaagtgtgaagaagatgagtcatctgagtcgagcgagagcgattgtgaggacgaggcaaccatgaatgtcgagcagggcttgggtgatctcaacagcggttcccgagggttgttgcatcaagcatctcagctgtccccgcgatgggagtgtgataa

SEQ ID NO: 368743 - DNA, 287 bp, Zea mays
tcttatctctcagctggtcgctcactcttgcaggtccacccttcactcagtcttaggctcttagctctaggctctagctagccgcgccactccttcgtgtagccatcagccttctcatcgccaccaatggccactgccgaggtccagaccccgaccgtcgtggcggccgtggaagcgcccgtggtggagaccccgccgccggccgtcgtgcccgaggagtctgcccccgccgaggccgaggccgaggccgaggctgaggctgctgctcctgctgatcccggaggagc

SEQ ID NO: 368744 - DNA, 404 bp, Zea mays
tgtggccgccgcccttctgccgtccgaccggaccaggtcgccgacgtcgcccctatcccgcacgcgtcatcgcagcgcctccgagtctccgccaagatctgcctcggccacggcgcggcgccgctggagctgcagccgtccagccgactgccttccgccgaccaccgaccaccgaccactggccgagccgccgcagctagctgcgctttgaagcatgggtcgttttgaacaagttactccagaaggccctgaaactaatcagcatgatgagcagcgctccatacgtttacatgcattttctgatctatcacacgtccctgcagccacttttatttatctcttaaaggactgctatggatatggtacgaacaaagcaacctcaaagtttaagatcctcatgcagc

SEQ ID NO: 368745 - DNA, 316 bp, Zea mays
aatggaaacaagttccagtcttttgcacttccatgcatacagccttagtaaggacgttacaacttctaaaacagctaagaaaagataaaacgttcaatgttggagccataaacaatgaagtcctggcatttgggaagcactcttgcgtacaagtgctacacatttcacatgaagcttattagtgagtccacagtagatcagaaggctagctcaggcacagaactaaacagcccgtgacgttacgcccccaccacgttctacaacaacacaaccgtttgaagacccaaacaaccattctcccagtatgaagaaactc

SEQ ID NO: 368746 - DNA, 334 bp, Zea mays
agtcttccttactacagccccgacgccaccaaccgggtggccgtcttcgtcgacgacaccggccccgacctctcctcttcgccgtcgtcgctcccgccgtgcaagcgccgtctttcgccttccccaccaccaacgcggtccgcgtcacgctctcggtccccccgctcccgctccccgcacggccgacgctcgcgcagccggagccgcagcccgcagcagtacccgaccgatggcaagcggcatcggcacaatggccttaccgaggatgcgtgccgtgatttcctgcgcgacaggtgcacccgctccaacctcgagtgcagatacgcgcacccct

SEQ ID NO: 368747 - DNA, 130 bp, Zea mays
tttttcattgcgcgcttagtggctggttttgtgcgttgtttggctaagttttttttttttttggttagaataaaagggagaagagaaaacactccagttgcgcagcaccaaaaccggttcaccactctct

SEQ ID NO: 368748 - DNA, 234 bp, Zea mays
  unsure (1)..(234): unsure at all n locations
ttttcttctcacgcgnccgggagcccacaaagggggggctttttttacaccgccggaggtttcccccccaccccccacttcacaccaaatgccccaaaacccttcccgttttaaaaaaccacgaaatttgtaccggccatactcgtcactatttgctgtgaaatgggcaagagccttccttctggtgaaagccaaggatgatagttgccgtgcctgatagagcacaatttcaat

SEQ ID NO: 368749 - DNA, 445 bp, Zea mays
  unsure (1)..(445): unsure at all n locations
tgttgatctctcctcctggtaactagctagatcatctattgtttttattttaaatttgaaaatttacttctgatttgcaaaacaaatggatatagttgttcccttcaatcatgtccaaggtcaagaaccattcaggtcataaacccctacgacaggggccacgagggctcatcttcgccactgcccctactcccaccttctgcatgtcctgctcggtgctgttccattccctagcgatgttctccggctaaagacgcttggagtttgtgttggtggtgacacttaatgaatcatacgagagggcttgttcccacatccctatacgaggataaaagaagtaggcgcatgaggagtcatgttcattcacaagctctaacagagaaagtgngcccagatgttcatttttaggtgcggccagtgatgaattattctcagcaataataat

SEQ ID NO: 368750 - DNA, 306 bp, Zea mays
taataattgtaataataatagcaaccacatgactacatgagtaccaaaacaaacagaaaagaaacaaagcaaaataaaaaaaaaagagagagaaggtttccagcttctgcagctccgacggtacagccaccacctccatctccatcgcgaggccgaggcggccgggcgctacaagaacaccgactgctgcgggttgacgacgatgtggcgcagcgggttggggacctcgccgccgacggcgtgctccacgaactcggccggcgtgaggaagctgccgtggcagacgcacacgatccgcacctcctt

SEQ ID NO: 368751 - DNA, 431 bp, Zea mays
ttcagcttcctcaacaacctgtcgcccatggagcctctcaggtcgtcggcctacagcaccaacagcctccaggggttccagtccatcaacatcacgtccatctcctccatcttcacctccccgcacgacaacgtgagcaaggaaccgaggctcccaaagagcccgctcggggaaatttctgacatggaggttcgtgccgtctccgcctgcacgaacgtgccaccctagcctccgaacgcggcagggctgagtgcctgcactagcaccgtgactcgagaaacgcgcacgggtacatgttcgggcgtggctggtcctcctcccaccaccgtggggccttgtgatctggccctgctttgtcagttcgacaattacggcagtccagaccacaacacgacgccctgcctcggtgtcaggtcagaccttaaacagga

SEQ ID NO: 368752 - DNA, 496 bp, Zea mays
tcgtggatggtggcggcgtcctatctctggtgctgttgatgatttcttgaacgcacgacgaacgcgagctatgtcgaaccctaccaaatcacaggtacgtgaaccctaccggatctccctcttctccccttcctacacctcccccgcacgctcccaaatccaagtagcggatcccctcacgctcccaaatccccacacgctcccaaatctgcagattccctcggtcggtccccaaccatagcggctgtcaaatccccagatcaaatgcttattcggtgggtgcagagataaaactgtcgcatgcttcctccctcgcaggccgagtccaaggaaacctgctagctggttagtatgccattactctgctcatctgttgttttgctccagtgtcatcagcttgccaaatgaaaaaaagaaaaatggattacttgcttccagtgccatgcggtttgagctcatcagcagactctccatcaaatgggccagcagttttttt

SEQ ID NO: 368753 - DNA, 114 bp, Zea mays
acaaatattccattccggagcagacatgcaaattccataactcttctgagctccatatctcgatccacatgttatactcaggctttgatctggggaactatgtctttagcgaat

SEQ ID NO: 368754 - DNA, 392 bp, Zea mays
tctttactcgtccgcccacgcgtccgcccacgcgtccgggagaacatcatctatcagaaaagattctgaactacccaagtgggttgattcaaccatcatgatttacccgcatattgtatatgaggaactatccaaagcagaagctcctgatcaatgtgctgacacagataactgcacactagaagaacaccttttacaaggacttaagcgcgtttcatgggaaaagttgggatggctagtttccacaacagtaaagcaagatctgcagcacatagtgtgattcaggtaaaagatcctgtgatgcatagcgaagggcccgacgtcatacagcatatgattgaccaatctattctatagtaaaagccctggtctttggaaacagacctggacca

SEQ ID NO: 368755 - DNA, 418 bp, Zea mays
gcataataacagagtacaagtccagtcattatgaactttgacactagaataaattattagtttaacttcttttttacaagcttcatgtggattgttgttccatttttcttctccatgtcagcttcaagtgttgcttccacttagcactcttcataaagtgcttctaaagagtagaaaagaggaaatggcttcttgcgaaaccttgcaacctttgggtgagcctattaaatgcaacatgaaatgtaattagttctcagcaacaaaaaagatcatattgaataagaaaagacataatgttataaaaagaatttgcttacactaatcaaccttgcccaaacctctggttcagctaatatcatacatagggagtcattccaaccagtccaactttcttttcttgaatctcttactgctttat

SEQ ID NO: 368756 - DNA, 157 bp, Zea mays
aaccccacaaacaagcatcatatatcctgctacaggaggccttcgtattacaattcgatagcttaatgccagagctccaagggagctgacaaaaccaaatagcatgtcacaagtgtgcatggaacttatatgggatgaatcagaattcgtaacactt

SEQ ID NO: 368757 - DNA, 101 bp, Zea mays
  unsure (1)..(101): unsure at all n locations
gtatatgcacgatctgnaggccccagccttacgggcatattcttcttttgaaacaaggctctgtaacatgcgttacaaggaattggactacatgatgcact

SEQ ID NO: 368758 - DNA, 138 bp, Zea mays
tgctcccttccgcgtggtgtgctctcggttggtacgctgattcctatggcgactctctcctcgccggcgacgccgcggagtaggtgcaacagaaacctgctcgaggcggtggcggagcctgttgctgcacagaacatg

SEQ ID NO: 368759 - DNA, 505 bp, Zea mays
tcttcttctctatctatctctcgcctctcgcctccgcgtgtcttcaacatgacccgcgttctcctccccctgcttctgctgctggcgctgcctggagcgtatgcacgcccggcgcggcagtattagagacaagctacgtaaatcaagatatgaaattacaaacctaccacaaaaagatatcagggccgcgctccacccgtaaaaaaaaatttgtaaaaactacaatccagcacttaaattcaacggcatcttcagcgccatccaccgctcgccggacgacggcggcggcgagctcgtctatggactcacaccggcgtctcagctcttggttggcggctcttcaagcctggctccctttaatgccctggtgttacaccaggtcctacatgtcgtctttcctaggcctcggcacatggtttacgaaagaagcgtcatacctgaccctgtttgagatgacgcatgggctcactgcctgtgacctgaatgaccacaagccagctttcgg

SEQ ID NO: 368760 - DNA, 464 bp, Zea mays
tctttcgcgtgggcggacgcgtgggcggacgcgtgggtgctggcgctgcccgcctcccccctccagtccactctccactcccacactccgttaccaagctgcccgcgtcgccccctcctcctccgccgcctcacagccgcagcagctagggttagggttcgttccgccgcggctgccgtcttccccagggcaggctactcccgccggggccctcccattgcattccccagttcccctgcaaccccccattaccctttctcccacccattccttccttccgcccctctccagcccgcccggaccggtcgcgttgcaaggtttgtttgaaggaatctggacgggtttatgtcgatactagctgctgctgctgcagagatcaggtgaaagggacatgtgttgtggctgcgctattagtacccatagtgtgcacagccataccacctcgctgatagctactaccccct

SEQ ID NO: 368761 - DNA, 224 bp, Zea mays
tctctctctctctctcgcctctcgcctccggcggccgtcgccatgacccgcgtcctcctccccctgcttctgctgctggcgctgcctggtgcgtatgcacgcccggcgcggcagtatctgggacagtgtccggggctggagtacgggctgccgccgttcgccgccgcgctccgggcaacctgccccgtctcgacggaggggtactggcccccctacgaggttgc

SEQ ID NO: 368762 - DNA, 349 bp, Zea mays
acacctttaggctctggtcaacagatcgtacatataattatgcaaaacactgtttatgctatttatataatgaaatttaaaatagaaagtaggataggaggtatgataaaaaaaaaaagtctgctatagattgccttacaaatggaagggttgatcaacctcggatagggatggtaatatactataaattttaagaatcgaatatagctctatttctatttatttttaaactaaaattattgaagactcctaattagttatgaagaaacatttgaattgtaatccattaccatacctacccttatgcagtggttcgcttggcctttttgccactctagctgcttgcacg

SEQ ID NO: 368763 - DNA, 341 bp, Zea mays
tacattaattaattagcggatagcgacggcaactggtaatatatgatcgataggtttcgccctagcgaagaccagcacaattaattaacaagcacgccatggccatgccatcatacgagacgagcagccggccgggctgccacgacgagctaaaacccatgatcaccgggattaatactactgcccacgttgacaaagtaggacgactacgactacatgggcgcggaggcagcgccggtcgggctcgcgctctcgaccgctgctgcgccgttgctcgccgccacgtcgtccatgccatggcactgctgcacctgcacgtcgtcgtaatcgtcgtccttgga

SEQ ID NO: 368764 - DNA, 162 bp, Zea mays
aattgggaccctttggaagagagtcagagaccgatcctagtccgtggaacctggggcacttgactactgatcagtaaaacgctaaagcaaaacagtcatgccttgaagcttgctttgcctttgcttgcttgcactattatttaatgcagttagcccatgcca

SEQ ID NO: 368765 - DNA, 312 bp, Zea mays
tgtctaaaacctccatcaagcaactggggaggtcgttggctagagctacgacctccacggtcgcagcactctgcttcctcctcagctgcgtctccgcgaccccttccacgctcgccgcgtcctccgccatcatccacgacatcatccgcggcctcgcggacaccacggcggcgcgcgtccgcacggacgccgaggccacggcgcgcgcgttcaccgacttcggcaccaacgcgaccgaagacgacgcggcccggccggcggccgtgttctaccccgtcgtgcgccgccgacatcgccgcgccggtgggggcg

SEQ ID NO: 368766 - DNA, 292 bp, Zea mays
gctctcaaaatgtcgcacaagcactgtgtggcggttcttattgcccttcctatagccgcacgcatggcgaaccgaaacgaagccaaaacgcccattacccttcggcctcttcgaccctagcaagaagacggcggcggagatggtgtactacgcgcttgcggacgccgcaaggttagaaaggcacatggatgcccacaaaacagaatcaagttggccttcctgggaaaggatccaatagagaccttaaccccggacagggtggaaagcctggggaccagggcattggggggtt

SEQ ID NO: 368767 - DNA, 512 bp, Zea mays
tttttacgcttccgcggacccttggcctggggcctggtaagtacctgcctacattcagatcaatgctaatcttgataataacctgacagcctgcttcatactctagtcattgaagttaacaggaaaaaatagtggtcttagaattaaaacaactattggttgtgtaatttaatttttttaatgcactgtgctgattactggaatttctttgcactatttattttatttccatttactgtatatgattataacatatatgcattaggagctattgatctttggttttccagttataattatgttcattttaccagataaatagataataactgaaaattctggacggtaattctgtgtttctgtagttgaaatatccaactaagagcatctacaagagtttccaaaacccacttttgatctagattttttgtcaagattgaaaaaaaaactgctctccaaccactccctgtctcaactcccaatctttccgcacttggaaaaaccgacctcgc

SEQ ID NO: 368768 - DNA, 182 bp, Zea mays
gagctatagtgcgttccaacttctgagaattaatcattaagcacatgggccgacttgatgtggttatccaaaaataggggttaacggggttacccggtgccaattggtggaaagcggcccatacgcggtcaagtcaactggcaaaagcaccaaacgattgtgaatctcctaggatgcacaac

SEQ ID NO: 368769 - DNA, 95 bp, Zea mays
gtcttctcccccccctcttaccaaatccccactaagagaccttccacaacccactgcgggtcacccacccattcccaaccaacccacaccgcacc

SEQ ID NO: 368770 - DNA, 114 bp, Zea mays
caaacagacccaaccaaccacaccgcaccacaacaaaggcaagcaacggccccatcgtacaaagcgacccgctgaactggggcgcggcagcagcagaacaggccaacagccacc

SEQ ID NO: 368771 - DNA, 467 bp, Zea mays
tcctgtgtccgtccacgcgtccggcatgctcgagcgaagaatagattctcaagggtggggcggtgggcacaaacaccctctgcctgcctgcagcctgctcatatcatctcatctgacatctccatgtttatcccctctctccagttctccagctcacaagtttcctggcctcgcttgtatctttgagcgcctcaactctgcagcacatatatcctgtaataagctctgtcttgcatacactagctctagagtctttcaagatgagcaaacagatctgagctccagggacttgtggtacaggatctctctacagcctcttcggtgctcgaagcggtggaacttctggcacaagggacactttacagaaagatgactggtgtcgaagctgccgccatatctgctggagcatctggaatattaaagattgtgggcaacaagttggcaccactggttataagaaagtatag

SEQ ID NO: 368772 - DNA, 59 bp, Zea mays
cccctgcgatacctatcctaaattcccgaatcaacccacacatccatcctccttttttt

SEQ ID NO: 368773 - DNA, 87 bp, Zea mays
  unsure (1)..(87): unsure at all n locations
catgatttgagcaaaatgtacttcattgactnggaaactttttacataaatggaggtgcttacaccccgacgagaactgactacacc

SEQ ID NO: 368774 - DNA, 450 bp, Zea mays
ccctctcttccgcccacgcgtccgtaaccagcaggttgatgacggttctaatgctcctgtcacatatgtgctgaaaggatcgcaggcagagcaaatgttgtgtcctcaatggcagccacaaacaatggaaaatactcctgtcactactaattcaacactcgaaaagcaaatacaagaagatttttgtcaaagagcaatgtcgcaagatggaacacaacaaccattttcatcagattggcgtctttctaattgcactgcaacttctattgatcctgcattgccgaagcctgcagctggagggtttgaacaggtcactggaaatatacattacctccgtcagataaagtggttgctgctactgtttcatgcaaaaacatgcacataccctgttggaagttgtaagttccatggttgtgttcagaactggggcttttttgtgttcgcaaaatg

SEQ ID NO: 368775 - DNA, 374 bp, Zea mays
cccacttttacgctaacgcttgtccggacatcagggcgttatctttgatgacagcagtcagcatcttgagaacgaaaccataagcctgcaatagaaaacatattggctgcaagataaactggcttcttgtatcaacactcgtcgaccgtgcaaatccaactaccctcactgatgacatataggatacttatactataaaaaatgcaaagaaaaaagagtacactaggaacaaattgcaacagggaaacgcgacttaaggaggacgagagaaagaacataggtgcacctacaaatgcaataccatagaaggcatcgggtgctgcaaaatacaagacagattccacttaatactacaagaaaaggatcaaacctct

SEQ ID NO: 368776 - DNA, 463 bp, Zea mays
ccctcgcgtccggaaaaaaagcagcggtactatgttcacattataattacaagtccctgaggcctagtttggtagggcttgggcttctgcatgataagttggcaagtgctttaacttaccagtacgcatgttgccctgatattatctagttagcctcactaatagacaatcacatcttgttagtagtatcaagctcaagacaactaacaggtctatcttaaaatttcctctttatgtgttggctgctttcttaatttcttgcaggctaaattgagcttcttctttctttttaaaggcctgtgagttgttatcatccgttgtctttttagaagaaagtgtatgggttgctaggaaaccaccagggtttgccttcattgacttcgatgaccgcagggatgcacaagatgccattcgcgatttggatggtaagaatggttggagggttgagctgtcaaccaaagat

SEQ ID NO: 368777 - DNA, 354 bp, Zea mays
cacttcttgagcctacaccttgttcgcgtctcaggggcttctacgatctgcttccgctcccctcttcacaacgaagccctagtgtcccgcgacatggcatgtggtctggaggagaaactcgcggtgctctcaacgggcggcgacgggcaatatcctacgccggcgggtgagggcggataggagccgcaactctcgaagaatgccaagaagagagaggagatgaggaagaagctggaagaggagcggaggctcaaggaggaagagcagacgaacatggctggggatggcaggggaaaacctcagacggcatctgctgctgacgatgatgacatggatcccactcaatactatgag

SEQ ID NO: 368778 - DNA, 81 bp, Zea mays
aaccacccctcacataaccccctcgaccccccactcctccttcttttcaactacgagctaacaacaccaagggggaacctt

SEQ ID NO: 368779 - DNA, 374 bp, Zea mays
tcttcttcgtactcgcctatctccgcgactcaaggcttttttcaattcccccgggggtcccatttctcaccaccgccgccgctccccccgttcaacaacaccatgagggagtgcatctcgatccacatcggccaggctggtatccaggtcggaaacgcgtgctgggagctgtactgcctcgagcatggcattcaggctgatggccagatgcccggtgacaagaccattgggggaggtgatgatgctttcaacaccttcttcagtgagactggcgctgggaagcacgtcccccgtgctgtttttgttgaccttgagcccactgtcatcgatgaggtgaggactggcacctaccggcagctcttccatcctgagca

SEQ ID NO: 368780 - DNA, 155 bp, Zea mays
tctcttttgagcctacaccttctcctcgtaggagggttttattcattctgggggggctcccctcttcacaacgaaaccctagtgtcccgctacatggcatctggtctggaggagaaactcgcctaggtcgcatctctctttttctgtcataatcc

SEQ ID NO: 368781 - DNA, 269 bp, Zea mays
ccgtccttaatttctggatccacccacgcgtttttgttcttcgaatattcaaaaatagaagtaagggacatttttaatacactttcggtttcaacaaacaattcatcataattaataaatgcaactgcacttagctttaatacaaattctctacatggacactcatcatcacatttacctagctatccctactcctggtccttgtcctgttcctagactcctagttcctaatattgccgacatgaatgaattcaatcttcctttctttt

SEQ ID NO: 368782 - DNA, 461 bp, Zea mays
cggtctcttggcccaaacttgcttgggattaaaagggtttgttgatgttgtaatggggtgctatccaatacagtattaatgccgttgagtgatttacaatgattccattcttattgtggattgttctttatctgaggatctatgtagagaattgttacacttttctttttcttgttttgcatgaatttcgtgtattaggatttgggataggattcttgtagtaacagttcttgctcaagttgtttattgttctgcacattgtattttaataaaagttggccatattttcattgttctgaaccattcttttgttcccgccattgcctttttacattattctaattttgaatgtaattaaatagagtctgtggacaacatcatgcaagagtcacatgagcttgatggtacaacagtgattgttgatcgtgcgactcctaaagatgaaaatgtcagataccccc

SEQ ID NO: 368783 - DNA, 419 bp, Zea mays
atcgctttggagcgttggaggaaatgcactataggggcaggacgctctggggacacagtgaacaggggagtgcggcaccgggttggagtcaccagacgccccatgactagctccctgccgcctgcgcccacacctagtcgtcttgcgtggaggatcgttaggaacaaagaggcatccaccctgtcccttgcggcgtcacgaccaatggctgtagaggtcgttgggatgagaagttgtagaggacacatggcgccagaccattacatgacgcgacatggagaagtctcgtctaggtgcgcgagctcgggccactgggtgctcgactaccgacctcctcgggcacacgtaagaacgatgcccaagcgtgaggcagcgaaagcagcgcgtacgacactggcaaacaaccgcactgtgggatg

SEQ ID NO: 368784 - DNA, 384 bp, Zea mays
tggtacttttgctcccaaaacagtctcccgttagctatttttgtatgtttttggggggatgaaagcttaatatgtttccacttgtttttcacaaacgttggcggtgtgttgtgtttgttctgctactctccatgttctacatactgttactacctgtttcttgttttttcccttccatgttatcctttccttggttggttttgagtcttgtgttgttttcttttttaattctttcatttttctcttccccttcctttcttttttttctttttttttttttctatctttcattcttttttttttttttttgtttcccccttattacccccttttttttgtttcttttctttttttatcttttgttttttttttatttttcttttt

SEQ ID NO: 368785 - DNA, 478 bp, Zea mays
cgtccacacctgcgctgccgtaagcggggtcttcggagtcgccgccgccgacgtcaaaatccttgtcgcggcagcgatcactgctcccctctatgatagcgtcgcgtgagggcaggcggtagctccctctgtcgatccgcgcatcgcgtgcccggtagcggctattagagcccatagctcgtgttggttgcctggcaagcgcagctcgatcaccgtgccggcgccgtgtggcatatcatgccgtactatgggcgctgttctgctctgggtctactggagtgcatttgctatatttttgactactactacattggatggcgctgaacgacattgcttcacacaataatggttatgactgggtgcagtatgcttcacatgtgaaccccgacatgtccgacgcgagacaataaggcgtctatctgtgatggcgcaagcagggatggattctgctccagtgtatgagaacaacggcattgcc

SEQ ID NO: 368786 - DNA, 841 bp, Zea mays
cttcctcgaggtctaacccccatggcgggacgtttttatacacctcttgggggccttacataaacctcagtcaggcatcgtgaggagggagagttcatggacctttgcgtcttctttctagattaatcttaacgtcaagaccctcatgggcaccaacttctagatcgattcttgccccgatgcatctttttctgatttgttcagtatcactgataccacttatggttagatttcctacttttctatcctttattatgctgatatacctttttaaaattctttccgattaaccctttttttattgattcctatttgctgatatattgccaatttttttttctttttttaccttactttctttttttttctattataccttttttttttcattttttatataattttattttccttatttttataattttttacttcctttcttctttttttgttttattttttctaatatttttacatatatacttgatatttttataattttttacttattttaaattttttagtttttgttatatctttttttttttagattatgaatattattcctttttctatatttttcttttacttttttttctttttttctttaataatatttttttctttcttattttttcttttatactttttttttcctcttttttcttaacaattttattattttctttattttattctttatgttctttttaactactctatctatattccttttataattttcccttttttttctttttttatatctttatttcttttatttttttttttcctttttccttcttttctctttttttcctctcttatttttttttttttt

SEQ ID NO: 368787 - DNA, 266 bp, Zea mays
  unsure (1)..(266): unsure at all n locations
cccctcgtccgcccacgcgtccgcaggaaaaaanggatttttttatatcaccgggggcttcacccctcgccgncggcgggtgtgaagctccagcagcggaaactgcgctcgaaaatacagaggcagggtggcctacctcgaagatcttcaaaagtcgtgtcctattacggtcctcacaaccccaccatataaactggatgctccggaaccccatatgagcaagaggacaagcgaacttcactggggcaagcaccacccaagatcac

SEQ ID NO: 368788 - DNA, 403 bp, Zea mays
gttttctttgggcgaactaatcatggggtaatgggggattgggaataggaaatttagcaagtctgtgtgttccaagtcagactgttcagcaaacatggtgttggtattgtgttctttgcaagcctgtgtgaaaaagttcctgtttagggctacctagtttggaaacttaggttgcaaattttttctcggaaataatgttgtattgctctggggcatgttagcttgtagccgtgttgcatgataagaaggaactcaatgacatggacttgtgctgccaagattccaagaatgtgtttatggaagagctgatgctttgaggtcttctagctggctctaaatactctcaacaatgtctgatcggtccagtggagttaggttttgtttcaagctccctagttatttt

SEQ ID NO: 368789 - DNA, 293 bp, Zea mays
cccttattgatcttttgcactgaagcatctacatggggggttctagagagttcaatttgtcatttttttccttagctaatctaatatgcattttggtattggttatgcttccttttgatgtattataaactgctattttttgttgcaatttctcatttaactagagttttgttgaatgctttttgaaagcagtaataactataagctctctgtgagccaattcttgagatgatgtccaacatgctcatttaaggtgtgcctaagttggtgtcagaaatacgtcaaggaaaaat

SEQ ID NO: 368790 - DNA, 357 bp, Zea mays
cggttgcttgggcgctgggccaccagctttgaccggcgcctcccttcccctccgctactgctcctccccaccccactcccccgcaggagcggcggcggcggcggcgaggtcgtaccccacatcggcgagcggcggcggcaccgccggaggcaaaggcaagatgttcgggcgcgcgccgaagaagagcgacaacaccaagtactacgagatcctcggggtgcccaagtcggcgtcccaggacgatctcaagaaggcctaccgcaaggctgctatcaagaaccaccccgacaagggcggtgaccccgagaaggtcaaggagctcgcacaagcctatgaggtcttgagtgatccagagaa

SEQ ID NO: 368791 - DNA, 170 bp, Zea mays
tttcctagatcatcctcgatcgggagacgcagaggtggctttgattcggcttcgggaccttcaccacggaggaggcgatgcggaacgccatcgagggcaagaacggcaaggagctggacggccgaaacactaccgaaaacgaggcccagtcccgcggcggacgtggaggc

SEQ ID NO: 368792 - DNA, 492 bp, Zea mays
tcattgatatgcacatgcatgcattcctcaccttttgctttgcatctccttatcagctacagcactggcctaatgacagccagcggctgcagttataaaaacaaaattactgtagaagtcgtagcagtagccgaattaaaaccgcagtgcatcccaaagcgcgtaaaagatgcatctcttccacatcatgtcactctacgcgcgctgctacaggcaccgacattttgtgcccgcacgttatggacgtccttcctccctacacacccagatcaccactgcatgacatatgtgtggggaatggcatgccggctagcacgcatgtgggagtggtagcatggatagcacttctccgcatggatggacagtgttttctcttacaccttttgtcacgatcttgccagtaaatcttctgatttggcaataataatgtcgatctgtaaatcgtttattcggcgtttgagatccaatcccactttgtttctcaacatgcat

SEQ ID NO: 368793 - DNA, 129 bp, Zea mays
gctaccccttccgtctccatatcttcttcttggtgggccgtctccactccgcgttccctggctccctgcgttgcgtcttgggggagagagagaagtgggagacccgctagaggctgccgtgtagggact

SEQ ID NO: 368794 - DNA, 508 bp, Zea mays
tgactccatcgcaggagctagaggagacaacaacatctttcaagatggaagctgagccttgttcgccggagatggctcctccagggtttgaagattgtaagtctcaatggttgccactgtcacatcctaatcctctggttgaatccacacacactgtggtacaagtgactactaccaatgccatgggaacgactccagatgcagcaactgggtcactgtcttcacctcgcctacttccactgttgaagagagatacagaggggcaaacacttccaagatcatgctctccaacaacagaagctgcaccatgttcaccagatatgccacctccaggctttgagaattgtaagtcatcgtggctaccactaccaactcttcaacccatagctgaaaccacgcatgtgttgcacgacgtggctcccaccaagtcaatggtagtgggacttatggaaaaggcatgctcagtgctggcattggagcggacagatgtgaagatagactcggagca

SEQ ID NO: 368795 - DNA, 91 bp, Zea mays
  unsure (1)..(91): unsure at all n locations
cttacatgaactactaccccgaggccaaaaacnagttcaacctcaaaaacacggggggggacacccaccaccaaccccggccgcaacgacg

SEQ ID NO: 368796 - DNA, 477 bp, Zea mays
  unsure (1)..(477): unsure at all n locations
gtgttcatatgccggcacatgacaggcatggggaatagttttttttttgatccaacgcagttgcaggcaacgatgcgcctaaaatctgccaaaccaggcgacgacacagcagccagtctcggtttcagcagggcgcaccgcgcacggcatcatcatcatcgtcgccgtccgtttcgttgcgtcgtgctcctgcagtcctgctgttgggttgccggtggtacattctttgacttccacatgggctgggtcgtcctggcaccctgcgcaccacacggactcaccaagccgggggaaattcaaggaatcaggacaagagctgtcagtatcagctgctgtacagcggtacggctcgtgcttctcttggaatgttaggcggcaaggttaggcatcgtctgcacagacagacagggaaggtgcccgcgaggtgctcggccaatgcgccagaccgttgtctacngcggcgcgctgggggggggc

SEQ ID NO: 368797 - DNA, 389 bp, Zea mays
ggatggtgcagcggcaactacacgccagagagagggaaggggaggttggccagagagccgagagcagccctgcagtcgagagcatccgactgctagctactagcaatagcataggcagataagctcgggccgggccggggcacgcgcacaatgaggtcgcggcggtggcacagcgtggtcgccgtagcgctggcagcggcggcgtggtggtggtgcgcggctgatcatgctcatgcgcaagcgcatcttatccagttctactactcttccacgtgtcctcgtcttttagacgcttaatcttgggttccatctcttaaaaattataaaattgatcttcaactttgtttctattgcaattcttatttttttatttcctatcactgtttttt

SEQ ID NO: 368798 - DNA, 328 bp, Zea mays
gcagtgcttcaccctcgcgttgaagggcaaagcctggagggctggcggcggacgaagcgatgtcctggcgtccgttggagtgtcatcttgcggcgtaagagccgaactaccacccactgtccaaacgacggaagatgaggaggcgcgcgtcaggcccgaggcggaaaaagccgagctcgacgaggagatcgtcacgttgaaggctgagatcttcgccctggaggaagagttgaccacgatggatgcccacgtcgccggtacgcacgcgagcgcttctcactctcgtgtctcagctatgccactgtgattggctggagctgatgtcgta

SEQ ID NO: 368799 - DNA, 400 bp, Zea mays
ttcacgcgtccgcccacgcgtccgcccacgcgtgcggttggattggacattggtgtggattgtggagattgtgtcaaccagactgacgagtaatagacagtttgggagtatgttaaaatccgttatgcatcacctatcagaatttacagtttttatttggtaggcactatgcaagtttcattaacagattttgtccaccagcttcttttctgttctttatcttggcttgaaaaagcagttgtagggtacctgtaaaagcagtcgtacatctaagatctagcttgcatattgttttaacaagactggttacgctcttgttttttagataatttcatttcttaagcaaaatgcttacccttgtgttgctgacaagaatccccgttgccctgagaatgtcacc

SEQ ID NO: 368800 - DNA, 175 bp, Zea mays
ttccgtttacacttgcgtccggattgctaaccctccggaccttagtctatcacggtgtgtttttcaatggtcagaactagtgttttcgctcttcttactggatatcatgatccaccttttgttgtctagattcctgagggtctgcactacaatccctactttcctggtggtgcca

SEQ ID NO: 368801 - DNA, 383 bp, Zea mays
agtagagaagccaagccaaacctgccaaagacgggattttttatggacgccggcgcccccgggccccaagaagccggctttcaagctctacgagcggcggagcagcatgaggagcctcaagatgctctgccccctgctcccggccgccgccgccttcgccgccgcgggcggctccgccggcgccggattctccccgcgtgggttctcgccgcgcgggctcgaggtgctgtcgcccagcatgctggatctcccgtcgctcgcgctcgggagccccgtcacgccgctgccgccgctgccgggctcccaggaggccgccgccgccgaggaccgcgccatcgccgagaaggggttctacctccacccgtccccgcgcgggaatgccg

SEQ ID NO: 368802 - DNA, 434 bp, Zea mays
cccatcttatgttcacttgccatttctgataatgggtatcaagtatgataactgtcatagcactaagtactaagtagctttgcttttgagtgctcaggctttggaacgtgctaaaaatagacattacctttgctccagagcttcaagatgacagtgacatataatttccttcattacaagggcagagggtctatttgttgaccatttgacggtggctatggtcctatggagtatggagggcttgagaattcactagtgtatatgcttttatatgtgtttctcttcattctcctgtgacatgcttcccatctacaataagtttaaactatattttgtataatccccatgagtcgtattttccagatgttcgtacccaagcgatgtttcagttgctggatacaggcttttgggggccttatattttctttgtttta

SEQ ID NO: 368803 - DNA, 415 bp, Zea mays
tttttataaaaagttctggaagtatttcagtgttgtacttgttcatccgaattggattggtccaatttttttttaaaaaaaatctgtttgttcgcatcatggttgcgcttgttcctttgtaatgctgtctgaagttattatagaaacaggttttgcttatagcagttgtatttagaacagcattctaatgcagtaaggaaaatcagcaattataagtggtatcctggtaggcatattatgttctccgcgtttgcagcatttgttcaatacaattatgcatactggagcccacatgttggtgtcaaaattttagtctttaagtagttttgagaaattattatggaagaagaccaaacagttgactgatttaaacttgagcaatcagtctttctgtggaataaaattcaaattgtaa

SEQ ID NO: 368804 - DNA, 76 bp, Zea mays
tttatgtcttcaatgggaaatcgaaaccctacgggacaggtggcgtccctaagggttaggtgacagttataactaa

SEQ ID NO: 368805 - DNA, 282 bp, Zea mays
ttcgtcacgcgtccgcggacgcgtgggtgaagcggctgggttggatgcaccggaagttacgacagaacagcaatgatgtgttcaaagagttcaacaacgctgcaggtgggacctgcaactgcattaccgggctggccgcgttggacccggtcacttttctcgtcaccgtcaacgaatactttaccgccgtcaacgattttatcaacaaccatccatcttatttgttctgtgtctcttttacctttggttgcatgcttcttcttatcatttgtctcgttatgg

SEQ ID NO: 368806 - DNA, 59 bp, Zea mays
ttcattttttcgtgaagacagtcaaaaaaagggggggttcttagccacatacgtaacta

SEQ ID NO: 368807 - DNA, 136 bp, Zea mays
ttcattctaacgcgcaaacgagctgaattggggggggttttttgttatccccacccatagttgtccgtcctgtgatcaagaaagcgtccactcgattgtgaatcaatattagctgcaatgagagctagtgtgagga

SEQ ID NO: 368808 - DNA, 77 bp, Zea mays
caccgcagctgagtcctgaacagcgcgggcgttcttcgaaagagtggaacacagagggctgaccccaactgcctgat

SEQ ID NO: 368809 - DNA, 68 bp, Zea mays
ttcatgcgtacgggcaggctcgcagacctcgggggttttttttgatcaattcggatctaaacgactga

SEQ ID NO: 368810 - DNA, 65 bp, Zea mays
tcgtatacacgttcgttaaaactaatataggggggttaaattaagagatcaccatttatctaaac

SEQ ID NO: 368811 - DNA, 128 bp, Zea mays
ttcactcgttcacccaacctatctaacccgcctatctttccatagctcactccgtacctaaacaaacaacatattattcaatccacaccattaaaatctattcatactccaccccttcaaaaccttta

SEQ ID NO: 368812 - DNA, 67 bp, Zea mays
ttcatgcgtacgtgcaagctggatgagtaagggggagttttaggacaaagagggtagtattaacatg

SEQ ID NO: 368813 - DNA, 109 bp, Zea mays
gtgagcagcctcactgctgtttgagggggggtgttactaggcaattggctcctaaatcgctgatacgtgggcacgtgtccatgcctgtaaaggggtgatgctcactaac

SEQ ID NO: 368814 - DNA, 56 bp, Zea mays
ttcattcgaacgctaaacccaacagaatcggggggtattaaaaaaccaccccccac

SEQ ID NO: 368815 - DNA, 209 bp, Zea mays
tcgttcactcgtacgtgaaaactagtagactggggcagattttagagatcagtccggaccttgtcgaccgaccgagtatgcaacttatgtcatcaatccgaaccttattctagtctcaaatcaagcttgtgtctatacagacaattcacgatatagaatatcgacataacccagtaagagttgaatacggaacaatcagaagcggagac

SEQ ID NO: 368816 - DNA, 57 bp, Zea mays
tccattcgttcgcgaacgcgcgttctaaagggcggactactaggagcattctctttc

SEQ ID NO: 368817 - DNA, 279 bp, Zea mays
tcgctcacgcgtacgttcacaatgacatgggggggttcaatttattccctgtccaggaccagctggtgcgttaccaaagcatgtatccgccttaacatcggtcaatatacaagtggtgtatcatgactagttttttgggtctgcaacaacatgaatggaatactgaacagtattgcgtgatccaatcccacgttattattctagtgtcactcggaattccggagataccttgtgataccatttttatttgatttatctattacattggcctctccggtc

SEQ ID NO: 368818 - DNA, 136 bp, Zea mays
tcgtacaaccaaagaagaagcggaagaagggggggtttaccaagaacgttcatcctaacaatgttgtctatggactacaatgtttttacttgaccctgcaatagtacaatttccttagttttattggtcatttctt

SEQ ID NO: 368819 - DNA, 250 bp, Zea mays
gttggcgcgacttactggcggcgagataggtccggcgaagggcagggttggctcggggaggctctggcggtcacagcgaggtgcgactcggtggcggggatggccggaatcgctcggtccacgcgtgcaggcgggtgttctcatcggcggagagtgtaccggccaaaccacggcgatctggttcaatccaagggcacggtgagcttcacggggtaacgtagtgaccgtgtgcacaaggaatcggaaaatg

SEQ ID NO: 368820 - DNA, 265 bp, Zea mays
ctgattcgtgggttctgcaagtcgacccaggggggtgttctaaaccatctctaattgcctacagcttcaactccaacaacaggatggccccacacacttaatgaaaacatttctaatttctagcaaattcgactccgaggacaataaaggtaccacaatggacttcttaagaagaataggaatcgtgtacataagcttttttgctctaataaaataagagtggttgttgcaacaatggcattcagaatgggttttgataagagtg

SEQ ID NO: 368821 - DNA, 149 bp, Zea mays
cgtgggcagaattcacgagaacgcaccggcccgcctcctccttccgtccccatccagatgatgcttagggtttccgcgtctccggccgccgcggtggccaaccatctctctggtggggccgtggcgaccacggtttctgccagggtgac

SEQ ID NO: 368822 - DNA, 249 bp, Zea mays
acgctcacgtttacgcgttgttttttattttttgggggggatataacaaagacatatttctttgggaagaaacaaaacgggtttttttctttttacaaaatgcaaggtcaaaaaatttccacgacccaggttggtcacaacctgaactgttacatatttggcatatacgatgttaaatggataaaatatgggcttgacgtggaatggaaattataggcatcgttttgaactcaaaattgtcagaccatg

SEQ ID NO: 368823 - DNA, 141 bp, Zea mays
ttgttcacgcgtccgcccacgcgttcggccactgccagcttccccgtgcgcgagctgtgctgctgctcggcggcgcgcccacttcctggccgctcccttgtcactccgtctgccgtaaatcggtctttatatatatagttg

SEQ ID NO: 368824 - DNA, 541 bp, Zea mays
tctcttacgcgtgggcggacgcgtggggcgtttggctctactgtggcttcacaaatcagaggaggttcgtgcagacaaagctcactatgcaaccaacattactggcgatatatataattctggctggattagcgagatgtatggctactcttttgcagcagctgagattaacctgcgacacatcattaggagggacataatgatatatccaggttatgttccactgcccagggcaaaatacagggttttccattatggtttgagatttggagttggtaattggagctttgacaaggcggattggagaaacgccgatgtagtaaatacatgctgggccaagttccctgaaccacctgatcctgctacgatcaccaaacaagatctagatgcactggagagggatttttttcaagtattgtaatgcgggagagtcttttaacaaagccctatcctgcaccattaggctcattaatttgcccccgtctgacaccctttttcagtctattaagaaatccgttcaagtttttgtttctaacaaatt

SEQ ID NO: 368825 - DNA, 507 bp, Zea mays
tttgatgcttcgccgcgaaaccccagacctcgcgccgccccttcccctccgcggcgtcgtcctcgcacgctctccgatccaagatgtataagctggggagaggaaaccgcgacaaggtgcagcagttcatgaccattaccggcgccagtgagaaggttgcccttcaggcactgaaagctagtgattggcacttggaaggagcttttgacttcttctatagccaacctcaggtttctgtggtcaatactcggcatcttgaagatattttcaacagatataaagaacctgatgctgatatgataatggtggaaggaatatctcaattttgcaatgatctgcaggtaaggagcatttattttcatctgtaaataattcgttcaccatctttgcactttattttcagccataggcatatggagcgcataaaccattttattgaaaatagaaggtaccattttaatggttaaatgctaccacaaatgtgtttagaatttacataatactttt

SEQ ID NO: 368826 - DNA, 298 bp, Zea mays
tctagatcgcgagcggcgccctttttttttttgttttttagtggagtacgtatatgtatatcttcatcatataccatatggcgaaacaggatgagaggatcactgttacgtttattgactgattaaccacactttgataatgaaaagtaatctgctatttttattatctcatgccccctttctacctggttacttcccaccccaccaaaacaagaggagggagcaagcaacatgtccgggcaggagacgaaacaagatcaaataaaagaatttagacttaggatcatcagattcttac

SEQ ID NO: 368827 - DNA, 160 bp, Zea mays
tccacgcgtccgcccacgcgtccggtcagcagcttctgcttgctctggggggaaggagagagagagagcgagagagagatctagtagagaggctagctaggtggtccttgaacgaagatgttggcggtgttcagcgggcaggtggtggaggtgccgttgg

SEQ ID NO: 368828 - DNA, 381 bp, Zea mays
ttcacgcgtccgcccacgcgtccgcaggcgtcttcgtactcgcctatctccgcgactcaaagctttccccaattcccccccttctcccatttctcaccaccgccgccgctccccccgttcaacaacaccatgagggagtgcatctcgatccacatcggccaggctggtatccaggtcggaaacgcgtgctgggagctgtactgcctcgagcatggcattcaggctgatggccagatgcccggtgacaagaccattgggggagggtgattgatgctttcaacaccttcttcagtgagactggcgctgggaagcacgtcccccgtgctgtttttgttgaccttgagcccactgtctacgatgaggtgaggactggcacctacc

SEQ ID NO: 368829 - DNA, 409 bp, Zea mays
ccatgcgtccatgcgtccggcccggcctcacagtggagacggggctccctccctcttctctcttgagagggactgccttgtactcactagtcaccgcacccaagtccgcgctgtgcactgtatcacgagctgaaccaattggagcgtgccgtcaccctagaccgctgctgcggagcgaccaacgagtcacccgaaaccgggtagactcaagccggtgtggatggacttataagggttgcccggaagatgacaagggctcaggtgaaatgaaaaaaaaaggagcacatgtgcttgccggatgaagcggaaaggccgcaatttccctcgattgactggtggaaactgactattgtgggaattatccaaacatggaagactacagctaacttcctgagggctcaaaccatgt

SEQ ID NO: 368830 - DNA, 204 bp, Zea mays
ttatcgtttacgcgtgatgcccactccacgagggtcgtgaggatgctcgaagacgttgagcctgtcaaacttgacgacagggcttattatgctttaccgttagggcctctagctggaagaggaacacaaacagagatcatgttctctatttggctctgcaatagctactgcttagctgtggggtgcggtatttacagtattgtg

SEQ ID NO: 368831 - DNA, 154 bp, Zea mays
ttttcgtacacgcgtccgggcggcggacgggtggggggcgtggggcctgaaccctacgggcgagggcatggccggcgcgcaggcgctggaggtgctgtcggtgaccggggccgtggtgcccggtgtgcgtacgtacaacataatggggtacgta

SEQ ID NO: 368832 - DNA, 415 bp, Zea mays
  unsure (1)..(415): unsure at all n locations
cgatcgaactggccagttgtgacactccttctttggggggggggggggggggcagtaagtcaaatataatactcctagtgaggcttaattcgtcacgtggcgaagagtaaaacataggaaaaggctatcgatagaacctgtatataccattccattccattccacgatggttaggagccgactatactcgatcatgtttgtttggaattctgatggaaataataactaagacgctaagataaatcaataaacggtaaatcgattggtacaatccgagacgaatatggccgctagctagctaaagtcattcatgctcgttgagattagagtagagttcagttagtagctagtncgcaacgctactatgctatgccgacagactcaactcactcagacagacagactacttaggcta

SEQ ID NO: 368833 - DNA, 65 bp, Zea mays
  unsure (1)..(65): unsure at all n locations
tttcgtanaaacacattcgacgaggtcacgactgaggaggggactcccgagcgcacgcgccaatt

SEQ ID NO: 368834 - DNA, 399 bp, Zea mays
ttcactcgtccggtcgtttgatgcgattccggcggcgatcgcgagcgcctccaccaccacccgctcccccgtcctagcgcgcgtttgggcgatctcccctctcgcggcgggcatggctggcggcggcggcggggcacgcggctccgacagggcgggggcggcgcgctctcccacaaccaccacggcgatacagtcgaccatccaatcgacagggagggtcgtcgtcggccactccgacgccgacatcttggacacccttcgcgaattccaacatggaccccaactggacggcgcataagctgctcaaccaagatccatttcatgaagtaaaaagaaaaagggccaagaagaagggatatgctggccacaagagcttttgcttttagcactgcccatgtt

SEQ ID NO: 368835 - DNA, 348 bp, Zea mays
gtgccggtccggaaccggagtttcgggccagacccacgcgtccttgcacgcgggcgccaagcggacggtcatatcgcccgcggctgccgaagccgaacccttgtctggcccggtctggcgcaggagtacaatgcgccggatgctttcttagctcgagcgggctgggagatccgagcgtcccgggatcatttggggaggaggggcggcctgggaaaatggcaaacatacgtgcacttatggtcggcttatcgcgggcaagggagatcctaagcagaggctggaccgatgagcttgcacgaggccatcaattctagcatctgtgcgcgcacattacaagatccccatgcc

SEQ ID NO: 368836 - DNA, 136 bp, Zea mays
tctgcctcccctgcgccccaaacccacccgcctcgccgtccccgcaggccgcagcctgctctcggctcccgccgccgtctaccgcgtcctgcggctgtggtgttgcactacctgcggtctggcataacttacatat

SEQ ID NO: 368837 - DNA, 301 bp, Zea mays
actaaggggccaagagccctccagcagggtttgctatttagagttcgctatatttcaccgttcatatgcgtaggcgtgggccttttggcatcctgcgtgatgggacatccatcagatgtcaccactgaccaaaagccggccttttcctccaggggagggccagccgatgcttacacctactagctggggcttatcatcctttttaagttgaggaaggggcagtcgcgggggacgtcccccagcgacggggtcggttttgacgccgacgcggccgagcctggtgatggcgtcaacaaaggcc

SEQ ID NO: 368838 - DNA, 387 bp, Zea mays
ttcattcgtccggcactgcatgcacgtctggtctggaccaatgaagccatggacaacatggtgttcctgcaaaggtggctccaaaagttcccacagtacaggggcagggacctgtacatcgccggagaaagctacgcaggtaggatcggaggaggacagggagtatatacaatatacacagctatcattcagctagcatggtcgttgtttcgatcgagaaacatgcatgctattaacgctggctcgaatgtgatgcagggcactacatcccgcagctcgccgaggccatggtgggagttcaacaacaaggaggaggagggatctttaacctcaaagtgcgtcgccctgcgcaacccggtgcttggagtcgcgaacggactttaactt

SEQ ID NO: 368839 - DNA, 170 bp, Zea mays
ttatatctgcgcctcactgctgcggtgcacggtgggcccctccctacccgctgtctgcggctggccaccctcatagcccccgagctttgtgtgcgacgatggactactcgggcaccaaggagtcgcctcctgccggggcttggtggtcgagggagacggtggccgtggtg

SEQ ID NO: 368840 - DNA, 391 bp, Zea mays
  unsure (1)..(391): unsure at all n locations
tcgcatgcgccgtatcgcctctcctctctctcagctccctgttctttcggaaggttcttgaaagatcctttaattctcgagcttgtttatccgggaacagaactactacttactacatgacacatccaaagcttctgctctctctgtaggggaacgaaggatgttaaaaccaatgcttggtgtttcctgaggttcggtgaaacctcgcagatgggaaagtacgttgggttcatcggcgaaaatctctctctccctccgtcttcagtcaaccaggtacacgcaccgtcccttgcctagcttcgcatccttccttccacaacctgctctggcggnngctgttacttttgtttactgcgaccgcacatgatgtgaatatgatcgtcggagtggc

SEQ ID NO: 368841 - DNA, 258 bp, Zea mays
ttcactcgtccgccaagattgagtcccaacggccgtttgggggaggctgttaagcaacttgcacctgccaacttggggctccaatcattaatggataggcacgtaaatggttcagggacagcatctgttcccctgaagcgcaatcctggatcccatatcagaacattggaattatggggactaagtggagatgttatgggaaagcttgcatgtagcgcactccttggctttgtcgtatttagcacattaaaattgacc

SEQ ID NO: 368842 - DNA, 203 bp, Zea mays
tttcgttgacgcgtgggtcagaatgcttaaaggaggtatttttcctgggaaggtctggctaacccggcgatcctagcctctctccccttctgattattctccaagctttgagagctagcacgacgaatatgagcccaaggagggttctcgtcaggagggagaaggtcaagcatttgtaaacttattttgacaatgcaagttta

SEQ ID NO: 368843 - DNA, 361 bp, Zea mays
gggacggcattaagttgagtttttttttctttccatttcaaagtcagcattcttgattatactggtatcttattacaacaatgaaagaatatacaatgggggggctgccctcaatcgcaatatctaaacaaaatggttcaaaacttgggcagccacgagaactaataaactttccagtaaatataaaccgagaagccaacggaagaattccgggaaaaatggccagcctttggcctttgtaactgtaaggggggtcacgttagtctttagtccctgtttctgaggttggttagtcttttagttcatgtacccacggcagttaggagccttgcacaggcatggaaccctgcagttttcggac

SEQ ID NO: 368844 - DNA, 177 bp, Zea mays
cttacgtttccgcggacgcgtggggtcaattcttatagaagcatgctcagaagctgaaaaaagctgaggcccaatatgccatagatgggagatctgttttctttttgttcccgggcaaatatgctttgctctaggttcagcttcttgtcttctatattccaaatttttttgtattat

SEQ ID NO: 368845 - DNA, 195 bp, Zea mays
ttcacgtgtccggatcgcgagcggcccccttttttggttcttttaaacatacgtccacgcatgcaattggattcttaacatgagacagtacctagcattttcataacttcaagtcttcaatgtcacaacctcaaatgatggtggctgctgatttggatgatgttattctgccattgcctgatgacctattggata

SEQ ID NO: 368846 - DNA, 259 bp, Zea mays
  unsure (1)..(259): unsure at all n locations
tttttnttaaatttcttttttttttttttttggggggatttttaaaaatttttgggggcccaaaacaaaaaagagagaacattcaatggtcctaacaagaaccagaaaacataaaaattcaaaaccaataaaaatccccgaagaacatggtcctcagtttcacaaatccaagcatccgggcacactaatggactacaaagaatgccaaaagcgaaaagttaagcaacgggcgaagtccttcggcagcaaaaaacgggga

SEQ ID NO: 368847 - DNA, 199 bp, Zea mays
tcgtttacgcgtccgcccacgcgtccgcccacgcgttcgcccacgcgtccgcccacgcgtccgattggattcttaacatttgacagtaccttgcattttcataacttcaagtcttctttgtcacaacctcaaatgatggtggttgctgatttggatgatgtttttctgccattgcctgatgacctcttggttaatttgg

SEQ ID NO: 368848 - DNA, 199 bp, Zea mays
cccacgtgtccgggaaatgaatgatggtaatatttatgatgtcggtgtggtgcttctgtcgccaactctcgaccatactaccctcaactcacccccggcaccaccggcaggcattgatattcagagatgaggttttgaatgagacgttcattatttgtacgtatttggaaagtcgtagaacaacatgatcaatactttg

SEQ ID NO: 368849 - DNA, 115 bp, Zea mays
tttacttttacggtcaccgaacatacttggggattgagacagagatagacgtcttaactcccgtatcgccctgattgtcctgctggccctataactccccgatcggcaagaggag

SEQ ID NO: 368850 - DNA, 197 bp, Zea mays
tcgtttaaaaaaaaaaaaaaaaaaaaaaagagagaaatttaaaaaaaaaaaaaataaaaaaaaaaaaaaaaaaaaaaaaaaaaattcataaatattgcgcttttgaagtggacctcttagtggttcctggtccttgtcgttggggggccttcctgggggattgcgccttttggccctgggttttgttcctttgttgc

SEQ ID NO: 368851 - DNA, 197 bp, Zea mays
ttttctttgtcgacgagggctgcccacaaaaggggggggttgcatgaacgcggacggggagcctacaacatggctttgtcgagcacgtgaatccccccaacagtaaagagaatggtggctatgccccgtcaagggggcgctcttaagccaacagaccatgatggaccgtggggtcatgttacatgtgcctggtttca

SEQ ID NO: 368852 - DNA, 197 bp, Zea mays
gttcgctgtacaactacgagcaaactgcagcagggattccaaacatgaggtctagaggaggggattctgacatgagtatctcacccccagtcagttgcaatgctcgaagcaaacccatgagctattccctgacgagaccaattgaacacttggatacgaatgctcaccttttggcagaagaacctagtgactctgtc

SEQ ID NO: 368853 - DNA, 249 bp, Zea mays
ggccgcctgcacgggcccggtccggaccggcaggcccggcccgacccacgctttcgtacgccgggccatggccgccgccgccggcggggtggtcgcccacctctccatccacggccgcctccgccgctcaccggagcatcggccgtccatcaccaccaccaccacctcctcctcttcctcgtccgctcaccgcccgtccctgctgcggtgccgcgcgttcaagcaggaggccggcgacggcgacccggc

SEQ ID NO: 368854 - DNA, 195 bp, Zea mays
ttcacttcaagcacctacaaacatctgctgggagggcttcaaaaatgtatgtatttgcccaactcactactgaaggcacctattctcgcatggatgacgcagacacaaaaaatgttcaatggagtgaacttgctgctttaggcgagcgggcatgtgctcgacattcacattctatggtctcatatggcacaaatt

SEQ ID NO: 368855 - DNA, 119 bp, Zea mays
ttcacacgtacgctctcctaacataggttgggaaacatatggagatggccacctattctcaactaacggctaaaaaaaccagcgagcactatttctactttctctgaaagcgcgaggcg

SEQ ID NO: 368856 - DNA, 180 bp, Zea mays
tttacacctacggccacccaacatactgagggtgagagacggagaccaacctgcaagcatatatatagcctgcattggactttctaggatatatcaagctccactgaaaccattatgtgataatgggcttgatgcttctaatctcggaccacgcccctgaactgtatcttgttaggaaac

SEQ ID NO: 368857 - DNA, 190 bp, Zea mays
tcgttcacgcgtccgtgaccttctcgtcaccaaccccactagggttgctaaggctatcaaggtgaaatcatgcaatgcccttctgctcaaggttaaccaaatcgcatctgagactgagagtattgaggctgcgaagatgtcaaagcgtgcgggctggggtgtgatgactagctataggagtggtgagact

SEQ ID NO: 368858 - DNA, 198 bp, Zea mays
ctccgttgggccaccagctttgaccgccgcctccggtccccttcgctactgctgctgcccaccccactcccccgcaggagcggcggcggcggcggcgaggtcgtaccccacatcggcgagcggcggcggcaccgccggaggcaaaggcaagatgttcgggcgcgcgccgaagaagagcgacaacaccaagtactacga

SEQ ID NO: 368859 - DNA, 198 bp, Zea mays
ttcactcgtccgcccacgcgtccgcatcgacatggctatgcagcagcagcatgaagctgagcttgctgcagcagctgcacaacctcttcctgatgacgatgatgatctgattgagtagaaaggatcatgagtcttgaacttgagcaggagttgtgccttgcgtgttttaagttgttctagggtgaactcttgagttct

SEQ ID NO: 368860 - DNA, 191 bp, Zea mays
ttctcggcctcgtccttatacgagcgccattgtgaattttcgagcagcagctagctagcctgtcgtctcctccctcttgttcttggctactgatcctgttctgtcggcgatatccaagaaaacaaagacttggtctttttcctctgcgtgagcgagctgagtgagggagctcacttcttcgaacagccgga

SEQ ID NO: 368861 - DNA, 253 bp, Zea mays
  unsure (1)..(253): unsure at all n locations
tttttnnttaatttttttttttttttttttttttggggggttttacacaaaaactgggataattatatgctcaggctcaagagcaaatgcaaaaggtccatttaacacaatgttgctatggatcgattctaacatggaatcgggggggataaactaacagacagtttgatgagcttagattcacgaaaaagctgtgacattgccatgaaagagcaaaatctcactgtcggtttggcctttgtcgaactgccta

SEQ ID NO: 368862 - DNA, 194 bp, Zea mays
tttgctccaactcgcccccacgccgctgccgtcgccggcggccgggcgtaggcctcgaccctcctccgcatgcatctgctgctcgagcgtacgcgcgctggaggaggcgaagcgggtggtgctggtgcggcacgggcagagcacgtggaacgccgagggccgcatccaggggagctccgacgcctccgtgctca

SEQ ID NO: 368863 - DNA, 177 bp, Zea mays
tttacacgtacgttgaccaaacagcgggagggttaggtacggagaccgaactcctagctaatataacgactgcaatcgtctttgaaccgtataacaaggtgaagacgaaccctagtataatagaggtcatgcttttattctttctgagaaaggagctgcaataatatcctgagagga

SEQ ID NO: 368864 - DNA, 193 bp, Zea mays
tcgttcacgcgtccgcccacgcgtccggtcctgcttgtgagtctgagctgaagaggaggaggaggaggaggagaagcagcatcgcagccggaggagggagagcgaagatgcgccgcgtcgcgctgttgctcgtcgccgccgtgtgcgcgctggcggcgccggctgccgcggtcgtcactgacggtcttctccc

SEQ ID NO: 368865 - DNA, 199 bp, Zea mays
  unsure (1)..(199): unsure at all n locations
attcttcaaattctgggcctgccactggggtgattccctgtgataagcggcttaagccacattcttgtacataagctgtcttttctgnttaattgaaaagcagaactcctgccagtttctttcaaaaaatggcaattactttgcggaagatcaaatatcatgctaacttgcatttactgatactagccttcgtgttcat

SEQ ID NO: 368866 - DNA, 194 bp, Zea mays
tttactcaaaccttgatctaacaaccgtggggtgaatttcctatgaggagcttgcgactcatttaagtgctgaaattgactctgtactatcagacacgcacaactctaagccggtgatattagaaaacattagtttttgttttgtgatgaaggatactcaggatgaccagcataaactaggatgaggcaccaat

SEQ ID NO: 368867 - DNA, 184 bp, Zea mays
ttcactaggagcggcaccaaaaggcgcgagagagaggcacggagaccgcccgtctcgctcgtctgcgcaccggattagtcgctgcgccggcggatgcagcgatggcggactggcggagagatgacttcacgctcggggtccacgggcggagggagcaccggcggagccagcagcgctgcgggag

SEQ ID NO: 368868 - DNA, 133 bp, Zea mays
tcgtcagcgccgcctggtcaacagattggtgggctgcgctgtcactccaccacgctgcttgtactgaaagctttttcccagaataaaggctggggaggaggaagcggcggtggcggcgctctcagaagagagg

SEQ ID NO: 368869 - DNA, 191 bp, Zea mays
gtgagcccgacaccgcgaatcggatccgccgacaaggtgagagggaagagatggggctcacgttcaccaagctgttcagccggctgttcgccaagaaggagatgcggatcctgatggtgggactcgacgccgccggaaagaccaccatcctctacaagctgaagctcggcgagatcgtcaccaccatcccc

SEQ ID NO: 368870 - DNA, 204 bp, Zea mays
ctttgttctcattctcagccgccgccaatcccttcccgtgctccgcaaccgctgagtgagaagaagagatggccggcaagggcgatggcccggctatcggcatcgatctcggcacgacgtactcttgcgtcggcgtgtggcagcacgaccgcgtcgagatcattgccaacgaccagggtaaccgcaccacgccctcgtacgtcg

SEQ ID NO: 368871 - DNA, 200 bp, Zea mays
gcgttccttttgggccaccagctttgaccgccggcgcggttcatctccgatactgctagtagacacccgactcccgcggaggagcgccaggggcggctgctgcgaccaggacaccgccgacagcctcaagtgcctcgaggctcacctgggcggcaaaacctatgtgtctggcgactgcattactaaggatgacataaagg

SEQ ID NO: 368872 - DNA, 197 bp, Zea mays
gttccgaccaccaaggccagcgccggcggcttcgaggcggccaccgagggcggcggctgcgactgcaacacctgcaactgcggcaccagctgcggctgctcctgctgcagctgcaactgagccggtcaggcgatggcgcacgagagtcgagaggacgacgacgagtcgtataaatataatagcggcgtctaaataag

SEQ ID NO: 368873 - DNA, 199 bp, Zea mays
ttcacgcgtccggcacagcgcagcgcagcgcagcgcagccaaccttttctccgccacgcacgcttcggcggcattcattatttggattttgttcctaccggtcgatccgcgtccgtccgtgcactgcaggcgctaccgtcatgctgaccaacccattgccattggttttgtttcttctctctctctctcgctctcgttg

SEQ ID NO: 368874 - DNA, 192 bp, Zea mays
ttagggtttttgattttagccgccgccgctgctcatctcacatccctcgagaagacgcctgctcctcgccgatcgatacgatggccgtcttctccgacctccacaccgccgacggcctcaagtccctcgaggctcacctcgccggcaaaacctatgtgtctggtgactccattactaaggatgacattaagg

SEQ ID NO: 368875 - DNA, 192 bp, Zea mays
cccacgcgtccggttcttctccgtcgccggtgcgctcgcctcctgcctccctccccctttgcgagcgatcgtgaggggatcgagatggcctcagcctcacaccaatccgagcccctcgactccgctgccaccagcgacaccgacgccccctcagataacatcccagaattaccatgccccccctgtcatatc

SEQ ID NO: 368876 - DNA, 194 bp, Zea mays
tttcacttcctgacgctgttcaagctgctgcaaatgctgcactggctgcagaaaagagagaaaaggagaaggcaaaagagattaaattggcctcaaaaaatagtctcatagctaataagaagatgagcaatgtcctagctatgtggaagcaaaggaatcaagaagggcaggccgcacgaattgtccttgatgac

SEQ ID NO: 368877 - DNA, 192 bp, Zea mays
gtttttgattttagccgccgccgctgctcatctcacatccctcgagaagacgcctgctcctcgccgatcgatacgatggccgtcttctccgacctccacaccgccgacggcctcaagtccctcgaggctcacctcgccggcaaaacctatgtgtctggtgactccattactaaggatgacattaaggtcttc

SEQ ID NO: 368878 - DNA, 196 bp, Zea mays
aatacccgtcacaccccacacatcgttaacacacccaacccaaccaccacgggcaggataaaaacaacaaggggacacccaccccacaccaaacgacaccaaaaccaaaaaaaccaaccacaacaccaaacacagccacaaaaaccccaagaacacaacaaaacacccaaaccaaacaaaacaaacacacccccaa

SEQ ID NO: 368879 - DNA, 294 bp, Zea mays
attggaaagagagatgctttgaccatctcaagggactctcacgtccatcaccattatggtaccaaaaggaaagaaaaaaaaatctggtgctcgtgggacaagggccttagaatgaaacaaaaaccgatagaaacattgcctggctattctcttggatgcatgactaggtctaggctgtacttataagaactttacaagggatgctgacgggagctcaaaacaggcacattgcttccttccttccaacgcttggtgaaagaatcaaggcctgacattttaaatacaggatcaagg

SEQ ID NO: 368880 - DNA, 187 bp, Zea mays
gtgagcccaggcgccacgcacgccgatgcttagccggtagcgcacgccgatgctgagccggtaggacggggcggcgtattccggcggcagctcgtcttcgctagttcactccatcgccattgttggtccccaccgttgtagtccatacgacgccgttgtgcctgtcctactacttgttgtgccttac

SEQ ID NO: 368881 - DNA, 335 bp, Zea mays
gacactactagaacatttgcaatgcgaaattggagcaaaatttattacagtccaatgccttccttgctttgcagagattccataattgtaaaaggtactggtgctatgcactatgctcattggtaccctcaaagttaaaaatcaacaaaaagagcaatgtaacactagtcacaaccaccaaatatctccatcaattgacatccatcaacctagaagaaatgcaaaaaccccaactatcacaccattcatctcctacatggatcatcctagtcgattcataggtccaaatcactcagatgctttagtacccatgactcaaatgttatgtctgatgc

SEQ ID NO: 368882 - DNA, 478 bp, Zea mays
tccacgcgtccgcgagcagccacctagtagtctttacttcactgctatagtggattatgactgtttgttccattccattataggacaacctgcctgtttcaaccaatgtgttttcagcagagacttttgggccctaaagatgagcattactttgctatatgttcatttgtcaacagggacaagttatcttcgtttttataccctctgcattgttatattgcttatttgtttggagacacaaaccattgtaatcccaaatcttaggatgttactgataatattttctttgctcctgcaatttttattagggcgtgctatcttgaagtatgcctatcccaacttgcttgggactaaaaaggctttgttgttgttgttgtaatatcttgaagtataaagcagggatattgcttcctgctcttgaatacaaatgggctatagttgataaaaatgaataatcgttttgtgactaaaaattctg

SEQ ID NO: 368883 - DNA, 92 bp, Zea mays
  unsure (1)..(92): unsure at all n locations
atancaaccggattacatctttgttgcacaattgcagtgaatatgttaatgagcttgatgttaaacctgatgggtcatggcctgtgaagtat

SEQ ID NO: 368884 - DNA, 164 bp, Zea mays
cccctgggacaaaaaaaattatccttttaaacaaagggcctagttatttacaggggattcatgggacggaaaaaggccttatccaaacatatagaaaatctatgaaatctggctctgggggaaccgaacgcccatgagccaaaaaaaggaaggggcagtcccaa

SEQ ID NO: 368885 - DNA, 115 bp, Zea mays
attagatatctgtacagaagtcgcgccaaggcgaaggatataaatgatcatccaccttaattaattttctattaattttaaaacataacaacattataatttaataaaaatttat

SEQ ID NO: 368886 - DNA, 90 bp, Zea mays
ctatgctctagctagccgcgccactccttcgtgtggccatcatccttctcatcgccaccaatggccactgtcgaggtccagaccccgacc

SEQ ID NO: 368887 - DNA, 129 bp, Zea mays
ccttcttctagctagcccctcacgcgcttgttggtgccctgtcgagtcgagcccgcatttatgcacgatcgagagcgagtgcaatacatgctgccgtttagagctttgcatctttaatatttgtataca

SEQ ID NO: 368888 - DNA, 135 bp, Zea mays
ctaaagggcccaaagggccatttttttcaagggttggtacactgacatttttcatataggatgaataggattacaggtaccctccatgggacttaaatgtgaccgggttaaccatgtgctggaggatatgctcct

SEQ ID NO: 368889 - DNA, 383 bp, Zea mays
tctccctttttttcctccttttttttttttgacaaaatcaggtggtaacttgtatcattagatatttttgtcccctaataatatttgttgctatgtacaaggccacaaacttacaattgtaagtggggcaccattatatttctagcactagctaatagctttcctgtgtctctctttcgaaagaaatagaccaatagtcagtgcaccacaatactgcaggagagcctttagtcttgagctgatggttgatgcatggttatgtacaatgtattggactttcccagggcgaatcattttggtgcgcagaagaacgttaagaggcagaaagctcgggttccaactttttactgatctctcgctcctgttgtgtcctgagataaccc

SEQ ID NO: 368890 - DNA, 188 bp, Zea mays
ctcattttttcaggtggaaggagcgattcgtctgtgcctgcgcctcgccgggctcgtgccgctgtaccctccttctccaggagacctgtacggtgaaggggcgttcccgcgccaaacgggaagcaaagctcgctcgcgccctttttttcggatcatataatcgccggcgctcttagctcaaacaccac

SEQ ID NO: 368891 - DNA, 328 bp, Zea mays
accccttgacagataccagtttcatgggaacttttttcagcttggtggcaacattcttatgtagactagattttgctgaaatgggttcttctacatgtttaatagcagacatagtagtcctttaacacccaatacaaagcaccttctcactttccaaacattttttggggtctggcatatggcatatcttccattccactgaattctgaaaatcggcagcaaagtcttcaaaatatgaaataatccttgcaaccaaagctcgattaaatggccagccaaaattttggatgagccattcgatttgggatatgagaagcaggaaaggaaa

SEQ ID NO: 368892 - DNA, 350 bp, Zea mays
cccacgcgtccgatctacgtctcccctttcctcgagtggttatgcacaatatgataggcggcagttctattgtcagtagcttgaagggattgctggttgctttgctgaccacctatcaattcctataagctacaaactttgtggatagtgatgttctttggtgacaatctagtgcttcatctgttatttggtacctatacacattccatttgtcggagatgaaatggagtcttcagttgtcagcataaaccgtttgggggagaattccagaatcgggtttgggagggtgattatatggtagatccaaggccatttttgttttatcagttgcttactcacatttttatact

SEQ ID NO: 368893 - DNA, 464 bp, Zea mays
ctcatgcaatcattagcttattgagcagctgattcagggcataaaccagagtttcacttgcgagttgcgaaggatgtttcaggagagcatgaaacttgacaaccgctacggtactcaaaagtacccgatgaggcactgactcatctttcagctcaaactacatagtttgctacagaacaaacaacatgtactaaacatcgtactacatagattgctacagaacaatcgcacaaacactatcacttcagattgctccaatatctggaatcactgactcatctttcagctcaaacttaacaggatctgttgtccaaaaatgggtcagtcgtcaagctcatcatcagtaggagaatcttcaaccagctgtgttttgtcaccttgcacatccttatccagcttctgacgatcatttcctgtgaagtgagtgccctccgacacatcattagccgattcatgacactttt

SEQ ID NO: 368894 - DNA, 257 bp, Zea mays
  unsure (1)..(257): unsure at all n locations
tttttntttctttttttttttttttttttttttttttggttttttttttttttttttttaaaaaggcccatgatattggaaggccaatccttgggcgaaatgaaacagggccaaagaacatccaacagttttgtggggtaataaacgttgaacagttacattttttcccattaaacaaaaaattttttttgggccgggggaagacatttaacagggtgcaactgggattttgtcctgagtttccatgatacatccgg

SEQ ID NO: 368895 - DNA, 125 bp, Zea mays
tcctcgcgtccgtgcatttcagtccctgcgaagagaaaaccgtcgcgtcctcgccgcgccgctcgcgtcgggatcccgtcgccgccctactcggtcgaccatggagacggcgacaatggcgactg

SEQ ID NO: 368896 - DNA, 345 bp, Zea mays
acgccaaacaataaaaacagcttatccagcggtctatactctgtactttccaaattccaattcgtaccatttgaagtgttttcgtatttctgcaaccgacacaaatggacgagtttgtacaaataaacaaagaacgactactgagcaaaacactcccagagcaaacaacaacatacccacgccagggttcacacgtgctcatcatcctgctggcggctggcacgatccagcgggagcacaaccaagccacggaacagaagaagcaggccggcgaggtcgacacaggcgatatattccttctcatcttcgcctccaaaaaagcgcaggattcccatccagctttgt

SEQ ID NO: 368897 - DNA, 67 bp, Zea mays
catttattaggtggagtccaagaactcgctggagaactacgctttcaacatgcgcatcacgattaag

SEQ ID NO: 368898 - DNA, 81 bp, Zea mays
cccttgttttcgcccacgcgaccggacttgcataggaaaggaaggtcctaatagtcagtctcatatcacacaacaatgtta

SEQ ID NO: 368899 - DNA, 208 bp, Zea mays
aaaaaaccaggggggggggtttcttaattgacctatgcgactgcccggcccacaggggcccgcccaaaaaaaaaccagaaaggcctaccttttttttttggttactccgctccggtgggccccaatttccatggccctgaccgaagggaattcacgttacatatcacttcctcccttggggcaaaccaatcctgcaaaagcaaggggg

SEQ ID NO: 368900 - DNA, 136 bp, Zea mays
aaccgcctcttttttcctagcccaccaccaccgcacgctcggggcgaattgataaacacgtcccagtgcgagccccccacgctcgcgcacatcccacaccacaccaccacaacaccagtctacacccacagtacaa

SEQ ID NO: 368901 - DNA, 107 bp, Zea mays
ctggtgctccccttccctgtctctcggggggggctgtgcgccgacatcgcccggtgaccagcgccgaccgcctcgtagaaaactgagacgcacgctactcgagcatc

SEQ ID NO: 368902 - DNA, 235 bp, Zea mays
tttttctttttttttttttttttttatttttattgggggttttttagcccaaggtgcagccattgggatttagacacccacagaaaaaagaactgtttttttttctttcaacccataaacctatatggacagcattccctgctcagattataaaacaaagacctggaagcagactatttatgaacattgaatcggcctgaacgatgacccaattttagatgcttccctgccatac

SEQ ID NO: 368903 - DNA, 78 bp, Zea mays
cttccacattggccatccttcgtcttccatggagaggctctttgccggcctacgtactcgacttcctattactgaatc

SEQ ID NO: 368904 - DNA, 306 bp, Zea mays
ttagtccctgtcaagcagacgcagggtgacaccaggcagcagcccacctccacgcgaacacgccgcaccacaccatcaccggcaccgcagcacggcagccagtcaccaggactccaggagtgatctttgatccccaccaggccgccacgctactgtcggaggaaagacacaaaatgtttcagtaccgcctgttgaaggtgtagctggaggaggaactagctatggatgggtggatggaggtttgcggggtacaaatattggggctggtgggattggtcccaccaaaggacactcagatgatccttt

SEQ ID NO: 368905 - DNA, 204 bp, Zea mays
  unsure (1)..(204): unsure at all n locations
gcccaagaaatctgatataccccggggggctttacaacacaagggggctgaaaacaacttcacccttngccccacnccatcatgtttcatcactcaagagaacaaagcgatcccatagatctacttgtcaccggcatattcgaacatagatgtcagaaccatattacatttatcaatctaacattgatcgcatcttctcactct

SEQ ID NO: 368906 - DNA, 125 bp, Zea mays
ctaaaccttggggaataaaacacacaataatgcaacactggccgcgtttattattgccgacaccctaccggccggcccgggctgggcgtgacagcatataaaccatgatggtcgatgaatgaccc

SEQ ID NO: 368907 - DNA, 363 bp, Zea mays
ttgttatcgataagctgcgtaaaggtcttttgtggaaaggaagaaaagaagtaaaaggtggctactatctgctatcttggcctaaggtcactaggccaaaggagttgggtggcttgagtattcatgatctgcaaaagcttgggtgggctcttcgggtcagatggctatggttgcaaatgacggagccccctagaccttggtctgaatttcaagttcagatttgtgatattgtcaaaaaacttgtttcagtggctgtgatttcgcaagtgggcaaacacaatgatactcttttttgggctgacaattggttacatggaaggagtgtaaaaggctaaaagctcttgctccgattgtttttgcttt

SEQ ID NO: 368908 - DNA, 107 bp, Zea mays
tctgctggaatccatggccacgcattccttactgctggaaaccttgcgaaactgtcggagggcgagtacaagaacttttcggtttccgaattcttggcacacgttct

SEQ ID NO: 368909 - DNA, 221 bp, Zea mays
tgctttagatcgcgagcggcgccctttggggtactatttcacgaacacgagcgacggcacggtgaagattaacttccgattccacgctgagatcaaccacccttcactgtcccaacctcaacaccttctactccaacaaggagatgcacgcgctgacgtgtatattcaactcttgcgaagcgctggaaacgacaccgtcccggagtctgactgacaagagc

SEQ ID NO: 368910 - DNA, 285 bp, Zea mays
tcccttttgaagaaaatggctgttgatcaggggtattatacaatattccagcttttggctctagcaaatggtgatcgtgccaaagacaagcatagaagcagaagttcttttgttgtagatatggagaagaagcttgctgctgaaaatttgataaaggtgctatcttcctgtcatggacctctgctttgtcatacgaaacaaatggctgagatctacattaagctagcagcaactggagaccaagaaggtggacactaacataaaaattccgttgcccctggaggc

SEQ ID NO: 368911 - DNA, 307 bp, Zea mays
aagcaaagatgcaaagcatccaacaactccgacttttcaaagcagccaacaggcgacccaaacaaaaagcagatagacaacccgaagcgaaaggtctcaacaagccatcgctgccgggctcaggcacaaagcagcttcgacttccaatcttgaccctctgccctgcctccggtttttgcccgaccttcgaaacattctggaccaccaagaagggaggtccgcctcgtgttatcgctgccgagccacatccactgatgtagcagctccgacttcacgttgcaaaacccccacctccactcgcatacca

SEQ ID NO: 368912 - DNA, 240 bp, Zea mays
tcgtcccgcgtcctggttgccccgcgtcgggcgactcggacgctccccataatccctagtagccgccgccgccccttcgtgggcctctccctgccgcgccgctgcctgagctggccgccggaaggttcggctgcttgcggggagggcggcggcggggcatctccgtctccctctggtggatctgggcgggcacagccgccaaggcctccgtgagttgctcgtcggcgtggccggccccgg

SEQ ID NO: 368913 - DNA, 96 bp, Zea mays
tcctctgcgtttcgcgactgagatagccaagcctgcgactgcgcgcggacgggcgagcgagcaggcagaatggagcgccactcccagaagcaggcg

SEQ ID NO: 368914 - DNA, 379 bp, Zea mays
ttcttcatcgacccccgccgtagtagatggctagatgccaaaatcccaaatcccttgtgaacctcctaaacctaagcgatggcggtggcggcatcgccgtatttcctcttgctcttcctcttccattcattagctgcactcgcctccctcgcgccaccgccttctcagccaccaccgccgcgggtgcctcagaaagtgcaggtgtggcccaagccggtgtccatctcgtggccgttgccggcatacgcgccgatctccccgtcgttcaacatccgcgcctcgccgtcgcacccgtcgctccgtcacgccatcgcgtactacacccgcctcatccgcaccgagcggtacacgccgattatgccccccgtcaactacaccg

SEQ ID NO: 368915 - DNA, 266 bp, Zea mays
ctcgatagcggatggggcacgagggaatttttttaaccaagcttaaaaattcgccccgagggggatcaaacctaggacctggatgtgctacatggaagcccttaaccactaggctagagacccttttgcataatgacatgtttctctgtgcttgttgtctttactgttgcaattttgattctggtgtgcctttgcatgttccctttggtcaacaacctgctctcaggaagttcccaagttttccctaatgaatcaaaccgaatgag

SEQ ID NO: 368916 - DNA, 353 bp, Zea mays
ttgacgcgtggggggagacgcagaggtcccgcggcttcggcttcgtcaccttctccacggaggaggcgatgcggaacgccatcgagggcatgaacggcaaggagctggacggccgcaacatcaccgtcaacgaggcccagtcccgcggcggccgtggaggcggcggcggcggctacggtggtggccgtggaggcggcggctacggcggtggcgggcgccgtgatggcggcggcggctacggcggtggcggcggcggctacggtggcggcggtggctacggtggtgggtggtggcggctacggcggtggcaaccggggcggcggctacggcaactccgacgggaactggaggaa

SEQ ID NO: 368917 - DNA, 401 bp, Zea mays
tctgtatcagaccaaatcaagcacaacccaccgccgcgtgcctccaccgctccggtctgtctccagcaacggcggcggccatgcaggtgccgggccgcctccggcgcgtcctccgggcgccgccacccagaatcctactctaccgcgcgatctcctccccgccgcccggtggcggcagcggggtggcggtgaagcaggtgacgcgggggaacatggaggaagccctggagaagctgcggggacgcgtgcgggaggccgcattcgtggggttggacctggagatgagcggcgtcacgagcgcgccctggagagacacctttgagctcgaccgcgcccgacgtgcgctacctcaaactccgcgacttcgggaggcggttcgccgccctacagctcggcgtctg

SEQ ID NO: 368918 - DNA, 194 bp, Zea mays
aaaaaacccgagggtaaacaaaaataatcttaaaacacttgttacaaataacctttgggtttaaagtttagggcagggacaaaaaaaaacatgtccccaaacaattttataaagttcgggtcataagggacctcctgtccagattcgaatagataaaaaagtaccaaataaactactcgggagcagaaacctcc

SEQ ID NO: 368919 - DNA, 57 bp, Zea mays
tcttctcgtccggatacgcgttcgttcacgagtcggctcacaagtgcgctcatacga

SEQ ID NO: 368920 - DNA, 179 bp, Zea mays
cacaaagggagcttaacaccggaggttaaaaacgccctaacaggggtggggaacaaaaaagggtttttggggcccaaggttttgggaaaacaatgaacaaatgggggacgggttacagggggggaaacccgggggttagacccccaaaggaggggggaccaagggaaaatacaaaattt

SEQ ID NO: 368921 - DNA, 357 bp, Zea mays
gcaggaagggggggctttactattcaattctatgccacaaagatcagtcatgcttcttcaggtattggggcggtcactgcaagaatctcacatgagtaactactaggcatatccagcatataaagtcgattgttaacagagccaccgagggtagctaaactgtgcatatcatatacacaagtgactgcagggacttaaaaacttctttacggaaagctaagcgaaaccaatcagcaccgaacagctttctcttctattctggaccatcaatttactaatagaacaccgagcacttactctggcaacactggcatgtgatgcccagagcgatcatcccatggaccaataatatggagg

SEQ ID NO: 368922 - DNA, 357 bp, Zea mays
tcttcaaaaagcaaatcaaagccacaccaccaccaccaccggcagctgccgagagccgcgcccgcgcccgaacacaagggagagcggccggagaggaaagccaaatccatccactccaccccgtacgccgtcgccgtccctgtccctcccctcttcccgcgcgcatgggccccaaatcgccagcgccgcgacgagcgcgcctgcccccgcggcggcggtagcagcagcagcagctgctgctgtgtgcttcgcgtcttcgccggggatggcgcggctcgggcgagcgggctgccgctccggtccagcccgagcttttttttcaggaattcctgaagacacattgagaaattttatgtc

SEQ ID NO: 368923 - DNA, 71 bp, Zea mays
tccaccagaacttgtggagcaatttaggagcagacaaaggaactttgacaccgaatctcgcgcaggtgcag

SEQ ID NO: 368924 - DNA, 131 bp, Zea mays
atcctagcgcctcgcctccgcattctagggtttccccgcctacggcgccggccatggaggcggtggtcgtcgacgcgggctctaagctgctcaaggccggcatcgcggcgcccgaccaggcacccccactg

SEQ ID NO: 368925 - DNA, 73 bp, Zea mays
tgctggtacgggcccttggagacgcgaacgcggtaacgtgggctaggagggcacgaagagcatagaccccgcc

SEQ ID NO: 368926 - DNA, 250 bp, Zea mays
gggcacaaattcaacgtttgaagtcatgttttgggccaactccttaatttaatacaattggcccaaatttggggggtggggttttgtataaaatctaatttttggtgggggccatcaacacatggaaaattcaattggggggccaacattacaggcgcggttaaataaaaaggggagaaaaacaaggtaaaccattcccccccattttggtctcactgggccaggggataaaggggcatttggtgaaaat

SEQ ID NO: 368927 - DNA, 340 bp, Zea mays
atccttttctttctcccttctttcatctcccctccccatctggatcctccgccgccggttccccattgctgcctccatcgcccccactcctcgccggttccccattgctgcctccaccgcccccgctcctcgccggttacccattgctgcctccaccgcccccgctccgaggagggccacgacggccggatcctggactcgttgtcgcgcgccagggcaaagaattctgctgccacggacgacgacatggctaaccatcagttggtctcctaccacgagctcgctcgtgctaccgaaaacttcagtgatgctaacctgctggggtctggaagctttggga

SEQ ID NO: 368928 - DNA, 115 bp, Zea mays
ggggccttattttgcaactcgaaaatggaaaaagggtttgatacaagggcaaagaaccccctaaaaaaagctttggcctttagtttaacaactttgaaggggcccccgggcccgg

SEQ ID NO: 368929 - DNA, 105 bp, Zea mays
tggtacactgttattttgctaaactagaggcctaagctttatttaggtggttcattgaccttgtatcataaccttttgacattatcgagttgcaaaataaggtcc

SEQ ID NO: 368930 - DNA, 304 bp, Zea mays
aaacagaacgcggaacaagcagggtcttttaaacaatacccagtgcattcaaaaccaaacattccatgcttgacaaacacgaggggacggggtgaacaaaaacaaaaagaaccggatctagctataacagcaatgggcacgggtacgggtctaacctgaaacctatacagaccaagcacaaccaaccgaaccaaccatagacctgtgtggggcaagggaacgggacctggagccgccaattgtacgtgtcctcggggacaaacaccggctcggtgctttggtgggggaagaacacggggtggcc

SEQ ID NO: 368931 - DNA, 388 bp, Zea mays
aggtcaaaagcgcatttcaaaaaatttgtaatgggaaataaaaaaagccgtcgattgggtaccagaagcaacgaaactatttaaatctaaactaattttatccttttccatttgctccaccctttcgcagttttattacgagcataaattttgtacaggattgtacaacacgctgggggtaactccgtcgcgcatttgaggaatgaatgggtttttcccctttccagtgtgcttggttggcaaagcacgggggctccaatttatttactgcctatccaagaacatgtaatcagcacagctggactggaagccagctgtttccggtgccaactttttggggaaggagacgaccttctttgacgaacttagcaggtaacgggcgttggac

SEQ ID NO: 368932 - DNA, 214 bp, Zea mays
acatgtgaacaattttggattaatgtaacaaagtcaacaggcgtagcagtacggagtgcgatattgaggaagccaggtcagaatacaacctaggacgcgacatcaaagcaacgacgggaaaatagagggggcaaggaccccattattagtgcggctccacgctgctgctaccacatacagtttataataacataaataccaatataataaaacc

SEQ ID NO: 368933 - DNA, 328 bp, Zea mays
cccactcgttcgcccacgcgtccgcccacgcgtccgctcctccagatccggtgctcctctccgccgcctccctcccgcagctcccatatttttccgtcgctcgcgcgcccgacgcctccctcccgcgctcccggagcttatgcgcgccaaatctcccgccagcatctccttctcccgcgcacgcctctggctttcgttccagaccaggctccggccagatgagaacgctccaccagtagctaggcttcattttcctttttaatggctcatttccatcccctgatctagcgctaaaatttagtccccaattcatctctaaggaaaatcg

SEQ ID NO: 368934 - DNA, 124 bp, Zea mays
gaaattcgtttgccagcgattgctgggacctctcgctctatcaagtgtgtagcgaggcataaagagtttgcaaagcctactgctgctgctgtatatactgatatcgctaccaaggcaggcgatt

SEQ ID NO: 368935 - DNA, 125 bp, Zea mays
ctgattttgtttatggcccaagccaatcactttcttggtctgatcatatgttacctttgcgggttcaacaaagtcacactggaggaaatttgagcaatggctcaaaagcaaatgtgcatacgggt

SEQ ID NO: 368936 - DNA, 138 bp, Zea mays
cccactcgttctcccacgcgtccggcataggcaccgtcgcacagagctgggacttttttttaagcaccacagagctgggactttgagagggaggactcagcgggctccaaagccgacgaggataaagaggagcccggc

SEQ ID NO: 368937 - DNA, 381 bp, Zea mays
ccgggcctccatccaaaaaaaatcgaaggggccctaaaatgatttgcatttgacatagggttcggttacattttacaccagtttatgaaggaaaagcagaaaaaaaaaatcggagcgaagtccaatgtagggaaaaaactacgaacggggcaacgaccgaaaaaagctaaaaaagggtaatgaatattatgaacacaaaatagtcgttttttttaataagaacctttcccacggagatttttttatgttctccccggccataaaacacggggagttaaaaatggggtaaggatcaaaacacacgtgctgttcgcccattgcaaggctcagtatttgtacagactttaacggacaaacgagcatgactgattagccaaatcc

SEQ ID NO: 368938 - DNA, 100 bp, Zea mays
ccagttttagtacgagtcagcttctagtgcagttgactattcattttaacgtggatggtaagtactttataatagaccagatgtatgatcgtgatcaacc

SEQ ID NO: 368939 - DNA, 347 bp, Zea mays
ccggaatgcatgaaacagacttttattattcctatatttccagggtacacattctgcaaatttccctacatggtaaaaccgcaacctcacagttccggcaatgttccgatgagaaaatcagtcaactcgccgagccaaagataagaaagaaagaatggaacctcaaaattcttttcacaacttcaagggccgtgtatccacaacatgattccccccaaaaaagtgaggcaggcatccgcggcgagttgcacttctctgtcctatgtaccaagtcaatttgcaagcaggaaatacggtgaaaccaaacttttgatttccctaaccactcattcacctgtgggcagccg

SEQ ID NO: 368940 - DNA, 546 bp, Zea mays
gccacttactgttagcaaaaaaaacttacctaaaatctaagagcttagttgattgtattattaaccatacatttattgtttctctttacatcaagaattttcacttatgtgtgcttattaatttgcacagttgttagcatggcttttttatttatcttgctccctacaggtgagttgtatgtactatctacctgaccaacaacatttacgcttacgaattatttctatgtgatctattagtatttcttgttcgctattgattgcttcacacatctttgttgttgctcaggtcatatttttcaattgtacgtttgcatacagactaatagctacgcacagtccatttgttgttatcagaacaacaaaaaacttatatgtgcaccgatatatttattatttgtctttgcatcgatgattcacatggatatacacttattgagtttacaattttccataagattgttttattcctttgcaggtaagttctaaagcatgtctctttaattgacactatatacgtttatgtattttccaaacaagtttaaa

SEQ ID NO: 368941 - DNA, 468 bp, Zea mays
aatcatccatctattctttaaaagaaattatgtaaaatataattaaatgttgccattttaacttagaataccgaatacagatgctagatacacaagttacagaagtcgttaaaaagttgcgcccttcacagtttcaaagagaaaaacaaaatatgcaacatttaagcagcgaacgagcataactttatgcataaactacccgcatgagtagcgtccaaccaagctccttaagacgagtatttctgtctatcccaagcatggcacacatagcaacatcagctgcagtgccttcctacgttttcccgtatacaatgaagagatttagcatcttatagctttcctcctctcagcgccaaaagcatccttcaacaacagcacgagaggtttctcttgatcgggttgaggatgccactcaagaattactttttcttcttcaatggtctcacgaatatgctgatacatgttcat

SEQ ID NO: 368942 - DNA, 432 bp, Zea mays
gttgggaggactagataattgggttaatcatgacatatgatgctctaatctagccagcacaagcacagataaagttggtgtggtgtggctggtggtagttgcacacaccatctgttcccatgctggaggcccatgatttcccatgctggttggtttgttcctgtaatcgcttgctgcttagccttggtgcttctactttgatctagaggctgggaactccaaagaggaacaacgtacatggaggctggaggcgcatgaggtggttctaatggggcggtgcaagcaaaggggagcgggactgatgcctctaccaagccgctgcccccttgctgtacagatttctataaccgtagttgatatgtgtgatagaattgtcacttttgtcacttgagatgttatcgtagtttgtgaaacagaccggtgatttctttg

SEQ ID NO: 368943 - DNA, 226 bp, Zea mays
gggggggcgggggcacagcccgacccaactgccggggttggggcccgcaattataaacccgaaaaaccccacggaaaaagggggcccctaaacccccaaaatggccggctaatgtctttcccaaaagatttaaccggggatatttccaaagcccccctccaaaaaggagttaaacaatcgggagtccaggcaaaaaacttggtggggggggtagcaacgggggggc

SEQ ID NO: 368944 - DNA, 117 bp, Zea mays
ctggctcccttgtgccgccaggccgccgatccatcacgcgatgcagtggagcttagagatctccctcgcaaggtcatgtgggagctgccgaggttcgtgaagatagtggaggtgggg

SEQ ID NO: 368945 - DNA, 544 bp, Zea mays
cccacgcgttcggtttacaaacacttgaacgcttacattgagcacaaattgagttttttgaactcagtattgagtattgacatttcattgcccagttgcccttaagtggtttccatttatgttttctctagtaaatatgtagacgtgtagtttatttgattgattgctgtggtaatgtggtgctactaattattactcaccacaggatatcagtaaataatgttttggaggtaggtagttttcaacatggcttgggttgctgacatttatttttatttgcaaattgtgttattatgtaagtacttctggggataattctatggatattatttttgttggggcaataatgaataaaatgatggttttgttagccaaagtttgaaatagtccactgcatacatcccaatgtgcccactcctggctgtaagcagggcacataatcttgctttaggatttggcatagattcagtcaaatgttgcacttgcaatgtggacaggttttatgggataaccattgccgtatgtttagtcatgattctgagat

SEQ ID NO: 368946 - DNA, 142 bp, Zea mays
gaaaacaactgcgatttattcaagaaaattattaaatttggggctgggacccacacagcataaaactccaactgctgcccacgattggcccatgtttgcagctggctacagggcaaaaagttcaaaacatgcacggaagcta

SEQ ID NO: 368947 - DNA, 202 bp, Zea mays
cccacgcgttcgattggactctcctcttcttgccggatctccccaccccattccaccccgcccatgggtgcccccacccctcgccgctgacctgtgggtacactgccccctgctgccgcgaggcggtcccgctcgcccacgcgaaccctaggcagctacgctttggtgatggagcagctccagcgaccgacgaggagaggag

SEQ ID NO: 368948 - DNA, 375 bp, Zea mays
cagttaaacacagtagttagggtttgtccaccaaaaattctatgtgagcagcatttgcccagtatgttcggcgtcgatgcctcccagtaagaacatgctcatagtgctacattcttgttcactatgaaactttggcgctctccctggacgacctttccttttcggcatgtctcagggtctgctcgaatgcttgcagcgaattggaggtgaagctttctagggcttggacgacacggtgcaagctactctgcaaactgcttgcgtcaagaagatgttcctggtatgtttgcgcgcttggaagccggctgtgccgacctggtatcagggccaacttcctgttcaacacatctgcctccttgttgatctccacagttt

SEQ ID NO: 368949 - DNA, 314 bp, Zea mays
aaggggggcacatgaatgatacattgtaacaggcacttatacaatgataagggggcctaatgtttctaagggagaaagtgaaaaaaaaaacgggaagaaaaaatgggtcgtttagctgaacagcagtgtcactcctccgagcgttcagagccttcgtcgctgtcgttgcaagggacggtgtagtggatcacgacacgggctccggacgacagccgagcactgacaaagagttcacagtaggttcaggtaaagaaaggccacgggcggcacttaactttcctcgatcttgacgagtttctccttctttctgaacg

SEQ ID NO: 368950 - DNA, 363 bp, Zea mays
gggggctgggagcaccacaggcgcgtcaatcatgttatttaaatcgttgtctcaagggaaaattaagaaaagccgtcccatttacaccacaacagtttttgattacaaaggtcagtgcttccggggtttgcgtttaaaacccttggcctcaccctgcgcccgctggtgtcgccgccgtcagagagctgcgcccacacgctttggcttttcaagccgctgctacatggttcctcacacccggcaactgtccgcagtatctttgactgcagagatgggcacgttgtttttgagatagtcgaaaccctcagtccggatcacagctgacaggtttttggcagcaaatttgaggcaaacggatttaag

SEQ ID NO: 368951 - DNA, 280 bp, Zea mays
ggatgggggatcaacaagattattatttcatctcatgttaaaaagaacagcccaacggaaacaacaccattgtaattgtatgaggaaggagcgaagaaaaagaaaacaaaaacacgccttctactggggccaaaccaatcacccaattgaataagttacacgaagggaagaatacatacagacgggacccaacactaacctttcctgctactatccatccggtccttctcttcagctcccagaggttgctgtcactttgaagcagtcgatattgcacagc

SEQ ID NO: 368952 - DNA, 512 bp, Zea mays
  unsure (1)..(512): unsure at all n locations
cccactcgttcgcggacgcgtgggcgaaaaccatcgacgcgctccgtccaccctcccctaccccgcgtcctcctcccctacgcctcccagcccagcggcaaaacctaaccctagatgggcgccgtcacctctacggtcgcggcgcgctttgcctttttcccgccgagcccgccgtcgtacgggttcgagcagccggcgccgcttccggcccctgccacacccgagcctccggccccggccacatccaagccgccgcctccggccccggccacacccaagccgccgccagcgggggaggagaagggcggtggcgcggtggtggagctcacgggcgtcccgcggagggttaacgtggaggcgcggcggctgcggacgaagcggggcacggggtggtcgcgatgcacgtgcgccaggcggnggccaagctcacgctgctctactcccacggcaacgccgtcgacctcggccagatgtacgagctcttcggcgagctcagcgcccacctcaacgtc

SEQ ID NO: 368953 - DNA, 365 bp, Zea mays
acaaaggggaacgccctttatttcattacgaaatagacagaaacatagttcatacatgaccgttaaggccaccagaaaacgaaaagccgacaaaacgcacgcaactattagctaaagaaaacataacacggggaaagccttccaccggggggtttcagaccatctaacatatttgcccaaaagcagagaacaaagagccacaccgaaagggacaagagcatgacatcgcaaactaagaacttaaacaagtttacgaacagagcacccacatgaatacagctcccagcacggttaaaccaaaagggcatactaacatacaaactttattgaatgcgtttatcaaccgacttccatccatgagcttt

SEQ ID NO: 368954 - DNA, 534 bp, Zea mays
cggactcgtgtgtttttagagtatttaaaaactccactctaacccgaagggcctgtttgtcaacaatgtttttcaaaaccatggttttacaatactatactttgtaattgtcatgacaataccatagttttagcagctccaaaatatcatggttttgagaaacattgtttagatacaacattgtaatgttttccacaataagattttaacaaaagacaatctgagcaaaagaaactggaagtggaatcttaattgtgttttttgtggactaccagagtctataaatcatcttttcttccaatgctctgttgctaggtttatttggagaataattcaaacaacccttaacttgaattctattcccagtgatgttgaaaatctctttggaccttggattaacagttttagcaaaactgaaaaaatctggtccttttcggttgtggcgcagtcatctaggcgatttggcgctctcaaaatgattgttgttttaatgataatttgattgatgatccgactaatgtgatcttctcatgt

SEQ ID NO: 368955 - DNA, 165 bp, Zea mays
aaaaactgatcccccccattgttttatttttcatcagaaactaaaaaccgcaaaccaaaatgcaccaaaatagtctccccaattttgtcccccccaacttaactaaacagcccttcgttacacccgaacaaatgtttaaaatgttctacaaaaactgcccaaaac

SEQ ID NO: 368956 - DNA, 317 bp, Zea mays
aaaccggggggtactcttttaagttgggggcgaaaataaaatttttactctcatgtttaccttttatacggttttacaaggacgcgctccatgacagactgcaccctgatttaggcaatgaatttgtcgtccgctttcggcatgtacacacaccatttttacagaagcaacactgctggtttgcccactcagtcgttcagagagatcctttcgttccagcgatggggattattacggggccaaaacttgcagctgggccttcagatccacagcttgataaagttgccaatgcagcaacctcattatttgcaaaagcc

SEQ ID NO: 368957 - DNA, 445 bp, Zea mays
  unsure (1)..(445): unsure at all n locations
cccacgcgtctgcccacgcgtccgcaaggcccttgagtgccccgcaagtccctgcagcaaaacaaagtgtgccagccacaacagctcagaacgcacctcttctttctcgctcagtgagtgctgntgggcgggttaggaaatgagccctccgccaatgctcctagcttcattccccggtcacgaacctatcgcaatgccatgatggagaaaagttctggtggcgtaagcagtctcacacatcagcaaggttcatctgagcaggccgtcgcaccatcccaatcgatgtttacatcgcagccttccattctgtcatcggagaccttgtctatgaaagaggaaacgtcgttgagacctgggtttacatttggaaccgtaaagcccgagtcactgaacccttaccagggcagagaagagaactcacttgcagcgagcagcagcagcagca

SEQ ID NO: 368958 - DNA, 374 bp, Zea mays
cccacttcgtttgcccacgcgtccggtcgattcggcgcctcctgtccttcacgcgcccacgctgccgtcgcctcctcctcactgtcgtccatgccgtgtagccgcctacggccatggccgctggagccagcgactatttgacggtggagtaccactccagagactcccctctttcccctccgacgacgagggagccaccggcggcagcggcgtcctcgtacaccacggtgggcacggtgggcgatcttctcatgaagtggtggtagtgcctcgtggacgtcgacggagacgcggcgtgcctgcccctcgtcctcctgctccttgtcttttccggcgccccgtcttctgctcacggctgcgaccgctgcgtgcgc

SEQ ID NO: 368959 - DNA, 265 bp, Zea mays
aaaattgaagggggtacttaccccataatttgcgccaatccaatataagtaggtttattgggggaacacacacaacttttagttgactgttccactacattcacaaaacaatcaacgcctacctgatcatatgcattttaattaaacccacctcatacaatgggagctagagtgatcttaaaatttaaagagggggatctaaaccaccccaagcttcctaacttccggggattaccggtggtacattgagctcgaaccggtggaa

SEQ ID NO: 368960 - DNA, 267 bp, Zea mays
aaccgcacccccccccaggtgaaaattcacaagttaattataggggtacaaaaatttgctcccattaatcggaaaaaaaaaaaacagggagagcgcatggtcaatgcccccctggggggacaaaaaaaaagtaactttggggggaaccaaaaaaaaccccccctggattttattgcatgcattctgatttgcccaaaaaaaaaaacttgcaaccatttttagcccgcgatttagggaagccttctttgggaaaggggaagggccccc

SEQ ID NO: 368961 - DNA, 317 bp, Zea mays
gtcggggccgccgctgtgctggagccgccgcgagccgctgctggaggagccgccgccggcctccccaactcgccttaggtgccagaacgaccagaggccagagggcgttgctgcgctgcgttccgctctcccttttctgctgcgacgacggctggtcgagcgccgtcacactttgcaggttccttggctctgcgcaggtgacgagcgcccaccagacatgggacagggtggacaagaggagtcgctcaatttccttcaagttttgctaggggcgtcaaccactctcttgtagcttttctgcctcttcagtagtgcta

SEQ ID NO: 368962 - DNA, 412 bp, Zea mays
aaattaaatgagatctcccatgacaaacagactaaaatagccaaaaattagtttacacgatgaactttttataacccaaatgccatgtaactgaacccgactagaattcatcaggaaagaacgcacaggccacactacacgaccccagttgtataatatacccaccgcatttgctgcctacttattccaatacaacagctgtattcccactctgcaaaaatagaataatcacaagggcaaatattaacagtaagaagctttgtttgccagccaaatactgcttacatggtggcatactggacagctgggttgtgaataagatctccaaggggttgcgagattgacttggaactggcagcaactgaatctacgccctgcagcagcttacagtaggcaaaaatttcaggcatag

SEQ ID NO: 368963 - DNA, 223 bp, Zea mays
aaggaccccccaacggggataaaaagggtaaaatgccagcccccaccgtttaagggggtttccaaaaaaaccggaccccccttcaagggcccccccctaaaacgaggggggatgcccagggcttgccccggaacatttaatatggggggcccccaaattttccccacaaaaaaaaaaaacacgggtggtacaagggtggcccccaaaaaaccaggggccaaaa

SEQ ID NO: 368964 - DNA, 437 bp, Zea mays
agaaagtcaaaagacttcgagccgtgctgtttagttgcacaaatacgaacaattatgaccaagctgactacatgaattattcaagatgtcgattaaaggacgcttcaaggtctcctaccaaagccgtgacgatctagagcaggtcttaatctagaacggaaggaatttttgagaaaacgagtcttcaatggaacgcaaggtcaaacgacgatgaagcacttggcccctggcagcaggcagtgagtgacactgatgagcagtccaccggtggagccgcactccggcagcgaggccgccgccgccaccgcttccattctgcattgttctctagcttgtgtggctttgggatcttctttatcccttcaacggcgtcgtgtggccttaaaatcttccgttatcccttcaacgcctcccacacctaaagctttccagagccc

SEQ ID NO: 368965 - DNA, 285 bp, Zea mays
gggaacccccccgaaagcaccggggtttattccacaggctgttaacacagggcccaccaaaaaatgcaaaacagggggcggcctttttaattcaactgggggttccaacccatccggaacccaggaaacgggccaacgcaggggggggccaaccccagggggggggcggcggggccaaggggatggcggcaacggttttctggaaccgggggggggcaaaaatggccccccaccaggcctttacggggggggggggggaaacaaccccggcctggggggccttgc

SEQ ID NO: 368966 - DNA, 118 bp, Zea mays
atgtggtaggccttggattctccaacattttgcagcaggctgttgtgggaactggacaagttcgttcaaaacctaaagctcaagatggaattggggggccttattatgcctctggtgt

SEQ ID NO: 368967 - DNA, 374 bp, Zea mays
aattgatgttaaatcttgtacttaaatttctataagcataactgttctagagaaaactgacctcagaagaaatgagtaaggcaaaatcaacaatttatcatccagcagcaaatctgaaacgctggacacctcgaattgcgggattcgacaagtccccagaaaaaataaactgacacagcacctcaacatacttgctgtagtaaatgtaacatgttaatggacagagcacattatcgcacaaagcaaagcttatgtggataaaacatgaaatggaaagaagcagcacaatagccttcgctaaccacacaattagcgattgtctaattgtaagtacgcacttatttcctagcatatagcacatacgcacaataact

SEQ ID NO: 368968 - DNA, 413 bp, Zea mays
ccccgcaaatttacatgttatgtcagtgaaaaaaaaagtgggccagaaattaaggtacaaaaaaaccaagttaacgaggccagcaggacagccaggcgcggcttggctagaagagcgtggcaatggaggatccgcagttggcgaggtctggccaggccgcggcagctccgccaatgccgttgttgccccagtttaagaacgaggagggggcggttggtgccgtggagggcgtggagctaacactaacagcggggttcatggacgcggcggcggcggcggccatgagcgcgtcagacgcggtgacgacgttggcgtcgacgttggacgacgacggcgtcggcagctcccagtcccagctggcgctctgctggtcccttgatgacggcttctgctggtgatccccggctccggcg

SEQ ID NO: 368969 - DNA, 398 bp, Zea mays
catcttaaatatctacgggcatatttttagctagggaattgtattattacagtgactgatctcgagtgaaatataatatattcctacctttatagagcgaacaggaacatcttgagtctgtcggtcggccagatccaaaaccctgggctgcgaagtgcgaaccatagcgggtttaactggtggccggtgcttggcttcctggagaccaggacgaagcgaaatccagatctgccactggacgcagcgctgctccgcttgtctccgtgctgttcagcttgggcgcttcctgctcatctcctcggcgttgctgagctgctccgctggcgggctggcggctggatgcgattacacgacgcgctgacacaggtacgcggctggcggctggaagctggaggcgg

SEQ ID NO: 368970 - DNA, 274 bp, Zea mays
aaccggttcaaacaaaatgccgggtgaacttccaacccttttttattggggacaaaacccttcatattatttacaggacaaaacaaacccaaaaatggcttggcctttccggggaacaataaatcaaaattgctaaaaactggccccaaaccgttccttttaaaatccccccccaattccccctgtatggcattggcccccacatgggcaaaacaacaacccccctgggttcttgggggtttcccgaggggtcccacaaaaaacaacccctttt

SEQ ID NO: 368971 - DNA, 148 bp, Zea mays
  unsure (1)..(148): unsure at all n locations
ttcctttttttttttttttttgaaanattttgcacatgggaggctttttttacaacaaagggctttatggaaactgaatacatccctgaatgaatagtatatgaatatataagggtaagatgaaatagaccacgagtacttttacacg

SEQ ID NO: 368972 - DNA, 411 bp, Zea mays
ttttctctttttttttttttttttttttttttggggaacttttaagaaataaatggttgaacaatatgtacagtaccgtcaaaaagcagcaagtattaagtaaacctgggcagtacgttctcaaacagtcaacagggcaaagtaccagtcaggccgtccaacggtagcgaaaacttaaaccttggtaacaaatcagttccatcagcatcgccatgacccatgattgaagcacactataaccaatgagttccacatttccacagccacgagccataacggatcaattccccatcagcgtagccacgattgaagcgcgccatgatctcggttgatgaatagtggaatccatcatactgcagttttgcaattttttctacacacgtccaccaattgctatggttcaaacatgct

SEQ ID NO: 368973 - DNA, 351 bp, Zea mays
  unsure (1)..(351): unsure at all n locations
acggggggaaactagcaccaggagaagcaccatctacaaactgggtaccgcggggcttttacccggaggcatacacacaaaattacctacctactacacaccactgaaacacacccctttctcgttcttccggtcactctgacacgtggccttttgtctgcttcaccactttcaaaagggctgcaagaagtgaaacacacacaagattagcttagggtcagtagttcttccgtgcagccaaggctagacattgctgctgaagctgcctcactgactggacaagtanncgcggttctcagaatcgacagccgaagtcgaggggccgctccggggctctttggaagccagccc

SEQ ID NO: 368974 - DNA, 400 bp, Zea mays
gacacgccatcttatgtgcgtcaatactttataacagtgacaaaaaaactgtctgcaactctagcattgcaaccctgaaggattgacgtagagaactgcaagttttcacccgtcccataaatttaatgtggcacataatgtgtaacattatagtagaccccaaacaacctacgatctggggagcagtggaaagaagcagaaatcagtcacataagcagaaaagaggaggcacccccccccccccggtttcttgaactccctgtccaggcatctcttctgcttacagtttcttcaaatccctgtccaggcacggcagctccaatgttagtgtgtctactactctatttgcttcccagagcctccaactccatttccattctcttctgttcttcactcttct

SEQ ID NO: 368975 - DNA, 336 bp, Zea mays
  unsure (1)..(336): unsure at all n locations
ttttnctttttttttttttttttttttttttttgggtgtttttttaaaaacgatggtccatctttatataggacggaaacatccttttcatacatcaggccgatcggatccataccaaatacacacagacagtgcattttacacttcagcagacagtacacgtacacagggctgtcgtttcgtacacgcttaactggtcaagatcaaccgggcgggtagctagaccaggcacgcggccggacgggctttcgtctataggtaaacgcctaaaccaggcaccggcgtccttagttccttacacacaccacgatcgggaagcacgccggcgagggagag

SEQ ID NO: 368976 - DNA, 251 bp, Zea mays
tttacgcgttggcttaattgttacattctgtcccttgtggtgcacaagtctgctacgattgacaatgtgatggtctgcttccttgtcaaataggctgtctccatcacccagtattagctcatgtatagtaagatgatcctggagcatggcatcccgttgtactattggaacatccacatggacagctctgtgcagctgacgatccaattgatgagcggcatgcttcacgtcttgaagacattggctggcca

SEQ ID NO: 368977 - DNA, 317 bp, Zea mays
tttctctttttttttttttttttttttttttggggtttttttagggaaaagggggattatgcatagccaataaactaattccctggggtcaccaggtggttagttttatagaggatcaaacactataacgaccaattgggacacgactaatctggaaaaaaactatcatcggaggtcaggtcttttactaggggacactggaaataacagaagttaaaaacaaacaattggacacgttttatggagctaaactctttaacaaaagccctgggtgcgttgctgtaacttttatcttccgataaccatctaaaactttg

SEQ ID NO: 368978 - DNA, 206 bp, Zea mays
tttgctcctttcctttttgacaggactaaacttgggctttttagatccaatcggtttgacaaccggagtatgcagtagttctaattgattataaaaaataaaataaaatattgcaaaatgtgaattagggtgttacaaacacgccaagtcgcgaaaaagatgcattgcatacatgctcttcaaacaaaatcggcaggctacttaag

SEQ ID NO: 368979 - DNA, 462 bp, Zea mays
ttctcgcgtccgttcaaatccgcgtcaagccagggcagagctcagggctcggtctcccccttcgccgccagttgccgcagcctccaacccctcgagatccgccgcgtgtgagaccgccgaccatggaggccatggaggagctgtcagagctcgccgagtcgatgcgccaggcggcgtcgctcctcgccgacgacgacccctccgacgccgccgcgccgcgccggcccaccaccttcctcaacgccgtcgccctcggcaacgtcagctctggcaagtcggccgtgctaaacagcctcatcggtcacccggttttgccgacgggggagaacggggcgacgcgggcgccaatagtggttgacctgcagagggatccggggctcagcagcaagtccatcgtgctgcagatcgacagcaagtcgcagcaggtttccgcaagtgccctcccgcattcactgcaggaca

SEQ ID NO: 368980 - DNA, 261 bp, Zea mays
ttctttctttttttttttttttttttttttttgttgttttttttaagaactttcgcccaaaaaaggcagggtttttgggaactggttcagatgaaacaaatcaaaatttggtccccccaaaaatcaatcaatattattacaaaaaagatgaaaattaaaattatcctttttttttttcaaaaacttttcttgatgggtaacgtacactacccatggtaaggtgagcctaacaggatgaacaaccccccggggggaaaccct

SEQ ID NO: 368981 - DNA, 363 bp, Zea mays
  unsure (1)..(363): unsure at all n locations
ttttntttctttttttttttatgaattctgatgggggttcctcagtttctgcgatgatattttacaccaaaatcatcaaaaataagatcttttagaagtcacagaactagtaccttcgatatgcatccagatccaggacgcacgctgctgggctctttgtgagtcggaagagacgatgtacgtacgtacaataagacaattacaagaacataaaatccaagaatgaactcgatctagtatgcctatatctgcggtaagaggatgcgatgaggccggcgagacttggagactcgcgactgcagggcagatggtggatcagttgcgggcgcactctccggggaacccctgcgggaagcgccaccc

SEQ ID NO: 368982 - DNA, 240 bp, Zea mays
ttctcttcgtacggctccaggtcccagccggtggggactcgggcaaaagccggccatgtccaaatccaagagggtcaactcgcttgtcaaatagactgactccagctcccaccccctagctatccacaccgacatgatgaggggagcgcggatacaggagcactcgtgggtgatcgacacggactgaactgaggataggacgatggcacagaagcgcggcctcttgctagtccggcagac

SEQ ID NO: 368983 - DNA, 215 bp, Zea mays
ttctttccgccggggattccaccgagcacctgcggtgatctgcacccgccggcgatgttcaaagcaccgactgcgaactcgctttttacatagactgactccatctcacatctgcatgtgatccgtattgacattctgcggggaccgcgcataccggtgcactcgtgggtggtcgacacggactgaacagagcataccatgatagcactgatgca

SEQ ID NO: 368984 - DNA, 396 bp, Zea mays
  unsure (1)..(396): unsure at all n locations
ttttnctcnttttttttttttttttttttttttaggggatgcttatatataagttaaagagaaacaggtggcgtccatagagtgatgtaaaatgtaaatacatagaaacttgttaaacagataacatggaacttgtacaaaaaaacagctggattcagcacaactttgtcattcagactcagttccaaattctggttagaacaccacccagcgagttaacgtgacatcacaccagaaatttccagcgcctgatgaaattttactacataaactgaatttagataacaataaacagcaatctggaaaagactaaccacagctaaccaaagcaacttgacattttctccacacaacccaagataaaaggtcagtaggtcacagcaccacaaaattact

SEQ ID NO: 368985 - DNA, 232 bp, Zea mays
ttctttcgtacggcgctaggtgcctgcctttggggtctctggcaaaagtcggccatgttcaaatccaagactgcaaactcgcttctcaaatagacagactccgactcacaccccaaagctatccacactgacattctgtggggaccgcggatacaggagcacttgtggttggtctacagggagggtactgaggatagcatgatagtacagaagcgcggcaccttgcttgccc

SEQ ID NO: 368986 - DNA, 233 bp, Zea mays
ttttctcgttcggctccaggtcccagcctatgcggtctcaggcaaacgccggccatgttcaaatccaagagggccaactcgcttctcaaatagactgactccaactcacacccccaagctatcctgactgacttgatggagggacaccagataccggtggcctagacgcacatcgacacggactgaacttaggatagcatgataccactgaagcacgtccactagctagccct

SEQ ID NO: 368987 - DNA, 270 bp, Zea mays
ttcacgcgtacggctacaggtccgagcttgtgctgtctcaggcacacgccgaccatgaccaaatccaacagggcaaactggcttgtcaaatagacagactccaactcacacccgaaggccatcaacactgaaatgctggggggagcgcgcatacaggggccctggtgggtggtctacacggacagaagtgagaataggacgatactaaggaagatctgccccctaccagcccggcggaccttgacggctaccacaataaacgacaaggcc

SEQ ID NO: 368988 - DNA, 243 bp, Zea mays
tgtcacgcgtacggctccgggtcacaacaggcgccgattctggaaaaagacaactatttgaagctctgcgactgtaagctcgccacacaaatagactgactccaactcacacccgatagctattaagactgacactcagaggggacggcagatacaagagcactacaaggtggtcgacaaggactgaactgaggagatcatgatggtaaggaagctcggcacccttacaagtccggcagacgc

SEQ ID NO: 368989 - DNA, 269 bp, Zea mays
ttcacgcgttcgcatcccggtcagaggttgtgccctctgcgaaacaagtctgccatgttcgacactatggtggtctgcttccttttcaaatagactgacacgatcacctagtacgtgatcatccataggatgctgatcttccagtcgcgcatccagtgacactaatgggagttctacatggtcatatccgggaagatgacgatgctctggaagagttggagctttcacgtctggaagaccctgactgaccagatgattaccaacgatgc

SEQ ID NO: 368990 - DNA, 270 bp, Zea mays
tttcacgcgttcgcatcacggacagcggtggtgccgtctgcgaaacaagcctgccatgttccacactttgggggtatgcatcccttacaaatggactgacacgagcaccttggacgaggacatgcataggatgcttatctagacggcgcgcatccagtgagactattgggagttccacaaggtcatgtccgggaagatgacgatgctctggaagactgggagctttcccgtccgaaagacccgggctgaccagatgattagcaacgatgc

SEQ ID NO: 368991 - DNA, 278 bp, Zea mays
tttttcttttttttttttttaacttagaagtcggggactgtccagtcttgaactgtccagtctggaatctggttcgtggttacagcggggtattttacaccaacaccatgatcatgccattgttcatatcggaacagcacatgtggttctgaagtgtccagtctggttgcagcggctgcagtggacgacgcgcttgactcgcccacggtcctccgctcttaccctcttcttcctcggccgtccggggggcctaagcgacttgggtggattgatgacca

SEQ ID NO: 368992 - DNA, 51 bp, Zea mays
agggaaagcggcacgccgcagaacacgcccgcaaaccccgggcgacccacg

SEQ ID NO: 368993 - DNA, 114 bp, Zea mays
ttttcgcgtccgcttacatgtgagcatttactcggcatttggaagttgcgaacaatttgacacaaacatgtggtaaaatctcccttcatatatacgaggtcgagcaccaactaa

SEQ ID NO: 368994 - DNA, 327 bp, Zea mays
tttttctcttttttttttttttttagcaactgaggggaggatatctactggaaacagttcaaccgtatgcctatcatcaaagtaatataagtagataatttccctttgcctatctaccgtacaacacattacacatctcacacatgcacgcgaattacaggcatggagcaatcaaacaagtgaagctgaggtctttctgcattgcaaagcagtgtccttgtcacaacaatgggactgctactggctgagcggcacacactcgatctcgatctcgacctcaccgcgctcgacattctggagcctgaggtgtgaactcctgcttgacct

SEQ ID NO: 368995 - DNA, 203 bp, Zea mays
ttctcgcgtacgctcacaggtgccagcctatggggactctgtcaaacgcggaccatgttcaaaaccaagagtgcaaactcgcttgtcaaatagacagactccagcacacacccgctagctatcatcactgacattctgtggggaccgcggatacaggggcactggtggttgatccacacggactgaacagaggagagcatgat

SEQ ID NO: 368996 - DNA, 240 bp, Zea mays
ttcacgcgttcggctacatgtcccaggtggtgcggtctcagggacacgcgggccatgtccaaatgcaagagtgtaaactcgcttttcaaatagacagactccatcacccacccgatagctatcctcactgacacgatgtggggaccgcggatacaggtgcactggtggttgatcgacacggactgaactgaggatatgacgatggtactgatgcgcggcactcttgcaagtccggctgac

SEQ ID NO: 368997 - DNA, 241 bp, Zea mays
tttctcctttttttttttttttttttttttttggacatttacaactttgttgggttcgacaaacttaaacaaaaatgcatgttgcacgactaccggtagcgattaatgccatagcacaaatactgatcgccgcataagatagcactacttcgatgggaccaaactttactcgatatcctcatcgtcggcatctgcgccgcccgaggagttgtggctggttgagcctttcaaagagactggc

SEQ ID NO: 368998 - DNA, 223 bp, Zea mays
gaaacctctttgggtatttttttatcatttttgtgtttggggcccaaacaaaaaaatcctcattggaagaaacaacgtcacagttttttttttaaccctaacattacttttttggcggttttacataatcagaggcctggggaaagcttgagcaatggctttatgattcttatgcataaagtgatataacaagggctaagcatggatggaaatgaacccccca

SEQ ID NO: 368999 - DNA, 416 bp, Zea mays
cccatataggaccagagccaacaacagacagatttgtagttgacatggtaaactgtgcagtatttaagacttatctttgtaggtgccataggtgcatcagattattcaaacttgtgattgtgatttgagaagttttgctgaaaacatgaagcaatgcaacatttgtctgaagagtttgaatatggagtttacatctttagttacctatggcattcctactaacatgttggctttgttgggaagttagctaatgtgaaagaagcatattgcacaaatctccagtcaatattaagcttatgctcaccattcctaggttttatgcaaaatattgcctgcgaagcttgtaattgtcatggagactacctatttgacactcttcgaccaatttcagttttttcagcctagaccaacgtact

SEQ ID NO: 369000 - DNA, 463 bp, Zea mays
tttcacgcgtccgcccacgcgtccggttcggagcgcacacacacacaaccagatctcccccaaatccacccgtcggcacctccgcttcaagatgcagatctttgtgaaaaccctgactggcaagactatcaccctcgaggtggagtcgtctgacaccattgacaacgttaaggccaagatccaggacaaggagggcatccccccagaccagcagcggctcatctttgctggcaaacagcttgaggacgggcgcacgcttgctgactacaacatccagaaggagagcaccctccaccttgtgctccgtctcaggggaggcatgcagatctttgtgaaaaccctgaccggcaagactatcaccctcgaggtggagtcctctgacaccattgacaacgtctaggccaagatccaggacaaggagggcatccctccagaccagcagcggctcatctttgctgggaag

SEQ ID NO: 369001 - DNA, 347 bp, Zea mays
ttcacgcgtccggttccatttcttatcccgtcccctccgggactaccgctccccccgatggcgtccatcacgctcccagcactcgctgatcgcactctgtaaccacgaccgccgtacggctacgcgccgcggccttgagctgctgggcgctccggcggcgcgactggtcggcggtggacaccgtgtgctcagccaactccatgcttagcgagcatgcctgcaagcggctacagctcgggagcgacgacgaggacgggtaagggccgaacggcagcgacgcccacaaggggttcgcggccggggaggggaacaaggaggagctagccattgcctgtctcggcctgccc

SEQ ID NO: 369002 - DNA, 254 bp, Zea mays
gtggaagggataaaagggaattttatagcactgtggcagtcctcccaatggatctgacaattatgcagagccactgtgtcggttgtctaacatttgcaagctcggttcagaacagtagctcaattagaagactccatatagcatcatgtacagggggaccagtccatcttgtacgacgatatgagatggacaacgaattgtttgctccctcttgatccttttcaaggacggggcactcctctgtttcacggact

SEQ ID NO: 369003 - DNA, 408 bp, Zea mays
acaaggaattgactcatgggtttattagacagcaacgatgctaatccccccttcaaagaaagggtttgagtggtaactcaggattacaagaatgccaacaagaccaaatgtatatggatttactcagaaaaaaaagatatgataacaaatgagtaaatggcacacggcaaaccaaatcgaaacagcacctatatgcgcaactccagaccaagaggcatcttccggctcatttccttcttctcccagtcaactatgaagtcgttatgcaaatcgagcagagatagcttcttgagagtggtaagggattccatgccctgaggtaccttatctaggttgggcagcgccgtgatgtggatagcttggacgcactgaagggcgccatctccaaccttcatctggctgacatca

SEQ ID NO: 369004 - DNA, 319 bp, Zea mays
ggacggcacaagcgtagtttggcttccagtgtgtcagagggataggttaggcgcacgcgtcaatcgcgatcctccttaccaactcgaattcctttgtttccatacccgttcccatgacgatcgttgttccatgattaccctacatatttgttccagccaggacatgcgtggttgagaggttgctctccggctattttaatgtcagccttctgtgcctctaacgcctcataaaaaaaacttaagaatatcctgggatctgaggggatccccgagggggtgttaggatcgcgagcagtgaatttagccaggactggtggaa

SEQ ID NO: 369005 - DNA, 334 bp, Zea mays
ggggtcattgcaatctcatgttcacctttaatctgactccctaaaagtgcttcacaaagcgggagaatttattgattatatatccaaaatgaaaaggagtcttgtaaccggagatttgaacattctactggaacaattcaatttggtctcataatactcgcattgaagttcaggaagatcctgaaaaaatcaaagctttaccacacgtcctgttccgcagcaatgtttctctttcccactaaccagtagactaatctgagaaaaatgggctaacattaaacctgaaactggcttaagaagggatagcggctcaagttgccgtgaccagatcctt

SEQ ID NO: 369006 - DNA, 483 bp, Zea mays
gttattgttcatatgatgcttggtgtccaaaatggaaatagtttagagtgtttagtgcttcccgcagagcaaaactggattaaactgaaatattttaaaatatgggtcacatttcgagcttgttttgtaatattaggttcacttcctaatgaataatttaaaatactaaatgagttgaattatgctttctttgggaagcagctccttagttttgatttgattttgcagcgagagtcaaattttgattatgcatgtattgtcaatgtgaaaataattttattttctcgaacactgaagtctggagagctgtgtatcattacatgaagatgaaaaaggatataaaaagccagtacaacagccactaacactagactaagacaaaaacgaccttgacctggacttgattatacactacagatgtagccttgtggcaatcagattttaggccacatgctatgtttaaattcttccatttggttcctt

SEQ ID NO: 369007 - DNA, 372 bp, Zea mays
ttttctcttttttttttttttttttttttttttgggttttttttaagaacagctatttatgtatataattaaaacacacaaactagctagcacatacagtagctatacatcatgcatgggcatggccgccgggcaggattaaacttaattactcagagagaaagaaacagcgccttaccattcacggcagcgcagcgcttccccttaacttcacatgctgctgtctcccccttccttgggatccaacccaatgctctctgatccggaggtgggtggtcgtcgacgcgctgatggcattcaccgcccaattagccacggaagcgtaaggcaggacgggcgccacgtcagcgcctggggagctactaagacgac

SEQ ID NO: 369008 - DNA, 484 bp, Zea mays
cccacgcgtccggctggttcccctctccatatctctcctgcccagctccctccccctctcatagatcgatcacacagcctgcaggcacagacaagagttaggctgttctacctgatcatatgaccctccagcaattctctcatccacacacaaactgaagcaagaattattgcttatctatatcctgtctgtcctttcctctatttcccccctcccctttctatttccattgtgcagcttgttattagtagatagcagtggatcgatgtgtgatggaggaaacaagctagctagctagctaccagctgaagcagcagggagaagaaggatagagagagagagagagagagaaaacatcttcttcatccatagtctcggcctttcttcaccaggtcgtctgcagatctgtctcctgtgaccttacagaggccaagctaggccaggaagggaaaatggcgtccccgtcgagcaccagcaacaactc

SEQ ID NO: 369009 - DNA, 83 bp, Zea mays
tttattcgtacgcatatgctacgtgaggtaactgggtctcacacctataccgctgtggtgttcgtgaaactagtataggtact

SEQ ID NO: 369010 - DNA, 118 bp, Zea mays
ttcatgcgtccgcttatgctgtgtgacctcactaggtgccagacccttagctttatgcaggacgcgagactctgatacctactgttctaattcacagatctatcgatgagtgtagggg

SEQ ID NO: 369011 - DNA, 331 bp, Zea mays
cccacgcgtccgcttctgctctctgtcgcctctggggcgcagagctatagctctctggaagcctcgagactcgaatggccgctgctctgctccccagctctgtcgatgcgtgcctgcgtcagctgaggcattgcacacagcgagccttgaactgtgagctgtctattccccacagtctaccacgcatggggtacgaggatggctgccacatgggccaggagccaaagatggactgccgtgccttggaccttgacgacacccggtaccgcgtgagacttgggatcggggaccatgtgaagaagaacattgaagattacatggtgcagaagct

SEQ ID NO: 369012 - DNA, 261 bp, Zea mays
ttctttcgtgcgaaaatttagttggacttctcagggtcccagactcttacccttgtggggttcgggagacaaatgtactcctttctacaatcttcccgctctatcgttgttcatgatgacaacgttaagaactgagacgatgcttgtccagagaaaggagcttgtgtatttccatacactttatgtgtcatgttctggcacggctggcacatgggtcttaaacttaataaaccctgtcggttttttgaccattattgctat

SEQ ID NO: 369013 - DNA, 85 bp, Zea mays
tttattcgttcgcaaatattgtgtgacgtaactaggtgttagacatttacccgtatggtggaaatgagacaattatacagtactg

SEQ ID NO: 369014 - DNA, 110 bp, Zea mays
tcgtccacgcgtgcgcttatgctgtgtgacctcactatgtgccagacccttacccttatgcaggacgtgagactagtatacctactgttctaattcacaggtctatcgat

SEQ ID NO: 369015 - DNA, 100 bp, Zea mays
tttattcgtccgcttacgctgcgtgagctcactgggtttcagacacttactcatatgcagtactggagactactgtagctactgttctaattcatgggtc

SEQ ID NO: 369016 - DNA, 100 bp, Zea mays
ttcatgcgtacgcttatgcagtgtgacctgactgggtgccagacccttagctatatgcaggaaaggaaactatgatagctactgtgctaattcatgggtc

SEQ ID NO: 369017 - DNA, 107 bp, Zea mays
gagaactaaataattgaacgaagttttcaacacataaaagctgatttacaacgggaagacattgatatacatgatatgctggcttaacatacactgatgttcccaaa

SEQ ID NO: 369018 - DNA, 63 bp, Zea mays
tcgttcacgcgtacggttatgctgtttgacctgactaggtgccagacccttagctgtgtgcag

SEQ ID NO: 369019 - DNA, 111 bp, Zea mays
tcgttcacgcgtacgcttatgcggtatgacctaactatttgccaaaccctttgctttgtgctggacaggaaactatgatgcctactatgataattcacaggtctatcgatg

SEQ ID NO: 369020 - DNA, 54 bp, Zea mays
atgcgttcattcatgcggcggtgtagcgtcagttatctgggtgacagacaaata

SEQ ID NO: 369021 - DNA, 151 bp, Zea mays
tttattcgtacgaatatgtagtgtgacttaacagggtgtcagacatttatttgtgtgcagaacaggaaactagtatacgtactgttcaactttatagctttatcgttgtgtggatgagatagttaaggtatgggacgaagtatgtccatac

SEQ ID NO: 369022 - DNA, 75 bp, Zea mays
tttatgcgtgcgagtatgctgtgtgaattcactatgtgccagacacttacctttatgcaggaaaggagactatta

SEQ ID NO: 369023 - DNA, 103 bp, Zea mays
tttatgcgtacgcttatgcagtgtgacctcactgggtgccagacacttagccatgtgccggacaggagactaggatacttactgttctaattcacaggtctat

SEQ ID NO: 369024 - DNA, 73 bp, Zea mays
tcgttcacgcgtccgcttatgcagtgtgaggtgactatgtgccagacacttagctgtatgctgtacatgagac

SEQ ID NO: 369025 - DNA, 225 bp, Zea mays
tcgtttacgcgttcgggtgcgcggtgtgacgtgaccgagtgccataccttaggcggtgtgccgtatggggaagggtgagtgcgtgctaaggctaattcagaggtctagggaggtagcgatgggagaggtccatcggtggagacagacggtgatgtgatattgagaaaggttgtaggaagacattcaagccattggggacaacagatacgattttctcttggaaag

SEQ ID NO: 369026 - DNA, 410 bp, Zea mays
  unsure (1)..(410): unsure at all n locations
tttttctctttttttgaaactataagtatatctttggtgtaataacatgttcctaaaacgtttgcaaactgtatttgtttgctacatataaacgttgtttgcccttatgttgcaagaaagataataatcaaagactaactttgaagccatatacattgaaaaaatgctcttgtggtttcctgtgccgccaataggcaaaactgatagcaggaacagcaaatagcaaggctgcgccagcaaccactccaccagcaattgctccagtagtggaagagctacttcctgcacaaaataaaagatgtcaacaacaaagccatatgttccatacccttaatcactcccgtactaatgtagggtatgggaaaaccaaaaggacaagngtagttattgacttattctgcattcctgca

SEQ ID NO: 369027 - DNA, 131 bp, Zea mays
tttatgcgtacgagtatgcagtgtgaactaactgggtgcgagacacttaagtttatggcgaacaggaaaccgggatgggtactgtgctaatttaaaggtctttacgacgcgtggatgggtagatacaattt

SEQ ID NO: 369028 - DNA, 119 bp, Zea mays
tcgttcacgcgtccgagtatgcagtgtgacctgactatttgccagacacatagccttgtgccgtacatgaaactcttataggtactatgaaggtgtagcggtctatcgtggtgcggagg

SEQ ID NO: 369029 - DNA, 234 bp, Zea mays
tcgttcacgcgtccgactatgcactttgagctgactagttgctacaccgaaggacctatgccgtacaggaaccgagaacgcgtgaactaaaggtgtaccggtccatcgacgtgaggcggagattggtacaagagcaaactagccgtgatcctacagcgaagaatttacacatctcacagtaactctattagaggctcgagtctggttagtacattggacatacactgaacgcaa

SEQ ID NO: 369030 - DNA, 74 bp, Zea mays
tcgtttacgcgtacgcatatgcagtttgaggtgtctagttgtcaaagactaaggtatatgttgtaaatgaaact

SEQ ID NO: 369031 - DNA, 95 bp, Zea mays
tcgttcacgcgtacgtttatgcattttgagctggctatttgccacacccttaaccatatgatgtaaatgagacagtgatacgtactgtgataatg

SEQ ID NO: 369032 - DNA, 208 bp, Zea mays
ttttctcttttttttgtgccactgcgtttattgggatcgactatcacaagaaagcttttcaaatttttattgggagtgtcatttccatccctctcaacttctcaagcatcagcgtgaaacaagttgccatggatttgcttaggaactaactgcattagtaaaactgacctaaaaataaaactgcacattcggttcaaattcaacgagt

SEQ ID NO: 369033 - DNA, 110 bp, Zea mays
tcgttcacgcgtccgtgaacacgctttgagctgactatgtgccaaaccttatactctatgccggaaatgcgacaatgacacttacagtgataatgcatcggtctttggag

SEQ ID NO: 369034 - DNA, 297 bp, Zea mays
aatgaggaaaatgttagcgtgttctctatgtttgttaacagaaaccgaacaaaaaagggggaatcctaacgaactgcgccctgatcgggggcgcaatcctatatggttggttgtggccaactgctaaagagcaggatgtgcgctcgtgccgtggctaccatggaaggccatggtgcggtgccttacgtggactactacgcggcgcattaatttggtctgctcaggagaggactatggcggtgccaaaggtcgtcctagctgcatgtgaccattcgcctgcggaccaatgggcttagg

SEQ ID NO: 369035 - DNA, 524 bp, Zea mays
  unsure (1)..(524): unsure at all n locations
taacaaatggaagctcttgtggataagctgtgcaataggtttgctgccttaaatggtactatgcttatgtctttaataggataaatagtaccccatctgtttgctacgtcacatttgaccagcatgcatacaaaggaagtcatgttttgcataaagttggtttgattcctagatgggtgcttgtacttactgttaataaggtactttgggaaagagcctccctcagtgttgtggtagtgaatttattgtgaacaaaaaaggtggtaagagtaagaaatttgcaacagcataggagagaaacattactgcattctattataaaatcaaaaggagagaacattgcacatatcagaaataagatgtgatcaattagttcttttttaacactcttgtgcctgcgattgatgtctacattttagctatattgaaagttaacacttatttctttgtttcagtcatttaatngnttgttttctcgagacaattgtgctgtaagacatgcatcgtaacatttctcagacgtc

SEQ ID NO: 369036 - DNA, 268 bp, Zea mays
gggaaacaaaaaaaatcttagcaaaactttgcccgacaggggccaataaggagtaacatgttcaaatgattgcccggacatggaacaatctccaaattatagccaaaaagccccagcctaaaaaagagattttttttgaattaaaaagacattttatagactactcagggaacatagtctataaactcaggctggtgggaaggccttttttccagcagctggggatccagctggaatgactttaacccggacccgtgggcggccccgg

SEQ ID NO: 369037 - DNA, 398 bp, Zea mays
tctacgcgtccgattaccagggatgatatttatgggatccctggtgtgacggatggtcagtaccggccattggaagaccatgcctctagtgttataaggaatggtgaatttaacaattcatacagagtctcttagcaaactaacatgtatggtttgtcaaatgctgaatttggttgagagaggtctttatttgctcattggaccagattgacgtacagatggataattttcaagatcctatggcgagcaaccggtgttcactgcagaacgaagctaatggtattctgacagtaagccatgggagatgcattggaattacaacagaagcttgggtatggatacaacatatcattgattgaaagagggaaatattctgatacctaatacaggtatgctca

SEQ ID NO: 369038 - DNA, 348 bp, Zea mays
ccacaagccatgccagaccctgggggagtgaagtgaagagggatcctagttagctgctcaaaacgccattacaatcaagagcagccagctacctgctcgacacacacgcccgccagaatgcactatgtttcgctactgccattacaacctccagtaccgatctacacctactcgtatattatatagttagttagtatacgtgttctgcattaatgctatacgccagcaaaagtgagcatgattacggtctctatgtggccaccgcatcggctaccaaaatggcgggacggaaacagaacccatgcatgttttccctttcacctccgaggccggacggccccgatcgac

SEQ ID NO: 369039 - DNA, 94 bp, Zea mays
ctgtcgcatgggcggacgcgtgagcgaactggggcgtcaaaccctggcggacggcttcacagtgcaccgccatcatcttgctggttcctgcccc

SEQ ID NO: 369040 - DNA, 296 bp, Zea mays
aaccaacaaatcatcggatctttttatattgcaagcatgcgtgtgcaagtcacaaacagggtacaatcacatttgtccattaaaagggaggacatatgccagcatcatttcaactaatctaatcgggcttatttcatcttgaccatccagctgcaaaaaataagctgggggatatgtagccctggcagataagaagaccccagaggaaatccctgaagatttccaacgataatggggtacattatcacacgagcatttgaggactaattcattcttaactatccagaccatgcctg

SEQ ID NO: 369041 - DNA, 516 bp, Zea mays
tttcacgcgtccgcttttactcatcttttctcttgccttctactcctcgcccacgcctcctcctccctccctcccgtcgtcgcttcgcttcgcttcccttcccttcttcccttgcgaatcctctgaccaccgcagagccacccccggaggaaacgaaccgtagcgcagccgccgatcaccatggcgtccccggcacggcccgccgccgcatccgtctccgccgccttcggcctctcgcccgaccccaaacgctgctccttcgaccaggcgctccggcacaaggagaacagactggtgatgtcatttgttaattaccacgatcaagaaaaggtctctaaagaaatcgtaacagacgctatagaaagctgcatgaagaaacaggcagataacttgttgaattcgtggaagttatcagtggtaggctgtcgcattggagctgtattgctataagctggaaaggtccattggagaataccgagtgacgtgatggattatcataacgaagcaaatctcact

SEQ ID NO: 369042 - DNA, 457 bp, Zea mays
ttcacgcgtccgcccacgcgtccgcccaagatcttcgtcgtaccacacccagctgacctgttgctcgaggaatccctcccagaacgcggaggcagagctcctccggttgagctacccggcgaggaaataacaagcatgcaaaagaccagctgccggcgggccacggatggcgaccaagcggcgccgtccgcggcgcaagaaacaaccgacacccctcctcctcctccggcctttcacgttcccagcgccgagagattcccggtgacgcctggcaacggacagccgccgcagtagttagccaacgccaacggcgtcgcgccgagcgagccgctgacggcgcgggagcggctgcgggcggcgcgcgtgctgggcaagtacgcggagccgccggcgtcgaaaccggccaagccgagttcgggagcggcgtgctggacgcgctgcggggaggcggacgcga

SEQ ID NO: 369043 - DNA, 284 bp, Zea mays
gggggtaaaaacccaaaaaaaacaacgggcaaccattaacaacaaacagaccggccaaggttttcgggggcaaaacatttgaatgacaatccaattggcaacccccccgggaatgcccctacggaacaaactggggaaaaaaaacgatttacccatttgggccggcccaacacaaaggtttgggccttttagggccccggaggggggacaacccaggccatggccaaaaaaaagaaacggcctataaaaagggggggaaaaaaaaaacaaccgggcaaagcccc

SEQ ID NO: 369044 - DNA, 549 bp, Zea mays
ttgtatacggacgcttttccccttcccagcttcccctgaccactccgcagcaggcccgcaagccccgacgccagcggcatgtcccccgccaccaccccgttgcccgcccccgtggcagccccagcgtccaagggcgggaaacgcagcctcatgtcgtcactcatggacgccaccgcgctgctccgctcctcctccttcaaggaggactcgtacgtggcggcggcgctcccggcgtccgagctccgcgcgctcgccgacctcaaggcgctggtggccacccacccggaccccatctccatctggggcgtcccgctgaatccccactcccctcctcccggcgcggcgaacgacgacgccgacgagcgcgccgacgtggtgctcctcaagttcctccgcgcgcgggacttccgcgcgcgcgacgcgcacgcgatgctgctccgctgcgccgcgtggcgcgccgagttcggcgcggacgccgtggtggacgaggagctgggctttaaggagctggaggcgtgttgcgtacatcacggttgggaccggcgggca

SEQ ID NO: 369045 - DNA, 392 bp, Zea mays
cttttcttcatacggttaaacctgttcggagcgcgctccgcgcacacactgcctgtctctggctttctttgcgtagcgccgagcaggggccgccatgtgatcaggccgctacccaggggatagtatataggatgcgggcgggctttggcactttggaccggctgacatggttggcggccgtatcggtcccagacatggacgggctgctggagggggacgcggccaatagggagctttcgtcggggacgggcgtgcttcgcctgctgcccatgtagcgtctatagccagtcatgctggtctggctagaggacacctgcatccacgcctgcgaccgcagggctacctgggagatgctttgcgagttaaacgcgtgcatggtgctcgaaggcagg

SEQ ID NO: 369046 - DNA, 443 bp, Zea mays
ttcacgcgtgcggagggacggatgacagaggcaaaatcatagccacgcgacgtgcgtggagttgatgttatagctagatatgatccgggggataggtgacattgaagtactgcgagcctgtcgtggccggatatagcgaggcatagggtcctggcacgcgccgtgtcctatctggacggagccgccgtcgtcgcagcgggccccctgctgctgtaatggccacgcatgcccacactgcgccggtctggtagcccgttcgtagccatgcgtgctggcggaaactataggcgcatgcgtgcgccgcgcggggctgcactgtgacgctgtgtggaggcgaggactctgattcgacgaggttgccaggcgcggaggcgatacagaggagatggagaaggatggtggcgatcgttcggggctggagaggaagcagaattgtcggaatg

SEQ ID NO: 369047 - DNA, 333 bp, Zea mays
gtggggttctaataattaacgggccaaaaaaaacctcgtttttaattcccttcttcgcttggacgtcccggtttcactttacagtcgggagaagacaatcactccagaacatgtttagcgtccaggatccacaacatgtttagcgtccaggatccacaacatgtttagcgtccaggagttcagacagcacagacaatttgaacgtgttcaagatgcaatctatcagacaccaaaggtccacccgagggtccagactcaccgccctcctttttgcatcttgaaccttgacacgggccttgaagaagcacaagtcccaggttttgccaacgaact

SEQ ID NO: 369048 - DNA, 234 bp, Zea mays
aaaatacgaagggggtctttgggcaacacgggtgatcaaactttcaccaagatcgcttggggactaaggggcctacacgaactaccgaacaaaatagacttgtaaagccgtttatacactacttctttaccgcgccggctaaaagcgaacaaacagaataaaggtacaaattgcactactgcattcctccatcgccactggggccgggggcgagatacgcatacacgcgctcgc

SEQ ID NO: 369049 - DNA, 238 bp, Zea mays
gctgcaaacgcttcttgaagcattataaactttggggttcaacaatcgcccacccatataacatctaaccgacaaaataacctagctgcaaacttgaaactaagacatggttgggagaaagcatcacactaggatgtgcaagatttcttgctgtaggtccgagggttttattatctgatcagcgtatgcgctactacaccttgaattacagagactacctaacaagttaaacaaagca

SEQ ID NO: 369050 - DNA, 137 bp, Zea mays
aaggttgttggggtttactaagctaccaagaaaaatcaacgaacaatggttttgttgatacacaaaccaaccgagcaacagctaattaaaatcactggcctaacgacgggcaacacaaattaagcaattaaggggtt

SEQ ID NO: 369051 - DNA, 307 bp, Zea mays
ccaaggggggactttgggcacacaaggggttaagttaatgcaactagactcacaagaaggacactgaaacaacccacctgttgttcttcctgcacccaactccaaccacgccgaacctaaccaagcactccaacaattataaaaaacgatgaagccccagccaaaactggagtggcagcactcctactggggatggttctatttctgtcctggagatggagattccttacccttgaagcaacgggaacaaaagaagccagagagcctgatgcgtttctgcaccgtaaaagatgatgcaacccctgct

SEQ ID NO: 369052 - DNA, 385 bp, Zea mays
ttttgcgctggccgcctgcccccccctctccgtccgtaagctttggccggggcagataacaaaatctgatatccctggggcttcgctgcgccgggtcccctaccttctcacctcacgcaaagcagaagggggaggagttttaggaggtggcacgaggagccatcatcgtgtccgtgcgtgctgcccattattgtttgttgttccagcgggaatttgtggccacagtggcgggcgctatattactcacaggttcggggccggtcccggaccgggcgagcaagcagagcggggtgtccatcatggcggaggagtgcccgcccactggcggcggcgtggagctctggctttcggacgagttcctggacgacgattttttcttcgagga

SEQ ID NO: 369053 - DNA, 440 bp, Zea mays
gacataaaaaaagtgtattgtagcctctgagttcagtagcatataacgtaacatgtacaactgcccattagcattttgaaggaccagcacatccaagaaacatcactgatgaatagttcctcagctgcctgccaagaacaataaaaacaaagacccctcctgggatttcctttgaaaattgtccccacaggtggtgcccatgcctccagcttcgggagaaattggtaaatgtcctagcaaaaactgaatgatttgacactgtttttcagcatgccaatgttctgctaccatggttcacttttccccggcagcaatgctggtgctggttgtcgcagttacgcttgtaagaaagcagcttgctggtgtgaaagtgctctgggctctggcagaactggggtcaacatgtaatatgaacactagcatacagcaaccgagcgagc

SEQ ID NO: 369054 - DNA, 320 bp, Zea mays
cggccgaaccggcttatatatagctagggagcttacaacataggagaagataatagattggacatcctagtcctagtcatgttattagcctattagtcaaacacaaaaactgttgacatgccacagttgtctaccgtcaacatgtacgtagaggttttacaacatgtattccacaaaaaacaagatgagatggggcctaatgaaaggtgcctatgttatttatccatacaaaaaaaaagttatgctggcatggtagtaactcactcacgagacaaagcataagcatcctaatgtttttcttggacttggcagttggcact

SEQ ID NO: 369055 - DNA, 311 bp, Zea mays
  unsure (1)..(311): unsure at all n locations
gggaatgtcgatataaatacatgcacttttttatatgatactatgaggatggtgataagagtatctaaggggtacatatttgccctaagatcccaaaagatttgcattccccatgctgattttagctagattgtaaatggttgggagacatcctacaagggttttacaacagttacctaaagaagcttgttcgtgaagaacaggaactacgtctcttgttggggctccttctgggggncttctcttccttcttcatcttgcctgcctttttgtcacagttgttagggagcttggtttgttcgtcttgctca

SEQ ID NO: 369056 - DNA, 260 bp, Zea mays
acttaaacacaacaacagtttttgaccttaaaaaacgctgtcccccaccatgggatgcacgttggccggggggagggccccttcccaaaagaagaaaggggaagggcaaacacgcacgcacacataggggtgggtcaattcccccaaaaatcaacaaccaaaaacgttcggggggccccgatttggacatacacgtgtccaggttttttttttttttccacgtttttcctcccctcccttctttttttcttggggttttt

SEQ ID NO: 369057 - DNA, 223 bp, Zea mays
gggggaaaaaaagcgacagcccgaatttgcattaacaaggccatttcatacccgattcctcctttggtctccaaaggtttccatgggatacataccccttcccaagatccatgacgggggggggacccctagcagttagaccctcgaatcactcgagctgggggaaccaaacccccgggatcttgacatccttgggccccttggcccccagggcggtgtcgga

SEQ ID NO: 369058 - DNA, 317 bp, Zea mays
ggccaaagtatggcacttcattgtatatatatataggtagccaaggctatggtgtacatgtggacatggaattgcttttgcttacgtgacatggagacacatcctgatagccattgctacaaatcctcaagaaaccctagatagcggtaacaagacatcaaagaatgggggacatgagtatctccgtcagaaagtcgatcctttgcagcctttcctccagccccagtttggatgatgcactcgtcgtcgctcgctgtcgctcccttgttgttcaacctcagcctgatggaaaaaaaaacaaaaacccaactggggct

SEQ ID NO: 369059 - DNA, 435 bp, Zea mays
tggtgtgtttgcatgttggactgctagatttttactggttagagcttttcacttttatgaaataagttaggttcaatttggatatggattgtgtatgcttttgtagcctgttttatacgcttcataatgagttctttttagttttgctatgtcgaggagtatatttgcaagtggtatattgatatttctagccctggtgctgggttcaagtatggactacagatgtggggctggattctttggaagaaaatatatgttagtggggttttgtaatttgaatgaggaagctcgttttttaaaagtatattgatattagtaagttgttgctacagttcaattaatgttcttcaacgcggatatagaaaggtcataagcttagtaaccaacaggttgctcggtacttttttttggggtgtttttttcttggttttcatt

SEQ ID NO: 369060 - DNA, 426 bp, Zea mays
gagaacggggttcagttgatcaataacttaagtcagacattagaagtattgttcaaggtctacaggacatatagaagtccaaggcaaaatttcctatatattaatattggactagagatgccgactacacgcgctgtatatgaactgatgctcgacaggattacaggatcgaagaagggagtgctagcttagctatctgcttcgacttggagctatttgtagaaataataaggcagccagcaacgtttctcctagccaggccctaactagcttaattagctaattcttcgtcttccttgggtcctgtgcgatgtagagcctcttcaccgaagccatgaacagctcccacggcacgtcgccgacgagcatccggtcgccctcgttgtcctcgtacagaagaatgtacgccttcttgttgctcttact

SEQ ID NO: 369061 - DNA, 388 bp, Zea mays
gcacactcactacacacacagacacactgacacacccacacactagttgtatgtgctagagctgcagttggcttggcatcagaggccatgaaactgaaacaggagcaagcagacgacgactgcagcaagatgcagggaggtcgtggcctgatgagcagccttgagctcaggctgggcatgtcttcagacaatggcgacgccagctgcggcggtgatccgtggcttggcgttggagtgcacccctggagccttgcctccagacaagcagagaaggtagccctggagcaagaccaccagcagcgttctccgccgcagccggtgggatggccaccggtgggcgcgttccgcaggagccacctgcaggtttcttcgaagaccgtggaggaac

SEQ ID NO: 369062 - DNA, 291 bp, Zea mays
tttctttttttttttttttttttactgctagattgtgccttgtggctacatattgttcagggggcttttacgtacgttacaactcgacgaccatcatcgtcgctacgacctgatgaactggactacgtttgaactgagcttaacccttcacccttttgtttcgttcagagaccaccaagaaaataggaaatcaaaaagaaaagaaaactacatgatccgggactctcgcatttgagaaattaattaacctttttgggggcaatatatggaagaagagaaaatcctagctag

SEQ ID NO: 369063 - DNA, 338 bp, Zea mays
tatatatcccataccgctcgggtggatacagcttcccctcgccctccctcgtcgataaaaccgatgcaccgtgccgcctcgcgaaccctagcggcggcgggacgaggggaagaaggttacaggcacggcgcgtgaagggtcctgtcctgcccagtcccgtctggtccgccgcgatgccgtggcccgagatgtggctgcctcccgcggccggagagggggcggtggcggcggggctgtttctcgatggcgtcgatgggacggcgcacggcgcgctcctcgcggccatgcccgggtgctccctgtcgttcgggcaccagcatcggcgccgacgtggggcg

SEQ ID NO: 369064 - DNA, 211 bp, Zea mays
aaaacaacgggggcaacggacgtcctgtttaactgaccactcaagatacattgaaaactgggcatccgaaaatccccaggggccccagcctatacaagcatggggggcgcttcctggacaaaaaaacaagagggccccccacaaggttagacacaggctcggtttcactcccacaagggtctaataaaatccgagcctactttttaccctg

SEQ ID NO: 369065 - DNA, 398 bp, Zea mays
ggagctgatctggttcgtcgacgtgcacgtgcgtagcgcgcgggacatccagaacatctgcatctaccacaagcaggacgtgtacgcgcggctctcgctgccgggggacggcgcgccggcggcgtccacgcaggtggtcaacggcgggggccgcaacccggtgttcgaccagtcgctgcgcctcggcgtgcgcgcgggggacgtcgacgccgcgctccgctgcgaggtgtggatgctcagccgggtcaagaactacctgcaggaccagctgctgggcttcgcgctcgtgccgctccgggatgttcgtcgccgccgacggcggcacgctcgcccgcgacttcccgctcaccaccagcgacctcttacagaccccctcgggcttcctgcagctcgagctc

SEQ ID NO: 369066 - DNA, 338 bp, Zea mays
ggaaaacagagaacccaacccttttttaataagccctggcggctacattaaagacaggaactcttccccgatcggacaaacctaaaacaagagcctgggagggggttattcctttgcgctagtaagattaagctgagacgcttgaaaaggccctccttttgtttgataactcgggggctggggcggggggctccccctgatcagggaaccggaaatcaaaaaaacgcccggttgccgtaaaacacctggggagggggtttttcttgttgcccggggggggccggtttttttaccgcggtcgagtcggccccaggggaatctgccctggggggggtttt

SEQ ID NO: 369067 - DNA, 153 bp, Zea mays
cccactcgtttgtggacgcgtgggcgagctggggtctattgttgagggtcatgatagtaagaagctcatcacccaaggtggagttgatggaattgcggaaaaacttgcaacttcgaagacggatgggctaagcacagccgatgatagtattaa

SEQ ID NO: 369068 - DNA, 347 bp, Zea mays
caggaaggaagaatcactgtttcactatcaaaacattcggaagctatacaccctgttcccaaatcagtagaatgctttctttaacagcatatgtccttttacaatgtcataaggaaaggaaagctaggcagcatgaaagggcatgaagaaaaggcaaaaatcatgctagtttggcaaaatgctgcagggtcctttgagttccttcaaaaagatctattaaaagggtctccaaatcctttggcctgtacttaatgtaacgatgctttgggctatcaagcaagcctgaatattttcccacgaacgtcctgtaggcctgtataactttcagtgatattgaaatccggaca

SEQ ID NO: 369069 - DNA, 383 bp, Zea mays
  unsure (1)..(383): unsure at all n locations
tttnttttttttttttttttttttttttttttttttttgggtttggtttttgaaacaaataacatgattatttcataaaaccctaggcctcaaatcatttaaggggccacaaaataaattgggcattcctttacaacacgggcatattggctactatattataataatataaaaacttgtcaaaggtttaagattcagaaatcagaattgatcttttgcactttgcaaccaatacagtagtacattttctcagagaagacattattgaaccggggaaaagaagcgttttatcgaaaacacagtacgcctgggctaaacaaccaaatgtccctcgtacgtcactcctatgaagtgaagaatgaatgttaccaatttggacgaaa

SEQ ID NO: 369070 - DNA, 344 bp, Zea mays
gtgaaaacaaacaacatactttttgatcgaaaacaagtacatttttacatcctttacatgctggcctttttttaaggctcggttggggagaagtccaaaagaaaactcctgtttttgaaggaacgggtgctggcatagcatcgctttcggaggcaacccacccagaatcccacctcccaggagggcaggtagcccatgtaaggggcaagggcgtttaaccttcaactagatttcctagcacagtttacaaacaacggccccagacaccttctttccccatgaacttgagagaaacaagggaaccccttaaagctaactataattccgccaaacagcccggaatt

SEQ ID NO: 369071 - DNA, 200 bp, Zea mays
aacaggcggaggttatgtgattgcacagttagcagcctggggtcaacattacaccataattgacccagctacaataccgggcttctgggtgaaaactacagactacaccgcaacctacgcggcatacataggtttaacacataattacgggaatccatagcttcgatcaaaagttaatctatgttaaagttccccacttg

SEQ ID NO: 369072 - DNA, 339 bp, Zea mays
cgggggacggtaacatttaaacattccaaattttgatgccctcacaagtctggatctagaacaaagttaaaatctttttgcagttacagttgtaatgggctcattgggtttgcgaagtagcgctttacacattttgatggctttttactagagggttgcttgaacataccctgcagtggggtcggagccattggcacaggtttttcaaaaacccgaacatgaaggttcccatcgagcgttagcttttttagcagggtcctgcaagtttgaggattcaatacatccatcctacggataacatcttcctccgatagtcctggatagtgcatgacataacca

SEQ ID NO: 369073 - DNA, 246 bp, Zea mays
aaagcaatatttaaagggccagggtacttataggagccccaccattttgaaaaataagagccccgggacaaaatataggatcgtccaaaaacatatttttaaaaaaagtttaattaaaaaaaacctgggggccagaacctaggaaatttaaaaaaagggctttcttaaaacaccctgtagggtttccccagggggcttttgacgtaaaggcttttaaaattttgccagttttttttcaaaagggaa

SEQ ID NO: 369074 - DNA, 151 bp, Zea mays
acgacaacaacttaagagggaggtttaggcacacgactggccgcgaaatttagagacagcttacaaccccatgcacgacggcacgattgccacagaaaaatcaaccttgcgcacagagtgttgcacggggttctcacatgaaatgacagcg

SEQ ID NO: 369075 - DNA, 213 bp, Zea mays
gggggagggaaaaaatgctctttattacagcaacatttaccattacacaataaaaaataaataacttagtttaaaaaatgattgccccataatcatttgatataacaaataggaacaggacgacactgactgattgactgaccacatggggcatttaaattgacacacaccaaatgaccgaactgaagaaagaacaaaaagcgaagccatatc

SEQ ID NO: 369076 - DNA, 398 bp, Zea mays
ctcatgctgaacctttctttgacaaccttgatgcatataattgtatgcttcaacgtcttgaaagtatcaataacaaataaaaaaacatcttcatgtggactgggtctcacaacaagcaaaggtcagaatacaaaacgcatgataagaatcatctactatccctctacagagctgtaactgtgcaagaactgtcggtgatgcaccacaagggatatactctgtggtgcaggtaggaggatagcaaaactgctgctggcctcgcctgccctgctcaaaggatcctgtccaggtcgctgatgaaattggaggccagagatgtcagcttctttccagtctcccctgctatgtccttgagcgaagacagatcctgtgaagcctggaaagatattctgttgatg

SEQ ID NO: 369077 - DNA, 174 bp, Zea mays
aaagacaacaaaaggggaaaagggggcccacaaaaatgggggggttattttgtaaaacaacaactcggggtttcaacggtagggccccaataactaaagataggcccaggcaacattattttttgttccgtttaaaccggggcacaaaaatttaacggggggcaaaatttaaat

SEQ ID NO: 369078 - DNA, 241 bp, Zea mays
gggaaaaggggctgcaaaaatccctttattcagggggaaagaagctaaaaacctttcacaatctttggcccaaaaaaggggggatcccttttgaggggggcaaacaaaacatgtttttaccgaaacaaaaaagcttgccccaatccattttggggggattccccccaaaccccgggcccatgctttggaaacccccccattcagggcccaggaaaattattgggtcttccccgccctggaa

SEQ ID NO: 369079 - DNA, 321 bp, Zea mays
cttcatctgatcacaacttgttatgagacaagcctcactcaagaaacacaagcaacagcaagatcactgttgtgaagaaaatgaagagagtctggacaagccgaatctctctgtttgtcctattctgcagcaaataggacagaacttgcataagaatggcagccataataagatacggaacgaggtaacgtcttacagccctcttcatcgtggaaatccgtctgagtggtactctgggcacaccaactcgaaaggttctcacaacagaattagcaagtgaaatgttcagcgattggtgtggaacatcagctggtaatagga

SEQ ID NO: 369080 - DNA, 345 bp, Zea mays
  unsure (1)..(345): unsure at all n locations
tttntttttttttttttttttttggaaacaaacaggctcgtaatcctgaaattcttgggtgtatgtaggtatagagtgtttcatgcacagataaaacagcattactaacaaacagggacaataatcatggattgtagagtattactacaaaagtacaaaacagcgacaatatgcatggagtgcagtgcctggaaaggtacgattagacattgtgcacggaggtcgacacatgggctagaaaaaagtcctgcagcataggatcagttccgtgaacggctccaggttgatgaagaggacgttgagttagagggaaatcttgatccacgccagcgatcagtatcttgc

SEQ ID NO: 369081 - DNA, 300 bp, Zea mays
gggggtaaaaggaccaaaaaaacaaaaacgggggcttttcatgaggacacatccctggaggaaggaaaaaggctttaaaaaaaattaactccaacatggcaggggcctttgttagggggtgcctggatattttaaggggcttgacctgcttcggtaccttggagagggagggggcgaccggaaactggagagcgagcgggatccgtacctttttgggcttcgggtcctaccacgggttttgctatatcgccccctttttgggggggaacggctaaaacttttactgggggtacgaccctt

SEQ ID NO: 369082 - DNA, 231 bp, Zea mays
gccgtagttattattgcaaaaacacgcatcacctccgtggccatcccgatccctgataccacgctgagggcggtggtattaggagattagcgatggcgaggtggcggccggcggcgctgctggtagtggctctggcggcggttctatcggcggcgtggtgggcggatgtgctatcggttacggtgaccgacaccgagtgcatctaccgagtcgtgccctatgagggcgaca

SEQ ID NO: 369083 - DNA, 140 bp, Zea mays
cgctgactcgccgctctcgccgcagccctcggcggcgggcaccccgcgcctcctcgcgggtcccggcataaaggtctgggacccctgccacgttctcctgcccccgccgccgacgaatccgcacgcagggaggcaggtat

SEQ ID NO: 369084 - DNA, 266 bp, Zea mays
gcctcgtttcaccacggctctcccccttccacacgcgcagagcagggagcgctgccacgcccccaccaccagacgccgcggccagcgcacagcgacgaccatggctgtggctatggcctcggcattgctcatgctcgcgctggcaacggcgtcggcagcggtcagcggcgccggcgcgccctggaggagcaggaggccgaggccggaggccgacctggtgaccgggctgcccgggcagccggcggtcgggttcagccactacgccg

SEQ ID NO: 369085 - DNA, 94 bp, Zea mays
tcttcgcatcttgagaaggggttctttattgagaccaacaatcattactgatatcaccacatcaatggaaatttggagggaggaagtctttttt

SEQ ID NO: 369086 - DNA, 115 bp, Zea mays
aatcacgtcccaaaaaatggtaccattatgttatgcagcatatatacaggcgtacacacacatggcacgttaaaataacactgctaattatccgtcacgtcggacaaaaggatta

SEQ ID NO: 369087 - DNA, 79 bp, Zea mays
gaaaatgaacgagctgagcttcaggagtccatgagagactacattctagcgtcagttggcataaacaacaagggagagt

SEQ ID NO: 369088 - DNA, 79 bp, Zea mays
gatataatcgttttagagccgaacgctgggtgtcagattgaataaaaactgccttgagaagtgttgtatttcgttacat

SEQ ID NO: 369089 - DNA, 519 bp, Zea mays
tcctcgcgtccgcggcagtggcggacagcaacgggcgctcaacgccatcgcgcctcctgcgaacccatggtgagatgtgtggtctcgatctagagtcgaaggacttccccaacaccctttcctccatcggcgcgacatcggccagctcatctgcgacgatgaggcatcttcgaccgacttcccaacaccccatcctccatcaatgcggctccagtaccccttcctccatcggcgcgacagcatccagttcatattgaatttcctctcaattgtttttaactttctaatttattaatcgctggtgttagaacaggtaggtggcggctaagaaaaatgaagatggtggcagctaagaaactctaaagccacttctgattcacatatgatgcgaccacagaaattgaagatgtcgtgacctgggaatagattccgcagaagtggattatttgcatgctcaatctatgttcattgctgaagttacccttcaaattcaaatcttgggcagagccccctttaatt

SEQ ID NO: 369090 - DNA, 333 bp, Zea mays
tccacgcgtccgcaacatctctggcaactcctagaacgttcacggccacaccccgcaccacggcggcccgccccgccgcccccggccctcgtacccggtgagatatatcgccgccttccctcgcgaaaccactcgtggagacaacgacgacgagtgacgactacgacgcgagaagtcgaggggcagcttcgtgctaggaccgagcttcaggaggtctccaacggcaacggccccgccccgcgccaccgccccccgcagggactgattgctattagagatctatttggtagtggtcagcagctgagggtgaaccgaagatgagcgttgtgggat

SEQ ID NO: 369091 - DNA, 284 bp, Zea mays
  unsure (1)..(284): unsure at all n locations
cggttgctagggttcgtactcgcctacctccgcggctcaaacctttcccccttctcccaattccttccgccggccgccgctccacccgtacgacgacaccatgagggagtgcatttcgatccacatcggccaggccggtatccaggtcggaaacgcgtgctgggagctgtactgccttgagcatggcattcaggctgacggtcagatgcccggtgacaagaccattggggganggtgatgatgctttcaaccaccttcttcagtgtgactggtgctgggaagca

SEQ ID NO: 369092 - DNA, 113 bp, Zea mays
cccatgctatcgcccacgcgtccgggagcaagcaaagcaagagcctagggatccgcgtccctgcacctggtgatgctctcgcagccccgggtgtaggggttggcgattaattt

SEQ ID NO: 369093 - DNA, 160 bp, Zea mays
tgtggtcagcgctctgctctcctccactcacgaactcactcactcactccccttgcccccatccatccgctagccactagctccagcaggctcgccgccgacactccactagtgctctgctctctccgctccactcacaaactcccctcgctcccccccc

SEQ ID NO: 369094 - DNA, 162 bp, Zea mays
ggggagccgaaacccagcataatacgatttcaagtttttaaaacccgctgatatttattggccgggcgccgatgttcattttaactgaccaaaaaattcctaccgcataaggggcccctttactaaaccaccactaggctacgggtcaggggaaaaacaaaa

SEQ ID NO: 369095 - DNA, 291 bp, Zea mays
ggaagagaaatctagctttttttttcatgatcatgggtaaacgggtctattttgaactacaagaaaagcgctctatacttgaaaccaccaaacacagagcactacacgctatatcacaccttatttgcaacaataaaaatttggtccagacgaatgatcatatcatcactggctacaacccatgggtgtaaacaacacgatgatgactgcatacagaactggatacacttactggtaactctcaggaaaagagagtagctaggtcttccaaagtttggtccaaaggctgac

SEQ ID NO: 369096 - DNA, 72 bp, Zea mays
gtttgctgtgcccggttccctcgcgcggtgcggaatttaacatggccgtgccggaggtggtggtttacaaac

SEQ ID NO: 369097 - DNA, 95 bp, Zea mays
cctacgcgtccgggttctggaaaatggtctgcttgttgattcccatgatcagcatgcaattgcagatgccctctataagatgctttctgaaaagt

SEQ ID NO: 369098 - DNA, 473 bp, Zea mays
aactaaccccaaatatcaataaaatgtccagcaaagaacagcctaggaggaaaaccactccacggtaaccaccagacacctttataagcatttttcagctcacaactgctctaccccttttgacagttgagggatcatctcctccacatcaacatataattggacctcaattctggcctaacaacccagtagaatgggagcacaatacatttacatacccgagtgggttgcagcctgcagatggagctcccttcttcctctagcgctgcacagaaggatatttttgcaatcttctatggcctgctatagcatatgttgtgtatcagcgttcaaaacaatcacactctaggtttccatatgattcatttattgcataatctagccactttctatttttaataactactcaacaatttgagatatgcacaataaactgaaatcctcataagggataagatcttttactttggaac

SEQ ID NO: 369099 - DNA, 309 bp, Zea mays
ccctaaagagattttattagcattacgacgggagggaccgctgcctgggaattcactcagccatggttagggagctaacgaacgaactgggccttacacacatattagccaccgaaattacaacacttcacacgatcgctctgccgcatcacgcaactctgtccaccgctctgccgcacttcacttcatagaggctatgaaacaggacgatatctttgtacaggttaccgtgcaccttcacactatcgcttcaccgctagctgcttcagagatcatcaatcatcacgctacttcctgctgaacaggctg

SEQ ID NO: 369100 - DNA, 539 bp, Zea mays
atggaccaccagccaaggagggagggagagggacggattaaagtgagtcgacctgatctactgcagagtgtaggtggagagagagagagagagtgatcctaccttactttaatagtatttaggtataacattatatatttttttttttttattttttttaattaaatttttatatttttttcatacaattcttatattattatcattcttttcatttcttatttaaatatttatttatataataatatctattatctatattatttttgtttctctctctctctttttatttttttaattattttctttatatagatttttttttataattatattctattttctattatatattattttttaatattttttatatcaatattattcatcacatttttttattatattattttttcatcattttttttcttctaatatttaatatattttactctatcatatttatatttatacatgaatactacttacttattattatttattattttcattactttatttttttctttaattcatta

SEQ ID NO: 369101 - DNA, 390 bp, Zea mays
gaatcccataataatttcagcaaacaaaaacattgctgaaacatttccgagtgccatttgtcatacaattgtctggaagcaattaatgaagttcagatataagactaatatagacctataggttcttatttcagaagattaacatagggatcatgatggcataaagtgatgcacattaacctcttgatgttcatattccattggagaacatatgagttttcattctctatattacgatatctcattagaaatgtttgaggtccctctcagtaacacgacaaacagatattttcttcagttttgcatgccccttggcaaaatttattactcacttagattgtcgcttggcatctgtacttcttcagtattctcaacttcagctccaacctt

SEQ ID NO: 369102 - DNA, 95 bp, Zea mays
ctagatgatatttccacataaaccccatataaaaaaataactgcatcttgtttcaactttcaaagtgagaaccaaaagcatagggttgctggtgt

SEQ ID NO: 369103 - DNA, 306 bp, Zea mays
gggggagaaaacctggctgctgctgctgctgctgataaaaggatcccccccgattggaatttaattttaatcccaaccttgacctccccggaacaattcgtcccccaaaaaacaaaaatttaaactcaaagctcccaaccgggaaaagagttaacggggagaagcctcgcccctaggaggatcttcttctctaataaaacaatttggaactttttcaaggcgccgattagcccggtttttttacccttggggccggtggtggttgcatttttttcccccctccccattttttcccccttggggggg

SEQ ID NO: 369104 - DNA, 112 bp, Zea mays
tcctcgcgtccgcccacgcgtccgggaaatcaacaaggtcgttaagcttcaagaagagcttgacattgatgtgcttgtgcatggcgagcctgagagaaacgatatggttgag

SEQ ID NO: 369105 - DNA, 82 bp, Zea mays
aaaggctcataggcagtgccgtgaccgattcgagagcggggataaggatcgagacgaggcgttggttatccggagcagcatc

SEQ ID NO: 369106 - DNA, 223 bp, Zea mays
cagatgtttaacctggctcgtcatgttggtgctggggctgtttatgttacccgcaggcgcaattgacctgtatcttcttcatcagaaaggcttcttcgacccagtatacgactggtgggatgacctgctgggggcggactaccgcgcgcaccggaggcacaagaaaggatgacgtcactaccataaccaccacgatcaccaactccacctgcaccaccaccac

SEQ ID NO: 369107 - DNA, 292 bp, Zea mays
ggaaacgcgttaaagatggggagaggtttcactagttcgacagaatcatatacagcttggcagtaatcgacatggctacggtaggacccaacatatttcccaactttgaccagtacccaggggcacactatacaggttcctcattccaatgacagcagcacaacaaaccacctaacaaccactaacacaggaaaaaaatgccatccatgacacatcagttgccatcagatcatggggggatcagcagcactgcagcagcccggaatcggttctcgctttacttattctcccg

SEQ ID NO: 369108 - DNA, 138 bp, Zea mays
gcggtcttattgcagcatggctgctatggccgccgctggcggcgtcgggctccacctcattggcgctgccacggccacgctcatcgtggcggtccttgttgcggccgtgctggggcgccgccgccggacctgggtctg

SEQ ID NO: 369109 - DNA, 112 bp, Zea mays
gttgcaggtgaaggtgctggtggggtcgtcggaggcatagctgacctacctgcagttctcggacttgaacagctgcaagtaggcggtggggcggcaagtgctggggctggcg

SEQ ID NO: 369110 - DNA, 379 bp, Zea mays
ccctctataaatatcaatagcaaaaagaatggctagggcagtgtcacaaattatacatgtctattgtaaaaaaatgtacactgtacaatgtaaaggtgtgatgcatgaaattaagaacagaatctgaacatcttgtctagtctggaaccattctgcttaaaacaaacatggggattccagatcaatttcctctgaaccagaaaatccatgccggctgacctatcatccatataagatatggatcaggtattcaggtgtatttgtatctgacagattgatctacatcatctagtgagaggttcaagctgcacctccattacaccagtagcgctagattctgaattcctggctgcaccatcaggatgcaaaagatcaactg

SEQ ID NO: 369111 - DNA, 411 bp, Zea mays
ttcatgcgtccggaatttactcgccctcttaacccttcttgtaccggaaaagtagaatgcaagaacatcatcgatccaactacaccacttaaggttgtctgggccatgggtgcaagctggtcgggagatgatctgacagacagtaacatgcattcagtcacaagcagtcggcctatacgtgttttgttgttgagaggttcagctgaggcagaacaggatttgcgtcctgtcctggctgttcatgggtttatgatgtttgttgcctggggaatcttgcttcctggtggaataatggctgcccggtatttgaagagcttaaaaggagatggggtggttccaaatacatgtctatctgcagtatttaggaattgctataatgtttcttggcgtccttttcgctgcggctgagct

SEQ ID NO: 369112 - DNA, 109 bp, Zea mays
catccaacctgaaatatctatgacaaggcaagcaccaaagaactaaactggggcatttggctaccacacaccgttcatgcctgctccgtccaattggggatgaagcagc

SEQ ID NO: 369113 - DNA, 152 bp, Zea mays
  unsure (1)..(152): unsure at all n locations
agctantcaccgcattacatggcggcgcctgtgctcctcactatccctaccatggacgaagaaggcgcccccccgtccgccccagcctccccttcccgcaccccacccgagcacgagccgaagccccgcggacctacgctggcgccccaccc

SEQ ID NO: 369114 - DNA, 243 bp, Zea mays
caccggaacaaagggggggtatataaacgggcgggccccccgggggggggggtaaaaacttttttcgcaaaagatacttttttattacaaaaacagcactttcatacaggaactacaggggcggccttaattttggcaaaaaggggaatcacgacaaatccaaaatcccaacaggaaacaaaatggttgattccccgcggaggggccccccctcacttagcatttttagacagggaatttttt

SEQ ID NO: 369115 - DNA, 287 bp, Zea mays
aggataggctttttttaaacctttaacggtgtttgcaccgcggataatgaccacgatttgaacactaaataataaacagcacactcacggatcggctgttacattgcagactccaatccaaatccacacatttaggaaaggttggcctatacgtcagctgaatttgaattgaaaaggaactggtgtgtcaaaaaactcagtgtatgaaaatgggctatttatcttttgcatgcaccactactgtagtgagggccttgctctgtcttccttagtgtaaaactgaataa

SEQ ID NO: 369116 - DNA, 141 bp, Zea mays
tgagctaggatgcctatagcatgaagtccgggacttaaacatttcctacgagtagcgaaagcgaaaacccaaacctagttggggcctgaacgttacgtatatattagcagaagcctggaacgagcctaacaaaacattaat

SEQ ID NO: 369117 - DNA, 95 bp, Zea mays
cctacgcgtccgggcttctcctccccctccggttcgggttcgggttcgagaggttctccggggttcggcttcgagggagagcggatacagatgga

SEQ ID NO: 369118 - DNA, 306 bp, Zea mays
  unsure (1)..(306): unsure at all n locations
atccgcgaagnaagagtgcattttaatcggtgttcgtttgcacaaaaatttacatcacaacctttttaagatacactgattttactgccagaaataagcagtaaggagatcatcacagaacgtcgacagaatctattttgaagacaccacaaacaccaggtactacagaaaccctataatcggcgcataagttagctgaaatttacactctaccagacttccaagacaggagggaggcatgacaaaactggtggatgacatcatgggtccttgcaacaccttcaatgcaatcacttcctgcctgtt

SEQ ID NO: 369119 - DNA, 169 bp, Zea mays
acatacattcacaccaagcgcccaagccgtcttcgactacaccaggtgccaagttttcttcgtgtcctttacccgtgacgagcacccatcaggtatagagagagatggcattgtctaaccctgtactcatcgcgaaccccataatttcgatcaatgccattctaagata

SEQ ID NO: 369120 - DNA, 138 bp, Zea mays
agggctagcacatgggggatgtttgaatgatttgtccttttattacaggccgatggtgctgccgtacacacccttacgccttaagctctagcacacacagcccacaagatcccgccaggggaacacataaacaagggg

SEQ ID NO: 369121 - DNA, 99 bp, Zea mays
tctatttggaagagacaccggcaagcgacgggacttgctaggaagcaagtgcaaagcatcattcttgtaggagagtgagttagcttctttcctacctgc

SEQ ID NO: 369122 - DNA, 395 bp, Zea mays
  unsure (1)..(395): unsure at all n locations
ttntttttttttttttttttttttttttttttggggttgttttgaacaaccatattttttcttgcgactgttgttggattacaacaacaaggggaacaaacagccagccactgtatgctacagctacaagacaaggcaagtcttggggctgtatgcttttgatggccggcactcaatttcgtgttgcaaaactaaccagaggtacacgtttgaggctccaggggatcgatgcttctcaagactatttaataatcaccgggggggattcggggcttctttcgcctggcaatcatttccaccggggccttttttgccgtggcttgttcttagtcagtgatgggccacctttcaaattgctcctcgtgcattcagccatgtttaccttgcgcgacggg

SEQ ID NO: 369123 - DNA, 134 bp, Zea mays
tcgcctactcgtccgcccacgcgtccgagcagaggcattgttacttgttagttccgaaagcacgtacgtctcacattagcttgtttcagccttcgttgttcaggactatagaggaaaccgcatacatggccaac

SEQ ID NO: 369124 - DNA, 254 bp, Zea mays
cccagggggaacttaatttgggttacggtacacacccataccgtactcaagggcggaagggaccaagtacacaaggtctgttggatgcaaatacagcggatattttataaccacctaggacggcccaccttgcagataaagctgagcgctccgtggacacagacctggagtacgaactgctgctatgagagtggctttcacttgaaagacaacatttgccaaaggatctgctacgcgaggggtcccccttactc

SEQ ID NO: 369125 - DNA, 319 bp, Zea mays
acgaacagagctcggggaacttatgcaagtgtattaacaaaaacacacgtgcagggcacgacagaatacaaatctacaattgatgcagacttgtgttacaggtagaaatcttagaagggggactgaaatgctaacagcgagagggttaaacatgataaataacgattcgggtactcatggagggatgggtttggatgccatgatgcatgaactgaaagaagataggtctacgaagagaaagccatgttaatgagctagcttaaaaaggctgaagcagggattacaattttacttttggtgcagagagtaaggacatgat

SEQ ID NO: 369126 - DNA, 61 bp, Zea mays
tctacttgttcgaccacgcttccgcgttcttgggccaagctcgctgtatatgggatcacag

SEQ ID NO: 369127 - DNA, 82 bp, Zea mays
aatgttctcactctcagctggtcgctcactcttgtatatccacccttcactcagtctataggctctcagctctaggatctag

SEQ ID NO: 369128 - DNA, 137 bp, Zea mays
tccacgcgtccgtggaggggcgcaagcaaggattagctggctagcccggcctgtagctccgagatcatgaagcgcgagtaccaaaacgccggcgggaacgacggctacaggggctcctccaaggacatgtcgctggc

SEQ ID NO: 369129 - DNA, 129 bp, Zea mays
tcgtcgattctggatttggcttcggtgcaatggaggttgaggtgaacaggggcttcaacagtgatgctgttttagcaatggagacgatccattccttgtgagcttcaaaatcaagttaccctatggctg

SEQ ID NO: 369130 - DNA, 265 bp, Zea mays
tctacgcgttcgcccacgcgttcgtccacgcgtccttccacgcgtccgtccacgcgttcgcccacgcgttcggggggggctgtttggtcagccgtggttgttggtggagattaaccacgtgaaggctggtgctctggtacatgttcgccaggtactgatggcatttggccgaggtggaaagatggacggtcgtcggtcgatcttatcgtctgtttcctgttgttttttttgtacaaccaccattgttgtgctcttttgtgtcgct

SEQ ID NO: 369131 - DNA, 178 bp, Zea mays
aaaagggactggtgataccccatcgccttaggttaggttaacccatgccctaacattttggacccataggataacagggacacacaggggaacttctacaacaacaagggccccaggagcaaattggttggcacgtcacgttcttgaaagaacaaccccccattaaatccttctgggg

SEQ ID NO: 369132 - DNA, 342 bp, Zea mays
  unsure (1)..(342): unsure at all n locations
ttnnttttttttttttttttttttttttttaaaagcagggcgggtttaaattaaatagcggtcgttaacagatcatacctatggaatgaaacaaacagctccagatacggggaagtttaaaaacaaaaacactacaacagcagaagaagaacaggccttcttatttctggcatgattcctgccttcttcagtagctccagataagaaacttccggttcctccaaaggctcgtgctagctaaatttcttgggggggagaacttattgagactgctggcctgatttctctgaggctgtgctcttaggttcttgcgactgtttggtggccgcgccatttgcagac

SEQ ID NO: 369133 - DNA, 430 bp, Zea mays
gaagaaataaaagggagggatatatttgataagggattaattgaaccaattcaaacatatggagaggtaaattaaactaaaaaatattttaggggctatatggacatcgttcatagtagagggaagtaattttgactttttcctatcgtatatgtgcttccttgttttgccttgtgaaggacaggagttggaaagaatgttctatgctgaagccactgaatgagcttctgaggatcctgcagcttggttattgtctttctcacttactcttcgtttcatcgtcttcttaatttcctcctcctttttgtcgacaaactgtataatatctttgaagctgccaagacgtgatggcctcctctgtctttcgacagcatcggcggcggcagcagcagcatctactgctgcagcagcagctgctgctgcactgggc

SEQ ID NO: 369134 - DNA, 324 bp, Zea mays
ctcgtcctcctttctccgatggcggccggggcgggcctgcagccagcgtgggcgcgcggccccggcgagcgcggcccggcgcaggcacagtagtctcgacgccgatcctctctggcgcgtggcgccgaccatggtccagcccgacgcggctgcggcggtccggtggcctggcccccacgcctagcatggggcccggcgtggctgcccggccacggcacgggcgcgtaggcgacggccccgtccctgacggcgcgcgggcgcagccccggtgtggcgggcacggccttcagcgggcgcggtcttagccgcggaggcgagcgcgcg

SEQ ID NO: 369135 - DNA, 380 bp, Zea mays
atggaataataagataattgttggaaagattcatttcaattacagcggggattcactgtagacagatgtgctgacaacgattacagtaaaaaaacggctgaattgagcaagagcatattgcgtgcgggaagatttgagattccatcaaaattggcaagtgctagcgcaggtaaagtcacgcaactagcaagctgactttcgagttcattaggtaatataacttcagccgcccgcaatagaatcaacttagactagcaaatcaaacatgttcttatgatatcttcaacaaagctgaatctgaaaaacaaaaaactatctggtaatacatttccatttcgcttgacaccatcagcaactcaggccttgagcttgccaaagaa

SEQ ID NO: 369136 - DNA, 326 bp, Zea mays
aagacaactttacatatatattcatttaattggggaaccaagcaaaatataaaaaggatggaccaacaagataaacgactaataaatactttttttcccattcctttggctggctgctacctcctggtggtttctacaagggtgaaaagatgagcaaaaggggaaagaccaggacaaggggggcttggggcatgctcctaccattcagaggggggggccctgcaaaattgctcatgaggggaaggggagtctttttgcacccgggagggctctggtcccagcagagtacaccccttttgtctggggctcaacacttttccttgggc

SEQ ID NO: 369137 - DNA, 271 bp, Zea mays
cggacgttctggcggacgcgtgggcggacgcgtgggtttgccggttcatcatagaaaaaaaacgttagccatcttgacataaacacgctacagttatcttcccggcttagacctaatgtgcctcaataagcaactgcataaaagtgggctaggtatgtagtgctgtgcggatcattcgttggtggttttgaatctttgattgaaccaacataattgtggggaaaaaagaaagcaatggccgaaaggcagggggaaaagggaaacaagtgct

SEQ ID NO: 369138 - DNA, 409 bp, Zea mays
cccacgctttcgttttgtttgtggttctgcctaggatggtcacctggatggatatatgacaaccaggacagttccactcacaataggatgagtagattgggcagaaagagaagggagggcctgatttctatgattgagcaaaggagatgctgagctgagcccctttcgtatggtttatgcagcggtgctttatggctctgttttttgtttcataccgcgcttgagtggctaagattgttctgctttccattacagagcttctgcactctaccatcttctgagctgatgatacctgggatattctttgacgtttgctgctttactacgatggcccatgccttactagaaggtgattctatatctgtttgctgctctaactaggatgccttgcaccttagagcatctctag

SEQ ID NO: 369139 - DNA, 208 bp, Zea mays
ggaaggcgaaggacgataatgctaaagatcatcattacatatacagcggagctctttagctccagcagtacaaatttcaggtatccctatttgctactgggcgtacatacattcaatcgagataattgaacaatatgttgtaacaataacaatcaaatcaagtaaaaaagaatttaaaaaatattaaacatgactgtggtagtttaca

SEQ ID NO: 369140 - DNA, 306 bp, Zea mays
ggggcccaacattgaaaaaaaaatgcttacccaggtggggacaacacaaccaatattccaaggggattattatggggggggatacaggatacatgttcgggggggaccggagccatacaaaaaaaaagggtttaaatggggagcctaattaccaacatggcacccaggaggggggggctggctaaaaaaaatggttaccggtccattaaattacaaggggaatgcaaagggttggtcctacaagagaaacacggggctggaaggggggtttcgttccggccttaaatgccctttacggtgggggcc

SEQ ID NO: 369141 - DNA, 176 bp, Zea mays
acttgcaacaaatgaatgcgggaaccttttatttggttaagaattatacaaatgccacactttaaagaagtacacaaacacacataattttaatgaagacagcaggaagagggaaaacacaaatcctgatacttcctatacaaagctataatgtacaaaaaaaaataccacaaaac

SEQ ID NO: 369142 - DNA, 308 bp, Zea mays
gcctatgcttctcatcaggcccgggggccttatccataggttaatcttttacaaccgaccacacttcatccataaaaaaagatgcttcaagattgttaagatcatgctgctggatgcccaggttatggaaatccaaagtgaagtccctctgcactgctgtaccgatcagattatcatagaaatccagagctgcttgctgcttatcatcttgtgatgtggcaatttggtcaccgacctgaaatttagcaataatttttttttcttgcggtagggagcttgctggtgaaagaaggaagtgtttgcacccc

SEQ ID NO: 369143 - DNA, 156 bp, Zea mays
tttctttattcatatctaaacagaaactatagtagcaagggagggtataattgcaattacattcatatgaattaaacagaaattgctacaactcatgagaagaaaagaggtactagcagcagatggcctatgctgactgactatgaatgactgcta

SEQ ID NO: 369144 - DNA, 155 bp, Zea mays
gcgacgctagtgtttcactctcctcagtcgcagcggttcccactctcgtcttcagaagaagcgccgcgatgggttccccgccgctgacgccgaaccgtcgatgggccactccactgcactccagcagaaggagcggcgcccccttgctcgctctt

SEQ ID NO: 369145 - DNA, 338 bp, Zea mays
cgttagctactttttcaattcagtgggttatccatatatagctaactgaataacattgtggaccaatggaacattgtaccgacgtccaaagttgaaaccacataatttcttgagcaacctcattagcaagattacatcgtagttgaaaatatagttcagatgttttgactaaaagtttatggctagcctgaactattctttctaatagagcatatgatactgaattactgaaactaattggtatttggctagtactttcatgctggtgtcgctgtattagtgtatttccagtattttgtttgcctactgaacagcaaattgacttgccttgatttata

SEQ ID NO: 369146 - DNA, 255 bp, Zea mays
ggggggggaaaaattacaacgaaacagttccttgtattggggaacggggccggttcccggttgtttatgtcaggcgcaggcccctgggtacccattttttggtttgggctacaatttttttgaaacaaacattttccttaaaaaaaaaaggtccggttttaaaaaaaaaccagggcgatcaatggtcaacaagcaccggattcctttggggggctcatttccaggggggggcctaggatttttacataggggggg

SEQ ID NO: 369147 - DNA, 344 bp, Zea mays
cccacgcgtccgcccttccatgccccgctcgcctccgccacctccccctcctcccgcccctaggtgactgtgactccctccggcgcctgaatctccatctcgctccccacccgccgcctccgccgcgagatctccggctgcccgcgccatggtcgccgcctccggccttgcgctgccgcgggtggccgcaccctgcccggcgcgcccgcggggtggtctccgccccgccttgctccgattcgcgccgcccgtggcactgccaccgcaccagcttcggtgctgcgcgttcaccgccgatgacggcttggtgtccgcagcggcctccaagccccgccttcccaggg

SEQ ID NO: 369148 - DNA, 188 bp, Zea mays
gtggtgccctacaacagggccgggcaggataaattaaactgcgttcttcagacgctccaagcctagtttgggcactgtaatatttaactcaacccacatatattaaggtggactacgatgccacttaagctaattctcacctcaacacatattgattgggatcaatactagagtacccaaacaaaacc

SEQ ID NO: 369149 - DNA, 378 bp, Zea mays
agttatcaccgagaaaaatgttgggtatggttctcacatatgccagttctcgtggagccaatttgctcatctgccgggacccaatttcacaactgcacataactcatgcattacaaccaacccaaaagtgaaaaaactggagaagaataagaatgggtgttgtcgctcgatgttgcagcaatctaaatagatcaaaaccaacaactctacactctctatacgcacataagctgctactgatggcatatactgctgccccctgtgtcaccttgggccacatattagcatactggtctgaataagacacctgagtcacgacaaaacctttcagcatctcaatgaaatcatgacgcctttccttgtcaaatctttttattt

SEQ ID NO: 369150 - DNA, 208 bp, Zea mays
tttcttttttttttttttttttttttttttttttttttgtcaggggtcatgttcggacgcaaatttcctgggattaagtgctcgaagcatcactgttaactgggaattgccattctaaagtctctggaacattgcaagattgacttttgaattttctacagggcatcccaacccacgcgtccgcccaggttttcgcccacgcgtccgg

SEQ ID NO: 369151 - DNA, 376 bp, Zea mays
ttttttttttttttttttttttttttttttttggtttgggtttttttattttcttttgtgtttccggccccttttctttctaaaaagaaaggggccccagggccccccccatttttattcagggggcaaccccccatccaggaaaaaaagggggccccacccttgactggacacaccccacccccccgaaggttccttttaacccgacccaacggaaacaccaaacaggccatgaacctcccaaaaaggggccccccggaccaaggagggaacaagcccctgacagggggggaaaaataaaccctggaggcaaagagggggaacaaacccccgccgcctaaaaaaagcaaactttttttttcccccccgggagggg

SEQ ID NO: 369152 - DNA, 391 bp, Zea mays
acagcaaaacagtgggttttgtactgtgcaaatgtaccaggtagaatacaaaccccctgttagacttagacagacgagtgcaaacaagaaacaaacaaaaacgtagaggggctacaacagcaatcccgtctgctcttcatccacaatatatatatcaaagtttcgtttcgttgcagccaagtccatccattcaccatcagcagatgacagcattcagagtctcgttctccacgaagccgatcccgtccgagcactcgtttccggcggtactggtacacacagcgttgccgtcgacgtcctgcccgagcaggccaggcgactcgcgcaccccgtgaatgtagttccgtacgagctcgttgtgctcctggtcgccggccgaagagaccgtgtc

SEQ ID NO: 369153 - DNA, 116 bp, Zea mays
cgcctgcaggacgacactagtggatccaaagaaaatggtacgaggcacacagacggggattctaggactttctgctgcaaatcactgtctcgactaaggaaattctgcaaggatgg

SEQ ID NO: 369154 - DNA, 289 bp, Zea mays
cacccaaaccccacaaccggttttgaccctaaaaaacgctgtccccccccatgggctgcacctcggccggggggggggccgctcccccaaagaagaaagggggacggcccacacggaggcacacaaaggggggggtcaatcccccccaaaattaacccccaagaacgcccggcgggccccgatctggacaaacccgggggccgggtttatttttttttccacggatttcccccccccccttcgtttatcctggggggtctttacctgaccttgtggggcaacgggttgc

SEQ ID NO: 369155 - DNA, 184 bp, Zea mays
ctcaaagaaatccaaaaagcatagcaaaacccaatcggagagtatgtctggaatggaaagattgcagcggatgttcgccggagctgtcggctgcgttgggccacccgccaccggactctccaactctggactcttctgagcaagtctacatctcttctcttgccctcctaaagatgcttaatca

SEQ ID NO: 369156 - DNA, 318 bp, Zea mays
gaataccatttgtaacaccgtatggtcaaattatacttacatagcccagctccgcaggacccacacatacaggtagcacctctcttacacttccgtcatcactttgtgtaaaatggttaacccggaggtgctacatttggagcgacaaggattataagctggtcctcaccctcctaaacttccaaggtggccctaaacccaccaactacaactgctgatgtgccacgtgggccaacaacacggttactacagcttctaacggactggggtgccacagctttcttctggcttcttctttacctttatactttcaaactt

SEQ ID NO: 369157 - DNA, 234 bp, Zea mays
gggaggaaaaaaaaaaatccctgtaaaccccaaccaagcaaacataaaatctacgggtttgcatttttccccccggatcacagacccagccccccccctttcccccccctaatcccctcaccaatgcaatcccctagctttttttttaggagcatccaaaatccggccccccctttaaatttgtccccccccaggttggtccctccgcccccttaagtctcgcaaaattaaatt

SEQ ID NO: 369158 - DNA, 197 bp, Zea mays
aacgggtggggttttttttaaacactaacgccatgataaaaacacaaatctcaagggaaaggacagatgcaagtgcctaaaacagcctcggtcttcttttattggggacctccctgagggaaaaaaagcctcggaaacccggtgatgatccagcccaagggggggccatccataatgctccaaaaaaaaacacaggg

SEQ ID NO: 369159 - DNA, 330 bp, Zea mays
ctctgaatagaatatggcattgttttaacataggcaaatcgccttctacagtcaatggatcatgaagcgagagatcaccccgcattacctaaataaatatttccgaagaatgaatcaaatcgatctaattacatctaataatataacaaatggttctatgacaaagaatgaatgttaaacacccaaaaatagcgctgcctcatggaaactttaggcagcaaagtcctgccttccaccggtctctgatagtgctaatgcctagagttgtggtcaactgcatcctgattatcaatcttaccccataggccatcacaagcaagtttcaataac

SEQ ID NO: 369160 - DNA, 156 bp, Zea mays
aaatcaaaggggggcaaattaataaaaaaaggggtaaaaacaaaaccaaacaactcatcggtgattcaaaaacaccagcccatccacagcaaggttcgaaccacaggccacaatgccacacacttcaaaggaacatcacgggtccccacaagagaa

SEQ ID NO: 369161 - DNA, 111 bp, Zea mays
tgccttatcgagctcgggcgccggttcgggatgcgcgtgtagatggcggcgctcgacgacctgctcgtccccgccgcgcagaccagcgactacatgttcgacgtcgacacc

SEQ ID NO: 369162 - DNA, 329 bp, Zea mays
ctgtttcattgttcttatattgttttctgtgtgtcttgactattaagttctgcacagcagtgcagaaaactagaaaaaaaatctggtacaccgcatattgcatctttttcgttagaaatctaatcttcatgatactaagcacttaagcagtaattctctttcataaccaactctacgcattcaaagccgaaatgctatctggatctgccctacaatggtaataattggtattatatgatagagtcaatttatgcttttatactctaaaatttctgtgtggattggtgtgtaaaaaatcattagattgatgtgaaacatgctttggctgc

SEQ ID NO: 369163 - DNA, 389 bp, Zea mays
tttttttttttttttttttttttttttttttttttggttggagagaacacagtttgcagccttaggatatagagccaaaaaggtcttaacagcagggggttgctatataaaagaggggattttttctgcccgcacataatacaagttgggaaggcctaacatcaggagaggagaggaaaggtcacatgcacgatcttaaacgagatgcattggcgttggctagcagctcttgaaaatcgtagcaccatcttccaagctagcttgagttacattcaaataacattatgaaaacatatactggtcaaaagatataccaaatattgggcccgttttgttaggcaatagacgtatatccatattataaatggaggactcctatatgttatagg

SEQ ID NO: 369164 - DNA, 146 bp, Zea mays
gggggggcaaaactatagttttattgggggaaagcaataccggagtatttatgtcatggccaattataaactttgggatttaaaaattacaggtttttgaaactggattcccaaacaggccctaaaagattgaaaacacaagggtt

SEQ ID NO: 369165 - DNA, 196 bp, Zea mays
ggaggtgttgatagagggggtcaccagtccttccacggcgcgaggcctgtcggtggggaccgaggcggacgcggacactaccaccatggcgtgcctgctcaggtccagccgcagtggcaagtggccgcgccgccttcgacgtcgaggccgacacccgcggaagtcgaggagctgagaggcgaggtggagaggaagg

SEQ ID NO: 369166 - DNA, 367 bp, Zea mays
gaatgggctcgtcagatccagatcatcatacgataaaacaaatggagcaaacaaaacttgccataaaattggcaagggattacgtaaagaatgcgagatcattcagattcttcggactccacgaattcgccatctacatttagggacacaggaaggggataccagaccgacgaccgcttgtccgccttgatcaaccgggaaggaagtagagacgcttccccccacaattaattgatcagcaatttccagagctgaaaccgaaatgcactgtctgtctcttgttccattccatctgtacaacacggcgctgcgccatgatgcgttcagttctcaccagagctgctgggtcttctccctgatcatgttc

SEQ ID NO: 369167 - DNA, 257 bp, Zea mays
ggctcaaaatagtattaataagggaaataggcggttacatcatacgtttaagatgcccatatagtttttacaataaataaaaggggggaaaagaaacgtaaataaacgcggcctttacaggcagccaactgggggtggccgttaacccacacctagaactcggggtagttttggaactcctggaagtttccttccacagtttaattttttcctgggcaggggttgcaatgctgacaacctggggaggggggggtttg

SEQ ID NO: 369168 - DNA, 333 bp, Zea mays
aaaaatagaacctggcttctttattctggtctggaactctattttttttctatactcaccctcctggattttcaccccaatcttggttccttaagcaaaaaaatactggagacctcctacaggaacttttacttaagaaaaaaggaaaactgggagcaggacaagcttcaggacagacaaatcaacccacgacaacaaataataccctgcacaagggcttttttttttgtttgcggatcagtacatcagtaacacattagtcaattcatccatgatagacagacagacagacaccaggaagtttaggctttattggacaagctcaggaataag

SEQ ID NO: 369169 - DNA, 247 bp, Zea mays
  unsure (1)..(247): unsure at all n locations
tttttactanttttcttgacagcaacagcaccactggggttgttattagatgcatcactgcaacacttacaaggatatataccgtatcgtttaaactttaaagcgaacatctttttttaaaaaaaagaaacaacaatgcgaatagccaataacgattgactcgctcatctaatctcttcgggacaggtgcaaacttagcagtctggtcaaatctacactacagaaacgaaaaccactagactacatg

SEQ ID NO: 369170 - DNA, 125 bp, Zea mays
aggcaaaacgcagcccagattggaccaatcgggactaagatgggtctgttcaactcaatccatacatgttctcggtctctctaacatcagcagccctctcagtaagcaggagggggggggggggg

SEQ ID NO: 369171 - DNA, 206 bp, Zea mays
tcctcgagtccgcccacgacgacgggggagaggggacagagggctgaagtcacgccacattgcacctactggatgaccagagtagttgaaggcagtataggtagttacaaggatatattgagaagaagagatcgagatgaccagtgagcggaagaccaatgggctgtctgacctgatcaagaacactgaaaaggtgggacgaaggc

SEQ ID NO: 369172 - DNA, 334 bp, Zea mays
tccacgcgtccggagaacaagactaaacgggaattacatggttgatatgaagtcacatggcacctactgtctgacgtgagtggttgctggctgcataaggtgttacacgtatatattctgaagaagagatcgtgatgaccagcgagcggtagaccaaggttctgtctggcctgatcaagagctttgacaaggatggcaggaaggctggagatgcaggcttcttgaaggccttcaacaaggaggggttcgacaaggagattgaggacatgaagacagagctggagcccaagggcgaggaggcctacgaagcatatcctcctgaggtcaagggtct

SEQ ID NO: 369173 - DNA, 474 bp, Zea mays
cactatatgtgatagctggtagcgcccgctggagccgccgcggcggaaccgcggggacgcacgaggccgtttatcgggagcccaccaaacacgaagcaggatgtgctctcctgacccatgatccgtctgcgaccaaggaaaaggaacacagaagctacgacggccagcagccatctcgatgtcgatggatccgagcatggctgaccctggaaggatggaggcccttatgctcggctgcggccactcttgtacgctccgcctgtggacggcgctataaggtagcgccgctgagccggtggatctcagcaagatccggactgcccttgtgcacagctgtagcgagcatctgtcttctgcggtgctaggatcttcacacatgacagggaaagggagggcgagggacagagattcttgggctgggagatcgggctcgatcttaagggtgagcggggccttgacggatttgggcgcgcc

SEQ ID NO: 369174 - DNA, 346 bp, Zea mays
tgctccacgcccgagcccgagcccgggaccacgaggcatccagaagacgcgcgcgcccctctcgggtctcggccgcgccggcgagctcaccaggactccaccatcaccagaggggcggcgctctctcctatcgcggcgagcgacggcggctatgggaggaggggagacggtcttgcacgctccggctctggccggcgctatcaggttccgccgttgagccggtcgacctcagcaagctccggactgcccttgcgcacagcttcgtcgtcggatctgtcttctgcggggctaggttcttcacacatgacagggaaagggaggggggagggacagagattcttgggct

SEQ ID NO: 369175 - DNA, 151 bp, Zea mays
ccctcgcgtccgatcgactctcgagagagcgcgtgagtctctacaggaagggaaaaagagagcggcacagcagaacagatgatgccatggaggctctgcgatagacccctcgccgagataatggctagtagtgctggccgcgcaggctctt

SEQ ID NO: 369176 - DNA, 140 bp, Zea mays
tccgtcacagcggttttgcactgcggatgctcaggtttcattactgctgagatcaagccatcattatggcaaacatggctctcagattctattgcccatgggtgctttacaaatatcttttagcatgcaactctcttggg

SEQ ID NO: 369177 - DNA, 283 bp, Zea mays
accgcgccagaaccgccgggaccaacgacgccgcactaactgagcaaccagagcctgacatataatgagttttgctataagggcgccacctgctagcactatggaggtgcaataaatattgcattgacagctcgcttgcagaaaatcagtcgaaataaggggatgagcggaacgacggaaacccgccagcggggtacccgccggccggataccccccgacggagcaaggctacccaccgaaggactacctcccagcagggctacccgccggagtacgcgcagc

SEQ ID NO: 369178 - DNA, 231 bp, Zea mays
tccacgcgtccgcccacgcgtccgcttgtcggtgccggtgttcgccgacgccccgctcaacaagctggtgccgacggccacagacagcctgcacggggtggcgcaggtggaccgccgatgaataagcggctggtcacgcagcaaacggcctccgtgctgtacgttagcttcggatgcatggtcgccatggacccgcacgagttcgagaagcttgcgtgaccggctccccac

SEQ ID NO: 369179 - DNA, 263 bp, Zea mays
  unsure (1)..(263): unsure at all n locations
acgncctcgtttacgccagccaatcttaaatgggagaagctgttattatagctagaaacgctgataacataacagtagataaaattagcctacccgtagccggcgatctccgtctcgacctggaacatgagaatacatccgtacgtccctccccgcactccgccccttccacgagggaaggctacgaacgtcgttctcgcccgcggcggcggccacggatgcatcggtcggatgactcgagaacttattaagcctagcgcccg

SEQ ID NO: 369180 - DNA, 347 bp, Zea mays
tctctccttttctcaccaccggccccactcgtcttcgttgcgtacgacaccagaacccggttcgagaatcgccggcggccggctaaaggagagagggtgataataaatcgataaaaggacgggcacgacttttttttcggagggtgtcgttgaacaggactgcgctgggcctgggacgaatccatttttagggcggtgccggcgcgatcgttccgggatcggcagctttatcggggggcgagggatcacggcagcggcgggcgcgacgaccgaccgaccgacccaacccgccaccagtgccccgcggcccgcgccgaggaagaaggaagggattaggagacgggccc

SEQ ID NO: 369181 - DNA, 342 bp, Zea mays
ttcatgtgttcgatctcctcatccatatccggaggagccgctagacgcgctgagaggaccgatgttcacagctatcgctactgttatcggtgctgttatcctcactgcttgcctccttggacgcgtcatgttgcggctgacgttgccgactttgtccagagccttgtccagaaccgagacgaggaccgagaacggaaccgagaacggaatcgaggacgctatcgacgctattgccgtggctatggtcgggctcaggcttgaactgacgctgataccggagtccgttgacgagtccggcgaggagatcggcgagaagagctctgttaccagggctgcttacaa

SEQ ID NO: 369182 - DNA, 380 bp, Zea mays
tgctactgaaccaaccgtggaagggacggccacgggctgacgctgccctgactggtgatgacatgccgaccttgcccgtggcagggagcccataaccgtcaacgattccgcctcaaataagggcaagcgcctagagttctataatctccagcccagtagtggaggcagaaggcggaggccgctttagtcaagaagaaagagaagaaagagaagaagcccaaggcgaaggagccgtcccctccgctcccatcggccgtgtcctctgatgaggaagagaaaagcagcaccagctccgaggagacagcacccgcggcgaaaaaagcgaaggagaagacgaagaataaatgttgatgtctcgtcttcagcctcagatgaacgat

SEQ ID NO: 369183 - DNA, 387 bp, Zea mays
cggtcgcttgggtcggcgagctcgcagactgctgggagttgttcagagctttcgcgcacccccatctattctccggaaccaggacctgagaccggcctaagtgacctagattcctgatcaccccgtcgttgccgccgaacccgccccgggaaactttcttccagaccgcgttcgttgctgtccatttcaccgtgctggaggagtacgaccctgccaggcccaacgactactaggactaccggaaggtcaagactccggcgcgccaaggaggctgagcttgaacaaggagctttataggcggcgccgcgaggagcaagaacgggagagggaacttgagcaccttagagggaggccccggagcgcgaggagaatgactaccaattcagg

SEQ ID NO: 369184 - DNA, 77 bp, Zea mays
tccacgcgtccgagatcgcgagcgccgcccgtttttttttttttttttttttgttttttttttttttttatatatat

SEQ ID NO: 369185 - DNA, 277 bp, Zea mays
gtctatgtcgtcgcacggtgttgctcgccatagccgcttcccccctcctccctgcgtcccccggctccggcgaaccgccgtacctgaacccttgtccacgacgcctagccggatgggttgaggagagacgatcagacccgatcggggacggaacatgcgccactgctgggagagctcatggggggcgcccgcctgctcggctcgatcggccggggacggcggcggccagatctgcaatggagggcaacaaggacgacgcggccaagtgcctgcgcat

SEQ ID NO: 369186 - DNA, 232 bp, Zea mays
  unsure (1)..(232): unsure at all n locations
nctggagctgcttttattcgatggacacataatcagcggtggtcgggccgacggcgacattgagcggccgtatgttccttactaccgctgaattcggggcgctgattggctcagccgccacatcctggacgcccactccaactcctgtttgtactagcccatctgctgcaggggacctaaccgtgagctgacacccggacttgggccggtacatggagacgatcgcgcgggc

SEQ ID NO: 369187 - DNA, 339 bp, Zea mays
tgtgggcttctcctccccctccggttcgggttcgggttcgtgaggttctccggggttcgggttcgtgggtgagcggatcgagatggcggcgtcggatgttgagtaccgctgcttcgtcggcggcctcgcctgggccacggacgaccactccctccacaacgccttcagcacctacggcgaggtcctcgagtccaagatcatcctcgatcgggagacgcagaggtcccgcggcttcggcttcgtcaccttctccacggaggaggcgatgcggaacgccatcgagggcatgaacggcaaggagctggacggtcgcaacatcaccgtcaacgaggcccagtc

SEQ ID NO: 369188 - DNA, 488 bp, Zea mays
  unsure (1)..(488): unsure at all n locations
cgtttctgctcctccccaccccactcccccgcaggagcggcggcggcggcggcgaggtcgtaccccacatcggcgagcggcggcggcaccgccggaggcaaaggcaagatgttcgggcgcgcgccgaagaagagcgacaacaccaagtactacgagatcctcggggtgcccaagtcggcgtcccaggacgatctcaagaaggcctaccgcaaggctgctatcaagaaccaccccgacaagggcggtgaccccgagaagttcaaggagctcgcacaagcctatgaggttttgagtgatccagagaaacgtgagatttatgatcagtatggtgaagatgcccttaaggaaggaatgggcggtggaggatcccatgttgatccatttgacatcttctcatcattttttggaccctcttttggggangtggtggaagcagcangggaagaaggcaaaggaggggagaagatgtagttcacccacttaaagtt

SEQ ID NO: 369189 - DNA, 386 bp, Zea mays
cttgtctcgtgggctggagtctgaagagaggtcgtcgtctcgttggacagccgaacaacagccagcagtccacatcaaggttcctgagtctgcactctgcagccatgggaaccatcgtccacggcgggcggagcggcatgatgaagcagctcaacgtggggggcaagctcttctcgctggaggcaagctccctttccctccccatgtctatcggttccccttcccctaccccaacattcgtggaccgcgacccagccctcctatccgccgtcctcgctgccatccgctccccgtccaccgcagcgcccgacttccccgcgcgcgtcctcctcgacgaggccaacttctacggcctgcacgcccagctcctcgctgcgctatctccg

SEQ ID NO: 369190 - DNA, 147 bp, Zea mays
gcctagtgcttcttcttggcctagcccttcgagcagttcactttgggcactaatggttgctgctagctagtcactgaaactttactttgcgggcaggagaggaggccactctgactgtcactttgagttttgcgtcacctgagtact

SEQ ID NO: 369191 - DNA, 347 bp, Zea mays
tcgtggtgagccacggcggcggagggaattgtttaatcccccgtcaccgtctcctatcgccatcaccccacccgtcccccttggtccaggcgcaggcgcgagcgcgacgtccggcgtccggcttcggcggcggagtggagcgatcccgatccccacaaggaattccatcgctgtcgtggcgtttggtggcgctcctcccggccggcaagcaggatcaggaaatcgcacggaggtgaggatacacgggtgcggaacgagagctaggcgaacctgtctggtacctcgcggcggagatggacgagaaggcgacgatggagagcaagctgtcctcggcggcggccttcgtg

SEQ ID NO: 369192 - DNA, 81 bp, Zea mays
ccgattctccgcactcgctcctcctccactcctggcctttctcggtcgcatcaagaacacgagcaggaaggagaagaggag

SEQ ID NO: 369193 - DNA, 382 bp, Zea mays
tcctcgcgtccggctaatcaggagcctcatcaaccaaactgcagggaaagcattataataccatagcaacactatgtgacatgtatgctttcttggtgttcctttttgtcatttttatctggtgttatcatctagccatatctatcgtaacaacacccaagaggtccgtgaatatgatgggttagcgtttagtactctatacaaggtatttaatctcaaacatattctgaatttctgatattagagataatttttctttttcctttttaatttattcaccttatatagagtactggactgcaagccattgatgagattgtccccaaatctattacgagttccttaagctctataagtttttggatggattcaagttttattt

SEQ ID NO: 369194 - DNA, 79 bp, Zea mays
tggtaattaaaacgataaaatgttgaaacgctcatgggtgaagttcaggctctcaaacatttcaaccaaccttaaacat

SEQ ID NO: 369195 - DNA, 95 bp, Zea mays
tggtgaaactccccggctcgaggagatcgtgacattgagaggacgatgggagggcgcgcgctcctcctccttctcctggtctcggtgttggtctt

SEQ ID NO: 369196 - DNA, 156 bp, Zea mays
tcgatcacgcgtccgcccacgcgtccgatttggtgggacagaagatgcccgcggacgagccatattacctcacaacaagaggcacctgcaattggaacccatgattgctggacgaaacccccttgttaagttgaatgcaaatatatgttcattcac

SEQ ID NO: 369197 - DNA, 185 bp, Zea mays
  unsure (1)..(185): unsure at all n locations
tcgtaattttttttttttttcctttcccataagggggggaaactaaattnggaactaagggagtaaaagttgtgcatactgtagtattagattaattctgctatctattgtcacggcacaaaagcagtcatcaaatataaaagtctatagttctagcagcggcacgtattccattttctagaatc

SEQ ID NO: 369198 - DNA, 336 bp, Zea mays
ggtaattaaaacgataaaatgttgaaacgctcatgggtgaagttttggcttttaaacgtttaaacgaagtttaaacatagttttaaacaacgtaggaaaaataccaatatatcataatttcagacaataacatgaagttaaataccaaaacagagaggttagtagcttaccaaaacagaggctgagaggacgagatgagtcggttgctgggtgggtgcttgccacctgctgctagtaaacagaggcgtggagagagagggaagcgcggatggctcacggcacggagagaggctgcacacgccgtggaaggagggcacactcggcgcatagggagag

SEQ ID NO: 369199 - DNA, 130 bp, Zea mays
gtagagcaggagggagccgcaccgccgggctgccgcaatgtcgcctcctccgcccccgccgctgctgcgcaacgagctgtcgcgcatgacggtggtgctgggcctgcgcctgtgggtgctggtgggcatc

SEQ ID NO: 369200 - DNA, 325 bp, Zea mays
cataatttttttttttttttttctcataatttgtgaaactaaatttggaactaagggagtaaaagttgtgcatactgtagtatcacatcaattctgacagctattgtccgctacaaaagccgacataaaacaaaaaagctattgctctagcagcggcacgcatcccattcctagaatcgaagctgagttcccaagcacttagacaaagatgaggtctagatgaccattcctacctaagacctgctttatttcctcttagacaaagacccatgctctgtttcctgtacaaaatgggctgcgcgcactctacaccgtctaaaatcgg

SEQ ID NO: 369201 - DNA, 135 bp, Zea mays
tcgtcacgcgtccgcccacgcgtccgcccgacgtgggccgccgttccgccgccggtccgcctcagcgcatcgccctccgccacagcgtacctgcgacctcatcgatcaccttcaactttcaatcatggcggacgt

SEQ ID NO: 369202 - DNA, 495 bp, Zea mays
tctcgcgtccggctccccgctctctcctctgcttgcggactgcgtggagcaccagcggcggccagcgggcaggaggagctccctccccaaacagagaggggtggggtatcagtgcgtgcgctcctggaggagggcgtggaagagcagagcaggcggcaagcaggggtttgggaggatggtttcgctctcgacttggttccgctatgccgcacacaagtttgattactgcatctccctctcgttgaaggtgctgcacctatccatctattccccagccccatgttttttctaaatcctactccaccctctctcaagatccaaggaccctagtagcagcacatcttgctctgtaattaattccctctatctacctttgagtctgtacactcgtcgaatttaccacactgttcaatccatttgcccttcaccacaccactgttggacttgtacactagctttagttggactaatatggaaattacatcaatcaataac

SEQ ID NO: 369203 - DNA, 575 bp, Zea mays
gttatataattccttcggttcaagaatagcatcattaccatgagcatacataccagagaaacggagacagattcggaaattttcatttattgctagcttgtagttttggggtcctataatatttttcttggttctcttaattaattgagctagtaaatcaacaaatctgccactacagccgtcacgggcaaacataaaaaaactgaacaacaccaaattgaggcgcctagtccacaaacctgaactgctgaacttaaatgtctggaagccacagtttctgatttctgatggtttgtttttatgctcatttactctttctttcttccaggtagaccaccttgtgttgattcctcgagtcttcacctggtgcttccgtttgcagcttcatttttaactaaggtacttagatcacatattcacatcactggcaagtattatggtatataggctcctctgtcatatgtgggtctaggctaggaagctttctgtttgaaaatctaacctactggggagatgtccaacaattccaagaaacccacattctatgaaacgctatgtttacttgttggttaggc

SEQ ID NO: 369204 - DNA, 137 bp, Zea mays
actaagtttatgatttattatgcttatcattattaatttattatattctcatgcccctttggtccatccatatgaataaaatatttttggctttcatttgcttcttgaaacttactcatgtacatgttggtattctg

SEQ ID NO: 369205 - DNA, 107 bp, Zea mays
atgacgcgtcgggcggacgcgtgggctcttacgacgccccacggcaccaccccaacgtgatggcggtgagcaacaacattacggtatgcttgacgctgttgtcgctg

SEQ ID NO: 369206 - DNA, 344 bp, Zea mays
cctctcgtccgggaacattgcaagttttggcctaccagttttggcttgtgcatatggttggcactttatagcattatagattaaccttcatgtttgtatctttcataatatgatgttcgatatcaaataacctcagttgttgtagccttgctaattagtggtacttccatagcatttttattccagtgctaaggtgttgattctggtcatgtgcctttgactcaacgaaaccaactctcaaggctcatgattatttagcagcagtgttttctgaattaataacaaagcaaacacacccttcttttcaggacgtggcatcaaagattatgtcattttcccagcat

SEQ ID NO: 369207 - DNA, 300 bp, Zea mays
atgacgcgtgggcggacgcgtggggttccaaactcagctcgggggaaacgttctaccagaagaaagaaagatgagaatgatgatatgtgtgcaatggatttgctcgcaactgtggcaggaaagttactagcagatcaggacaattcatctagcgttcctaataccagtgcagcgaaagctaaaaaaaggaaatcagttaaggaagaacactttgatgaaattccgcctctaaaaaatgtggttatggagaaagatgtgggtttctggtagcctcagtgccttccctaggcaagctaaaaa

SEQ ID NO: 369208 - DNA, 483 bp, Zea mays
  unsure (1)..(483): unsure at all n locations
tttcgaattcttcccccctctccgatactcgacgcgcaccgatgcgggcgatgtcgtcggcggttaatggtatgctgcggccacggctgctcggggcagcgcgcgttcgcggcggaattttttttgttgcccgttcttcgttctaattcttttttctttgagttgtgcccagagatcgaaaggtgcgttgatttgatttagtttttttaattacncgagcgcccgtggtaattaattatgtacgtacttatatatatatacattacgccgaagaggaaggagcactttgtataagagaggaatggggaacgtacttatgggtggggggccagtgtgtcagcgtctgcctgtctgtactgtacatggcttataggagtcacatgcagagagggagggccctggctttgcggtggcattcttttggtacatggatcaagaataaattgaatttgattcttggtgtttggaaagaggtgtacaccc

SEQ ID NO: 369209 - DNA, 240 bp, Zea mays
cctcgcgatcggcgggccaacgcgggcgagccggggcttctgctcggcgccgagcgcctgcccagccgcgttgacggaccacccattccacaagaagcaggacgctgtctggccggcggcgttgcctgaccatcaattacacaagaagcaggacactggcgggcctgcggcggtccttactgtccacccattccacaagaagcaggctaactctccaacccactggcgttgcccgaccag

SEQ ID NO: 369210 - DNA, 362 bp, Zea mays
gggcgctgctacgcctgctgcaccgcccgttattccggtcgacccacgccttctttggctcgatggcctttatagttttgagtcgtccattgaccttgggtgacgtcggcgccacttctgcgccccgcgactcctcgcgtcttgtgtgagtgtgagtgctacaagcaagcgatggacatgaacgagagcggcgagacagggatggagcagggcaacgcgtcctccggcgccccggtggattggcagactcaattcaacgccgccgcgttctcgtgcgcgccgcagcaggttcccatgatggactccgtcttcgcgtccgccggcctgtgggcgtccaccttccaagccatggcgctttccga

SEQ ID NO: 369211 - DNA, 195 bp, Zea mays
tcttttgtattgtactggcaactgcaagtaggcacacaactctttctgctcatgaaatattcgcgccatctggagtttaggtttccagaaacatatggtatctaatgctgctcggtttctctttctggttgtccgatttaacgtcctatctattgtatatatatcttgtagtgatgcaaagtttctaatgatctc

SEQ ID NO: 369212 - DNA, 550 bp, Zea mays
ccactattggggagaggatgctgcgtccgcctgcaggtaccccggacagtgtaccggcgggacccacgactcctctgtcacgcccttgtacccgtcaccgccgccgctgctgctagggagcttccatacgcgcgcgcctacaacgagagctagcagcggtagcggccgttatcttgtcgctccggctccgttcgtgtacccaagtcccagcctagatgccgcagatggaggggtccactgatcagatcgccgccggctggttcgctaaggagccggcttccgagcggcccgtgggcttgccgaggaccggctcttccagtcgcctcaacgcgcaggcgccggagttcgtgccgcgggggccgtcgccaccggcgccggcggttgtgctgccgcctccgccgtaggtgatccgcatgtttcgccgcgccttccccgtcgacgcgtgggggcttctttttcgcgccgtaatcccggtcgtttcgagtactatgcgcctatcgtgaaacgaacggatttctgccaaggagccacatgcgccggatctggaagg

SEQ ID NO: 369213 - DNA, 387 bp, Zea mays
tttcttcgcaggtggtaccagcgaggtggagcccggtcgcatcccatggaggacaaccttccaattgatccagggcttgaggcacctacacagtgtattggctagcgaaccgtgtgctattatccactatgtagtaccctcattcaaagggcgcatactcacttattggatacaaattttacccataaaaagtttaggtaaaaaaggtgaacagcaaaatagaattagtcatcatatagaaggtacatttacccctgttggcatttggattgcagttcattttctatttcttaaattggacaacaggagatcatgtatctataacaaaatataaagagccatttagttaaatgcccaaggtacccaaaagggagagaaggtggcttt

SEQ ID NO: 369214 - DNA, 572 bp, Zea mays
actattaggggggctgctgctcctgctggtgccgccgctccagttactgccgggtccacccactcgtcctctaccctgcagatgcaaagaggccacgctgaggtaagtctacgttcatctccatagatattctattacttgttttacaaacacctccaccttttcttatctatttgactgtttgtaattattcactatttaataaagtaattaaataggcagtttttaacttaaagcatacagatttacccagaaaaagtttaggtaaaaaaggtgaacagcaaaatagaattagtcatcataaagaagttacatttacccctgttggcatttggattgcagttcattttctatttcttaaattggacaacaggagatcatgtatctataacaaaatataaagagccattagtttaatgtccaatgtaacctagagggggaagatgttgtcttttgaattgagtcgggatcagaacttcagaaatctctcacgttttctcgatgtcaataagagtgagctgtactaatgccatctactttaaacctaccattgaaattttgaatagagctag

SEQ ID NO: 369215 - DNA, 78 bp, Zea mays
tctgcttctcctccccctccggatcgggttcgggttcgtgaggatctccggggctcgggtccgcgggtgagcggaacg

SEQ ID NO: 369216 - DNA, 97 bp, Zea mays
tgcgcgttcttggcgagacgaagggactagggcgcggacaaagaatcagcatgcatccgagcgcggtcagtttcgactccggcgacgggcggcggcg

SEQ ID NO: 369217 - DNA, 363 bp, Zea mays
tcttgctgtccctccgttcgagccgtcgacgccctaaccctatcaccttctggccgcccaaatccctttcggctcctgccgccctctgtttaaggcgcagaccatggagtcgtcggttatggcggcacagaccatggagtcacaggctatgatggcgcaggtcttagtctttaggccatggagtcgcagtcaggcgttcaagatgctctgagacttgtgtcaggttcttccaacatgcatgatggattcagtacaccaaaaaaattaatatccttctgacatcgctgtccatctgtgtacctgattgggatgactaattgaagccagttattggaaccgcatttggttctcctagaggaggtg

SEQ ID NO: 369218 - DNA, 394 bp, Zea mays
tccacgcgtccgacacagtagagttgattttgcaaaccgagaactgttttctttcatcatataatcctccacgtgggcagaataaaactgagaagagtttgccgctgatatatcaaggctcaagtacctgtttttgtttggtaaaggaggtaaccgatcaatcgtatttacaatgtgacaccacatcaatcataaaggaggtaaccaattttcctagactggcatttatttgtttttgtaccaacttgcagtactgaaaaaatctttattttacttgaaagtggcatgcatgttcaagtgtcactgtatttagagatttggttatgtatagtcaaaaagtttacttgatttcaatacataaaacattgcaatacataactcagtgtgcttgatt

SEQ ID NO: 369219 - DNA, 174 bp, Zea mays
tttattgaccgagcatggctgagctcccgtgcaccgggcgactggacgtcctttcaaccccgcagcacgaatagagctgaactagcaactcaaacacacacacgactgaaccgagcaccggacgccttgctgaatctgaagaaacacccaaagtaccacgaggagtgaagaccc

SEQ ID NO: 369220 - DNA, 271 bp, Zea mays
ctccactccaagcagggctcctccgaccccggtctttcctcctcccttcagcgcatcgcacccacagcgcaccgttcttggctggcctgctggtgccgacagccaagtccgcaactgccaaagatggccgagctgctcccttcctcccgtgcttactcagcgacccgcgcggggccacctgcctgcccgaggggtaccgtatcgcacgccgcgtgtctgggctcggcgaccacgcgtcggcgtgacctgggcgacgtatcatctacgccta

SEQ ID NO: 369221 - DNA, 291 bp, Zea mays
tcgttcgtcatctccaggaatgacggggtgacgaatccgctccgtaccagacatgacagaggagccgacgccgcgacccacaggcctccgggtcgctgaggaggggatccagtgagccatgtcgaccgacgcgcccatgagccccgagctcgtgcagttgtacggcgagattcaggacatattgcgggcgctccagactgggttccagatgatggacacgatcaaggactccagcaggcagtccaagcagatgtaggatctcacggccaagatgatagagtgcaagcgctt

SEQ ID NO: 369222 - DNA, 55 bp, Zea mays
tccacaccatctattagtggagacgttaggtttcatcgaacgaacgggaggtgcc

SEQ ID NO: 369223 - DNA, 110 bp, Zea mays
tccagggacgcgtggacgggagttggaggccgctggtatcagcagccaggctgagctcctcatactgaagcaggactactaggacgcccggacccgcgaggagagcgtga

SEQ ID NO: 369224 - DNA, 399 bp, Zea mays
ttgacctgaatccaccctcacccagcggtccccatggcctccggcgaaggtgtagttgatcaaccgcctctcttctgttgatcctcgcatcggccaactcccccatctccgcaagctctcattccgccagaacctcctcgacgatgacgccgtcgcgccgctcacgtcctgggaggctattgccgggttgaaggagttcgtcattagagataacaaacttacaaggattcctgatgctggcatattcaaggatcttctggtgttcgatgtatctttcaatgagatatcttctttgactggtctgtccaaggttttcatcaaattgaaggaactttatggttcaaaaaatgaagttgcaaagatggaagaacttgaacatttcatgcgctggaaatcttg

SEQ ID NO: 369225 - DNA, 461 bp, Zea mays
ttctgtcgcgtgggcgcgcgtgtgtctctctgcggagcagcagagcagactgccctgctttcccagcttttatatctggcccgcgccgggtgccctgcctccactaaaaagagctccccagctccaacactctgtagactccggcacttcgcgagccacccgccgccagggaaggcagcagcaggaggtgcctagcaaccaaccagttagcacgtaacagcccagtttggcaggagccatatactccaacttcaccggtcgggtctctggacgccttcagttctccggttccattcgccgatcgatgagggacgccgcggcgggccgggcggcgcccgggccccgggccgcgacaagaggaggaggagcgaagcccggggcagccggggcggcgcccggcgcggggtgcaagccgctgcggcggctgtgcgcggcccgttgggtcttcgcgcccttacttc

SEQ ID NO: 369226 - DNA, 263 bp, Zea mays
gccaccccgccgccaggaacgcagaagcagcaaggggcctagcaaaccaaacccagtaagcaacgtaacagccccagttttggccagcagcccatattaactccaaactccaccggtccgggtcctctgggacggcctccagttcctcccgttcccaattccgtccgatcgaatgaagggaaccgcccgcgggggtcgcggggcggtggcccgtgccccgggggcccgcaacaaggaggagggaggagccgaagcccgggggc

SEQ ID NO: 369227 - DNA, 461 bp, Zea mays
tggacgcgtgggcgcgcgtgtgtctctctcctgagcagcagagcagactgccctgctttcccagcttctatctctgcccagcgccgcctgccctgcctccactaaaaagagctccccagctccaacactcgtagactccggcactccgcgagccacccgccgccaggaagcagcagcagcaggtgcctagcaaccaaccagttagcacgtaacagcccagtttggcagcagccatatactccaactccaccggtcgggtctctggacgcctccagttctccgctcccattcgccgatcgatgagggacgccgcggtggtcgtggcggtgcccgggcccggggccgcgacaagaggaggaggagcgaagccgggggcagccggggcggcgccgtgcgcggcgtgcaagctgctgcggcggcggtgcgcggccggctgcgtcttcgcgcccttacttccggcc

SEQ ID NO: 369228 - DNA, 564 bp, Zea mays
tttttgacgcgtgggcggacgcgtggggtggtacatcaatccatccattcctgaggcagaaacccttatgtccagcgcacgcggtgatcataaaccagtgaagtggaatgcaactgttacttcaagccagcttatatctcctgttgccgaggagcaaaaggtgtcgtatatcaagtatctccatccctttgaaaacaagggaaaggagttcttggttacagtcactataagaaaagttgacagcaagtggtggtataactcgtgcagaaaatgcgcctgcacagctgtcactcacggagactcttacaaatgcacaaaccgtgattgcgctaacattgctatgcccgtccaaaggtataaaatatttgtcactgcaggagacgagacagctgacacagacttcattctctttgggcgcatggctcaaagaattgtcaaaaggccttgcgatatgctcatagcgaacactccatcaggcttcattccagatgcaatcacatagctgcttgaaggacgttcattggaacgttagctttctggcacacattaactctggaacgtctg

SEQ ID NO: 369229 - DNA, 198 bp, Zea mays
actatctccaacaggggagtccattatgatgcccatggggaaccctactacgcgaacaacgcggtttacaatatagaacaatgaaagacagtgttttggataaatttatagataaactggtggatgaggtctaagagcacaggacagctgatcctacattaaatgcagaagggttggttctttcgagaattacatgta

SEQ ID NO: 369230 - DNA, 234 bp, Zea mays
tgggtaatttctttttttttttttttttttttggggaattttaaagagttttgggaagtcaataatactggaaccaatgtataacgacagaacattttttgcatatgttagcactggccgatccgagtaatattactagtacataataactggccttaaaaactaaaggccacatgcgaagggaaacaccatgtccaaaccaagggcaacttcactccatggaagaagaggttg

SEQ ID NO: 369231 - DNA, 257 bp, Zea mays
  unsure (1)..(257): unsure at all n locations
ttntttttttttttttttttttttttttttttggggttttttttattttttttttggttttttttttttttttttagggccaacatcgccttaaaatttaccatgaccatttgcccccttatgaacattttttaagaggccaagataaaacccgggcttactggtcctatcctggcccaagggtaaggggaccttacatgtttaaaaagggttttttgggcccaaaagggcctgttggggaacaaaatttttgaaaa

SEQ ID NO: 369232 - DNA, 384 bp, Zea mays
  unsure (1)..(384): unsure at all n locations
ttnataatttcttttttttttttttttttttttgggttttttttgggacaaagggctaggtacatttatatagccgaagagttgcgccactgtatcacaaacccgaaacggatacatgctccgaatgctacctagcacctacgggggggggaattttacaaacgagagggagacaggaactgtttgccgccggccggagctgtcaccatggaaacacgacatttaattccaagtaggatgatgcgaatgcgtatgagttatgacatctttccatttcttctttaaatgtccggaggcttgattgttgtcgagctttaagacgtgaaagcctttttaccgttggcaccaatcctaacagatcaacaaacctggactcccattaat

SEQ ID NO: 369233 - DNA, 337 bp, Zea mays
accacatacagaggcattattcgaccactaccaataagatgcagtgaaggcagaacacaaggaagaagtgaagaatcaaaaccacaaaaaataaaaccaagttcagtcgtaggctgcgcctcttgctgaaatcagcctgactaggttccttggatggccaactacgtgcagctgaaggctcacacttcagtcgcctcaatccccggcatgcagagtagatttattttcatgtgagtgctgcaattaaaatagccgctcttgttctatgacaaaaatcaagggccttattttcatgagctgcaattgttagtgctcagtacactcaaaccatatcaac

SEQ ID NO: 369234 - DNA, 228 bp, Zea mays
catgcatgtaggtgctagctacattgtcgttacgtcagtatatccaaacaccaggaggcggaaagatgcaatgtaaggtaatagagtattacattgaaactgagacagaatgggaatactgacaccttttcaaaccaaaatgtaaacctatgccagtaaatatacatgttcattgcaacctcagggtgtatctcctaaaaagagaattcctcgggtaaacattggcca

SEQ ID NO: 369235 - DNA, 323 bp, Zea mays
ggggggaaatctccccaaacagtaaaacggggtttttatggggttatttacttattacccaagcctgcaagcatggcaaaaatttttttccaacggcccctacagttgggtcgcaggggaacccggcccatgaaaaaccgccccaaaaccggaaaaggagggttcttttgagacccaaaaaatggtttttaaaccccaaacattaggctgaacttggggggcagggggacaaatcccatgggaactcccaacgggacaccgaatttaccatgcgagattgaaaaaggccccctaaactggggttttttcaaaggaaggggggg

SEQ ID NO: 369236 - DNA, 242 bp, Zea mays
ttttatttttttttttttttttttttttttttggtgtttttttttaattttttttttttttaaggggcccgaccaaactttggatgcataggccatacattacaatccaagggcccccatgggtaggggggtccttttttccagggggggccataccaaccagacacagggactcaaactggtccgcccttccaccttggacctttacttttttagaccgcacattaaacagcagttattgg

SEQ ID NO: 369237 - DNA, 470 bp, Zea mays
gactcaagccttgggcccacttccattcacagaacagggaataaaatagtcagagggagggaagttacatcgacatgcttaatctgtctccatctccaaatcgcaaataataaataagcacgtgtttgctttctgtacatgaaaaccactccagtctgagatttgcatgacctgatggtacatcaatgctgcgcttgcacattcaccttgttgtgctaaaaccaaccaaacatgtaatatactgactacagcaatacaggtcattgctgcagccttgtagcacacgtaggaaacagccagctggccgtgcttccaagttgcccatttttctggcggtcctgataagcattccgcttttatgatacttcattcatggccaacaaacatttcgtagatcaccttaatcaacagaattcgaggtcatgggctttccatcaatgtgacatagcggtgccccctttaatgatctt

SEQ ID NO: 369238 - DNA, 194 bp, Zea mays
aacgaggaagggggtcattcagttaaacattttacaacatgggtcccgggcatccaaggggttccttgggtatttcctaccccaggccaaaatgggcccccgattttgaacccccccactgggacttggcaactttctaaagcctcccgtttatgcttatgtctccagcaaaagtacattggcgcgggggggaa

SEQ ID NO: 369239 - DNA, 378 bp, Zea mays
gaataaagttaatttttagatttaaggctgtacatctggaggacaaaccaagtgtcggaggctcccagaagaatctcatacatgagaggctttacatgtggactatggagtaaatacaaacatacactaaaaactcatcaaatctgctaattatatactctgtggtacaacacgtatcctctttgaatatctttgcctgttctattttaaaacctgaataaacatgttttgaaaatgcacatttcagtgagtgttccctcttgtatcctcatgtaagatggaaaactacataaacttgtctttttgctgtcagtttacccggattttcactgtttggtgtatgtcaatgggttggaggaaagttcaatatatgataac

SEQ ID NO: 369240 - DNA, 275 bp, Zea mays
ctctaaaccggggaccaggaaaacttttcctgtcgacgggtagctcggcgggggggcataaccctgccggcaaccacgggtcagggctaccatctacgtagccggggtcctcctaccttgggcaataccgcccttgacatggagacatttaccctgggggctagtctggcaatcatattttcccaagggatttttattttcctaagaaaaattaatcaatttttccttaaaaaaataagaatcttttgtaaaatagagttgccaaactagcgctg

SEQ ID NO: 369241 - DNA, 303 bp, Zea mays
tttttattttttttttttttttttttttttttttttttttttttttttttttttagagaatgcctcacattcacatagagacccacattccacaacacgagtacatgggtgaaggacgtacttttactattaccaagcagggggtgtttatttacacacacccaaacccaggacagaagtttagggggaaccccaaatacacaaaagcctcattggtggttgattggtccaaatccgaacctttgcaaaatcaagctccaaatccatttgacagctggagggcgtgcccataaaacgggatgt

SEQ ID NO: 369242 - DNA, 321 bp, Zea mays
aaatcaagtcgttagtcctcggatttccatttcaagattcgggaaatgggatgcgtagttgaatagtgtatcgatccagtgtgcattgctaaaaatccggacacaaaaatatctatagttttctgtaaaaaaaaggagaaaagaaaataaaaaaaatatctctacagctgttcttcccgagcgctcacctctgcttccttcacccggtcgtcctcatccgctccggttgctgggaacaaaaatctgtccgccggtggccgtgcttatcctcgcagccgccgctctgctcaagatttttctcaccgccgttgcctcgttccc

SEQ ID NO: 369243 - DNA, 337 bp, Zea mays
aaagaaagggtcccccgggaccctttttatttatccttgaacacaaaaattaaacccccccttttacccttggggggaaaacccaagggcccaacatgatctcacaatgcccactaaaaaaaacaaattttggggcccggtatgaacaacatatttttttagcccctttttccaaaaaggcgctcccctggaggaagaacatttccagggggaggggccaagggtcggatgtttttttggggggaaaaaaaacccattttttgggggtgggctaaatgggggggggccagtttttttgggggggcattaggggcctttggaacacctagggcccccc

SEQ ID NO: 369244 - DNA, 351 bp, Zea mays
ggcgggcgccaaacttggtagagttgagtaagaatgtgacataggttgtgttggggacacaaaatgtgctccagcaagctttgagaatttaaccatattggtgatttctgcagtttgacgcaagccttatatagtagtagtagagtaaatggggttagctggtactacgaggtttcataggcactaaagaatgttgatggtactccatggcctgtttggagagctggaattctcacaagaaaacagtccaattctggcaggtcttgaagaacagtatagcctttactgagctcgggccttgcaaccacgtgtccacgcttcactggcgacttaacttacagtaaataaatt

SEQ ID NO: 369245 - DNA, 289 bp, Zea mays
ggacaaaaggcatttgatagggggaatcatctaatatactgtatgttaccaccactttggagtttgaagtgcctcaatgatgcaaaatgtcaagacaagcagcaaaccggaacttcattgtaaccagttagaagtacctaaataggattgactctcataacatctcatgaaactacagcgacgacgctcgaggactgtcagttccaaattcctccctcctcatccccagaggccacggtcccactccaccatagcaggtaaactcatttccatgtgggaaagcttggga

SEQ ID NO: 369246 - DNA, 436 bp, Zea mays
gggcaaaatccagttgtctgcattcctcctgccatgtttatccatccaagaaatccaaactggacactcgcatgcatcccatcatctgcaattctatgtacacagtacacgtacaagagaaagagagagcctttttccctggatgatggtgatgatccatggaccaggctcccaaaactagtcctgatccagcgctccaacctcccggctctgctctggtcttgttctagttaaccgccggtccaaatttttttattattattactacgatgctagtactatactgttactactagtgccgctaggctagctctacacggtacggtggcaagtcggcggcgggtctataggtggccgttgtcgccggggcggtcgccggccacggagacggcggagaggcggctagggcggggccggccggcgccggcgccgacgc

SEQ ID NO: 369247 - DNA, 368 bp, Zea mays
cgaaaatcaatactgatgaggggaataatataaaaaggattcttacagtttaaatacaaaacgtttgtcccaaatagaacaccaacatactgaaggcgttctatactagaaaggaaactagattcacattgtgaaaatttcataagaatcagattaccatctgtcacctgacacaccaagcctagtcaatggaattagttgtatggttatctggttaatgacaaatggtcaagtacaacctactacaagacagcaaccaatggatcccgatcccagggcagaactccccagtcgcatgaatacacttgacatagtctgcattaagccaaaaacgactcattgctggcaaggacccttccctgatgata

SEQ ID NO: 369248 - DNA, 354 bp, Zea mays
ctgaaatgacagcacaggtttatagcttaaacaatgcttcattgcttctggagaatcaagaggaagtcgtcagaaataataataatgtgtgtggttcaacaaaccttcctggtcacgccgcgccatgtaaatactcaactacagtgatgatgatacatcgaaatgggtaactagactcttgcctctgactcctatatagaggtccaagtctcagagacgatctattctcattctcaatagtgcaagggactgccagacaaggattggaatgaacaaaggaagcctttattctgggcctcaatgatcctgactggcataagaacagttcagtgtccatccaattacttcacacat

SEQ ID NO: 369249 - DNA, 194 bp, Zea mays
aaaagggccctaacaggacccaaaaaacataaaatttcaaacccaataataatcctggaagaacatgtccctaagtttaaaatatccaagcttccgggcccactaatggactccaaagtttgcaaaaggggaaaagttaagcacggggcaaattccttgggcagaaaaaatgggggttttaaatcccttggttt

SEQ ID NO: 369250 - DNA, 426 bp, Zea mays
  unsure (1)..(426): unsure at all n locations
tttttntttttttttttttttaagttctaggtacggtgctgttttaaataaaagagtcaaaacaaaaatttaaataaaacgaacagtcaaataaaatatctaaaaatcaaaagcattaactaaggtgaagcagcacagatccgagatttctgagagagatctttccggccgatcgatgctttccgtgtcccccttgcccgccagccgccaggtgtgcctgttcgcgtgcaccgctgctgccggaatcagcgggcaggcgtgagcatgtagcgatctcttcctttttgttggctttcttttgctgccggcaagagacggcggctcggggcggcggttccgcgtctgcttccggctgcctcgttttttatcctcaacaggccgggcaccagcaggttgcatctgattttctggtcgtgcaagggacac

SEQ ID NO: 369251 - DNA, 334 bp, Zea mays
aacaggggcgtgcatgaattatattttaatcagtaaacagcagatgcgcatcagtcgacagtttttgctttcttgtcagcatttgcctcttatatgcttcatcgaagatggagtgacagaccccatgcacgtatctagctcgctgctgacgatgacgcacccggagtatcatcctgagatatggacaccacatggcgaagggctctaatgatttctctaatccgaggccggccaacaggttctgtcccagtgcacctatccaccacagcaagagcctcgctgagcaccattctggatacagagccacgtaaccttggatcaagtacttcctcaa

SEQ ID NO: 369252 - DNA, 147 bp, Zea mays
acaggcaaaacgcgagtttgctgctggctgttgtctgtttgttcctgttcctctctgttttctcttgctctgtaacctggacctggtacgagtttgctgctggctgctgaccggacgcgtgggcggacgcgtgggcggacgcgtggg

SEQ ID NO: 369253 - DNA, 286 bp, Zea mays
gggctcactaaccggtattacatatttatttcaaaagaaatactaataatacagaaattggctcaaagaaacaattcaattacaaaagaaaatttgtatgaactggaactttttgggaggctgatatctatatcatgctctattttaggcaacgcaactcaagaaatagaattgaattagctgggtgactatagcaatgggcctagaacaaatttcatagactatacgcatatggaagaaccactatgggagcttatgctggggaacaggataacatttttttcct

SEQ ID NO: 369254 - DNA, 252 bp, Zea mays
gggaaaaggggcactactaccccccccaaattttttatacaaccatcacaaattatgtattcatggtacaaaaaccaaaaaaattaaacgaaatcattttacaaggcttttaaaaaaaacccccccagccccaaaaaatccttaaaaaaaagggaggggcagggccaccccataaccaccttggataaatttgggggaagggcaggcttaaaaaaaactggaagggacctgactggccttaaaaatttccaa

SEQ ID NO: 369255 - DNA, 223 bp, Zea mays
ccggggagtttttaaaagttggtgggttttgaattaagaaaagggtctagaacctttacaaacacatacaaaaacagaaaacagctcagtttactttacaaaaggatgcacaggcctatgaccaatacaaacatgaccaaaccaagcttaagcttgcaaatgttgcccatccggtacaatggcaagaagttgggcaattcctttagcccctgccaaagaacat

SEQ ID NO: 369256 - DNA, 186 bp, Zea mays
ggaggcaagaatttaaaccaaatatttcaactgaatacatattgaccataactaagttgaaaagaataccacagatcgttaaccaagtagagtagtaacaccaaccaccttgacaaatttccaggtaaacccaaaaccacagataacttatacgctttatttatgcatctcaactttaagcacacg

SEQ ID NO: 369257 - DNA, 166 bp, Zea mays
atctacaagggaatggtgtgcagtacaataaacaatatttgacgaaccaatacatgatcattgatcaaaggttagcaacacaccaaccacaaagccatcactacgcactactttcccccttttataatccgttacaacacatgtacagcttccatacctacagcaa

SEQ ID NO: 369258 - DNA, 366 bp, Zea mays
gtattgataatagatgggggtacaatatatagagacaggaaaccctaaccctaatgggctggcagcccaacagtggtgccggcccacacacactcacacacacatagtctaacaagttctaaacataagcgagtaagtatgagaacagggggagaatgttaggtttatctcatgtcgaacttggtcagaggactgagcccgactccacctcacgccctgatcgagggggaaacaaccttttggttgcgaccctttcacattgcgtacaatagaaggggaaaaggctggcatgcgaaccaacattcgctgatacctcctcgtccctatggggtccttcaatcccaatggtatagccctagtttttcc

SEQ ID NO: 369259 - DNA, 178 bp, Zea mays
aagtgcacaatacagggctacaaacattaagtgtggttaaatatcatatataacagttatgcataaaaccggggcttgcctttaatttaacacttaggtagtgtttgttgggggaggtactcgtttggcgagcattttactgggttagtccaccattctttaggtcgtccaccaactg

SEQ ID NO: 369260 - DNA, 193 bp, Zea mays
caggaagtcaagggctgcattttcccaatccaaaagagaccaaatagtgggtattattcatgatccatcggacaccattttctagaatagaatagggtgatgaccgggtacacaaaccaggaggggccttgtttacaaaacaatttacaatacccagttggttggcaaagtttttttttgcgccaagggtttg

SEQ ID NO: 369261 - DNA, 306 bp, Zea mays
ggaggtgaaatcccacgcgtgtttggatgcatatatgcgggaaaagacagcacaaactttacattactgctcatgtggtggtggtcacttcgctttcggtatccattgtttttttttttttgcacacgtcacggggctcacggctagtggcagtaggctgctgctgttacggccgatcgagccggccaggaaggcgcggaggcgccggcgtcgttgacgctcttcctggcgagccccaactgctgctgcgagcgcttgcagtaggcgatggccccctggatcaaccccttcgactccgaccgggcg

SEQ ID NO: 369262 - DNA, 212 bp, Zea mays
ggcaccgaaaaacagctaatttgttaatgatgatccacgttttatcgcagggcaacatgcaaacattaggcccaactcatgttccagcaagattctcctgcatcgggttctactaggaaccccctactaggatgaaattttaaatccattgggcccgtttccgggaccctgggggcaggtctaaccatccatgtcctggggggccccaaaaa

SEQ ID NO: 369263 - DNA, 391 bp, Zea mays
tttttattattttttttttgcaccttacaatatgggcgtcctcggttcatgttcatcccgttctttaaaggtccaatacagaggacgcagatgtatgtactatagatgtaccgaactacattaactgaattaactacattaatttagttattaactaaattaactaaactaggcagacaatggggcccaattgcggacctttacaccgttgtccaccctacctctcaacaaacacattattctctctctctctctctcgaagctacaatgccaaacccgattaagacttgttgggtttgaggtggattcccctttgatccacctcaaattgaacaagctcttaagatttcctaagcagaaacattagcactgctcctgagccctgattgcc

SEQ ID NO: 369264 - DNA, 390 bp, Zea mays
agtaaacaataaacattgtgttaaacaatgctggaatccgtccaccagacaacagcattccctcatgcacatttagaaacaccgacgttctttctcgctatacaaatgaatataagttactactatcattatattatacatatattccttacaacaaactacactaattgctaccaggagattcaaaaaataaaataaaatacacgtgaaacctacaacacttcgatgcgaccgcgagatcgcaaaaaactcagcgcttcactgacttccagttagctctcctgaacgaatcatcgcgataatagggcaactggaccttgctaaacttgtaccaagagcaccagaagaagggagaccaaagaggcaagcagtcttagctttaggttcttg

SEQ ID NO: 369265 - DNA, 371 bp, Zea mays
ggaaaaagggggcagagttacatcattcgtcaagaacaaggacaaagtttagccagacactacactagtttaccttaattaaaagctgaaacctcaacagaaaacatgaattgacgcaggtaccgggtgttctttacatggtcaccctgatccacaaagttgtactacaagagtccctgcacgactgatagcatttacgtgcatgattacacatcaggcagggcggtccagcattattccagctacaaaatcccaagcaccatgtcggtagcagtgacttgatcaagccagtgtgatcgaagtaagaatattgctgggtgtctgagtggttcataaagaaaccttttcttctcttttctttcttttgcaag

SEQ ID NO: 369266 - DNA, 424 bp, Zea mays
gggaaccgataaatatttagatccacgtaataaataaaagagaaactacaaaaaatcgccgtatacagttcttgcaggttacaaccacgtatattatcggttcaaaaacagaacctctgtaatctatgtacacgctgtcagcgtgcgctgtagagtcctcctgtcccgagctgtctatcaacagaagcgcctaacaaaaatttttacacggcacgaagccgtcacaggacgaggccgcagtttgagttgacctgcaagcttcatccgcagcccctcagaatctcggcgagccccttccgctgctcgtccgtgaggtcctcggggaacacgacgtcgaacttgaccacgaggtccccgcgcgcgcccttggccccgccggcgacgggcatgccgccgcccctgacgaccttgacgtacccggggc

SEQ ID NO: 369267 - DNA, 484 bp, Zea mays
cgcagcaaaaacagcagttttcccagttaataacttgtccaaagcgaacaatacaggaaaatatccaagggcattaacagccttttacaacgatgaaccaccgatttatggagacctaagaaatgccgactaatcattcaggactcacaaagtcaacatgctgataaatactctcaactgataaacgctctcaactgctgacacagttagccgcagcatattttacaactctagattactcaacagcagccatctcagcgaagttatgagacagcacatgctaaacctattttccaagctaagctatggaaaaggtcaaaacttatagtggggctgctagaaccccatgtcaatcggccaaactatcaaggaagctctgcagctctctcaggccttctgcagatatgctcctctgtacacgaggcctaggagttgttagaacaggaggcggcctagagttgaagcagacgacaaccacagaaag

SEQ ID NO: 369268 - DNA, 431 bp, Zea mays
  unsure (1)..(431): unsure at all n locations
agcgaaacagtgttgctttattaataattcagatcccgtttgccaacattacatgtaaacccactcctctgtttcaaaattcgacgactccaaactcaaattatccgtcaaaagagtagcaaaatcactggttccaaccaggaacagctccgaacatgccaacccacaccccacacaaatagcnnnttattctctatttccacaccaggaacacaacttcagattttagaatcaagcacataagatttagaccatattataattttcccaaccagtaagtcaccagtatcgggacacctcagtcttgggaggaggtgaaacaacttcattaacaggtggtacaagaacatgatcttcaactggtgccatttcctcttcaagaggagcaggctcaagaatttcctctggttctttaggtttgtatgtaagaa

SEQ ID NO: 369269 - DNA, 231 bp, Zea mays
aaaaaaaaacttaaaccttgggcaaaaccgggcccaaataccaaaaattttttacctggttaccaaaaaaggcattctggacagacctaacccaaggggggggaaaaaaaaagggaaactttggctttttggacaacccttggttttataagaacccccattcccagtggaaaaggtcttcccattttttgggcccccaggtttgggtggcccgggtttggtccccgggcc

SEQ ID NO: 369270 - DNA, 326 bp, Zea mays
atctcatgaataataaacacaatggagttcatataagtaggaatggagtacaaggttagccagtgcctagccaataccactgccaaggcccaagagaagcaaaaactcttggtgtcacaacaatgcagcatgtactacaggaatatggctaagaagaacagacaatagatatgatcggagctgccgtacaaccttgatgtatccagtacacaacactactacatttgtagtatggacggcatgtacataaaaaacaataaaatgttgtgatttgtactttcttcaaccaagttagagcgatttgtacttttcgataagatgtgatg

SEQ ID NO: 369271 - DNA, 396 bp, Zea mays
tctttttttttttttttttttttttttttttttttttttttttttttgtttttttttttggggtaaaaaatctttttatcggcccaaccatataaattccgtcgcaatcggagtccaaatgcattttgggcgttcattttagtgcagactggtcctgaaccccgagatggagtcgctgccgagtcggacttgatctccttcctgttgggggcgcccttggtcctcctacttaacaccttggcctttcccaaggccttggtggttctttccaagggtcctaatcatcaaaacatccatggccccaagcgtaagctttgaaacacaattgactagggtagaacgtacctggagatttagctgtcatgcccgccatcgggttatcgggccattcattgg

SEQ ID NO: 369272 - DNA, 356 bp, Zea mays
atgtccagcctagggtgtgttctctacatcgcaattaataatggtgttacaaataataattttgttacaaaatacgtacaaaagaagaagacgaagcaacaaatccaacaatataccgctgcatttgactcactcatgcacaacactgatcacgcctccatcgtcgtcagttgagttcaaaagagcacatcatcgttgtttgtcgagctgaatccaccgtaaatgtctcccatattgagcaggtgaaagtagccactccccgcgatgccggtggtggcgggcgcggcgctgtggttggggatcctggagcggggctggtgcgtgggcatggacatgggcatgggcatggacatgga

SEQ ID NO: 369273 - DNA, 288 bp, Zea mays
aaaatcgagcggcatgttataaaatatactagagtataatcaccattccaaactagaacattttcatcgtagcatgtcatgttaatcggcagaagtaaccgccagtactggatatcagtcagcatcaccatcactgcgtactttgagacagagatgcgccttcacaggcttgtggtcggagctccggacacagtcgagtgattcgtacgagctcagcactgcatccaggcctgaagactggccaaccttgaacagtatcctgtccgtccacgaaggcactcgtacctt

SEQ ID NO: 369274 - DNA, 391 bp, Zea mays
gggatctatgattggcactactattgacaaagtggggtatgagattacaatcactcccgagccgtcggattttgaaccagcaatgcctcccaaatttgacaaggaggatggggattcaggcgggggagagagaatctggtacgtcgagaaagaagcaaaaaagtgcgacaagctcctttcaaatttgtaagatagctcccatgagaagctagatagggttctcatgacaaccaacccacttgtctctgtacaggctttggatagaggcgtatcggatcatacgtccctacttctagatataagatcacccgctttcttgggaatacgtagaccgttcaaatttgagcttaactagtttactagataagatttttatgcttaaatttttatg

SEQ ID NO: 369275 - DNA, 370 bp, Zea mays
  unsure (1)..(370): unsure at all n locations
ttttntttttttttttttttttttttttttttttttgggaaatgtgagatgcgtatcattatattagaagtgttacatcatagtaagagatcaattgtacaatttctttgatcttggcttcttgttcgggggagtacatgtaagcctactgtaaattttttcaaccctttttctacaagattaccattaacttttcctcaaaacgggaaacagagaagcactaaccgatgcttgttacaaggatacatcagatgagctcgggtttttttctctctcttcaacacacacgagaattcgggcatgcacctattttctggccaagccatggaaaagactgttcagctcaacttaaaaaacctttgagatgaac

SEQ ID NO: 369276 - DNA, 447 bp, Zea mays
  unsure (1)..(447): unsure at all n locations
ttnttttttttttttggtgaacagatctgttttgggtttgtcaacaaccactagggtaacataatctctaattcgtataaatcaagtgctgtcactgtcagcggcctcttcatcaggaagtatcaagcggaggtcctcgttgtctctgtagacttgaaccaaagctgcagccttgtacgcgaggaaacccatcatccctggaagaacctcaaaactgaaaaagctattttggaagtgatgtgataaagctgacaatccataaatcacggcaggaattataagccttggagatgaaagagctagtcctgcaccacccaatgtcttctctattgtattcttcaaatcttcacttgtaatgccaattttcttcactttcttctttagaaaaacttctggaatatcttcctttgataggttatcagcatgttgatacagaagttgaagata

SEQ ID NO: 369277 - DNA, 237 bp, Zea mays
acgggtaccgaactaatgtcaccggggggtaagaagctacagcggaaccggaaagaaatgaaagcataggatacaacagcagcgaagcagcagctacagattatcacaaggaagctgctgaaacagattcagcccccacgcgtttctgagttaacaaggcaccagcacatggtgcccaatggcgtctcagctaaactcggttcttggacgaacaccacgacaatcagtgtttttgat

SEQ ID NO: 369278 - DNA, 255 bp, Zea mays
ggggtctgatccatggcccaagctcaacgggggcaaaaagcagttccaggttttgagctcagagttaaaatgtttaccagtacaaaaagaaatccatgcaggattcaggaaacaagaaacatatgtccatgttttagatggagtataatttatttaggatcattccctccatcccatgcccatgagtttgcaaacccacgcgtccgcccacgcgtccgcccacgcgtccgcccacgcgtccgcccacgcgtccgg

SEQ ID NO: 369279 - DNA, 255 bp, Zea mays
gggaagaagggctcaagtctgcaacccttttgagattaaattgctgcatcgttacaatggggtcagctccagatggattacactacaccgggggtttacacaccgggggggacttatgcccacaatacaacagcccatcctggacgatatccgccatttttttcgcattcaaaaatggggcgcgctcgccattgccgtcccccaatggggattttatttcgttattgctacggaacggccgccgttagccattag

SEQ ID NO: 369280 - DNA, 440 bp, Zea mays
  unsure (1)..(440): unsure at all n locations
ttnttttttttttttgatactaagcatataataggtaaaatcaatggtagaatacattggtttaagaagtacaggataaagcaccattacaatgatctgagatcagccctaaagttcataaatagtcagtaagacatgagcaggtaaaaatcgctagcatagaagattctactccaagcatacgatagaaaggcaactacaattgaaagccaacaaaatagagcagcttaccgagcactaatcctcatcatcttcttctgagctcccaacgtcactactgtactcgtcactactactgctcccaaaatcaagctgcacaggcttgacctgtattgtctctggtcccattggtgccactggtcgcactgaaacaggtgcctgcggcacaggggcctgtgcctcccgctcttcacccttgataccaggtagtatctatcaag

SEQ ID NO: 369281 - DNA, 317 bp, Zea mays
  unsure (1)..(317): unsure at all n locations
ttntttttttttttttttttttttttttttttggggtttttttatttttttttggggttttccttttttttttttttttttgggggggaaacaccaggtttattattcggggggttaaaaattacaaaaaacccccttcctgggttttggaaaaacgggaaaactgacacaggggggttttgttacaaaaacaccattattgaattttgcaacaggggaaaaactgacacaaggtggggggcccaattttttaggggacaaaaggggccatgcatagaaatcccatttttatttttcggggaagggcaaaaagggga

SEQ ID NO: 369282 - DNA, 402 bp, Zea mays
ctgcatagactacctaaagcattatggagaattataatggacgaattcattctacaaatagaagctacttaggggacaaatcaaattgcctactttgctaaccaaccagacatatgatcaaattaaaataattgtctaaccaaatattatatcctgaacttaaaagagaaagtaaatcttatgtgacagatttcagtagaccaggatctaacagcaagaagttgctcctttattccttctgttgtatccactttctatagaacatgattgattcgagcatttgcatgcgcttcaacattatcacaaagcatctactttgttgcatatgcaacatgacagtcagtggaagtgaattcctgtcagcatcaaacgatttattaacatatcaaagttatcaacaca

SEQ ID NO: 369283 - DNA, 296 bp, Zea mays
cagggagcatgtttccccgggggtagggatttttaaacgcaaaataacaggaccaaaacgaagcaggcgctcaggtcacacataacttgcactactatgaaaagtcactcctataacaatttgtaaaggcacaattttacacaaaaaataacttcacacatgagcaggaatgcccacagaaccaagaccccaaaaattagttttcacgcgatgcacacaactaatggtctatgtatgacagaggattttatactgatctgtcacactggtacagaaatagaagctctataagctta

SEQ ID NO: 369284 - DNA, 384 bp, Zea mays
aggaaacaatgtaatcttctatggaatgtgctttcaatttagacagtattttgtacactctcattacatgagatgacagggtaaactgttggcctgtgttccgtacgtcatttccattgcaggaagctctttatctccgctgaaggtgattgatttggatttagcttgaaccacgacatttgcatgaggctggttagttcggaagggattccataaagtcctgcacattatggaattaaattacattcaaatcacttgtatgcgctacatcctgttagaatctacgccttgggaattatgacaaggagagttcataatctcagaaccagaagtatccagtccatctgctgaaaaattagctgtttctcaactgatttgatgata

SEQ ID NO: 369285 - DNA, 212 bp, Zea mays
ccaaattaaactttattgctcaaacgacattatgcgtccttttaaaaaaaaagaaaaggggtaaatatcagttctcccacacatcacaaaaacattaaggcatttatatctggatatccgaaaacataaacccgagggacaatagccgagggctaatgggggaaccaaatggaaaactgcttaacaaagaccagaattcccaaagaaggaaa

SEQ ID NO: 369286 - DNA, 136 bp, Zea mays
gggggaaaaaaccatggtgggatatcttcttggagggggtggttctttgaaaggccttggtcaggccgattacagaagggaatttggccatttggcggggaaacaaccccaaaaatggggaaagaaatttgggggg

SEQ ID NO: 369287 - DNA, 459 bp, Zea mays
gtcattaacaaatgaatataacaggaggctgcaacgcactatacgaaaggttgcaacaaggtaaatgtgaacatgactgctggtaggactgtacataaaaatgactagcaccaacattcttttgaagtcaaacatggctcacgagatgttacaatcggcaaaaaaaaaagataatatgtattaattacaattatacagcttatggcagatgcagttgtcataatcccatgtgcaagcctcaatgatgtgaccacacaccatgacaggatcaaggatgacaggctaaagtattcagttcaggttgctttgaagttcacacagtttttgtcagttgtcttcagacattcaaaagatgttggaaggtcaagttctctgtacagacctttaagttccaaccaagttagggtaggctagaagttccatgtacggtagttcaagaaatttggaaggaaacttgga

SEQ ID NO: 369288 - DNA, 393 bp, Zea mays
gcggcaagatatttggataacagtaataaacaataacaggtcatccacgatgcaaccaggtgaagctatacaacttacgatacgggtctaaaactcccaaatccacatgtattgagatagattgaagtgtaacttaaattaatttacactccaattcatttcaacacatgtggattgagatcaatattagagtacccaaataaatccttactagctgtagcaaatatggctatgaatcagaatagtactgcaaggtacgaacgaggccgactactatcgagtatcgaccaacaggtaacattggcctctgacgagaaatcgcagtcagttcagcttttaactacgtgaatgaccgagtttaagccacttgcctggccaggtaaacagcgagcc

SEQ ID NO: 369289 - DNA, 273 bp, Zea mays
agagatataaagagactggtgattgtgacatttcggatgaggccattaatgttaagctcccaaccaaatatagactttccgccagtaagtaccgcttcaatatccaagcaatttgtttcaacaaaaaaaaaaacaagctgactgaaccctggtacaggacatatgcaagtaataacatatgtttctatgcaagcaacggctttagacataaatccccagactaggaaacatgtccgaagcaaatgacagctgcagcacaactgaagcgttggc

SEQ ID NO: 369290 - DNA, 205 bp, Zea mays
ttcctttttttttttttttttttttaccttgtacaccggcccaagttaaaatcattggaataatttacatacatgacaaacaagaacacgtttgcatctgaataccttagagacattccttttttcatgctaaaatcaaggaatgctgacttgtagagggtggagttcagggttcccaccactatatatcccagaccaacatact

SEQ ID NO: 369291 - DNA, 344 bp, Zea mays
gttgggaaacaaaacaacaagcgccacgcaaggcaactctttcttccatcattttagggattaggaccagccctctagggggaaacttccttaccccagaccggttcaaatcggggccttacccccagggggagggaacctttttttttacccatttttggtaggcatttcccggaacactaggtttcactaaaatttccccccccaggtttttttataattacctccaggaataaggtgacacaagctcaaaacgctaaaatataaaaatgccagcacccaccgagcccaagcaactacgtccatattaatcatgcatctgttcactagctcgggaacttcat

SEQ ID NO: 369292 - DNA, 253 bp, Zea mays
  unsure (1)..(253): unsure at all n locations
gagccagcagggggtgcattgaaaacacaaaggggtccctatgctngagatcaccttatcgcagctcacacattgtgtaaaccacacaggaggccaaaaccacagttagcactactctacacgaacgccaccgctcaacggggcaccttgacttcatttctttttttctttctttctttcttcttcaagactggtatgcatgcatgaactcaccctataccaacccaagcactacacgggggaactgatacca

SEQ ID NO: 369293 - DNA, 246 bp, Zea mays
agataagtgtcactcatatctcataaataagcattgtaaaataactcatacacaagtgtcctctaaatccaaaatgaaatactaattgaaaaacttagtcattaactgtttgtgctaacgttgagcataaataagtatatatgaattcaagtctccacacttgtgcggccacaaaaatttgagttccattccatcttttcctgtacaaaaacttggagaaggcaataattagtagttagagacagt

SEQ ID NO: 369294 - DNA, 272 bp, Zea mays
gcatagtaaagagatcaggaagtgacacgtttcacgaaaatagaagaatgacatgtacatatccaacaattcaatcctactacagagtacacatctactattggtttaaatttagacactattctttctgaatatccacgcaacaagtacgagcctatgaggcttttcattatttcgaaattctgactacctctggaacattataagcagtgtgccgccctccatttcatcttcctacccgaactgatgtctttgagtttttcctattcatg

SEQ ID NO: 369295 - DNA, 374 bp, Zea mays
ttttttttttttttttttttttttttttttttggggtttttttttttttttttttttttttttttttttttttttttcaccgggatctaaaatccataagcttcgcataagggggggaaatataccaccatgaaattcagggggcagtaaaactgtcccccaacccaagttattctgtccagacctgtgctccccaaaggacacaccttattgccccctgactaaacctgaaagggttgccaatgggcaaacaaaccccttcaaaccgggggatttgaaaattaacagctcgtataaacattttttacagggggcgggctaaaacttatgggttttatttaattgacccatgtcaaaaaaacgacccaattttt

SEQ ID NO: 369296 - DNA, 413 bp, Zea mays
ctcaaagatggttcaccccattctgtgtacagttcagtagatggaacatcattaaagtgtatctacatctaagtttcaaccattatcagttaggaagttacttgcttttgtgtacttccttttctactcctacaattattaatgtcaaaaggatgtgcccttgtagcagatcgatcaataaccctgtagtgcctggaatggtggtgccattatgtttcttttcaaacattccaggcaccattatgtttgaaaagaatttgcatttgatcttacagctgaagatattgccctgtaccactgatgcaagcaatcatgactgttatttcttcttaacaattctaactttcttgtctcattctttgtgactccacttcttactagaataacctttagtgcctggaatgttgcatcat

SEQ ID NO: 369297 - DNA, 169 bp, Zea mays
aagaacaaagatgcaactgtactttttagtaatacagcctaaactccctgtttatccggacggagatgtttatattacaaagagacaggtattggactggcgcaacttggaaccgggggggaaacatgtcccaacgggtttggacttttgcgccccccgaaaagattaa

SEQ ID NO: 369298 - DNA, 269 bp, Zea mays
aaaaattaaaaagactcaggttttcacagatggatagatagatggataacactggtaaccagttacataaacgggtccatggtacataaaccagttccatagatggatggagggatatcatcattagggccctttatttcccctttacttaaatataggggggcgcagccctcctgcgttttttcgaaaaaaaaaaaaggttccataaccgggtccatggttaaaagatccccaagggatcgaatgatttacttttaatggggaaaggg

SEQ ID NO: 369299 - DNA, 106 bp, Zea mays
acatcagaaactactgcgaatgagcttggagtatccaaagatgatgaagatgtactgtaattatcagaaatacaattacccacagacacaacatacgtagcatgct

SEQ ID NO: 369300 - DNA, 336 bp, Zea mays
ctcttttttttttttttttttttttttttatataatttttttttttagggaaacaaatgcagtttattgccacccggggtgaggccgcagacgggccaaactgaaataaggtagaactaaacgaggccgaaagaaggggatttgtttcccatctattttcctggacaccaaacgaacccttagggggcaaggacccaatacagacggccgtatgtacaagggagagcattcagggaaaaaaatgagctgtgtttagcgtatttcaggatcatgtgcaagggctttagcttgtgctacgagctgcactgacgggtttacttgggaagggcatgtaac

SEQ ID NO: 369301 - DNA, 140 bp, Zea mays
aacgggtcagatgatgggtaatgacaattttttttccctaaaatgttataacaaaaacatgaccatgttttgaaggcacaagtgtttgagtaggaatttttccaccatgcccccaattttattgtaaaatagcccccctg

SEQ ID NO: 369302 - DNA, 233 bp, Zea mays
gggaaagaagggggccccttaaaatttcagggctgatcaggtattacatttccctcgatggacaacggccaagccagaaaaacccctttttattagtcacagcccccaccaaagtttttttgggcaaatccccaccggattaggggattccacagtttccaccccaatttcattttaaaattaccgggcccattttggaataaaaaaaaaaaaaactcccggggttgaccttg

SEQ ID NO: 369303 - DNA, 197 bp, Zea mays
cccctgttccagacagcgccatttattccagttccaccctcacctcattgagacaacgggtgacaaacaacatctttgcaaacgcagagcaattcatactcaaaacaactgtctgttcggatcaccgattgaagtatccacccaccaaaactaataaagaatgctgaacaattgaactcggtcatcaattgattgat

SEQ ID NO: 369304 - DNA, 402 bp, Zea mays
aaaaaaaaaggaagaacttccatttgatttagggagtaactgaaaccaaattcaccccatcacacagcagacagaatatctgtgtgtagcactgcctgggatgggatacaatacaattcattccatcaacacatgcatgtatgcatgttgtatacattacatgtagctaggctccatcgtaactcttctcttttgtaggagttgtacaagccaatcaattgtgctaacaccagagctgcagacagatatgctctgctgccaagtcagtcgcctagtcacgccacagctcgtcgttcatcaaaggagacgctcaaacatgtgtgtattcagttcagtttcagtccaacgcggttttggttggtcctccgagctgacgctggtttgggcaggccatcaagcaac

SEQ ID NO: 369305 - DNA, 100 bp, Zea mays
ggcaataacagacactcatctcaatataaactatgcggacggcatttacaacagccttcgacatagattgtacatgacattaaacacacatcagttgtcc

SEQ ID NO: 369306 - DNA, 321 bp, Zea mays
agttctactaccacgatgctagcttttaaatattatcatggagctaaatgctcaacgggctacaaggcaaaacatacaaactggctaagttcgaaggtggccattggtactaggtaagccatatcatgaaatatataacaaagtgccatatgtaataatagtgcaacaaagaggatattaactgtagctctatagcccaaactggtaaacaccggtggcggacccagaaatcttcgagagccttcaaatgatttgtccgcggagtgatatctggaccctaaagcaaaccgatgcctagttctttattcgaagaaagaccca

SEQ ID NO: 369307 - DNA, 157 bp, Zea mays
aacacaaccaatccaaaagtctcaaataatactcatactggctaagaataatacatgaggcgagcacagattagtatcctcttcgagccccaggagacacaaaagaaaaagaagtttagatatgtttgacagccggacgcgtgggcggacgcgtggg

SEQ ID NO: 369308 - DNA, 326 bp, Zea mays
cccacgcgtccgctcatctctcctcccgtgacgtcgcgcctcatcgtcctcttcctccgcgtgccgctgctaccgtggcccccttgcctgctcgcctccacggccacacgaaggccccctgtgttgctctcggttctcactcctcctctctatttcctgtgttgtcgccccgccccatgatcttcttcctcgcgctagcactggccctatgccccctcctttctcacctccatggcctcgcggaagcggaccttgccgcgagtggttcccagttctcctcacctcctcctctctcctttcaggatatgcgctgccatcgctggcgt

SEQ ID NO: 369309 - DNA, 372 bp, Zea mays
tcaaccccttgagcatctcatctcacaacgagcatgctcttcgacaacaaaggaatcatgattcaactgttagaaatttacccaactcaaagtttcctgtcgaaactgcaccatggaagcaacaagaaaggattatccttcctcgcaaactgccaaagggatcaaaaggagcccacggaagagaacaacctgctgcatcagtcatcagtgacatagagaagcggctcaaggatcttgattttcgacaatcgtacaaggaccttagagcgcttaaacatattttggattccatgcaagcaaaaggactattggaaaacaaaaatagggaggaaatatctatgccaaagttatctgatggaaaccacaatggcc

SEQ ID NO: 369310 - DNA, 169 bp, Zea mays
cggacgcgtgggaaaattctttacgactcccaattaaccaccttgattgtaatgtgcccttaaagagatgaaaggatgaactctgctcaatattagaccttgtttggttagggtgactagattttactaaaatacaaaggagggtgactgataacaaaaaaagggatag

SEQ ID NO: 369311 - DNA, 357 bp, Zea mays
  unsure (1)..(357): unsure at all n locations
cccacgcgtccgcgttcagctagccggccagagatcgagcatcatctccatcatcgattcatccatctcatctttctcttcttctattctatgtcgtcgtcgtcccagattggatcgaagctgctagcagtctatccagtctctagctagctagctagatcaagcccgcagactatacaatataatacaagctagctacgtgcttattattgctttattagtctagaataatcttgatatatacgatcgaacatatatctcgatctccaccgatacacacccggccctatccatgcttgaggtgncgacgctgcgcggccctactagcagcggcagcaaggcggagcagcactgcgg

SEQ ID NO: 369312 - DNA, 370 bp, Zea mays
cccacgcgttcgcccacgcgtccggtagactctaggtgagatggcggtcgtggtggcggcggtggaggcaggggtggtggcggtggcaagcgggaggggatgcagcagccggctggtgcggggcctctactggcgcctgcgcgcggttctgcggcggctgcggtcggagcgagccaggcgcggcaggaggttcagcttccactacgacgcgctcagctacgcgctcaacttcgacgacggccgcgccgcccccgccccggcccccgccgcggccgacctcgtccttgcccccggcgacaacgacgcgctacggtgaatcggcgtccgacgatccgctgccaagagccagatggggtctctcttccttgct

SEQ ID NO: 369313 - DNA, 293 bp, Zea mays
catatttatccttgctcacacacgcgaagctgagagaccaaagaagaagaagaaggagcgagcaagcagaaagttagctagctgctagcgtggaagtgcccaaggcgagagagagagacaagcctaggacggccgcgccaggctagccagccagctgctagctcctgcggacgagccgatggctggcgccgacgtcgacgtcgggacggagctccggctcggcctgccgggaggaggcgccgcggcggccaagaaggacaccatcgacctcaagctgaagctgcccaccgccg

SEQ ID NO: 369314 - DNA, 251 bp, Zea mays
cggacgcgtgggctgcgatggagaatggctctatgccgattccgatggcattctcatctcaagatcagaattgagtgtgtaggcctgttcttatgttatgtgtgaacttgtaataatgtatagctgaattacatgactagcgggaatactttggacgtttcgtcagtatcgtttgggagatatacatttgaaaatcattgcatcagtcatgtgaattgtgaataaactgggtatctcaccatatttctgtc

SEQ ID NO: 369315 - DNA, 355 bp, Zea mays
cccacgcgtccgcccacgcgtccggccttgcctttgcctgccaatccaatccagtcctgcacctgctcgggcggctagtagctggccaaagctccggtgccagcttcgactcgagtgcggatgcaggctgcctgtctagtcaactcgctcgccggctcgtcgctcctccagggagggagggagtgtgtgtgtgtctagcagacagagatagaatacgagagatagagagagaggccatggacgatgcagagagatcccaggcgccgcccgagagctgcgtggactggcgcgggcgcccctgccggccgcgccacggcggcatgcgcgccgccgccttcggcctagtgttccaggc

SEQ ID NO: 369316 - DNA, 215 bp, Zea mays
cccacgcgttcggcagactgcagagcacctctcctgtctcctcatctcacgctgacaagatccaatcacgacgctaatcagtcgtcctaattaatcggcggccccgtgatcggatcgtacccgccgcagatcaccactgtccaagtgcccagtcgtagatcccgtgatcttttttttctcggtggggttgctgctgcggcttgaaagatgacgga

SEQ ID NO: 369317 - DNA, 368 bp, Zea mays
tttccatttcgacaccattcaagtgtacacccttggtgaagacaaatggagagctatcagagctcctataccatgctgcatggtgcatcttggagtagtaaatgtggatggagtgatgtattggctaacagaagataaaggaacaagctgtggcatggcagttgtatcgtttgatctcagggaagaaatgtttgccttgattcatcttccagcattggaggtgaaagagacagcctcttgtgccaccatcaaagttgcttactatatgactgagatagatgacaaagtgtgcgtagtgactatgccataccaaagccatgcaccaaggtggcgccgaaacaacgcagagctttcaagcaggactgaca

SEQ ID NO: 369318 - DNA, 362 bp, Zea mays
aattttagtaaaatcaactttcagattcgtgtagtcatatgctttaattgtgaatactatgtgttattgtttgtctttggttcttccaagttccaatacagcttcaattcatctgtgcagaacttttcatgtaacaatcagtgatgcattttggttgtgttgccagtaaacatgatgtttggtgttaatactggtttatgcgcttcaaagtcctattaagttgctgttcaattgatcgacactcttaagtgtaggatgaattctaaacgtaggaggagtcatagcccagttgaatacaaggaaggccgtgacaaagattatgggacttctggaaagaaggataagtcaagagatctagatga

SEQ ID NO: 369319 - DNA, 341 bp, Zea mays
ccgcgcccgtgccgtaccgtccctatcacaccggatcgccactcgctcccccccaccccactgcgccccacctccgcgcctcagatccatccccaaccggcaaccctagcgccgggttcctcctcctcggatccgcccgccgccgcgcggactccattgccagaggcgatcgagggggagagatagagcttgggtggtcggattagggagagagggagtgcacgaagcccgatccggcatgctgcacggcactggctcacccttgacgagaagaacccccggcgtatcgttgagggtgaggcacttcttcgccgcatgaaccgctatgggctgcttgctga

SEQ ID NO: 369320 - DNA, 267 bp, Zea mays
tttttatattttttttttttttttttttttttttttttttttttttttttttttttttttttttttttttttttttttgggccggcccaattccaccattaattaacccaaaccaacaaggggatcaggaccccccgttttaatttgtacccgggggtagacacaaacaacttttaaaaattaaggccaaaataccgggaatccaaaatgggactatggggcattgaccgaactttttaaaaacttgacacaaaggctagttagctt

SEQ ID NO: 369321 - DNA, 400 bp, Zea mays
ttttatattttttttttttttttttttttttttttggttttttttgggggaaaaggaccagttttagtcaatttttaattcccttttctttttttttcatttttaacagccttcgatcgctcatacaaaacacagttggaaaacaaactggtagctaagattttatatacacgcttaatacatttttctccctttggggttcagaaagaaacatgcctttgaacaaaactggagagctaaagccacacagctcctccctggctccttcctgggcacgtaggatccgggggggctctgggatccgggttcccagggggcgtgtttgaagcctttgttaaagaaaggaacagggatcacctggcctaagagcccttaaataacctgagctttttgcaagaag

SEQ ID NO: 369322 - DNA, 341 bp, Zea mays
tttttattattttccttttttttttttttttttttgggttttttttttttttttttggttttttttttttttttttttttggcagcagcaaagccaaaatttttttttccctggatttataaaacaggaaagccgctgggactatcattcttattctggggaaacagattggtaccccaaccaacacacgtttttgggggcagcttaaattcttgcaacacagtcgtccagcaacgagaagggggatgaacgtatctactcgactttcccccgttttgccccatccaccgggtttttaaaaagcattgcccccgtaattgggccaacccctccgggacccg

SEQ ID NO: 369323 - DNA, 312 bp, Zea mays
tttttcagcattcgaaataaaaggcatggcaatgttcataacaatgtatagaaaggacagaagcttgatgatacatgccaccaaatgactgaagaacgacaagtaaactgtcaatgccagtaaagagtaaactagccatccttgcagtccacatcctacttccacggttccacaccaacaacatgactcaaaagaagcccaaaatgcatattagaccttgcaaccaaatgtaagacatacactcctattagatatgatatgaaaaatataaatataaatttagatttcaaatggtcaccaaaataaatatat

SEQ ID NO: 369324 - DNA, 255 bp, Zea mays
ttttatattttttttttttttttttgcatgttgctagcaaaatagagattattattattattggatacgagtcaaaccacagtcgtcatacatctaccactcctaaacatcactgaacaagcggaagcaaaagaaacggatgaaaaaaaaaggcaagacatcatccatccagtaccctattggcacagatctctccggatctgaatctgatctggcacagcataatatcgatcctcctgcatgcccggccctgct

SEQ ID NO: 369325 - DNA, 352 bp, Zea mays
tttttatattttttttttttttttttttttttttcgccaaattcgaatgcagtttagtaatacaagcctaacacaaatcaggtcctgccttgacaactacaagcgcccaaagtcatccagtcaatacttaaaacagaaacgttgggctcctgcctccacaattgtatcagcagcgatgtgtcaagggaaacccaaaacactggaacaaaatctcagactcgatcctacagaattacagttgtgccgaccggacaggcaaaacatgctgggggcccctagcattttccagcattttggggcagttaagagaatctcaggcgttattggcatatggggactcgtcgcgttgtgg

SEQ ID NO: 369326 - DNA, 255 bp, Zea mays
ttttatattttttttttttttttttttttttttttggtttttttttttttttttttttttgctctgaaaagaaattcgatctgatgatgaaaacttttggtttaattgggccatccaaaaagttaagcgcgccggggacgacacattggtaagaacaggcggtcacaaccaggaacaacttcactaacttttggacaaatctaattccgatttatataacagaaggggaaaaaaaagtaaagtttcctaaggggg

SEQ ID NO: 369327 - DNA, 378 bp, Zea mays
tttattatttttttttttttttcaattaacttttgagaaataatgcagattactgtggtcgagtatagtctgactgaccaacaacaacgacaacaacaacaaagccttgtagcatataaaaatgagcaataatagtcacaaacaaaaattaaaacatgttcgagctgtcccatttacaatacctaatttcaaaaatcaaactaaaaatgcaaccagcatttgcctggttggaatgttcaaaaaaatctcgagggtgatatttttgtttaacctttttatcagaatttctttgacaccattataagcagctagagtgttcttgagtatttcctgatttcatatgaaatagatgtgatggaaaccatatgtctgttcaaa

SEQ ID NO: 369328 - DNA, 107 bp, Zea mays
taccacaggacactccttaatcctcatactatactatatacacagtgttgctacacaatcccgacaggattgattactacaccaaagtcgaacacgtagaggtagca

SEQ ID NO: 369329 - DNA, 400 bp, Zea mays
ttttatattttttttttttaagttaagagagttctgactgcgtcagtcaaagtcaccaactccagccctactagaaataagactacaagagtacacgtaaagccttcagctagttcctaattcgttcgtatagtacactacgctgaaatgcacctacatattttagaatcagcatttatcctcagtccatatagtagggtgttgtctggactaaaagctcctcgtcgtcttcattgtcatcggcgttatcatcagcaccgacccagttgctcgggtggtgttgtgatcgaggaataccactgataccttctgcaacgtcataaaaaagcaaggtagctaaacatttagtcaatgtagagacgtatcagtaactaatgacaataatgtaatggatgatttt

SEQ ID NO: 369330 - DNA, 470 bp, Zea mays
ggagtgacagagctcgctctgtgagcagagagcgaggtgggaggagcaatggagacgatggtagcggctcccgcgccgcagcagaggacagggcgcatcgctcggaggctggccaggctgctccgccacaagagctccccggcgggggcggggatggcgtactccgtcgccggggacgagttggacgactcgctcgacagctccatcaactcgctcagcaagctcaagctatccggcagcctgtcagctgcgtacacgctggacgtcttcttcaagaatgccacggagaagaacggggcgccgccgccgcatacacagccggcgccgtcgccggcgccagcgcagcacgccgcgaagcacgcgttcgtggcgaccctattcgcgagggcgtccgcggtgaaggcggcgtacgcgcagctgcagctggcgcagcacccctacgacgccgaggccatccaggccgcggacgc

SEQ ID NO: 369331 - DNA, 183 bp, Zea mays
cttcggttgattccgtgacaaccggcggctgctagggaagaatcgaagatcgccgccaccatcaggtgtggcaccattgcgacagcaacgtgccgcctcttgctgcctggaggtagctgagttcggatccgatgaggagattgataggctcaagcgtgacaagaacattttaatcacagaagt

SEQ ID NO: 369332 - DNA, 475 bp, Zea mays
atagggtcagcttataaaagaacagagcagatctgagagtttgttggcagagataatgaaactttcagctgagcttaggaaagcagtccaagcacagaataaccttgtacgcttgtaagtatacagtattacagtatactgctaatgcttctctgccctaggcccactttgtttctcctaggtgaaattaaacatttgccatctcgtgcaggtacaggcctgtattaagagacattgagagcaatctgatgaaaatgaaacaagaaacttatgcgacgatccaatgatacatggtgtcaaactcaatccacgatactgtggaatggccgcatagtcacaagctccaccgtaggcctggttcggttgcatctgaattggaggtgattgaatccccttctattcaattttaactagggagagatttaatcccatccaatcttctctgatccagacgcaaccaacaagcccttgctca

SEQ ID NO: 369333 - DNA, 248 bp, Zea mays
ggccgccctcaatgatccttttatctgattttggggagcataagtgaagcgcaggttcactcacactctgttgggggctaatatacaccggagactcgggttctacaaatcctcaaggtatatatgtacaggtgccataatgctaaatatcctgtcaagccagggcggtcctcaacagctcggttaccagggacctgtgaatgttcttcgcaggcaccgcttcttttgtgcgtatggattgctgatca

SEQ ID NO: 369334 - DNA, 454 bp, Zea mays
cgcgcgttcccccggaggtcgcttcgcaaccggtggatcgagatcaacaaccaggtgctcaacgcgctgttcacgctcatgagcatctaccagcaccccgcgctcttccaccacgccgtgctgctgctccggtggcgccccggggacgccaaggagctcagggaggcctactgccggaagaagggcgcggctgcgggctcccggcgcggcgagcgggctcacgtgtccgtggtggtcgcgctgctgcacgtcgcgtgcctggcgcagtacgccatgtgcgggctctactgggggtactcgcgcagggcgcgcccggacgccgccctgaccgcgctcaccgtggtcggcaccgcggcgccggtgatcgccggcctgtacatctacttcagccctctagggaggaaacgcggggggcggagcgtgcaccatgagcccgacgaacgttccgaccaca

SEQ ID NO: 369335 - DNA, 436 bp, Zea mays
cccgtgtcggttcatctggtgcggcgattcggtctcccgtgacaattccatctggtgtgagcccaagggaacttcttgagtcgccggttttccttccaaatgccatttcgcaaccttctcctaccactggtaaattgccattcctgatgcctaataattttaaatcaacaatgctgtgtggccccgagaagtctgaagaccacttacacgaagattctgcgttttccttccagccctttttgaggtctaaaccaccaacattatggactgcaaagaaggggccaagtgttgttcacgaaaccgggtccttatcaaaggatagccaggaggagctaaaccttcatgctaacccagcagctgcgaccgagcatgaaaccgaggaaagtctagttattagacctaaggcatgtgattccatgttcgacaatggtcatcc

SEQ ID NO: 369336 - DNA, 480 bp, Zea mays
cgcaaccttaggaagctcgtggacaatggcttcgagggcgtcgcgcagctcaagcagctctacagggacaagttctttggcaagtctagtgggcagatggtggaattcttacagtgttctgttggcattgtacataagaatcatgctgagagtataacctcattcattaaagagagtattgatgaggagctgaaagatacagattcatctaaacccactcagaagaagaggctaaccttttgtgtggaagggaatatcagcgttgggaaaaccactttcctccaaagaatagctaatgagacaattgaactgcgtgatcttgtagagatagttcctgagcctattgataagtggcaagatgttggccctgatcacttcaatatattggatgccttctacgctgagccacataggtatgcatacacttttcaaaactatgtgtttgtgacgagagtcatgcaagaaagggaatctcaagct

SEQ ID NO: 369337 - DNA, 293 bp, Zea mays
cccacatcttccggaaggatgcccgagtgcccgactggaggacttcagtttgaccttttttttatttctggatgtttctgtgcttgtttcagatgtttcaggagtcttatactgtatgtaggatgcttgcttgggtgattttcgttttttggggtaagccatgattatggagtcagcctgagttctgagatagaactgtaatcatgctatagcgcagggtagtccttttctgggctctttgtcttcttgaactactatctcaaaacaattgtatttctgtctgattaaatgga

SEQ ID NO: 369338 - DNA, 485 bp, Zea mays
gggttggcttctcctccccctccggttcgggttcgggttcgtgaggttctccggggttcgggttcgtgggtgagcggatcgagatggcggcgtcggatgttgagtaccgctgcttcgtcggcggcctcgcctgggccacggacgaccactccctccacaacgccttcagcacctacggcgaggtcctcgagtccaagatcatcctcgatcgggagacgcagaggtcccgcggcttcggcttcgtcaccttctccacggaggaggcgatgcggaacgccatcgagggcatgaacggcaaggagctggacggccgcaacatcaccgtcaacgaggcccagtcccgcggcggccgtggaggcggcggcggtgggtacggtggtggccgtggaggcggcggctacggcggtggcgggcgccgtgatggcggtggcggctacggcggtggcggcggctacggtggcggcggcggctactgtggtggtggc

SEQ ID NO: 369339 - DNA, 488 bp, Zea mays
gtcgagggccagaccagaccagccagccagccagccccgtccatggaccatggccacgaccaccggtcctctgcttcctggaagcttctccaatccagccacgcaccacggcggcccgcctcccgatgcgccccgccgctgcccgatccatcccccgacccctccccccctcccgcacgggcacggccatgcccattccgacacagctagctgataatatagctccgcgcctccgccccccgcgctttgccgctttccggcctgacaaaatcccgcgccctttctgcaggcgtacgtcggcactgaaagaaaggaggagccgaggaggaggaggaggacgggaaagccgaaaggagctatccctccctccggccccggtggacgggcgaggcgagccctgcccgcctcggaatcttggcatttctagggattctgtcattcatcctggtgtgtggtgaggtgaattcgagtgagccaagtggtctcga

SEQ ID NO: 369340 - DNA, 485 bp, Zea mays
gaaaagcctcggtttattgggttacatctccagctccctgcttataatagagactcgaaaagatcctactcgattgcgcgtctcatcagtgggcagtggctggctggctcaacaagcagctaagcatgcagaatctgactgctcgaaggtgtcaggtcgctgaactccttaggagcgtccacgtcctgccagcaaacggagtagcctggcgctcccctgctaccaggaccgccgccagcgggctcctcccgcacatgcccaatcgcgacgtggaggcctcgcccgacgactacgatcctactgtcgacgcagctcaccgagaagggcttcatgatgcgctcgggcatcgcctcccaccggtccgccctcgggtcgtacacctggcccctcggcgccgagaagaagggccacgcgcacccctcggtcacgtacagcctgccgccgagcacggcggagtcggccgacgccatgttggcccccatgct

SEQ ID NO: 369341 - DNA, 236 bp, Zea mays
atgaaaaaccggggccgtttaaacaaatgtaaaatgtaccccttatagtatctctctcgaaacaactgtgctatttattcaacccatttagaaaagcagaaaaccaaaagccaaaaacaaggtctaaggggttttaaaaaaaattacgaaaagcaactgcttctgaaaaaagtcttctggtcgctcttttggcttttggaaagcaaaaacagccctaaaccccaaccaacccgggc

SEQ ID NO: 369342 - DNA, 165 bp, Zea mays
acaatggaccagcttttgagtcgcattaacattctacttcatcaccggtagctacatagacactccaggtatgccctacaaagttcacatgctgcacaacctgagcgtacttatcgttttcaaacaacgaaaatcttctttattttggaaagggggggggggggg

SEQ ID NO: 369343 - DNA, 132 bp, Zea mays
gtagtgttgtttaaatgctattgtaccagctggtcccatgataagaattacacaggacttcaatatgaacaaaacacgttctctacaactgtaagtagccattccgaacccacgcgtccgcggacgcgtggg

SEQ ID NO: 369344 - DNA, 379 bp, Zea mays
aaggcatccaagagctgcagcgaacatctcataggtttatttgcagcactggctgcttagaatttacaaagaccgcagtgacatggcttaacttagagtaagcaatgcgaaggaaaaaagaattaggataagaatcgatcctacgttcctctaaccatttatgtgcccaccaggtaactcttgaaattcctgctctatcgagaagctcattccacctcaaggacaaaaattatcaaatactgcacaaaacaatcagaaataggaaaatcttctacggttctacttttggaaaaagatttacatgaattctaagcctttcctttccttttagcatctagagcctttttctgaaaagttctcatgactaatacgattagat

SEQ ID NO: 369345 - DNA, 455 bp, Zea mays
aaatcatcatcaacggacagtcgcacggaagttcattaatacagagcatttcattaattattttgccacgccgaacaaacgaaagcattttgtggatatatacaacttttacaatcgaaaaaaaaattcaaagtacatatgtacactaccaatccagccctgagtatagattatccagtgcagtgtaaagaaatttggcagcatttggctgttccacattccccgtgagaatgtcgctggttgttagatatgggtcaccataaaaccgcagattagcatccatccgtgtggcaactagattcccttctaatgagacaccaataaatgcacctttgctgcagctgtatgtatagcaaactcctgatcctttatcaccagctctcaggtctgcttctgctactctgcccacaggtcctgctgcagcacttacacctgccccaagtgaaaaatgcatt

SEQ ID NO: 369346 - DNA, 340 bp, Zea mays
tttcttttatttttttttttttttattttattaactggtgttaacacatttatttacttattttccatttacatcttttgcagtcaatgacagttatgaggaaaaaaaaaggaggaaacagattatcgctcgggcacacatctggttttggtcaggatagcccctcacttcaggcagcatccgagagatgggaggctggaagcactggtccaagtaagttgctcacagttctttgaatccttatctgtgtccctctttcttttggccttgttgccgacctatcaggcaatgccgttgccgtagcttgctcaggctgttcgcccacttttggcaccgtatt

SEQ ID NO: 369347 - DNA, 219 bp, Zea mays
ccgggctgaatgcaggggtatatacaaactttaaaacaattccgaaaggcttggaaaagggatacatattttcaataataatgccctacgggctaatccgaagaaaaaaggtggatgccaaaaaaccgaatcaggtcacgaccaccggtggggggccggtacctggggagcctagacgagggcgggggcgccgttttgggccttggggggggggggggc

SEQ ID NO: 369348 - DNA, 256 bp, Zea mays
caagaacaagctcaatattatttcaactctccgcaaacatctaactgaatatgaaacaacagccaagctatcatcagcatcctggatgcacccatggaaccgttgccagccagtgcatatgtgaacacacacacacacacacgatacacttacatcgacaagagtcagcataattctagcatttcccgacatcccgcctccagcagctgatcatgcacacgccgcaacggggaactcacctactcatcacactaat

SEQ ID NO: 369349 - DNA, 323 bp, Zea mays
gaattaccgattcatctagatcaaacatcacaatatacgtatgctaaattaataacaattatcgcgaccaacaattttatttaacctatttatatacctagttgactagaataacgaatcaacttaccctcattaaatctgacttgaaaccacgaaatcgacgacgccttttagctcagcatttcactgaaaatagggtaagtgttgcgtcgaatcgcgctttatctttatccactcgagaattctccggccgcgtactgatttattttcttctgcactcaatcttctcggatcttggcgtagacgaggataacgatcgacga

SEQ ID NO: 369350 - DNA, 396 bp, Zea mays
aaagctgattttcattagtggatataacttctaccaacatcttttctctatgatgaacaggtttacactcttaaactcagcctcaaatcagattcacagccaattgtagaagaagaaactgtctcagatactatatctagggtcagagaacctgagaccgaaatttctcaagatgggaggatacgcgagattgccatggacagtgccgattcagacctggtaatttccaataatgatgatccaagttacatgatgctcacaagatctttattttgccttgtgctgtgctgaattctttcaaatacctttcaatatcgacatccaaatagagcattacagattttacgggattgacatcgtgagatcttattagcgccacatgggcaaatgaacatg

SEQ ID NO: 369351 - DNA, 185 bp, Zea mays
gtaggccgccgctaataagcaaatgcagaatccggggggtggcaaggatttatcatatcataaatatagcaggtcacccagggataagcccacatcataccagcaagaccccccatcgttcatgggggggccgcattggggtaggttttggggaagggggagaactccaaacaaggggggggccc

SEQ ID NO: 369352 - DNA, 187 bp, Zea mays
aggctgctgctaaaaagcagatgcaaaatccggggggtggcaaggatttatcatatcatatatatagcagggaacacagggataagcccacattatacgagcaagacccaacagcgttcatgggggggccccattggtgtaggtattggggaagggggagtactccaaacatggggggggccccttt

SEQ ID NO: 369353 - DNA, 301 bp, Zea mays
gataaaatattatcattacataaaaacaagcaatacatatattattgttggcgagacatgtgtgagaaaaataaaactacgcatggcgcacatagattttggccttagataaatgccctgtaaaccacccaacaagggcaaaaaaaaaaaaaaaagcagtaacagacgagggaatacgttgccgaaaatattggacataatgtgtatagctgactcttctcttcccaaaagtaaccgaagcagctcattgagccaaagagtgttctggtgaaagaactgcagcagcagctcaaaaaagcag

SEQ ID NO: 369354 - DNA, 206 bp, Zea mays
tgcttctttgatctcttgccgcctgggctctcgtacgtacgtcctcgtcgccgcggcgcaatttggcggcgtgcgcgttccttgcctagattggcgcgatccaatttctgagaggcgtagaggtgcggcgccgcagaacacgagcgcgcgcgcctggtgcttgctgagaagcatctgcaaccgcgattccaggctcaccaggaaac

SEQ ID NO: 369355 - DNA, 417 bp, Zea mays
gtcaaataatcagcagcaactagaaagccagtatattaataaataaataaaaactgcacagcatcagctagtaacagggatttcattccaaactgtacttccttcgttatacgaggacgacctcttctccgcaggatccggctcgcccgagccgttgcgccgcccactcatcctgtcctccgcccactcatcctgtctgcagccgttgagccgttgcgcgcgcaggctcgggagtcgccgatgcaccaaaacacagggacgcagttcttgcaggtggcggcgcacttggtgagagcggagaggaccgagatcgagggtgacagattggggcagcgagagcagaggataggagatagggaaggaagagagcaaatcctcaccggggagaaggcagcggggagggtcgacgtcggggct

SEQ ID NO: 369356 - DNA, 310 bp, Zea mays
tccttttttttttttttttcgtcacctacaatttcgattgttacattaaacacagcaacggtgtatgaccttagaaaacgctgacccccaccatggcatgcacgtaggccggtggcagggcagctacacaaaagaagaaagcggaacgccacacacgcacgcacacatacggattgatcaatactaccaaagatcaacaacgaggaacgttcgacggcccgcgatctggacatacacgagtacaggttttatttttttttccacgcatttcctcccctcccttcttttcttgttgggggtctttacttga

SEQ ID NO: 369357 - DNA, 383 bp, Zea mays
acgaagtgttaatgtatggggccttgaccttcataggtcacgccttctcatatttatagaagaggattacatgataatagaggattacatgataaggactctgtaacaaacataggagaaaaaggaggtgcagctccacaagaccaggagagaatatctagtcccctaaaccacctttctatagatggatataaactatatctctaacatcccccctcaatctggacggtgcgacactaagtgcagattgtgccggaacatattaaacgccgatcctgataaaggtttcgtcataatatcagcaagctgatccttcgatgatatggggcgaacatcaagttgattggcagcaacacgctctcgaacaaaatggtaatcaactt

SEQ ID NO: 369358 - DNA, 298 bp, Zea mays
aaaaaaaaacctcttatgtgacatttagaaaaagttttaaaaagctgttaacataaaaaaaaatcatacccaccatgaagagaagtccgaatctacttgagtttcttgacaccagatagaggagacgccatgcaatgcccagaaacatacatatgtatgaaaatgagacttgagacaatactggtgttcagatcagatgccatgcctagggtaccacactaccacctgataatgcttcagtcctttgccaccatcttcataattacatcgttccacgcatcaataggcccaggcaagc

SEQ ID NO: 369359 - DNA, 275 bp, Zea mays
ggacaggaatgggccgatccggcctaaacgaacggggccttaataattttgcagttgataaatatataccctgcaatacccgttctctcagtctgaattttactttgcatgagccaccgtgtcgaagtggaatacaagaatttggggttggggttatattggtatcttttcctaaaaaaaacgacaccgtaccgtatagtatatctttatcagttttggttatcgtcgtcgtcttgttccgtgggggccttttgtgggttggcgaactccggcag

SEQ ID NO: 369360 - DNA, 411 bp, Zea mays
caaatgcttgaaaccaacctatttctcaatcaatatattaggccattggaccagcatccaacaatctcaaccctctagtgactgtgtgtttattcagtctccattacagcaagtctcttgattaattcatgtggttgaaagagtttttgggtggaagtcttaccagtaattactattcccattagttgttgattcaccgcagaccatttaaaaaaaaaaaagatgagtaccaaaatgggaaaacggcccttgcatttttcatgtacagttagcaatcggagaacaaaagctgagtcttatccttaatgatcaaaagcccctagcaggtgttagcattattaggttaccacatataaatgtggcgacttatcaaacaagttagctttagcaagtgcaaaatgttcacctgat

SEQ ID NO: 369361 - DNA, 407 bp, Zea mays
cgtttgagctgggatctaacagaaagccgggaaatttgtcctgctcctcgctcctgcgtcgcgtgtgccgccgggccgcagcaggtggtgcgcgaggtgaagagcagcctgcaccgggcgcggcgccagctctcatccacctccaccgggcgggcacctcctcctccagggccctctcctggcgatccgacgcccatttgtcccctccttcctgcaatccagtttggttcaggttccctgtctctttcgtactaggatcgctaaaaatgactgccacaaacagcagctacgaatccaagctcttagagcaactccagtagttctctaaaagacttcctaaatcaataatttagggtagttaatatgaaaactattctccaacagttctctaaatgaactttctaaat

SEQ ID NO: 369362 - DNA, 427 bp, Zea mays
gggtttcacagtgacgcttcctcaccaccgccgtcgcagagatgcagtccctcgtgcccttcagtacggcttcgtccgcaaggcctatggcgtccggaccggcgagacgctgtgcccggggatctcgtgcgaggagagcgccatccacaaggttgtgcaattctctatagctgtatgagcatttggagcctcgttgctggacaagggggtgatttattcattggagtttactgcatttaggttgctcaagattcagttttgcttagaccatcagataaactctactagcacatactctgacttcagattggacatgagagagagactgcaaatttgtctgatgcaaaaaaatcatcgataagtcaaaccttcagataaagtcagtcatggatttggatcatctaaaaattatatttatgttcaagct

SEQ ID NO: 369363 - DNA, 378 bp, Zea mays
  unsure (1)..(378): unsure at all n locations
cccacgcgtccgctgaaataggcgagggatcacggccgcgcccgcgcaagcggcaaggcaaacccttgtgttggtccagccgcccctcgccccgccgcaccaatcccccaccccatcccaacgctatccgctgccctcgccgcgcccccctcctcttccacctcgtccgccaccctccccaatccatcacatcccaccctaccccaccggccctgccgccgccgaggaggaggtgtccccacccccgtccgcagaggcagctagggatctctaccgggcatgnagctggcgctcgcctccgcgaagccctcgcctcgggcggcgggggccttcccgccacttatcttctcgccgcttaaaccattcccgctcctccgc

SEQ ID NO: 369364 - DNA, 466 bp, Zea mays
  unsure (1)..(466): unsure at all n locations
caggttcaaaagtagcagagtaatagagtatgtattttacgtccactgctatgtcaacgcctataccctaaatagctgaaaagagtacatagttgggcctttagtactgtatatcttttgtggcagatgattatgcttcatttctgcaaaaaatcattttgcagtgtgttatagagcaagtatcatgaggacattgtatgtcccactgcatagatgaagtgaatcatgcattaaataatgccattattttgtgttctatctgtatgtgcatatatgttgcaagtctgttttaatttgcatctttaataatattttaaaattgacaaacaaattgactttgcaggatatttgttgtgnggggatgagccctttcttctacgtcatggacaaaattttctgctgctcgaactacaaaaggatgaaaaatgttcaacaagcattagtccatgcaaaattgtctggcaag

SEQ ID NO: 369365 - DNA, 478 bp, Zea mays
  unsure (1)..(478): unsure at all n locations
catccacctcgtgcttatcgcctacccctcctccttcccctaatcacgccccccggtcccgttgatccatagttgtcgcctcccccaacccctaatcacgcgcgtctcgctcccgccgatccgcggatcggctctgctccaaccctcctccgtccctgagatgcaagcgagcaccacgggggatttctcccttgaggtgttgcctgagaggtgctgctgaccgagtagcatcattgaagagttactgtcgagcacttggattatgtgatcgatgtgcanagaagtggttccaagggcacaagtgtgccaacacggtgcaacttcacaccatgagngaagtctaggatttgctcaccttggatgaagctacangggaagtcattgaaccaacagaggaactgatgttggtttgtcgtattcctgtctaatgcggcatgggtcttcacatactttcctcaatgacagtcgtcgaccacta

SEQ ID NO: 369366 - DNA, 411 bp, Zea mays
aatcgtgatgtatgttccttgtttgcagtgatagcgggcacatgtatcttagaatgagtgcagcgtcaacgcttaagatcgcataactaataaggacaacgttaacaataagcagttcgatagaaccggaaaacttactgtccaacaataaactttagaaatagaacattgggggcatcttaatttcatgatcttggctttgacatcagattattcagcaaaaaatatgctcctcgtgtatagaaaccagaatacgcaaaagcgtcagcctaagtgatgccggaacagagaggccatctcaatggcagtaagagcagcttcagcacccttgtttccagccttgccaccagcgcggtttagcgcctgatccatgtattgacaggttacaacaccaaatacacaaggaacacc

SEQ ID NO: 369367 - DNA, 249 bp, Zea mays
cgcacaaactaatcgaaggctgggccatccttattcagctccaggccagaaaatacaggggtatccaacacgcacgccttggtggttcaattaatcaagggacaaagcaaaacactagtttaataataatatggcaagggggaacgtccacaatacttactactaaaataaagcacgaccaacgaactgggtggggggacaggggacactgacacgacgatcgacaactcgggcttaggctgccccctg

SEQ ID NO: 369368 - DNA, 306 bp, Zea mays
aacagccaggagcccaggccaaagcatcaattacatacatgattagatcctgttgtttccatctccctatagtcaaacaatgtggctgtgtaaggaatgaaaatgacttgtaattttgaatggatttaattcttttgcaggggatcattgcactgaccttccgctttctatacgtatgtacacatttatgttctttaaacctaacattgagttcaaacaactatgtcttcctctgtagcatctccaatattaattctggtttcctacacgccctattttccgtattacctggtgagatgcccatgg

SEQ ID NO: 369369 - DNA, 196 bp, Zea mays
aaaagagaacccttgattggataaaggggaggggcccacatacataaaagcttttggtcggcttggggtctactaaaagcccaaggaatattttttttgaggggataccgggggaatgaattgtaagaaatagtaaaggggagataatacaacaaccccccggacaagcacaacacacgggcgttccccgggcgcc

SEQ ID NO: 369370 - DNA, 261 bp, Zea mays
gaaaaggccacccattgcatacaagttcatttccgcattttaattacagggccctaaagaaaaggaagaaaatggggcgacaatgttcccccaagcgccaacttttggctgtaaaaagtcaaagactgggcgtgcccttgggctccagggccttcccaacatcggcggggtccctttgtcatcctttccaccggattgcaaatgccagtgcatttccagtcgaaggaccccccacatgggttcccggcctgccctttccat

SEQ ID NO: 369371 - DNA, 259 bp, Zea mays
gtggcattaacttcccacatgttattcatgttagggctgaagtacaccctagtaggttgcatgttcttccgtattggattcacgaaaaccccgatgagctcgccatacatgagataaacatcagttacccgggtagcacaagggtaattctggatcaaaagggtcatccggattacttcagctagacctcagatcaccaacttcaaacccttaacggggggtgttttttcaggtgggggcaaaatgtccaaacggaagg

SEQ ID NO: 369372 - DNA, 236 bp, Zea mays
ggggaaggcttctaccgaagccctagaacaggacaactatttattcatatatggtcatgggccacctaaaacccttaaaagcctcatcatggccatgggtggctttttgacaaaaaacccaccatttaaaacccgggcaaacacacacaaagagggggggggatgcctaatatttgaccccgtacacaacttttgtacagactacagagaaaggtgggatccaaaactcccctgga

SEQ ID NO: 369373 - DNA, 282 bp, Zea mays
tttttatttttttctttttttttttggggcacaaaggacgcaaaaggtccgaccacgaaccaataattatactttgtaataacaagatctttatcatggttaaataagcagtgtgctaatttgactccaattcattccacgcagaataaacttggaactgactagcaacatttaatttagctactggttaaactctctatcaaccaaggtcagtacgacgggaacacgaaattctttccaattccctgccctcaactacatttttagaccaactgtaaaacc

SEQ ID NO: 369374 - DNA, 219 bp, Zea mays
ttattgttttctttttttttttttttttttttggggttttttttcaaggacacccaaatatttcactgggccctatttccaggacccaaaaaaaacttggaacaagcacttgatggaaggagcattttgctttgactgaacagaacaaaacagggtacaaagtttgggtgcttcactttttggcttccttctctgcctcagctgccttcttctggcggg

SEQ ID NO: 369375 - DNA, 295 bp, Zea mays
ttctaataatttttttttttttggaggaacttctgggtctgattacatagcgtggaaaaataaaaataaaaaatgtacaaagcaacacatcgagaccatgaggcattcgtgtaaccaaagctgacgtttcctatctctctctctctctctatgccttttgtgcgtgtgcgcgatcaatctacagcaaatcctcgcccaaaaaatcaccgtttcctagagctattcttcgagtgccgcctcggcctggtgaggagcttgagcatgctgtcagtcaggtccagcggcgagtcgtcgt

SEQ ID NO: 369376 - DNA, 249 bp, Zea mays
tttgggacgaacacttggctttttaaattaagaaacaaaagttccaacattcatttggggggggaacattcatttagtatcgggtgccttttagcacccatccatctaatttcctttcctccaacagtcactccccggccccattttacaccctttaaaccaagccctgttcataactccaacaataccgctcccatcctaattttgctttacggggaaaaagaggaatcgaatcgggtgcctccattt

SEQ ID NO: 369377 - DNA, 404 bp, Zea mays
aaaaacaaagagagggttagctggtgttcattttttctgctgtgcgttcaggttgaagcgcccagggtgcagccgaagctgagcgagcccttcttggggttcacccagaccgcagagatttggaactccaggcttgcatgatcggcctcatcggcaccttcattgtggagctggtaacgacgtttgaggcattgcttctattcctacttgagttccgttctcaatgttcgatggaccggcttcttaatttctaggtgctgaacaaggggattcttcagatgattggggtggaggtgggcaagggtctggaccttcctctttgaagggtgaccaaatagtgacattatcgtttgctggtgtattatgctggccgaaaaacatgagggtttcacttgctttttgac

SEQ ID NO: 369378 - DNA, 271 bp, Zea mays
tatccaattaactcagcaaatagtgcatgaggtatgctcgtaaccattcccactgacaagaggatggtcagctggagctgcataaaagccgtttgaaccgaatacagatgtatcgggctggtctaatacatcgttcaagggggatgtcgatgatttgagagttgtcggaccaccccatggagtgaatcggcgcccacccctccacgtccttcgggctcagcacgctcaccataagatatgcttcgctcaagcaggatgtcgatgatttgag

SEQ ID NO: 369379 - DNA, 351 bp, Zea mays
acatggcttacattcaaacaagcgagccaaactgccacatacaaacacacgagatttcgtcccactctcacacacaagaagaacaagtcgcagcaaacagagatttaactgcagggacgaactttatcaaaaagaagggaagagtcggagagagacagagagagttgaaaaaaaaaaactcgacagctagacaaactgggccaattaactgtggcggcagcagaaccgcactccaggccaggccggcaggcaggcacaggcacgcagccaccacacatggcgcaatcgactctgcaaactatactggtactacgtactagctactgatggctagccggacggcgctggcag

SEQ ID NO: 369380 - DNA, 401 bp, Zea mays
atctacaaacataaacacacgatcgaaaacaatctcctgacaagagaatgttgtgcttcacaaataatattgttacagagcgcaagctgggaggtaataaataaggggatcctgttaggctgttacccagactgtaaaatcctggcagctcactgccgaacaccgtggccgacgcaggtccttgcacgcagcggtagacacagccggaggacgagcgcccataactgcatctgttcaacgcacagacggcagagctgatccaaatcactctcatctgcagatgaactgaagaatgaatatgtatgctccatccaaaccacaaggcgtccggcaagttcgcgtcgtatttccttttttttcattcatcccaacccttggtacctcttcttaacctttttttt

SEQ ID NO: 369381 - DNA, 327 bp, Zea mays
gacatatgcatggaagttgaattattgttatgggggtacccatcgtcgtatatatagctactgctccattccagccacgatacaaatgaaacggatctgcactcgccaagttgtacgcgttttctcgcgatcgcgactgcctttcgttgcgtgagtggagagaaaaaaataagcagaggctcgtggcgggcacacacacggacacgggtagtatatatatatacactacacagtgtagctagtatacctcgcccactccaaagcgaagcagcaagcgctgtgaccgactgtgatcacacaccacgcgttcatggtcgtcatgggcaa

SEQ ID NO: 369382 - DNA, 154 bp, Zea mays
aacaaactaatctggaagaaggctaatacaatgcgctactagactatagtcacaataaaattgtatgctactaaagcccgacagggaaggggaaaaaaaagaggaaaggccaagaaagaactaagggcttccattgatctgttatatgaattat

SEQ ID NO: 369383 - DNA, 324 bp, Zea mays
acccggcacccccattattcatttcattggagtagcagagaccacacgaactgtttttgtttgttaccagttggctcgggcacataagcagttcagcacatatgggggcacaccacatgatcccaacagagagagtttggtagtttacagaccacatgaccctcacttttacgaccaatcatacataaacaaatcaggatcatgcatatttgacctgaatgattgcactcgaaggtatacaatcagaggatggtgttttgcaactgcaaaagcaggatcgaagttcccgagaaacttcaacacataaacacaatacagcccatt

SEQ ID NO: 369384 - DNA, 314 bp, Zea mays
aaaaggccaagtttagcacatactatacccaaaatctaggcaccgtagccgtcgctagttgcgcgtagggcggcgggttgactgccgtcaccatgccggaacgcccggccaaaacttttagtcctggccttctggcgttttgtgaactgcagttacagctagacgcccgtgaggcgcaaagagaggtgtttcgactagttcatgccctacaagaagaatggattcgcgcaagaaaagaaaagaatttgaagcttcctatcttcatctatctctatatgaaagttcacgctccggctacttggctgaactcgcct

SEQ ID NO: 369385 - DNA, 197 bp, Zea mays
ttatttgggttggaaaaaaaaacgggttgattcatcaccaccttatttctcataaactaataactagtatataatgggaaatagggggactttacaaaccaagcacacgataagtttcgaaattagccctaaagacaagaaactttattgcccaaaaaactcattatccgaggggaacataatcggaaatctacttt

SEQ ID NO: 369386 - DNA, 306 bp, Zea mays
taattccctccaatcctatcggatacagacgcaaccgaacaggccctaaggtattgtttggatactctagtattcatctcaatccacatgtgttgaaatggattggtttacactcttatccagctcaatacatgtaaaaaattatggtaaacactctaatctagctcaatacatgcaaaaaaaattggggtaaacactagagtacataaaccaaacctaatagggtgagaaaccagcagcacgcgatcctgacgtaggctaaaatgacaacttgcatcgcgcatcatcactaaacagacttggttt

SEQ ID NO: 369387 - DNA, 387 bp, Zea mays
  unsure (1)..(387): unsure at all n locations
tnaataanttttttttttttttttttttttttgagcgtttataaaaaatcctggtgtttcaacccacatcagggcatattacatatttgcagggctgcaagcaaaatgcatcgctagctagggatccgcttgctttccagtgttggcgctgtcaggttcaatccactttatagggacgaacagctcgccggactcgacctcacgcagccgcagcctagcatttatcgcgacctccccgttggcgtacgtcacgaagctatctgagagcagacagttgtcggcgtccgggttcactttccgcaggttggtctcgccagctgtgagccgcagcgccctccgcagcttggttgccgccgccacaggctgcaggtccaggaaagcctggcc

SEQ ID NO: 369388 - DNA, 327 bp, Zea mays
  unsure (1)..(327): unsure at all n locations
ttaataanttttttttttttttttttttttttggtgtttttttaaaacaatggggggtcccaatctgatgcaggagcaggattcaaaatcgaattcatcattcgtatgcactggccattacactacatacatgaaaaacaaggcatgctattgccggctgtcagtccatggggatcctgcccggacctcccttgagtgagctgtacagcggcctcgatcgtttgaagccgaatatgtctgtaattctgtacattttgggcgggttggcttcgttgattgccttcttgaactctaccaaatggttgccgccgaaaacttgcacgctta

SEQ ID NO: 369389 - DNA, 206 bp, Zea mays
taaataattttttttttttttttttttttttggtgtgttttttaaaattaacttgggaccaacccccccgggggccacagaaatcatcaaaccgcagcccacgctggaagaggcatgggtctgctcaacccgaacctgaccacagttttaccaactgccaaaaaacccccttgcaaaaaaaaacccggaagggcaacaccaaacac

SEQ ID NO: 369390 - DNA, 359 bp, Zea mays
ctagacttaagtgtataaaagtctttttaaaaatacaaggaaggggtaaatgcaccggggcttgcctggaataacactagattagtgtttattagttgacgtccacttggcgaccagcctttgtcttggcattcgttcagattatccatcttcaggttggtccgactgacgacatagtcttgcggagatgtccaatctctgcattatcttggggtcgacttgggtcgtcttccgcatcacgtgattaattatcgtacctaattgaaatgcacgatacacagaatgcatatagacatgaatatcacaaacttaaatagtgctacacgatagcgaagtaaacacctatagcaggacatcac

SEQ ID NO: 369391 - DNA, 307 bp, Zea mays
agcgcgggaagcttcatgaagcgggtgctttttcagaacggggtggatgggccggaggtacctggacgccgccgcccgtcccggcggcgccggcgccggcgacaccagctcgtgctcctgcttgcacgacctgcccatgtactgcaggatctggtccagcgcctcgtcgctggaggagtactgcaggcctccatggtgctggtgctggtgcgccgcagccgcagccgcagccgatgccttgccggcgccggcgtgcccatgctcggtggtactgctgccgggcttggtgcccccgcccccacctgac

SEQ ID NO: 369392 - DNA, 302 bp, Zea mays
  unsure (1)..(302): unsure at all n locations
ttaataaattttttttncaaccacccacaccgaggcaattttaagcttttgggggtgggacaaaccacgtgcatcgtacactgctgacatttgcatgcacatgttttaattttattctaataagtatataaatatatatatatatatatatatatatatatatatatataattaaatcgataccggactgtccagacgcagagcaacggnttctttctttccttgccgaaagccacagataccaacttggatggcatgctacgtgtgcaagcaacggatcagtcacccatggaagcaaacat

SEQ ID NO: 369393 - DNA, 395 bp, Zea mays
gcccccgccgccgccgccgccgtggggtttttgaaagcgcttggtgtataaaccgcgaccgcgggaggccgcgccgtcggctgcggcggacacgcggtagcgccacggaggggacgccgtggacgccgcctccaaggcgaggctgcgctcgaagcccaatgagtaggagcgcttgagcaggaaatccctggcgccggccgcgagctgctggtccgggctggccggcgcgatctccgccgccgccgtcagcggctgcggtaccgggtggaagaagagcaggtcgtccaggctgggtcgcgtccgccgcgccgccctttgcggcggcgatggcacgggcggcggcagcgccacggcggcgcggcagagtgggcaggacgcgtgcgcgcggagccaca

SEQ ID NO: 369394 - DNA, 287 bp, Zea mays
gggggccaagttttaaaacacaggttttcatactttaaaattttggatccctcctcataatatccagaggggccctttgtagcagttgggtggctttagggggaaatttgggttcacgggctttggaggggcgttttccaccccacaggggggttcgtttccaacagggaaccccgaaaaggggggggggcctttgggacaatggggaaaactgggctggccccatttaacgccccctttcaccttttttgaaaggataccttttggatgaacctgtggggggtttt

SEQ ID NO: 369395 - DNA, 444 bp, Zea mays
caaacgggggattttagcatttttttttagaaaacaaaagatacataagataaatacactcggtccaagaacacaactttacagtagcaatacagttgcgaaactgtcgtcaagaacctgaacatgctttcaaggtcacaacagagggctccatgatgactaagagtactgtaacccacttaagactaaaacacaaacgatgcaagctgttgagcattacaatctgcaatgatatatgcatccaactatccaagaatccaaggcctgacagtgcacaaagattctgtgaacgcatctgctttgctagatttgcctgcatgtaacatcaactacaaggtggcgaatacgcggcccgtaccatttgacacgttcaacatgctccactgacacgttccaagatagtccatgatttttggcgacattactgatggattcaacaacact

SEQ ID NO: 369396 - DNA, 278 bp, Zea mays
gggggggggcaaaaaatattaacatgggtacttgggattttggttagttttacaacacaatcgtttagttttttacagaaacagaacacttgggcaccacgccgatcaaccaaaaggctacatacatacattagaagcagggtaaaaacaagggtaatatagctgaaactacttgaagaaaagacccttttttttttttccttttctttcaagagccatatttttgaacaaccttagtactagaacaatggtatcccgcaatagggtattttttactg

SEQ ID NO: 369397 - DNA, 491 bp, Zea mays
tatcctaccacccgacctcccggggcgttgtcgccgccggcctgctcccaaccacaagtccaggaggacgccccttcgatccgccgcagggaggcaggcgcccgcgcccccgccccccgccaggctccatctccggatccgatcgcccgccggctcggttcaatccgtttacttaattatactgaccttctcatatggcgttggatccgtgatgcctcctccattcctgaagctatttggaattcattgcctgaatcagtgttctgaagtgctatctaacagtcagaaatggatggatccgagcttgaaaatcctacttctagaagctcatcccagaaatctagccgacgttcgagtagtaggcgttctcaaaagtcagctggacagcattctttgaccggtgctcaagagaaaagaagcaaatcgaaatcttcaaggcagaaacacttggttattgacgacaaagaggctaaaaaagggaaaaaacatga

SEQ ID NO: 369398 - DNA, 491 bp, Zea mays
gtatcatccatctttggggtcaatggcgtaggagccgaaaaataaaatgatctcaatgtttttgtcctcttcattctcttgttttgaggtcaatctatcgtcccatattcacataaatatttaacaatatagtatttagctcgttattcattagtaacaaaaaaaactgagaaaataagaagtgcttacagagttacagtaactaggattgactagaggctggagtgctggacaaatcgcccgcccagatccctcgtgcagtcgcgctccacgctctggccgtctggctgtccggactccggcagtccggcctcctttgtcctcgcggccagctgcccggctccgtgcacccgtggccgcggaggagaggagacagaggacgacggtctgccagcagccagcaggtcgcagcctcgcaggagccacaggacgcccgagcagccagcaggaccgcaggggccagggagggaggcaggcacgcacgcagcagc

SEQ ID NO: 369399 - DNA, 387 bp, Zea mays
atatgaaattatttggggggttttttatctaaaattataaatataactaggtatgtgcccgtgcgttgcaacggcacacaaaatattcaaattaaacacatgtgaaactattttggtacttttctcacaaagacagaaatacctaaagttgtgtaatctgagatgacaagtaacatgacccgtaagaaaagttgaacagaaatatgccccctcctcgcaagccaagcacatacttcctttccttcaacacaagtagagtccatcccatctagatttagtcgagcctgatgacaccgaacaattccatcggtgctgcagtggcgttctgcatcctctggtcattgtagatgtaatgcaaggtcaaaacgaacaccataaacatgcatt

SEQ ID NO: 369400 - DNA, 311 bp, Zea mays
gggggaaaaacctttgggttttaaaaaaaacatgttgggcccccctgttgtcccccggttttttggggccgggaggtttttttgcctcattaatccctttccggggggccccccttagaacgaacaaacatttacccaagcggtgggggtttttacccaaccccctttttaaccccattcccaaaagggtcctttaggaaacacaggccttcctttttttcccccttttttttccctttttttttcaacagggtttgggaaaaattagtttcttcctacagggggggtttttgaacccacggccggggggg

SEQ ID NO: 369401 - DNA, 412 bp, Zea mays
gccttgggaggcatttttaccggatgttcttatcatctagagtgcagggttcagttccaaaagaaagttgactctttagcaatctctctcacgggcatagtaggtctaggttgacacaaccagtcacaaaaggatgcccaccctgtgcatcaaaatactattttagaagaaaccctcctccattcgctattagtaccatatcagtgttccgctatgttctagtaccacatcagtgttccatgtcgacggcatcagatttcttcctctccatgttcctccacttgaccctcaaatcacatggcaggcgcgtcttgtgaaacacacgacggccatattgcagtatctgggtccatggtattttaccattattatgtggagagaattttgccatcccatccctcaaaatagctac

SEQ ID NO: 369402 - DNA, 263 bp, Zea mays
gggagcaaaggaactttttgtttttggggcgaccatgaggggggtcagaaaagccagccacaaaaaaactgatgcattgggaatcccaaatttgtaagaaaaaagttgaaaatcctggacccaaccacgggggccccaaaaaatgccccccattgccattgccataaattgttccgttggaaaaaccattggggagttttttggggggcccatttgggggaatggggggtgtatatgagccgtggttaaaaaaatgttttttt

SEQ ID NO: 369403 - DNA, 85 bp, Zea mays
ggggcggttgaaccactcgactaataagaccacaaaaaagacgtccgtttagaggccagccgcgatctaaaaccggacgcgtggg

SEQ ID NO: 369404 - DNA, 330 bp, Zea mays
ggggaacaaaattttgggggttgcccataacatatgctggaatgattccccccgtttttcccggcccgggggggtcccgaacacccccttacgcctaaaggtttagcccacccagcccaaaaaaccccctggggggaacccctaaaccgggggggcaaaccccctttggggtcggtttaagctcccaacccccaaaacagggtcgatctggccccttttttgggtttaaaatccatccaccttcgtttgcctttgttccccccccaaaattctttgggcggggcaaagccccccccggccaaccaggaacggagcggacccccccccccc

SEQ ID NO: 369405 - DNA, 312 bp, Zea mays
gttataggggtcataacccattaattgggtacacacacaatgtacatcatttatcacacgatttaaattggtttcggggcatatcccctatatcttgcagattagcataccacatgtgatatccgagttccataggacgacgttaccacgatttagtgcaaatatatttgcttgtacaaaacaaaatcacagctaacgctgaacgaaacagctggtcacgagtacactttttactacgtgactacgagaggggcccacacggctcgtattcaaaattgagggaaaaaaattattagaaaggcttcccgaatg

SEQ ID NO: 369406 - DNA, 201 bp, Zea mays
ctcaatcacgcttccgtgctcttcaacaatcgctcacacctcccacgcggtaaccaccaccagcacatatctatgcgaagcaacgcggtccgtcccggtgcatgaaaccctaaacctataccgcactcgcctccctgagccatcctctacctgcgcggcgatggccaaggcgctgctctactcctccctcctccccgggct

SEQ ID NO: 369407 - DNA, 408 bp, Zea mays
  unsure (1)..(408): unsure at all n locations
tttatctacatcttgatgctgataaagaacaccagactaacccgaggtgatacttcagctgtcagctatttgtgagaatttgtttgctaattttgttatcgcttgcttacctatgtgtaattgtttgggttactgtaacacgtgtcagctgcatcactggtctgttgcaacaaatggcaacgctgaagtatcctaagaaatccatttcttgcattcgctgttcaaaatacagctgcgatggttgttttgacctccaccgtttcattccttttaggctgtttgaggcccaactcctccagtttcttggttcaggtgctgtttagttntttttttttttttttggttcaggtgctgctggttggccatgacgcacgcagagcaggctcagctccttaggggtagtggcag

SEQ ID NO: 369408 - DNA, 256 bp, Zea mays
cgttctgccgccccgcatcccgtccgcctcgccctctggccctccccgcggcaatctcggcgctcgccctccccagcggcaatctcggtgtcccccgcagcaagctcggcctcccctgcggcaatctcggcgtcccccacaatcacggtgtctatccctcccatctcaccgctgcctcataacactcccgtgtcccacgccatacgcccaagaccgagccgcctagatctgattgggttggctcttcgtcgcgggg

SEQ ID NO: 369409 - DNA, 190 bp, Zea mays
gcgccgcccttttttttttttttttttttttttttttttttttttttggcacagaaaccacaaataatttatcaggtacaagactagaaggaatccggtttacatcctatattgacaggagggttgaaacattgtacaagcagctggaatccaaaatgtgtctagcaaagttttatttgtcctgaactcc

SEQ ID NO: 369410 - DNA, 362 bp, Zea mays
ggcaaagcaagcttccttccttgcgaacgcaactgaccgctccggattcgccggcccccgccgccgcttcgccttctctctccctcgtccacggcaaccaactaaccgtcgagatattggcggggcgccgatgctccctgactccccgtagcgcgttgcggatgctgtgggcctgtgaggctcgctgccgccgctttgggatctgggctgctgccgtcagtccaaatccggcacgcggtcgccatgccggaccgtgtactcctgatcctcaaggacgggccgttgctgccatctcccgagcggttccagtgcctgtactcccccgccaactcctcggaactgcgccgccaccgacccctctt

SEQ ID NO: 369411 - DNA, 361 bp, Zea mays
accaacctgcgacctccacgacgacttcttccctgccgcctcctcacctgacccgagcagtgaccaacagggggcggacgacagccggcctcccgcagccgcggccagaagcccacggcggagggggagcccacggcgaagagggagaagtccgtggagacgtacgcgatggggctggtcagcaacgtccgcgacggcgtgatggcttctgctgcctgttcctcggctgccgacgcgctctggcgccgttggaagacttctccttcctcacgcgtccaagctcgagctccagtggcggtgccggcgatctagagtgggagcaactgcgcgttagaggaccttgtcaacaccgctgggatga

SEQ ID NO: 369412 - DNA, 150 bp, Zea mays
gccacattgttgacgagccatggcggtgctgcgcccaagatggctctgggctggcatggcgctggcaagcgagcatgacccccggatcgacccgtttatttgaggagcacctttagtccaggaactgctgcaacgtgtggaagatgcttt

SEQ ID NO: 369413 - DNA, 390 bp, Zea mays
gccttctcttgtcgacgtctccttctccctccttcctccagcacgagcggcagctgtcggagcacgacagttgcagcgtccttcaggggaggaagaaaggggacgacggcacgagtttaaaccaacaatctctcgtcatatatatcataatagagagtaggacgacaaaagccatgggcagtaatggcgagctcgagcgcggagcgggtggccactggtataaccgacggggacctggatgagctgaggggatccatggatctcggcttcaggttcgacgagcagaagggcggccaggacctctgcgacaccctccccgccctcgacttctatttcgccggcaaccggcaggtgtcggagcccaggatgtcgtttcccacgagcacgagc

SEQ ID NO: 369414 - DNA, 399 bp, Zea mays
gggaaaatctgccaaagagaatgcatcagttggtgttaaacaggatgctcaaatgaacaaaccagctgttggatctgaaacttctgatgcaaaccatgatttgaagagttcaaatggtaaaagtaaacatatgccttctgaagcagtatgtaccagtgcagagattcctggaggtcataagtccaacagcacagttgaaattgatcaaaacattcagtctgttgacagtagtaagatgggatcaagtatcaaacatgcaaattttgttgaagatggttcttccaccgtggacttaaatgaggcattgccatgtaactctcattcttcttcaccaaacattaatggtcatagcagttttgtaaacgaagaattctgcaatcattccaaggaacaccaaag

SEQ ID NO: 369415 - DNA, 166 bp, Zea mays
gccacttgttcgctcctcgacccgcttcttatgccaggaaaacctggcaggcgccgacgaactcgaagcagcagccatggtgctcgctcgcaaaacgttgaagctgaagctccacacgctcctctcagccggcaaagccacggaggaggagcatggaaaggatgtg

SEQ ID NO: 369416 - DNA, 441 bp, Zea mays
cggactcgtgggcttgcgcattgtgggtggtgtgtgcttcatggttccaagaaatctgaaccgctgctctcagtcgatttctcagcacttccttcatacttttcgagcttgcattatgctgtagctcttgattcgatgtatctgtcagctatgattcagcacagcaggctgctggttgagggatctgaagaaatctatcctcgctctcctttatatttggaatctggggctcagagcagtggttttgccgctacggccgcgggtaacaatgaaccttgcagagttgttccgaactacatgcccctcgaacaagttgctggactagtggcacatggtctgaggttgaagaagcatcaaaggcggagaactatgagacatccccgaaatcggcggcgacttattatagctagattacctgacaatggaattgggatgaagcac

SEQ ID NO: 369417 - DNA, 318 bp, Zea mays
aaggatgttgagatccagtgttcacatgatggtgaacttcttgttaaagtttgtatgtctgagcattgtaaaggggggaggttctggcctactctacaaaatgcttgcattccagtaatggcgttgattgactgggagctgagtcaaccaagcaatgtatctgatattttctgtgcatatggcatagactcagcatggaaatacttagatgaatccttgaaattagctactactgatactgggaggaacattcgccgggagcacttgctggttattgcagatagcttgactgtaactgggcaggtccatgcattaagc

SEQ ID NO: 369418 - DNA, 268 bp, Zea mays
ggcttgtataggttcatgtatacaaaggtggcgtgacacaaggtgacagaagatggatcgtagatcttaataagtgccgttttgaatcaaggtgatgttctttcggcacagggagtcatgtaattgctgcattgctgacgtaatgtaaccagcaatgcagcaattaactcgaaacgtctgcaatgtatgcacaaaaagaataccattcatggcaacttgaacatgtggacaatggtttctgatatctcaagggtcctttgcagtttcg

SEQ ID NO: 369419 - DNA, 201 bp, Zea mays
attattacttctttgggagggagctgcatgattagtgtattgcaagatttatttcatatagccttgtatatcttgtgtctatgcagggagtacgaaaaaacagccttatacatttaggccttggtcggctagcttccaagaccacatggattgagtgggattgggtgggtttaaatcccaactaagacaaactctttctta

SEQ ID NO: 369420 - DNA, 440 bp, Zea mays
cccactcgtgcgacttaatgaactaacttctggcgacatgacaggttcattcctcgttaagtattgtgaagtttgtttctagactacattttatggtcactgttggttcttctaatacattttgcgaagtgctattccattttctgcttcaatggaactagaggtggaagctgcagacattccggacaaagcgggtaacgggaagaaaggattgtgggtcttggtcccttgtgatacagctggagctaatttggaggaaattagtgggattgatgatgaaaattatgtcatagtaaatgaagacgatatactcgatggtattgccgcctttgttgctaggtgcattcttgaagatccaaaatccaagtcgttatcgccaatgcatctccaaaagggttcgtctatcctccatgcaaccatgctgcactcaaacattgcac

SEQ ID NO: 369421 - DNA, 212 bp, Zea mays
cagccttccacctcgaactccgcggcgcccagcgccctcggtaaccgccccccgccccgccacagagacaggtcgacgagacagacaaaggccggccgccatgggagaggacaagaaggcgggcaacaaggacgccgccggcggcgacaagaagaaggacgccggcgccggggccgcgccgcagcccatcgtgctgaaggtcgacttgcact

SEQ ID NO: 369422 - DNA, 445 bp, Zea mays
cccacgtgttcggagccctcgccttctccctctcgtgcgtccctacctccgctcctggcagccgagcagcccctggccttccgttcctggctgccgagcaagcccctgtgcccagtagccagcgcccttgcgtagcccggaagccccggaaagctcccgtatcctggatggtcagccccgccgatgtgcttgcccatggccatggtggtcgaatcctttccctccctacgtgagtcccaatcttgtctccagcgctcgtacgttctcatatttcatttcatttacaatatctaggttagtttattttcaatttaaagtaactgctataatcctctgtacttctactacaagagattttactgcaccattttttttgccatgtgctctgctgcgcacgaaatagatgtacgacgttgttggttttcaagtcaaacacaaacctgtt

SEQ ID NO: 369423 - DNA, 120 bp, Zea mays
tgacccttttgacgacgtattgcgtgggcaaggcatgacagtgcgacaagagagaaactaacaaagagctctgttcgttctgctgattgcttatgattcgactcgcagtgtcggtagctg

SEQ ID NO: 369424 - DNA, 283 bp, Zea mays
agaaataatggctggggattacataacatcagggatttgacatgaaacaaagatacagctgccctgccatccatgatccatggcagagaacttcaatcgatcattagacacatggttatctcaggattacatcatcggatggatgcccatgcacaaaattctaattacatcaacaacagtttagcaacattacatacaacactgaacatgcacaaatgccacggcaacccgcatccttctatcatatacaggggttgctgctcaaactcaacccacgcgtccg

SEQ ID NO: 369425 - DNA, 236 bp, Zea mays
acaccgggggtaaacaaaaatattgagtatttacaaaaaactattgaactacaagtcttgcctccacgtacacacaggcatttttcttgttccggacaaagattgacgggcaaaattgtatcaaagccatattgacgcctaccacacctctacaacctacatttttagggcaacgaactccactgattcgtgctcatccattcttagacaacaaatgaacttgcttcacattaatg

SEQ ID NO: 369426 - DNA, 287 bp, Zea mays
aacaaggatataggagggttagacaaaatatatatcaagttttgtgtagcagttttagacatgccaaatacagtgcaaatgcatagcaagtcattggaaaggataggaaacaaagccgagaggaacatagaaaataaaatggagccaagtttctaaaaagcttcacacaaatatacatatttctaaaaaaacttcacacgttcgacatgacatcctctagatgccacctctctcagcactttccaaaatcagggttcctacagatgcacgtgtcggggatccacata

SEQ ID NO: 369427 - DNA, 364 bp, Zea mays
gtccatgggcttgtacatattaatatcggtttatgtctacattttaggtctctgggtccacaatgatgcggaccctagttctagttgacacaggagccgaacttgtgattgtgatgtctatggtcctgctcgactggctaccacatgtcggcaacctgtcaccagaagtaccaccacctcccttacaaagctcagacggctgcttaggatctggcagcagacctatgctttcaaagttcaggagcgacacgacgtcggacatggtgggacgatctgctggctcctcctgcgcgcagagcagtgccacttgagcgtactgcaccacctcagcaagttcgaatccgtcacccagcactggatctac

SEQ ID NO: 369428 - DNA, 270 bp, Zea mays
ggggggaaaagccagcatatcagcacaatggttttgttaccctgaattgatcatacaacaccataaatgtaaaaaattaagaaaacccctcacactcgttataaaaagggggactttcatgtgtataggcaaaatacaccttgaaatacaaggccatacatatttttaaactatacatatttttaatacccgtcccgcattcacatttggagagaactggacccataaactggactgaaagtcactaaacaactgtacagacaggcccta

SEQ ID NO: 369429 - DNA, 186 bp, Zea mays
acccaaactagctcattttaatataatttggaaacagaattcccggccgagttttatcccggttttcacaattgatcccttcactccaagggggaaaaccggaatatttttaaatacttcctttgttctgatgcaaaagatactccagggggagtcatatgcaaaacaaatgcccgatttttccat

SEQ ID NO: 369430 - DNA, 301 bp, Zea mays
gggaaaattggcggaaaatttggggggggggaaataataacaggaggcccgggccccccacaaacaaccggtccaattccaaaaaagccctcaatatttaacccccccgggggaaaattgaatgggaaaaagggtccaaagccccacccgggcggggctcgaaaaaaggggccccccataaccccgggccccgggggccctttacactttgcctttggcgccaagggcaaaccgaagaattaaccccctacagggtacagccgggaacggaaacccaaaaaaaaaggggggggggggggaa

SEQ ID NO: 369431 - DNA, 181 bp, Zea mays
aaaaaacccaacctttgtattaggggactaattttacatttaaaacctggagttgcgccatttgcacatgggggaactggaaagcgaacacagctaattttttatggattggtatggttccaaaaggccaagagaattcaaaaaaattaagactgggggactcccccgagctaaaatgaac

SEQ ID NO: 369432 - DNA, 280 bp, Zea mays
accattccaccaaaccatttatttattttgcaaatgatacaactgcatgcacaccggggagacgctggctggctaacacaaagaaacacccataaaacaacgcccaaagacaccccagaaaaaagaactgccgtctagacaaacttggttttaaaaagggcccctgtacatgggacccactcccactaaaagaaaaggggggggcatgctaaaagagaagacccaaaaaccataacgggaattgttaaaactagaaagccaaaaaagccaaaaatcgaaa

SEQ ID NO: 369433 - DNA, 344 bp, Zea mays
acacacatatatatatatatatattgtctacaaagtacaaactcgcaatgttcagagccatttttttgaagcaaagacaagaaaataaaaggagcagacacatagctgttgtcacggatacatagtaaaataaggtacatgtccagcgccaaattgtacttaaaggaagtgactgaacatctaagcatatatactaataccgcagctactacacgcgtgcctgcaggcacgcccacgcaagcgtttcttcatctccagaacattattccctttgtccccccctatgtacacaagcaccagtcgctgggcctcagcctcagtagaaaccagcagactgggcatgt

SEQ ID NO: 369434 - DNA, 239 bp, Zea mays
ggaaccagaaatttttggggaattaaattcccaaaggggttattcaaccagcttttatttggccggaaccttttcaagggaaccaaggacctttttatggggggaatatggaaacctcaaaatcaaaaatttaacggcggtcttggtggggccctggaccctaattaaaggaatgggtggggtcaaaattttcctcctccggttccttggaaccggctggccggttcttcgcgcggggg

SEQ ID NO: 369435 - DNA, 118 bp, Zea mays
aaaacctgggggggtttttatttcatgaagcaacagtacgtagtacgttatcctgtatcggggtacaccagtacaaagccttttttatcgatcaagatcgctaacagcacaccacact

SEQ ID NO: 369436 - DNA, 382 bp, Zea mays
cctcaggccgggtcataaattattattatcaattgaaaccatgtgcactttcactctctttacatcatccagctctccaatcaacagtacacagatgaaaaccacacatgcaacaccacaacaaatttcacaataaacactgatctggtccggtctcaatggaatgaatgaatatatgtgcagccgccaggaccttggcttggggagatcacgcatgcacacccatctcgtctccctggctctaagggattattattattcagaagtagcaggcttctgccccatcaagctggtcatgatcctctggatcctagtctgggtctttctttctttcggcctcgttaccgtcatcgtactaggccctgcgcctgctggggcttgc

SEQ ID NO: 369437 - DNA, 193 bp, Zea mays
gcgcccacgcgtgcgcccacgcgtccgcttctcttgatcgaggcagggatcaagcgaccgagacccgccatggaccttgcacggagcggaggtgccgctgccgcggacgacggtggggagatcgagaggcacgagccggcttcgccaactcctacggcacggggctcagcgacatcaacatggcctacaacta

SEQ ID NO: 369438 - DNA, 301 bp, Zea mays
ttctttgttaccatgttgcatcggatgcatgtcaccttatcctgattccctatttctgtccaataaccgtacttccagcctgggtcattgaattgtgcctatggatcttgcatggggtgataaggatcaacattaatgggagcagcagctgctggatgcggatcagacactctccatgacaatggcttactctgtacaggtggatagtaagaaaaaggcataggttcagctcactaattaacatcagagagtggggaacagagcagcacggaggcccattatcttgcaccggatttaaagc

SEQ ID NO: 369439 - DNA, 303 bp, Zea mays
cccacgcgttcggagcacgacacgtcttgctcgctgctggacaagcactccggcgctgaactgcaatcgagttccgagtttgacctctgcgcacgcagacggcagacagtatcttctggcagctcctcccaagccgaagccgccgccgccgcccctcccatccggccggggccggaccttctcttcatcttcttgtgtaatagaatcttggaaaccactcagttcaatcataagctgtcacaccaatgagatctgtggaggagaccaagagatctctgacagttgccccctttgagtgcgcgt

SEQ ID NO: 369440 - DNA, 368 bp, Zea mays
ggatgagttccatgggggtgattttactgatgatgacgacactgacagctgctcgactcctctaccaccacccctgccacccggcatagattgggaggacttggatccctacaatgtgtgccccttgagttgcccatctccatttgctgataggaatgataaagaagtggcctggcatgtgaccatggacaatgatcctgaagtagacacagaattttatggagaggaggatgaaagcatgcttggcaataatgatgtcattgtggatagggtccatgtgaatccagccaagggtagggctctgggtgatggcaactcttaacggtgagctgggtgacaaaggattcagactctatcgcggtgccttg

SEQ ID NO: 369441 - DNA, 105 bp, Zea mays
cccacgcgtccgggcaagcgtacgaccgttggtatgcacacagtgtcactctcacataagccaaacaaaatcatccttcgcttcggatttactcgtgctctcgcc

SEQ ID NO: 369442 - DNA, 387 bp, Zea mays
cccacgcgtccgcccacgcgtccgctagttctagatcgcgaccggccgcccttttttttttttttttttttgacacgaagaactcgttgagtcacgtgttctacacgaggaaaaaagagagaatctccggcctttgtactaggagtattgtactagtatattacctactgtgctagtatattactgttgtattagaactctcccctttctttgcacaatgaagcgagaccatcgtctcctgtgagttataacacaggttttcatggtcaaacaaccatttgccggtgttgccacagccttccatccaaacaagcaagaagaaatatgcccatcacctagacagcgctagcattgctgcttctcttgaccttgaagtaacaggatctt

SEQ ID NO: 369443 - DNA, 338 bp, Zea mays
ggagcttcttgcttgcgtgcttgttccgggccggctatcatattgcctgcctatgaagctctctgtctctggccaatggaggagctacttctcctctagcctttctcgtctctgattcgtccattgaccttgggtgacgtcggcgccacttctgcgccccgcgactcctcgcgtcttgtgtgagtgtgagtgctacaagcaagcgatggacatgaacgagagcggcgagacagggatggagcagggcaacgcgtcctccggcgccccggtggattggcagactcaattcaacgccgccgcgttctcgtgcgcgccgcagcaggttcccatgatggact

SEQ ID NO: 369444 - DNA, 214 bp, Zea mays
cgtgaatgatgtgtcatctcagaccggagggcaatgtttggtgtctactaggccggagacatcccatgtccaggatactactagtcactgtgaggccttttcgatgggaaagcaccacaagatgtccctgctcatgagcttcaagcaaaacaagcaagcggccatggtcgtcgtgcctgacaatcaggttagccacgctgaagcagcacatacc

SEQ ID NO: 369445 - DNA, 388 bp, Zea mays
cgcgcacgagacccatcgcgaatggaagttgctcctgcggtgaagcaactcctccccatggcgcagggccccaactccccgtcctcctccaccacctcgccctcgcccgccgcgccgtccccgccgccgcgccagcagcagtcgcaggcgcccgtgccgcgcatcatcgacaccacgcccttccccaccaccttcgtgcaggccgacaccgccaacttcaagcaggtcgtccagaggctcaccggctccgacacgccgccgcctgcccagaagcccgccaagacccacggccaccaccaccaccacggcggcggcgtcgggcccaagaagccggccttcaagctctacgagcgccggatcggcaagaacaacctcaagatgatcgcgc

SEQ ID NO: 369446 - DNA, 441 bp, Zea mays
cgggcttttcgtcttctctttcgtcctcttcttgttgcgcgccatccgatcgccgctgccaggtcgtgtcctttctcgtcgccggcaaggcctcctcccacccaatttccttgacgagaggcgctgctcggttccccggacctcacctggggcctgcctggcgtccattttagcctaaaataggcttaaatagtcagattttgagcacccaatctcgataaagaaagccccaaagaggcaatagccagctgccagccctagtacgacgacgtgccgccgccagctgcctctgcgcgaagacgacgcgccgccgtagagttgcccaggcccgctgactcccgatctgcatctctcggactgcccgacgccttgcggctgcggacgcctttcgctgtgcgggctgcgtccagtggaacgtcacctctcccagcgcgggacgcg

SEQ ID NO: 369447 - DNA, 414 bp, Zea mays
gttgtaagccgcgagttctgtgtcgcatgttcagactgagcggacgcgtggggaggcgccctggccgagaactggagccaccggacgcacggctgctgccgaaatccacgggagaatgtttggaatccttcaactcggcagctaacgcagtttatttcttctttgctgtttgcctgacacgaggggtcgctttgctgttgttgccgggtgtgtgcaggacgatggtcgaggccgaggctggtagggcggcgatccggcgcgccctgcggtcgctgaaacggaggcatctcgccgaggaaggggcgcacagcccggccatcgaggcgctaacccgtcccttcgccgcccacgctttggagtggaaggagaaggctgagaagcatgagttagagctgcagcaatgctacaaggcgc

SEQ ID NO: 369448 - DNA, 255 bp, Zea mays
cggacgcttgggcttgcaaacatgtggagcttcaggttgcttagaagttatttggagttcagcaaattggcaatatcccactgttcaactttgatgattccatgaattcacacaactgaggtaccaccttttccagtgatgttcacctgtaacggcttataaatacatctgcacagatgcgataataatgtctatcaattttatctccaaggcataagagcattgagctaaataaaaaaaaggacaaaaataaag

SEQ ID NO: 369449 - DNA, 220 bp, Zea mays
atctctctcgccctctgccgcttgttcgttcctcgcgcttgccaccaggcaccaccacacacatcccaatctcgcgagggcaagcagcagggtctgcggcggatcatttgttgagtttatccttgagcctttgtacaaaatttatagtctggttgttgtgtgagcaaaaggggaatgtggaatcaaagcttgctgaattgggtgtcacactgattaatgc

SEQ ID NO: 369450 - DNA, 288 bp, Zea mays
cttttctcccgctgccgtccgccgctcctcctcccacaccggcgacctccgcccggtgttccatcctcccgcaccgcctcccgacgtccgcgtcgcccccacgcatccttaccttttgtcgattgcgcggtaccgtctaccccactaggcaaggcggtaccctccgcccagcgtacaggcgcgcctaagcgagcgcgtaagagctcctttttgaacacccttcctactgccgacggcagcggcgcatagaagagccaatccgccggtttgatctgaagcatggacaaa

SEQ ID NO: 369451 - DNA, 380 bp, Zea mays
accggataccgacggtcaaccgttttttgggaccggtaaaccgttattttagatcggtaaaccgccaatttttgccggaaacccgaatttaatgccacgattgagtatttagtggtcaatttatgtatactagtcttgtttaatgttatatgttatatgtgcagatgttatatgctatatgtgaagatgaaacccgtagctcaagtcaagtttagacatttagtggtcaattccggttacatttcctgtccaagatggaatccgtggatcaagtagcttcagttcttctaataagtatccgtctggacaatactcaatctagctagaactcttagctccaattcttctgtatgtgttcctaagatttgcttgaagatgaa

SEQ ID NO: 369452 - DNA, 290 bp, Zea mays
cccacgcttccgtcccgcgcaaacacgcacgcacactctggacgcgcgctggctggctgcaactgcaaggcgtcgccaccaaccgcagctataataggtgtattgaacaggcaggcagagcagggcaggcagtgtaggctccatcagatccaacgccaccagctagcagcagcagcagcagcatggccaccaccagcacgcctcgcctcgccaccctcctggtgctcctggcggcggcgtcaccgctgctgagcgcagctcaaaaggccgccccgaaggctccggcggcg

SEQ ID NO: 369453 - DNA, 248 bp, Zea mays
cccgttcgttagccttagccattgcggctgatttggcgattagacccgcccggattggatctgagataggctagctgcctgctactggttattcagtggtggaaaaatggttatggtgtagttttagtttaatctggttagttgagctgcaattcagccaggtgggagtgaaatttaggagtgaaattaggtggcgtttggttcacagatgaaattcccaggagtatgatgagagaaatgtctatttc

SEQ ID NO: 369454 - DNA, 341 bp, Zea mays
ggcttcttaattatgaacactagctgccgtgtaccctcagcagcgcgaatcgatcagtcctccctctcaaacattcgtggactcattcatcaagaactcatgtttccgcggggccccggctccggccccagcccaaaagcgcgcctattattatttatttatttatttatttattgatttatatatacatccgccggccaatccatcggccacacagcgccacgccacacgcaacgcaagcagctgcttctctctttccgctccgcaggccgcagcgcccatcaagagcgagaagccctgtcgcgcgcggagacgatggaagggccggcggcggcggaggc

SEQ ID NO: 369455 - DNA, 143 bp, Zea mays
ggtggtgggtatagtgctcccccttcgccgtccagtgacacctctccatcgacacctggaggtagtgatggagggtgtagcgcaacccctccgacgtccagtggcacctctccgtcgacgcctggaggtggtggtggagggtg

SEQ ID NO: 369456 - DNA, 295 bp, Zea mays
cccacgcgtccgcccacgcgtccgcccacgcgtccgcccacgcgtccgcccacgcgtccggagtgagtgagagagcaagcaggttgctagctgctggtagagagagctagcagttacagccgaccaggtagctagatagctagccatggagccggggtcgacgcccccgaacgggtcggcgccggcgacgcccggcacgccggcgccgctgttctccagcggcgggccccgggtggactcgctgtcgtacgagcgcaagtcgatgccgcggtgcaagtgcctgccgctgccggcg

SEQ ID NO: 369457 - DNA, 258 bp, Zea mays
cttacatacctcatgaaagtattgaaagttaatttggaagttggtgctggtacttgaaatttcaactcataattttgatttatgctagttgccataagcactccctataggatagggtttgccttcaatctctctaaaaaaatattttgatctttggttttcttgatgcttgagtagatgagtatcaacctaatttgtcagtagtgactatgggctaaaggaaaaacttttttgtccttacaattaaagtccaaagta

SEQ ID NO: 369458 - DNA, 408 bp, Zea mays
cccactcgtccgcccacgcgtccgagagagcagggcatgcatatgacacactatcatcattatcagatatagaactgaaggcatttgatggtgttgttgcagtgggtggcgacggtctatttaatgaaattctgaatgggatacttagttctaggcacaaggtttcatatcccccaactcctgaggggtttggatatgttggaagcagtgataactgtgaagaacagacaagaaattgggttaactttagtaaacccacaccagattctgggaatgccgtgtttctagggaatccaagtaaatgtgatgaccaagaaccttttctttcaacttcacatcctaccgagctagagataccatcaaattctactaaagaaccatgtattggagatcaggataacccagttt

SEQ ID NO: 369459 - DNA, 456 bp, Zea mays
gtccctccttctgcacacccagagtgtgcatgcgtgagagtacatatatatagtaggagaatgatgatgatgaacaccagcgccgccatgtcgccaccaagtaccgacgtcgtcgtcgacgacttctccctcggcgccatgcatcagccgtacgtcgtcggcttccacgccgacgccggcatgcgcatcatgcccagcgtcgtcgtcgataggccgctgctccagcagaacaccgacctattagaagagtacgacagtttcgacttcgcggccacggggctactaccgttaccgttccaagaactacctggtctcctgccccccgcgaattacctgccgctgccaacgccaagcatggccatgtccccgccgtcgctgaggctgctgacgctccgggcgtgccagtgcctacggcggcggtggatgtcgtgtcggcggattgggcgggggcggcgc

SEQ ID NO: 369460 - DNA, 403 bp, Zea mays
cccacttttccggggacgcgtgggtgacagcgtatcgcattggattatgcttgtctgttgccagttgccgggtgcttcctcaaggtcttgctcatggttgatctcgaaaatatgttctccctgaactcataccagaccatcttatagggtggtggcacctgcatgaaaatcttcctgggcagtcttagacattaattcaacagtaaaagcataacatcatgcaagtataccaaatactgagagcgtatcgcattggattattagcagcgctttgtttttgtcgtctggtacctattttttggctggcggttattacaagagcggtctcatattataaattattatatagggcgttcattggttgtgacgctgggaattgaggaaatatacattgcttataccg

SEQ ID NO: 369461 - DNA, 323 bp, Zea mays
cggactcgtgggttttctattcccttccattcatattaatggatgttgataccttgtgattgcaccaacccgctcaattgtacttgagatagcatcttctttgattgtcatcttttgcatactcttgttgacggtgctatcatattcttgaaaaccttccacgctgtccatctgagcattcttctatctctgcatttgtcccttaacagtcacctgctatgaggttccatttggatacccatggctggattcagtttgagattattatatatcttttgttctagctgattctgttgttttctttccatccatacattatcact

SEQ ID NO: 369462 - DNA, 249 bp, Zea mays
ggaagaagatcttgacaatgatgatttatctgtcgatgataatgatatatcagaagaagatatggcaaggtttgaaaaggagttggcagaagcaattgaagatgtcagtggtgttgatgactcagcgggggattcgttgctgagctctggcgactatggtattgttgagcaactagatggaggctaacgggcagagctgaaaacctggcaactccccagattggctcgcgcactgaaactaggccggcg

SEQ ID NO: 369463 - DNA, 287 bp, Zea mays
gggacatgcctattctaatttttataaatccatacattttagtttacaacacaaaactgtttggttaagggagcatacatgtttgtaattgggaatcgttagcgtttatacttggcacaatttcattacactcgcataagcgatttcattgctcacctaatccggaaattccacatacctttacaacaattccaccgggggaagctacatttcaacacaaaactgaactacatcacggcctaattttatcgggaagcaccgcttttcaaaacgaaaaaacaagccct

SEQ ID NO: 369464 - DNA, 438 bp, Zea mays
acctcagaatgaggttagtgttgttgattgtataacaaagcttccattacaccgggattggtagttggagttgaaagcaaaacctttcagatttacagtaaccgattcaagctacacaacctatatcctactgtccagaactaaatcggttagaacttcgtactaccaaacacttggacaaccagatccatgcggagatcatgcttcatgctttatagccatcaccagcgagacattaggtgatcatctgtcatgacatccatgaacaacagttgactaagaactcccgagagacaggtgcataacggcagccatgagaactccaaggatgcaaccggccacaacctgaggaacagtatgtccaaggatttcacgcaatggctttgtctctgaaatgggtgttcttctggtagctcatagacaatttgattcagcacc

SEQ ID NO: 369465 - DNA, 124 bp, Zea mays
tttttgaggcatcccggggggcaaactcgccatttattcgtccacttaacctcaccacaaccagtttttttctacagtcatttctggtaattaactaaaaagggcccgctctctgtttgcaatt

SEQ ID NO: 369466 - DNA, 371 bp, Zea mays
ggagggaacgatcaacttgatatgttttaatgttcatttcgttcatagtagatcgatccatacgagtaaaagaaaagcagaaaaataagaggtagaatttgcaaggttcaagtgcggacgaaataacctggcactcacatggtaccataaccatattatatagtataatcctatacacaacaatatcaccactgcctcacaaatgtaatcacctatatataatatacttcattcgttcttttttatttggcgggttttagttcaaaactgaactagaacgacaaatattcgagaacgaagatagttaaacagatgtccaagaagaaggcaagaaggatggagataatagaaaaagacagagagagacttac

SEQ ID NO: 369467 - DNA, 459 bp, Zea mays
aacagcagatctgttggtttctattttgttgcaaccagctaccacaagagataatttcttacaccaatcattttagaataaattacaacatctcatacgagccaccacagaaatcagcaaaaccagcatgctcacgttgccagcaaatcagtagccacttttttttcaccctctactcatcaaatgtctgacttcttgtgccaccttggttttggaaatctggatatcggtggtttctgaaacttggttcgttttggatatttaaattacgctggtttctgtcacttggttcatgttggaaacttgaatcacgcttattcctgaaatttgactcattttcataactttgatcagaacggtttccaaaagtttgaacatgcaagccaaaatcatcactcatgttcgtatgagcaaaacttgaatcatcctggcttctaaatcttgggtcacgccgagcat

SEQ ID NO: 369468 - DNA, 390 bp, Zea mays
ttttcacaaaatatctcttggtagacccatttcataggtattacaaacaaaattcatagacattcaagtttgcctcatgttgcttttggttgatcaataacacgcttaaacatagtcccaattattgctctttgcgaatttgtagaatctatctacgcctttgttcttcaagaaatgtaacaacaaactgacggttgttccgcgccaccaaagctttttgaattggtccaaaatgatgggtgttgtgatggaacagattgaagtgtattgcggtatgatccgaagactcgaggcactctagaattacacatttaaatctctgttacaaatcattataaagcaaaacttagtgacagatgattttgaaaggcgtaaagacatgttgtacct

SEQ ID NO: 369469 - DNA, 269 bp, Zea mays
ggggggattggggtaaaatattattccgctcccgatttcggtttttcccacaggttcaggcgaaaatttttccggggttggtccaaaacctttacaaccccggggggtttcctttttttggggggctccactccacggggattcacttattcgggaaggggcctggcccctttttaacccgggggaattgcattcccggggggggacttgtacccctggctgaccgggtcccaaaacgcagggcccggcttcgaggggggaaccttttt

SEQ ID NO: 369470 - DNA, 239 bp, Zea mays
aagcatggatggatagttataacagcattgtttagcaaaaatagtaaggatagcagtacctgacttggtttataacagcacaaaagaaaaatagagttccttcaacaaagtatgcagacggtggcacactgctcgctcaaggggagagagcagggacttcaatgaggagatgatgaccgttgcagttcccggggtttgccttcgtcttgagcctctttgtgctctccgcagagaaatgg

SEQ ID NO: 369471 - DNA, 218 bp, Zea mays
aaaagagggggggttttaaaaattattggttattgggactaccacgcactcacgaatggaagaaaccagccatacccacataagagtggccaaactacgggtacgaggggggggtactgatgagtagcaggggagcttggctcgtcgagttctgacagccgggacagaaagagcagagatggaggataaggggttcatcaatcatcagttcagttggg

SEQ ID NO: 369472 - DNA, 162 bp, Zea mays
aaattgggggtgttagaccactagaaaagggggccaaacaaaaaagattttgggggcaaatacagggggataacatggaacttcaaacatgttacaaaaacagggccaaaaaataacatgaagggacataacattgactaggtttacttgaaagcaacagaa

SEQ ID NO: 369473 - DNA, 247 bp, Zea mays
gaaaatcaacaagcgggatttaaagataaaggagcaattcttgccactacaaaggcgatgaattgcagaactaaatgggtaaacttcatcttatttgtaacaaatgagctgatcatcacacttccaacatgaataaatgtgcacaggcttgaacattttctttttgtgccatgatcacagttgaaaattatgtgcgcagatgggacgcttttgtgcaatgaccatattttcaccgaatgacaatacc

SEQ ID NO: 369474 - DNA, 270 bp, Zea mays
accggaggacttatatttcgattaccccataaattactagagcagagcaatgtttttttacaggatacatcagccattcacaaaataactaaacccgcatttttcctgctgtacagtaatccttacaaatgatggcagactggccacaattctacaatcttttttaattcccttcagattttcttaccaagggcttgactctgatctttatccttggtttggctgctgcacgtgcagtatctacagctgtttccttgcttgatacccggg

SEQ ID NO: 369475 - DNA, 145 bp, Zea mays
ttttttttttttttttgttgtttttttttgaaattttttgtttttttaaaatttttttttttttttttttttttttggacccccttttgcccataaaaaccaaccccaattttgggttcaatccccaaaaaccctaatccccccc

SEQ ID NO: 369476 - DNA, 162 bp, Zea mays
gtctccctgaccagacgcgccagctcggggcaccagacgcgctccgcctcgttccgcattcgtcccaccatggggtcagtcgcctccatggtcaccgagttccccgcgagctccggctctgggccgttgatgtaccagagccagttgagcctgctcctgggc

SEQ ID NO: 369477 - DNA, 340 bp, Zea mays
cccccccggacatttatttttgtgaatttatgggggtacgacagaaaaaggttaaaattccatccccatctagaccggggaggttattggtgaataccccccaggtcccccaaaaaaaccagggacccccaaaaactggttttattatggttttttaccccgttttccccatttttcagaacaggtgtttgccaccctttggttccctttcatttttttgcgaagaaaggttcactcatgatgggggggccttttttttttttttttttaacagattttaccaaactttttggtttgggttgaaacacccttaccggccgggttagactttttttttttt

SEQ ID NO: 369478 - DNA, 327 bp, Zea mays
aacacaggggaggttttatcgaatatggttcaaatcgtacaaatacagttagtttgggacgggagcgagtaattctcagactcctcatgtgcacagtcactttttcctcataatacatccaggtggggttcctcccccagttcactctataaaaaaactatcacacctacggtcacaaggtttctaccccgtcgatatatatatacaaatggattgcataaaagaaattatagagggcgagaacactctgccgtatcagtcttgataactctggtgttgtaagaaccacagaaaccacacttgtggtagagccaatgaaaccgtgac

SEQ ID NO: 369479 - DNA, 186 bp, Zea mays
gggggggaaaaccagtttggctgatttttgataggtaaaatggtcatgccccttttaaaaaagggggggggttttttttaggactacccgaacattaaggggcccctaatttgggggccccctttttgggccaaattgggtcaaaaaccttggggtttggaccaaggacttttaccggccgggggt

SEQ ID NO: 369480 - DNA, 328 bp, Zea mays
  unsure (1)..(328): unsure at all n locations
caggtgcagggttggcttttgtgaattatgattgcctatggcatctgaacgttttcacacatcgcagtcatgagtttcgacaacacaacttgtacccaaaagtaaaagtttaaatctggaaaaaaacaggtgaatttataagatcaaactgggtgcaaagtgggggttaagaatatgtgcttggcgtgtactttgaactccaagagctacataatgcagtggatctggtgggggcctctgcccccttggtcgactcatcaaaaaaaaagaacttatgctgactgcagcagtaacctcagtcttgagttntaaccaactccagcaccag

SEQ ID NO: 369481 - DNA, 224 bp, Zea mays
ggggtcaaacccaagcttttttttgtaaaaacacattaaccgtacacacttcacactggcattattaggacggctttggtatttcacaggcaaaccaaacatgccccccccaacagttaataaaccttatcaaaactaaaacgggggtgtttactggccccccttgttcaggaacaaaacaccaaaatgtcgctccaacagcctgctgcctggggctgggggaa

SEQ ID NO: 369482 - DNA, 299 bp, Zea mays
ccccccccaaacagggggttgtacaaaaacaagcccaagctttttaacagccatttacatggaccggagactgggactaacaacttaaagctgggaataaccttaagtttgcaaataaaaaaggtttatgggtggccggacatacaagtttaaacccgttccaggttccagccgttttggagtttctggaaaacctttttaacgaaaaccttttaaacttgacaacttgggagacccctgggggaatccgaagcttataacgaggagccctacaagttttttttttcagtaaaaccaat

SEQ ID NO: 369483 - DNA, 190 bp, Zea mays
ccgaaggaaaggaattttcggggctttttttatttaacaaaaaacgttttgccccaacaatgcaggacaagcattggtcccagtcccaaacatgggcccatggccaatgcaataggaaacccccctttttggaacctccccctaagggcccccgccccctttgaagattcccaccttagattgaattttt

SEQ ID NO: 369484 - DNA, 319 bp, Zea mays
acataacattagatgggctttctaaatataagagatatactgattcggtttagacaaagataaaaaaaatataacaactaaatctagacttctttatctttaagcttgcaaaccaaggcaacggtgatccctgtcctatacaaagacgtagacgccggcttaaggagctcacagctttcaatccctctgtgctctctgtcttctttcgccactccaatcaaattgatctctatttgttatggacttatgcagaacatactacaccggaaccttgcgagcatgccctgatgtcctggcacccgcataacagtctaccatt

SEQ ID NO: 369485 - DNA, 400 bp, Zea mays
aaggcaaaagaattgggcaaatataaagataatttttcttttattttacaacccatgaagatgtttcttgcttcaagcatccctaaatagggtacgaaacaccgacttatccattatgctacatagatcctcaaaaagcggaaaccaatttcacattccttggttcggatatgcattcggaataaaaaaacaccgaagatttgaacagaatggaagaaacatgtggacagcccttgttgccagcatctcttatgcataatgatacaatgctctacctgcatcgttggaaacataaacctatgaatcaaatgcaggaattaataatttacaacaaatgtcgttcataatatttgatattgatggttgcaaacaaacaaaacaatttgagcattagctattc

SEQ ID NO: 369486 - DNA, 451 bp, Zea mays
tttgacgatgtaaaagctttggggactgtcttgtctggtaacggggaaagcttttatgcacattggaacgttatctagaacacgaacttggttcaatacttattacaaaaacagcactggtgtgctgagtttggactatgtaaaccaaaaaaaaaaatacagacgagaatgtgaagccctccggatgccacacagccaggcaacaccgaataatccaggcgcatactctctgcaactcggtgttaattgcgcggttggatatatgtagaacttgcctcagagaatcgtgcatcggtttctttgttctccaggagatatggtggccggctgaaacctgttcggatcgaagctatccaccccgtacttctctctcatccgttggctccatgcgtcgttccggattgggcggtagtcgagattgggcacctaggatcagcagcagcagcagcag

SEQ ID NO: 369487 - DNA, 416 bp, Zea mays
attggttcacctttcgttgatcgcataagagatgctgtggattattattacaatgcctgattaaataaagagctaataaaaacagcaaaaacaaattttgcactgacagaactgaccatggcattgcttacacgttaggagttaatcaaaacttttctaatcgcgacggccaagcccaaaatcaagaggcacctaaacagtgacatggatgcagcggccttcatcagaggtctaacaacggtagtagcagagaaggtgagaccacgtacctcaatgaaatggttcatcagcacgtcagcctgccactggtattggtagctctgctccttggaagacgaagaactgttgctgctgcctcctctggtggccttcttcagcagcagctcagaccttggttcgaagttcgtctgtcgccg

SEQ ID NO: 369488 - DNA, 309 bp, Zea mays
tttaacttttattttttttgttttttttttttttgtggggttttttttattttccgttccttcttccgggggtaagtttttaaaaccgggaaaggagggcacaaaagccaaaactgcagtttccaaaacatattttttgaagagtccacccaaacctgttttaaaaaaaaagggtttttaagccgggggtccagggtttaccgggggccccacttttaccggggggcggggttttttctcaaatttacccttctcaaaaactacaggtttatctaaaaaacagagaaaataccccccttttaaaaaggc

SEQ ID NO: 369489 - DNA, 293 bp, Zea mays
  unsure (1)..(293): unsure at all n locations
tttnaattanntttttttttttttttttttttttggttgtttttttttttttttgttttttttttggaaaacagattttactaggggtccatttattatagagtactccaacaggggccgggcagccgggcaggcaatggtacacaaagctagactgcattactaggagtagaagcaagcatgcattattggactggaaaaaaagctaaggcttgttttaacaacctagctcgccggatttttccccaaaacccccccccttgctgttgcagggcaaaactgccctgccccca

SEQ ID NO: 369490 - DNA, 353 bp, Zea mays
gcactgctaccagcaaatattttttactagtacattcggaattttgcgtgcctgttcatgctaatcctgcaaaaacatgcatgaagtacatttttcatacggtatcgagtatagaccatttttgtacacgtggagactgcagccactgcaactaaaagcaccagcaacgtttttcacaggaagatcatgacgcattttgggcagcaccaagtttgttagctcctttgtccagtttcttttttgacaccttttgggatgcttccccttcttggttcttcactactggtttgaactgatattcagaataaataccattcctcctgatttgagccatcatgtttaagaaaagatta

SEQ ID NO: 369491 - DNA, 336 bp, Zea mays
taaagacacaaatacatagctgcaatgaaaccaaagttctaatgaaaacaaaatagtctcggcaatgctgggggcagggcaccaagccagttcagcagcatactgtatgtctaaaatacataaatagagggcaaaacttggcccctatcagttacatatatgatcacttaattgtttgcccttgataggtctgcgagatagcagtcccttatcttgcgcatctcgggtgcggcatcacccatgggctttctctctgagggtgttagcttggtgcaggacagcgcgagcttagtgacagaagctatggcggtctaaatctcttcccctgcaacgctt

SEQ ID NO: 369492 - DNA, 388 bp, Zea mays
aagattagcttttgggagggtttatttaaacaatttgcgatgccacacccctgagttaagcattgcaaacacgattaaccaacacgataaaataaccacagttcaaactccagagagaacatacccacaaacacacaacattacaattgatcggggtagctgtcctttggtcccattttggaagccagtcactgggccggatgtgaaccattgggccgtcctagacactaggcggagctgaacaaaatggtaccttccgggcttaggcttggctatggagatcttaatggttctgaagcatgtgcttgcaccagtaggccgacgccttggggtggggttcgagcgtgctgaactccaccttgaccatgccgaacttggacgagtaccc

SEQ ID NO: 369493 - DNA, 413 bp, Zea mays
aacatcactgtttacataagaaggtgagccgcaaaaggctcaatccacacacacaaaaacgtattctataattttaacaacagacgcaccataccaaggactcttcttgatggcggaaaactcatgtaagccaaaaatgcatgaatacattgctccaactaccccacggctgcaggaagaaccagaggaggttttcaacttttcatgactcgtatatgggtaccggtaggaaagggaatggagccacagaagcataggaaactggagggagtgattgcacacgagaaggtttcgtgtcttggcgtttctgtcttgctcgttcttcgtcctgcagatcagccccgtacagaactccgtccagctcattgttctcagccaggttgtgcgccttttgttcacttggtagccgatgt

SEQ ID NO: 369494 - DNA, 390 bp, Zea mays
  unsure (1)..(390): unsure at all n locations
cccttcncaccgcgcgcagccgcacgaccgggcggctaacaagaaaaaaacgggcggcgcccaaccagcagcagggccagcagcaccccaacaaccgacccaacaagcccaagcagcagcagcagcccccaccaccacgaacaccgacgacacaccaggctccccccgccgcctcccccgccgccccgggcgcggccaccgacggccgcgggccgggccggccgacggaggacgagcgcgcgaccaacacgaacggccgggagcagggccggggccagtgcggcggcaccaacctggccacgcacaagcccaccggccgccggaacgcgagcaaggccagcgcgacgcggaagcacgcgcacagcgacgacgacgacgacgaccgccggg

SEQ ID NO: 369495 - DNA, 226 bp, Zea mays
gagataaaatagtacaaaccaggttgttcgttggtgttgttaaaaaatttgacatatgaattattagggtgaagacatgaatgcctgtgcgatgtacaaattaagttactttattgctagatagtttttgtgcattgtcgaattgaagttttttgttactgcctgcaatcctacctgagcttgtggcctaacaacgatgcagtaaaacgattttactttttagttg

SEQ ID NO: 369496 - DNA, 285 bp, Zea mays
tacatgctattgctacataaaatacaattcattatgcagtcacctgcaattctacatagattaaccaccccggtagcctacgtactacataatcacagctacttccaatgatggggatgacagaaaaatagcagcatgaccacgcctcatcttgtagtcacccaaaaaaaaaccttgaactactgaaaaagagacggttatacacactgatgactgatgacagcaagcaaggggaagacaaccttcaaagaaaaaaaacacagaaccgcagctactctctagatc

SEQ ID NO: 369497 - DNA, 178 bp, Zea mays
gagcagcaaattttccgggctttttgcttccattttttggcccccctttaagggaaaaacaattaaaccgggaacttaacttttggaataggcttgtttaccttgaaaaataaggggggtttttatggggggctttaaaagtatttttcccgtggttagggaacctttttttcccttt

SEQ ID NO: 369498 - DNA, 148 bp, Zea mays
caaggggagcacattttaaacatgccgaatacaaaatttggaaaaagggcatggccagttttataacatctttcgacccaaaatttttgggggggaaaagtaaacataaccccccggtgttttggaacagtcccccgatcaacgatcc

SEQ ID NO: 369499 - DNA, 232 bp, Zea mays
gggcagatggttttcccacccaggggaacattttggtagtacattctttttacaggtactggttaatcactcagctacttacattaacatgctttagagggtccccaccacaaccaacaacaaaaaaatcctagtcaaagggaagctccacctccatggctccatgcagttaagtcaccactgcataccctggctggatcaggcaggccctggtctgcattgcatttgcatc

SEQ ID NO: 369500 - DNA, 326 bp, Zea mays
ggccgggaaactatattaagcataagtttagcgacaatctgtagcaagggtagatggtattgaatgtatacaaaagtgcactcgccttgctcccgcacctaagccgagtgggagaagctgctggcatattgaattacaatctgcttattacccgttgagaagaataaacagctaaaagagtagaacaaatgatggctgctatgcaagttcaagtactgatgatcaaatattaactcaacaataaagatgaaatattaaaaggtaaagtacctcatattgaagtgaacataaattaaggatgggtagtacaaaacacattcaccaaa

SEQ ID NO: 369501 - DNA, 162 bp, Zea mays
aaacagaaatttgttaaatttaatgaagggttataaagcccaattttggagggaagggttaatcagttaatacattttgcccccattcctaccccataatcgaaagaagcaagaaaaaacacaaaagccaaagatagggtttacccacagaaaacaggaatt

SEQ ID NO: 369502 - DNA, 306 bp, Zea mays
gttgtgttgttgccctgcgaaactttaaatgcgccatcattatcagcaagcaagaaatacatttggttaaccgaaacacctgaacctgaagaacaaatgcagaaacacatcgcaccttgtcaaaaccattccagtttaaacacaaaatcgctggttctacagaagcatgttgtcaccccctaaacacacacattggcagaggggagcaacaaccaccttactggggtccaagcataaatagcttgtagcacgcaggtctctctaatcaacttagattactggccggcaggaccaacaaggactccc

SEQ ID NO: 369503 - DNA, 172 bp, Zea mays
gggaaaaacgggcctggtgattgggattgcaaaacgggggttgggccccaacttgtttgttaaacccttcatttgggccagccttagtttgggggggggttacaagttacaggatttgttttttaaaagatctttttggcaaaacctaggggcattatcattcatttaaaaa

SEQ ID NO: 369504 - DNA, 168 bp, Zea mays
aaaaggggatccatcgttttgaaaccataaaattggacccccttccatttttaaaaagttggggtttgttaaacattccttttggaaggggttttgaaaatttaattaccttcacgggcaaaatcccccccttttttacaagtttttccacaggtttttaaagccccc

SEQ ID NO: 369505 - DNA, 268 bp, Zea mays
caaaaattaataaatcccccttcaaagaaacagaagaagaaatttacatgccagccatttcattacattaagggctaattaactgccccgggagagcatttttttgggggcacgggaattacacgggcttttttgagataattaccacaaacaccccaagggtaactatttccacacgttttactccctgcccttgaaatcctgagtttattaaaactttaccccctaaccttaaacaaaagaacccgattaattaattcccccttga

SEQ ID NO: 369506 - DNA, 345 bp, Zea mays
aagggcacacggtacactcagggattaatttcctttcaaaccaattttttcgtttactacaacacactcatagggtaagcccattcaaacctcccaaaaaaggcaatactaacccatcaacttaattttttattaaacctaatccaccccagcttgtttagtaaatcaacccatttttacccaaccaaaatgcaaccacatgaaaacacagccctttaaactcattttaatccaaacccattagcgggcctaatccacttttgtgacaacttaaccttacacacctttttttgacaaattaaacaaagccacttttagtatcaggactttttacaagcttacaac

SEQ ID NO: 369507 - DNA, 171 bp, Zea mays
gggggggtccactgattaaccttaattaatgaacagaacatttgatggccatctgaagagaacaatatggaatccaatgcatatacaagcagggcggcatcgacttaatctggctagctagctagcttgtgactggaccgggttattttgtagcaagctttcgtatctttt

SEQ ID NO: 369508 - DNA, 332 bp, Zea mays
ccaaaggcaaaatcaaactctcgatcgcactaggaacctctctacactgaaacaagcgttttctttttcatttttgttcccattccagcgatctcctgggccatcgccgcccggctacttgatcctgggcgccggcgcggtggacgggggcgcaaagaacccgacggcgcggcacttgacgtccagcccagcaccgccgggcatcggcattgccccgacggccgccggcgaggtggcggtggagcgcttgtaggggccgagccacttggcgagcatgtagcgcgtcttgcgccagggcgggacgtggaggccgtgggcgcggagcgagtgga

SEQ ID NO: 369509 - DNA, 360 bp, Zea mays
gcaacggaacaaatgcaggttatagtgaaaatgtctatactaaactgcttgcgcatgatgtctcactgcatctgtcgtatctatcccttaaaaccacacacacaaaaaagcttctgccagccaaccaactgcaccaaaaattttggcctagcctttaactttcttggacctctttgggaaaagcttgcgcccctcaaggagaacctgttggtgcatctgctcccacaccaagtcaaactggtcatggaatctatcctggtaccacaacttgagctcaggatagagaaaaccaggatcaaaattccacacgcctctcagtgctgccctgctgtcgactaacttcggaccgatcttcatcct

SEQ ID NO: 369510 - DNA, 195 bp, Zea mays
cttaaacccaaaggaaggggcttttttttttaaaaaaaaaagatgcgttagagatttttgggggattaaaactacttcaacatatcccaccacccatttcccgtgcaaggttaaaggaaaacactttctttgacaggtttacagacaccgctgacgctttttcatttttgggaagggcgcttgaaaggtacaagg

SEQ ID NO: 369511 - DNA, 319 bp, Zea mays
gggggggtggaccttaaaaccacacacccccgggggttaatttttcctaaaaaaaagacccctttgtttaccactttcaaagattttcctgggacttggaacaaccggtgtttactgggggttacgattcaagaacataaaaggtttaaaaaattccaaagaccggggggggccccaaatgtaaaccctgttttttagcccataaaacttttaatttctggggggacccatggcgggcccagggaacacttttttagaagaatgtcccttttgggggggggactaacttttgattttgcgggggggccatttttttttt

SEQ ID NO: 369512 - DNA, 154 bp, Zea mays
  unsure (1)..(154): unsure at all n locations
acccnaaaggggggataggtttaccatggatcctttttaaaacacacgggagttcgggacagaacataattttttatacacgggcacacattttgataaggaaggagacccaccccaaaggggggtttgctgctagcttgatttattttttagg

SEQ ID NO: 369513 - DNA, 378 bp, Zea mays
tgattaacaattacgcattcgggtggttttctatctcataactctgtgaacactgaattacagcaggcgatctgtagtgactcgcgcaaaaacggatggcatcgaacatctccccaaaaaatcacctcctccggctcagaagctcgcgttttttcacaacagcaaccccaaccccaacatccagaaaagcaaatagcaaactgagcagggaggagattaatactaatcactactactagtctacgacaactatgtgtctatgtctccccctgcagtcctctgctctagttcgcgccatcaccacgaccacgtgacagggcttgcctggtagctcgcggccgggagctgtagctgcggcgaccaacgcagtgctgcgct

SEQ ID NO: 369514 - DNA, 326 bp, Zea mays
gaatataaatacacggggggtaatttataaatcatagattaaattcacataactcataaaacataaaaaatacataataccaaaaagtaaaaaagttacataattcataaataccttttcagattacttagacttttttaaaaaaaaacttatgaatttattggacatcaactaattaaaagacgacacatggcaatggcagtcggtactgaactacttctggtaagtaccgaccgcggcggccggcagcgccatcgactgcagccccacctacgcccgttggcaccggccttgtgcttattccacaaacgctacgtgatcaatca

SEQ ID NO: 369515 - DNA, 75 bp, Zea mays
tttttataattaagcagatgaagtatgtattgtaatataaaaatcaacactttttacagttacagtagacacaac

SEQ ID NO: 369516 - DNA, 396 bp, Zea mays
gggggggattttcaacaaaaattttttttgactactagtctgctatgctggcgcatcagggaacgatatataataacggaacacagaattgaattgcgtgatgcaagagtagtatttaaaattccagccatctcatctcctctcctctcctcgtagacatttcaggacactgaattgcaaccttgcatcaattgccgaatctgcatcagggggaattgcatcaatttcccacgtctttcgttcttggtttggcaacagagaagccttatttcgttcttgggctcactggacaggcgctttactgtcttcccatttgttcagtcttttctgcgcttcttcaacctgcaatccaaggacattcggagtgaatttagaggcaaattcaaattaagcttt

SEQ ID NO: 369517 - DNA, 416 bp, Zea mays
aagcttaactgacctggtatccattgattgagcttgactgaccacgagttaacgagttcaaacacatgtcattgtatggcggtggcgaggtaagacatcaaagaagaaaactcttggttaaacgaaaaggaaaagaaaagccaagtcgtgtggtgtggtgagcatcaaagcctactgactccagaaccctagacgcgtctacagtacactgcattttatacagaggcggattagcacacctcctacataggccagtcttactgatcatatacatactataaaaagcttcaagggcgcctcagctgcggattcaaggcatgcacatgccctactgggagtctggtggtcaccggagccccgtgctggattgttctggaagccgctgctgcacccattcgagaagcgattatcatgct

SEQ ID NO: 369518 - DNA, 330 bp, Zea mays
agtagcaaataatgcagtatttagcttgaaaaaacatttataattgttcaggtgtggatgtgatgtgatatgacgaaacgacgacccaggcaggcaggcatgcaatcaatgcacggtggtggttccattggtggcgccgccattgctgtacggcattgcagctggtgcgccgtcatcgtcgtctcctgcaaccgtcgccgctcccggagaagaggggatggaaatgaaacgatcgtcgagcatctccgacgatccccgggcgccgtggtccgtcgtgacgctgacgctgacgcctcccgccttgggatgcggcagcagcgccccggacac

SEQ ID NO: 369519 - DNA, 237 bp, Zea mays
tttttttttttttttttttttggttggtttttttaatttttttttttttttttcctcttttaaaccaaacaagacgggatatataccaaggctttttgggtttagcttcatttgttggattgaaatgtccaaaaatccctcaagagagggttcacatttaggggtgttttggggcccataaaacctttccattacctggtgattgatttcctttacatcctcttgcatgtaggggtt

SEQ ID NO: 369520 - DNA, 382 bp, Zea mays
aaccaagcgggtttttttccatgctgagcttatcttaaaaaggttccacgacttgcatggcaagcacagcacagacaccagcaggtttttacaaagtttcttacaaacgaaaagaatcatcaaaaaaagaagaggaagaaaacatgttgtgtttgctgacactcccaaggtccacctaccaaaaaaacgaggaaaacaaaattgaagcaaatgcagttgctaggaggaggaataactaagtgtgggccggctaaagctgggggtaaactctatagccagtcagcggcatgcctgctgctgctacgtctccgacgacgagcggcgacatactcgtcgtgcgtgtcccgctgttgcctgcctgctcttggtgagcaaaaaatac

SEQ ID NO: 369521 - DNA, 298 bp, Zea mays
gtgggggtgtttaaaacacggctcttaaataatatcgccgggtgcgaagttgatcccaacgcagtcgtggcggttaatttcgtcccgtgcgaagttgctgatccctaatgcaggccaaagcacaactcacatggatcatgttgtgcttcaagggggttagggctcctggcaaaggaggggaagagagggaaagagtcgggttattgatcctgagtgagggcgcgaaccctcccaacacacacacacactaccacatgttgtacaatagacaaataacctgatatggttttttgggaac

SEQ ID NO: 369522 - DNA, 295 bp, Zea mays
aaaaacgagttggacttcatcattcatccagtatactgtagttgctgccagcaacacccagaaattagtcccaaatggaacaaggatgaatcaatgatacattgatcacaatttacgggcacaaacttaacccattccacaccacaaactacaggtattcattcatacatagtggtagccagaatcgacatgtggctttcataaaatgaccacattaggattcacgcatcgtatgcatcataatcaaccggcaaaagcttttttgcttctcaaggggaaaaagatggagaaaaga

SEQ ID NO: 369523 - DNA, 340 bp, Zea mays
aactcagaggaacaggggttattacttcttaacttaagtttaatttggtataattttaagcggttttggcccctgctatcatacacggaggagctaaagtcgataaagctaaaaacaatgagctaatcgacttataatttacttttaaaagtatatttatataactaaaacacggagcagctgtaaccggaaacggaggagcctcaacaggcggcggccacagcttaagccaaccttgacggcaccgcaggacactgcgaaattgcacaaccgtgcacaccatgtcaatagtcagctagccggcacttgccaaccatttagtcaaaaggtgcgaaaatac

SEQ ID NO: 369524 - DNA, 249 bp, Zea mays
gatctgaaattatgagtcctcatcgatcactttgatgttatatacatccaatttggcatgatcacaagaccatagacccaacaaaacaaaaaagaagaacaaagtttacatcacaagagctacactagaacagtaaggcagtacgagtatcaagctagtcgataatccatcaaaacccggtggtgccggtggacaccgccgccgctcatcactcatgtcgacctccgccggtggccggcgctgacggca

SEQ ID NO: 369525 - DNA, 328 bp, Zea mays
caaacgggaaactccattgaaatttatcattgacccaataactggggttcatccattaactcatttgtccgggtaagacataacttatgccattaaataaacataacatatttttcctaaccccttacattacaacaaagatttccatcccatgaccccaacccaaacttttgtggtcacccgtttttacaaaaaagaacactttggtttatagccccaacaggatctagaacgggccaacaaaataaacagggggaactgtcctctaattataatggggaagtcttcacagccttgaatgctggatgaagcagcccaagctcatcct

SEQ ID NO: 369526 - DNA, 361 bp, Zea mays
ttccttttttttttttttttttttttttttttttttaagggaaagagaaaaagctggcgtttcttctcctccaacgcaatttgatccaggaggaagaggcgagcaaagaagaatttcaaaggggaaaaaaaacttctctagctagcttggggttaaattcatgcctaactcaagagtcaaactaaataaatatcctctccacatgatcgtcgtcggtctcacgcccctttctgtcgaccggattgttttgtctccataatctgacaggcaagccgtgcttgggcacagggaacgggctgtactcgacctcgtcactggatccaacgatttgccacctgcaaatttaaaaataaagcatgca

SEQ ID NO: 369527 - DNA, 249 bp, Zea mays
aaccaggctaagattatccaattgattaatggggcacagcaattcttgtcaaatctgaacccaattggatacttttttgtcccaccaagatctttatacatcaacaaattaaacagataaaattaggagttgagtacaagaagaaacaaacataaggatagaatactaacactgccttttcatctaaccaacaaactaaactcaccggcctttccttcgtgacttgaaggggaatccgcaggaggtgat

SEQ ID NO: 369528 - DNA, 462 bp, Zea mays
aagcttccacgccttggttaaggacctttgtgctggttcccttgaacgccatgaacccatcgagatcatgatgatgtccggtgtgagccgcagcactagttatctggagggctgagaaatgcagttcatcaggggatgctgtttttgttggatgcactggcggatgtttcgtctccatgaattttaagcctcccaagttatcccatgaagaccctgcattgctcctcacttggccataaagtggttgactaaagaaaagatttgtccgctgccttgtatcataaaacattgtcgatgaattgaatgaaattgtgtctgcctgaggtttcctcctccgtgcattatgatgcatcagacgcctacgacagcttcgtttgttctgatcaaactccgctaaaccatgaaaactacaaacagagaaggattaaagaaaagagggaaatggagcttcattatgtcaac

SEQ ID NO: 369529 - DNA, 203 bp, Zea mays
ggggcccagccccagcagagagacaggggacaataattgaagacgcatttcaatttacatccaaatgcatgacgctatttacagacgccgacacatggacccacccaaccttactactacattttagcggacacatacaaacatttagcactacatacgccaccctatttacatccgagagctgggctttgctcccttgcacc

SEQ ID NO: 369530 - DNA, 362 bp, Zea mays
cgactcaaaagcaggggataaaagtttcaaagctgaaatacacagtacccggcagttaccagcgcaatttttttttctgagacggggccgccgcaaagcagaggtccccccagtgtgatgcaagcttgggacaaaacccatggtcagattctccaatgcccatgggacggtcaaaacaagatgcaaacggggtcaagtacggttgaggaactataacaacaacatcaacaaattaaataggtcatactccaggatccacaacaggtctcaccgcctggtaaatatgacaaggcgactgaattatctcttttcgcctgaaggtctttttcccccctttccacctgagcatgccgcaagaaagt

SEQ ID NO: 369531 - DNA, 481 bp, Zea mays
acggccttgctccacctccactgctccacggctgcgtgcctgctttgctttgctccgcctgcttcggatgtgcagcccgtgctccactgctccgcctgctttcttttgctgctttcaaattcggctgcttggaaagcctgctgccctgcagttgcaaagcctgctgtcaaagtctcctagacaaaactaaaataattgcttatttagcatataatctacaagggattcttcatctaagatactttttgatgatgtttttatactaaaattttattttactataagatatgtctttaccattgccataccttaattttgggtcgtgctccgccactgctgatgagtgatgactgtaacaccacgcctgttgtttgaatagtcactgatgcccgcattattaacgagaaatcgagcgcgtcacctagatacgccgaaatagcgaacaagatgcacctaatgctaagctagggtcacatggagc

SEQ ID NO: 369532 - DNA, 215 bp, Zea mays
ggccgggggggcgctccaaaccagcatggggacctgtgcgcccagcaattgccgcctcactcagggatttcatcccgcccacaacaggacagcacagggcgtcgatcttgaaataaaaagccaacagcgacacaaaccgaatataatcgacaccaccgttcgttcacgacgccaggggggggctggggcagttgtcgacgccgcaggccagaacg

SEQ ID NO: 369533 - DNA, 236 bp, Zea mays
ggattgcacaattcatgggcaactagtagaaaaaagaatccgaaatagtcacattcatccaagacaaacacaaaggttctagagacataacgttccttatagggactagcattgcatttgattaaataacatccgaaagatatctaaatgccataagggtcatggacctgtgcagattgaatttagattgaggctgaatttacattgcggcacagttttgttgtttcctaaccatg

SEQ ID NO: 369534 - DNA, 248 bp, Zea mays
tttttttttttttttttttttttttttttgttttttttatttttttgttttttttagcaaaactaaaagcctcattttaaaaaactggaaaaagaagggtgaaaaccatccaaaaaccctggcctgattttgacctcacctatccctagacccatttttttctaccggttttaaactccgctactcgctcacaaagtcacaaggcacaaacccggttaaatgccatgcggaccaaaagcccttcagag

SEQ ID NO: 369535 - DNA, 328 bp, Zea mays
cccgggaacaacacttattttttttttattcccattgcagggcccaaacgtaaagggacaggattacagcaaatccctggggaaaaaatatactccacacccaacatacgggcccaaacccaacatttacatccatttttggggggtccgggatcctgaacatttggatactgaatacaaaaccttgttcacatacccggaactggaccaacgcatccaagcgccctgcacaaacacaaacaagcccgcgaaatataaacaaagctcccatgggaaaacctccaagtttccgacccacgacgcataaacagacccccgtttttttttt

SEQ ID NO: 369536 - DNA, 273 bp, Zea mays
agaagaacatctggatcaatctatatcatccaatcggggcgggtccgctcgctcaaagcaaggatgtaatctcatggctaccaaaatccatccgacaaacgtacgcatataaaccagagaaagaagaactgaaataggtgaaacccacgcacgcaatgcagtaagcagccaatgcaggcttaattgacggcggtgcatacgcggcttatctcccccccggggccggacttgaggccgatcctgccgagcttggccatggcggccacaaatgcc

SEQ ID NO: 369537 - DNA, 275 bp, Zea mays
gggccaaaccgattccatgctaaagggaactttgtaactaggaagggtgataacgcaaacctatacaaaatccaattaaccctgtccaaacaagttcccttggagcattttttacaaataaaaattgcaactcactgttaggagcaaagttgaaaaaatgaatcattgaatcatcagggtttggcacatccattttgggcaacatttaaggggcccacaaaacgaaacaatggggaagggaatatattgcctcctaatgcttcggggggggtggg

SEQ ID NO: 369538 - DNA, 394 bp, Zea mays
gcgccgtcaaaagttcgacataaacgacccaaggtgatggcatcatctgtgctgttaaaatacatctatatatgagacaacacctttagcctacactcagtatgcaatcattcagtacaaaaaagcaaagttgttcgacacttgtttctctctgctacatagcacaattttgctgcgagaggatcaggcaatgaagtatctgttcctgagctttgaaagaacttgatgtatagtgacagcctgcaagcaatgcattgaaaggtggcttcaggaaatcatactttacaggcagcgacttggtaaggtgtaaccagatttacctcagaaagttacatgacctatttcaaatgtatctcatcccagcaattcttatacgccttgatatcatgtactg

SEQ ID NO: 369539 - DNA, 279 bp, Zea mays
ccctaaaaaattttttgatccctgaaggaaataatttctttgcaggggtagtctggccctcggggggaataacccgaaaaaattggtttggggccaaaggggttgtccaaattttttctgccgcttcacgagggggccaggggtttttagttgcttatgtcaaaatacttgggatttgcggggaagtcatgctcaacccgcagtttgcctttgtaaaagtttgggggcctttggggaaagaccactttaattttattggaaaaaaaaaatttttttttt

SEQ ID NO: 369540 - DNA, 238 bp, Zea mays
ggaaaaacatgaagattattttacctgaagttaaacaacacccccataaaaaaaggggggaagaaaggaccaattgctaaaatcatggcaaaaaatgatgttcaaattccatcccattgattaactcaaaacactattttagcatgcatttcctagcactggaacagggagaagcccctgttcttccacagagagcatagcgtcctgcccaatttcctggacttggacttgcacaggg

SEQ ID NO: 369541 - DNA, 303 bp, Zea mays
agcatgccataatgttccgttttattaaaatcaaatctttcgccgatgaaccatgggcggaaatgttcacatgcatgcgagccccttttgggggggactaagcgaacaaaaatagcttaccaagggtccttttagagatgaaaaaacaaccaagcctttcaacgggacgaacacttataaaccacccttggggggcaccgcaaaaaatggaagcctttgccacttgtggggggggcctccccctttttttttttggcccccccctccaaaaaagcccccccccgggggggttcccaatttttt

SEQ ID NO: 369542 - DNA, 393 bp, Zea mays
caaaaagcaataacaggttgttcaaaaagcaatatacagtcatcattactttcaaaaggtagacagaaagaaaccaaggctgaatgcagtctccatgacatgtatttgcttttagctggccccttagatatcaaggtcagactagactagcaaaaaaacacaagaacaagataaataactgacatgactacagaagacctaaacaaactggcttacctttaaggaagagggatcagattctaatttccaggttactgccaggaaactgacccatcagattctaatttccaggttccttccaggaaactgatcctttcctcaagggattccagacgggagaacgtactcagattttgatagtctttaagtaacttattggctatacaaaatttt

SEQ ID NO: 369543 - DNA, 214 bp, Zea mays
gggacccaaatataatcccaaccctaaaatttttacgggaaaattcaaagcccctttttccccctaatttcagggaaaaaaccccaaaaattcaggccaatttaaaaaccccccaaaatttacggtacttgccccaaaaaattccgggggggggaaaaaaaaaagaagggggccaactttttgaaaagcccttttatgcttttaaccccaaaaa

SEQ ID NO: 369544 - DNA, 232 bp, Zea mays
gggcaatccataaatctggagctttaaaccccataagggttatcaaaaccggtcggtttcgatcgatcgactagcacccccagcatttaaattggccttccttagccggggggagggaggaaggccccagggcgattcctttttgctcaaagctcctaaggcccaccaaggggggccccgagctcgccaagggcgccgtcgtcttcctgaagggggacgggatccagctttt

SEQ ID NO: 369545 - DNA, 201 bp, Zea mays
ccaaacaaatacctgtttcttattcccttgacaaattaacacattgccttaggccaacccaatcctggtctctttaaactcaattaaccgcctgaaaacacaggtttacatgctcactctggcatgccaagacatggttatgcatcattcccgccatcaacttgaattactagggtgggccacgctcccctttgggatccc

SEQ ID NO: 369546 - DNA, 145 bp, Zea mays
gaggcaaagtacgaaactccaaccatttggtgccaacatgcaccaacccaacctgcccacatgccccggtgcgcctacacggaccaacactggggactctcggacactagtcaaccccttgtcccgtgcgctaaggatgctacct

SEQ ID NO: 369547 - DNA, 217 bp, Zea mays
ggctgacaaactaaaatagcagtgaactttggttgcaaacgaggtttcagatacatgctaattaccaatccgttacaaccggtagaggccttgaccttgcattgtcgattagctatcttcaactgctgcagtgtaaacaggaaaagacaggcgggagggcagcacgggcaccgttcggagctcgacacgttgttgtcctcgtcggcgatgcctcagc

SEQ ID NO: 369548 - DNA, 218 bp, Zea mays
gcaataaaactctaaacaatcaataaaatccgttggtcttttgttgggttcaaggaaaaggggcaacacggccattatagaaaaaacctcgacatattatataatctgagtggtaaaaatagaaccactgaatttagcttgagagaaaatcccttttgaagctaccaggtaatcagcaggggaatgggaatctactactgctaagatctggatccatg

SEQ ID NO: 369549 - DNA, 121 bp, Zea mays
aaactgggagaataataatctcatattcttcctaaggctgggggaacaaaccacaaaatgagaataaagcggattcgagttcccctcggtaccacaggaccaaatgatattttaaaacctt

SEQ ID NO: 369550 - DNA, 424 bp, Zea mays
agcggcataaaaacccatctccacttttcatcatacaccaaccaccaatgcatcatcatttgcattgtagtactactagtaaaaaagaagctggataggattacggcggttcgacaataactaggaattcagaatccttcccttagaggcacctcgcagtccacctcatcattcgggggtaaaagcagaccaattgcatatccagcgaagtaataaccgtctccaactaaacactgggcaaaccgcctaccaccactccatgtttttttctcctcaacagaaaacctaggtgttcctaccacaatgcagcttgcccagacagccctaaccggaacaagacatacacggactaagcagaacggaatgtgcacaggaggcaaggcagctaattacaaaatctgggagaagatggtggcgcgcattt

SEQ ID NO: 369551 - DNA, 450 bp, Zea mays
acctacagacactgcaggattattataacgaacagcattctgttgatactacacagaaacaagaatctagctgtcatgtcttatgttcagataaactcctcgacgtctataaatagaccacagtagcatgaaactaagcataagtgcaaccaggctctctaacatctcctccaccgtcagcttctactcgctacagaagaaacatctccttcgtttgacaaggatggcagagaaagcgagcacaacccgtctcaccagagtttacagggctgaaaggcaaaggacggctcgcccgctcccacggcgcgggcaaatcaagctcaagattgcacgcattgtggtgcgctccatcgcctccgcactcctcagggccctttcgccgctcccagctctcaaccagaaatgaacataattgtaaagttagttcctgctgtaggtctgctcccggca

SEQ ID NO: 369552 - DNA, 289 bp, Zea mays
ggaatccaacgagacctttttgaaatattccttcctgggatctccgaaaaaaaaaaccctcccctttatctgattgaacaggggattattcccgtcgggcccccccccaaatgcccaacaagacctaaattttccggctcgggaaggttcctggtctaaccatgtaaaaacaaatatccagcagggaacccccaaaggggacccaagttcctattatcccctcaaaaatattaagagtcctcaaaataagcgggccccggaaccttcaaacccattaaaaatgggtctt

SEQ ID NO: 369553 - DNA, 123 bp, Zea mays
gggacaaaacccgcaaagaaggggcctattgaagggggtgcacaggaaaaaccattaccccagaatcctttctacagaaagaggaccttttttcaaaattttcccaagcggggaaaaaatgga

SEQ ID NO: 369554 - DNA, 242 bp, Zea mays
attaacttgggactactatatttaagaatttaagtgttgaggagactcaatcggagacctgttgtgttgtaagaacagaacctaacaacgcttcattgttaaccttttcaacatatatacgctatttattctgcattttatttttgaaaactgtcgataaatgtacccgtatccgctgcatagcttttgaccaacacaacaaccccttctttttctaatacctcgatcaacaagacgttgtt

SEQ ID NO: 369555 - DNA, 381 bp, Zea mays
gagaagacgaagcaaagcataaataaatcaataaatactccattacagtacaattgagaggtaggtaggagatggatgcatgggcatggtgatgttgagcagctagtatgagaggctaaatatatcatgagtagtggcaggcgttcccgagcgagatgggcttgttctgcttgtttgggttcatgagcaccctgcactcgacggcgagcgtgaacttgggcttgaccagcgcgcccagcacgtaagtccgcgagtgcagcgtggtcctcagcaccatgggcaccgatgccaccttggcgctggcctgctgctgccccttgcccccggccgccggcgccgccgtcagcgtgggtccgccgccgtacagcggcaccttgttgc

SEQ ID NO: 369556 - DNA, 430 bp, Zea mays
gtaagcaaagcaagctttcatttcttcgtcgcaagcacagattcggttgctctacaatctagaaatatactggtacacaaaattctgctcagtgctaaatattcagtcgtacaaagacttggccgactggattcttgtcttcttgccttttgctttctggatcttctcctcggacttctcattcttcgatacagccctagcaattgctttcattttcctagcattctgtgaccttttcatatgcacccccttctttattttcctcgtgaaggaaggcagcagcagctgcagctcctgcctccaccttccgcagcatatctccacaatgggcacggatcagctggctgtgaaaccctatcaaagaggcttcaaacagagagcagagtctcccttctccatcagaacacacaactctcaccagatctccaca

SEQ ID NO: 369557 - DNA, 273 bp, Zea mays
aaaaagcctttttaaaacccaaagaaggcctttccgtattttgaacagacaattggaccacgtgctacattccaaagccattcaacaatttcggggtattacaattagctttacggcaccgggttgttttgctgctcccataagcagggaccttgtccagaaaccattcaaaaagactaggttttataacatcctatatttatcatcggggggccatcgcccagaaattcaagatccaggagggggccggcgcaaaccagtttataaaagcca

SEQ ID NO: 369558 - DNA, 262 bp, Zea mays
ataaggggaaaaaaatagaaactcaattcaccggacaaacatgagtcccaaatgtggaccccaatggcagtaaaatagaacacgaagccatgctgagtttccaagcagtaggagaaaggagaaagggatctttaaccgcatggctgttaaagaatgagaataacctgacaactcataggcagggttaccattaactttaccggctttcatttaccttttcaggggttttttctatcctttttcttgcagggggacaaaagac

SEQ ID NO: 369559 - DNA, 398 bp, Zea mays
ggcgcctcagaagggtcattttaagaaagaactgtacaaaataaatgttttaggatacactgtagggttgcatagatagatacaagtatgatctggtccagctagattgctatttacatgcatcacgattgtactgaacaaaagtatacttgatcaccaaactttccggcataaagctcgggtaagtctagattaggctattccttgctgtatctgctggttcacctgctgagaaatgagacgtggaagtaaataaaaatggtgcagcttgaacacactcccacgaataaaagacaagacattataggatcaaaagtaataaatgacttggatacccctcaaaagtactagtggaggacagtggtaaacagcgcagatcatcagtgccaatacggaca

SEQ ID NO: 369560 - DNA, 302 bp, Zea mays
ttttgatccacaaatagtatgtgaccgatctactgacggcgatccctgaacaaagccacgaaaacgacagggttccagagactgtttcacggtgctaccggccggctgcctgcaaagctcactgaactcgccgagggggtgagattctcggaggggtcagcttcagctagtatctcagctcacggtaaaaaaaagagcatcaggttgcgtagtaaagcttactttcgttcattccttccttgcgccgccattgctaagcaataaatcctgcctgccgcgcgtggtcagcaaaagcagcttcg

SEQ ID NO: 369561 - DNA, 203 bp, Zea mays
aggggggtcaagaaagcagcctactagcaggtgacacgttcaaactggatctatatggatctgcaaggttggagcccaaaaattttggggaaacatgtacagacagcacttcatggatgagaacgggatgcacacaaactacactgctgggtttaatcataaggctatctagcattcaaaagagcccgacaggaacagactaa

SEQ ID NO: 369562 - DNA, 221 bp, Zea mays
gggccccaaacttttattttttaaaaacttgggaaaaattacgggattcctttggaggaaaaaacccgggatttaaaaggaaaaactgggtcctggaactaacttttttaaggcccgggggggggggttttttatttactggaaccccaaagctcccacggggattttgccgggggggccggggccccctttaagggggatctttccaaaactggaggggc

SEQ ID NO: 369563 - DNA, 447 bp, Zea mays
aaagaaaagggggggttcactgcttcatgctcttttaacacaaaggggcggcaatacacactcactacaaaactttacagctaaactactggctgagtttgcatcacatatttactcctgatactctttgccacctagattatctccatacctttttttcacccagatgcctattttttacaattttccacctaagcaccaggcggtagtttttcgaagccatggctgtacttggccaccgttgttagaaagaatggaaaagtaacatgaaaaaagaaaagaaagaatggagttagcgtcagtgttagcaattctttacagcagtcagaagttagcactggaccctgatggccgacatggataaaaacagacgtcggcattctccagtgagaccgttgaagggtggcctgtagagttttctttgatgcgatcgcgctgcacccgacg

SEQ ID NO: 369564 - DNA, 355 bp, Zea mays
caacgcacaggcaaccgactagtaaaacaacaaggaggtggcaaatgcaccggggcttgcctggataacactaggttactgttggttaagtggcgaccacttggcgagcatcctttgtcttggcactcgtttagtttatccatcttcaggttcgtccgactgacgatatcgttgtgcgaagaagaccactccttacaccatcttgaggtcaacttggctcgtcttccgcatcacgagattaattatcgtacataaatgaaatgcattatgcacatgtatgaataccaagaaatagtacataactaattattgctataccaaaaaggattaatacttatggtcaggcatcacaaac

SEQ ID NO: 369565 - DNA, 270 bp, Zea mays
cggagttgtgtcaattctgattctaattggctgacgcttcaatcgcagcaagagaatttccatcgcgtcatcttcaaaccccaaaagcggaaaggttccttggattcgtctgtgctgtgaattgtgatcacacgccatctcttatcaactcactgcattgcttcctttatctgatgctcacaagtcccaactcgaagttcaccagagtttcaggtttactatcagcccatccagattttccttttgcctcttcaacttcgagcctttttt

SEQ ID NO: 369566 - DNA, 297 bp, Zea mays
gaaaagcttcctttgcccaagcaacatatcaaccacatgaaaccaaaaaatgttcatcgaagcttgcgccagatcaatacatgagcgaactgtatgggtacctaaaattcaagggggttaaattctcttcaaagcagcttgcgcacatgtacatcgcgtagaccaatcgcaggacaccacagccatttgcatggggttctttagatgtttgccgaagcttcatgcgcttcagcaaaaaaaaggcctccatatttacatggtgttttcttagacgtttacctaacaagttgaacttgg

SEQ ID NO: 369567 - DNA, 178 bp, Zea mays
tcacatgcatcgtttttcagtgacacgcacgcatgcaacatgctgcgacgatctctatctagttcgctccatctctgcgtctccgtatcttgcaaatttttttatcaacaagattatgccgtcgttttccatttctgcctgctgctgttcgaagaataagctgtcctcctccaatacc

SEQ ID NO: 369568 - DNA, 249 bp, Zea mays
tttaaaaaaaccggaaaagccccccccttttaaaggggccttttttctttgcacgggtggttaaattccaaccctttcaaaatttaaatcccaaccagggggccaggccaaggcaaattttttacttttaggttttcccgccccggccaaaaaaccaattttgtttggcaaccctttttacaaaccaggggggcccacaaacacaggggggccccccctgggttggggccccccccttccaaggggggg

SEQ ID NO: 369569 - DNA, 318 bp, Zea mays
aaaaaatgaaaaatccttgaaaaatatgattgtcaaattagccctaaatgattttaggacatagcctcagtagggctgtacatagtcagaacgggcctgacatgtcatcaggctcatgaaacatgggaaatataagaccaaaaatttcataggcatattggaagttgtacgaaacctggacgggagtaccagtcaaagggaaacatttttaataaaaaaatcactttgacatcaggattcctggacgggagtaccacttttaagctgggcattagcagaagcgttaagatcttgaggaaagaagagcctgcatgtgtt

SEQ ID NO: 369570 - DNA, 220 bp, Zea mays
aacaggaggcatttttccgaacgggtaaacaaaacgagctatctagtctacaagactacgagaactactggctcagatttgcatgggggccacatataagatttccctgtcacacgagacagttcagatgcccgactctaaactagtagtccagaaagtaacatgaagactatggtgtccgccacgactgggcgaaaaaacgatgttggttgttaagcct

SEQ ID NO: 369571 - DNA, 253 bp, Zea mays
ggggcgaaggggaggggtcatattattcattaggtctatgattcaacatccattttacttaaaaaattggttgggcattatcataatacacgaaggggggggcctactactttttttaggtatcaggattttgcaaagccaactgaaataaaccgggcccttccttataagaaacccaagggcctgcaatggcccccccttaagaaatgggtgggcggaaaaaactttggccacttatgccgttttttgtttt

SEQ ID NO: 369572 - DNA, 381 bp, Zea mays
taaaaccgatgcttgcttgtgcgtttacatgatagattcgcctgcttctactaagcatttacattacctctgctcaagcactctacttttcacacaatgagaaaaaaaaaggggggggggtcggggtaagagtaaagaattatgtaaaactgaagataaaaaaaacttcctgttttcctgggagcagaaaccacctcttctcaggggggtaggtaaaatggtagccacgttagcaacccagcttgactgacgagagagcccttcaggttacatggcctcagctccgcttgtaatcaggtatgtttctccaggtcaatctagtgtcagttagccgcaatgtcactgttgacactggcggtcgatttgtcaatcacgcggaca

SEQ ID NO: 369573 - DNA, 287 bp, Zea mays
tacgaccacagacataggtttatagaaaacagtaagaataaattgacgattacactcagccgaagacaaactacaagcatttgaagtctcaatacacctttcttcttgggaagattgaccagcatgaaggctccaagcctcctgaggacattcctgcagatagaagaaacactgaaagtcctccaagtaagaggaagttcaaaggtacagctatctgaatttgtcaatcaaacaatttatttaagctactttagtttttttcaaatcatcaatctttatttcttatt

SEQ ID NO: 369574 - DNA, 381 bp, Zea mays
agcctgaggtgcgtgtgcgtgtactcgctccttcactcatgcgcagcttgtttcttctccaacgtgttccagaacaccacagcacgcctctatccacagtaacgcattttttttttgtttccgaacctgaactgaagagacagatgttcgacatacaaacggagatattgctttgcggttcgttttaagacctttttttaagcatgccgtgaggtgttggatacagacaatgtgcatatattacggcctttaatctgcgctaacagtaacgaggcacggtttggtttgcgggacattttgtcccgtttccagtgctttctttgtaaaaaaaaataaaaaattaaactgattcctataaaatctctatacaaattctataaa

SEQ ID NO: 369575 - DNA, 133 bp, Zea mays
gtcaattacaactgaaattgatgtttttttgcaatcgatgtttcactagatagaaaggagtttgcacaaggaataaccaaactaagattatccaattgattaatggggcacagcaattcttgtcaaatctgaa

SEQ ID NO: 369576 - DNA, 372 bp, Zea mays
cataccaagggtaacaagtatataaacgttctcagagcaaagtaatgtaagcttcaccttcggttcctacatactcctagtacaccgctacagcagaaaccaacagaagaacagctgacagattcaggcatcacttgcccaggaaattcaatcctgaaagaacattacaatccacgggtcatctcaccatgtagattagcatcatgatgccgctctggtgtgcctcctttggtggtacatccggagatgaaatttattccggtagtattcagaggaaactttaagcttcatgctctttgtgggcacttatgcagcggtctaaggagacctatgtcaggctcaacaaacatggaaatggcacatatctactgc

SEQ ID NO: 369577 - DNA, 333 bp, Zea mays
ggaaacaaatagagcctaagacaagttttcagattctttgcccacactaaagatgaatgtagtcacgcactcgactagatatgatagggaacacatcaggaaaaaatgtttgcattcactgaacttattagtgacgcagctgcagtccaaacaggcatccgtttaatccccttcccttgaacccttgcgttttgcattccaccgcttaccagctcaaggaatagcaccaccattatttttctttccttgacagcaccataagattgaagttgattgagttggggatattgcacatgatggccttaataacaggaacaacatcctgcagcaaac

SEQ ID NO: 369578 - DNA, 57 bp, Zea mays
aaaaaacaaaagggggggttttttaaaaggggggccaaaaaaatcggacccgggggg

SEQ ID NO: 369579 - DNA, 295 bp, Zea mays
agtaagtaacaaaaagcacaaggggcatttgcatgtttcagtgttcaggccaattagtcccttatactgcaggcaacacaaaacacaatgcaaaactgcacacaaatgcagcattctaaccggttcacatgccccgttccaccacgacatgcaagtgccgacaggttacattacttgaagcctctcaaaccacacgcacatacattacctctcccatccgccgctggcgtagccgccgtcgtgcgccaggggcacggtccccaccgcgcggcgctgcggctgcacctgccccgtc

SEQ ID NO: 369580 - DNA, 287 bp, Zea mays
ccacccccacaaagggctttccaatttttatccacctccccaaggggaagtcaaccagggctttttttttatccccggggccaaacaaattccaaccagtcgggccccggccccggtaataaccaaataggggggtttgcccttgggggataaaccccgaaaacaaccatttgggcaaaaccccctgggtaaaagcgacccatcccatttttgggggttggagccaattaaccggccgccggcccaaaaaaaacctcccgaatctctggcatttttttgggaaaaac

SEQ ID NO: 369581 - DNA, 166 bp, Zea mays
ggccccaaccccagttccagtttattttgacccgggccatgtgcttcctaccactatcgtagttcccaacaaaaaaaaaactcgcacaacgagccaaagcaacgggaaagtccaaagctttacagtaaaagcatgaattttttttccaaaacccaaaatcatggga

SEQ ID NO: 369582 - DNA, 157 bp, Zea mays
ttatttttttttttttttttttttttttttattttttttttggaatcagcggctagttgaatacatctctgacctaaaaatgtttatttacaacaaagaatttcagctctctatcaacaatccctgacaaaattctggcccccttggggaggggagc

SEQ ID NO: 369583 - DNA, 456 bp, Zea mays
gctgtaagatctattttcaggctattcaaaaaatgtgtttatacttcaaactctgatggatactattgcaaaattgctgctcacaacatgcaccgccccttttcaactaacacatccagagaaaactatacagtgcgtgtaaatgctgatggaaagttacccgatcgctaaactaccaattgtaaagttgcctcttccagaaatgttctccgtgtgtgcttgtcgaaattccatggccatgcatatgcgcaacaaggggggagcatgcttttcaacatctgtgagatttctaaactgtatttctgagcagccagtttccaagaattgttgtcctttacaagcatagctccctaagtcttggagaggtgaatattcgccaggcagcaaacattgtctgagtctccagcggctttcatgtccctctactcaatttagtgcgcgagtcatgtcaatgag

SEQ ID NO: 369584 - DNA, 437 bp, Zea mays
ataagcatatgacgttgtttttatataatagttgataccagctgtagagtggatttagactacaatacatactaagtagcattcaactaccatacatcaacacttagcaacaatgtgcttgcaggtgttaagtcaatatgtacatatccacaaatagtataacagtaggttcatatctataggaaagcattcatgatccaaaagtgatggtgctcctgataggtgcgcaaaaagcaaacacctgtgcacaaaggagaagaaaatattagagttttggaatttttttcccaatagtttgttaatgttgctaggtaaaacggtgagtggaatatattatgtagattgtgtataaggatatttgcggtgtatgaataaggtttgcacatggtgttataccttcacgaagttgatgacgatttaggagcttttcttttggg

SEQ ID NO: 369585 - DNA, 351 bp, Zea mays
  unsure (1)..(351): unsure at all n locations
tttnttttttttttttttttttttttttttttttttgtttttttttttttaaggatgcaatgggagtagccctcacaattttcataaacatttgtccagaacaggaatcatatctctctaacttattggacttgaaacaccttgcttcattgctttctcagttgcagccttgcaggattcgaaggttttgaataatctttagttctttacctagctaatatctttgctccactatatatctatactacagactacagggaacatcaactaaacagcgatctgatgtgtggctccaacatacggggccatggggctggcacaggggcatgacatggccatggtgctaaggaa

SEQ ID NO: 369586 - DNA, 385 bp, Zea mays
gggcaaaacatttttacacatacaatactacaatggacatttttacacatacaatactacaatggacgtggaattcaaggtacactaaggtctggtttggtgactagaaatcacaggtggattggatgacactgagggagaaattagtttatttctccttcaatctccctttgtcacaaaaccaaaccagccctaaggctgaatttactggtatgaataagtgaatgtgcaaaacattgtttagacagtgtgaatttgaagtagacggtagaattggcatcaactcaaattaatagggcaaggtacagttatccactactagtggatagcaccactgggatacgtaatccggaaattcttaccatgatcaacatgtgtaaagaaa

SEQ ID NO: 369587 - DNA, 235 bp, Zea mays
ggagaaaacttggttgctgccctttattcctggctccttgggcccaataaatagccatcggcctgctggcctaaagcctttattttagggaagcctaaacatggtaacactaatcaatcactaatcaatcacttaatcaatcactaatcaatcttttctttccttccctaaactttccattcttttaatttccttcctggccactggtttccatagggtcctgctgatctcccaa

SEQ ID NO: 369588 - DNA, 217 bp, Zea mays
ggggggaaaacacataggctaattttattgattgaggagcacctgggaacccaaagcccatgaacatggggagtcgacccgaccgagaacgtggggagaaccaccgctgaagtctgcatgtgggacatgagacagatgtaaataaagcccccctgttgacacctgcccaggaaaaatgggcatacacatacacgcatatctacttgacttgaagggg

SEQ ID NO: 369589 - DNA, 366 bp, Zea mays
ggggaagaaagaaatatgcatttcacctccgggtctcatcatattacaactttacatcagcatgcttaagcccatgcctgtcgacacaaaccattaccctgtttactatacccataatccattagtatccccctcccactttcaatatctacaaaggggggtatagaaaagtcttgtctcaaaacaagagcaggcccagccccccaaacccacaggggaagaaccagatctggggcagggccctttcgatttccatctgatgccgcctaagcctggggttaacgttctgggtcgcaaaatggtatggattcgggtaaaacaagctcgctgggatttggccccggggcgccaagggaagcacaattt

SEQ ID NO: 369590 - DNA, 173 bp, Zea mays
gtgacggcatacaatccttgcctaaaaaaagagataaaggttacagcatccacctggaagttatcagggttattgcacaaacagcctacaaagctcgtcaaatgtaccctcacatacctacctagatggatattaattgtacatgacaacgaagagagctgaactctccctta

SEQ ID NO: 369591 - DNA, 367 bp, Zea mays
ataaaaaaaaggaacacacgtaacacttttcacatatccaaaacacagttacaacgtatataattgacctgcatctcgctaatggcgatgcatttacattgatttacagaaaaacgaaggctatcaacctggggctactatcagtctcacagataagctgggtaaagaccaacagacaaatagcaaaacgagggctatattgctcatttttcaacctccatgaccgttagggttgaatcattggtggttttgttgaatctgctgagtgaagttgggattctgggtctggttctgaaggcccaccatactttgcacgttttgtgcacctgcctgcatgttcccgtataccccttgctgctgctgctgc

SEQ ID NO: 369592 - DNA, 278 bp, Zea mays
ttttatttatttttttatacagtcgacaaacggaaggagtttttaaatgttgagtcggaggacaatacagacctaaaaaaagagattaaggttcccggatccacctgtaagttatgagggttattgcaataatggtctacaaagctcgtcaaatgacaaaaaaaatacctacctagctagggggctactgtacatgacaattagagggtgggtaatcccttagggtcaaatagaaaaacgtttgcgtagtggataatctttcaacctcctaggaccat

SEQ ID NO: 369593 - DNA, 277 bp, Zea mays
gggggcgaaggccagggtccaaataattcaataggtctaagattcaacctccattttacccaaaaaaatgggtgggccccaccaaaaacccccaagggggggccccaccaccttttctaggtaaaaagattccgcaaagcccactgaaaaaaaccgggcccccccctataaaacccccaagggccccgaatggccccccccccaaaaaaagggggggcggaaaaaactctgtcccctcaagccggtttttggtttggccccccccgggaaagggagg

SEQ ID NO: 369594 - DNA, 156 bp, Zea mays
gccgcaaacaatctactattgccgtataataacaacaggcctcaccaacaacggtgtcaacaaaatgtacccctttctaacaaaattgtaggggacccggggggccaaattgatacaccttttttagaaaaaaacggcatttttttttcccgggga

SEQ ID NO: 369595 - DNA, 315 bp, Zea mays
atcatcttcctcgcgacgtgaggggctaacaaacaagaccatgaaaaaacagctccacagaggaggcagttgcttgtgctggcatgaccgtaatcatgagcttgactcacatcaggagctccgacgaacaaaacgcagcgacaaaagaacaacacacgcatgtggcttggttgtccacacattacagtcggcatcatgagagcgtggtggatttaaacgtgagctccccaatgacagcatcgaaattcgcctccacgtgcatcaccgaattcgctgggttcacttgtacaggcgtgctaagcagctgcacccctt

SEQ ID NO: 369596 - DNA, 220 bp, Zea mays
attgggggtcggggtgtttcatcatccacaaatttaaaaaaaacagggtaaagtcataagcatacacccttacaaaacccgaaacgttgcattaacttcaaaatttctcattatcaactgtatttactccaaatccttataggagcttaaatttacataaggcaacatgttgtcagttggcaaaaaaaattcccggggctgggcagctacttaaaaattt

SEQ ID NO: 369597 - DNA, 261 bp, Zea mays
aaaggaaggactgcacaccctttattgaatcattatttacgaacgggataacgaatccaacgggatcgggggaacaaaaatattttttttaaaaaaaagggggccccaaaaaggttataccacatccaaacaatgaatggtacacaagggtaaaagatcaaacgacaaagctcctggtcggctaaagaagcttttttggtcttggcaatgctcaggggggcgcccaaaagcttgtttttgggctttgtccccccaaagggg

SEQ ID NO: 369598 - DNA, 335 bp, Zea mays
gtcagaacagacaaataattgcatgctgcagggccaatgaggggccatcagtggttacagctcaaaaaagggtaacgggaaaatggctgaaagaatgcgacaaaacttgcatggaatttcctgataagaattagcatggtagctgacctgactccactaaaaggcaaaagcacaaatttgtacatattaaactgtgatatcaagccgcggttcaaagcaaaagccagtgaatagctggagaggaaatcttttgctcacagggcatttaacggaccacctccattgcttttgcatcatgtcaaaaacaagcaaagcagttgcaccatagctttgta

SEQ ID NO: 369599 - DNA, 172 bp, Zea mays
cggaaaaaatttccggtttttattacgcccgaattgaacattgcacacatgacagggacatacagagggaacaggggcaattaatccatgccactctgaccccaaaaactggggcagttacagtcaaaggccccaaaactggggcaatccctgggtttttcatcattttttc

SEQ ID NO: 369600 - DNA, 181 bp, Zea mays
tttttacccataaacatgcacacgagcagcttcgcgattcaaagtgggttgtacagtggaggcgcccgtctcaaaatcagacgacaggcaaacaaaataaggaaaaacgacccatcgaaaaaacgaggaaaaacaaaccctgaaaaaaaaattaccttctttggatgttacagtgatgacc

SEQ ID NO: 369601 - DNA, 185 bp, Zea mays
aaagcaggatcgctggaactaggatttcaaactcggatacaaatacaatttttttcaaaaaaaagtgtacacagaagcaactaactgcattacaaggacggtctctcgttggattcatcctgtgcgatacacaagggtacatagcctcgcgatccaatttccagtggtacatacatatgcctaca

SEQ ID NO: 369602 - DNA, 231 bp, Zea mays
aaagggcgaatctatcccactggaatttgccctgccgaaatattcatcaaagttcccccacaattggccccaaggggcccccccaaaaaaacctacatgtactttccaggactttgactaattctccaactagggttacatttataatgggcaggtccacccctccaggaagaaaggccaaaaaagattaaaagggttaccaaggggggagcaccctcctggggaatttcc

SEQ ID NO: 369603 - DNA, 255 bp, Zea mays
  unsure (1)..(255): unsure at all n locations
tttttnttttttttttttttcttttcttttggatagggggaattcaaccacaaatgggggggaaacaatataaggccatccttggacgacattcccatgctaatcccaatactgcacaaaacacgtcttaatgtacatgcttacaatgccactaataaacgtcctatttgcacaaatggagcactcagtctaaaaaataacaatctttgtgtctaaaaacactaacgcttactccctccaacacaaaagaacaat

SEQ ID NO: 369604 - DNA, 361 bp, Zea mays
gagcagagatgtgaggggatattaaccgtggattagttcgaggtacagcgttgtctctgctcctctgatctctatagctagtagtctcccctaaaattaaaattgggaaggaacccaggccccgttctcgttggtgacgtaggacgtgcaggagaggggcacgaggcagagccctctgctgcggaggtcaggccgccgccgcctcctcgtcgtggtctcctcctcctcgtcctcctgctcctcccctgcagcgctcgcgttccaacacccccgctggtgcgtcggcctgggcttcttgctacttctggacgagttcaagtaggggcggctcaaagtctcgacttggtcttggaggaatttg

SEQ ID NO: 369605 - DNA, 318 bp, Zea mays
atcctgaaattggctctctttttagaaatgcagaacaaacagatgacaacggttcccaaagttgcaacaaactaagttcactcgtccgcggagcagagtaccagcacaagcatcccaactttcaacattcgaagcattcaatattctgttaacatcaaccattttgactagaaaaaaacaccaggtggcactttccgccaacggattcaaccatcacaaccccaaccgagcgtaaccatcagtccagcattgagcggcaacacttcttcagtttctggagctcggatggtccacttcatcccaccgccagatggtgcc

SEQ ID NO: 369606 - DNA, 230 bp, Zea mays
  unsure (1)..(230): unsure at all n locations
ttntttttttttttttttttttttttttttttgggggttttttagcggtgaagagggggatttcacatcaacacttctaaagggtgcagtttattttagaaaccacgaccgcgatacaatatagcaaactaaataggggtaaccataggctaaccctaggacttcttttgctgtggagcacatacatactacgaagttagcctccacagaggggatgtgcacggcaggaa

SEQ ID NO: 369607 - DNA, 270 bp, Zea mays
acacatcacaaccaaaatatcttatgaatttgtttaacacaaatatttgatccaacaaagaatcatataacttcaaaacatatatctacaaatccttttacataggatccaaagaaagtcctatgacttcaactcagggaattaaacattaggcttaattgaaaataatcctataaattcaaagccagagctattgtaactagctactatagcaaccataagggtgcagatcctataggggtcaagtagacttgagatggaggcacttgg

SEQ ID NO: 369608 - DNA, 131 bp, Zea mays
aggaagcctccatccgggcactacgatttgcttctcttaggtttcctgacgttaatgtgtggcctgattggcatccctccatcaaatggtgccattccacaatcacccatgcatacgaagagtttggctac

SEQ ID NO: 369609 - DNA, 221 bp, Zea mays
ttttctttttttttttctttttttttgtgtgaactctgaatctcttatatgggtaggatactggttcacatcatattatcccttaggagctcttacatggacagatgccaatttgacatacactaagattcttgaggttccatgacaaacggcatgaaacagcacatttaaaattggtgcatggacaacatactgttttaaactcaatacattgggtgtgt

SEQ ID NO: 369610 - DNA, 256 bp, Zea mays
ttttctttttttttttttttttttttcatttatttgtcttctttttttctctttttcttttcggggtaaaaaaaaaggggtcattatactgcctgggtgaaaaacatcattcaatttcgcacttgccaccgattgcaaagcaatttcatggattcccaatttgggcagcccaccaacattggtctactttttttaaagaaaaccccactttcttattttacataatctgctcgggctaggatactctccacaagcc

SEQ ID NO: 369611 - DNA, 193 bp, Zea mays
gcttacccggcaaaaccaaaattattctggcgccaatttaaaacaaacgggcgttgattcagggcgcggaaagcctaaacaaacatgtaggcgcgtatatacccacatggcgggcggtttaaacccacaatttacgcgtttgcctttggacgggttggtgccaaaccatatccctaggccgactttggcaagc

SEQ ID NO: 369612 - DNA, 334 bp, Zea mays
gatacgacaatgtgtatatgacaaatacaaagactaagaagtgaacttctttgaacacaatattctttgtatgttacattagagaagcactcatttctcttgctgaaagtatatttacctctcgcaattgctcgtgacaagaaacatataatcgagacaaggtagctaatagtgttgatgtcctaaatcctagatggagaatcaattagaagcaacatcttgcagtcaaacttgagaaagacaagttgcaggacgatggagattgtcaccccgagccggtcttgtatcgatgatacacgccccgttattagagatattgcaccaaagcacgcca

SEQ ID NO: 369613 - DNA, 300 bp, Zea mays
ggttcaatagggagtctataatacatcaatttaaataccaagtaaacaacggtattcctcgctacagatgctttctagaacaggtacaacaaactgaatttagagcaggttacaaacatttttggcgtcaatttgcctttcctgctaagtgtatacttcaggttgctaccctcaggctacagaagaacagaacataacctgattatcctacattaatccatcaggtcaattcttgttggattgctgtctatttccagttgttaaattgtgttctgcgaccaatgcactagcattattctt

SEQ ID NO: 369614 - DNA, 369 bp, Zea mays
tcgcgacctacaactgctgtagctagggcgcgcccaccgtcaatgtcttggcactcccgctctgttcatcaatcgcatcgacaggagccctatcctcaatcatgtctttcccgccgagctacacaccttcaggagcccatcccctcctccctcaaacgacgccgggtgacacgcaggaaaagtagtaatgacgacatgcttccaaatcactttcaacagtttcttctacttctttttgtttgccttatgatgattatctactgtcagttactcagttttatgatttgactagttactttggtttgcggagctggatggaacaatctttcaaggtgctccaccattagattgtgcttatatattgagctg

SEQ ID NO: 369615 - DNA, 325 bp, Zea mays
ttttcttttttttttttttagcttggctaaagtttgcatagccatttttttttgggggggggccgcaaattgttttttttttctaaaaaacccaggagagttgggtttcattccattaagaagaaaaaaacagagatattacaaaacagccacctcacagggggccaaatacagacatactgatactcatccatgaataaagcacccaaaactacaaattcctacagacccgggatgtgactagtcagcagggatagtttttttgccccagtcagctcccgcttttctcgctcttgatcgccattctgacagcaagagccacatt

SEQ ID NO: 369616 - DNA, 210 bp, Zea mays
attggaattatgaatctatcttattttatgataatgtacattgaaataccctatcgttaaatactaggccagcggctatccggcgggcggtttacaaacacaccaccgcacaaggacattatatctggtcacaccttttttttatgatgtgatatgaaaagagtgtgcacaccacccgttcacaccggtagtaatacatgttgcttgaca

SEQ ID NO: 369617 - DNA, 261 bp, Zea mays
ttttctttttttttgactatataaatattttagcgtttgtccgactattaatcgcgacaataccggatcaataaagcttccacccgacgaacagaactggggatataggaacaatgcgatcagcaccgttcaagcgtaagttattccttctgcagatgtgtaccaattctagcattgtggcactgcacacaagctccaacgtgtatctatgagtacaatggcctgaataccatacttgagtgatccactgcaggcaatatg

SEQ ID NO: 369618 - DNA, 190 bp, Zea mays
tgtcttttttttttttttttttttttttttctttttttttttttttttttttttttttttttggggtcaacacatctgctataggggtttcaaatcaaccttttaagtcaacccctgaaaaataattttaaccactggaaataatcccccccaaagcctgccctttcaaaagaatcatttgcctttttca

SEQ ID NO: 369619 - DNA, 330 bp, Zea mays
atcaaaaaaaaaaagacctcatcccatttgcccttcaatcaaaggaagggaatacctttgtgtgacctgccctagattccatatcaaacaaaaacaaggccccggtttttggatacaaaatttactggatggcttcctacttttaaaataagcaagcttacccaaaaccccatttgagggggttttttcgggccatgccttagaaagggaacaaatgtttttccattataaacagccgcccccacagggccctaaaccaaaacaaaaccaaacgggggcagcgatgtttttttattttacaccaacaacaaccattctaaagccaagggc

SEQ ID NO: 369620 - DNA, 306 bp, Zea mays
aaaccgaaaacaaattttactgggggtccatttattatagagtcccccaacaggggccgggcacccgggcaggcaatggtacacaaagctagactgcattactaggagaagaaccaagcatgcattattggcctggaaaaaaagctaaggcttgcttaaacaacctagctcgccagatttttccccaaaacccccccgtttgctgttgcagggaaaaactgccctgcccccaaagttatgactcatgacccggaaatgaaaacacagcatgggcccccactggtgggggggacccccagggggggg

SEQ ID NO: 369621 - DNA, 253 bp, Zea mays
agagcaaacctttcgggggattgtaactaataacgaaccccagcaacataattcggggcccgaccattacaaaaataattgggggcacgcccattacaaccgggggatttatccagggaatccgcctatcccaaactacaaatcccccgggataacacgactaaggtaccattattcacgccaaaaccaaaattgtgcccaaccctacaaaattggtctaggggcctaaccataaaacacttttttgagaaaa

SEQ ID NO: 369622 - DNA, 268 bp, Zea mays
atgcacatccagtatatccattggatgcaaaaaagcttttctgggcataccatacgtacataccagacgtgagaggcgaaaaggacccacaggggaggggagggcaaccaccaccagtttccaacttaattgtgagtgaaagagagatgcaggctgcatgacaccgatagatgaaaagcaggggaggacggccaccagctgggcgttttcagctttttgggctcgactggcccccgacgtcgcccacaggtcccctgggctggttttt

SEQ ID NO: 369623 - DNA, 187 bp, Zea mays
atctgggtcccccccccattaatcttatgattacttcccccggtcaaaattacaaagccccatagggcccatccgggggacatacagactacaggggggtggcagatacaaagattttccataaggcaacaaaacccgtaagatttttaggggcttggttaggggcaaaaaaactgtagcccctcca

SEQ ID NO: 369624 - DNA, 400 bp, Zea mays
gagcacagatttgcacatacaatttactatgaagaaaattacagatctgcacatacaatttactatcaaggaaaatacatctgatgacaaccaccaggtctccgcagtatacattgtcttgagtgatcgcataaattgaacaggccggaaggaattaaggcaactaaccaggagctgcctagtaaactagtaccagaaaaacaacttcataccacacagtggatattacctactagcttcattagaacattgcttagctgagaagagcacaccgagcaaattagaatatcgctgcaacctgctggcttgattttagctgtcttcagcttagttcagacgccttcttttattctgatgtaggtccccaccatccacatccaaagaacctaaggcaccactt

SEQ ID NO: 369625 - DNA, 503 bp, Zea mays
aaaatgctatacaactggagtataccgtatagtatctttggagttagagtatatatagatcgatagagagagggagagatcgagaattatatatgacaacctcatgttctatctactgtcaacatcactagtcgtatacatttccgctagctcttcgttggatgcgtgtggaaaacgcaaaattgctcattgcatcttccaaatttcctccaaggcccaaaggttaccagtaataatgctgtcggagaacccttgcacccatccactgagctccgggtcctcaaactggccgccaccaccggcagcggcctgcaccgacgacgactgaccatgaccagctgacgacgacagccacagcccttggtcgttgttggcctcctgcgccgtcgcccaaccgccgccactcatcaccagctgcatgtcgtcgccggcgcgcacgctcgcgaggaggccaccgtcctcgtacgagtacggctccgacgcgagcgagtcggacgacgatg

SEQ ID NO: 369626 - DNA, 410 bp, Zea mays
agagcagatcagaaagagaacacagacacttaattttcaaatgttatttaccgtagcaacacacaggcaattttgctactgactgcacaccaacttcacaataacataagctacctcacaccagtgtccaaattacaaacgacaacaccaatgttcctaaacctgttacatgagaatctgtacatcttctaactgaattttcttcggacacgggacaccgcaatgtgcgtttgctacatccttaacacctgtcatttctatcaacagttggcgggcaccaccaagtactaatcagaactccaaaccgtacccattaacgctcgttgaaaaatatggcctacaagaattgtttgtggcaattactatctctcagcaaggccaaaccggaattgatgcaggagattgttggt

SEQ ID NO: 369627 - DNA, 218 bp, Zea mays
cttcgaagtttgaatgactaatttatgtatcaattactagaaaggaacagagttttaatcaagatagtaaatgagttactaaggtaattcatgcaacatattttaaaagcataacagattcaatgaaccagttcagctcaccagatcaaataactaagacagcttcacaagatccgcatttatacatttggtagcgaggataaaaaaggggaatgcta

SEQ ID NO: 369628 - DNA, 114 bp, Zea mays
gaataccacccagaacggtgtttacaattaaagcaaattagctctggaactggtccatccaactcagtataggatccaaaaatactcccggaaatatcactgtccacacaaagc

SEQ ID NO: 369629 - DNA, 109 bp, Zea mays
ccagccagcacctgagtcctacatgggttagaatttatgaccaatggagccatttacatagccaaaaggattacaacatctgttcctttcaaagatgtccaagaatgtg

SEQ ID NO: 369630 - DNA, 418 bp, Zea mays
gagagttcgtttctagtttattaaacttcagatttccgaacaatcgatacaacaaccgttacatcatccagcttgccgccggagtagcccaggtacccagccgcgagagccgagtccgagaacgggctccttccaaacccacaccgccccaccttcttggctcgggcaaccagtaaatcggccatttcctgcagttttcacgcagaagttgccatgttcaagagacaaatctttctcgctaggttcgtttatgcaacacgattaaaaaaaacgttccattacactgaccgtgggcttcagatcagcttctaatgatttggagacgatgcctgctacttcttcctcgtagacgttgtcgaaaagaccgtctgacgctgttacaacgacgtcgccttcttgtagacagatggcgtatttc

SEQ ID NO: 369631 - DNA, 422 bp, Zea mays
gaatggaacatttctatatggaaaaatttaaaaaacaattcggtttgcagtcaatgaaatcataaatcggcgaacataattcggtttgcagtcaatgaaatcataaatcctttgagagcttgtgtggggcctttcagtgaaggcaggcatgtagtgtggctgaggattactattggctaacactatcttgaggaagtctgacactggagtacacatagaatgcaactcctctatgagttgcttgatgttgttggacatggtcaccactcacccggtcgactgttgttcctcagagcatttgtcaaccttgagattgttctgctccatttgggttttcagctcctgttgaatcactccaataccattgactctggcgaagagcacatcaaaaaaattctccatgacttggttccagcgtgact

SEQ ID NO: 369632 - DNA, 412 bp, Zea mays
aaatattacaaacctaaatagtgttacgtgatggcgaatttaaacacctagcggcgaggcgttgtacaatttcatacggaatccctagttattaatatacgactacacgcaataattacgcccctcgaacctaacgcaaacatcacgaacaacaaactatacacattaaatacaattagcctacacaactcaccagctaattgattaattgctaaccttattccttgttttataaattatactacatggctcacaaggaactattttaattttatttcactccttacatattttacatatcaacaattaatcaaacatctctttatgttatttatttaatgcaattgacaatgacaaaattcatcaagtagttgtataaaacactaaatctatcctttacgtcgttacttcg

SEQ ID NO: 369633 - DNA, 189 bp, Zea mays
gcgttgtacatcatggggttaattggagaaagaaacgaaatttacaagaacacaacacacaccacacacacttatataggcattaggctacattcgcgtcgggtatctgaacaaactgaccaaaaacagggtccctcaatggtttacctcttgatctacctccgggagagcagaaaaacctttggcacc

SEQ ID NO: 369634 - DNA, 397 bp, Zea mays
ttttattttttttttttttttttttttttttttttgtttttttttttttatggaaaatagccaccaaattaaccatttgggggaggacatctggaggccctaatttactagtagaacaaataaatgtagacaatgggcaaagagaggtagggaggaatggcccccttcctgtagatcagaagggtctataaataaatagcaggacaaagttcttcagcaaagcaggggcattttttctaaaccataaatacttttgattgggtcttcagacccaaagataaagatgtgcaagcaaccggcaaacaactttttgaaagcaaccacgaaccaaacaccagtttttgcaccttggatgaaatgcccaatatgggggcgccaggatcaaatctggcccttt

SEQ ID NO: 369635 - DNA, 389 bp, Zea mays
ttttattttttttttttttttttttttttttttgaggagaagcttggaatttaattgttagaacagaaatggcacatggcaagcaacatgcgtaaccaccctagcagacctgaattgacagatatctgactcttagcagccaaagtatcaaaacaaattccgattcatgcatgcaagggttaggtatcaatgccgcctcgagcaattccacccagtttggcaaccccaaaaatggagttgccaaattagccctaagtgtgaactctttaccagctctgcaactcgccttcctggatgtacacgatcgcctgcaactcacattcctggatacttctggtacacggtctaatgtaagaaagagttcataatcctcgattctactcaacatt

SEQ ID NO: 369636 - DNA, 358 bp, Zea mays
aagaaacacagctaccggatgttatcatcatctagagtgcagggttcagttccaaaagaaagttgactctttagcaatctctctcacgggcatagtaggtctaggttcacacaaccagtcacaaaaggatgcccaccctgtgcatcaaaatactattttagaagaaaccctcctccattcgctattagtaccatatcagtgttccgctatgttctagtaccacatcagtgttccatgtcgacggcatcagatctgcagatggacacaaacaaatgaaggtgtggttagtaattcagtatgacacacaacagttgtgtgtgtgtgtgtgtctgtgtgtaagattgccagcatcagtagc

SEQ ID NO: 369637 - DNA, 228 bp, Zea mays
tctttttttttttttttttttttttttgtttttttggggtttttttggggccaagtttgtgcataaaaacgcaacacggtttgccctagtatcaacatccgcatagtttcaacattgaatgcgcgaccaccgtcaacccaagaaaccgggaaggaaggcgccaccgccccagacctccaaaactaagatggcatcggggaattaatatacatcatcataggatgcacg

SEQ ID NO: 369638 - DNA, 361 bp, Zea mays
tctttttttttttttttttttttttttgtcaattttgtgtggggagcaaacggggtctgacgaaacatttactggcatgggggtcacaaacagcatggaaccgggcatcccacaagctatacatgcacaacatgtgcatccaaaattacacgacacaaccccctccccccttaccccggttcaccgttacttcccaaccaacaggatttaatgccgacatcaggaataactgcctctgacgatcaccaagaataattagcgcaggactcaacaacaagacgaccaaaaagagcaaaactccccatggactttcttctcgccggtgccagggcacaccacccatttggaagaaacgcccccc

SEQ ID NO: 369639 - DNA, 453 bp, Zea mays
ttttatattttttttttttttttttttttttttttgtttttgcaaagccaccggaacagaataccagtcaaatataggtcattctaaacaacaacgctgcaacaagggcaggttttttttccctggaagaagcagcaggcttggagcacgaaaaccagcatccagccatcatttatcaacttgagaatcgaaacatagcatgcgggcataacatctagagtgggtgcttaattaaaaacagcggcaatggcaatggcaatggcaggcagattaggtgcacgcgcaccggcacgccagcgccgtgacgaagagaacaacacgaagtgtcctagaagataagctataagaaatcaagaacggcacagtcctggtaaactccccgacatcagcagacacccattaggtccggagatcggatcgttttactggccctcgggggcggattctttgggg

SEQ ID NO: 369640 - DNA, 211 bp, Zea mays
tttttatttttttttttttttttttttttttttttggtttttttttgggtccaagggggtgcataagaacccaacacgttttgccctagtatcaacatccgcatagtatcaacatcgaatgcgcgaccaccgccaacccaagaaaccgaaaaggaagccgccaccgccccagaccttcaaaactaagatgtgattggggaattaatatacc

SEQ ID NO: 369641 - DNA, 151 bp, Zea mays
caggggtcctggaaatgaagattcataatcaagtgagctgttaactgcaatacacaagtttattcctatagaaaatgacatggtgattcttttggtttgagccagttcggacatgtgcattggcacaacaaataattacgaccattaattg

SEQ ID NO: 369642 - DNA, 423 bp, Zea mays
cggctttgtcggcagcggccgccgcggaagaggcgaggaggttatctacgcccccggctgctaccctagcgaggccattcttggatgaatcagcggctgccgagggctaccactctcggaattctcttgcctgtagaagagggagactctctacggcgagggcatcgtatccgtcatgcgacctaatgcatcagctgcatttcgtaactttgaacaagaagcaagacaatctgctgtttgggactctgaccagaatgctacatctagttctggtgataatcttgcttctttataccgtccacctttttctttgatgttcaacggaccctttgacaaggcaaagttagaggcttcttccctggacaaatggctattaatcaatttgcagtcgacagcggaatttagctctcacatgcttaatcg

SEQ ID NO: 369643 - DNA, 151 bp, Zea mays
ggaggatatcaattgtgtcactcggtgccatggaattttctcgtccaaactagctcgatcatgacgagagcggtgaaccagctcttgacgagttgggcagctagtcgatcggcatgcattttttaacccacattacggatctacaatgagc

SEQ ID NO: 369644 - DNA, 227 bp, Zea mays
aaagaactacaacattcctttcccccttttttacatgtttgcagggagatacatattacaggctacattacactatttatttttttacagactacaggccaaaccctggaacataaataaaatgtctgggcggccctgtccctaaaagggcttctaaaaaaaacaccccccctggtttgtccaggggcatgttcgctcctatctaaccgcctatacgggtcttttaa

SEQ ID NO: 369645 - DNA, 105 bp, Zea mays
aaaaacgcatacagccaatattacttaatccgagcttcccctgcaagatccattattacaacaggtatgcagggaccagtgcactgccaaccctaacatgctatt

SEQ ID NO: 369646 - DNA, 236 bp, Zea mays
ttttttttttttttttttttttttttttttttttggttttttttttttttttttgttttttttggccgagcaacaacagggcaaaacgggaaattatgttgggagggaggccctttagggctctacagggcccccgatagcagagcaaggaacagttcacaccacctggtaaaaatctcacaggcaagtcaaggcaaccccgggaaggaaatcccgcaaaacaagagttgggaagt

SEQ ID NO: 369647 - DNA, 153 bp, Zea mays
ggggggggccggaaaacccatttcaattcaaagccctccaaaaggggaacaacggggtctcagggggcccatttttttgggggaaagggcccggggactttgcccaaaaaatgaacttggggggcttttaacggccggaggaaacaaaaattg

SEQ ID NO: 369648 - DNA, 194 bp, Zea mays
gggcgggcctgtaaacctatttgaattaaaagccttaccaaatgggaacaactgggcctgagaaggcacatttttttgaggggaatgtacacgcgactatgcccaaattaggaactgggggggcatttaacggccgaaggaaccaaaaatttggttccattaacttaaccttgaacagagaacaaccccactgg

SEQ ID NO: 369649 - DNA, 108 bp, Zea mays
ccagcacgctttttgttaaaaggggtctgcatatccatctcagcttcttctttctgagcaacctcttcttgcgagccaagcatgaacccactatactgagcgcttacc

SEQ ID NO: 369650 - DNA, 331 bp, Zea mays
gggccgaagaagacaataatgactgtgcaaagtcagtcatgcctggtgcagtgacacaattatttagccttcgaacaactcgggcgctgctacaaattctatatatcacataggtaaaccatttgaatgggatagttgtccaaacatgctcgaaaaatttacaataatactaaccctacgaagctccaaacgagttgtggccaaatatgcttggggatgactgcccaaatgcttcacactgtgaacccttaaaatagtttccttgactggttctagaaatgaaggatacacaacaacattaactaattttagaacactgcaagtgaaagag

SEQ ID NO: 369651 - DNA, 362 bp, Zea mays
gaacaaggggggtgtatattgctgccagtaatgaacgtcgcacagtattatacatagccggaggcctggattatgccaaacactcgtttagggtcttggcaaaaatgatgtcagtgcaaaacagcaaatacgaatgcccttgtaacatgtctagagagagaaaaaaaacactaactggttaggggagcaaacgtgtactgagagcacgctgatcgctaatgctgacagcaccgggttttggccaaatcttatggcgacgtcggtggttcagggatgagcctaagcagaggcatttgatttcgcatccacagggaaacagcggtcttcaaggttctcagatgtttccatcttgctttccttac

SEQ ID NO: 369652 - DNA, 429 bp, Zea mays
aagggtaaacacgggtgtcccaaatacaggtccaatgcgatcacgcaaactagcgagtagccagttcgcaaatagcatcaccctattaaactacttttcactgctgctgctactacaaaggaaaggacaaatgagaagaaagttagactggtaattctgacctactctttggaagtttggattggaattaggcagttgactgagctaattgctggcttcagaatgctgcgccgttactcttccgaactggaatcagtcacggcattctctttgtccaccccttgcccgtccccgtgctggtaacccaccggtctgctggccttgcgattctccgtcgccaacaaagctgctccccatcgtagacaacttgctgctggaaaacagattgctgcttggtaacttaggaattcagaattggttgtgaaagcc

SEQ ID NO: 369653 - DNA, 318 bp, Zea mays
aaaaaggggccatttattttgggttccgccttttttaagtccaaacgggccttttgcagtaatatttgggggggaaagccgaacattacccgctcacattttttattggccactggtctttttgccccccctggaagaacctggcaaatcccaaaggggataggggggcccttggttatgccttctatgcggatgcaaaacgcatcccaacagattttcccaaattttttttccaaaagaaaactcggccccctttcctttaaggaaaactgccttatttttgcccaaacgggccctttactttcccttgccatttta

SEQ ID NO: 369654 - DNA, 332 bp, Zea mays
atgtaaatgggatggcctaaagagaaccacttgcatttccagctatttaattttaatattttcagcatatacagtcgatagagagaacaacttgcaagcagaacatacagctatatcgttgtctatcgagctatcctacagtacctcctccttttcttcttggggttgctgtctgtcagtcttcagccaagctttccatgtacagttagggggtgttaaatgttcactcaatgatcggtcctgttgttgttatgcacagggacggggggtgagacgttgaaaggccattacgctccgcctcctatctggcgtgcgagagctcccttgacgca

SEQ ID NO: 369655 - DNA, 237 bp, Zea mays
tttcttttttttttttttttttttttttttttttttttaacatttttgatttttttttgttccttgggaaaataaggaagggggctttattttccatcccaagaaaaagggccaagccttttacaattgtttgggctttcagaccaccaaaaaatagggggggttaccacaaattgaaaaccacatgcttccaccgcccatttggggctaattccatcgctttgcctttacgggaaa

SEQ ID NO: 369656 - DNA, 182 bp, Zea mays
caaaatatcaaagtgtgaaaattattagtatatgtgcaaatatagaaaagagaccgaactagtcaaaactctctagctccaagagccttcagtggctcagacgatgcattctgttgtgccaggaggaagacttttgctgtcgacaataactagtgaacccaccttgcttggactccgcagga

SEQ ID NO: 369657 - DNA, 450 bp, Zea mays
gtatcttccgtcatctggccatccacaacggtgatgtggagcacgtggtgtgtcgtgaagggctaaaggcagtttcatctctggcgtcacggtgagggaatgccacaacgtggcggacgccaccgccgtggtgctccccttgcgacgcctaagctacttcttttgcaggtacgggcgacctagcttgcatctgttaattggtttatatgttttgcccgcaagatgtgtacaatactcaagtcgctacattctggacgtttggttgctttgtatgaatagcagttcaattgtttttcaagatttaggatctgatttggttggactctcaggatagtatagcaatacagatgcaaataggtgtggaatgatttaggatttgattaacattttgaaaggacctaggaaataatccgtttgaagaattcaagatgatgcagacctggacactat

SEQ ID NO: 369658 - DNA, 141 bp, Zea mays
aaaaaacgaggggtaactggctatgcatgcctggaaaacaaacttccgaaacgaatacaccccgtacgaggggggagcctgataagaaaagggcccctgttttggcgcagggggggggtcatcccctgttttggggcgggg

SEQ ID NO: 369659 - DNA, 263 bp, Zea mays
gatcctattgagccgtcttatgtttaattcaaagagcctacaacaggtctttcaaccaacaacaaatttccgcacactacatactcagaaagtctaacatattacaaaagggataaaaaggaccaggtgttttttaagatcaaaccaccaactctttacggacccaggaatctacgcttatgaggagtactcaaagggtggcggcagaagcgggtcttcatcaacggtcatggcatatgatccggacccatgttgggttgcac

SEQ ID NO: 369660 - DNA, 334 bp, Zea mays
ggaagcacagtacaacgggtacggtatcataaacatatgatacctccgagcgagtagacatggagtgatggagatcgaccattacaaaagacataaaacctgaagtcccacggcgataccgatataagcactagctgcaaactgctctctctcgttgtctctgtgtgtactgactgtcgactccgggaagctcaaacacggacatccactccttccatgacgaagcggacagccggacaccgtcgcgaacgtctggaatcttggactcattcaacaattgtcaaatgagcggctgcggcgccttaaaatgagcagtagctgtatttgcaccctt

SEQ ID NO: 369661 - DNA, 320 bp, Zea mays
ggagggaaccttgcattaaaacccccccccccccccaaggaaaaaattcttgggggggaaacccccccccccccaagaaacccccgggcctggcataaggccaaaggacaaaccccccccgcctaaaagggggggtaaacatttttttgaaaaacaaatttggacccccccccaaaaggatccaaaaaggggtgggttccaaggggggccaccccccaaaggggccccagccccccccataaacccaaggcctttttcaccaaacctaaaggggcccaaaatttttcaaaaccccccgggggggggctcctccccccggg

SEQ ID NO: 369662 - DNA, 451 bp, Zea mays
atcacatacaatacatatttcaaacacattaatatatgttcatatcacaaattcacataagtccaaatatataagttcgcaaattcacataagtccaaatacataagttcacaaattcacacaggttcacatccatagttcacaagttcaaacacacaagttcaaacattagctccatcgctctcgatcaggacatcggattgttgttagtagctccaccactagaattgagacatctgtccgcaaagtcaacgtaagggggagggagtcacttgatgagagccggaatcctacaaaataaaccaaaattctcataaatacacaactggcattaaatcacatgtacacaaagatataggaaagcatgataaacacaaaatgtggcttcatatttgtgcatgaacatgaacatgagagtgaaaacaaacttcatttcaagacgcaccaagct

SEQ ID NO: 369663 - DNA, 294 bp, Zea mays
gtggggccaaaaaagacatttgtagcatcctgcagcttatgaatagcccaacaatggtacaataccgccagaaaacggacctcccattataaatcctttcaaaagggataacaaaagtttcaacaaatgctcggcacagagttttaacagcaacattttattgctctctgccgccgggatccatgtggctaagcagaaaaacataaagccctcggcaggccgaggcaacaggattaattcctccacaaacccctaacttcagaaaaataaagtaacacctaggccaggattcgg

SEQ ID NO: 369664 - DNA, 285 bp, Zea mays
gggggaaaaaaaaggccccttcgatttttcattcccgccaaacaagaaccctttaaccgggggggggggggtttccctcccccaaaacctagttttccagggtcccccaaaggggggggggggggggaacaaaacccttccagccttactagggggttaaaaagttttgggaagggggttaatcgaccccgccccgcagctgggggccccgctccaatacccggaaaagcttggcccccccctcaaggggcataacctggcccaacttttcttttagccgggaaa

SEQ ID NO: 369665 - DNA, 286 bp, Zea mays
agacattcgaaacttatcaatccaattgagagatggcactttctcacaatgtatcaagtaaatgtttgtacatacaggttacaatacaaactcgatttttaacaacataataaaatgaaccgtcagtaaattgagcaaacagaacgaatgcaaaggccttctaatcccttaccaactacataagaatcaagtgatttaaaatctacaactctagatgcatggagcatgcttcaccgtgtatacgagtcaaaaagaagaaaagaatgtagaagtccagtgaaccacc

SEQ ID NO: 369666 - DNA, 140 bp, Zea mays
agtgtaaaacaaatatcaatactaatacaagaacccaatcagatactataaatcgtcgatcgacacgcaacattatttggatcgactcacagcttacatgcaagaggggtgggaagtcagacttgttgagcacataaaac

SEQ ID NO: 369667 - DNA, 425 bp, Zea mays
gtatccgaatcttatttaagaagagaagatatataataaatttgagatttatcttttatgaacttttacagactcaatgctaaaaacaaaaatataaatttgtattgcacattatatatcttatttattcaaaattaaagaaaaaaagtcagaccgaataaatatacgtttgcgaccgttttcctattgctgtcatgctatcctcctattgctgtcatgctatccgccaccgctatccagcttctgcagatagacgaggacaaaagcattgttgagttaaaggtggagagagggcagatgttttgcttgcacaagcaaatctgcacctatttttctgtgttcaaagttcaaacaggagaaaaagggaattattagctatggatgtgtttagcctaataggaagttcaaaagtgttatgtgtggag

SEQ ID NO: 369668 - DNA, 198 bp, Zea mays
aaaccaaacatcttcacctgcatatttgggagaacacattacacatgtagcttacacaaaaaaataatcctatgtcccccccagagtaaccagtttacacagttactagttttgaggccgcctttaactccagccagggcttggcagcaacgttcgtcgtaaaaaaccagcctgccttggggggggccttggggaacg

SEQ ID NO: 369669 - DNA, 282 bp, Zea mays
ccaagaacataaaagggttagatattgaattcaatttagaattattttataggaccatcccgtttatataccactgaaagtacatcacatattcacatgtttgttcttgggtgattgcacaaacactcactacatctcaaaaatcctagaaacaaagtcatcctccagtccttaacgccgtctgtacagcatagcgatgtgtatgaaatgtaccggtccgaaaaatacactatcgagaatgcaggaacaactgatccacctaaagccggtcgaataactcag

SEQ ID NO: 369670 - DNA, 320 bp, Zea mays
cccacctccgcccccgaaacacggggggcgagaggaagcgcttaaactcaatagtttcacagatcccaatagtttgggaatgtttcctttggcgtgtttgggactggcccattttttacaaacctgtcctggttaggccgaaactttttaacctttattcagaagatgagagtgggggacccagttttgttacactccacgcaacaacacttttccttctttttttggttttaacgaatcagccttggaacgagcttagggctttgaggacatgttcgaccacttggatgcccctaaggaacactttgttttccaaaaac

SEQ ID NO: 369671 - DNA, 225 bp, Zea mays
gggggggggaagggccttgtatctgccctttaacccgaaattgaatttggcatcaaaacattccccttattttcccgccaacaaggcaaaagcaaaccgtttttaaaaaacaatttacccccgcccggataaaaacagggccgggcaaaatgctcaaagggccccactcgggtttaccccccccggacaaccgggaacggaaaccattcccggggaccttaaaaa

SEQ ID NO: 369672 - DNA, 173 bp, Zea mays
aaaaaaaaacccccggaaaaaggggcgtcgcccgagcccagttccccaagggttttttgccggggggcaccctggggaaaccccttgccgggggtaaaaaaccctttggggggggtttcaaacccccggaaaaggggcgtcttccgggggggaaactaaattgaaacccgggg

SEQ ID NO: 369673 - DNA, 194 bp, Zea mays
atgttaaaagggccacttgcattccagatgaataactgccgtagaaggacacccacaacaaatggggatagcgatgattattttcgaccctgtatatgatattccgaagtttccaggccaaaccaacagtatcagtttcccaaagagaagaggtacacacaacacaacacaccgacgctgatgaaaagcaaatg

SEQ ID NO: 369674 - DNA, 157 bp, Zea mays
  unsure (1)..(157): unsure at all n locations
ttnataattttttttttttttttatganaaaagggccatttgcattccagatggataactgccgtaaaatgacacccacaacaaatcgtcatagtgatgattattttcgtccctgtatatgatattccgaagttttcaggccaaaccaacattttag

SEQ ID NO: 369675 - DNA, 356 bp, Zea mays
  unsure (1)..(356): unsure at all n locations
tttttaatantttttttttttttttttttttttttggggttttttttttttttttttgttttttttaaccagggcagggagagcacctgttgcaaccgccaactagggttgctccaccccgacacagttagggtttttcccaaaataaaccagccgggggggatcaccgttcaccagtaatcaagctggggggagctcgaattatgctgcccaattcaaatgggatccaagttcttcatttgcggacaaagaagggttccgggggtcgccacgctaacagaaaggggatccttactactccttactgggtggacaaaagcacaccctgaaacagccttcaaaaggtttttgcaaaa

SEQ ID NO: 369676 - DNA, 216 bp, Zea mays
aaaaacaattttctcccttcatttttcatgcccaacgatttcacaaaaagatgacttatttcagccaacagtcaagggccccaagctcagttcgatacacaaaggaaaactttttaaaccaactgcccctgggcccaaaacaggaaaagaaaccaagggccgcttttactttttttattcaaaggccttttacctacatgggggggggaactagga

SEQ ID NO: 369677 - DNA, 119 bp, Zea mays
ccaaaaaggcaacatagtttttttaacaaacaagtaaacatgacgctgatgtttgaatacatggacattgtacttattcaactacaagcatgccccggacgcgtgggcggacgcgtggg

SEQ ID NO: 369678 - DNA, 252 bp, Zea mays
gtaccaagttttgttttatggggacccaaacatattattgtttgttgggaaggtgtgaccatctctttacatattgctttttatggacaccttaatttttttattcatttaaaaaactgaatgcggaaaagctaaagcattttatgatttggaacggtgtctttgactttcgcgctagttatttgtacaatcaaaaccaaggctaacaaatttacagaaaagtgaagatttaaaaaccattgaaactatttg

SEQ ID NO: 369679 - DNA, 232 bp, Zea mays
tccttttttttttttttgtttttttttttttttttttggtttttttttttttttttttttttttttttttttattgaacagagaccgggggttccattccatttgaatggaaaccggaacattggaggcttcaatacatgggttttcaatccaaattattcaggagaacacacccctactgcctaaaattaggtgtcatccctgggaagcggtttgggtcccccctgggcca

SEQ ID NO: 369680 - DNA, 221 bp, Zea mays
agcaaaactaaaagcatcattttaaaaaactgaaaaaagaagggtgaaaacaaacgaaaaaccttggcctgattttgactttacctatccctagacccatattcttttaccggttttaaactccggttctcacttacaaagtcacaagtcacaaacccggctaaattacatgcggaccaaaagcccttcagagaaaaaaaaaaacacggggcaccgaaata

SEQ ID NO: 369681 - DNA, 219 bp, Zea mays
accctctaagtccagattatttattgtttactttaaaaaccacacccttgccatagaaaggactatggtacgatgtttaaaattacagggctggcacgtcaatgcaaacaaaaactattccggagtttctgtcccctgccttagggaataactggtactggaacaagcaccaacagggcccacaaaagcacgggtgatgcggtaaccggcaccggaagc

SEQ ID NO: 369682 - DNA, 262 bp, Zea mays
gtaaccaagcgaatgagcccgacctttttggttggaacttggaacacggaacggaacgggactgtcaaatggtagcccctaagccatacaggcagtcatatttggaacaggggcaagggggcctaatgacctacatgggccgcccgcccggctgcccttaaaactgggattccttttttttcgacttgccttccttctgttgcttccttttcctcttgagagcattctttgccaccatgttggtgaagggctcctttgggtt

SEQ ID NO: 369683 - DNA, 253 bp, Zea mays
ttttttttttttttttttttttttttttttttttttttatcttttgtttgttttttttttttttttttggaaggggaaaaaaagaccaaaaggggccttgccaaaggtagcccccagggcgtaatgaaagccccattggaaccggggggccgggagcccaattatgttggtgggcaaaaaccccaggcccaaatacaacaggggtcactcaaaggatttacaacaggttttaaggggggactttttcaggtgg

SEQ ID NO: 369684 - DNA, 229 bp, Zea mays
gataaattattccatattcgataaaatgttagagtacaaagattacataaaaataaagtttatggattcatacagccaccacatgacttccagaagatcaaaggcccacaacacttgttgctactgctaacacatttttccatttctagcaggcagcatgtacaaaccccacaagtaaaaaatctggaaacctacactctgcaactatgaaaaggaacaaacaaaaagg

SEQ ID NO: 369685 - DNA, 189 bp, Zea mays
gggaacccccggaaacgtaaaggggaatgctgctaaccggggattagttcgttttcatgcctcccgagatgggatactgggccatacatagaccccctttttgataaggggacccatgcccaagggagcaggttgcccctgtttgctgctagcttgatttatttttagtgggggggggggcaacaaaaa

SEQ ID NO: 369686 - DNA, 452 bp, Zea mays
ggcaaatacttacagatcctgctatcagtcgaatcgacacagaaaagatggagtcacatttcacctggagagaagacttgagagcacttcccggatgtgttctatttctactagttagtacatcgtccacaaaaaacatataccaagggatatccccttatatgccaagacaaaaaaggtaaggactcaaaaaagacaaatatctgatctgctaatcttccttgaagcaaagttaccttcttcaaatatctttgatatggtacctctctgaccagatagagcctctcttaatttttctgatttggacacaaaagctgtgttgcctaatccagatcctgatctaaccatactacatgatgttttagacttataatttgatcttcaaggccttttctctggctcatttccagctgcaccttttcttgagtagacttcagttcatcatatattga

SEQ ID NO: 369687 - DNA, 337 bp, Zea mays
gaccccgacaaaaaatactttgaacacaggaataggcttatgggggcattaataacggaaccaagggaggggctaaaagaaaccaaacaggtgcttttatgccttcagatttacatttgaccaaccgagatttagacccatagggctgaccccaactacctttaggttttactaggggaccagcgcgcaaaagacgttgttgctgaaccaaatgacctgggcaccgattactccgaatgcgaggcggataggcctactgttttgttggcgaaggcggtcaggacgtgtgccaggcggcggaacggggacttggcttccggcgtgggggcgtacaggc

SEQ ID NO: 369688 - DNA, 337 bp, Zea mays
aatgctaaaaagaagaatccatttgaataacttcatatcatccaagagatctcctttaagtatagctagacacaagcaaaataccaacacaaaactatacattgttatctgaaataaaaataatatcccacaaatcaaaactataacggaacaacttgcacacctgttgtttcatattcatttgtgtttgtctttctgcctagggaagctattgaataggttccatggatggaatgattgatcctgtggcggtgaatgcagttgatgtatagagatcttgttggtgttgttgaagcaaaagtcgtttctgctgttgttgctcatacaacacgtactc

SEQ ID NO: 369689 - DNA, 363 bp, Zea mays
ccttgcatatttgatctaaaatttgatttgttgggctgccatacaggttacttttgactactttagtaccttctgggagaaaatcaaaacccccatgaccattaacaaagcctggcacctggccttttccatgcaacaaagtcatgtttgggttttcatgcactaaagggttatggtatgcgagagatttcaagagaacacttttggaatctgatggttctccagggtttccttgttctaactgtcgattgttggtcattaatggatgcctttccattgatgctgagatagacgagataaaaccagagctcacaacactattttgggtgttactcccaactttcctgtcacagtaagggtttt

SEQ ID NO: 369690 - DNA, 243 bp, Zea mays
tttttttttttttttattttaatttgttaattgttttttgttcatattttttttttttttcattttgtatcatttatcctatttgttttaaatattaccattagattttgcttttaaccccaagaacccaccgttttaaataagatatacggcccaaaaggaggggggggccggaaaaaaagggggggggaaaaaaggggggaaagggaagggacatacaaaccataaatggggccggggacg

SEQ ID NO: 369691 - DNA, 156 bp, Zea mays
aaggggctaggattcttctgtaacccttcccaaaaccaatgtatccggcacagagctctacattatcatgtaacccgtttcttacccacgcgtccgcccacgcgtccgcccacgcgtccgcccacgcgtccgcccacgcgtccgcccacgcgtccg

SEQ ID NO: 369692 - DNA, 124 bp, Zea mays
aaccagaaaatcctttttaatttatttcacacatactgtgacactaagcatcactttttgttgcacagatggcacgacataaaaccacacaaagcagccgctcactgtcacgacggggagctcg

SEQ ID NO: 369693 - DNA, 150 bp, Zea mays
aggaaaaaattgggtttatgacaaactcacacgtgcgcatccaatacaactagatgaagtttatttaggaaaaataaggggcaaaaatttagatgcccaagttttttaaaacctaacagccttatgatgctaaaggggttccaggttttt

SEQ ID NO: 369694 - DNA, 120 bp, Zea mays
ccttgcatatttgcccacatttattatggttttacacccaatataggtgcaataccattacatacccgtacaatacacctggtgctggtaaacatataggacgaacaccccacgcgttct

SEQ ID NO: 369695 - DNA, 188 bp, Zea mays
aaacccctaacaccaaacccatgacctttaattaataaacgggcagggttaaggttggggtagctgaatttgccaaataacccgaaaaaccaacaaactaatccatgcaacaaaacaaaatggcacctaaccactaatgatgatgttttccaacagacttttacatgggccttttttttttttaaggg

SEQ ID NO: 369696 - DNA, 124 bp, Zea mays
ggaggaaaagcctttccttaaatccccttaaaagagaccttattttaaaggtccacccggtaaagagacctagtccaccaaacctgtttgaaaatattccggttttactaaatcttaccaggcc

SEQ ID NO: 369697 - DNA, 72 bp, Zea mays
cggacgcgtgggcggacgcgtgggcggacgcgtgggcggacgcgtgggcggacgcgtgggcggacgcgtggg

SEQ ID NO: 369698 - DNA, 177 bp, Zea mays
aaggaaaagcctttccctaaatcccctaaaaagagacctttttttaaatgtccacccagtaaagagacctagcccaccaaacctgttggagaattttccggttttactaaatcctaccaggccagtttagttcaggcaaaaaaacaggctcatccattttgggctgggttgaaaaag

SEQ ID NO: 369699 - DNA, 358 bp, Zea mays
gtgaatatccaatcattggaattacaatcatatgaactatagtagcaacataaacaatttgttggcagaccaacaaacataaatagaatctgccagaaacaatttgtaattccatatccagatccagtttctcatgcatatctagtttgtgacagaaacaaaattgccttagaaatcatgagagtatctagaccaacaaacataaacagaaactcatgagagtaatttgatacagatgtggctctctaaaatataaataagatataaaaacgtgattgactctctaaaatataaataagatataaaaagacttttgaagattgaaaatatatagatagtggtattttatggaaaaatg

SEQ ID NO: 369700 - DNA, 120 bp, Zea mays
ccttgcatatttgcccacatttattatggttttacacccaatatagttgcaataccattacatacccgcacaatacacctggtggtggtaaacatataggacgaacaccccacgcgttcg

SEQ ID NO: 369701 - DNA, 328 bp, Zea mays
cgctgctagtggcggtggccctggcgggggcgctggcctcgaaccggcccgtggcggctactgcgaccgaggtggtggaggcggcgaacgaggtgctccgggcgcaccagctgccggggggcctgctgccggcggtgatcacggcggtccggcacgactccgccactgtggcgttcgaggcccgggtggacgcgccctggacggtgcgcttggaggtcggcctccgttacaacgccaccgtctccggggtcatgagcccgggccagatcgccgacatgtgcggttggctcgcgcaggacctcttcatgtggtttggcgatcacgacat

SEQ ID NO: 369702 - DNA, 114 bp, Zea mays
ggggaaacaaaactgggattttggatgcccggggaacatgggacccaccaggcaccaaatggggccaaagcattttatttttgggacagtttattacacgaacacctgaaacct

SEQ ID NO: 369703 - DNA, 242 bp, Zea mays
gggttgggctggaaacaccagtcttattattggggtgtataataattacaaaaaaccccatcattgagttttgcaacaacgggaaaactgacacagggtggtttagttacaaaaacaccatcactgaatttggcaacaggggaaaaactgacacaagtttgcgtgcccaattttttagggtacaacaggggccatgcatagcaatcccattattacttttcggcgaagggcacagaggggaa

SEQ ID NO: 369704 - DNA, 165 bp, Zea mays
tgttctcttgggcggacgcgtgggcccagacgacggggagctgttcgcacactccagcagcttcactccccactcagtgagaggcccaaagctctaggccctagcctagccccgccactcctacgagtagccactggacgtcccaccctaccaatggccacagac

SEQ ID NO: 369705 - DNA, 290 bp, Zea mays
ccctcctgacgcgggacccacaccaaggagtcccggtggccggaggagcacctggttttgctggtcggactcgcttcggtcgacctctacagcatccagctgacgggcggcatctctgcgtgcttcgtcgacctgtccaacctccggtcgctggaccccgggcacaaccagctgacaggcatcatcccggcggggctggagcaggggctgttcccgtcgctggtcctgtcgtacaacccagaggcgggcccgatcccgcgcgacgtctcgcgcgtcgagatcaacaccct

SEQ ID NO: 369706 - DNA, 336 bp, Zea mays
gcgtttatttgtccgcccacgcgtacgtccacgcgtggggcgactaccagggcgattagtcgacccctagtcggtcctagttggtccctggtcatcctagaccttttagactggtatttatacttatataggtataaacagcaggatatacaaaataacagacagaggtacaagtcactaatcagcagtcggcttaggattagagcagcaacagccattagtgtttgatcactggtgggagacacagacagaacagaactagaacagaactacagagatgggggagagggagcagggggaaccttgagatgacaagctcatctcgtcactggtgct

SEQ ID NO: 369707 - DNA, 142 bp, Zea mays
gaaccagactcctccatttcaacccacgtgggtcttcttacctgcatcgctgtacccttcccccgaccctacctggggcatctgcctctgatacgcggcggctcccgaggcgccccctggcgagcgtccaggcgcccgccta

SEQ ID NO: 369708 - DNA, 109 bp, Zea mays
ggtcctatcgcatgcgtttattatgacccccacgcgtgacactggatcagggggctgcttttatgggccctgctatgccagtaagacttacggcagagagaaggggtac

SEQ ID NO: 369709 - DNA, 396 bp, Zea mays
caggcaccggaccggataccccgggtcgtcccacgcgattttattacctcccggtcgcatgccaaagggcctggaggctacaacccaacttgtcccacagattatccatctaccgcggacaaaagagtatctccaacacttgccatacctcaacacaaatatactgaatctattatgtggctcaccatgaaaaagaagattgaaaacagatagcatggtataggactcattgaaacgacgtaaaatgagaaggctcataagtacaccagaggtatgccccagctcatctgcgaaacccctaagcagagcccatgagagtaccaaggtagcccatataacggtcgagatcaaagagtacaacgaaggtcaagtagatccggcaaagcccaaactcac

SEQ ID NO: 369710 - DNA, 249 bp, Zea mays
  unsure (1)..(249): unsure at all n locations
cgggctcggaacggcccgggtcgactccacgcgagtgngtcccacccgaccccgcttctaaggagggcggggaaaataaggaaaagatcggtgaattacaccacgacgccctccgaggcagaaccgagacagacaaacacatgaagcggcgggcgcacgccgggaaaggacaccagaaaaggtggaggcgcccggacgcacgaataaggcatatctagctctcccagagggaacagctactgctgcggg

SEQ ID NO: 369711 - DNA, 283 bp, Zea mays
acttgggtcccaaccgccggacgcgcggcaaggggggggcgaaggttggaggcggcggcatctctttatcagcagtcctggtacacccagagggaggaagtcactgccccgaacacgatgggaccaaccccgataagtactacgacatctacgagacatgccacctggaagaggcgaggtaacgctgcagcgtggcaaagcaggcgggcctcgaccgcaaaaaagagaaaagaaagacgggacatgctagaggaggcctctccaagacgggtgcgcccgcatg

SEQ ID NO: 369712 - DNA, 221 bp, Zea mays
gccgccgcccggctggaacggacacggtcgatcaccccacttgagtgtcaaccccggccaacgcccgcagcgggaaggcgagttagccagaccggccatcgattgagcgggggcacaggaagagcaggaaggagaaggagcctgcccctgcccacctcaccttgagcgcgcagcctgcgccacgcgggaagcagcctgcccccgcgctgcccacgaacaaa

SEQ ID NO: 369713 - DNA, 292 bp, Zea mays
cccggaacccgtcggttcaacccatgtgggttcacaccccagccggcacgcagaggggggccacgagaacacagcaccgcgccggcgcttagccgacccagacgagcccgcgcgcacacaacggggcgaaacatggcccccagggccacagctgcccgagaggaggcacaccaaagagacagacaggcgacccgcacgagggcgaacaacacggaccgggacgacaggccgacgggcaccgaagacgaacgggcgcaccatgaggcacacctgaaagaggagctggatgaca

SEQ ID NO: 369714 - DNA, 197 bp, Zea mays
gtgccgaccgagacgaaaacagacgtggggggggttaaaataaagcaccgaggtgtgaacacctagccgaccgcacaagcaaacactcaaaccgggagaggcgcacaacgggaaagcaacgaaggcaccaaacgccaggcaaggcgcccgcctcagaatcagcctagggatcacgcgaagcgcaccggggatggctg

SEQ ID NO: 369715 - DNA, 223 bp, Zea mays
tttgtatgggcgcgcgcatccgcaccacggtggcccgggcttactgtcagcgtcgctgcctgcctgcctgcctgcgtccgctcgcaactgcaacgacagggaggcgcgcggggagggagagggacaaaccgagaaaggcacggcacagctgcctgcctcggacctcggcacgcgctcgcgccctggagactggtgaacactgaggactggaggcggtgggcgc

SEQ ID NO: 369716 - DNA, 317 bp, Zea mays
ttgcgttctcgagggcggacgcgtgggcgggcgcgtggtctgactcgtggggccacgttttctttacctaactccccccgactcacgaatcccagagagccttcatggcgacgcaccgccactgactcccactcctcctcgtgggcgccgacctcgccctctccgacgtccctgctcgcgcggagctgggcggggggcgcggcccgctggtgggcgggtggaacccgatccctgacatgagcgactcgcacatccaggagctaggcgggagggcgctggggcaggcgaagcacacagaagctggacgtcaacgggct

SEQ ID NO: 369717 - DNA, 304 bp, Zea mays
gaaagccgcccccccggcctggaccggaccggaagggccggttcgccccactttgttgccggcccccgaccggacagcccaggggagagggagcaaaaccgggaaaagggcgctttagatttcaaacgaccaaaagcagggacccccgcggaagtccacaacacaagaggcacgccaagggacgcagatcgcagggcacggaggcaacagaccacgctggtaatccctgccgaacgagccgaggagacccacccacaccaagcaaagattggacacaccggcgggcggacggctcacccctagc

SEQ ID NO: 369718 - DNA, 313 bp, Zea mays
tttgttattcaccctccttcgggcttcggcacagcaagcaccatccccttcgccaccgtcactttcaccgataccgatacggcttaccacctgaaaaccctaaccctaaaccccctccgcgcgggagccctcgcccatggagaaccccaggccccaggccccagcactcacccctcccatggccccggtccgcgaccccatccacccgagaatcgacccaatgacggaccctgcgcccgagatgcccgcgcggggcctaaacgccgcagaggccatgcgttctagagtcaacaactgcgacgatgacagaggc

SEQ ID NO: 369719 - DNA, 356 bp, Zea mays
  unsure (1)..(356): unsure at all n locations
ggtgggagggccngcccgcagggacgtggctcggaacggcaccgggtcgattccacccgacgtgggttgcgaaccgaggcagcacacgcaacggggaggggggaagtggagaagacggccgttaagtacaccaccgggcagagccatgacaacgaccgacacgccggcgacgggccgccgcccaaccgccggcaagacaccggggacccgagcactcacgaggctcgacagaacgcagaaaaatccgccgacgacctggagccccgaggcgaggacgagcccggcgccggcatggaggaggccgacaagaaccccggggagacaccggcgacggcgagcgggagcaagacggcgcg

SEQ ID NO: 369720 - DNA, 412 bp, Zea mays
tgtcgtgtgcccacccgtgcgcggacgcgtgggcgggaggcatgtttgggcaaactgcatgttgtttcagaagccgagagcgggtcgcccgacggcggagcggggccggcgctgaggaggagcagtagcgcgagctcaaaggcggagaaccccgtacaggggctaatcgactactgcgagaggacccagcaactggccttcgaccggaagagcgccagcgacgccggctaccgcttcctgacgacgtccgcgtccaggatcgccgccgagtccgagtccgacgaccgtgacgagctcaccgagatctgcacaggatgacgatacgatagtgctgcacgaacgacgaatcccgatcattatacaatgatgcaaatgcgtgtccgagattctgtgaaggaaaaaaaactgaaac

SEQ ID NO: 369721 - DNA, 302 bp, Zea mays
cggaacggacacgggtcggctcaccccacttgggtccccaccgcgctgggatccggtgcggaccgggtacacgacagcgaccagacctgacgtgacacaacccaggacggctccagcgaccggtctcgccgccggccggcataggccacggcgaccgcgccaccacgttccaggacggccagaaggagagcgagcacggcaaagggcgcaaggacagcggacctgcggaagacgatgcaggaatggggggagctgtcacgatggaacaagcccaggttggaaaccaaaacccggtaggggca

SEQ ID NO: 369722 - DNA, 173 bp, Zea mays
gaaggaccgcccgcagggcaccggctgggaacggaccgggtcggctccacgcgacttggtacccacccgggaaaacaccggcgagggggctgaacttagcaagaccgaccctcatggcaaggcgaggaacgaagcgggtggcaccagagccgcccacaaggactagggcgaag

SEQ ID NO: 369723 - DNA, 342 bp, Zea mays
gcccgccggcactggctgggacggaccgggtgggtccacccgcgtgtgtgtccacccggccagaggcggcccccgggggggtcaggtgcagggcaccgacgttctgtaacgggagaaataagggccggccagcaagcgagaggcagaccgagcaacagcgatggaggagaaggctgcacaaggggagcggagatgcggacgatgccgcagatgcaacaacgatgacacccaggaagaggacagcaagagccgggcggcaggagctgcaaaggaagctgagcagacaaacaccagggcgcacaagggcgctgcgggccgaagaggtggcgacatcaacagggc

SEQ ID NO: 369724 - DNA, 371 bp, Zea mays
tgtgttgtcaaacacatatgctgccgacctggaacgaattcttaagatatagatctcttgtgcttcgccaagaataaaaaaaaaaaaaaaaaaaaaaaaaaaaaccaaaaaaaaaaaaccaaaaaaaaaaaaaaaaaaaaaaaacaaaaaaacaaaaacacaaaaaaaacaacgggggccccccctctaaaaggacccaaaccaacgcccccggggcggcaaccaacaaaccttctaagagggccacccaaaaagaaatacatgcgccaacctaaaacaacgccagaaagaaaaaacccccggggacaccaaaaaaaacgacgcaacaagccaaccccggtgcgccagatgataaaaaaaaaaagaggccc

SEQ ID NO: 369725 - DNA, 257 bp, Zea mays
gaccccgcatgccgcagtggacgaagaagaacccggcaaagaacagacggactagggcgaaggcgctagaggacccaagggcaccaccggcgacaggcgagccacagactgcaccgacggtgaccgaaacccaacggaatgcaccagcggtgacaaggtccaaactggggaaaccactgcgaccgacaactaacagctccggccggagatccggccagctgcagagggccctacgaccgagagggcagcaacgactg

SEQ ID NO: 369726 - DNA, 309 bp, Zea mays
ttgggtcgcaagcgcggacacaaggggagaggcgggggcggactcacagggcggacgcgtggtttgacgcgagggccacgacgagcgagcagaggacccatcctagctcgctaagctgtgcgacacagcggcagggaccgaggcgacgatgacgagaagcaccagcggcgagagcaagctggagagcccgctgctgggcctgcccacgccgggctacgaggacggaagcgggcacagccacggagaggcagagagcgggcagatggagagcatccgaagagacgcctccctgccgtggaggcagcagat

SEQ ID NO: 369727 - DNA, 180 bp, Zea mays
ggaccgggcttggaacggccgggccgacccacgccacttgggtcgcaaccgaccgacggagccaaaccggggggcatactgcaagaccgccaccgtcaattgcaccaggcacgctcacgagcacaagagaggcgcgcaagacggggctcgaaacccaaccactgcaacaaaagcaaccgg

SEQ ID NO: 369728 - DNA, 328 bp, Zea mays
ggcgcatcgcccgactgttagccagcctcagccaaggccggggaggaggagcagggcttccgcccgctggacgaggcggccctgctggcctacatgaaggacacgaccgagctcgcctgccgcctaggcagcggtggcaggctagactccatcgagatcaaggagggaggagacggcaacctcaacttcgtctacatcgagcagacccaggccggcgccaccggcgcaaagcacgcccacccgaacgtgcagctgcgtgggggactcgcggcccatgacgcgggagcgcgcctactgcgaggccaacacgctgcgggagcacagccgg

SEQ ID NO: 369729 - DNA, 292 bp, Zea mays
tgtgtgtggccgccctttctttttgacgagggggcgggtttaattataacacgcgatgcattgatttaccaggcaggcacaggggaaaaaaaaggaggccttgctaaaagaacaataggaccgtgcataccaggtatgaacagcaagaatggagagggcaacccaacttttcgaacacacaacaaccgacacggccacagggggcggcgaggtcatgccctgtgtatacgcccggggaaaaaaaggcaaaaacccacggtacctggagagccagctatacacttgagccagg

SEQ ID NO: 369730 - DNA, 322 bp, Zea mays
cgccccctgctgcacgcaagggcaggttttactccagatcccggattttccttcctccttgacacctggccttgcgagtgctctcggtgagctactttgtgtgattatcaggaaaaacgaccgatacatgttatgcaggctcagaactgactgctggattcagcaaattacgggctagaatagagctaggactgggagaaaacaacaaacccgcgaaggatccatgacaggctagaccttgccatcaaggctcaagtagatttgttttggtggacgagcatcacatgggctgctactggttccagatctggagaaatatcta

SEQ ID NO: 369731 - DNA, 255 bp, Zea mays
gaacgcccgggtcggctcacgccactggggtggcaaccccgcacgaacacaggggggggggggggccctggaaagacggggccggaattcccacgccgaaaaacgggggcccacgggggcaggcaaaagagacgaccacagggcgaggggaaaacagggccagaaacgcaccgacaacgggggccgcaagaaaggacaccccggccccaggcaagaggcggaacgggagaccccccagagccaggcacaccgggg

SEQ ID NO: 369732 - DNA, 199 bp, Zea mays
ctttgttaccccctcggcctcaaggagggggaggaggggaccttaggaacagcgggggatcttttccaagcaaacaaggacgactatctcgccgaactcaacaatgcctcgaggtgccgcaggccacacgaaggcaaacaagagtacgagacactggcctccaaattcccaaccatcagacattgggcatacgaggaag

SEQ ID NO: 369733 - DNA, 191 bp, Zea mays
ttgtgtgaccacgcggccggccaagagggggaggggggtgccttaccagccgcgggcgtggattcccaagcaaacgaccaccgccggagcgaccgaccacgctaagcgaatacaggccgacgcgcataggaacaccctccaggtaacagaccactggaccgcacagggcaaaccgcgacggaagggcgcca

SEQ ID NO: 369734 - DNA, 189 bp, Zea mays
tttgtgtgcccacccggacaggaaggcacgcggggggggtacgctcacagcgcctggcttttcttcacccaccacggagcgctgatcaaccgcccgcgcgacggaggacagtacccgtgcaacggcggaaacacgccagccagggagatcaccaacataccaggggaatgggggaacatgaaccccagc

SEQ ID NO: 369735 - DNA, 396 bp, Zea mays
ccacccgtcgtcagagccggccccccctctgcacccgctgactgggtgcgttgcctccgcaacagcggtattctcaagggctgccagtccccaatgttcccgtccgggtccaccggcggtggccgccgcagccagggtggattcgaacctgccgagccgtactctcccaaggtcacctgcatcggccaagtccgcgtcaagggcggtaagcgcaagcccaagcacacctcagccgccactctgcactcctgctccagacgcggcggagtctggagcgcagaggtcagctttcgccgcgccggcgacgaccgggacggaccccagagcaagaaccagggctgggtgtaccagatcccggtcaacatctgcgaggcactcaagacatttggctcctgc

SEQ ID NO: 369736 - DNA, 469 bp, Zea mays
tcttttaattttggttattttaataacattaaaattggggcaacttagatgaaaatttagcgaatagctcaaatcatctttcacaatgatataggtgagtaatttagatggaagatttagggggttcactttacggtattttcaaaatggcagatttggtaatttcgatataaatttaggaggttcctttcagaatgtcaaaagtggacaagtatttttgaaatacaaaatatgtattattgtcaatgatgatcagagtctactacaattaatggttggttatctttgttccatatgagaagaatttctatgatatgtctttttcccccctctagcgcgtctcagtaagacagtaaggactaacgcggaggctttaaagagaatctttagttcttaaatattaagatgactcttatgtatctttgttgggcttcatcagttcttaaataaggtgctatatgcgagggaa

SEQ ID NO: 369737 - DNA, 432 bp, Zea mays
tcgtccacgcgtccgactatactgcgacgacggggctgggttacaccaatcggcgccgtcttacgcaggtgccgaggccttgaatgatcgctaagccggcgacaagcacccaatagaggcacgatagaatgagacggaagcagctatatggagaagcggttattaactctatggttgatgtccagtggcatcactaccagacacatcagagggtacagaaacaccctgagaatacttacactggaagagatcctgcacaagcttctgcggagcatcactacactgccgctacagcacgacaggactattgggatcgtggagaaccaaatgctgcaagccagagtccatcatatccatataacgaagcccatagacatagaggtgcacaatacttgtatgatgggcatagatctgatacagagggtggtctag

SEQ ID NO: 369738 - DNA, 472 bp, Zea mays
tcttccacgcgtacgtgttcttttttctacagagaagttttcaagaacaaaagaactattgccagaagatttctggtttagtgcaccaaagaaggggattatggtttttgcattgccgggagaacctggcttatccgaggtagctggtgatttcaagatccagtttcatgatcgacagggagatttttactgctggctaaacacaacaatgatggagaacagggtaaccttgaacccaactgatcttgatgattatgacaagagaaaactgccctcacctggattccagattgaggttgtcctgatagattacgatggctcgcaaccagcaaaaccaaaaccaggcgctggacctgctgctgataaatctcatgctgattcctcggctagcaccgttgcaaaagaaaatagtgctgcatctgaagaattcaacaagggaactggaagcaataatgatagaaatgaagtcttc

SEQ ID NO: 369739 - DNA, 363 bp, Zea mays
ttgtgggaggcggcgggcttgtccacggcgaaaatggccatttccggcatggtcgcccttagctctagagacggtgccgtggtagggtgggctgcgcgtggcggctgcccaggtgccgaggtgcggtcgtgatgctcgggagccgcaacagccagccgccacctcccccgtggccctgcccccaaacccgtgatcctctcgagccgtccccacccctgcctaccgttttttagcagtctggcttcatccgcaagccccgcacgttttcatgattccacgcccccttacaccagttttacacccggtgctccgtctccatgcctcagatcgatcacgttcccattccccaaggctttggttaca

SEQ ID NO: 369740 - DNA, 551 bp, Zea mays
tcttggacgcgtgggcgagcaaagttatttcatctttgcgcctatgaatccatttgcatacatagcttctaatagtaatggtttgtaaatggattcataggcgcaaagatgattcgagcaaagttatttcataaatttctgtgggcttatgtcaattctttgccaaattggtgcaatgcatttggttgtaccaaagcagggcagtatgataagagccttaatcaatcatgcctgttattttctatggaagcagctatgaaagaaatgccccttgaactctctctacaaattgttgggtcagcaaagaagattgataacatgataacgttgtgtaggcttggaaaaacactttcagaaatacctacagaggaatacaatcagatcttggatactcatgccaatggccgactctcacgtttagtaaatattttggacaagctcaagctggttcagcttgcaaaagaattcttagaagatgctggtgtatcgtcaaatgccatgtatacacattcgatggagctcaggccttacatcgaagaacccatgccaag

SEQ ID NO: 369741 - DNA, 446 bp, Zea mays
tttcccgtcagcccctctcgtttttcatccggcttcttcttcaaccgcgtgcgctccacgcctcctccaggaaagcgagagcttctgcataagaacaacaaatcaaaagcgtgatcagctcggtgccaacaaaacctcaacaaccaagtttcatgtctgatctcgacgtccagcttccatctgcctttggtatggctacttttcaatccatgatgacatgtttttttttatatcgtggttttacataatacatagcatcttccagcttcctgaagagtattactgaatagattgataacatcacatacacgaagttcatctataacatgtttattagtattctgtttgcatctgatggtatggcatcatctttgatagatccgtttgctgaggcaaatgctgaggactctggtgctggttctggaacgaatgattatgtgcatgtg

SEQ ID NO: 369742 - DNA, 487 bp, Zea mays
  unsure (1)..(487): unsure at all n locations
tctgcagcggatgaccctaccagccacgcaaagcatactgatgacacgatgaacgctacatgtagagttcgtccctttttactctaaagctgtcctttttgtctctgacgtgattggatggcatgggatgtggctgtatatgctgtggtgatggtgaaaataaatgatataatatgtggtagttggtatagggttgagatatagagtaaatatgattgcgaagaattacggtatagagtagagaatctcgctgacagggacaagatattccatttagagtcgaaatttagagttgtctgagtgcggatagccttactctccataagatgttaatggcctttgacaggtggctacactaacacacttgttaaatngaatctacacttgaatcatatggcttctggctcctctttgtcaatcattgacaacttaaaactccagatcatttgctcctggcactaaattaaaattttaacactttggcata

SEQ ID NO: 369743 - DNA, 213 bp, Zea mays
acagccagcataccctggacgtcagccactccccggaccacgagccccggacccagctaaagaaaagcacgtatgcgaacgagcccccgctcgccgacacgccgaggcagcctccgcggcaccatcaagcaccgcggcggcggcagccacggagcgcctgcgtcgcctggagagccaccggctcaacccaaacaaggaaaaggaaaatgcaca

SEQ ID NO: 369744 - DNA, 224 bp, Zea mays
agaacagccgggagggggactgggcaggctttgagggcacagcgccaacccaaccgaggcccgcaggcagacaggacggcaccggagccgaccacggaggacagcgtggacatggccaagctgagggaccaagcagcgcggaaccaggagagggaccaggccaaggagcgcggcgcgcgccacgcccggggcgccagacagcaccaggagcaaaaggcggagga

SEQ ID NO: 369745 - DNA, 226 bp, Zea mays
ggaatacccaggcttactttcacgcctttggacagccgccacatgcagtggggtgtttgggagatgttagcgaacaatggtggtacttacccacgagtaccaggtgccctttaaagggataccacgaatttggggaggcctaactccacagaccacaggccagacgcgccgtttacaaaagagaaggatcgggacgctgcacacacactgggagagttcgctcttg

SEQ ID NO: 369746 - DNA, 122 bp, Zea mays
ggcagactagataggagagtaacttggcaggttttgagggatcagttccatgcccacggagagatcgagtccataaggatggtacttgaaccggcaatcgggtttgtgacgtatactacaag

SEQ ID NO: 369747 - DNA, 348 bp, Zea mays
ttacctttgcgtcctgttcacgcctacgcgaggacgaaggcgtattctagggcctttttgaaccgtgtcctggactgtacccaggtcgggctgcaacgtgtgctgtaaggtgtggacagcttcaagaggagctttgacagcctgctcgtgagccggcacgagatgggcaacagccttgagacagccactgagtaaaactgacaagatggggtaccggtgggcgaactaaaatgctaaatagaaggctagcttgctggctatcatagtccttacgatgtacctttgcgcaccaggatcggaatcgggactggcctgtacgctagcctggccctcacagtgagagcaacg

SEQ ID NO: 369748 - DNA, 255 bp, Zea mays
tgttctcggttgtccgcgaccctcggccgaaggctctgtttgactcctttgacggttgcttcccttgttgccggcggcgcgcggcgcctggcgcggatcggcggcaggtgcatggtggaggccgtcgccgggcgccagacaggcaccagccgtaggcggcctagcggcagcggaggggagcaccggcacctggtcgcgctcgacgtcgccgctcgcgtcgccatggtcaccacccggaccgtgggtccagcagca

SEQ ID NO: 369749 - DNA, 418 bp, Zea mays
tttgcgtcctgttgaagccggcaggcgatgaagggaccaattttgcgagttgggccatgtctaccgaggtttatgaagaactcagctgggatgtcgatgatgatgatgttgaagatgccaatactagtgatcacaaagacagcacaaactcgttggtagataagaaagaggagcaagcagcggagcctgttaactgtgaaacagagggcagtatggaacaagaagcagcagctgaaaatgatctggcagacgataaggaggtcgctttggctgcagccaaggatggtaacggtgaatcaagttttgaagcatcgacttcaaaggcaagcaatgggaccagacaagaagagaagattgaggctgctgactaatctaagggaggtgatttctcagtggtgcctaaaccattagtgcaaga

SEQ ID NO: 369750 - DNA, 297 bp, Zea mays
atgcaccttccacaccggcgaccgaccggggccattggggatatgagacgcctcttgcgcacctacccagacgcggcggcggaccccccgcgccgacggcgaggcaggcggcacgcacagaagcccgaaccggaccccgcgagaaaaccttggaagacctgatggctatgattgatgacgccgccaatacaaacgctgaactgactgacgagcacaagaatgaagacacgcagaagcggctaaacgccaacagaagactggcaacaaacgcacgggcactcggagaaaaaagaccag

SEQ ID NO: 369751 - DNA, 313 bp, Zea mays
tttgcgacctttcaccccaaaggggcaaaccagcggagcttgagcgggttacaccacccatttcgcagcatagcgagagaggtgcaacgcggaggaaccccaacgcacagaaggacgctggccgcggcgcgcgccaacagagagagccagcgcgtgccagaacacacactgtcggaagcactcggcccaacggggccaatggacaccggccacaccgcctgcgtcttgaaggtggagaccaccaaggacgacaccaacccctaagggatcaagaaaacgaccggcgacctgctaccgcacgccgacggggagc

SEQ ID NO: 369752 - DNA, 333 bp, Zea mays
ccgggattaccggggcgacctttgcgtgcgtgtcgaccaaagtggtcgaccggacctgttttctccagggcaggaacccattgtaccgacagcgcgccacaggaacaaacatcatgagacgctcgggcgaggtgacacgtggcgtctcggactggatcaaatagatagagacatagggtgtgaggacgtacaagatctaaaccatcagacccatgtaaaaaaaagcagattggctagatgttatgctccatcaatatggagatcatcaagtatcttagaatcagttatgtgtcgagaaaatgtcttggatatttactattctatacgaactct

SEQ ID NO: 369753 - DNA, 363 bp, Zea mays
tccacgccttttgccgccgaggcgacgcggcggcgtcttttgtttcattagctgcacaattcgctgatttggaacacacttgtctgttgtgagtttgtgacaacgccagtgccatgtacctctccaccaaccctatccaacaccagcgcacgaagcatgtcgagctcgacctccactttgtctgcgagcgtgtcgccgttgggatgtgcgtgtacttcatgtcctgactgcttctcagttcgccggcatcttcaccaagggcctctctatgtcagcgtttgaggaatttcggtctagtcttaacatatgccgtggctagagtttcgactgcggggggtgttagctgtgctgagagcatactga

SEQ ID NO: 369754 - DNA, 395 bp, Zea mays
cccgcattgacgccgacgtgcgtggaagggttgcggtgaactgcttgctatgggaccacctttatgtggctgcgctgttgctgggtgacggctggccgggcgcgggcgaatgagagagtcgggcgacgccacgaggccattgatgtgctaacatgcgaatgtcaggtgagtctggaggctatatgtggagagggggtgatgatgtgccacgacgtctcgccgttgctgctccatgccagctgctcaggtcgactagacggccgcctcaccgctgctactccatgctaggtgctcaggtcttcatcagacctttcaccgaaagacagccaacacgtgtgcacagccctcctcttcccttcttgttgtgcgattccgaggatcaaaccctagcttaa

SEQ ID NO: 369755 - DNA, 269 bp, Zea mays
ttgcgaccgttcacgccaaaaggcccgaccaggcggaattggaggatgtcgccgacgaattcgctgcttccgccgcagatgccgaagacacgaccggtacccacgaaagacacatcgcaggcgagaagccaatagatggggacactgaacgcgcatgacgaacgaaaccacgaacgcacggccccagccgaaaaaagcgcacccaaggacggggttgagaacaagattaagaaacaaagcactggcgaaaaacctggcatgtaaccgat

SEQ ID NO: 369756 - DNA, 140 bp, Zea mays
tgcaaaacagctggacacggcgggaggaaagagccatggccaagagacaatacgggcattttccaagtcccctgacctcacaccaccaccaccactgccccccaccagccacaatcagaggccccaggcgcgcacaggac

SEQ ID NO: 369757 - DNA, 304 bp, Zea mays
  unsure (1)..(304): unsure at all n locations
gacgtacacgcgcttcgaaagccaccggccacgccngggagcatggaaaacattgaggcgggaatcccagggattcgaggaggggcgaaggcggaggacgacgaggagcaccgccgcctccgcacgcgggcgagacagggccaccagcaacgaggagctggagaaagaccaacgccaaccacggcgagagcctcgacaccaagggcaacaccgaccgggagacggggaggacacgcagccacggacacgagacccacaccaccgagaactacaagcgcgacgctaacgagaacaagaacggcaa

SEQ ID NO: 369758 - DNA, 404 bp, Zea mays
tctcacgccttccgcgcgatcggagaagggagggctacataattttatggatgacgaagataatgaagttgaagagtaatgctccaaatcgcagctgggctcgtgggcttcgagtcggcttaaattactggtgagcgtcgctgctatcagaccatcgctcatgcttgttctccacccgatatttattccttgaggttaatattgtgcgttcctgtgtacgagtgaggagagtaatcacccgaatgtgtgggaaagaagcgtggtccaatacgacgcccgcaaagtgctcgacaaattgtgtgaacctgagatcgtcgtcgtttctgcagattcacggttgatctggatatggagagctgacttgttgttcccccttattagattgaatggatgggatagatata

SEQ ID NO: 369759 - DNA, 376 bp, Zea mays
  unsure (1)..(376): unsure at all n locations
tttgcgacctttgaccaccatacatatcacgcggcgcacttggatngtttcaccccatttgttgctcgttccgggggccgtgacagctctatgtatccccaccacaaataagagaccacctgtctgccttcttctcggaggtcggacacgagctctatgcttcattcggccggtccaactacaccgaccgatccaatccaacccactgaccatggggatcccgccggtgtgctgctgcgcccccatccccaagccggtcgtcgccttctgcaaccttgcgcggagccatcaaggacgccggcctgctgacgctagccgccgggggctttccgcacgacgccgggcgcggctcggcggacgcccaccagcccgagga

SEQ ID NO: 369760 - DNA, 311 bp, Zea mays
aatgacccagcgcgaccgtccacgccttccacccctccgcccacgccacgggggcgtgttgggagtcaaagccacacataaagcgattaccaagggagaatacgggaattccccaatcccccacctgtcaccggagcacacccacgggatccgacgcgaccgcgacgcagactacaattcacgccggtgcctgccgccgcgccggggcccgtgtcgcaggacatagcggcgcttgccgatcgcgccagcgcctcataccgtgctggcggcgggccccgcaacgacctgtgtgctctcgcggcggagctcct

SEQ ID NO: 369761 - DNA, 290 bp, Zea mays
ttaacagtttctccagaagatgagtctccctggccgttttgaccttgtcctgctcgctttcctcctggtcttcctcgtcttcgccgcgtccgcgtcgacgagttccgccgaggtggccccgagcgtggcggtggacttcgtgcggcggtcgtgccggtcgacggagtacccgcacgtgtgcgagagcacgctggtcccctgcgcggctggcgtggggcgcagcccgtgcctgctggcgcgagcggcgctggtggttggcgccgaccgcgcgcgcaactgctcctcctaca

SEQ ID NO: 369762 - DNA, 247 bp, Zea mays
gaattcctgggcttctcgacgtcccctttcgagttttcgaccgccagcctcgggaggcggaaattttgctcgttttgacacttcctttccggcagtatggggctgtccgcgctcctggtcgacgccgacgaccaccacgcgcccaccgcgcccgtcccggccgccgcgcgcccgcagaagcagcacgccccgcgcccgtgccaccagtcggcccccgtcgccgtgccggtctggcccaaggcgatga

SEQ ID NO: 369763 - DNA, 300 bp, Zea mays
ttcacgcgtacggcgagacagaggcacacttggggacgttcaccacggttttagagcacacacggaggtgccaccgcgcgccgcatccggagcatggtgacgccgctggccgggaagggcccgatcgcgggggcgatcccgcggcccccaccccctctggccgagggcggcccgggagggtcggcggccgaggcgcccgtgcttatattcgtatacttccacaaggagacccgcgcggagctggaggggatgcacgcctgggcggtgcgcctcgccatgggacgcgcgggccgggacatg

SEQ ID NO: 369764 - DNA, 276 bp, Zea mays
tcgacgccgacgcccataccgaagcaaacttggggagtttgacaccacacatacacacatacaggggagagaagagtagagaacgaggggcaggggagccagcgcccactcgctgaagcatggcatggcaggagaatccgtacgtctaggtgcaagtcggacggaggatggacacggaccaacagggcgcgactgatgcggcagggaagccggaactggccaaagggacgcccacagcgtcaattccggctacgcaacgggagcctgaacgcggtg

SEQ ID NO: 369765 - DNA, 309 bp, Zea mays
gtcacaaccttaaaaaccccgaccgcaggaaggggcccgttggaagattaaaacgagaatttgcaagattaagggcggcaagggccacaggggcaagggccaaagacggggacggaggcgcacagagacgcaggacacgaaacacggggcacaagaccgcagggagggacaagggcccacagcaaacagggctgcgaggagagcacagccgaacgatcatggagctcggggaccggatgacccacgacgccgaggccaccgacaggcaaggatgcgacgaagggcaccacatagggctgggctacaaga

SEQ ID NO: 369766 - DNA, 356 bp, Zea mays
ggaattacccacgcgaccgtaacaaccttacaaacccaccacgatggacggggcagatttggagatttaaacgggagcgtcccgcattaacagcagcgaaaagcgacaacaggagggtgccaacatgggtggcggggtgcacaggcaagggggacaagaaatacacgcgcgccccagccggtgctgagccagggcaagcgggagaaccgctccaacaagacagccagctaggaccaatagccggacacaacgaggagcgacagacggggcaaggcccaacacaacgggcggctgcggacgccgacacaggaccggacgtgccgctacaggccacaggaccggcacgagcacctgga

SEQ ID NO: 369767 - DNA, 469 bp, Zea mays
ttcagcgcgcgggttcccgaacccggccggccggccgcgctcctcgccaccgccgccgttggccatgaagcgcgcgcgcagctccgaggtattcatcggcgtaggccggctgcgcgcacgcaggggcctggcgccgctcctcgcagcggcggctttcgcctacctactgttcgtgtccgtcaagctcgagcgcgtggcggccgaagcgtgggcgctcggggccgccgcgtgggaggaggcctctgcgttcgacggcgacgtcgactacatcgcctcccgcgacgtcgacggggagggcacggccaagtgcccaggctcgctcgcgctcggcgccggggagaccacggcgttcctgccgtgcgggctggccgccgggtcggcagttaccgtggttgggacagcgcggccggcgcggccggagtacgtcgaggcgcttgagccgagcggcacgggcaacgggacggtgctg

SEQ ID NO: 369768 - DNA, 443 bp, Zea mays
attctctcaccatcgatccattgctggggtctcttggggcctttccccacccatttcgccgatgggttagctcccccgcaccgcacgcccaagaacaaagaggagccgacgccacggcgacggtcgtcctcttccggccagcaccgtcgcggactgcgttgcatccgtgcctttgcttctctcttcaccccgcgtctctctctcttggcgacgactgggggaccactgccgccgctcaacgccaggtagtcccttcgccggcgacgagcacccactagttttgtgatcggtgaaaatggctgctgctgaagcaagggctgcttggcaacgtgctgcaaaccgttgtctggttcaggaggacaggaagagagctccaaaactagcttgctgtccatcatcggctgaacaacatggtacaaacaatgggaactgtcgaaattttg

SEQ ID NO: 369769 - DNA, 197 bp, Zea mays
tccacgcgtccgccaacgccgacgaccacttggcggccttcacgccgggattcgatgctttcgggaagggaaacgggaaggagccaaaggaaccggcgcaaccgccagacaagacaggacgcgccagcaggcaaaggcatacggcccgcgccgcacatcgacgacgacggatacctagcggaagcgacacaagaaca

SEQ ID NO: 369770 - DNA, 396 bp, Zea mays
tccacgcgtgcgcccacacggccggccacttgggcgccttcacgcccgatttacgtgcctacaggcaaagcacggggcgctagcaacgggagaccgccaaacggcccaacacagaaggctagctctgcgggaaaagcaggagagcaaccaaatctataccagcaaaatgtgtatgcaccggagacacaaccacactatcctggaggatacaagaacccttcaagacaatgggaggaatagcctcaatacgtgaatctggaggggccccattggcgattctctggaaactacaaggacaaccaggcccatatgctacctgctggagatgcaaacaaccgcgaaaccatgtatggagcaaactccccaggatacactgctggacatggccaacaatac

SEQ ID NO: 369771 - DNA, 261 bp, Zea mays
acctccaaacggtcgaccccgcccccggcccggggggcggattggaaccattcacggcaaggtgccacagtctacggaccgacaggggcgagacccaagccaacacaaaggaaccaagtgagcgcgagaccgcgagacggccgaagaggaggagcacaaggacgccgagatggacggggcggggcacggccacggcagcgaagacccccgcgaacagccggggggcaagtgcctcgacggctcagggcagggacgccaaga

SEQ ID NO: 369772 - DNA, 393 bp, Zea mays
ttttggcttttctggcctcagctcttacagggaggaggtctttttgaatctttagaggcgcattaaaagtatcttctgaaacaagatgagatggagcgtgctcaggcacaggtagaggagcttaacttgagtctgaagaatattaaggagaactatgagctactgcttgatgaggcaaactatgagaaggtttgccttacgaaagcagttgaaagactggaagcagaagctaagagagcgcatgaggaatggcagtccaaagagctaagttttgtcagctctattaagaattcagaagaagagatagtcgctgtcacggttcaaatggacaggaccttggaggttgtttaggagaaagaaaatgaaaacacaaagttgcaggagaagctgcag

SEQ ID NO: 369773 - DNA, 266 bp, Zea mays
ggaattcctcggttacctatccgcctccacgcgtccgccacgctggggtcttggggggtttccaactgttgccaatttttcctcaccacttattatggggcggtggtgtgcgatcgcaggaacaatcaccaccgtattaagaagatgatgcgctgcctcaacgggcggagggtgcgccgcttttggagcggcgattggagattgccagcggcaacccctgcacgtgcggatgcctacgggcaacgatgggcggtgcgccagcctga

SEQ ID NO: 369774 - DNA, 233 bp, Zea mays
tcgacgcgtgcgaggaaacccgggggcgtttgggcacattcaagcaagatttcggccgttgccgccagcacgccggggagaagccacgacaaagccagcggcagcacaacgaagcaggccacctggagccggaaaagcaaagcagccccaaactgaaactgagggcgatgcggacaaagagcagaggatcacagagaggacgctggggacaaccagcactggcaaagaaaggg

SEQ ID NO: 369775 - DNA, 223 bp, Zea mays
taaaagcctttcagacctcaccacgacaggggggggaattgaacactttagcggggcattacaacttttcacggagacaagaagacaagtgacgtgctcaagcacaggaagacgaacggctctacagacccagaaacacgcgagggaacccgtgagaatcggcttgagcaggcaaggcatgaccccggctggcctacgaaagcaacagaaaaaccaggagcag

SEQ ID NO: 369776 - DNA, 270 bp, Zea mays
cgggattacccacgcgaccgtaacggctttccaggcctcagcccaacaggggggggcatgggaacctttagaggggcatgaccaagctttcccggaaacaagatgagatggagcgtgctcaggcacaggtagaggagctgaactagagcccgaaaaatatcaaggggaaccatgagctactgcttgatgaggcaaactatgacaagggctgccttacgaaagcagccgaaagactggaagcagaagctaagagagcgcatgaagaatggc

SEQ ID NO: 369777 - DNA, 268 bp, Zea mays
tccacgcgttcgaccacgcgtccgaccacgggggcgccttgggagaattagccggctaggtaaccaatcggcggagccaagaacaagggagagacaacttgccccgtgcaggcgacatgtgcaactccaacgtcaagtccgagggcgtcgtccagatcgacggtcgtccagtgctgcagccggcgggcaaccgtgtggcggcgccggacgccgtccgcccgctcaagaagaccctgcacaagtgcttgtccatgccgcctgcctacga

SEQ ID NO: 369778 - DNA, 143 bp, Zea mays
tgtgacccccggggcgtcagcagacgggccggccacgatggaagcaacaccgcgactgctgccggctgacactactgagtgcgcgagataccaaccgggaaccgaagggcacttatgggacatggtaaaactccggtggagac

SEQ ID NO: 369779 - DNA, 179 bp, Zea mays
tttgaggctgacgctgttttctatacgcggcgggttaactctctcccgcaggtggatttatacaggcgcgaggacgaaaaacccatcgaccgtcaaaccctgctccatcacattggctgagcagggatcgttgcacaggctttacatatcagagccatcccttccataccgggccggtg

SEQ ID NO: 369780 - DNA, 147 bp, Zea mays
gacgcccacgcggtcggaccactgggggcacactctagtgtccagtcgaacaatgttagcccagcctatcgaccgagaccgcggtctccttgccttctaccacggcacgagtaacgaggtgggacttactccgatcgggatcctggc

SEQ ID NO: 369781 - DNA, 291 bp, Zea mays
atttccacgtgtacgcccacgcgtacgtggatgccagcgcctatactagatgcccctgttagggtccatggccgtcgatggccccagacatctgcttggtggcctacctcgaccctacgacaaccacagttgcccgttggcccctactgatgcaagcactgactgtcttctatggcacacggtgctagtacagacccttactactggtgtttgcgccatctcactggtgctcgacgaaatgaccatgacgagtttcgagttgtgtgcaagctcatctacgacaccgtggac

SEQ ID NO: 369782 - DNA, 201 bp, Zea mays
aggaaccggaacggaacaggcgggttgacccacgcgcattggatttccggacccgaagcaaagcaagcaggggaggggggatgaaaaaaccgaatgctcgaagatacgaacacggaaccgaacaagaggaagaggaggaggacgacgggaacgaaggaggccacaacaggggagggggcaaaacacaacaccaagggcgac

SEQ ID NO: 369783 - DNA, 224 bp, Zea mays
ctaaccctgacggacaaaatggagaggggggggtgagttctcgcgcggggaacgtcctttccaggctggggccaacataagctaacgagccgcgaacccagcctgacggcaactagcgccccgggctcagagaccaaggctgcgcaactacgggcccgaccgcgccaagccgggcctgggggacgggactatgcgcgggcaaggaacacccaaaacaaagactg

SEQ ID NO: 369784 - DNA, 191 bp, Zea mays
ttgtcttatcacgcttacgcttatacagaatgcggtggttgaactcttgcccggaggaggatgtctccacgcgcgagcccgaatgagccatctaccgtcgaacccggctgctcgacatggggcgcgcaccgtatccatcccaggctttagattataggatgactccgttgcacaccgggcctgtgctatgg

SEQ ID NO: 369785 - DNA, 143 bp, Zea mays
tctcgcgaactcgcttcagacaggaagagggcggataggtttaaacgtgtggactgtcttggccccaagctggtcggcgcagtctaccatccattccagcccccctgcccttacgctggcccctagcctaccacgggcttact

SEQ ID NO: 369786 - DNA, 190 bp, Zea mays
atttacatttgtacgcacgagacaagggggcgggggccccatactcgggcggctcaagcagtgctttccagatcaccatggctagtgactcaattaccttcacgagatgcaccatggacacggtagttctgatactaaccatgttcactttaggtacgacatctgattctttactttttgcgcgcattgc

SEQ ID NO: 369787 - DNA, 228 bp, Zea mays
tctgagacgcgtgcgtagacgggcaccccgaacgctagcttgtacgttagatgtgagagtgcaggcaagacaggctgcctagcgctcggctactcccttgtctaccgcctatgcttcgtcgactcctacgaagatgccgcctttggcgtgacgctcatgaaggttaacatctacgcaaccatgtcctgcaccaagcacgtcgtcgtctgcgtggacctctacatcgag

SEQ ID NO: 369788 - DNA, 177 bp, Zea mays
tgcggaacatggctgagtcctccgacgggctgttggctctgctctgagaactggatatgctgggcctagcacccctccgctctgcgcctgttcctatccgcgcctccggcaccggctgcggccgaaataacatcgaggggatcgccaatggctggcaactctatattctcgcgccag

SEQ ID NO: 369789 - DNA, 127 bp, Zea mays
tgtgtactttcaaacatgtacgaggcccacgaccaggggatggctgtggtgctcctttactttgttctggccagcataccggcgctcccaagcccgattcgatacgcggcctggtcgttatactgga

SEQ ID NO: 369790 - DNA, 327 bp, Zea mays
tggttgtttctatcgttaaaccacacatggtcaccgctgtgggtgcgcgatctgggcatgtgcctgggggcgggctgatagtgaagatgggtggggtgtcaccttcttcaacatcgacatacacgggcggcagttctggaggatcgagatcaactccaaggagcttcaagaaccaatgcttacctactgcggcaaaggctcctaagtcattggtcgtattgggacactacacttgaacagggtatgaaggcttgtgacagaacacaacacctagtggtgcatcccaagctggctgaagaaaggacagctactggacacgactacatg

SEQ ID NO: 369791 - DNA, 213 bp, Zea mays
ttttccacccgtaccacgccatctgggggacccttttattggacgtccggtcgccgacgtttcccatggaggccgtcgtgattgttaccaccttccggtcattcccgatccccttcatatttacccagttccaggtccagcgccggcgccgtgccgccttcctacacatcgtcgacttcaagcgtcacgaagacgacaaggagaccgctaaag

SEQ ID NO: 369792 - DNA, 223 bp, Zea mays
gcctcaggccgtattgtaacacccacccggacgcacacgcgcagcgaaggacccatatgtgtcaattcaccgtcgatggagatgatcggatcatactgacatctgtacggtgtcacatcgggagttgggctgcgcctgaaaggcgggccgaacgagctcagcctcgaggacctgttcagcagcaagagcgagctcctgctacaccacaacccacggcacaaga

SEQ ID NO: 369793 - DNA, 416 bp, Zea mays
tcctcgcatccggatcgatacgataaacctgtgggggtttgttcgttcagaggcgaagcctttgcctatgtggagagagattttaatatcaagtggacaccctacctgggtataaaacttttattccaccctgcgccaaaagtactcatatgattcactgtggggtgattctacaattgctgtctcttgcagacagattatcgtgcatttatgctcccttggcacgctctgtgtttcctaatgataatggggatgcacagattaaacaccttttgctgtcattatctgctcgtgccaatggattgaaccctctgatgttattacagtatcaatccgaaatgggggaagtgaaagtgtgttcatagatggttgccatgccttgctttcaatcacatctttaacacctggcttacttt

SEQ ID NO: 369794 - DNA, 421 bp, Zea mays
taccacgcgtccgcccacgcgtacgcatcgggggattttttaagccgcctggttcctttcatcaaaggtcgccgccgcctgcagcaatggccgacttctcctggctcacggtgcttggcttcctattcctcaccttcaactcaggcatggcgatttatcggtccaacggtgacgccggctccgtcgctttcgtcgtggtatcttatctcgacctggtggccctgttcgcctgcttgcgctactacgagcagctggatcagcagcactcccaaaagcgcgcgagggtcaaggctggggtttggagcctcacgaccctccttactatcatgttcagttacaaggtggctgagattatgcccctgccagacaaactttgtgtctggtcgatggcagccgctaccacctgtggcggcttctacgc

SEQ ID NO: 369795 - DNA, 457 bp, Zea mays
tctacagcgtccctatcctacttagtcggggctttttataccagccgcctttttatggccaccgagaccattcaggttccggcgccggccatgccggcagtaggtgggcgcgccgccaccagaggcggtagaagggcgggcctgccgccgccgccgtggaggggccagatcaaggagaagatcctcaaggacgtcgtctctgctgtctccgccatggccgcaggcctcgtcaagcatagccgcagcgacggcgaggagggtctcccggcctccgtagacgccgacaacgacaagtgaagcggccggaccccagaagtataagaagagccgctacgggcggtaatccttccggccgctccttttgtgctaccatgtgctcatattagtgcactcggaaaagggcaggcaaagggccaaatattttaactaatgaagatttcgtgaatctctcctacgt

SEQ ID NO: 369796 - DNA, 332 bp, Zea mays
tctttcacgcacgcggtgtcccaccgggggtgggggcctatttagatcgtcgtcacctttttgagcacgggctgcagcaggggctgccgcggcggctagcgcaagaccctgttcaagacgctgctgcagctgatcaagccgctgataaacctgctgcagctccagctggagcatgagctccgccacatgcgccaggtcatagaggacctcctagaggccactcacgaggtcactgtccagcacatgatgcagcacgagatcatggaggacaacctggatatcctgcagctgatccgcgagctcttctgcgagctcctgccgattatcctggc

SEQ ID NO: 369797 - DNA, 367 bp, Zea mays
ccggcaggttcttgcccggaattccctttttgacccacgcggtccttagccaggcgacgaaacgcagaaagacttgggtgcgctttttatgtcaatacagttccgttggttttatagccgctagaaagtacgcgatgacgatgacggcatttcgcacaatgttgaggagaatgcttatcaccatcatcacctagcaatctctaacaatattggactgtgacaggatgtcagaaggtggtaatcttacttcgtctctcagggctatagatattcagggatgcttcaaactacggctcatgtcagggcagttggatgcactaaattccttagcaatcaccaactgcccggagttgcgatcactggaaac

SEQ ID NO: 369798 - DNA, 221 bp, Zea mays
tcctcaccaccgcccacgcgtccgcgtggaggggggacttatcggaggcgccgcgagtttgtagccggcagcgccgggctaagtcgggccggaccaacttgtccaggaggcgtagagaaccctagacagacgagaagaatatacggcgaggaagtggcagcaaagcccctggaataaattggcatcatagagggcgcaggaaccaaatctgaccgaaacct

SEQ ID NO: 369799 - DNA, 233 bp, Zea mays
tagttagaacacacaaggggagaggggagggggagggaatgttaagggaggcgcactctttctcccaggagctctggaatcgactccccccggcagggaaggaagagaaggaaggagagcacgcaggaggaggaggggagaatgcacgaccgcggccggcggaacgacaacaacaaggtgtcccggaagctcaagagcatggacgcggacaagctggagaacggaagcaagga

SEQ ID NO: 369800 - DNA, 411 bp, Zea mays
tcgtcaccactggccaggtagagccaaccagaggggctttcattgacggagagtgtgccttctagagcggcagggagacagcaacgaagggagggacgctggcgccctgccggatgggccaccgagcctggccatggacatccttgctactagcgcaactgtgaccgcgcgcttgcacccgaactgcgcgccagcaactccgaccctgagagcagagaacatgaaaccgaacggcaccaccacttcaggcaccccaaccaagtacaacagctccatgagttctgttccaacccgcttaaccagcacaacgagcggcaacacgagccggatacccacgctcggagaccaaaactacccgctcgcgcttgagtcctatctaaacatcactctagagaacaaggcagggtgctc

SEQ ID NO: 369801 - DNA, 256 bp, Zea mays
ctgaaggccagcgagtgaggccgcgcgcacgcgggggttgttgacagggcccaggggatcttcgtgcgcgcgtggcggggtagaacagattgcgcgcgtacaggggagaatgacacgggattatgctgctcagtacgctacggttactggcgtctcatatctgtgtgagtgagacgaacgtagcccggaacgtagctagcagtgactgtagcgtggactagtccggtgcggactgcgagtgaccagggctaaataa

SEQ ID NO: 369802 - DNA, 388 bp, Zea mays
  unsure (1)..(388): unsure at all n locations
tggaaacctgggccactaccagcgagggacggggagggtttcaccgaagntacggacgtttgtggaaaccagcatgtaggagctgcagcaagtgctggggagacctaaactggaggtgagcttgtttgatacgcttggggaaataacaaccatggtcagttgggtctaggtgacaaggaaagtagaactagacctgagctaattacagcatttaacgaaggagcttcctgggaggagtaagaaaacgcatgcggagcttcccatactgcagccctagccaagaagaagaccactgaccagatagaatctaggggctggacattaggccttggagacaaggggcaggaatggccatggaaccacagccacgcatagcgtaccacaacct

SEQ ID NO: 369803 - DNA, 277 bp, Zea mays
tcgtaaccaccaccgaaaccaaaacacacacggggggcgttctcaggagaggcccgacccttctcaacccacaagcagcaagcgaagaaaggagggacgcaagcacacagcctgaaggaacaccacgcgcgcgccacggaacaagacacgcaacagggcacctcagctaccagcgctagcaacaagaaacgaggagccagcaacgccgacacagagagcagaggacaagaacaagaactccaccacccccgcgacgacccccgacaaggacaacagc

SEQ ID NO: 369804 - DNA, 367 bp, Zea mays
gggggaggccatcagagatggggggggctttctcacaggctcctgatttgctggacaacacagtgtgcataacatggaacttggtgccctagtgcctgccttgatgctgtcgcctgttcggatgaacaggcagctctgcgccatattggtagctctgacaggtgatggcgctcctcttgtaagaaaccagtcctggacccagcaactgagaagctgactgataggcatgctgcaggcagctacactgagccaaaccgggctctctggcaggcatcatacgatgcgatctctgggcttctaacataatactgcgtcattatgattgaaagtatccagcacaatgtcaggacacatacaccgagcttat

SEQ ID NO: 369805 - DNA, 293 bp, Zea mays
tgtttacggccgcaggccaacccggaaggcgggggggatttttgcccaggtgcccacgttttccgggccaaaccgggcgcagggacgacccatctcggcccgctgcgcccgccgagagggtgtcgtcacggcccaggcacggaatgcacaaaacgctggggctggtgcagaactggatggcgacgacaagggggagcctctaaacacagaggccagccctgaagaaggcgaaaagcacctagacaacatcaatgttccctgagcgctcgtaagacagaacaggggggaaaacc

SEQ ID NO: 369806 - DNA, 286 bp, Zea mays
tctttcgcacgagaaactacccagccggggagggcgaactgtctaaagctctaaaaagaacgcaacaccgggtgctaggcggaacggatacaaccggacggtgccgccgaccatgggatttgaggcgatttacgggcggcacgaggaacaatcaaccgctctggagggcaagagtcagaccaaacccaacagaaaacgatgaatgaacccgaagcttggatgatctgatcaagtgccactagcccatgaaagaggccccgctaagccgacaaccagctaaaaacac

SEQ ID NO: 369807 - DNA, 371 bp, Zea mays
tcggtcctggcctctccttcccagccgtggacggggacttttttccctctttctcaagctcttaaccgagctcctcttctctcttgttcctggtgggcggcgccctctcccatggtcgcttactccggctgcggacgtcgtcaggttcatccaacccctcttttccctctaccctcatcctctagccgccatggagctcgccctggcccctgcgtattttttatttgttttcctgcagctcgccctttttcgtgctcctgcacgccggcaaccagcccatgttcctgcccaagccgggctcgcccagcctcttgctttatctgctccagcagcaaccttagggtctcaaggtattccagttcgtgagcagc

SEQ ID NO: 369808 - DNA, 359 bp, Zea mays
tctttcccacgcagaaaagccaaacacgcggggggattttttacacaggttcgcgggctttcaaccaaccaactcaactctcgtgaaccagatgagctgaacatattcaagggcactcaacggaaccatgtggacataggcatgataattcaaccagtcgtactccaggaccctaaggctgaagccctcggcaagctcgccttaaccgctaggcttagttgagagctgtggttgggatctatacggaatcgcgctcctgggctggccgaaccaatccatggggacgcccatgcctggctctaaaagtccatagcgagaattcgtcgaaatgctgacgtaacggcaaggggggcaaacaa

SEQ ID NO: 369809 - DNA, 390 bp, Zea mays
tcgtctccactggccagctagagccaaccagaggggctttctgttacgggtagtgtgtcttctagagaggatgggagcaagcagcgggagcagggacgctggcgccctggcggtggggccaccgagcctggacagggaccatccttgctacttgcggagctgttcccgcagcgtatgctccgaaaatgcgactccagcaactcccatactgaaagcagaggacatgaatacgagctgcaccaccacttcgcgcaccccaaacaggcacaagagcttcatgagttctgtaccaactgggttgacgagcaaaacgagcggcaacagcagcgggatacctacgctggtagacacagactacccgatcgcgctacactcgtatctaaacatcac

SEQ ID NO: 369810 - DNA, 161 bp, Zea mays
ttctttttgcaaacaagataggtttactttggcggctgagcatgaaaactatgtgcggggtggcttgaggaacggactgggctgtgacaagtttgacataaagtctattctagaaggttaactgaaaaagaagataaacctgcggagacatactagacaat

SEQ ID NO: 369811 - DNA, 280 bp, Zea mays
ttctaaagcagcaaagggcgacaccgacctgggaggggttctttaggagcaccggccctggctcccgccagcaccacgggccttggacagccaccctatccgaccgagtgggcattcaacccaagagcatgcttgcacacgactcctacacactacctctggatgtcactaccaaccaccacaccggagacaaccgatgacgatcgcaggggggaacggagctaccctcccggccaccctacccggtgaactagatctatcgggagcctgataccataac

SEQ ID NO: 369812 - DNA, 320 bp, Zea mays
tcgctcgaaatttgggggacggaagcgagagcagcatcttttcctcatcgggaggtggagagatggaggcggccggtcgcctccccctcatcatcctctcctccctccttctgctcctctcgcccgagctgccgccggaggccgcgcccccccaaatccacctcctcgccaccgccccgctgagcctcctttactacaccttcaactaccgcagcctgcatctcaacaaccgcctcctgctcactccccacatggggcggaacatcctcaatctcttccccccaacattaaccagaccgtcatcccccagacacctcatg

SEQ ID NO: 369813 - DNA, 338 bp, Zea mays
ttgttcacgcgtccgatcccgtagactaagtgggggggattgtcatgcgagttcagtagtgagtccagatcaacgagggactcatctacaggctcttctagggggtggtcatggccatagatcaaataacgcagggaccacaaacattctcagggaacctcttgttttatggtttggcctgagctagtcagcatctgcagcaccagaaccatcaaaatcagcagactgtactccagaccgtaccgaaatacgaaaggagacaccagacaagacttgggaatcaaggaatatataaccccggtcataagtctgctagatactttaaggaccacatttac

SEQ ID NO: 369814 - DNA, 322 bp, Zea mays
tttgtaccgcccaccgaactgagagctgcagcggcgggtgcttttggggccgggcggcggaaggccaccgggagggacgcacagcgggcgcagctggtagcccggcggggcgccagcggctgcgcccgcgactgcgccaccgaagccaccagagacgacaaccggctgggcggcgtgagccacaaggggttcgcgatggggacagagaaagggacggacaaggaagaggaccaccgcgagagcgacgggggcagcaacagacccggccactcaatccggcacgcacgagggcacgttccagggaatcaaaccggggacaaac

SEQ ID NO: 369815 - DNA, 290 bp, Zea mays
ttgttctccgctagagatgccgtgaccaccagggtggtttttttttagcagttcgtgtgggtctcccaagcgggcgggtagccctaggcaaatcctagacccatgccagacctagcgacaccaaccagcttgccagcgaccatggggaacccggagaagctgatgaatcagatcttcgacctcaagttcacttgaggctcaggtttgacatgacgcagccaaggggcgagaaggaggagaaggagcagaagcctaagggcaagaaggcgatcgagaagggcaacatggac

SEQ ID NO: 369816 - DNA, 390 bp, Zea mays
tttagcggtgttgcaaatcctatcacaatgttttagctctttacactgcaaaaagtttattgtaaatctgaagaaagggaaaaaggcaaaatttggatgacaagtacggacttgcgtcatatgcaaaaattcaatataattagcacacggtgggaaatttaacttcaacgttcaaccatcaatcaccaatgtgtcaagtttgccttgaacagtaattttacattataccaacaactgtcgtgttttctacacgcatcttcttgtaccagttgcactattttgtgactttatgtgccatttttcttttgtaaaaaagttttcccccgggcagaacttattataaaaattataatccaataattcttaaattaatattcattcattataaat

SEQ ID NO: 369817 - DNA, 326 bp, Zea mays
tgatcacgcgcgcggggccgcgtggacggaggggtgtttttcagccaggatcgcttagtccgcagggtataatacaacaggaaataagacacatgctcacgcgtccaggacgagatacatcgaaacgatagaagacttaatgagcggggaaaggcaaaacaaaaaagagccggatattgtaaccaagatcgggagcactgctttgctaatgaggtcttatgggatggccgcgagggcgctcatgatacgcgtgcaggatgggatctcctgccacagcttctaaaccccgctaagctagttcagcgtcttgggcctcaggaacagga

SEQ ID NO: 369818 - DNA, 243 bp, Zea mays
  unsure (1)..(243): unsure at all n locations
ttaccacacgctcttagaacgcaaaactgcagcatgatggatncggctatttatcaaccgagatcatggctttctacaatcgcggctacactgatggggaatcgatccgccttggctcgtggctgtggagatgtggaactcataggttatagtgtgctacaatcaccggtcaccccaatgctgatccagctattgcaaccccaaggtttaagttttcgctaccgttggacggtctgactggca

SEQ ID NO: 369819 - DNA, 389 bp, Zea mays
tgtccactcctagctcgtaatggagcggatgctggactttcagaatatccgccaggagttcgagaccaaggggaagggcggcgcctccattggcctcatacaaggcaccggcaagctcgtctgatacgggtaccaggccggtccgcttgattaaagtatgtctgttggctatagcaacgttcagaggcattgagccaggcaaggatactaaatgtttggtgagtgaacagagatacgcgcttgaatttggcataaagataagctgttgtgtactcttaccctgccgctatgtatctgtctatatccctgagggctatcataaggttacagaatgatgatggaataaggaaagaacattgtctaattaccgatgactggatgactatttt

SEQ ID NO: 369820 - DNA, 440 bp, Zea mays
gctccacacgtccggtcggacaccgccgcacgggacgtgtttcaatttccagtcgcggggccttctgcacaggctcgcgcctgctggccgacgaggaccagcataggcagctgcacgcgcgccgccgagaggacgcccacgccaacgcccgcgccatcgagatcttcgcgggacaccgcgccggctggacggaagccgagcgccgtatgcatgcccgcaacagaagagacgagaacgaagccgccagactgggtgcgaacctcatcaacacatggaccgacaccgatgcgctgcgcgcccgcgccaagcgacactagcgcaaggacagcgaaacctaagagactttcacgaggaacactatggtcactacccgctgaaggtgctgatacagatggaacaaggcccgcgtacacaacagggaggaacaagaggaggaggaa

SEQ ID NO: 369821 - DNA, 510 bp, Zea mays
ttacccacagcgctccgtgtgacgcgctgggcttgataaggcccccttggaggcgggttcctatttgaaaacgctccatacaaatcaattgatgttgtaagtacaactcttgtaggaagagatactctattcatgattaatgtcttcgaataactacatcaggacaatctttataactttgtgtagtaaaggtaatgctcactcctcatttctagatggattgcaattcagtagcgcttctctttaatttctaccctgaagatttgattttaggttttgctcttacacttggattaatatcagtgtattaatttgcaacaggtaattgatacctataacttggttatatgcttgacatcgttagttgctctttctatgctgtcaattggtcatgcggggttgggtagaagttggcaatgttgtgaattcggtagggtatcagcctctttttcatagggtttctccgctaatctgccttgttagctagttgaacaggaagaagcgctacac

SEQ ID NO: 369822 - DNA, 179 bp, Zea mays
gaccggccttgaattccttgatttacctacgcgtccgtttgtatctcccccagccccggaagagaactgttggggttttttttaattcaaagcgggggtctttctatacatccatttctagacctggaggtttgtctgcgatcacataaacaatggttgaaggctgttgcttgtgcttg

SEQ ID NO: 369823 - DNA, 182 bp, Zea mays
aggaggaaacagagggccgcagcccgcacgccgcacacgcaagcaaggacaggaacgcaagacggcagccaaagagacaggacggcggagataaaaaagtagagagaagcacaagacccaaaaaggaaagcccaaggcagcacccacagcagcagcaacagcaaccgtagaaacaaagaagc

SEQ ID NO: 369824 - DNA, 191 bp, Zea mays
atggtatcgggtgcatacgctggtgcaaggggggggttggttaatggaagagcgggaccactctagattcaggactggtacacctgtagcatctagatcatacatgctatccaagatggcactgccaaacattggtgtaaaacaagatatgccttctacaggtcaagatgccaaatgataccaagatagaa

SEQ ID NO: 369825 - DNA, 233 bp, Zea mays
tctttcactcccccccaaagcctccccaccgggtgggattgatcaactcaaggcgggagttaccatcaatcccatggatctgctgcaccttcactcaaagtgaatcttgagcacaagttgggatcctcctctaaagtcatcaccagtgagaaccaggaacttcaataccaccttgaccacaatgtccattacctggacattgccccattgcaaattgatgttgggaaatactc

SEQ ID NO: 369826 - DNA, 198 bp, Zea mays
gtcgttcacgcgtccgcccagcccggcccagcgggggggattattatacaaagtcacggcgttgctctccctcgccgacccaattccccaccccatgttcaaacacccgatccaatcctgttagcccatggctcccacccgtgtcggcgaccccctgcaccacacgacagctcgggtggttcgaccagaacgaccagt

SEQ ID NO: 369827 - DNA, 378 bp, Zea mays
ttgtttcgtgggctcgagatggactacatcgccgtctatatttctgtcgacggctggaatgcagtaagcgacatgggtgcccggggcgcttcatgaattgccagatgatcggccatagcattagctcgtgaagcttgtgatttaaattttataggtacgcctgaagaaggcagtttgtttcggtacatagaaattgagctgccttgtgtccagccgcccaactgcggaggacctatgtgatgctgacacacagctacagactttggtgtcagagggctctgacactgccgaggatgccaagtgtttctttcatggctgccttgaagcctaagagacaatgctagctgatgatgtggcaccataataaagctattggcc

SEQ ID NO: 369828 - DNA, 354 bp, Zea mays
cttgttggtccgcccacgcgtccgtggaccattgtggggtatttttaaataggctccagcctactttccagggccggagaaagaactagtggcgctgctggaccctcaatggataggatagagaacacccgaggacaagagtccggtgcaccgagactcgacagagctgtgaatcatatcgacagttacccgcaacggtctacacagaccctattcctgtcgcttaaggagataattgataggacaccacatgctggcgatactgctgtggtatagaacactcacgttctcacgcacacagcatccttatacaggagtcactggctacataaccaacctgtgggcggccaccat

SEQ ID NO: 369829 - DNA, 114 bp, Zea mays
tctgtgacaccccctcacgcgcggcaacagatgggggtgattgtttgacagaacgaagctgccgactgccggcgctgacaggtacccacctctacaaacagctgactggggggc

SEQ ID NO: 369830 - DNA, 274 bp, Zea mays
ttggttacgcgtcctaccacgcgtacacaggagggggctatacttctacacttggatgtggcgcatgatctgactggctggggcaaacgcctgaaggacaaccactggtcggcgtcattgcctgaatcatattatttgaacaaagcattgcctgaattgaagagccaggcgtcagtcttcagcgattttagcaacccgggtcgtttatgcaacattactaggtttaacagacccaactgatctgcagacatgtttcatgtagacggactacttc

SEQ ID NO: 369831 - DNA, 148 bp, Zea mays
ggaccgcccggattctgggtgatcaccggcgttctctggacactagaggcatggcccccggcggggggtcacttggggtaccagaccggctttgtatgcttgttgtccatggataggctcggacttcgtgctccgtcatggatcacct

SEQ ID NO: 369832 - DNA, 117 bp, Zea mays
agcgcgtttctttcgtccgttcgagtactcgtcggctcggcagggcctccatcatttcgtgtcgagtcttcgcgtcagccttcccatattgccctcagatcgatctccctcgcaccc

SEQ ID NO: 369833 - DNA, 309 bp, Zea mays
ccgcctgcaggtatcctttccggaattcccttttttacccacgcgtttctttacgcgtccggataaatgatggctggaggctggtttttgtgctccaagcctgctgcttcttccagggaaaaatgacctgcccttgatgcagcgttgttgtttagaatgacctatatttgactggtattctgttacggtggctttgcaaagctgtttgcttggtttaatgtctcggaataatatgaattgcctgcagaagaacaacacaataaaaataaaaaaaaaaataataaatcaaatagggggcggacagtctca

SEQ ID NO: 369834 - DNA, 394 bp, Zea mays
cctgcaggtaccttcccggtattccttggtttacccacgcgttcgtttccgactgttcctcaggatgcttcggggtaggctgagtgccatgtggccgaccctgcacttaatccataggtggacgttctgaacggggaggtttgttacttcgctaagtgacgtggagaatcccgtctctgattgaaactccggctcctgatgtcataaatgaagtgccctaccttgttgcagtggcttcaccaatttcatccccttctgtaccactgaaggtggcaccaatagaatgtccctcgctccatctgtcaaagttcatcgaaagaacttctgtccttaccaccttcagtttccttccaaacctgcacccccaatatcagtgatgcaagtctcttctgcc

SEQ ID NO: 369835 - DNA, 432 bp, Zea mays
tcgttcagatccagattcaattagggttgggggtgattcatactttagaatccctaaccttctaagggcagacataaaggcgaactagtgatcgataggttataactctcaccagaaccaaatgggaatggagagctaggaggttatgagctcaactgatacttgagattgtaaatcttctttgcttttgtgttcatgaatctattacatacaagaggatgtatgatattacacacaacgcatctcaaacctttataaactgccctcatgatggtacttggatgcacccaggttcaacgcacaactaacctatgtcctcgttctatccgatatatttttcatcttttgggtacctcccgtacctcggtgttgtaccatgacaacaatgttaatcacacagacacaccatatatatttttatatttaaaagca

SEQ ID NO: 369836 - DNA, 352 bp, Zea mays
ttctttacaccaactctcggccggcaacccagagagtttttttttggatgaaggaggttggcatcccgaggaggctacaggttgcccaatatatctactgctgttgatgaagatgatgcacagccgttctaggtgcacgaaggctctcgatagagatgagcatcaagttggtgttgcccctgctgcgtacaagaacagcctcatacccagaattagtgccggaacaagaactgatcacatgaccgagcctaaaatgaatgaggacaaagaagccggagccaccatttgtcacagtaaagggaccaggactgggcccataatttccaccacttctgaagccaagattggtcaa

SEQ ID NO: 369837 - DNA, 209 bp, Zea mays
agcctgcacatggagatccatgactatgcgggttactgttacggcggcggcatcatcccgaacgcgacgcaggcaagacagaccccgaagccctagaagaccgcaaccaaggggccgaagcctgacaagctgttaatggagcatgacgccgcggaaggtgcaaagtcccaagccagagaagccgtgcaaggagtacaagccgacgctcg

SEQ ID NO: 369838 - DNA, 500 bp, Zea mays
gtattgtttgacaaaagaggagtcagtgtataaacagaaacgccaaattcaacctttatagtcatgagccatagcagaactcaacctctgcactcgaatgagaaactgctacctacttcttagtctttcaagcaaatgacggtaccaccaagaacagaatacacagaaagagatcaacgaccagagaaatcactaaccttggtagcatcacaataagcttggagttgcaaagtgctagagtgtggaaagaccatgtgtctagatatagggtctgtttggtttggttgtagattcctaacaatctgattctagctgtgagctgtgagaaagctaatgtgagctgacaattgtttagtttgtttgaaacaaccgtcaactatagattctataagatcatgacaacttttaacatggatgataggaatatggtaaatctatagtaggacgtgattctgaattgaactataggaatctatagatttctaggaatctattatgct

SEQ ID NO: 369839 - DNA, 477 bp, Zea mays
acgcatgtgcctgggagcggcagcccagccggccggctgaaaagcccgagcgggcgtagggcatgcctgcctgggcacgagccgaacggcagccaaggagcgagtggcggcggtggctgctactgctccgttgatggcggcactcaacggctcggccggtttcctcgccacttctgtgcaatctcttgaggtcagctccttaagaggagcgggcgtttccctggctggaggaactggctatctctctggttttggccgactggttccttgcgcgtgatatcctcacctccctgctccctctcctctcacggctccaatacttggattgatttcggtccctggtttcttgagattgctctctggtggagatttggaagggattgaagaaggtgctgtgctcttgcagcaaggtcctccgtgtgcctcgctgctccttcgtgcgcctgtgtggtgccggtctgatctggtctctgtcca

SEQ ID NO: 369840 - DNA, 496 bp, Zea mays
acatagtgcccaccagtgtagggcatgggggcaattcatgtgcacgacgggccgccctggctgctctggctgtgagaaacagatactacccctccctggcaattctccattggattacttctatctacagctcaaagttgcattgttacggtacagtcctgatctgatattggtgtcagtactcgttttatggcataaatccatatgttcaacaaatggttgtatcatttatctgtgcaagatgcaactggagtctagctatttgttccctttgctctataaatgtttctttgtaagcagcaagctttatttttgaaaagccactagcttcaacaaaggtggaattttaattaaatatactctgatggttagcatcaaccaaatattgtgtatgtgatatctaactgcattcattttcttggacatacgtagattggtgatctggtggtgctcgatatatttgcggaaagcattaacaatgatggctctagaggtg

SEQ ID NO: 369841 - DNA, 562 bp, Zea mays
  unsure (1)..(562): unsure at all n locations
cccttttgtccgatttaactcatgctaaatgtcttttgtgaatccttagcggtttgctctctattacaccatggtcacaacctttagtttgcctgcaggcacttgttttttcccaatagttttgtttcataagattgatgaaataaatctctgcacttgccgaatgatttgaccaaagtttcgcttgaacagattaaactgatgggtattgcatgcagccatacatcaaccatgaatcggcttcacagtggaagagttcccccatgcctttcatcagctataacaccagtaccagtgttctcagaggcgtcatttcctagttttacagagcagagatcatcttttgctgaaagggaattacctgttagttctgtcacctcaattggtacttctatggctgcttatgataccaagtcaacacatatgttagcttccaacttcaccaatgaatcacctaataggcagctttgttctggatcatatgttactgagccatctgatcctgatactccattngtagcaacacattcatcattaatggctaattcacgcccctagtcat

SEQ ID NO: 369842 - DNA, 305 bp, Zea mays
cttatacttccgctttactggaaaccatatcacgacggggtggactttattggtttgtgggggaaccacaacattgccgaagtatctgatccctcggctgtcatcccatgaggaagcatcaggatccatcatcacccacactgatgatgaccaaagtgatccacacggaacttggccttatctttaaccacactgatctagactggcctcgacatgaccattataccctctatcaactagaactccagtgacgtggacaaactccatctcactactgatctactgaaccacttaccaaacgtgat

SEQ ID NO: 369843 - DNA, 525 bp, Zea mays
ggtttgctggtccgcctgctggggccggtccggtttttctgggtcgtccctcgcgtccggtgggcgtgcatgctcgttttaggtggtgttcttggtctagggcagtatgtgagaatacatatgggggttttttacacatggaacactaatggaaaccaatagtgcctacacgtatcaattagcttatgcctggtttttccatcctgttttgttcggggggggcggttttgggggtcccaggtttccttcccggggctggcggcgggttcttttttttttggggccccctaattgcattcccggggccgcggttttcccccgtggggctggggaaacccggggggttcccccctttgttggcggggcgggccttcccctttttgcgggtgggtgtttttgcatgggggccccccccgggggcctttcccaccagttgcccttcctgttgggggtgggggccgccccttgttggggatttttacggggggtgggtgggggggtttccgccagggggcccgttccctt

SEQ ID NO: 369844 - DNA, 531 bp, Zea mays
cttttgttgagtttgatcgtcttacagacttattgcgtgcaagaaccattgagtctgatccacctaaaccaattgtttctcgtgaggaaaagaatgaagaaagtatcaaagttgatggaattagaggctcagcgttacgtcatatggacctagatgattctcctgctgttaaagtacataatcatggtgctagttctcctgcagaactcgcgaaacaatatatgagctctcgttatttgagggaaccccaatccagtagtctgcggagccgattgtttcttgagaataaaggtgaagcaagcaacactgtcaatgataggaggtctgtaccaccaattgttcagacaccacttgaacttcggaatgaaaaccctggtctccctgtaaatggctatgtgacttcgggattacgtgggcgttcagcgatatatagaatgtctcgctctccatattttaagggtcagaactattccagtgatttgaacacgtcttcattgtcccaacgatcacaaagcttgcatgttggtggca

SEQ ID NO: 369845 - DNA, 416 bp, Zea mays
gggcaaaggggctgtccttctgaccaccgggcggtgctgatacgcacgtagggggggctgccagaccccacgaccccggtccccatcggtcgctggcaaggcggagtgacctacaacgagtgattctgtcaagccaaacggtctggctgttgtgcattcacattttgatgggtacattacctctggctaggaaattctccataaccactggcaagcacgggagaacatggagagtgctctagatgtgcaaatgcaacataacgctgaatatttccagactacattcgagatcataatcaaaacattggattcctagacatacaatttgtgtgtgaatgaatgtgtgccagctcctctggagaaagagaaaattgctactgtaactggaatattgcatggacagcatcccttgattt

SEQ ID NO: 369846 - DNA, 379 bp, Zea mays
gccgcttgttcggccgctggtgcggcatgctgtgcggctgggtgatcttcagcggggcgttcatcggggctcgatgactggctcgatgagtcacacgtgtgcgcgcatgcgctcgggggtgggcgttgtgctggcggttcatgtgcactgctctgccgactgttgtgtgagcagaagtgtgatcagaaggatgcttatcaggacgtcgcgatggacttagcgggggttgtggactgatgtgtgggctgacacttgagctgataattgggtagggaatgggataggggtaggctcagatgatactacaaggcagactaatgggaagagaattgtgataacactagcgatatctcttgcgtcgtatggtgagtagatggtg

SEQ ID NO: 369847 - DNA, 259 bp, Zea mays
gggaaagcgggcaccccggcagggcaccggcgccggaaccccccgggaccacccacgcgcccggcgtggccccccacccgggcccgagaagctgaaggggggcactaacaaaggctgaggggagactcacaccgcgggaggggaccacacgcgacagacagcggctggaaacagatcgcgcaccccgggatgaaaacccaccgcgaaacgacggacgggcagactacaggggccaaggagactgacatcggaccaacgc

SEQ ID NO: 369848 - DNA, 551 bp, Zea mays
ccctcttcgtccgagggtttaacaaatgccaaccacgctgctttgctagaccgccgccgatatctacggtcgaattaggttcggtgccctcttcgcctctgtctccctgcggcggcggtcaccgtagtggactccggccacccccacgacgaccagcaaaagggtgaggaagtgcaagaaactggggtacactggcctcgcgaacagctccatcaacaatctctttgatctcatcacgaaccaaggtacgggagtgtgaactatgccgtgcaaagacctgcgcttcactgcctttgcccacaccgcaggctagaaaatggttcctgattccgtcaataaccaaggtatgaatagttgaaagctattgcaatatactactgcaacattgattgctttgtaccactttgcttatgtcagtaatttcgacatgctctgcttatttagttgacacttgttgatacgattgtgcttgctgtccataagtgagttctaaagactattgatttcattgacgatatttaatcttatgtactatttttatgtgacctatt

SEQ ID NO: 369849 - DNA, 504 bp, Zea mays
ggccgttgttcaattttctattcgccatggtacaacacagctgttagatccgatctccaaaccgccatggcatccgtcgttctctggtcccagcccgacctatccgtgcgctcggtcttcatccatcgggcttcgcgcgtgctcgcgtttaccgtcgagctgttgaacatgtccttccttgcttgtgacttcgtcatcgccaaagccctcactagattcatgtcctcaccagctcactccaaattcggtctcgtcgtcgttccgtgcgtcatcaagaaatcctaagaatctagggaagatgaagctagcagggtgatattcaccaagtactcgacaaaagcttgcacatgtcgttgattgtcatcctcgtctacgccaagcccccaagctatgaagacactctggtgctggccacacatcaccagctcaacaaaaggaatcccatggatatttggccaataatagaaactgtgtgcctcgctcgccagacgagtgtgatcaatg

SEQ ID NO: 369850 - DNA, 492 bp, Zea mays
cgattcctttataaacctttcatgtgctagtaactaggttgtgcccaggatcatcatgcctctagcttgcaccccaactgtatacatcattcttctctcttttgggcatacaatacattggtgttgtactatgacaacaataccaaagatttagtgttgaataggagcgatggaaaacaactatccatgtgcctgaaccttgatttgcggcttcagttgggtttcaactctagtctacaccccaacttgcttggggctaaaaagctttgttgttgttgtttgatacttggcacatgctatgtgctatttacagttgtcagttgtattactagttatacttgtaataaagtcgaagtgctcaggagttatacaagacatggtggctgctcaggagttatttccttgtattgaggtggcttttccattcaaatacctgggtttgcccctttcagtcaagaaacttctaaaaatactttcctaagactcattgac

SEQ ID NO: 369851 - DNA, 382 bp, Zea mays
ttgtttgcttcggcctaaccttcagcggcaggtggtgctgtgtgagcttctcctgggcttagatgcggcgcgctcaacgcgagatcagagatcagggggcgccagccgtgtgcattgcgcggcggatcctgcgatgcaagctggtccgagagggatgagcgagggatctcgcggagttataatgccagcgctgggggtggaaggaaggaaggaccgccctccggtgcatgacatccgatggcaggaattggacggatgagatcgactatgaagagccaggacaggcaacaagacggtggtgcagtgatcctcttgctgacgtcgtacgcgctgacgctgggcttcatcagcttgatctccgtgctgtactataaagacttct

SEQ ID NO: 369852 - DNA, 508 bp, Zea mays
  unsure (1)..(508): unsure at all n locations
tttccttcgcgtccgattatatttgagttaagatactcaagcaacaaatcctgaaagcttgacatcaatgtatattcaacaatggaatttgataaaagttgacataaaaatcatgaagaacaaatgggaattcttcatgttcctcactctagaagtttttgcaatgatcattactggctctgctgccattataagtaatgccttgagtcctttatcctaattattacactggaacctcttgttgtttcattgctgtttttgttgcaggaattgtaagagatccaaattctccatcatcctttggtgcttggattcattattctgcgtttcagcatcctggggtggtttcatttctcgcattggattgttttcttttctttggtgttgcagttcttacagttgttcaagcatcacaggtaatttttttaaatttatatttattttaccagagaaacttggttagcttttacgaagtcattttatatngctgtaagtattatttgatcac

SEQ ID NO: 369853 - DNA, 221 bp, Zea mays
agttctttcccactttctgcgctacagctagcgcgcgtgctggtcatgcggtagcgtttcgtctcggtcccggcatctgcctgcgcgggctcgccctctacatgatggtgtagcctgagctggaaaccggtgcttcctgcttacgcatggccttcatgaagagccgacatggccgagtctgtccgctcgagggatatcaaactcgtaggcctagcatccgt

SEQ ID NO: 369854 - DNA, 461 bp, Zea mays
gtggagcctagccgctcgcctcaacacacccccaggcaagcatcgccttcgtcctcactgcttgggcaggctattcacttcgccacgtgcaacaatcaaggattgaacagaggcttgagtcaattgaatcatctctgaagggtaaccacaaagttgaacatgaagagataaaaaagatcgtcacttccagcaatattagcgccccagcctgtgtagccacggcaatgaccacaatggttgttgggtccgcggtaggctggcgaggtggtgcttggtacgctcgaaggggcttgagaaaagagcaacaaaagctggtggggatgggtcacatgaagtcgcacgacagatggcactggcggcccttcaacaggctcaggaacagcaggtttgccttcaagaacaagcgcgccgacgcccatccaagcaccgaggccccctcgacgtcaagcaacgcggccttt

SEQ ID NO: 369855 - DNA, 327 bp, Zea mays
ggcactcgtctggtcggccaactacgggactccacgcttccgaggctaacgcatataaggacccttcacctatcgcgcagtgctttctagggcgcactaccgcacgcgatctgggcggtaccagagctgagtgttatgcactcgtgtcgcaacaacctcagcgtgtcattgaccacaccagggcttgcgctggcagccaatgcgcacgtggcggacctgtgggggaactccttgtaccgcagggcgcaagagaccttgcgtcggttgttcacccaatagctgcttgccaatatttgtggtagactactgtgacggagagctaagatt

SEQ ID NO: 369856 - DNA, 203 bp, Zea mays
  unsure (1)..(203): unsure at all n locations
ttgtcgcgggggctagcgctctgctactctgacatggcgggggagactgcctattacacctacctcggcatcgggcgcagaaccctaaaccccgaccccttcgaagccacaggggggacctacgtctgctagcccgccacgcagcacccatgcctngtcgccgacttcgcggaccggcggcgcgccgcggttgagaaggactc

SEQ ID NO: 369857 - DNA, 106 bp, Zea mays
cgtacgcgtgggttgattcaacagtacaactacattacgtgttttatgatccagcaacaccataaccgcgtgaagttctaccgcccaaagatgggctttgtctaga

SEQ ID NO: 369858 - DNA, 110 bp, Zea mays
acgccgcccactcgtccggcggtgtgcaaagaggttcctccatgctggctgttgtagactatgtaccaggccatccctcttcagggatgaagacctggaagtggataact

SEQ ID NO: 369859 - DNA, 315 bp, Zea mays
tccatcgtccgcagccagaggaagacaccgggggggggtttttaaacatgcggccggtcccacgcagatcgatacacacaggtatgcagcctgatcgtacatgagcagtaaggaagtatgcagcatagatgggtaaatgaccggcaagaacggagcttggctatggttactatagagcatcgtaaacaagttctggagcgcgatgcactacaagggaatgacgttggacggaaaaaacttgcaacgaatctgaagtgatgatgatgcaacacgctaatacaggactagcaagatgttcatattatgggagactga

SEQ ID NO: 369860 - DNA, 560 bp, Zea mays
tttctttgaactatatcgaatactggacaggggatgaactgtctgacagttttacccaggatgacatgtcacactttaggaaaaaaatggctgctatattactatcttcagacctgaataagagaagggggtgtctgttatacaaaaatgaaaaagaagttgactctggaagcccatctgatgttgagatattagaaaacccaacagattctaagaggaaactactccacgtgcttgatgatagcgaagtggtgtttgaagatgaggaagaccctattactcaagcagacttgcaaaggtggtttgttgatgattgggataaaagagctcctgtaaaagtctctaacgatggttgcaccaatgactttttaatggttggtctttccacaaaggacatgccagtgaccaaagccgattcaatagatgttttatgtgattatatcatggcaatagaagacgatacgacactagagagaacatgggtgcgaaagttcaatccttttaagatagaaatatctgtcaagacctgcaaacatattacgacactcaagaatgattct

SEQ ID NO: 369861 - DNA, 420 bp, Zea mays
cccttttgtgcggttgtgacagcagttgcctgcctgatccaaggctccacccagctattagtcgccccaggagacgctttccgagatcctcatcagtgttaccacacgggtacatagaccgtatgtgctgcgctgtgtggtcctgggacttgattcgttgatctatccatgcaggtggagcaggtccctaatcagctacctctgttgcaaccacaggaactagcgtggaaactaccggaccggacattccatttgccattccagacggcgggtgagaaggccaagcatgagtacaaccaaggtgaacaggcttgtgcgcaagcatgacctcggccagaccatatgcgagggcgccttgtcgaaggggaacaccgcgagggacacggccaccggcgaggacatcctcatcaagatgctgga

SEQ ID NO: 369862 - DNA, 402 bp, Zea mays
agtcctactacatgtctggataaaccatgtaaaatggactatctacctgggggtattagatcgaagcgtcagtataatacgcattaactgtactggtggattttctgcacttttgcacgcaaaacatgaccagctgacgcacctagctcatggtgcgatctctgagctcaagatacatgctgacattgcaggattagatgatgaaataactcatttgcaacaagagctacatcaaatggatgcacatacatgctacatcaatcgttgatcacaatcaacaaggtcaaacatgccgctgacgatatagctcggcaatgtttggaggccttcgttcactctcaccgagacaggatcatacattgttacctaacgccatataatgttcttatcaacagctacaat

SEQ ID NO: 369863 - DNA, 386 bp, Zea mays
agattgtctacagggctgggccaaccaggcccgatcgatcagccagcatggcgtactccaccaaagggtcactgtcatgcgtgctccttctcctggctgtctttcaccacggctgctcgtcggaaagggcccacagacgtgccggggacatggagaggagcatgagcaccggcgacagctcgacgatagagcggatcctgcggaggaaggcggtgtacaacaagtcctactccacagtcatcgaggagcggcagcggtaccgggtgtacgcgcacaacatggcgtacatggaggccaccaacgacgtagccgatgctgggaggctcacgtaccatctcggcgagacggtctacaccgacgtgacctaccaggagttcatggtcatg

SEQ ID NO: 369864 - DNA, 174 bp, Zea mays
ctttggtggaccacgatctgtgaccgaggcctactggagcatccgttactggttgtccctacccaagtcccccgtaagaacagctgctgcaggggtggccgttaagaccctctccccaataaagatgggctgactaacgggccggagacaaagcattgaactctgggagccacc

SEQ ID NO: 369865 - DNA, 301 bp, Zea mays
  unsure (1)..(301): unsure at all n locations
ccctcgtgntcgggcgcggctactccttgcattcccttccgagggaccgccgaggcgggggtgcacccgccatgcagcaccagggtggtggcggcagaggaagacggagctactcatctgggagattcgttcacggacatgggccccttttcgatgtcaacggccagctggagtgcatttaaacatgaggacaggataccggtgagacaaagaaacactgggacttaaactccaacctttagcggaagcccaggcaaagggggttttggccactctactgacacctcagagagaaaggctc

SEQ ID NO: 369866 - DNA, 387 bp, Zea mays
ttcatgcgtccgcccacgcgtccgaaatcgcaactgccaaccgaaacgagaacaaggacgccgtgtaaaaactcgcgcgcgccccaggaaggagaggaagagggagtaatgtaccaggccatcccgtacagcgccggccggccgtggccgcggcccgcgccggcgatgggcgtctaggccgcggcggcggtggcggaggaggagaggctgctcgcggctgcacagcagcagcagccgtcggcgggggcggaggcggcggcgaggggggaggaggtgcgacgggcggtggcggagtgccccgtgctcgtggtggggaagcgcgggtgctgcctcagccacgtggtgaagcggctgctgcaaggtcttggggtcaaccccgccgtgcac

SEQ ID NO: 369867 - DNA, 493 bp, Zea mays
  unsure (1)..(493): unsure at all n locations
ttctctcgtccggcttcatttcagaagagaaaagattatttagatgctgtggcttcagatggttgtttgactcagagttcacaggggttggctgcaggggagatgatttacagtttgagagactacttgaaagattctgtcagcaataacatctcaaaccttaactggagtgcatctaaaaggcggtctgggagacggtttagacaaggagacactgggacttcaactccaacctttatcggaagcccaggcaaagggggttttggccactctactgacacctcagagaagaaaggcactgaagaaactcacagtgagaacacaggagaccctctcagcatcgatggtgttaagtctgattctccattacctactgcagtaaccactaaccactctaaacacgattcaacaaatntagggctttctttatcaagtgctgtaaaaatcaacgcaaggccactccgaaactgcagcatagactcaaagtcaaaag

SEQ ID NO: 369868 - DNA, 555 bp, Zea mays
  unsure (1)..(555): unsure at all n locations
ttctctcgtccggcaagagcaaccaacaaatatcgtttcatctgtggaatcagaaccttcaaatgatgaagagcacacaaagcatgaagtgtttcttgcgactactggtgataatatgcttgcttctagtgcaggaactgaaatattgcgggatacagttgagcatgctgcttgccagccagaagcagtatgcacagatggaactgcaaggcagtctgaattgtcgcaacttgatagaaaagcctttcatgatgcctcatataaatacactcatgggtccactaaagatgatggtatcttgcccagtgaaggtacttctgttgatgttactggttctaagcaggatgatgtgaacattgttggcacacaaactgatgatgtttctcggggttctagtcattttccagttattttacagtcaactgagtcagatcggcctccaggtcaagtgaagaatttggagagtaggatggagcangtgaaaacagaagaagcttggttaacagttctggtggaatcaaactccagtctggcgatgaccttctatatacatat

SEQ ID NO: 369869 - DNA, 149 bp, Zea mays
gcgtatgttgctctgtaaaacatgagctcaagagatatggtctttcggcccttgcaaggattttggaaactatgctggttgctgtccagtggacgcgaacacatgaattgtctctaccgcaaacgcactaagcttcgtaactcttgcac

SEQ ID NO: 369870 - DNA, 407 bp, Zea mays
  unsure (1)..(407): unsure at all n locations
tctcttacgcgtccgcacagatacatctggtgtagcatcctgataggcatgaaaggcatacagaattctgtaggttgcgaagccatcaagacaataatatgacccctggaagactggaagtcatcctgatagccacacaatgcatttgtgaattttattttgtgtacctcatattgctatttgttgtgcaatgtccatgtttttgctgattatactgcatgttctgattggcctatcacattcggtaaacaatgcatnttgtttcctgtgtttagtagtgcagtgctgctatgaatacaaaatgggtttcatccatatacaagcctaagttgccatgcaacaaaggtgcaagctctcatttcaatgggattaatctgtattcttttgtagagaaagtggcaatagca

SEQ ID NO: 369871 - DNA, 397 bp, Zea mays
  unsure (1)..(397): unsure at all n locations
cccacgcgtccgtcgttcccctccgctgtctcgcctctcccttggttcctcgcggcgacgactgggcgagcgcctcctcccctccctcactccctccgtgagctcctcgccggcggcgcgcgccgccgcccgtcgccacgtcttctccgctgacgtgggctcaccagatccaatgaaggctgccaacttgacgcaaggggaataaagatccaaataagtttttgacattgatctgtagccagtactgcaatggctacgaagcnttgtggttctcggtatcccctgnngatgttgacactgaaagggttacggagagtacatggcccaagtttggacccctagacgattggtgtcgtcatgaaggaagcggtcttctggggcgatctcgcggggtttg

SEQ ID NO: 369872 - DNA, 409 bp, Zea mays
gttctagatcgcgagcggctgccctttttttttttttttttctttaatccttgatacattctcatttagccaaatttttttcatggtcatggagtccattacaatgctgcaggcctgatcctccatatacaaacttcaaccttgcaatagcatattagactttacaccatagaggctgcatgctgtctccacatcgatcaaatatacaatcaatagcgttcgtttctttagcaatagaaacgtatacaagctcagcaggaaggaaggtagcagcaattaaagttttctcgctatcgatttacaacaacattacctaggaaaacttgttgttgccatggcgcgcgttcggttctgttctgtcattctgggcgtgtacagtataggcttgtattgtaagctgtagcacggt

SEQ ID NO: 369873 - DNA, 462 bp, Zea mays
cccacgcgtccgcccacgcgtccgccgctctggatcgattcttaaccgcctgattaatctatctcttcgttagtctccgactccgaggctttcacctcgcggcttaatcccaattgggttggctggagcgcaacccaattgggggttaattgggattgctacttcgcgggtgctcgtccctcgtggtcttggattggcgaggcgaatcgactggtttcctgcagcctcctgggtagggatccatgaagctgaaaaatagtgcactggagacttttaaggagaacaatacgattttcactcctgaaggaaatttccactctacaaagatgcgagaagagtatgttgctggtccgaaccaacagccgttgttgagacaagatgcaaatggatgattggagatgtaactggagtcctggatcgcaacacgtggaagcttggaaggacttaaagatgctgaaaacg

SEQ ID NO: 369874 - DNA, 182 bp, Zea mays
tccatgcgtacgacaattagtgctctgtcgcgaggattgtttggtagaaaagctatagctatacctgaacctggagttcttatttcaagaggtgaagataattcatagtaaagacaacctctgaaggccatgaaaaaacatggaaatatcttaatggtgccaagggataagctaactgttaa

SEQ ID NO: 369875 - DNA, 319 bp, Zea mays
tctacgcgttcgcccacgcgttcgatgaccttcactcgcctccaaatcttctctctcctttcctcctctcttctcaccgcatcacctctccctccggcgcgcgcgtccgggtacagcgctagagtcactcaccaccatgcaggcggcggcggcggcggcgaatggcgcgggcgacgtgcagaagccttagcagcagccgctggaggcgggggcgccgtccccaccggcgacggcggccgtggtgccgccccattgggtcgccatgccgttcgcgccgtctcctggtgcccgggccatggtgatgcagccgcaccatatg

SEQ ID NO: 369876 - DNA, 279 bp, Zea mays
cggcggaatctggggggacgacacgacgcgcgttatcacgcgaacggtcgtctcaaagatcactagcccgaaccctaacctcgttcggcatccggcatcgaggcgagcagtatcccggatcatagatcggcaccgccggagaccaggtcgtgaagggccgggtgttagctaaccgggctggcgcaatgacgctagaccgaccgaaagacgtcaacgccacaaaccattgaatgggtgtgaggatacaaggcaacaccttgatgaatgggacacaaattc

SEQ ID NO: 369877 - DNA, 331 bp, Zea mays
cctacgcgtccgcccacgcgtccggcggcgcccttgttttttttttttttttcatggtttttggttttggaggagaaattagaggagttctcaacgggcggagacgggcaaaaacctgcaacggacggtgatgacagagaggagccgtagttcgcgagcaatgcgccatgagagaggaagggaggacgaggcaggaaaaggagcggaggctcccggcggaagagaagaagaacaaggatacggatgccaaaggaaagctctagagggaatatgctggggaccatgatgacatggatcccacacaatactaggagaaaaggctcaaggctca

SEQ ID NO: 369878 - DNA, 477 bp, Zea mays
  unsure (1)..(477): unsure at all n locations
ttttacgcgtggggaatttttcatgggtaattagtgataaccagtatgatagtcatgtagggctttgtcttatctttccaatgagtacttatgcgcttgatttggaattatattgtaaaagatatcgctgtttgaatccgggtatgttgctgtccaaaaaacagatttttcaggtggttgaacagcagtagtattagcagtttctgggaatttttcgtggctaattagtgataaccagtatgataatcatgtagggctttgtcttagctttccaatgagtacttatgcgcttgatttggaatgatattgtaaaagatatcgctgtttgaatccgggtatgtcgctgtccaaaagagaaaaaaaacagattacagggtttatcttgtggactgttttgggctaattagatgttgaaatttaattatatgtatacanaacttgtgggaaattttatgtagatgcctctggagtttntgn

SEQ ID NO: 369879 - DNA, 391 bp, Zea mays
attttatcttcccccgtttgcacctacccgtatatcctgtctctcccatgctctcctgtccccagctacgccagtcctgctccctgtgtgctacagtgcttcgctcccgcactgcgcttggccgatttccctctccccgcaccttctccacctcccccattccgtcaccgcacgagcagagctccctcaccaagaggaccaaaaaaaaaaaaaacgagggaggcaagccaggcgggacagcaacgcgacgcacttgtcattcactcgaggagctcatgcaaggcgtaaatcttattgcaagaagggcagctgtgcatgttaagtctcaaatatagactcacttgataacactgcatgagaggttgaaaacttgaggtacagtggatattct

SEQ ID NO: 369880 - DNA, 171 bp, Zea mays
atttgattcagcacgccgaccgtaggtaagggagctatgcggcgggccggctcgcttggttggtcggtccgtcatgagccaatgggactgcctcttggggcgcgaacaccctaacgtggccaatgagcagcacagcgagcataggcgtcacacgctagctcggattctgac

SEQ ID NO: 369881 - DNA, 336 bp, Zea mays
ctttcccctcgaaaaggcaatcgagctagtgccgctatgctggggttttgacagaaagaaaaggcccacgatagagaggattctcgacacgctgaactacacagacatttcagtgcagcagaaaggaccacggcgacgacgacaggccggcgctgacgatccgcagccgcctgaaaagagtaggctggagggaggtgcaggaggcgagctccgcgacatcaacggcatgggaggtgccacactcgtctgaaggacggtttggctcaagcacggcagctgtcgtcgactcgctcaagcttctcctacaccgactggcgacggtcgggaacaccacgc

SEQ ID NO: 369882 - DNA, 334 bp, Zea mays
tcgtgaacattttcgccaacagcattgctgaaagcccgtcttgacgacgcatgacttgtaggcagcgaagcctcctcaggagctgcatgcgcaccttgccgtggtccgagaagagctcgtgaaggccaaggagcagctggtggagaacgagaaggaaaaggctgcattccttgcggagctggagcgttccacgcaggcggctgatgaggccaatgccaagctgcaggaggcgcttgatgctcagaggaggaccgaggacgcccaggaggctgacaaactccctgccagcgagtcggaccaagcaagcatgcacagtcagcacgaggatgatgtt

SEQ ID NO: 369883 - DNA, 370 bp, Zea mays
gcatctctttgtgttacagcaaacggctggcgcaacacatggacatgatgcatgacttgatttcggacccttagtgtttctaggcgggcgagaagctttcggactttctcttttgccgtagaggcaacaaccagttccggtcacagcgcgggtctcgtgtctaccgcgcgggaatcgccggccacgaccgactggtgacggtgacgtggtgcaggaacctgctcacccacgggctgaccgtgtcgatcgaagggtcttcagacggcggaaaggacaagagcggtggcagcagggagtggcgcgacaacgacagtggagcggtctcgtcctacaacaagggctgtagcaccgcctgcaaggtggagatgca

SEQ ID NO: 369884 - DNA, 350 bp, Zea mays
ctgcatccttagaattccacactcccccgtagcgaaaccctagccggcacgccaaaaccaaatcccgccgagcccgaaagttttcggcgggttccttgccgcgaatcgattgatttcgagcgattcgactccttgtgatctctcggcggggtagagcgcggatgaccgtcgtgcatgtcgaggtgcttcccctacccgccaccggggtacgtgcggaacccagtggccgtggacgagccggagtagaccgctaagcttctgaaagaaaaggaaaaggccgaaaagaagaaagagaaaaggagtgacaggaaagctcccaagcagtgtgagacgttcaaacattcaaagta

SEQ ID NO: 369885 - DNA, 440 bp, Zea mays
ccctctcgttcggttattaaaaaacttgagctgtagctatagcttttgttttgaattttaagtctttttattatcagacctctccggtcttttagatccacggtactttggccctgttgttgagtttttgcttcacatgaaactttcctgttcttgagtttttgcgccacatgaagcttttctgctgattttttattcaacttcgtggatgttgttatgtaatctctatgttccaaattataagactttttagcttttctagatacacttttttactatgtaatccccatgtgagaacgaccacgatggggccaggtcttcgacctgtgctttggcgtggggcaaacgagtggatttattaacctcagcctaaaattcgctcacacgggggagttgaacactcgaactcaagacttgattagtgctacttacaccaccta

SEQ ID NO: 369886 - DNA, 203 bp, Zea mays
ctcatgcgtgcgagaacgcgtgggcggacgcgtgggcggttcccgacaagccgttgtaccagtcccgcccgcctgcgcacttctgccaccctcgagccgccttcggagcctgcgagccatcccgacgctcctcgagcgatccgtccctctcgcgggccttctctcagccgattgcagcccaaggggaggagagggagaggatg

SEQ ID NO: 369887 - DNA, 358 bp, Zea mays
cggttgcttgggatgcatagcatgttttgtgtgtgcaactaaacctgatttgcactgctcaggtatgaacaagcataagtcgattagcatgaactgcaacatatgacagaacaagtaaaatccatcattcagactatgaatgctactcagggtggtgagctcgagtcctttgatagtatgacaccattcgatgttgctgcccgaatactggataatcaactgcgttccctgatgtggagtgatgagaaggctaatgagttatctggcagaatacagaggctgtctatcaacagcgtttcaatcgaacgtgactctggaattcccaagttttggttaacctgaataattccacgtattt

SEQ ID NO: 369888 - DNA, 254 bp, Zea mays
gccattcatgcgctggctcccgcgctgctagtgccaacacactcatctttgacaagaaacacgggccaggctctcttggtggtacattgcctggaaagtacttatgctgagctgctgaagaaggatttactgaggaatccgctcgatgcatggtatgcaagctcacagctgactgctggaagctgaactttactgacttgtatcaagcttgtactgtgaacaaacatcataccctagctggatcctgtgatacg

SEQ ID NO: 369889 - DNA, 113 bp, Zea mays
cgcactcttaagaagccactgatccagcccgtgctatgatcagcctaatggcgacgaaccaggactcaaaggccgcagggccatgtgcatggtctgcaacagatcccactcca

SEQ ID NO: 369890 - DNA, 527 bp, Zea mays
atttgtttgtatggtacagcaagtcacaattggtgatcattatcttcattttagaagtggcagtacacaagtttcgggtggcagttagaatgctttgacccaaacaaaattcaccatttaaattctcacttcttgcactcgacaaataggagagcactagagaaggaaatctatgttgatggtataatgcagttgttttgaattctgtttaatcaaatatctacatgacaacaattcgttaatataaatctagacgtactggttatcttcagaagagccatattgtccggtcagtttgttctttatattttatttgtgaaaaatatgaggaaaatgtgcattgctgacatcctgttttatttgtgattgctactttacgttgctttatctactaggccataacaaattaacaacatcccgtgacaagtgcgccagtttaagtacggtagcagagtctttgtctcaaataaaagggtgccagggctatgatctagtacgtatttaccactaatagtagataaaaattg

SEQ ID NO: 369891 - DNA, 264 bp, Zea mays
cccactcgtacgcacgcaatcactcaacacgtggaacgaaagatgtattgggcctgtcacaggatccggaggggaaagtgacatttgcaagagtggtgaacaaagccgatctgatgccaaaagagattacaggagatctatgataaagtggctcgactgtttaagaagaagaatgatatccagtccaaaaactgttggagaattagttgggaaggaatttacaggctcacttaagaggagttttctgaacataacctacaaggc

SEQ ID NO: 369892 - DNA, 359 bp, Zea mays
ctttgtccgccgtcgcctcagctcttgtgttttctgttacggaaaaaaaaaggaggacacataagcgggggacgacggcgacgacgacgacgaggagagggacggaacgggaccagcgcaggtgccgagatggcggcggtggatgacaaggccatgacggacctggagacgctggaggaggaggaagtgctgcgccggttaggcacagcggaggaggcgggcctcaccgacaacgaggccgcgcgacgcctgcgtctccacggccccaacgtcgtcgtcctctcgcaccacgagggcagcatgcttcatggattcctaatggcgctcttctcgctctggggatgggatcatgtctttcc

SEQ ID NO: 369893 - DNA, 350 bp, Zea mays
ggtggtgtctggggaggagaggaagcgtctttccagagatctccataaaatctaccagtcagcaacaataatggtcccttatctgacacacacttgacttaatcgtatatcaaaccccactacagcacatgtgcatttacctttgataaagcagatccaagtctagatatagtgccatcctgtagacctaaatgcattcggttgtgtccccacaacagcaggacacatgaatacactggaggctctaggtcgatccacagcacatgctcgtggaaattctggagaacccgtgtccagtttacaaaggtcactgcattaggagtttgatttttgcgctccgtatgatccat

SEQ ID NO: 369894 - DNA, 303 bp, Zea mays
gcgtctgttgcgcaggttataacaggaagtgcggatcgcttgctgttttgttctgcgatcagcctgtcgaggactggagaccgatcaaacgagctgagaggtagacggtgcttactatcgactgagcctgtcaccaactactagctcagtatgcctggggtgggctggagctggacactaatttctcgcctgcaagtgttaacatgtcttctggattaaataggcacaataaacggcgcaagtcgaacatcagaattctgacggtgtctaagacattcgcgctctagctgaatacaatgtatg

SEQ ID NO: 369895 - DNA, 423 bp, Zea mays
cccactcgtccgcacacagtcagtcgatcgtcctctccaacataccctctgcttcctgccttcctccacgagctgccttggaagcctcgaccatgcaggaagctctcgtatctccggccaatgccggccgccttcgctttcgctcggccttggagctcaagccgttcgccttcggggaccagcgcctcgcctcgccgcgctacctcaacctcaacctcaacctcggcggcgccgatgacgcgctgttccgctgctcgtcgccgacgttcagccccagcttcggcttctcctcctcgccgtcgccgctcgccacgtcctccgtctcgctctcgccgacctcctccgcctccctcgccgacgacggtggaagacgggcgccggcaccgacgccgacgccgacgccgccacgggccacacgctccg

SEQ ID NO: 369896 - DNA, 405 bp, Zea mays
cggactcttgggcgagccccgtgggttgagttacatgctttagctcgtggcttaattaggctcagtttctttatgtacttagatgcttcagctctgggttgttccaaaaacttgctaaggtatcatgattttctgccgtttaaatttcatatgccggctatatcttttttttttttctggtttcatataaacttctttgttgataagaagtgtagagtagtgacatatttgcctgagctcttattacctgagtagtgcattgcaatggtgtgagctataccaagtttctcaaataaccaatgcaagtgtgttatcctgtccatgaggttgagaggtaaggccagctttgcttagctcccttttcatttgagcaagatattgcttctgtcaatgttcacttctgga

SEQ ID NO: 369897 - DNA, 436 bp, Zea mays
aatttttgatgacgctgatgttgttgctctgattgggacaagtaaggacttggcaaaacagataaatcagaaggaagtacattgggggttgcttgaagattctgttgaagagcgaatggagaaagcactagcagaatctgataaaatagaagctgaaagcaaggatgctgatgcagaagataacaagaaaagaaatgcagaaggtggaaagcaaggtgcttctcttaagaaagccaaaaaggacaagcttgttggtgcgactggaaaaagcgtcagaactgaaacaagcatggttttctgtggcaccttcgagtgaaaccggagctaactcttccagcaacgcctgttgaagttgaacaatcaatttttgaggacctacgaaaccgtgcacaactgaatagtgtggcattgccatctgttagcttctacacattcc

SEQ ID NO: 369898 - DNA, 549 bp, Zea mays
cagttcgattgctttgtttgactgatttaatacacttgtctatttttccaaactttgtatatttttgaagcttgtgttttaggtactacacaaggtaattgattcatttatatagtaagtagttattgctactatatgttaatcagtgtatgctatgttcgttaattgacactaattatttagatgggtgccctaacagacgaattttgctactgtattcaggcccaggttcgttactgaagttaccttttcaaaagagcaggtgaattatcattgtgcaattttgctgagagaactcttgaacttaaatctttttgatatcactcgacttcattaatcatggtgcggcctgttattgtcatgtagatgctataaggtctcttagtgttaggaaaaacctattatgctctctttgtgaatgcctgaactgtatcaaatgcttgtgcatgtgtttttgtagcgctaagaagtctgcaactgttggttggtcaagggtgatatctaatgtttatactaatttttaactgtcgggacacgtattgacatata

SEQ ID NO: 369899 - DNA, 549 bp, Zea mays
ccctcgttaccgcgactcaatgcgaccggcgcgacgacggctttgacgcgaccggcacggcagcggcgcacagccccgaagacgaccctccccgctgccttctccccggtgaggatctgctctcttccttccctctcctatcctctgctctcgcggtggcgagccccagtagggccggcgtgggccggtccgacgttgagggtgttcggcgtcggtagccgccactccgaggaggacctgcgggacctcatgcagtgccacgcaggcgcgacgccgtccgcgtcggcctctgttggaagtgttggaatggcgacgccgcctgctgccaagaggaggcacgggaccacgccgctgcagaggattgactaggatgcggccgtcgtgctgcacccgaccagctgacaagctaacctctgtcttggcagcaacttggttcaaaagattcctaggtttgctcatgtgtatactttgatttggtcctctctctttttcccctgcggaatgagagagtagcaggcagttcctagagtcatcgagcgctctggcata

SEQ ID NO: 369900 - DNA, 498 bp, Zea mays
  unsure (1)..(498): unsure at all n locations
ctcttcttctgccagtgtcgcggcgctcctccctggcatctccagctaccccagctcggcctccttcccctaatctcccatggcgtgcgctccctcgctgctccagtcttctccatggccaccccttttctttgcccctaggtggcgagcttctcctcgccgatgggccagcaagtctgcggcagcagcactcaggttcccctccactcgccatccctctgcttggtgctccaccagagatcaaccatggcggctctcttccccaggcgctctgtttttttcccagccgagctcgccggcattcccccgttccttgtgcggtcgtgctcccttgcttcccatggcagctcgccctcgctcctctctgctcgccggccacctgggtgngcttgcgctcgcccatggtggctccctgagctcacccctaaccacagtggcgagctcctctgcgtgcagccgcgctcttcggttccggccggatctcgcctagctagaact

SEQ ID NO: 369901 - DNA, 523 bp, Zea mays
ttcgttttcaccgacaaacaagagagcaggtctccaaaactattgcccccagagatcttgtatcaggagagggtaaataaagtttttgggaagcactctacatggatgctcgatcacttcattgccgtcttcaatctcattgccatggctcatctgtcgccttgtcacgtggacgtttcatgtcgtcggtaacaatgagatggtgttaggcgtcaagttgtcttctctacccgatcgtcggcaaggaacaaacgttcattcaaatcaaagcgcaagtacccgatgtacaagatgacgtggccatcatagcaacaatcaaaaggtttcatatgggacaaatgcacatcacactttgctcgagaaccatcaagcaacaatataagaactttatgaagtcatgcaaaaacttctgcaagtcaaacatgggccatagaaaaatagtcgaagaagaaattaacttctaaactcaagccgaaagtggtaacaattacaaccaatccaaaacatgcaactttgagcgaag

SEQ ID NO: 369902 - DNA, 473 bp, Zea mays
cccacgcttccgattccccttccacctcgctctctctctctcctcccactgctcgccctctctctcttacgcgcgcgtgacaacctccctccctccactgcgcgcggcgcgggagcagcagcggcagcacccaccgactgatcgccggtgggcggggcgggggcgatctgatgcgggcgcggcggtgatggcagcgccatccggcggtgggggcggcggctgcgggggagggctcctcctcggccgccgcagctgcgacgatcggggtccacggggtggaccaagttgcagaggcgatgtggcagatgaatttggaagaagccatggaactggggccatacccagagcgtgttggtgagccagactgtagctattacatgaggactggcatgtgcagggttgggatgacctggaaatttaatcacccagcagaccgaatgctggctgctgctgctgcaagaatgaagggagaa

SEQ ID NO: 369903 - DNA, 388 bp, Zea mays
ttatcttgatgcccctgatgaggaagttactgtccttgactacagaagcttgtagggtccagcatccattggagatttgggctgtttcctctttatatgaaggggaaaaaaggaaggttatggacaagtaaattaatttttttggtcgcctgtgtatcctgttagattctgttgtaacttgaatagtcggaatttctatttgctctcgcgttcgtcgaaccatactccgtgaatgcggtgcggttgctacggttgttggccaactttctttgacacaacgctgtctgtcccaaaaaataagacattttttggagaagtcttttgaagtgaaactttgaccgttaatttctttttcaaaaaaaaacaacacaaaaaaaaaaaaaacaaa

SEQ ID NO: 369904 - DNA, 249 bp, Zea mays
ccggaattaatattttggacttacccacccgcccatacttacgtccacacgaccggcaacacacccgggggggttttttaaaccacgcccggggtgtcccccccaccataagagttgatgcgatccctgcaggtggcatcatagggaagggtggagcttacataacacaaatttctttcatttttggggcccatgctggcacttacgaggaccgccatgaattaaacaccagcttgaaaaacattgagt

SEQ ID NO: 369905 - DNA, 416 bp, Zea mays
ccctttcttccggttttctgattgttactagttgctctgcggattcgattcccttgccgagatttatctcttcgccgccggagactggtggacagcagatcctcttccttctccgccggccgttcattcttaagctgcctgcgaagctttttcttgagaccctctccagagtactgttggccggatcttggtttggcgggcgagtggtgaaagatcgaatccttgcttggaggttcagcggcaggcagctcgctgtgacttcgcccgtgcggggatggtgtcgagatcctactccaacctcctggagctcgccgccggcggcagcggcggcgagccgctgccgtcgctggggcgccgccggataccgcgcgtcgtgacggcctccggcattgtgccggacctcgacgtcttcgacg

SEQ ID NO: 369906 - DNA, 407 bp, Zea mays
  unsure (1)..(407): unsure at all n locations
ctcttggttgccggttcaccgtcggagcctgacgtcacgccacacgccacgcgcgggtaacacggccggcgcctgcacggcgcccgcggctccgcgcgctcgtcctacttgccatccgtcactggacgggccacgcgactgcgatccctgccgcacgagcgcaacgcgccatgggtccggcgtgccagtgagagcgggagaagctcggacatctccgtggagggacatcttctccagcgattcagcgcgggatcctgctggactggcctgatccctccgtgctggtgtcggcgagcatgcaaggaaggatgcgagggcgcgcgggcggagcgcgcgcggggaatcgtcccngaaggcggcgggccgcgaggtggagccattcacgctgtgcggcgagatgtcccatc

SEQ ID NO: 369907 - DNA, 244 bp, Zea mays
ggcgtgcgtcaccttcgcggggctcaggtccagggacacggaccatagaggccagcgccagatctgaccaaggactacattgagcaactcaacgcgctgaggtacggcagcctgtggctcacggccagaaggactgcggctgtgaccggagcgaccggcgcgatggcggcgtgagaccatagggagaacctggccgccgacgcattgatggtcctcgagctgccactaggacgtgaggacgctg

SEQ ID NO: 369908 - DNA, 315 bp, Zea mays
ttctctcttcctcccatttccaaccggagatgggggggcgtctgagctaggctaggctattctcgccagcacttatagctcctaagctcttgatagattgaactgcttccatgagcaatccaatcgggagatggccaccactcacttcgccatggctgaggagctggcctaagtcatcaaggacaacctggacagcaagcatctgatactctgcaccgaggagtccatgatcgcagccctccaggagctgcactgacgagaagaggacgacggctcagcggatacaatagagctccagactgctcgtgcctacca

SEQ ID NO: 369909 - DNA, 99 bp, Zea mays
ttttcctttgctggacgtccacgcctacgttgagagcagacggctacaggctgttaacaatgaggacattgagctgccctatgagagtgactgtgagga

SEQ ID NO: 369910 - DNA, 356 bp, Zea mays
tttcctttgcgtccggtagtaacttacaacaggtgagatgtgcactatagcatgattaagcaatctggtttgtttaattgcctaatataattttaatttctaaggaggaatgtaagtgcaatgctgtgagattctttgcaattatatcatcacagcaatctggaagtgccttgttccagacactgcttaataattgtctatattgctatgatcccctccataaataaggtttatgtatctgttcttatctaatatatggggctgctttattggaggggaaggaggaaacaggatgggatggaacctggagcccaatacgtggatgatggattattggatgggatgggatggagaaa

SEQ ID NO: 369911 - DNA, 596 bp, Zea mays
  unsure (1)..(596): unsure at all n locations
ccctcgcgttcgaaaaaaagtttctccctgccattacattgacatctcaaactcctcgcacctgttgccttttggaacataggcgttataacccacattttgcattgtgatttctctactaccaacaccaattttcttagaaggctatgtagcagtaatttttgtactagctacaagaaacccattctatgcaataaatatccatattacgtaggtctgcagattacgacatattgctttcatttcaaagctttgagaatcatgtagtcatgcattagattcacatgcaccaaatttaagctaactggaaagtgggatcatatttttttatctcgtgcaaataactattaagctgctcaagtttctttatttggtaattaattaaatttttcaaccatgtcatattgcatatcaattgccaactttntctacacagatgcacatgctcaattatgataatgtcatatggtctgtcaaccatatgtggtcaatgcaaactaaattgttttatttcttatatgttttgattggatttttttgtatttgtcactgggatcatattttctctcaacggtttngctggttgctgtttaatt

SEQ ID NO: 369912 - DNA, 546 bp, Zea mays
ctatgtcttatgtactggataaagaagtaatttgtaatgaaaaagaacacaccattactgaattgaaggaaaaggtggttgtgcttaatggtggaattaggcagttagaaacacaagtgagggatctaaggagccaaaatacacagcttttcactgcattgaacaatgcaaagaaatctgctaggtcgaatggcactggatttgctcagcgtaagagtgttcgagcttcccagcattttggttatagtaaggacaacttcaattgggtggatgatatggacatttcagacagtgagcactcggatgagttagagaatatgagtgatggatccgattcagactgggtacagtcgaccaggaaagccaaaaaacaccagagaagagtgtctagccattcaaatcctaacctggattgtcaaaatacacaaggcaatgcagaaccagagaagccctcagatgaaaagtgcattttgcccaaatatatttcatcagacggctggtcatgctcaaaatcctcctcatgcaagaccacatatgcgagtgcag

SEQ ID NO: 369913 - DNA, 523 bp, Zea mays
ttgcctttgcgtccgcccacgcgtccggcggccagaagccgtgcgcctcgcaccccaaacgcccagcttctcgtgccgcggccgtcgtagaaggcttgtccgagaagccgagcagacccgtgacctcttcccccgcgcattagggttccgctctcatcctcggtgcccgctcagctcaccgccgctacttccggctaggccgtcgccgtggcgccccaccagatggacgagtctggaaaggcgatagccaagtgggatgctagagcagctaggatttacaatgaaatatgtgtagaagaggtcaatgcccacaacaggccccaacactttctcaactcagaagggtatgcaaacctcatcatgaaattcaaagaaagaactggacgaacatataccatagatcaaatgaagaatagatgggacacactgaaaagaatgtacatacaatgggagatactcaatgaatgagctactggcctgggcagggatcctcacactggctcaatcagtgccaccgatgagt

SEQ ID NO: 369914 - DNA, 209 bp, Zea mays
tcgccctctcagacgcccacgcggccgcccacacgtacgcgcacgcaaaagtgctaggggaggtgcacaagccatcgaacgcgtgggtttgtgcggaggctctcgaaacatgttgaacaaaaacatgcaccctaactatagggagacgtttgatactccactgaatccttatgagaaggatcgtctgagggctaagctgaagctttgga

SEQ ID NO: 369915 - DNA, 445 bp, Zea mays
  unsure (1)..(445): unsure at all n locations
tcgatgtgatgcctgctctgctccggtgtagtgtagtgtagcaagcaagggtggctagagatgatgcgagagattaaatggatgcttgccgcaatagaatagaatagtaccgagtgattgcattctgtttcggatctgaagataataaaagggttttttaattactcgccgctttccttcccgatgcagggaggtgcttgctgctgatttgagtccgaaagcagataagccacatgctgcatcctgcagacggacttgggacccttgctaaatggattgggaaaaaaatcaagctgcaagatacccagagggtttcgtgcaagtacacctcatgatgcgcgcattcccgctataagagnggcccttgctcaatcaactgacaggcaccgatcaattactaaagagccacgcacgcgcaaagacagacacagtcagagggagatca

SEQ ID NO: 369916 - DNA, 495 bp, Zea mays
  unsure (1)..(495): unsure at all n locations
tcggtctcagctagctagcgtccccctgctctgctctgggtccttttgtcacagcctcgccttggcggacgaccaacaaggtcgccggccagccagggcggacggccgccggcggctgctgctgaaccctgcaccacctcggcggcgtcgtcctcttcgtcaggtagcaaagcattccctggctattacagggatcagcagtcacgccaccaaacagccttgggaatcagctggcgcggcttgattgattagggcgcgtgggactctccggagagaccagacagactactcgatccgtcgttccaaggcgttgggacttggggagagggagacccacccaaccgaggcgcgcgataatgtcgctggaggtggacaacccatctggaggagcgggcggcggcgagtcggccaaccggctcagcctgaagcgccacgactcgctcttcngcgacgcggagaaggtgtccggcggcatgtaccacgggtccgagggca

SEQ ID NO: 369917 - DNA, 213 bp, Zea mays
ttcttttcgtacgcggacgcgtgggcggacgcgtgggcttgaggaactagtatggaggatgactcgccgttgaccaagacgattcaagggtgtggtgactggactcaccatggggaccatctggggcaccgttatcaccacctgggatcgatgtgccctgtgtggagcgccaccttgtgattcctggccttattcggtctgcttaagatgtgc

SEQ ID NO: 369918 - DNA, 224 bp, Zea mays
tctaaaggcacatggttagacccgcccaccaaggtagacaagtccaagcctaacatggacaacggaaaatatcctttttaaagaatgatggacttgatgatgaacacgttcgaggagggcgaccaggatatgaagcgcacaatagccaaagctcggtctgattcctgactgggaagactaccgatcatggcgacatcttgagccgcatatcaggagatgggcta

SEQ ID NO: 369919 - DNA, 135 bp, Zea mays
gcccttcctttttttttttatttcaacagcgcaacaatgggggggcttattataaaagcatattccaaagaaaatccaaagcgacatttgtgttaaccaagccaatgagccccacctctcggttggaacttggaa

SEQ ID NO: 369920 - DNA, 267 bp, Zea mays
tggaaagctggacgcctgcggaccggccggaattcgggcgacccacgcgttttgtgtcgcgtggggcctatcgtcggtggagagatcggaggtttggtggctcttgcacttgcgtattgatgattctttgcgaacgagcgagcggaagacgagagcatggaaggatgcagccatgagtgacggacattctggatggctggccctgggggtttatggcaatgcacacacttccagttggggcacgccacacactactgatggctatgc

SEQ ID NO: 369921 - DNA, 319 bp, Zea mays
ccaccctttttctcagctgtcctctccacctgatccggatctccctccctcttctacgcgggacgcggtgcgagccagatgaatatgcgcggccgccagccttgcactgaccatgttctcatggattgtacaccggccgggcgcgtcccctcgtgccgtcagtgggccaccgtgtcatctgggagccttaggagctgcctcgcagtctactgcggacccggcgcattggtagcagcgggaccgcccgcgcataagaggcctaccacagctggggaggaagactgcggatacagaggggctacggaggcgctaacacagg

SEQ ID NO: 369922 - DNA, 445 bp, Zea mays
tgttttctacgcgcacctagggcagcctctcctcgtgccgtcgaaggcccctcaacaaccctactacgcctacccggccgcctcctacgtgcagaccgacccaccgtcgtcgccggacccgacgctcgtcttcgtgccgtccccctgctccccgatgctcgagcgcctacgccgcctgcgcccgcgccgcgcgttctgcctccgccgattctgcgcgcgcgcgctcccgctcctactcttactcgcgctcctcggggggctcgacttacttctgtacccgtccgccccggccgaccgcgtcgtcgaccttcgtgtcgacagtttccgagcgcagtcgcccgtcctcggcctcggactcgcgctgcggctccgcgttagcaaccccggattagaactaccgcacgttaccgcgcggactacgccgtcgtttcctaccggggacacc

SEQ ID NO: 369923 - DNA, 536 bp, Zea mays
ttactgatctcccttcccttaatcttccgtccatactgcattcaccacttattcccctacatggtccacaagtgccaacattcacaccattgatgtccgatcccattgtgcatgtcccagtcattgatgtttgttcggcgggtcaggcctatctagtgagttgtgggccgtctataacttcagcagttcccctgctcccgagcttgaagcctctgctgccagaagcagagtcgttagtcgagagaagcgcaagggaaacactgatgaggctcatagcttcgacaccacctgcaagcaatcctctacctggaagtatatcctgggcgaataacaatgtgaagaagcatgttgatgtgtgtcccaatgaaaaagcatccggtacgtcttgtgttgctgctgtgtttggaagtgggattgcacacgctgaggatgaagttccaagcggaggtgattcacacgagccgtttgccgaatacgatggtaccagcaatgaatgtgatgtacatcattggcagaaattctagcttggctgcatc

SEQ ID NO: 369924 - DNA, 343 bp, Zea mays
ctgaacacgatccactgctaattcaatgtttcgatataacatcctgtttcggctgaagtttttttttaaaaaaaatctgcaactcctacagaaaagcatcggcataacatccttttcccagaaattgcagacatctgcattgactgatacaaggttctcattttggtctagttgttcagtaacagctttggcagcatatgcatgaattagatcaactacattttgaaatccaaaggattgcctccctgtgtaggattcatccctgtttattcgattggcatgggacagatttgctgacattaggccttcgaagcttgtaggaggaagcaaacgccggtgcatc

SEQ ID NO: 369925 - DNA, 159 bp, Zea mays
ggggggggattaaaagaccaatgtattcccatgagtttttatttctaaaaacccattcaaactgacatgggcattatcctatacaaacataggttgatgttggccgtcgccaactgatacagattaaacatttgtgcgaccaacattgcaatctcatat

SEQ ID NO: 369926 - DNA, 334 bp, Zea mays
tttttgactcgtgggtgtcaggtcaggttcgcaatggggaccaacatagaaaagttgttattttgggtcatgaaccaaaaaagagcttttacaagaagtttctctaccaaccggttcctgtggaagagcaatctgagggagcacttgcttgaccacataaatgcataaattgcttgtggcaccattagcaacaaggaggaggcgagtatttatcttacctggacttacctatatcgtagatgtgtcgataaaccgggctactatggacctggaggatactagcagcatacacatcgaatgcttatctatcaaggttagtgtaagcaacatttga

SEQ ID NO: 369927 - DNA, 412 bp, Zea mays
tttatggggccaaccttgctgtcatggacacatacatggttccaggcctctctgaccggcggaacctttgctacgctggctccatctacgcgccgggatgaggtcagacgaaaacctgctccggtcgatgcatacagccggcgacctcggagccaacctcacttgcccctccaaagacaacgaactgccccgaccccattgcctattctgagttagaaatacttcacagataggaatggagatctttgcgatctcaaggctggttatcctcctatgttcttccatccgtcaccacactttacttcatttggaactgtgaacgtgcatgttgcgtctaaccatagcgtgaaatgactaacgatcactttaccaatatatgataaccggaccgtgcatataaatcttcagagct

SEQ ID NO: 369928 - DNA, 244 bp, Zea mays
cccgaactagcctttacattttttaagggggcggggcgcaaatccttaaaggaaacccttttgggggtcaaaactataaaggctaagcagttttataataaaaccgccctcggggggttaaaagcatttccaggatataggaaaaccctaaagtttcaaccttcgcccaaattagggggactgggcttttaaaacaaaacgggggtttttggggggcttcgcccaacatggggaagggggggcc

SEQ ID NO: 369929 - DNA, 521 bp, Zea mays
tcctcgcgtgcgcggacgcgtgggctgggttatagccatgctcatgaaactgcaattgaggaaaaccttcctgaggagggaaccatgactcctgcaaataaacaagaaaacttcttgttcactctgcgcaaatgaaacagtgcatatctacttagcattgttggtggcattttaagaggaatgcttgacaaggactggacctggtctgcgggtcgtaacccctcagctgcgacttctgaaggttcacaacttttatagttccagcaagatgtgattgctcgacactatattattacttcagtggaggaatgcattcacgtcgtcaattgagcaattcaacaattggtgatagagcggactactgcaaaaggctataaaattttcaaggctcacgaaagtaagatcggtgagaagtacaatgccgtagttagcttgcggagaagagtatcgggtatgtccaagggattgcgatatggtgatgcacataaacttatgtcaatgctagaggatgcttcaaatgg

SEQ ID NO: 369930 - DNA, 331 bp, Zea mays
gcctggcgtgcggccacacgggcgggagagagacgcggctggcttgctgagttgtgatgctggcggctgaaacatactgactcggggacgtgtgcggtggacatgagggtcactgcgcggccggatcgccggtagtggggcctgggccggggagtgagtgccaccacgtgatggtaagaggggcttccaacaggatgcgtatgatcttgtgggagaacttttgttcaagatacgattcctacttttggtggcgggttcgagagtcagggaccttatggtcatgggggtggcagaagagaacgagcacttctggatatagagaggagaaggg

SEQ ID NO: 369931 - DNA, 249 bp, Zea mays
gcctgtcttctgccctagccggaggtcggccagccgccccagcctcaacagtcgcacagccgccgccgaggcaaactcgaagccaccccgccgccgcagccacagccgcgccgagcttgagccgtcgttgctccgctgaatcgcccccatcgtctctcctgaagagagaggagatttattgagacagcatgcctaagataaagacaagtcgtgtcaagtatcctgaaggatgggagcttattgaaccaa

SEQ ID NO: 369932 - DNA, 541 bp, Zea mays
tcctcgcgtacgggaaaacttgctttgaattcagagtgaaggttagggttgaggggattccagttcactgttggggagaagatgtcgctgctagggttttgggtaggagctgcgctattcactatgtccaggagcgctcaaggcgcagggaacgcactaggtcctttgatctttgggcttggtgcttggatccttgtgatatccccaaggaggtctgtttaacggtcacagttcctgatagggagcttacttcttctagcggccctctacctctagtgggcgcactgcatgactcaccaactgatctaaaggatggccatgtgtacaccattcgcaaccacattgaagttgacgaagatctttccttcatccaaggaagggatgttagaggcggtccccctggtcgttgaccacgcagagaattggtatggagctacggtgtgccagattcagttggagaaaagagagagagatcagtggatcgcagaggcagggaattcgtttgacgcgactagggtcacgatgatgatgaggatttccc

SEQ ID NO: 369933 - DNA, 479 bp, Zea mays
tttctttacaaagcccgctactggtggatatgcgaggccatttttttgcaacaccccaagtgattcgtttcgaattagttagtttgttcttgtaacggatcaaagcactgatgttcctgcgctgcaatggctctttcgctagttaatctcttatattttgctgtcaaaactcgcctactcggttttagtcaaggatgcgatttctttcatccaaaatcttttgggtgctcatgtagaagttgaaaatcttcgtattttcactcctgtttgtctggattattcgctgtattttgacggcgttaatctggcttgttcgactattgacaatatcgttgcattcttgtttccgacagagtttttgaagcaaaacgatcggatgagattcttcaaggggagcaaggtggaggtatttgatgaggcagaggcgccatttggttcttggaggcctggtgagatcatcttcgttatggacacaccta

SEQ ID NO: 369934 - DNA, 503 bp, Zea mays
ttctttcacgcgtccggcgctcgccgtctaggagcattcacgttggcggcgggcggcggctcggtccttcctccctttcttccgtgctaagccaccgagcacccaagcggtttggcctgatgccacatctctggtaggagaggtggatttggtggacctagattcgatgtgcagagagcgacttggaggtggctgacatcttcaagcactgcatcatgcagttacaactactgttggccatacagggaaatgctgggcctattataccaattgttcaaagcatggaccttgtataattacatgttattatcatagatagattaatttctgaaatgcccatagattggtatatttggggaaatttattcgccaactgtaagcccgtcgtgatgcatagaacgatcgtggtataagatttttctgttgatgtttgcagggtatttttccagcacttgacattcgagtgaaaaatgtcgcacggacatattctccttgacataaag

SEQ ID NO: 369935 - DNA, 366 bp, Zea mays
ttaccactgccccggatccataccagctgcagcatcagtgcgcgcgagctagcttaggtcggacgatagatcgatcgatcgctcagtcatacgggcggaggagcaggctctgatgttgacagaaaccaggaaccgtgacttgtagtcaacagcccctatcgcaccatggcatctttctccgggcgctgagtccaacgtctgtcgtacttcctgcaaacggagaacctcagagactgactgactagggtaccactacctcatcagccacagctggtacttcacacaccatcccacaatgctgctgcacgctctccatgagctgcagaggcttaggcgtgaccagctgcgacctatggagcaggggga

SEQ ID NO: 369936 - DNA, 502 bp, Zea mays
  unsure (1)..(502): unsure at all n locations
tcccacgcgtccgcgcacacggcacagacccgtttcgcctcttcgaccgcgactccctccgaccgagctgcagtgcgcgtgctgcctgccttccactgttcctgcttccagacatggcggcgaggccggtcgctctggctctgccgctgctggccctcgtctgcgccctggcagcgtcggccgacgcgacgcagttcagggtgggcgggcagagtgggtggagcgtgccgggcgccggctccgagccctacaacacctgggcggggcgacttcggttccagatcggcgaccagctgcgtaagtaggagtagtcgccaccgcgcgccgcgtcacctgctgctgctcattttggtcgtcgtcgctggtgcatggtgatgacgagttctttgcgtgagcgtgtgcagtgttcgtgtaccccaaggagacggactccgtgctcctggtggacgccgncggctacaacgcctgcaacacctagttctacgtcttcaggttcgacgac

SEQ ID NO: 369937 - DNA, 211 bp, Zea mays
tcctttttttttttttttttttttttttttttttttggggatcattaaaacatatatgtgtatacatataaatgttaggggaagcatagctctaccaatatatattacaaaccgacaattgctcatggtacatttgacaacactgctatgcctgtgatggggcaatgtaccgataatgataacacatttaaggaatagcacgtccaggcag

SEQ ID NO: 369938 - DNA, 435 bp, Zea mays
tttctgtagacactgccaccgctgcgtgacaggaactctgctctctctctgtctctctctctctctctctcatggcggactccccgagccccgggacgaaaccccaacggagaaccggtgccgacgccacgcccctgcgccgcacactcccctcgccgcagtgagccccgctgcaagaatttgctccgcgtggcgcaggttcttgtatgagagagccaggggaccaccgctcccactacggtgggcggtatgggcacgggtagccgtcaccaagcccatacgcaccgccacgccctggacatggggaaaggtatgcgagacagtctagtgggtactaccgccagatccctaccatgcactgcaagaactgtgggatggggactgtgacctaccatcaccatgggtgcgcctgttcccactggctgcatgggcaga

SEQ ID NO: 369939 - DNA, 273 bp, Zea mays
gttaatggcaaaataacgacctcaagtttttttccctaaaatgtccaagaagttttggtcgttcattggcgttgttcatattagcaagcccgcacccgcagcatattcagacattaattcgtgcatgcatggcatatgttatgttagtcccggcccatcccatgtgaatgtgcgtataataaaccgcacgtgcgtgtggtggtgacgtacatctgaagaggttgagaaagatgccgagtatgccattgttgagcgcgacgaagttgaggagga

SEQ ID NO: 369940 - DNA, 335 bp, Zea mays
tttctttttttttttttttttttttttttttttttttgggggggaaaactcttttcctttattgagcaataattaatttgctaagcaaatcttggccaaacagctccaaattttatccaacggttcacatgctcaacataatcttacataatttttcctcataatttttagggctctattggtattactaaaatttcagttaagcattttaaggcaccttttattcctttaaaaatatctatttgctagaaaaattccaagaatggatctatcagagagcccttgattttagacacctactaaaggggggtctacgattttaccatttttctttg

SEQ ID NO: 369941 - DNA, 162 bp, Zea mays
ggtacaagaaaatagcgcatgcatataattatattttattaaaaaaaagaaaaggcctcatttattggtcggtgcagtacaaaaaagctatgaactaaattcctggtctggaactgcaactactgtgggactttaggaagccagagtgctccgggggcagtt

SEQ ID NO: 369942 - DNA, 211 bp, Zea mays
  unsure (1)..(211): unsure at all n locations
tttttngtttttttcttttttttttttttttttggggggcataattgtactccatatcatagcttcgtcgttgcaaaaactgcaagagtagcagcttgcgagtcacaaagcattaagcaacaaccttagcacacagactcacaaaagacgataacatagcataaagcaccaaggcaacggcaatatttggcctttttgggtccaaataagt

SEQ ID NO: 369943 - DNA, 193 bp, Zea mays
acttttgcatggtgctctaaatttagaaatggcaaacaaaattgggtaccgaacaaaaatttgcccaattggtttggctccaagatgcaaactttcctgtgtttgacttcataggaacccgagcccttttgacatttgatactaccagtattacagaccaattctggttccagtttctactgctaacagagaa

SEQ ID NO: 369944 - DNA, 375 bp, Zea mays
gaaataaaatgcaataggggaggtttttttttcaaaggggcgcacatcaaatatcatagttttgttacaatagaaacctaatcttccttcatctgttatatacattaaacttttcaaaatttttattacaacacaatctattcctctttaagaactttctctgcaacttcgttcagcaatttgttaacgacttcgtcaacaatagattcaaccatgtttatgatctccagcgctttcttcatttttggatcagctaggggatcgaacggctccggcggcagagatagttcagctatacgcttttcacgctcggcagcttcctcagctcgccttgcttctgttcgggcatcttgggtgtctttttcacttttcttt

SEQ ID NO: 369945 - DNA, 260 bp, Zea mays
gcggccgccctttttttttttttttcaaccaaaaaagaaacatggggggttaaattaaacagcttgcagcgtgttcacaacccacactatattggagcttttacacagttcacgacttacaattagcttttgcttggacgacagctggaccaaaaacacacacacactttaccaaacttacgacaccaaatggggggacagaactaggtgataacttccaagacctggatttacaagagggggagtccaaacttcaaatt

SEQ ID NO: 369946 - DNA, 214 bp, Zea mays
gtacaggagggcgacaaagttttgggttcagataacaaaccattgcaacagtgaacaattttgaagggaagagagatggaagattcatcagaaaaacttggcgtgggcagacaaggcattcccccccacaggaagacgcttgtcctttcggactggcaggcatgttttggcactgccgtggaaggttaagacctgcttttgaacgggatggccc

SEQ ID NO: 369947 - DNA, 201 bp, Zea mays
gataaaatagagactagatggagtgaatatagaatgcaaacatacaggaaacgatcctaagaatatacccattagttcacattggcccacatgccctatgatttatccattgtgcacttgtgtggtaccaaccacgtgctcccaagatgcatggcttgcatggttttcattaggattaactgcaggcaagtagccttttgg

SEQ ID NO: 369948 - DNA, 295 bp, Zea mays
tttttttttttttttttttttttttttttttttttttggggggtttttttttttttttggcacaattagagttatgggttttttactaccttgaataatcttaagttacaaattggcaatttttttattagggcctaaaaccaacaattttttttttaggcatgggcaggggcaagcaaccctaacaaatatgggtaatgggaagactagtagaatgccccacaacacaaacagcctacaacaggggggctttttttggacacatgacagggggcattatacattatacaggggc

SEQ ID NO: 369949 - DNA, 189 bp, Zea mays
ttcctttttttttttttttttttaaaaaaaacaaacaagggggtatttttagtgtgctcgccttgactaattgtcacaggaattacaaatggctatgattattcaaactggcatagttaataataataaataccgggggaaaaagtatggtttcgcttaagcagagtaacaaaccttatcattatcaag

SEQ ID NO: 369950 - DNA, 163 bp, Zea mays
attctggggggttttaaaataaaacctttgggcgattgaaaaaacaaggtacagccttttggaacctgcttccggggcatgggtttttttgaaccaaaagggaatccagggccctaggtttcaataacttggtgaaatggaacttgacggggggttttttttt

SEQ ID NO: 369951 - DNA, 248 bp, Zea mays
ataatcaaaagtgggggacattttattattcctgtaaggactaatttacagacacaaaactggagagggttgacagaattaaaatcccctttttatttaaatatgaataaaaagagaatttttgcccctccaatctatctggttttgaggctcttgaactaaccctggtgtcatgtacaataccgatttctatctcgtttggattccaagaaacaggccacgtaaaaacgggttttctgctgaaccga

SEQ ID NO: 369952 - DNA, 130 bp, Zea mays
gctaaaaacacggaaattacggggatgcttcaccgtgctgtgcgtgccatgctgctgatcaggtagctaccttacatgagacaaaaccagaggtggattccttgcaagcatcactagggacttccagctt

SEQ ID NO: 369953 - DNA, 160 bp, Zea mays
attacaaaaatgggggggattattagaacaaaggggggcaaactacaactggtgagatcatgtgcatgtaccactttacacgtgggggggggcacaaacaaagactaattttcaggctaaacaggacactcggtctggagctgaggaattcctgttaaga

SEQ ID NO: 369954 - DNA, 327 bp, Zea mays
gctacaaacacaatcctgggggtttttcgggacgaggcagcgctaagacctcgtttggataggcacgtattcacctcaacctgtaaattaaactaagttatacctaagtggtccaatgcacctcaatatacatgaactgcggtgaatttgaacaaggcttaaaaagacatttaaataacatcttcagttctctggggggttttccctttctaggtatagcccgcatttcctcccaaacactaggcttaagggagtgctcaccaccgctcatctaccacaccaggcagggaaagaccaggatccgaaacaggcgctaagctagctctg

SEQ ID NO: 369955 - DNA, 168 bp, Zea mays
atggccgttgtttcttacgccgttggatgtttctgaccagaagctgctcaacgaactgagtgagcttgcggtgctgaaacgggcaaggattgagcggatgaaggctttgaagaagatgaagaatgccaagcaagggtcctcgggtggcaatttgtgcccgctgatcat

SEQ ID NO: 369956 - DNA, 232 bp, Zea mays
gtcttaaaagcagatttaatacatggaaacgaaaggactacatgggagagtgatctaacaatcaatctaaaccaggtggaaactaacactatgatagagggagtgacatatactaccagcctaatatatcagtcgctgcctgcattttgcacaaaaggaagcttatccagtcgaccagtcctatgatttcttgacatccttgcatgcggataacactaggccttggcatggc

SEQ ID NO: 369957 - DNA, 170 bp, Zea mays
acacaccacatttaactgtgacttgcaattggagcttacccgatgttacatgatcagccttcaactggctccggcacacccgaacactgttgggaaccaccgggtctcggagcttatgcgcacacacaagcgcttacgggactaacacacgggcagacatggtgcacact

SEQ ID NO: 369958 - DNA, 146 bp, Zea mays
gaaaaacagcctatactgatgaagtattggcaaaaaccaaaagaattgtcagccatcatgaagcagcaggagggggcgctgcagccgggacggtgagccagagcctcgtcacccgggggggaaaaggcctacatagctacctttac

SEQ ID NO: 369959 - DNA, 119 bp, Zea mays
actaaattaactcatcgatcaaagagctgggtaaccacataaggctacaagatgacgctctgaatgtagctacataccaaaaagctaaacctacatgcctgtccaaacatgaaatgccc

SEQ ID NO: 369960 - DNA, 270 bp, Zea mays
tccttttttttttttttttttttttttttttttttttaagcagcaatccatctcatttcatctcatctcataaaggcgaaacaagggttcactgaatgagcaatacagcaaaaatttacagcttgtacacatggaatgaaaccaacaggtacatgcctacgacaacaacagtcacacacacgtttagccggtccctttcatcctttctgtcgcacgcctagtgcaccttggcagtcctactactactcctcgatgacccctgcagggggg

SEQ ID NO: 369961 - DNA, 154 bp, Zea mays
ccgccctttcttttttttttttttgatgaaatttattatttcaaaacggttgagttcgaaaaagtgctgcctacatattatgacttataaaggctgtccattcgggatgtttaagaacatccatcccttgctgaagtttacaggatttgatgca

SEQ ID NO: 369962 - DNA, 221 bp, Zea mays
atgaatacatatggggccaacgtaagggtcagtgcatcccatgatggcatacatacatattttgggtacatacacatcacatgactggataattacatatgtccaatgtaagcgtcagtgcaccccatgatggtttacatacatattttggatacatacacacattacatgactggagaatcatgcagagatctttcatttcagccaagatcaggaacgat

SEQ ID NO: 369963 - DNA, 272 bp, Zea mays
ttgtttgccgttctccctcccgtatatatcaacccgcccaccacacctccaccccaaacacacaacacaaccaaccgcctcagtcctcactcatcactcgcacagtcgcaagtccagctatcaccaaccagagctcggctccaagcctgcaacccaaggagacagatacgttcgcagatggcgggtgcagtgagggcgtcatggatggtggccatgagcgtgggcgccgtggaggcgctcaaggaccatgggggcctctgccgctggaacta

SEQ ID NO: 369964 - DNA, 263 bp, Zea mays
agacacactcacggttaaggcatgttggaactttttggaaaactgttaaaaaaaatggaagaccatttcacaatgccggttttcaaggtcattttcaaccggtgcttgatctgggcatcacacgcacaattaaatcgctcaagtaatactctagatagatgaccgatatacaaacatgagccaacgaataaatgaatcaatcactattctacaaatgagcccatgcatgtaattaacaagcatgcaataatactggtgcctat

SEQ ID NO: 369965 - DNA, 178 bp, Zea mays
gggggggaaacaaaaatattttcctgggcctgttttattaaaaaccttattccccattacagggcccttttttaaggaaaagggtcccgaccgggaatgtccaaataaggtttaaattttccacccccataaaggtcataggggcaaattcaatttgggggagcaactaaacattttt

SEQ ID NO: 369966 - DNA, 301 bp, Zea mays
ggttggcaccatatatatcaacacaaatggttaggggacaaaaccacaagggcaaacaaccatccatggccacacacagccttaacataggctgtctaatgacaggtccatcatatagtatgtatgtatttatgtatacgggggggtaaatatatactagaggggaaaaaccaaaagtttgtcctgggctgggccattatattcctttcctcccaaatggattaccttgggctcacaaaacaatcaccttgtgcttgctggggaacggggacagtggggagaaggaccgagaagcttttga

SEQ ID NO: 369967 - DNA, 294 bp, Zea mays
gggttgatcatcgaacaagaatgcaatttacggatgaattgctgtaatcttcaggtgggagtgcctgccacaaatttacagcagcttgcgtagccactgtatataaaactatctgcccctggtccttcaaagaaccattctgactacgggattctgaaaataacttaggcgtctgagtggcatttggctgaagaactaccggaaattgccggcatccctgtggccttatttgaactggcctaagcctccgtcacagagcccaggagggattaagggacactcgtttccaccggc

SEQ ID NO: 369968 - DNA, 261 bp, Zea mays
ttttttttttttttttttttttttttttttttttttttttttggtttttttttttttttttttgggttaacccaatcataaacatggtggatttgggggggaataagaacaaagggccccaataaaaaaaatccaaaagttttgggtggcaagatcttttttggttgggaaaacccccggatacatttgcatgacttcagatcaccaagacataaggccggggggccacacttcacagtttaaccccgggggaaggttccc

SEQ ID NO: 369969 - DNA, 241 bp, Zea mays
ttcttttttttttttttttttttttttttttttttttttttgggtttttttttttttttgaacccccaccaaggaagcatccccctttgattccatcgacgaattggcaaacacagttagctggtccagagagggagagagccctgttagacgtctacggggcatgccgttgcctgttggaaggggaagtttccggggccccccccggtgttggggccctaacttcccctgccgccgttga

SEQ ID NO: 369970 - DNA, 224 bp, Zea mays
ttccttttttttttttttttttttttttttttttttttttggtttttttttttttttttttaacaggcactgcatattttataggcatagagcaccctcagatcagatgaaaattaagggagtttgacactcaaagtggcacacaagaaaaggtctgttttccttctagaagtgatccccatggtttgggccatgtccatcttaacgggaaggaccccccccgg

SEQ ID NO: 369971 - DNA, 321 bp, Zea mays
ggagcacccctataagttttttggtccaaaacaacaccttacaaagtagttttaagcaacatgatacacgactattaacacgtgtaaaatagtagtacaggttatttacattttttttgaaacaactagaaaatgggtttttattccacccgtttcggaaaggacggtccaaaggggccttcagaaacgtactacggaaaagcaatcgcttttgagaaaaggaggctccatcctcctcctccttggccatatatacctatactttttaaggcaatctttagaggggcacgtccagtagatcagcccacttactaacacaaa

SEQ ID NO: 369972 - DNA, 219 bp, Zea mays
atccaccccccaatgcagtacatagcatggaaaaaaacaagggggagcccggaatggccattccaatttacaaacataattaatgcccacttttatgttttttagacggcattaggacaagttaccagaaaacattttattggttgggggggtttcttacccccccccaaattttatcagctttagactttatttttggacagggcaacagttttttta

SEQ ID NO: 369973 - DNA, 383 bp, Zea mays
aactaatgaagtggaacatccaaattggtcttaatgaatccatgacacagtgataccattgagtttttttgttgtacaacataatagaaatatcaatatttgcacaaatactaggaaaagaaattctctaaatgatttaaagtctacatactagtagcaacaacttaaagaagaactaatatttaacttggctcacgtgcactcgatgtttctacattcatactagaggctgcaatcttcttttgcttgttgatgtagtactcccgaacccatggctccatcttgtttacatccattgtcatcaccctcttcttacgttcttcttcttgtagcttaagcatttgctgctggatttcgaggcttgctttttgaattattataac

SEQ ID NO: 369974 - DNA, 357 bp, Zea mays
gaagaatggttcgcaatatattaggtcaaagacacatggtcttgaagagatcacacatgtttaacaagaaatttgtttacaatgaacatgttaacacatcagcagaatctaactatcacactgaatctgcactcaggcagtaggcatcagtcaagactgaagagcaagaaatagagcaggcatgcatcttgcagataaacaaggacaatgtggacggcttcattctgcaaggcagcaacacctagcagataaacaagttccaaaacaccaccaccaaatatgaattccatgtattgaactcaaagcttcattctgcaaggcagcaacacctttcagcattcagcttcattgagagtc

SEQ ID NO: 369975 - DNA, 111 bp, Zea mays
gagagacttgtcactttgcaggtagatgagagaccatttggccatgcttgaccaacaggagcgtgacaagaacatcctgtgaacctggtgtgactattcacggggttatct

SEQ ID NO: 369976 - DNA, 202 bp, Zea mays
  unsure (1)..(202): unsure at all n locations
caaccccccgtncagttcctcaatgtccccccaaacacgaccggaacggatgaggagcgtgttcaggcgcaatgtgtgtgacaatgggactagaatggtcaaggcaggtttcgaatgcgactacgctcccagaggttgtatttctagattgtaggcaggccacaacacacttgagtgatggcgggcatggcccaaaaggttt

SEQ ID NO: 369977 - DNA, 389 bp, Zea mays
accagtagaagagggtcgtctcctcggtctccgtggtcaccgtgctcgcgattcccccccaactgctgctccgtcccagcgcaccccgccgcggagaagatgagaagagagaggagggtggtgcccagctttatactccgaagtcgcgagtccaaggaggatgggatctgggaaatcgtgcggagcctgcggagtttgttgcggtggaaatctgttacgaggatagcggtgagccggtgagcgtgggcctgctaagtttgttgcggtggaaatctgttggcgaggaaggtgatcctgacgacctgggcccacgggtcattggcgatcggtggcgcagtgcattcctttactttcattccaagatgccgtgcacccggttttttcgagag

SEQ ID NO: 369978 - DNA, 192 bp, Zea mays
  unsure (1)..(192): unsure at all n locations
tgggaagttatgtnttgatagaggtatcaaagcgaataagctgccgtagacctcataaattttgcatcacagtggcaaggatgatctgatgtatattgagatcaccatcccacactgatgaacggtattttgcccgaaatgttctctttttcatctttcagggcatcaacttttgatcgtattggtcttccc

SEQ ID NO: 369979 - DNA, 351 bp, Zea mays
accttaccgaggtggaaaagctttgggggcgcatggtacgggacctcccttttgtcttcgtggacgccggggacgatttcatcctgcgtgtggatggaggtgacgactctgccgccgactcaaaattcttcaggaagacccttgccatggccaaggacgtgatgtcactgaagaagttcacggatcggtgccagatctgcgacctggctaatgacatcaagaaactcttcaccgagttacctgaacttcgtgccaagtacacggtacggggtgtgggctctgatctcttcgcgagctcccgcgttgacccttgtgtcatcaatctgtacgggaaagagacatgattttgtt

SEQ ID NO: 369980 - DNA, 315 bp, Zea mays
  unsure (1)..(315): unsure at all n locations
acccctacgcggaagcgaagtgatgggtgggcctaaagactgtgtcctcagatttcccccggagcctggncgggggagtgagccccgcggagccaccgatccaagaggccttcgtgcgtgcagggatgctgctgctgctcgtccctgcgccttctaccccgcgacaacacgctatagtccccctgcggctgcgcgcaccggctgaagacatggtcttggcgtgcccaatcccccacctcgacctgctaacgctggtgaccgcccggttcccaacctgatctacctgtatgtacccttcccttctccatttttaca

SEQ ID NO: 369981 - DNA, 467 bp, Zea mays
  unsure (1)..(467): unsure at all n locations
gacgcaaaaganttgcaaccgggtgccctaagggaaactctctctggttccccacgaaacaggggttnagaggtaatgcatgctcagaagtatgatgcagaggcagctctgtggagtgttggtgtcattctattccaacatgtactggaagaccacctttttatcggggcaatcagatccagttgcttaaaaatatacttaggacatgttaaatacgctttccatcttgattgtgacttgagccatggctgaattgtcttgtacagaaagttgctgctgatcaatttagtggagcggcttacagttgaagaatttgtgcaccacccatttcttttgaacatgcttcagagaagactttgagccttacacaatctgacataggagatggctttccaagaaataatagctgtccaacaaggcattcaaaccatagttcacaagaagattgaatgccttttcctttaaat

SEQ ID NO: 369982 - DNA, 336 bp, Zea mays
  unsure (1)..(336): unsure at all n locations
ccaccgccngncnggtngaaattaacaccgacgcggacggtggtagctacaagcgggcgcagtcgacgccgtcgatcccgacgacgtcggtgacgccgtctttgtcgacgacgcctcgcggtgccggcaacgtgtggcgcagtgtcttccaccctgggagcaacctggttaccaagggcatgggcgctaacctcttctaccggccgtagctccaattcccccatcgtttacgactgggttttcagtgtcaagaccctaattcaaccaccttttgatcggtcgagattgattggcagttaaaaagccatttttgctggtcctggcggttttttaaaa

SEQ ID NO: 369983 - DNA, 148 bp, Zea mays
taaacaggaagagctagggtgaattctcactacaagtagcagtagatggaagagagttagtatgccactgactgctagtgaatttgttgggtgtggcgttagttgagatcaggaagatgggaggcgggctgttaggtggatcagaacc

SEQ ID NO: 369984 - DNA, 270 bp, Zea mays
aagcccctggcatggcagtttgattcctctgcgaggatctcgtgcttctgatgttcatgtgatggagcagtcatatgcagaggtcactgtgatgtgggagctggctatgcacgcgcggtgagacacaccatgctccagctctagcgcactggtacagacacgatgtgtaacatggagttgtgatcggggaaacatatatgtccgctgagggatatcatactgtggacgagagaagctactgggtttcgcgcgcgcgcctgttcctataca

SEQ ID NO: 369985 - DNA, 420 bp, Zea mays
ggaggccaattggagggaagcgtaatgaatatagcgcgtgtttttccgaaaagcaagacagaacatcattccagagaagatatggaaaaaaatatttttcagcagattaagtaccaggaaaaatacatgaattcaaaaataaaactggctggcgactctgagatccatgcattagagttggagaatccaatcaccttccctggttcaagtaaagtgctggagttggccacgggaacaaaattaagatgaccttgtactcttgcagaggatgaaagggatgtgaaatcaagatgaacatcatcatcactatgaggctaccctgcctgttgtggtagataaatactcaggagttatcttgccctttgtgacccaaaatgcggcataacaggaatacttgaatcctttttatggaaccatttt

SEQ ID NO: 369986 - DNA, 203 bp, Zea mays
aagaaggcccaacggggaccacgaccaccaggggaggagaccaagacgaaagacgaaccgaaagcccggaaccaatcgcagggggaacaaccgaaccgggaggacaagaccagaacggcggaccgaaaagaaagaacaggagcgcacccgcgaggcagagcagaaagaggaagcaagatgacacgaggcacgaagcgcggcac

SEQ ID NO: 369987 - DNA, 428 bp, Zea mays
  unsure (1)..(428): unsure at all n locations
aagngccattatttgagagcgacgttttaggggctatagctgtcattttctcacgagngcacgnaacgatgccacagacacaacgctgaaaaaacgactcaaaatgctgaaagacggcggcgcttgaagaagcaccaagtaggtagcactgattacgatgatgatgatactccagtcatgaaacatgttgcgaagcgctgtgctcctaaaatatctgatagtggtgatgatgacacttctgtcacaaaacctgatgtcaaacgtagagcttcaatattcggtagtgacagtgatgaagatgataatgtacctatttctcttgcattgggtaagaaagacaatgctaagggtgctgaggaaactgaacattaaaatggacaggccaatgggtattccaaaaaaaggattattgcagtcaatgaaagaaa

SEQ ID NO: 369988 - DNA, 343 bp, Zea mays
  unsure (1)..(343): unsure at all n locations
gacagcattcagagggtaccaggtacctttttagaggatggccctgtattttccacgagnacggggnantaacgcagggaagtccccccgcgatgcagtacgcccaagctttcaatgatctatgacagaacgtaggctaccatgctgacactgatgagaagaagagagacagtttcaggaggggcctcaacactaagctctgtgaccgtactaacacagttagggccaacagctacaacgagatggtcaaactcggccatctcctaagaggattgaatcacagttcgccaagcagagaataagaggaagacccctatgacagggccaacagcactgtctcagc

SEQ ID NO: 369989 - DNA, 303 bp, Zea mays
  unsure (1)..(303): unsure at all n locations
aaaagcccagggtttggagggagaggttaagggttttgtctccttttttcccccaagccccagtgggngtgggggcgctcccatggaagccatggacgtcaagtacaagcccgtcatgttccccaacggcgccggcctcaagaaggcgaagccggcggcggccgtggcgctggccggggagccgctgtaccgcgagttcatgcccttgccggtggccaaccccgtcgacccgacgtcgctcaagtgcgcggtgtgcgtgtgctcacccctatttcaccgccggacgctggaaggtttcccttc

SEQ ID NO: 369990 - DNA, 249 bp, Zea mays
accccgaggacgaggatccgaggtttgtccctcggtctaagataactccaccaggaggctgccttacgaatctattaccgtggtcctctagctagatctagaaggttcctgacccttcaaggtcgtgaggccattaagagtcatacctgccaagaagtggacataagtggatcaagctcagaagcgtagagaagaggccgttgctttgcaagagcatattaatggtctgtaaaggaagttgcatgaaaa

SEQ ID NO: 369991 - DNA, 363 bp, Zea mays
ggacgcgtgggctgtacgctgtgtgcggtaaagggggcggccgttgttctccccgcgcgggcgctggcctagattaacggcctgctctaccagccggcgttttcgtctcgcgtcccaccggtctccatctacatgcagtcgcgctcgccaccgccgatggaggcgtctgcgccctacgacgtcatcatgatgcccggtgtgggcggtgtggagccggtcgtaacgtagggccaggtgccgcgttggagtgaccttgatcagtgcatgttactcggctccacgttcgaagaggcgtacgtagaggacgacggatcctgtctctacctctgtatctggtttcatctctttcttcgactccgtcac

SEQ ID NO: 369992 - DNA, 166 bp, Zea mays
aagcaggaagatgtggttgatggcaccactttctttatggatggatgcttgtaacacttaaagaaccaagacctgcttcgataacttagaaagacttagagatgttagtgaagaaaaagtaataaaggttggagacaactagtatagactatggggacgtgtgggt

SEQ ID NO: 369993 - DNA, 259 bp, Zea mays
  unsure (1)..(259): unsure at all n locations
tcgaaaccctaacctcgggggggtngataatgggcgtcaccgccgttcccaccccngcggnggncacccggatggcgccgcctccgtcgtacccggcctcctccacgatctccgcctccgtggccgcgtcggtcgaggaagaggacgacctttatggccggctcaagtcgctccagcgccacatggagttcgtcgagatccaggaggagtacgttaaagacgaaccagagaacccttagcgcgaactcctccttgcgca

SEQ ID NO: 369994 - DNA, 266 bp, Zea mays
tcttcttccgccgtcgacggggggccgtgaggagagcagacgttgtgtgctgaggaagaaaaaccgatcgatggcgtccaactacgtggacacaacgggcgaggaggggacggttccacggtcctcacagccacagcaccagcacgaccccgacgggcggcgcggcggcggcggcatcgccgcgcaacttccggcgcagcttctcctccgcgtcctccgcgggccacagccacggcggcgagggcggttggaccattctagagaat

SEQ ID NO: 369995 - DNA, 134 bp, Zea mays
aaacaaccgtataatagactaagggataagttccagcccgttttttttggcaccatctgctgagcggttgactatgacactgtgctagactgtagccttacgcagcttacacaagtttgagtctgctaaaagac

SEQ ID NO: 369996 - DNA, 437 bp, Zea mays
  unsure (1)..(437): unsure at all n locations
cgagaagtccatgatcagggggtcgtagacgcgcttacccctggttttccccgacggcgaaggggtngggaccatcaatgccctaggtgacaaggagactgggctgagggacaaggcaggaccatgcagtcttggccttgagagaccatttggctcctttttccaatccatcagttgcatcaaaatgaagattaccacattctatttaacagaggacgaggctgctgtggcctttttggaacagatgctggtttggttctacaaagatgaacggaaatcttctactggggatggaaaattaggtgttgctgaattctccccaaggatgctaagatctcaaggatgggctctgtgtccaagagaaaggggactcatcagagtagcacttacccttgccaattggcgtaagtggagaatcgcctgggtttataattcct

SEQ ID NO: 369997 - DNA, 324 bp, Zea mays
cacacagatcgatcggggatgaataggaggtggtgccgtctactcgccgccgcgagcgaggcgacgccgggcacgcgctgggctgccaacctgacctggcgggcccagacccacacgccgtcgttactactacccgaggcccgcgggccggcccgggaggagggaaagggagagggagaagggcgtcttcacccgtcgcgcctgcgtaggcgctgtcagggcgctgggccttcacccttggcggggcggtggcggcggccggtggcggcttggatcgactgcacctgtagggcctctttttgcgtacgcgggcccgactttacc

SEQ ID NO: 369998 - DNA, 243 bp, Zea mays
  unsure (1)..(243): unsure at all n locations
gcgtgggcggtcgcgtgggattngtaatgggtgcctccgcttnattgcctcgcggccacagtctgagccatgccgcgcgtgcgacgaccagagaaaccgctcttgagcgcgacgctgcagcaggcacaggcgaggtcccgctcatccagatcacaccagcccatcgacgacagcaacaccttcttgggcgccgccgccgcgacgcagtcctcgcacatgtttccggcgtccacgagctaggcg

SEQ ID NO: 369999 - DNA, 345 bp, Zea mays
  unsure (1)..(345): unsure at all n locations
gagccctgatggccaaccgtgcgactaataaacatgacgctggcatctcgctgatagaactngngaatggggacgcatgcctggggggtgatggcgtcgtccaggtgtagaggaagctccctgtgtacataaactcgaaacttggcggtgtgataaggcactgctgtggtaggactttgtgtgataatcatggagtggcgaatttctagagaatggcatgtactccagtgctacctggacattgaccagaaaaaatgtggtatctagttgccttctgtgtnaaaaaaaaaaaaaaaaaaaaaaactcaaaaaaaaaaaaattaaataatatttcaattaataaaa

SEQ ID NO: 370000 - DNA, 320 bp, Zea mays
  unsure (1)..(320): unsure at all n locations
ggattaaaaccaggaggaaacaaataaaatccacatagcattactctaaatnctaataaaatttgtagtatggagtggggatacatgtatggagaactttagatagataaccaaaagtatctactgaggattctactgagaattctgagtatactcaggagtcactagcgctcttacaaatatgaagactagattgagataatgacgatgctaaggaatactctttattactgcatttaccagagtatgaccataagattgaggaatttgcaaaagaagaaacccattacattacgggttccgtccaaaaaacacctaaa

SEQ ID NO: 370001 - DNA, 402 bp, Zea mays
  unsure (1)..(402): unsure at all n locations
cgcgcccancagcgaacgggggaaactttaagggggaaaccccgntttgccccgcaaacaagngntacaaaaggccagctgcccgagtgcaacgacgcgcgccgacggaaggctgcacgcacgcacaggctgggcggcggcggatgctcggcagagaccggccggggagcgagcaacgcacatcgcgacctgcgagtggcaagagaaggcgacggccggcggcatggggggagcagctgctggaggcggatgcgtcggcggagagcggggcgcggcgcgcgcgaaggaggcgacggcgcagggcgaggccgggagcgcgctcaacagcgcggagagcaacgaggcggaaccggcgctggacgcgctggacgaggagctgagcctggagaacaagccggagga

SEQ ID NO: 370002 - DNA, 356 bp, Zea mays
  unsure (1)..(356): unsure at all n locations
ccggcagggaacaaaaacgcggggggggagtaaaagagcgaagccgccgatgacccaccgcgagaaccgnaagaagaagacggaggggccccaagacgaccccgaacgtggcgacgctgaacagcagcatgcagaggatcaccgacgcgctgcacaagagcggcgccgagctgctggcgaccaacaacggcgtcgggggcgagaacgaggcggcgaaccaggcggcgcacctggcggacgcgcccaaggccgccagggcgcagacggacaagatgctgccggggcacaacgacagcgagcagggacacgccgcgctcgccaccagggtggtcaccagcgccggccaccgagtgcgc

SEQ ID NO: 370003 - DNA, 382 bp, Zea mays
acaaggggccgttttaagacaagcaccgcaagttccccgcaccgccgcagatgaacaccgtgcactccgcgctgcaagcggggctctccaagctcataatcttcttccagaccaaggggccggaggccgccgccgagatggggtggaaagactacttcatcagagtcgtgccaactgctctcgggacggccttggacataaacctgagcaacgcatctcttgtgttcatctcggtgacgcccgccactatgtgtaaaacagcctccccgatattccataagctataagcggatgcaaacaggccggagaacgctagcaacaagcctctaggaaacatagctgccaatcccactggagaacagatgacagtacccaaggagac

SEQ ID NO: 370004 - DNA, 444 bp, Zea mays
ccagcccgacagcagccgagcgggcacttttaaaggtcggacccggtttacccccccaagcacaagccctagcaagtagccagccacccgggcgtgaagaaatcagcccccagaccgtcacccatggccactgccgaggtccagaccccgaccgacgaggcgaccgaggaagcgccggcggaggagaccccggctccgcccgccgtcgcgcccgaggaggctgcccccgccgccgaggccaaggtggacgagccagctgccccggcggagaccgagccagccgccgccgctgagcccgaggcggcccccgcggcggcggaggaagagacgccaaaggaggaagagacggcaaaggaggcggagccggagccggagccggcggcggccgaagaggtgaaggaggaagcggcagcgcccgccgccgagacagaagcaaacccgcag

SEQ ID NO: 370005 - DNA, 245 bp, Zea mays
ggaaaaaggaggaagaaaccgccccaagagcaaacaaaaggggacatgccgaaagagaaacgcaccgagaaaaagaacacgagcaaaccggaggaaggcgccgggagcacaacgaaccacagagggcaacacaaaggaagagcggagacaaccaactgaggagacccgcgcggcccagacaaaggaagggacagaaagcgggaaggatccggaggcgacggcccagcccgcgaagggggaggagc

SEQ ID NO: 370006 - DNA, 396 bp, Zea mays
tcaagcagctggagctcgagtgctcggatagaggcgatgagctgtacgtgctcctctgcagctacgagaatataaaggactagaagcgcgcgctcctcaaacagctggagaagctggccgagatgctgcacgagccgccgcaggcgggcaagtactactgcggcaatgcggacgacgtgcgctcgggcggcgtcggcggcacgaaggaggaggaggagtccacagacgccgccgccggggccgcgctctactcgtccgagggcgctggcggaggcaggttcatcgcgcactcggcggacgacgactacatgggagcaaccctcttccggacgccgtggtcttcgcagccgaccggtggcttactcacgtcgtcggggccgccggagcaccaggcgc

SEQ ID NO: 370007 - DNA, 356 bp, Zea mays
  unsure (1)..(356): unsure at all n locations
cacacacacacgcanccngagacggggggagattagaagcgaggaccggcggtaaccaccgcaagcaagacgagaagagttctcaagcaggaggcgagcgacgccagcaaggacaccagtatcctcagcggagcggcggcgccagcaggaggccggcgagggngcccctctcctagaagatgatgactgacgcggactcgaattcggaagccctaggaggagcaggagcatacaaacaggaggaggagcggaggagaggagagccgaaagcgagcgcacaccaaggggcaaaacgaaggcaaagaaacaagcagaagaaacgccggggagggaacagcacccgaagagaagaaaaa

SEQ ID NO: 370008 - DNA, 573 bp, Zea mays
  unsure (1)..(573): unsure at all n locations
ccacgcgcggcttaaacctgnggagggggaccagagagagggggctatttggagagcgaccccgccgggccccaccaccccagcccggagaacgcgcgccccgcccgaggcagcagccgccgacgccgcgccggcgcaggcgccgccctcagacaccacacagctggcgacgagcaccacccctgcccaacctcgaaccgagccgccccaggcaggcgcgcgaacccgagcgccaccacacaccaactggacacccacgaccgctaacaaaccgagccggatcccgctgccgacggcgccgcacccgcagaacaagacgccacaaggcccgcgccggccgcggggcagcccagggcctacgcacacgagatgccgagcaagaacacgaacgaaccactgagggagagcagggattccgaccgggacaccgagaaccacacggccaaagggagcgcccggcacacgcccagcgagcagcagactagcgactactgggaaagggcggaactcagcgcacctgatgcacagagacagctgaagagtgcaataggggccagcagcaagaagaagccg

SEQ ID NO: 370009 - DNA, 480 bp, Zea mays
  unsure (1)..(480): unsure at all n locations
ccttgcacgcacacgcaaacgcaggggatccataaagggcgttacccctagttctcccgagagacagagaggatcgatctgctggcggcgtctaagctggagaaaggcggcgccaccgccgagggcgacgagataggcatcgacccagcggcggagactccggagcagcgcaacaagttcctggtcctccgcctgtacgaggcgctcaacgcccgggaccacgccgccgtgcagtcgctgctggcgcccgacctggagtggtggttccatggcccgcccaagcaccagcagcacatgatgcgcctnctgacaaccaccaccaccaccaccaccggcagcttccgcttcgtgccccgctccgtggacgccctcgccgcctcgtccggcaccgtgatcgccgagggccacgagaggggttgctactgggtgcacgcctggaccgcgggacccgatggggtgatcacccagcttcgtgagtac

SEQ ID NO: 370010 - DNA, 254 bp, Zea mays
  unsure (1)..(254): unsure at all n locations
caccgnccccggcgaagggggcccttaaagaagccggacccgtttttccccggaccgcagnctntaggacgaccgacaccacccctgcccagatcccccggaccccagcagaacgtagagcccgccaacagcgtctcccacccggcgccatccactcccgccgccacaaccgatgctacgaggcaggcggagcccctcgaggaggcggccatcgaggaggaggaggagggggaggaggaggactccgacccagg

SEQ ID NO: 370011 - DNA, 438 bp, Zea mays
gagaccaagcagaactacaacccggagcggcagggcaaggcagcagaagaacaacgagccccaaaaaagccccaaggtgcggaagacgaagaaccacccctacaacgacgccaacaccagggacaagcccgagcccgcggaagacaagagcccgcgggagacgctgcggcgggagatcgacgagagccagaacccggaagaaccaggcgggaagatgccacacgaaagccaaaaggacaacgcccagcaagccaagcccggaagcgagagaggacgcagagagaagggggccggacggagacgagagcgaaccaaagccgaaaagcggaacgaaacaaacaaaggcaaaacagcccacaagaaggaggaagagaggcccaacccgcggaaaaaagcatcagccgggggccaaatcaaaaaaaaagaaaggggggggga

SEQ ID NO: 370012 - DNA, 333 bp, Zea mays
ccacagggaaaagcaagaggagaaaaccgccgccggagccaaagacagcgacggcgagagagaggaggctgaagcagcggaggagcaacaaaggaaaacggggcggggccagccgcagggcaggggcatcagcaccaggcggggggcggtcgaagaaaagacaatgaggaaccatgaggaacgtgcagaacgacccgagacacaaggagacggcggagaagaacggcaaggacccggcggtcacagagaaggacgacaagcagcagaagacggggggacgagggaggcaacaggagaagaagcaagaggcgcgggaacaacggcaagagcagg

SEQ ID NO: 370013 - DNA, 512 bp, Zea mays
agaacggacgggggagaatattgaggggcaaacgcggtgacccccgggagaggctgaggagaagccaaactcccacccaaagcacaaaagcaacctatggacccccaggggaaggagctacaccaaacacagatcgcaagaggagaaaagctagcaccatagaagagaaaccaggaaggtcagagaaggaaccaggcgaggcggaaaacctgaagctattgcttcataaacccgacctgtcataccggcaccactggaaaggtggaaagactaacaaacttacgaggcatggccaggagaagggcacaattcagctgtgaagggctcacccacgaataacgagccggctcgcagcgacgaaagacagcaaattcgaaggctggcaagtctaacaagaaacaccagtacaatcaaaggcaagagaggaacccagaagctacatgactgaaaaaagaacgcctggaacagacaaaaaatggaacccgaaggaggaaaaaaaaaaaaccgaaagc

SEQ ID NO: 370014 - DNA, 405 bp, Zea mays
  unsure (1)..(405): unsure at all n locations
ctagccccaaccccgaccgnccaagaccgccgcggcgccgaaccccgaagaggaagaaaaccacgaggaggacaacccagncgccaagcgccgggccaaggaggccgagcgccnccgccagcnccgccncnccaagacggcgccggccccngccgncncaacacacccgaggccaccncccccgccacnnaggccagcgcagaccnccgnncccgacgccgccgcgaagcccagccnncncgncaaggccacgcagcnnaagcgcgcggccccggaggggaccgccacggagcagcgcaaccagcaggagaaggaagnganngaaaancncncagacaacaaaacgcncaagncagnccgcgagagcgccaagggcancaacnacacggaaccganccagaccgg

SEQ ID NO: 370015 - DNA, 427 bp, Zea mays
  unsure (1)..(427): unsure at all n locations
gcaacgcgccgctcccaagggaggtttttgggangaccctggccgttcccccggcctccgacgcacagacggagcaggcgcccgccgccgccggtgcttccaatgaccctgcggaggacgccacggtcgagaagcccctcgcggcgccgcccacgccgaagctggacgccgctgcggcggcggatgggtcagcgtatgaggtggaggatgatgagtacgtgagcgatcccaacgatgagccgattcctacgatgcgtcgtcgagaggccagcgacgacgaggggtccgaggacgggaggcccagggcgcggatcggccctgaccaggacgacgacggccagggggcccccgaggcgtacgacgactaggtggacgaggaggatgaggagtactacgacgaggaagaggaggacctgggagagggatt

SEQ ID NO: 370016 - DNA, 365 bp, Zea mays
aacgaccaacacaacggggaccttaaagggcaggacccccggcacaccacgacgccaacgattgaaaatgactggcccacccccccggccaacaaacaacacgcagcaaagggaccggaacgaccctctccaagcaaaggatgatggaccccagaaggaggagagcggcccggaaagcaactaggaggacagcacgtggactaccccgtcagagagaggtcgaagaagaattaagcagaagccacgagcccacaaatttatccaaaaaaagaccccctgcagacagaaacaaggggagaaggggaaaaaaaagaacatgtaaaaaaaaaaaaacaaaacaaaaaacacaaaccaaagaggggcgg

SEQ ID NO: 370017 - DNA, 284 bp, Zea mays
acgctgccgtgttcgcgattcagcgccgtgctcgacgcccctcctctcctcagaagtcagcgccgcatctccggttgcagagacttgcgctgccacatctccgcttttcgaccttcagttgctcgacgcccctcctcccctcagaagtcagcgcagcgtctccactctccacgccggcgcgtcggcgacgcgggtccttcgaataatacggtttgttctcgcatcgggcgtcagccggattcgagggacatagatgatggaagtcgatcttgggtgccaccacg

SEQ ID NO: 370018 - DNA, 193 bp, Zea mays
tcctttttttttttttttttttttttttatttcctgaggggggtgttttcattacgtgggtggcatttacaaccactgcatctcaagcttcaaagtggtcctccaggttttgatgctgctgcggggctgcccttgctttcgttgaggcaaccaacatatatgattctgtggactactccgagtaataaacatg

SEQ ID NO: 370019 - DNA, 425 bp, Zea mays
tgggttgatctgctgctgcagaggttgctcgatattgtgcttcgaagtgggcgattgagggcttgacacgctcgttggctaaagagctacctcctggattggcagccattgctcttagccctggtgttgtgaatactgacatgcttaattcatgctttggaagctctggcgcattatatcaaacaactgaaacatggtaaacttcattgccttgtgtttgtttgacctatttaccttatgttgttttactgcacatatagattataaacacagcatcccgctatggcgctattaactgttcattggctcagctggaaataaaatctaaaccaacggacactcagggatgggacactatgattacataactaatgctaacactttagcatggtcaaataacacataaatcaccttactgaatcatc

SEQ ID NO: 370020 - DNA, 184 bp, Zea mays
caacgcaaccgaggtgtatttatttcaacatccacgttttacaaaaatgacagtttcacatcgttgtttaaaaatgcaatgactcccgaataccagtacaactcctggtttcaccctttacaaaaatccttctgtttttgctaaaagaactagcattatatctgaacagccagcattgcaggca

SEQ ID NO: 370021 - DNA, 418 bp, Zea mays
ttccacgcgtccggctcggcatgccccccggctccgtcgcgcgtctcgtctccgcgtaccccgcggtcctttcctcggtcacactcggcgctaagttgaacttctacctccgcgagctcggcctctcctccgccgagttgcgccgcttcctcctcgcgagcccccaccgcttcctcctcgcggggatcgagactcgcctgcgccccaacctcagcctcctcaaggaccttctcggcaccgaagagaacgtgctcgccgccgtcaagcagtccatggagctcatctacgacaacctcgagatcgtcctgcttcccaagctccaggtgctccgcgaacacggcgtcactgaggaggttctcgtcaagctcctcaccacccaccccagggctcttgtgcacaggtctacccgctttgatga

SEQ ID NO: 370022 - DNA, 308 bp, Zea mays
  unsure (1)..(308): unsure at all n locations
cgataaactcgctggtataatgtatatcttatacagagtgaaaagtcaaacccaaatactagtcacacacgtatacggtatatgaattaccatgcaagctaagggaaccaaaagtaacttgagatagtaagtatgcttagatcacctaggctgccgcgacactgacgccagcgataccgtacgacacaaagacgaaccaaatgtgatcacagcagctaaccagtgctttcgtcatgctctgaaagctgaagcaccccataaagctagcttactatagacagntacgtactgctacgggcacacaggac

SEQ ID NO: 370023 - DNA, 309 bp, Zea mays
aattgaggagcacttcatgggatgggacccattcatcgatgggattcatcaattagaccaaagtagaggcaactcaacaccatactacgattatacatcacactcatatattgactaaactcatatattgctactagaaatgaagagttgccaatagtttatattggctcactatagataatagctgtcttcggatattgtccatcgggcccctgacatagtagtcgacggcctgctgcagaggtagacccttgtactccataacagtgggcacgtcccacttgagcgtgcacgacacggggcatacgc

SEQ ID NO: 370024 - DNA, 302 bp, Zea mays
acgcgtacgcctcctcctcccttggcgcggcggccgctccgctgcgtgggctgagccgctgccaggctagcaagcggtgcagcgacgcgcctggtcctgatgctccaccacgctgcagtccacagactgcccggtcacttagtgttgcggccgagaggggcagattgcctggcccatgattgctattcaccttagctaaccttgtttgtagcttgggtccgtcggttggcgcctcgtcggctgcctctcgctgcttggcccgtatgttcctggggtcgcgggcctggagtacacaagtatat

SEQ ID NO: 370025 - DNA, 317 bp, Zea mays
gttgttaccaaaagcgccaacggggtcaactacttcagaatctaccttgaaacttaggatgcatagctactggaaggggaaactatgaactagtagcatttttccaagaccggttgataatacaaggcgatccaaaaaaaaatcaccaaatgcagtttggtgcttaaatgaagggctacgctgagttgccaagcatgggaaccaactccaccataacaaaggggcagctgctgctcaaatgcttaaaggcgtcgctggaggcgactgcccttaaatttgcaggagatctgagaaaatggaggcacaccttttttaat

SEQ ID NO: 370026 - DNA, 247 bp, Zea mays
gagggaaaaattgcaaccctggtgtttttggaaatataaacagcccgttggccaaacccgggtttgggtacaaaacgcatcccgctttagcatggtaaaatggaaaccctggacagttaaaaccttggaaaaaaaaaaaaggtacttggtacccttaaaccactcggacatttttttactggaattgggggggaaaaattaggggagcccctatttttgaacccgaatttggacccttggtttttgg

SEQ ID NO: 370027 - DNA, 337 bp, Zea mays
gaacctgtaaagagtttggcacatattttctttgaaacgcaatgtcaaatggcccaacaaactgctgctgtccctaaaagagctaacaattttaaatctttaccaatccccctagctatgacctaaacatatttacgacactagagggagggtaaaaattgtagcgatttgaacagtatgccatattgcccgcgctacctgacactcgaagaaaagatgcttatgccttaaccatctgtaaaaaaaaggcactgtgctctgataactcattttgtactggggatttctgggatcaaacattttccttgtatgaattctagtggacgcactctatatt

SEQ ID NO: 370028 - DNA, 424 bp, Zea mays
tgaattcacaaactgacgaagtaatggaagataaggatgagaaaagtaaagctgaggaagtaattgaggaagaaaaggctacaagggtgcaaatcggaggtggaggctaagggtgcaaagcggccgagcgcgccgttcgagcgcacctggtcgattgacgatgacttccgcatcctagaggccctcgctgcgcttttaagtcaattggtgatcctggaggccctcgcggcgcgctaccggcgacggccgacgggggatacgatgacatcgtccccctcgacccctcctccatccccgacgcggcggcgccagcctacagccaatacccaataggccaataggccaataccggttcatctctacaggtactggactagagtcgaatgctaggcggctgctagctgctaggtaactctgtactata

SEQ ID NO: 370029 - DNA, 251 bp, Zea mays
aaggcggattggtttatttcatcgggttaaaaaaaaattgtgagcaattcatgatcgaacaattaccgggttttttccgacgggcattaccaacttttaaaaacaaacaaaatggatgcttatggtccccataatacaaccaagcgaaagctcctttgctcgacagattcataatggtgctgtcgccgggccggagagctcaggcaagccccacgagctttttgctgatctcccaaagctttttggccttt

SEQ ID NO: 370030 - DNA, 284 bp, Zea mays
atcccaacaaagcccacgattaacacttgggtcgaattcaaaagcaatctaggggtacaaatttaacaagaaccaggtcatgttttggcaggtttaagggcccaaaggcaatacttgaaacgggaacggtatgctcctccctttacaaggggatcaggaggggggggtccaagggaaacccaaaacacgggcaaaattttagactgggtcctatagaattggagttggacccacccgcatgggcaaaacatggtgggccccttagcattttccagcatttttgg

SEQ ID NO: 370031 - DNA, 341 bp, Zea mays
ggggtggcccaacccataaaacgccacatgccttttggcaacattaaggttatagtagtcaggagtaaatgatgggagttggcccagctttagcaaagccaggttccggattgtttaataacccagaggggaaattcccctgccatccctgaagggggggaaaggtatcgacgatacatgggtttcccacacgttttttgccataggacgcgaaccaccttggatcacttcacattatttacatacatacctgggggagggtcccaaagacctttttttttttatggctacattgacagacaaaaggtttgcctacccaaccccagaaaaaatttaaaccg

SEQ ID NO: 370032 - DNA, 175 bp, Zea mays
ttcctttcgtcctcccacgcgtgcggtacgcacctggacccgtccaccaaggcgctgactcccctaggccccgacctgcgcacccacgagatccctacctatacggtcgctagcattctccctgcccgtcccgagttggatagctcgcgcacttgacagaggggcagccggatat

SEQ ID NO: 370033 - DNA, 307 bp, Zea mays
  unsure (1)..(307): unsure at all n locations
aaaaaaaaaacaaaccgggcttccgggtgggtaataacaaccccagtttttaataacaacccgggtttttggacatagcaaggccttttttccttaacaaaggaccaccttggttttaattcccacttaacctccagaatagccctaattccgggccctaataattaaggggggggtttaactaacgaagggggcaagcaaacttatttgatttgtcaagggggggggggggaactgccttgccaatccaggatttttcactagatttgcnaggaaaagggccttgggggggtaataaaaaccggga

SEQ ID NO: 370034 - DNA, 293 bp, Zea mays
ttgcggcggcgcatgcgcaggcgagcggacggcagtcgcgcgggcagcatggggcggccgtccgtccaggcgcaggcgagcgaccgtatgttcagcgcaggctagcggacatacgtacagcgaactgcgagcaggcgtccgtgcaggcttccatgcagacgagcggtagaacatttatacggacaacacattccaagaatccaaaatggagagtgaaggagctggtgagcactctagtgaacacgctgatggtagtgggcatgttgcgcggacgtctgcaatgtccgcttaca

SEQ ID NO: 370035 - DNA, 404 bp, Zea mays
gaaagcatggtccgcgggcagccgccggggcgtgaaccggggggacccacgcgtcttcttcgcgtccgcccacgcgtccgcccacgcgggggagcagcacacgctctgctacgcgtgcgatgtgtcattcccattgataactgggggagctcaaggccccctccgttttactataagagcccatagcctcctccactcacagagccacaagctggaccaccgacccaggtcgctcgtgccaactgaggaggtcgagcacctagtaacgacctgctctatcatcaacgtagagagctggccggtgtacgtctatattggtggctggttgcatggggcatggtgacctcgtctggacaggatgcctagatgctgctgagcctgggcgtgcttgacacgtgttactt

SEQ ID NO: 370036 - DNA, 272 bp, Zea mays
gggggggcagaccattgatttggagaaaaaaaagaagcagcagcagcaggagatgaacccataactcacagcacaacaacaaacctgggctcagtcatagctgccaaaaggggattcaaacaatgcaagcttgatttttagcagttaaagcccaacccaaatggccaaaccgttgcaccgggccgccagcaagtaccgactacattttttgcccaggggtacctgatgaccaagaacgcaggttcccttccagaacacttcttttatttttt

SEQ ID NO: 370037 - DNA, 292 bp, Zea mays
ttcttttttttttttttttttttttttttctttctttttttttttttacaaaatactactggtgttgggggggggcaccacaacatggatgaaggggatacatcaacttggttttcccaatttaattcgacgaatggggaataactactgccattcacaggggggaagaaacaagttaaccttaaaaatgtttgaaggactgttttaacaaactccttgatagtttgaaggactgggctttttcccatacccaaaccttgatttagaaaaattggtggacctccataagcca

SEQ ID NO: 370038 - DNA, 442 bp, Zea mays
agagctatacacactgtcttccttggtctggtgaccgcacccatagattctcttacctcaccatggccaagtcatctggagcagttgtgcatctggggccatgccaccgtggtctggcgctacggacagcctccacgccggccgagcgactcacgctttctccggccgtcttcacgcgagcaccaaagtcttggtgagtccctggtgctccctgtgtctcaaatttaaactctactatatggtggccacgagttcgggctcgctagcctaaggctgtctccaatagtggagtctcaaacaggagacccatacgccgtatgcgtcttaatgggtctgctgaaatggggaaccaaattgttggttctccaacagaccatctaaaatgggcctccatcaaccgttttagcaagaaaaggcgggaagcaatcatcccaatcttcag

SEQ ID NO: 370039 - DNA, 417 bp, Zea mays
aagtcagcaaaatgaaactaatcaactatcaatggtgacatgaaacaacaggccatacaagtagatccactaccaaattctaaagtttgtctttcaaacagaaatgtaactatgcatagtctaagtggaccaatggtgtcgtggttttgaatcaacctaagcatataacaggccgggtcaggcttggaatgtcatatgcaaggcactctcagcacagcagtttggagaaaacttctaggtccagcttcccctgatgtgcagcaggagccacatcccttgccaaccttccgaccacacgctcaatgtacaccacatagagcccattcatgttttccaggatttgcaaatcattgcgtgccttgagaatagatctggtacattcttcaaaaagtcttttgttaatatgctcacagcata

SEQ ID NO: 370040 - DNA, 562 bp, Zea mays
  unsure (1)..(562): unsure at all n locations
tgtcctcggacgcgtggggacgacacaattcatccgcacctaggaaggagaagccgaggcgatggagtcggagaggacatgctgttccagtgagtacttgctgaggatcttgaggaaggacaccttccaacgagtgtagaaggtggagctgacatcgaggacgagtgggacgagggaacacatgttctggacggcgacaacctgcgtgtggaggttgagagtggagccctcctgctgaagcagcgcgtcggtaagggagagtccgccgacattagaggcagtgtcgccggtggcgccatggggagggagatccttgacctgaagtggtgcaactttcacaggctgcgcgttcctaagcagcacgaaggcgcgtggaagccacctcaatcttcttttggaccgtaacggcttcacggtcggcctcaagcacacgctaaggcggcattgcgggctgcttgatctgcgcgcacgtgttnctcgatgaggcgatggccattagcagcacccgccatagtagagaagacgttggggcnacatcgtcgacatatatggaggacatgac

SEQ ID NO: 370041 - DNA, 237 bp, Zea mays
aataatggtacagtacagcttgaatgttcagagagagagtccagacttgagacacacacaaacacagaactactactgcactacgttggctactgcatgctagtgcctgttatatatgggacaaggagtatatgctgtatttataatgctgctaggacggccggggataatcgatcggatatacatataatgtctagctattgtacacgcatctcgcatggacgagaacaaaaggga

SEQ ID NO: 370042 - DNA, 256 bp, Zea mays
acttcgtcggcgttgctgttagggagctttcatccgagcgcgcctacaaccagagctagcatcacaagcgcacgatatcttggagagcctgatccttacgtgtacccaagtccgcagactagatgcctcctatggaggggatcactgatcagatcgccggctgttgcttcgctcaggagccgactgccgagcgggccgtgggcttgccgcggaccatatctgtcagacgcctcaacacgcaggcactggagatcgt

SEQ ID NO: 370043 - DNA, 331 bp, Zea mays
ttcttatcgcgtccggtaaaaacgaaaaaaggtcccgggccgtgaccgagagccgcggtccagagcggtgggcggccggcaaggacgaaacggtccaacgccaccacctacaccacctagtgctctatcgacacctcccccgttgacgacccgtgactacacgtccagccgttcaggcccaggtgtccccgcgacccagacgaccacgtccgcctcggtctgcgcctgcccgctacaagagtccgtccgcccgccagctctgaggtgccagcgagcccctctctactgcactctgtgcggtgcggagatcccgtactttctctgtgccccc

SEQ ID NO: 370044 - DNA, 341 bp, Zea mays
atgccgaggaagcactcaaaaccttgtgtctaccagaagcatacgcagacattgtgctggagctaccccatgctttgaagaggattttatcctctcgggacagtgactaaatcgtgacctcaagatgtccagttttgttgtgcataagattcacatctcaatcgtggggcatgtttttgaagatattgttcagaatcttgtggtagtatagcctgcagttgtggactgcaattcctgtgaaagcaaggcagacatttgcgtgggccgctcgaaatattccggctacagttcctgttaaaagaatcaaaatcctaggaaggccttatggtcgaggcataatc

SEQ ID NO: 370045 - DNA, 296 bp, Zea mays
aaagatacagggggcacaatatcaaataaaaaacatgctcagagaattacactatgaataccacagttgttttataactggagacattgaaaaacctttgttactgcctactggtcggtataacaaagaaaagggaattaaatccaagatgcaccaaaattattccgatgtgacaagtcttcggggcacacaaaaatcttacatttaagccggttcctagctaagatcaaggaaataaacaatcttatccaaagaagcaccggggggctttaaacccttgaacaaacattttgtta

SEQ ID NO: 370046 - DNA, 219 bp, Zea mays
gaatgtaaacaatatttataacgggatgttgaatagtatgtgcggtataatatacacatatgtgcgagtgttgtacttcaacgctaaatgaaatacgccagacacgcacttccctgtatcataataaactcgccaagctgcttgcgttgaatgttacatccgaacaaagcgtcagctgctcagcagaggttaaaacgtagacgtcttgaagtgtgaaac

SEQ ID NO: 370047 - DNA, 261 bp, Zea mays
tgcttcttcgcgtccggccacccattcttccacgggtgggacatcagggctgtggggggggtacacaccatactcccaatatgtacacacaataataccttctccaacaagtgtctccaacccttcatcacagatctaatggtattagcctgggtttcgaccctgatgaactaactatctttttagttgggacaaatagacaggacattacggggccataattagggtcacgcgaaaggggaggtgacagcactttgaaag

SEQ ID NO: 370048 - DNA, 308 bp, Zea mays
aaaacagtaaaacggggtttttatagggttatttccttattacccaagtttgcaagcttgggaaaaatttttttccaacggcccccacagttgggtcgcaggggaccccagacgttaaaaaacagcccccaaaacggaaaagggtgtttctcatgagacgcaaaaaatcgtttttaaaccccaaacatttggctgaacttgggggggaggggaacaaatcccatgggaactcccaacgggacccccaatttaccatgggagattgaaaaagccccccttaactggggcttcttaaaaggaaggggggg

SEQ ID NO: 370049 - DNA, 195 bp, Zea mays
agcttccctttgagacgtgggctcatgctattatggggagggctaattaagcacacggggggacacacaaagatgctaatagcgaggataaaaattccgctaagaaacttaatggaaaccatctgcctgcattggctgctgtgagtggtaacaagaaaacaacagggtcatacatggaatattacatgggacaag

SEQ ID NO: 370050 - DNA, 186 bp, Zea mays
ttgctctctggactaaaagcagatacaccgggggggtttccttggagcaccggggggatactctacacacgatcttagaaatacgtggacagggcatggccgctaatggaaaatattatcataccctagcgccagtgcaccagcaaagtgtttgtggggcacccactggaagggagccgctggatg

SEQ ID NO: 370051 - DNA, 220 bp, Zea mays
aaaaaaaacaagcccctgtcccttgtttaacccccataggggttttcaaagggccgaactggcaaaatttttagggcaaaacaaaaaaaaatgggtggaaaaaggggaccccccctttttaaccacctaaggggccttttccaattaattttgaaaaaaccaacaccccagcaacggggaccctcccaggaagggtgaaaaacccaaaacttttttcaaa

SEQ ID NO: 370052 - DNA, 232 bp, Zea mays
cggaaagaccggcctgacccacccaccctccctcgcacacgaccacccacacaaccagggggggggtaaaaagaaaagcgggggggaccccaaaccagccgggaaacaacaggggagaggccccacaagcacccgaaccaggaacagagaccgaacccaagcggcggccaagggccgggacaacgacgacaacccccgaagaacgcccacaggacccacggcgaggaacccg

SEQ ID NO: 370053 - DNA, 285 bp, Zea mays
agggccaaattaagtgcgatcgtgtacaacaacaaaacatgcttactttataacaacacaaggacacaatcatgcatgtccaaattaagggagaatcatatacaacaaacatcgctacaaattgacaagatagcagccgcctggctccacaactctttaactatgattgatttatgaggacgaacattgaggggaaccccagttactggaaagaggatcttggaaatgatgtcatgtaccttccaacgatgttggcaacgggaagaggcccccaggcacgagaat

SEQ ID NO: 370054 - DNA, 211 bp, Zea mays
ggacaggggcataccgggattcacgataaagttttttaccatgaagggatccatcgacggtttgtttaatccacaggggggtatcgttctcaccataaatggaccatcatcccgtacaggaaatggtgattaacatgcaaaggaaacacgtccaagagaaagggaaccaaccaacaccaagcaaaaacctggtgggggttttatttcatga

SEQ ID NO: 370055 - DNA, 275 bp, Zea mays
cattattggggggttttatacaatatggggggggtcactaaaacttatcttgaccaaggtaaaaccgaaggccggcattttaaatgatccaatcttccattcccggtgccgcaagtcaaaaccttatctatgtggtcacctaaaaagaatctgaggggggggttttaacaaccaccgcagtgggaaacccctggggtcccccaactgaattgctttagggcgaatacccctttccccaggtggggataaagccaaatagcccccctcaaaccccc

SEQ ID NO: 370056 - DNA, 551 bp, Zea mays
cccggactgaattggtggacccacccagcgtttcttgctgcccgattgatgtgctcaggaggatgggaaatatgcctttgagccggttttcatactagcagaccctggggctgccgatcttaatgctttaatggaaccatcaaaatctggagcagatgcatctggcagcagggtatatggctcaattataggaagtaactctgatagtggagtgagccctctactcgacgtatctgagagtgacagagcagcaagtcttcattgctgatatggttggactgaggactggcgatggctagagtgcatttggacagatgctagaggagaattattggacagcttaatatttccttttggtggtattagtagccgccaagacactaaagttctccaaagccttattatccaaattctacagcaaggctgtcaaataatgtcgtcttcacctgaggctagcaatatgagaccacgagatgtcataataactcggatcggagggttccttgagcttgaaatccaataatggcagaaagcaatatactcttatggtg

SEQ ID NO: 370057 - DNA, 413 bp, Zea mays
ctctagtcgcagttcagcgagaagagaaagagagggagatcttgccgatagctagcctcatggcgttcaaggtgctactggtggttgagcttctgttcgtcggcacctttctcggcgtctccgctaacgagcaagccaaggtggccaatgaggataatcaccgctacgtgcaagactggcactgcaggtggtggatgctacccgggctgcggcggcggctggcacggaggtggatgtagctacccgcactgacgcaggagctgatgcaccctgtgctaccatagactgtgactgtgctgcatccaccctgatctgataccatagcccatgtaccatgccgagctcgtcggtggcacagctaagcagctcaataactggctgcgctgctacacatgtatacttacgtctgcccg

SEQ ID NO: 370058 - DNA, 419 bp, Zea mays
attctgtctgcggtaaacatgctaggcgcgacaaggtggggctacccaacctacagtggggggcatgccttcagcctgtacgcatggataacgctagaagacgagttcgagctgcggatcgagcacgcgctggtatgaggcggcttccctgacaaccccaagcgcaggacacgctggagcccattcaaactgcctcaaaaagcaattaaaagctgacgaagatccacatgaggatgcagtacccattacacagagaggggtgtaggcgactacagcattggagagaaggctatggtgcagggctacatgaatgtaaataaactgtccaacaatctgtccggatggacaagtgatctttgttccaaaggagacagtatgggcagaggaaacactccttgaataggtttaacacatcccac

SEQ ID NO: 370059 - DNA, 343 bp, Zea mays
tgttggccgtaactcactcgtggcctgcacgcgggcgttactacccgtcaggggggagcattgccgccgcctgcgccagggggcgtaggagaggccacggcggtcagggacctggaccagactccacaggttaagagagcctccgccaggatgttctggcgggacccctggggcgggcctctggagatcttcaacgccgactgggtgacagatgacgaccggagccgggacctggaccggacggctctgatactgcagctggacgagacgcatcagagctggctcctggccggacccggcgaccaggtgtgcaagaagaagaagaggtacttcgacctgggct

SEQ ID NO: 370060 - DNA, 160 bp, Zea mays
tgttttacctaacataaaccacacaatactgatgggacatattaaacgcctgcggtggtaccgctctgaccatgaatccctgtttttagttcaattagaactcacagacctgctgaggattatgctctgttttaggaagctttcacgacaaccacctgcc

SEQ ID NO: 370061 - DNA, 246 bp, Zea mays
ttgtttgtcataacatagctgagaccatcatgaaggcgctatttaaactgcagagggggtacagatatgcaacagacctgacgtcgtggatgtctgggatgcaactgctgcagagccaaaatctcccttgtatttagaggcttcccaaatacactacctgtcccctactttggtgtgcaaagggccaacttcaacaacggaagagaggtatgtgaaaacagcctttccagcttgctgacttcattg

SEQ ID NO: 370062 - DNA, 338 bp, Zea mays
tgtttcgcgtacgcttggacgggccatccgaggagcagctcggcggcggccatggggacggctcaacaagctagcctcccctgctcctctgacacaacatggagagagcgtacgaacacgagctggtgactgagtgtgtgtgagactgtacctgtatgtccacgagctgcgtgtgctcggctcaattctcatggatgtgtgcattgcacgagggacaactactacaggcggatggagatggcagtacctgatcgaggcggtgtacctgttggagctcgctctgtaatagcacctccaccccaaggtatgagaccagcagaggaagaagctcgttcact

SEQ ID NO: 370063 - DNA, 280 bp, Zea mays
ttggctctcctgacagagaccagactatacgggtggggcatatgtgacgctggcgggggcaccgcacgaaccgaccatcaactagctaggtgcatgcattgctggctcactcgctcagctatctgcaccgctatcggatgctgttaagatgaccacgcgccctgctctctggactctgataccagttgacagcagcagcagcagctggctataagttagcaccagcggagcggcgttaacatctgcaggaggatggtgaagagcactacgaccatggggg

SEQ ID NO: 370064 - DNA, 252 bp, Zea mays
tcttttctcttcacagacctgatcccatacgggatgggcaacttcgacggcggcgcgggggtggcacagagcaagaccgccgtgctcgagtgtaccacgcgcacgctccgtaccgacatgttgtgctgggtctaccgctccatacacgcccgcctgctgcccatcctcgtcgacgcgcacgtcgtggacctgcaggacctcctgctgcgtctcaccttggacaacatctagtggctcaccttctggaaggac

SEQ ID NO: 370065 - DNA, 362 bp, Zea mays
tttctctcaaaacacaaaactatacaccaggccaggtttaattaatctccggagcgggcacagactcaaactagaacccaaatcccccttaaatcttcatcatgctccttaagcacgtactgacacataaaaactggtccttacacaaaacgcatgtctaataaagccatacacaaaaaacttgactacttaactaaatctatcttgttaacatatggaccaagtttaatctctcacattctagcttgaaaacttacatgatatcacttagctttatctatcttattataagatcatggcactcccatcaacaattggtaaccttatatactttacaaaactcgacctccactcaaaccaca

SEQ ID NO: 370066 - DNA, 184 bp, Zea mays
tttttctcattggaatacactagccacccaggggggactactaagtctcctgggggggcgcatcaccaacacatacaccagagctccttagaatgctcatccttcacgctaagaacgtcctaatgactactaactgtgtgtcacatgctaccattaactctacatgctatatagtaaaagcctc

SEQ ID NO: 370067 - DNA, 268 bp, Zea mays
atacgttcgctgacacgaggggagcaggtgggggtcctattcacgacctgttcgatcatcaacgccgagcgcccataggcgtgagtcccatctggtggcttgtttagaacggtcatgtggatgtctgccagacgcgaggcatcagttctgctgtgcatcggcgcggcggtgtagggacacatcacagcaagcaggttggaccagcagctagacataacaaggggcgacggtcgggccaaggatcctgacaacgggcggctgatgactc

SEQ ID NO: 370068 - DNA, 474 bp, Zea mays
  unsure (1)..(474): unsure at all n locations
ttattctacataagagaggacgcggacgcatcttcttcttccctcccggaacctgagggcaagggcgttgccgcccagccgtgccacccacgatcgggtgcgtagccatggccgtcgaagcgcatcgcctcctcttggcaggaggacacaggcagcagcaacagcagcagcagctcgccagcgcggggtggccttgggccggcgccgacgaagataggtgcgcgacgacggcgagaccgagccaacatcatcaccatcaacaacaacagcagcaacagcaggagttgaggctccacaacgcctcgtgcgtgggcgtgctggctccacgggtctcgatgaccgctgccggcggacagatgttcctgggcgacgcggcggagagcgacgtcacgttccgaggaggaggagctgcngcgcggcaggaggtgacngcagtggcgccggcgcccaaagaggcgaagcgcgccgagcagc

SEQ ID NO: 370069 - DNA, 272 bp, Zea mays
accacgcttccttcacacgtgcgatcgaagatgcttaccaagaagctgttgcattgaaacggcttcaggagcttattcatgaggaggaggatgaggctcatctggttaaacatcatatgaaggggaagcgtagtggtagtgtcaatgaaaaggacaagcatgccacgaaaaagcagacgaagcgaaagaataaccacaaggctagagacgaggcaagcgaggagaaaagccaggataaaattcctgaaaggcctcccgatgaaactggcatt

SEQ ID NO: 370070 - DNA, 251 bp, Zea mays
atacacccgcggcgacaccgcgccagaggggggggataataaaaaagaaccgccgatgcccccggctgacccaaaggagaaggggtccaagcaaaaagcgaaaccaagggcccggggggaacacgaatggctaaggaggaaccaacgacaaaagaaaaactgaagggccccctcccgaaacgctgaaagaacaaacgaagcgagaaaccatacggggggagaccaacaaaaaaacggggcccacccaccgg

SEQ ID NO: 370071 - DNA, 370 bp, Zea mays
tttaatcttccaaacactataccgagacctaaaattgtctcgacggatactcctgatctgacacgcgatccatgggatcgccccaatggacgacgaggccaagttggagtggtgaagaggagtaccagagcgacctcaacgacgcacccttctgcgcgttggggcgccgggacgctgctagcgatgaccaggacgaggatgaggacggagggatgcccttgaggcaatggaaggatggatccgacgcacattccgacgggcagggcgccacccaggggtaccacgaggatggcgcgtacgatgaaagcgaggagtaccaggactgcgcgtgcggcggggccaaaggacggggcggaggaacgcgccaggc

SEQ ID NO: 370072 - DNA, 416 bp, Zea mays
  unsure (1)..(416): unsure at all n locations
ttgattcgctggcccaaggagaacccagtgggccccgctgcgccctcttgcgcgctcgctctacatgatcgaggacctgaccagttctcgttcgccgcaccagaagngccgcgaaccgcttctcccgaggcgacaaccggaggaaccggaaaaaggaccctccgccgaactgggatcatgatcgccgcaccctgcccatcccgccgggcctcccgccgctccacaccggccgagagggtaggccagttgtttctccaggttcgactaaaagagttggacctattgttagaccgactacacccaaatcctctgtccccactatcagtgcatttgatagaattgaagattcagatgacgaggaggatcttgtcccagatgccaagaatgatactgcttacttgaccccaaatggtgct

SEQ ID NO: 370073 - DNA, 307 bp, Zea mays
ttcttatgtgcgggtggaggactacaggctgcacagcttgcgtgcgagttcttccgggccaccgcgcgacggcccacctgcgaggctggccgtctcgacaggctgtgggaccacacaagttctaaggccgcgcccggacaccgggctcggacctgtccgcaagccctctgttcgtgccgacgccggcaagatcagggatccggccggggacgctgaggacgttgagccgcccttgccggattgtgatggctaggagacgccggccacggtgacgcgcaggatgatggtcaagcgccccggggggaac

SEQ ID NO: 370074 - DNA, 279 bp, Zea mays
tccacacctacgcaaacaccacgacgggcccgaatgatttacagaagcttcctaccccctaacggaacagatctcaacctcatcaaggtccaagaggcaccaccaactcgttgtcctcccaccaagacactggaccaaaacccaactactgatatacaacggggtacccaatgaacattcctgagcacaaaaccaaaacatactatgtcccacactggaccaaataaaggacactcaactcaaggacctcctccatgtgcatcacgcacaagatccaga

SEQ ID NO: 370075 - DNA, 401 bp, Zea mays
tcctttctatcggatgcagctgaaaaaccacgggggatgtgctggacatgtgagactgatgcacaattgcttccggaggcacgaagacgttgagcgaacttaacaccggatgcacctactgtgggggcaattggggcaagaagtacacacatacagatcgagagatctatatgaagggacaggctgcctgcatgcctataactatgcacgatataggggtagaacagacgaatgggtatactcaccaggctggctccctcagaaaggtcattatgaccaagaaaaaggtgatcgaactgcagcaccggaaaatagagcaaaaggcacacagcacaataaaaagatcctagcatcttgagatgggtggagacacgcttggccagagaacaactcttatgtat

SEQ ID NO: 370076 - DNA, 204 bp, Zea mays
ttagataccatagccactgccctgcgggcctcaggcgtttgtttcaaaaccactggcattggcggggggccctgtttcaactgttgccccagatatcaaaggaagccgggccatactacaggcggggggggtaacctattcattgaatttcgagggccgtaagcgctctttaccgggcagtatttgagcccccctttacttctg

SEQ ID NO: 370077 - DNA, 412 bp, Zea mays
tccttttcctggatcctaccgagctgatttagaagctctactacttgcgcctatggaaacaggtcttgggtgtggtgaacaagatgcccatcttgcgacatatttccttactagcgcattctatggatggtttgttcggtagatatgatatcgtcatactccactcaggatgattggcaacaaagaatgcccgacacagtagtgcacttactgctgctacaagaagagggccagcaaaatgaacatgtgctttatgattaggttgtattgctttattgcagccaattcattttattaccttatcctgcccactcctagaggctagagggagaaatgaggcgcgtcaccaaaatgcttcggattcacgcggcataatatactgagcattattcagctaaggctcaattgctgg

SEQ ID NO: 370078 - DNA, 338 bp, Zea mays
gcgtatgttaccatcgccactgccctgtgggacagaggtgcttgtttttataaacatcagggctggcagggccagcaccctcaattgctcacgatcttctaccgacgcaaaacaacttactgctggtgtgacggaccatccacccaagatagcgctccaccagctaatgaaacacagtacatcaactgtgccgatcgtaggctttgatcttgccggagaagtgctgtttattatcataggactcctagtattatcatggcaatccaagtaccaagagagaccgtcgagatatgaccacaacagaagtcagcccggaatgcagcgtcataggaaataac

SEQ ID NO: 370079 - DNA, 259 bp, Zea mays
aaaaacgaaggaccttctggggctgcttctcaagagtgagaactgacaccaaagggtcttcagatatactatcacaggttcatcaatacgactccgaggtggtaggtagtctaggggaccaactgagtcactcagacaaaccaatggaaaactatacaaaattacgggcctggcatcacacgttcttattggctttattattgtcaaagctgcattaggggcaacgccatcacggccccgaaaactgaaaacatgacca

SEQ ID NO: 370080 - DNA, 99 bp, Zea mays
accacggaggtatgcttgctatagtgaatcccataggcggggaagctgcacaacttggagcctataccccttacactcgaaattcacaaagaatcacac

SEQ ID NO: 370081 - DNA, 158 bp, Zea mays
acccaaactgccatgggggggaatagatagacagaaaggacaggaaccaaccaacacaagacacaacaagctgcagccgtggcaggcatggggcaccgcgccactgacaccgggccccaccaccattaccacccgacgcacactttatttagcccacg

SEQ ID NO: 370082 - DNA, 257 bp, Zea mays
ggggggggtttttatataacccgtggcacattagcagaaccggcaaagcacatatatacatgcctgccgtcgggctacagtactacaccgcagttggggcatgggggcccgcgagggaaagtgagggccaacgcgccatgcccgggcgacacgcactggcactggcggcaggggcacaggcacacccccacgatctccccacctggggcctgggctccacaggtgcctcgccagtcgccaccaccatgcatggaacg

SEQ ID NO: 370083 - DNA, 304 bp, Zea mays
aaacgcgcaacagtctcatcacattttattttttggcaattaaaaacaaacatttttacatttatgcaggcggggttacacttggacttgggatatataccactttgtttatactgggggtgggggggcaatataatgcccgcacccccccaaaaattagccccgaatggaacaagggccgaccaatcaatgaaacattggtcacaatttagggggacaaacttaacccattccacaccaaaaactgggatcgggtttcattcatacatacggggagccaaaattgacatggggttttcataaa

SEQ ID NO: 370084 - DNA, 293 bp, Zea mays
gacgatcaaacaaaacttaaatagcaagtaaacattgataaccaaacagagtacaaggcgaatgtaagaaaatggataaggtccaacggcgctaaacaacgtcattggccctacagccttcttttgctggagatgttgggtataaaatagaagcaaaaatgcatggaaatgggaacggttaggcaattcggtttgtacagagaaacacagcgctcggctactccatgctcttcagagggccttcagctcagccttgacagatcttgttttggttgccacaccgctctttggcg

SEQ ID NO: 370085 - DNA, 438 bp, Zea mays
agaatccacggttttttaaagcataaagcatgcaacacaagttttaaacatcaaacatatttaaataccctataacttaaatacaaaagcaagttgaatcaactcaacagccaaatgcagagcacaactattacaacagaaatataattagatcacctagacaataagtataaggaataaaaaaggtccaatgttgttggatgtagcttaaaagtttccatttcttgcctaagtccatcttttcttgcctcttagtctccaattgagattggagctcttgcacctttgctaaaaacagagcttgtgagtaagactttgcaagcagtccatctttaactcgtgctgccaccattgctttcatatcatccttgttctctggggtagaccacttgtttaacaaatttatctaaaacggatattttcgcccatggctgctat

SEQ ID NO: 370086 - DNA, 288 bp, Zea mays
gaaaaaaaccaaattaaattctcggataataaatgattgggtggccaagctttaaaacacatggtttcatactttaaaattctggatacatcctcataatatacagaagggccctttgtagcagctagctgacatttgagggaaatttgggttcacgtgctctgcaagggccttttccaccccacatgggggctggcttccaacagggaaccccgcaaaagggggggggcctttgggacaatggggataactgggctggacccacataacgccccctataaccttttt

SEQ ID NO: 370087 - DNA, 275 bp, Zea mays
atataaccctttttcttcttaattaaaagacagagcttttgacattataaaaaaacatttgacagaatacatggcatatcattttctttccccaccctttcatttaccgggacgtaaacacaccacgaaagctctaatctcaggacaactaggttgttttcagaagtccaccccagtatcggggaccatgttttattgaaaaccatatatggagcattaattattcaagcccacaaatgactaaacaagggccaatctactatgctggtatttct

SEQ ID NO: 370088 - DNA, 215 bp, Zea mays
gggaattggtccgacccaccggtccgacagaaacaaacaagggcttagcggggacaggacactgcccaacataagcagggtcgactggttgcaaggccccctaaaccaatcattaaaaacaggtggggggggttcttcattggtctatgggactggacgggacacagggggccggcgaaaaaaaaaaccgaaaagactaacctttgttttttttt

SEQ ID NO: 370089 - DNA, 298 bp, Zea mays
ttttgcccatgcagcggaacgtctaccgcctcgtcgacaacgttctcaacatcttcgtcgtcgtcaaccagccggagcacgcgcacaagcacgggcactagccgcgtgcgcgctggccggcctgccagttgtaagagccgggatggtgttgtatcgatctcctttctgcacttgaatatatatgtgaacaaggcttgagaaaaaaaaaaaaacaaaattgctatgaaaaggaaaagctgataatgtggttgcctacaagctcggggagagatctgttggcgccttgaaggcaaatggc

SEQ ID NO: 370090 - DNA, 266 bp, Zea mays
tcgtccacgcgtgcgcccacgcgtccgtaggtgcacgcaccccaccgcctcctgccggcctcgatctcgtctgctcctccctacccaatccctcgcggtgggcgagggtggaagcgagtgacgatggcggcgctggaggcggcgagggagtgggcgggctccgtcataccgccggagctcgccgccgccgcggggggagacccactcgccgcgctggcggccaccgtcgcggccctcgtcgcggggctgcttattatcgctgtctg

SEQ ID NO: 370091 - DNA, 381 bp, Zea mays
aaaaatagcttattctattatgtggattttaaagcctcaaactgaaaggcccaaacgggacctaattgaataccacatacacctattaattcaacagatataggaaactcggtacaaattctaacaattcaacttggatccttgcaaccgaaaaaaaataaaaccctacaacacaaaatcaaacccttcacccctattcttcatttctcctaaccaaaatcaccgagacaaacacttgaacacaagcgtgtactctgtgctccctccgtttctgctacaccccttgtcttctttgttggattacttcggtcagataatttgaggaagaggaggaacagtggtgccaactgtcgacagctgatttggtaaatgggagaccac

SEQ ID NO: 370092 - DNA, 334 bp, Zea mays
tgtgtaaagaaccaccgcagggcaccggccgcccgcaaggaatggcggcagcgatcatcatgcctccacatacagacccaccacggccagccacagcgagtaatcccaccgctcccgcttcccatccccaacgccagcgagacgccccgacaccgtccctacgcgcgctcttcctccgcgccgtggacccttcccgcccctcgtcatggtccacggccgtcgctgatcttctctcctccggtgaccccgtcgccgcgctggccgtgttcgctgccgccctccgagccaacctcgctgcgctccggccggacctgcccccagcccttcgcgccgc

SEQ ID NO: 370093 - DNA, 284 bp, Zea mays
tctttttctttttgtttttttctttttttttttttttttttttttgcctaataaaaggaaaggggaattgcccacacaaataactgacggactcttggcgaacgcatccaacatgcccaatcatgggctcgtctttggggggcatatacttttctgctagaataaagggctcaaactcatcctaaagccttgccttttttaactaataagagttagcaacctccccctcaagctcttgattttttaggggtaacagctcgtcaacatcgccaatttgtttgagc

SEQ ID NO: 370094 - DNA, 341 bp, Zea mays
cctacgcgtacggccacacgtccacgctgggggggccatgtgagggcaagtgcgtgatttttatcgagcagcaaacaagatgcctgtgagagagatgtgctttactgggggtgattatgcacaccacctatccttgctagaatgagcattacacggcatccatggttgtatataccgagatggcgatatttacaacgccaagaataagggagagtacctggagggcacacatcagcacctctgcagcattaggtaaggcgtcgtgtgtactgtaacatctgaggctcagagactaactcatggataaacaaaagctagccgcggtgcatgcaacacgatcc

SEQ ID NO: 370095 - DNA, 340 bp, Zea mays
  unsure (1)..(340): unsure at all n locations
tttttntctctttttttttttttttttttttcttttttgtttgcctaaatgacaacttgggattggggccaacgggcatttgtctagtttatgaacagtacatatttcctgttggcaagcaatatgctgaaacattaagggaaatggtgtgatcattcaggagaatggtgacccctaaagtcacgtgtgcaagttcatgcgacatggagtatttgttctaacttcactctaaggcagaagcttccattctaaaaactcacgaaccctaaactacaaggccaaataaccggcacttaaacaaaaggaaataataaggctcccgaggcaaaaactgtgctcg

SEQ ID NO: 370096 - DNA, 395 bp, Zea mays
tcgtggacgcgtgggcggacgcgtgggcttctgcaaagagttaccacatttgtctgaaagcagactacaacaaacattgagtttcttctccaataatttttgaaaaaggacgtgtatagttattaagacaagcatgctcattagtacaattttaacatctatcaacgtttaccttaggaaaactgggatattacttgctatcagctaaaatgataagaatggcaaattataagcatgctatggtagaatgaagaaccacagaatgattactttgtttgaaaaactcaaagttcacatatattagaactctggtactcattacttttgcaattggcatgatacaacaacctttttcagattggggtgatgggaaaatgaaacaactgaaacaagca

SEQ ID NO: 370097 - DNA, 152 bp, Zea mays
aacctaacatatggaccccaaaatattccgacctaaatctagttgccagtcaaaacctttgccaccttaaaagctataaaacattcatgtgctatcacaacatataccgcccaggtatggaacggaagataagtttttcctatataccccag

SEQ ID NO: 370098 - DNA, 216 bp, Zea mays
gggggggcccccaactcttttggggaaaatgggtggggtttttggccaatttccatttccccgccccaaaaaaaaaacttattttccccctcctttttttttcttgacgggtaacccctcccttatttcaacttttaactggccggggaaaaacgggggaaagcccaagcctttgccctaaaatttttttaaaaggggaaaccttttcctttttaa

SEQ ID NO: 370099 - DNA, 432 bp, Zea mays
tttggggtaggagttatgataaggtaagagagacagaaatttggccaaggagagatgatggtgttcacagccgacgagctaaagaagaagatttgaggctggattacaatgttgaaggtggtgcaaggcatagaaataagatgaggcccattgataggaatgatagagatgaagatctttcacggaagcgtttggatgatggcgactggaggggatctcggcaaagagagcgtggtgatgtggttttgaatcgccgtgaaagtttggacgattctcatatcaagagaaataaggacgatgagaacttgcggaggttgaagcctgaaaatgaagacatggtcatggcgcatggtcatagagcaagagatgataataacagaagaaaaaaagagaggggcgatgaaattgatcaaaaaagacgagatgatagtg

SEQ ID NO: 370100 - DNA, 378 bp, Zea mays
tttgcacgtgctgacacaccgtgtgacagaggggatggccgacctactctggcgggtcttgccagtcagcctaggggtgcgggcccggagcgcttatccgccccacccggccatgtcgaagcaaggaggacaaggccaagccgcatgaaggcgcccaaggccgacaagaaggagtacgacgagacggatctcgcatatctggagaacaagaaagatgaggaaaaagcactgaccgagcttaaggacaaggcacagaacggcgcgataggaggctcgggtctgcagaaaagtggaaagaaatgagactggtcacccgtctacaatacctagaggatgataaggcagatgtctatctgtgttgcgcttcactaaatgtga

SEQ ID NO: 370101 - DNA, 287 bp, Zea mays
  unsure (1)..(287): unsure at all n locations
gtcnttgtcaaacttggccgccgatgatccggccgacttgtccactctttatcagtcgtcacaaacgcccccgccccgcccgttgacaagctgcttcttccttgacctgtccaccaccgccggctgggcggctgggctatatatggcgccaaaccaaacgcgtgcctccgcaagccagagagagccacttttcaccttgcagttccacaacacagagatccagataccaggatgggcgcgacgctcctgcaggcggtgtcgtcgctcctgaccaggctgcagcgggc

SEQ ID NO: 370102 - DNA, 369 bp, Zea mays
ttgttgcaaatgccaccggtccaagaagagtgacagactctgttttttttttcaagtatccaatcggtgtgatcctccactaccactagcaagctaggcacacaagctagtaccctagccactactcactagctagtaggcgcgggcgtgggcggcggcgagcccgtgtgaggccgggagcgggctgcgcatgggcgacctgggcggcggcggctgcgcgaggcggcggccctcggcgtcgtagtagataaccctcgagaagtcgagcggctggcagcgctcccccatgaggatctcctttgtccacaccccgggctcggcggcctccttgttggtcgtcgtcccaaacgccggcgccagcgacgaaaa

SEQ ID NO: 370103 - DNA, 174 bp, Zea mays
cagaaatctgtacagtgcattgtatttgataagtatgatatcgggaatgggaaatcacattacaagagttcacataaatataatcaagaggctttcttatatctgtatctgacagcacaacccatataaactatcaaatttacaaagcttatccctgcaattaaccaaaagaac

SEQ ID NO: 370104 - DNA, 305 bp, Zea mays
gagcggccgcccttttttactcattttttttttttttttttttttttttggtttttttttttttttttggggggttttttttttttgggttttttttttgggggaaaaaagcgacagcccgattttggcttaacagggccttttcatacccgtttcccccttgggtttccaaaggtttccaggggatacaaaccccttcccaagatccatggggggggggggccccctagggggtggacccccgaatccctggggggggggggcccaaacccccgggattttgacatcctggggggccttggccc

SEQ ID NO: 370105 - DNA, 226 bp, Zea mays
actggattacatgaacaaaggggtactggatacgggccgtaattacaatatgggttttaaaggaacaatatttgggggggggaacccaacaatgtccccagtccgacaacaggtaagttatccctatcgaacaactcaattccttttggggaactgaaactttattatttaaatccgtgggggggtaggaataaaaaacctgtttcgcatttggagggatgcaaaa

SEQ ID NO: 370106 - DNA, 259 bp, Zea mays
tcgtccacgcgtccgcccacgcgtccgggctggttaccgctgagtttttcaacatgttagcagacactgcgctctccaacgaaggcgcgaatgactttgctatcaacgaaggccgtcatggcgaatcactggacacgccggtacgctgcggtcagcagggcggtaattgctatcatcagccatgacaaggtggaggaattcttggttccgatcacgcgcagccgcactggacattgagatttacttggaagtcttaatg

SEQ ID NO: 370107 - DNA, 214 bp, Zea mays
aaaaaaaatggaaactcttcactgggcttctgaaaattactatggccccggtttaacataagggggggcccctccccggtccaaaagaaataaagcttttcccagggggggtggtagtacaccaaggaaaagcctttaaaagggtttggggcgttgcaattttttaggcaaagctttaagcggggggagatgttccataagactgggggccccc

SEQ ID NO: 370108 - DNA, 168 bp, Zea mays
gttggatggaatgaaaacaatcatcacactagaaggacacaaaatggaggcggcaagcaaggggaaggaatcgattacacagacacacagatctagagacatatagagagcccagcagcagctggctagccgtttttttaaactaccacaacccaacccaaccctttt

SEQ ID NO: 370109 - DNA, 213 bp, Zea mays
aaaataataaaaactcttcactgggcttttgaaaattactatggccccagtttaacatagaggcgagccactccacggtacaaaagaaataaagcatttcccaggtgggggagtagttcaccaaggagaagccttgtaaagggtttgtggcgttgcaattttctaggcaaagctttaagcaggtggagatgttccataagactaggggccccc

SEQ ID NO: 370110 - DNA, 151 bp, Zea mays
gaagcccaggcctttaatttaactttcagtttttacggggccaggtccccccaataaagccagggaggtttgacaaaacttttgacaaaccaggggtcacaacaaacagggggctcccccttggggccccaacatacaaaggggggggggg

SEQ ID NO: 370111 - DNA, 147 bp, Zea mays
gggaaacctaaaagggttggcactaaaaaggccttccttggaacaaatttttaattttccccgggacaaaacgggacatctttacaaggggagggggcaaccctaactggactggaacaatgaaaaacagggggcaaaccttttttt

SEQ ID NO: 370112 - DNA, 426 bp, Zea mays
tcctttgggattgttccaataggcaaggatcacaggcattgcccttctgggttggctggtaatcccaacccagttcctgcaatctcgtcgtacttaatataatccctccctatagaacaacagtcccattcaagattttctcctgatgaaacctgagactactcacaagtgcttcctgtagacattgcatttaagctttgcatatctctaaaccaccgcatcgcattgtttttttttctaatagacattgcatctgacaatgcgaaccttttcttatgcaggtcatatcctttgatttcagcgaacctagagctgtaatttctttgaagctagctttgcagtttttaccactgatgtgtctgcccaaccatttgtttctgcaggccactctctattgattgctcactgcaggatcagtcatgaaac

SEQ ID NO: 370113 - DNA, 223 bp, Zea mays
  unsure (1)..(223): unsure at all n locations
cccaanaaaaaaaagggggtttgttattcaatcagggggttacatttgccctactatcatcataatgacataatcactgcacatcaggtggtaacccccacaaggcataaaattatggatcttacacttcgttatacaactgatgaatcacacaattgcgcacagcccaataaaggcggacaccaaaaagcacgtcaatgcaatttcacaagttcttccgccg

SEQ ID NO: 370114 - DNA, 376 bp, Zea mays
ctctctctcttgcgaccaatgcatcttatcttttcagaaaacaaaacaaagtcactgaacggtatttgtaacatcaggctgacgcttgtaaaccaaactacgaccacagtagggaatagacccgtgctggatcatcatcgaaagcccaaggctcatcactgctcatataacatcaggaaaatcgccagtaaaccagtccgaatgttttcgcaacaagaaatctatttggaagagcgtataatagttccaagccaatcttccgagtcggtgctcacatctcccttcaaggccctcagcgagtgttctgttccagccttggtaatatacacgtctattccaagcctagctatcactgcagcctccagtattttggtct

SEQ ID NO: 370115 - DNA, 234 bp, Zea mays
atgtataattagcctaattttggctacacggtagtgaatcgaatatctagtgacgaggcacaaataacatttaaaagcaattaccagataccgggatattactaagtacaacgttcgcgctattttaacttaaccgaatctgacttgaacaagaagcgctaatacaaaacacaaatcctatatatattcctaagctagaaaattaacaaaccggctcactaatgctaaattgac

SEQ ID NO: 370116 - DNA, 204 bp, Zea mays
cgggctacaaaggggttttttagccaagagggcataaaacattagcacaaatgtcagacacatgaccaaaacaggttcataggccagcaattttgttaaacaaacaccttgttttcgtcgaacacggatggggataccaatttgcagattgggagccacgagcccatttaccagtagcctttccaggggccatactgggaaatt

SEQ ID NO: 370117 - DNA, 311 bp, Zea mays
  unsure (1)..(311): unsure at all n locations
atccccagaccccagtagatgatgcccattaacccaatgatgatatgttcatagagttgaaacactgtcgctcgcactgaacacctccaagcttctccactgtttatctgcggcacatttacagctggtgctactagtaaacagaggtaaattaaccactttctactgaaagggtagtgcgtgcgtgtatatatagcaaagctacagccaaactatacagttgnttctcctatatatatatatatctccccacttttttacccttctcccaatcacttgaatgcttgatgatgccattgctttatccccct

SEQ ID NO: 370118 - DNA, 382 bp, Zea mays
agcaaaacgggatgaagaaatgtttattcaacaacgtatgatccatcagtccccctattacatactcgtggacgttatcaagggccaaaaaaaaatgagtaggcttggagattacatcctaattagtaccttcaactcgcagcaaagggaatatacccaaatgaatctgtaaaaaagtaggtaacagtacatcttcacatccttctgcgcgggtgggaatcctctcttccagggaaggaaggtcagttttcgacaattgtcgaatgttttggagtaggagttggcaaaagggtaggcagtcttgcaaatcccatcgttaatcgctctgtagacagtagagctggcggatattgcctgaagcgtataaccaatccttgaactg

SEQ ID NO: 370119 - DNA, 104 bp, Zea mays
ggtaggaaaaacggcacgaggttccattacttctcaaaatagctgtggcctgtaggttcttttattgctacaaagcattacaacataagcagctaaaccagaaa

SEQ ID NO: 370120 - DNA, 83 bp, Zea mays
aggaaagggcggtatacggagtatattgcgaacaaaagcattcattggcacaattaattattcatgaaaatggggaatcgaaa

SEQ ID NO: 370121 - DNA, 306 bp, Zea mays
aacattacaaccataaagatcagcactaacattaatgactttgctaacataagagtgtcataccatgcgtgccatacaaactacaggtacattcatacatagcataacttacagcacatgatacaagctacagagcacggtcaatcttaaatatataaaaaagacaatattgaaggctctgatgatggagagaaaccagggcaggctttccccgcaaatacggagaagctacttccaaccagtgaccttgtgactcggtgatcttaaatttagaagaagaaaaaaagagcaaagcttattttgccc

SEQ ID NO: 370122 - DNA, 438 bp, Zea mays
cgatctgagttgtgatgaagatattgcatcgagcagtaacaagttgattccatacaacaataattataagaatgggttctcaatgaatcgtccaaacagggcaggaatttctatctcacaagtactagctagagttgggatgtaccataatttagataggactgagccaacatacgcccaagctggacttgagcttgggtgcttagatgcagatggccgtcttgcaatggcaaccccatcgcatcaacgaatctgacgttgcgaagtttgatccctttctgagcgtctctcacgacttgagtatactgtcctaggcccgatgctaacccgacctggatgaagaaagaaagacaaaagaaaggaattggtgaatatggttgggttggttcatggtagcggaagatgcccgaaccaggtgccgctcgcttgacaatgcaa

SEQ ID NO: 370123 - DNA, 450 bp, Zea mays
tcgggtccttagttttcccactctagtagcctataggctatatgtataggttcagtcatccatttttcaatattagcaagaatcgcttgctgtaccaatagattaccgagtcatgacacatataaattagactatttactaagattattattgattactatttactaattagactattgtattgatattttgttagatgtctaagatgattattgattactgttttaagataaccatatattatgtatttttgtatttgagatgatttttatgtataattaatttttttattaacaacatatattataataataagggcctctattttaaatcttgcttgattctaaaccctaaatcataaactctaaaccctagaccggtaccgagtgaatcctggatccgctactcgatgcagatgtggagcctgaaactcctagctagcgtgtagca

SEQ ID NO: 370124 - DNA, 380 bp, Zea mays
gggagccaaaatcgatcaaaatagcttcttcagaagagcagaatctgtcatagctgtctcccatattgagcaggtcagagtagctactttagtagaccaattagtctctctgccagccgtcagacgtattgggttatgtccgacggctgcccggggccatcggacataacagagccatcagaactctgtcgttttactgtaatgcaccgtcattttaggattcagaagagcagaatctggcatagttgcctcccatattgagcaggtcaaagtagctacttccctcggcctgaagattgggtgtgcttagtaatcttgttttctgcattagttggggcccccataatagccttttccaggatgcacgaagcaacttggga

SEQ ID NO: 370125 - DNA, 271 bp, Zea mays
gtgcaactaaatatttcataggggaaaaccgaaaatactatgggtcttcttctacagggtacccttgcacgatttacacctacccctacccgcgaggggtactcagcttggcgtatcgataagcgcatataaccaacccgtttgagctttagcttgatacgctgggaatttacaaactatacgctggcaaaacaaggtatacccccacagtctcgaacctcagcagccaccactcgcgggctcgatcgagctccggaggccgttgcccctg

SEQ ID NO: 370126 - DNA, 445 bp, Zea mays
attcacaaaacctacacagggtattatgttttgcacatatgtgcaaacactttacaaaatcattcacaaaagtactaacgcttccagtgattcgtaaaagccttcacaaaagcactccaacttcttgtatcctcttcatcttggagttctttttggcgcatcctcaattgtgcttctatgactttctgttcttcaaattgctctatgctcctttcctcctttgttttgaagccacgatactccacaacataattgggcgttttgcagaatgggcactgtacatatccccttcgagcaacactttgaacggttgaggcttgggtagtactggatgggctattggctcttggcgagccatggtatctccttgctggcgagcgtctactgtaaggaccatttctttcatacctttcggcaaggaacgcttggtacgatggccaccctt

SEQ ID NO: 370127 - DNA, 174 bp, Zea mays
gacaccctaattggggttacacgctaattttaacctcaaacctgataatgaagggtgtcccataaatatgtccctacctcttaattgttgggttgacaaaaaaaaacataactccccccttgaaccactgtgattccttttccctttacgatttcatccaaccaagggatcatg

SEQ ID NO: 370128 - DNA, 452 bp, Zea mays
gatgacctctgtcctcaaacgattgctggagcataatatgggtcacaagttaaacactctgaagcctgaacttaggcggcagcacacacgagttaaccaattgcccaaccagagaggatgggcaagcatgcatctgctaccaccatccacatgttgctgcaaaagctatgctggcgccaagagcgtcagctgcctgtgcatgcaattttcattccgcgcgaacgacatgcacatccatcgtgtacttgttgctgttggtgttctcaagtagttcgaagaggcagaggtctcccagctgcagcttgttgtcgtgagcaaactgcctccacccttgcgcgagccttttgcatccgcgtctgcccttctgaatccgacactgcacctcccagctctcgccgcagcgttggagcgtcagcgttcggtcctcgaatggtaggtatacatcagcatat

SEQ ID NO: 370129 - DNA, 477 bp, Zea mays
tcatccgattctctgtcatctccaataagattagaacctgtacagatgctaccctacccttttacaacaaactcactgggggtcaaatgattaaaatggggggcttacatggtgttccgtcgccgcctcctgcaaccgctgctttgcgttattattctctgacaacaatccaaccatctgttacctcttcaacggcttggcaagctacaaatgtctatcagcgtgccggaagcttgagaattaggcccggaggagcagtgtcgaggagctcatgcctctgtcacagatcacagtactaaaccaaactatgtcaatgcctactaccgcgctcatagctgcaaagccagatcagggtgcttcggatttgccagctttcccctaggcgaggaacctgatgactgggctctggaattcaagcctgggtgagcagagctattttcggtcgcggtctttggatcctggcctgcgctttgcacg

SEQ ID NO: 370130 - DNA, 347 bp, Zea mays
cccggatgaaacgaccctctgcttttgagttctgaccaaagggggcagccaggcaacatttttccagatttcacaaacgttacagcagccaaagccactcaccgttaaaaaaatacagcaaggggggtccatcactctcgttttaaacgacggtttttttaataacatacatccattccatgccacatatttttttttttctccattcatccgaccatggggcgcttcctgccccgttgcctcacttgagccagcttgttctggggggagcaccattgcttcgaagcctttctgtacgcagccaggattttttccatcacatccccacaggacgaatgcatggaaat

SEQ ID NO: 370131 - DNA, 347 bp, Zea mays
acaatctttggtgcagtgtcagtgactatcccacccaaattcggtttttatagcgaagaattccattgtgccatgaataagatggtactgctttagcatcaatggctaacttggccattatagtcgaagccatatcatcatggtgctaagaatcagaaacatttgttatccattgtggagtgcaagtagacaatgccgaacaggagaactgaacctccggatgcctggacaatgcatcagccgcactattgtcaaccccttgtatataattttgtactgcaatcccaataaacgagtaaacattttctgttgccatggagtgtgcaaacattgttcatccaattgaa

SEQ ID NO: 370132 - DNA, 331 bp, Zea mays
atgcaacctaatttatattgtcctacaacttcattacattgcacatgtaaagcagagagtacaaaagacacacgcaacatctgcccaggttcattacattgcacatgcttctaaatactggcaacatcactggacgaaatcaggtccactataacacagacaattctactcccccttctgttccagaagaactgttaatagggtccccttctattccttggcctgagaagttgtggaagccgacactgcgtgagcagtgggctccttcccacaccggccaccacgcgtgcggttgcagcgaacccccgggggtgtcctgtcgtccgttcta

SEQ ID NO: 370133 - DNA, 437 bp, Zea mays
tttgttttggggtgcgcgaatttcgactagggtttcgcggaccgagagggaagcggggagaggagagggcgggtagggtttccgcgggcgggccccgcatggcctcggcggcagcggcggcggtggcgccggccgcggaggagaagaagggcgcgggcgggccggtcacgggggacatggtcagcgcgggcttcgcggagctggagcggcagcagcggctgctcgccacctgcacgcgcctctaccagcacctgtccgaccacatcggctcgctcgagcgcgggctcgccgcgcgctccgacgcgctccgtgtacgccgcaaggcattcgacgcgcgcacccaccgcgcgctcgactcgctccaccgtcgcgaggccttcatcgacgccttcgtttcgcgcgcgctcgaccaccttcactccatcttcgcaaggggt

SEQ ID NO: 370134 - DNA, 427 bp, Zea mays
ttggtggtcgaccagcctttttctttcagagccttgggtttccctttgcctcctttttcttttctgctgtggtcccagctcgcagccctttcatgctcttgtcacatacactcgcacgcaggccggcctttgagcctgagaccgccgagaggcaccaccgcaccagcccttgccgcgtataaaacgtctcgtgcgtaggcggcggcgactagctaggctgtccccgtggcacgtatacgcgcacactatactggggttcgggttgcattatcaggcatccgaccgacggcatgaggaggaaagggagcgactgtacacggatcagcccagccgagatcacgcccatgatctccctggcgtccaggcggtacgcgggccggacggcgtctgcgccggaccgggaccgggaggaggagcgacctcggca

SEQ ID NO: 370135 - DNA, 271 bp, Zea mays
ttctgtctctatatgaacatgggatcaggagaggaagagcggagctggtgccaggcgcctcaccacactctaggagcgattaagtggtagctacaaccatgactgctgcggcggagctggaggaagctccgcctgtgcaaagaccagaacctcgtgctgtaggagagctactaggtgcataacacactcgatcataggcaggaagagctgctgcatataaagaaccacctgaagtcgtctatggtgactgccatggtacagaacctcacag

SEQ ID NO: 370136 - DNA, 284 bp, Zea mays
  unsure (1)..(284): unsure at all n locations
ggactnggacctttttaaactattaaggggtgatggaaagacagaatgtcagccattcagatctgaaatcaccaaaaacaagtgacaaaaccaacataacatgctctagactctgacctgcccccagttccaaaatcatttatttgctacatggatttccaattgtcaacatcctggtacaaatgcgagagaggcctcaagtcaccatgtcacgggtttgaagcagggctggtacaatagctttcgagtcaccatgttacgggtttgaagcagggctggtacaa

SEQ ID NO: 370137 - DNA, 455 bp, Zea mays
aagcctccacgccttggttaaggacctttgtgctggttcccttgaacgccatgaacccatcgagatcatgatgatgtccggtgtgagccgcagcactagttatctggagggctgagaaatgcagttcatcaggggatgctgtttttgttggatgcactggcggatgtttcgtctccatgaattttaagcctcccaagttatcccatgaagaccctgcattgctcctcacttggccataaagtggttgactaaagaaaagatttgtccgctgccttgtatctgcaaatgcaaatgacaccagcattaagactaaagtgtttccataacaacaacaaaaacaaaaacaaaaacaacaaagtcttttagtcccaggaaattggtactaggctacctcaatgtttctgcacaggaaaaaagaagacatatggtgaaaataaatttgaaaagatctgaac

SEQ ID NO: 370138 - DNA, 479 bp, Zea mays
tttttcacgcgtccgcagcaaatatggagtggcatcggtacttgttctttccgtttcccaaaagaaaaaaaaccctgtttcaggccaactaaccagctgccctgccggcgcgatttctctttctttctcctcccccgccgagcgccgatctctgtttcgccctatcgcaggaggcgacatgcaacagtggagtcgctgaccagggaggggatgtgactgtgaaaggctgctgcagctggccatgcgatttcagatttcccattcacaacaattcaccccacccatcgtgcacatgatcctactgttgtgcacactgattgatgagaactgtagtggctttgtcctctacccaccaccaccaccaccaatagcaggcccttttatacattggccatgacaccgatgatcactccaaacagcagctgcaaagatcaccctggattcctggagcacggagagagagccgagcgagcagctgt

SEQ ID NO: 370139 - DNA, 234 bp, Zea mays
tttatgcccacgcgtccggccaggcatgcggacgagagtgatgacacaaaggagtcgacgttatggaacgcagtgccgagggagcggaaatgcaggcgcgtggtcatatacggggagacggatccgtgttgcgctgtaggatccgctcggtggcagtgctaggtgatcgaggctaaagacaaaagggtgactgacagaaagtgaatctatcatccatgggaggagccgggcacg

SEQ ID NO: 370140 - DNA, 296 bp, Zea mays
ccacgcgtccgcccacgcgtgcgtggagccaattttatcattgttcctgcgtggaggtcacctgataaaatggacttgtctctcatggtgtggcagcctgaatagtatcttatacaatcatgtacgctgttaaaaagttatgtgatctgtgatgacacacttgttagtctatcgtatatgcaatgatgttcttataatattccattgtaaacataacatgtgtggataactggacattgcactttgggctgaccctactgcattgacttattgggtggtgccaggtcagctccggg

SEQ ID NO: 370141 - DNA, 290 bp, Zea mays
cataaacgggtctgcaattttgggtttattaacagacaagtgggggcaatacataaaataatttgtagactaaatatcaaaattagacgcactaacataagttagaactgaatttacgtataaaacaaagtcttatacttaaaatccagaattaaaatgataaaatatgccattatgggccctcagaagcagcccaggcggcctgccaggcgggccaggcagcggcctggtgaccagcacgccggcccatcctggctggccggcctaagcggcccaactgagaccacaaa

SEQ ID NO: 370142 - DNA, 359 bp, Zea mays
ggtgtcctccaacatgctaacagacactttgctgtctaacgaaggccgggatcactttgctctaaacgaaggccggcatggggaaccactgcacacgcctgtacgctacggtcgccagggccgtaatcggtatgatcaggcatgacaaggtggaggaatttttggtgtcaatcaagcgttgcagacagggaaccagaataagacttgaaagtattaatctaacaacgcgcacgattctttgaactaactacgggggaatccattgtcgtagccgttcaccgctatgggcgcctggtcatgagacatgcccgggctgcactaggcacgcgccgaccggatgcactgccgggtgctggagc

SEQ ID NO: 370143 - DNA, 286 bp, Zea mays
ggggggactaaaaaacaacttccctcattcaaaacaaattattcaaaccggtcccaagcttggcaaagctatgacaaaatggggtaatcccccaaaaaggaaactgcatgatgctggggggaaaaaacccaaacaaagggatttcagtacatattatgcttaacctgaataaactcaaacaaaggggcctttcatcatgagaggggtttcagcaccttaacagtcactttctttgggggttttttcgcagggagatttaccaccaagccctttttagaggaataat

SEQ ID NO: 370144 - DNA, 474 bp, Zea mays
tttgtttgtcggttcaaaccgagctctctcgcgatgtccacgtcgcccagaatgttccgacgcgttcgatttctaatcaacggggcaccggcctccaccccttgttgagcactccccctccacagtcttgccccagaaccttctcgatgcttctctcgccctcgctcacgaggccgtgacccatcccttgtacggggtcgacccctttctccttctgccgcccgcaccaaccctccgccaacacctccctgccttgctcgcaccaaccctccgtcctaggtccccgccccgcctgcgccaaccctgcaccctcgagctccctgcctcgcccagctcgtggaggtgagcatatgcttgaacatttaatccaccctcctccaactccctgggcacggtggtggtggcgcgccggtgcatggccggctcgaggcgggattggatgaattgaggagcgggataggtacacgatggagt

SEQ ID NO: 370145 - DNA, 173 bp, Zea mays
gggggggaacccattaaaaaaaatcggttccctttatgttttctttccacgttttatactcatcttccttggtcgaccttgttttgaacacaagcgcaactggttaagagcatctttgccagtcaccgccacaggtcccaaacggggaagcccctgggttttaagcaaatcgc

SEQ ID NO: 370146 - DNA, 347 bp, Zea mays
aaagaacaaagataacagaaagaggattttcaatttttagcaaagggcaacaaacagaggaccacaaatactcggtaaataattgaaaagaggcatacaagaagacagaggcagacatgagatgtgaggaatatggcaccttgatagcttgatatgctgcaatgtatacacaaataatcattacatacatccctggccgccagaatcgtctctctgcttattttggcacgacgaaaaggtcgacgacacaggacctatcatttcctcaagggtcatccgccagctttgttgtagttcgttgacaggcaggatcacatcctggacccaggcgcgctggaagtggatgt

SEQ ID NO: 370147 - DNA, 235 bp, Zea mays
ttatacccgtgtcccaacgtcggcccatatcaatgttcccattacaacggcccattcggcccacatcaagccttacacctcctattccacatccgccagctcctggacgtcttcctcccctgccatctccacaccgtcatcagtgctggcgcctgctgcatgtgtaacatctgccccccctgcagaattggcttgtccccaagcaatggcattcggaaaacgctgacaaaggaca

SEQ ID NO: 370148 - DNA, 366 bp, Zea mays
tctttatatgttcctatgctgcaattacagctctaatctgtattacagatcgatggaggacacagtgacatatataggcatggggctgaaagggggagccacacacttgtgattcaagtattatttacccgctatgaattcaaagtcggcactcacgatggccttggacacaatcctgagcaacaagatgttgaaatactatttggacctggctatactggtctagcggatcttgggaatagttgatatatggattcaataatgcaagccatgtttttaacccagcattacatatcaaggttgcttttagttttcacattcctggttcatacatctgtacatttgtatctttgtctaacactttac

SEQ ID NO: 370149 - DNA, 223 bp, Zea mays
tggctagcggccgccctattgtttttttttttgtggggtttgttttaaatctagtgatcccagttaagtacctttacgagaagaccatataggagcataaccggactgggggctcaggaatcagtggcccccacagaaactccagactgaacggacgatagatcatgatacacacgtacagatgttgaggagcacacggaagtggaacctgcttcggcaggga

SEQ ID NO: 370150 - DNA, 310 bp, Zea mays
tttgtggtaacacattcctgatatcgaccctggggtgtcattcatagaatttagcacgttctctacccactgctatggaacttccatacatctgtgaaatagaccttggctgtagatatgaggaggtgaaagcgcaagactggatcatgtgggaccagatgatttgcatgagcttgagaagatctctgcacactatttgggactgacgtctcttctctatgatccaagtgcgaacacacctgaagaagctcttgtgcatatctctggggaagccaagagaacaaccccgttcattctatacatacctcag

SEQ ID NO: 370151 - DNA, 267 bp, Zea mays
tttatgatgacgcgtgggccgcgccggactccggcgacctccttgtggacgcccgcgcggtcgccgtccactccgagtgcaccgacgccgacccgacggagcccatccccttctccctcgccgcggggcccgacccggccctcggcacggcgctgaccctcgccctgccccgagacaccgcctccttccggctcacctgttcaacctcccccggcgactacgcgctgcagaggctggccccggcgaagaccgactgcgcgcagtcat

SEQ ID NO: 370152 - DNA, 432 bp, Zea mays
ttggtttcgcgtccggccacgcgtccgcccacgcgtccgcttgctgctgctgctcctccttccagtgagttccattcgtggcgccgctttccttattacagctcagatctggcccgtccccctccctacccgtagcgcgctgctaggatcttcgcctgagaaaattttgtgttcagtcgttaggaggtcgagagaccatgacacggaagtcagcagtagcggattatgtatagtagcacaaggagcattcgtgtagctgaaaggatttgccttcaatggagctcgaagctgctcctgacgatgaagtattctgttcagatgatgagatgcacacgctgtggcctctgtgacaagtagacccaaagagcgtgaggttcccttgctgcatcgtgtggactactctccagtagtctcatggctggctacctacat

SEQ ID NO: 370153 - DNA, 202 bp, Zea mays
caacagctggtttatatttatacagatacatttttccaaaagtgttgttgctcttgatgagtggtgcaaaatgggaaccaccatctgctatatatccttgataatgcgtgaatagtgacagtgcatctataaccttgtggctgcatcacaaaagagaaaaaaaagatgcagcatatcacattgttgatgtacaaaagaagtg

SEQ ID NO: 370154 - DNA, 327 bp, Zea mays
gaccggccggaatttctttcgttcacgcgtttgttatcccacacaccactgatgcgcagttgtgtttgaccacctaggtgtttcgctcataccggaaacggtagctgctgtttctgagtagaacgggcgctgacatacattgttactgtgagaaatgggacaaacagggatgcgacgggacagcaaggacggagcgatacggctgggatgctgactgaaggttcgatgggtcgccatcgtggggatgaggctcgaagaggtgatgtatactactgaagcgaaaccaactgactgcctttggctcctacgccagatcaaggattcagt

SEQ ID NO: 370155 - DNA, 202 bp, Zea mays
tttgatttgtcacttccatctcggccgtggcgccgcaccgatccagagggcaacatacaaccagttctaagaggactatttccctgtgcaatgttagttcggtaaatgttgttctctggggtgggtaagctagcttattccctggagaatagatctacaacgatggtcagtcctctccacagatcctgatgtttgttggcac

SEQ ID NO: 370156 - DNA, 414 bp, Zea mays
ttgttttcgatgccactgccggacccgacaaggggcgactggaggattcataatctggtttgactccggatgttggcccgaggaatggtcctggcacatctcatgaaggagcaacggataatatggcgcgggacaaacgatcgagtgaattctcaaactcgacagcagatggctgtgagatgagaggtcacatatgaatacacccagctggatgatcggtcatatacatggcacctactggtccaggaccaaagagatgcgcacattggtagagtcagactcactcttgtacaggtgatgagtcatgcctatatgatagtacagaggcgacagcgacatccacgatagtggctcctgcgacatgcaagatccatgaactgcctagggcgacctgggctttgacgggatacactg

SEQ ID NO: 370157 - DNA, 324 bp, Zea mays
tcgacatacagaccggcggctgatgtggaagaagagcgtggcgttcagatggataatgtggatgaagagcgtgatcttggaaatgatggcggtgatcatgatcttggggatgtctttgattggtactagtttatgttaaacacggatgcgagcgtgaatatgagttggtctagctctgcataacagggggtagtttttaggaaaaaaattctttgcatccgggatacacagaatcccttctaggactgatttggtgactaggtatcacggagagattggagaggactgagagcctccgtgatcccattgtcaccaaatgaaccc

SEQ ID NO: 370158 - DNA, 198 bp, Zea mays
tgtttcttgcgacaccctgcctgaccgctaggttgacagtgcgcgaggagggaatagcccgtcgtcgaaggggaattgaacgagctgccgtctcctactggtgggacgggtgggtgtctgctgctcagccaggacacggcctgcctcgtcggatagagcttacatgctcctctaccgcacgccgccgatggttagctg

SEQ ID NO: 370159 - DNA, 164 bp, Zea mays
  unsure (1)..(164): unsure at all n locations
ttttccatgtgnacaccgacacgtgggccgacgcgaggggcatatttagggaagaggtgtgtaacagtagaaggagctggaatgcactaatttgggatctgacactgtgaagcgggctctgtgaatacctaagataaacggaccgacatgcagaaaagaaaggc

SEQ ID NO: 370160 - DNA, 336 bp, Zea mays
ttcttttttattggagaagaggatgaagagggggggcgcttctatatgggacccgtggctgcgtattggccccggcgccggcatatggccctcgatctgcttctgccgatctgggccggagcgcggggtcaacgactacgacctaagggcacgatgcatcagaccaacctgctgctggaggagccgatccggatggcctgcatcctggagccatacaagaccagctcgtttcacgtgatggccatgagcgcctgcacgctcggacgcaggatgtgctgcgcagacaccatctgctccgtgctgagggtcggtatgttcgtcgcgcgggacgattac

SEQ ID NO: 370161 - DNA, 316 bp, Zea mays
ttgctttctcgtttccagaggccacccggtggagtgagggcgagcgacgcgccatgagcatattttggccacgccttgtgcaggtccttcctcctgaggtgaagtttatagcagaccctgaaggcacgatcttgggtgcgaatggtttagcagagcctcggtatgttggccaaggaactggagagatgagactcgtcggtgctctgagggaagtgcttgctggtggccatttaggttatgaggaggttcaatgcgtactaaaggatatcctaccaattggatcgagttcagattcgacggtggttagtcaagcact

SEQ ID NO: 370162 - DNA, 194 bp, Zea mays
tggaccccgcagggggccgcgcctgctgctggactgacttaacagacaggctctgtgcgagagcctgaacctccgcgaggcaggagcctatggtgctgacggccaaggtggcatactgagccgtgagggcatatatacggtgcaggacatgcttctgctgggcgtaaagcatgaggctctgcgcatgctgactg

SEQ ID NO: 370163 - DNA, 384 bp, Zea mays
tttgttttcacccgcgggccttgggcttgggccttggaatagggtaccaccaaccaatcaatcgaagaagaggcccgccggccgccgcggtttgctcgctatcgctcccttgctggctgcggtgcgggtgcgccgccgtcgacgagggagtccctggctccctccctccgggttcgaattcgggttgcttccttagggttcagtggcagtacatagcatggccctaaagctcggctggaggagaggaggaggaggctggcttgcgcttccattggggaatcggaccaccgcgtcttcctccgcatgcagcagctccaacttgttcgtcggcggtatggtaacagctttcaattacagtagatgaagaattgcaacggatgatgc

SEQ ID NO: 370164 - DNA, 403 bp, Zea mays
tttcctttcgtgcgtgttttaggttacaccaactatgatggagtcgcagctgataaggaagaggcacacagactctactttatcacggaattctcctaccagatttaccaaggagaatgctgtacagaaactgcatggcgatgtgatgggagcgggtctatcttacaaagaaagtaaacatctggaccaatggcatgattgttaccacatatcatatggtaatgagacggatgggcttacacctgtaaggcatattggattgggggaccctgctcagataggtggggggcatcaactgactatacttagcgtggaggagctaacacaatgcataggagaggtgcctgctgagccacggtttgatgccattaatgctgagactgtggccatacgacatcatgct

SEQ ID NO: 370165 - DNA, 462 bp, Zea mays
  unsure (1)..(462): unsure at all n locations
acttacattatctcactttccaggcacatgccctagaagatgagatcttttcttcattgcatgaattcttgagaacctttattagaatggtagtgttaatttctttccaattgattttctccctgctgatatacatgcttataaagaaaaataaaattatttctttttcacttatatatgtttaaccttttcatgagagcagctttatatattcacgatttcttgttgggttgccaacgttatgtttatattgaccaactttattaggacactgcattctggtatttggcacttaacagttccactttgcaggaagaaaggttcagattgtgagacaaaggatatatgtaccatatcactgctcctctatcaagcatcagttctcattatgtatatagttttaccattatgacatccattttccttatcaaatgaatatccattttatncctaggaagaatg

SEQ ID NO: 370166 - DNA, 482 bp, Zea mays
tttgttcttctaggtaaccacagcttccagactgcaagtacgagctctgccatcgcattcatgttacctctgaaagcactcagacagtcctctagatttattgtcaataacagctgcgtatttggcattggcttcatcaaagttgccactatcaaagtcaacacgacgctagaaacactgtttgtcaggaagatgaacatcttcaacgaggccaaagtttacacttggaaaatcgaggatttctctgctctgaagaacccgtcccactcaccggagtttgagatcgctggatacacatggattatctctttgaatccatcctacgatggtaacagcctgtccttattcctgaaaatgaagaagacaaacgacgtccccaaaggctctgggagcctggtcgagttcgctttatccatcatagaccaggaaaacggcatggacaggaaatatccaggcaggtgccagttctcgagcaaacacca

SEQ ID NO: 370167 - DNA, 314 bp, Zea mays
agaaagggacgggaagcactgcacgggcaacagaggcgcctgacagcgaccgagctcgggaaccaaacagggaagcagcacaaaggagcgcaacagagaagaagccgcgaaagccagggaaaacgagggcaagaagtaggaaagcagagacgcggcgggtgcgaaaaggagcgccctgaaaggacagaggacggccccagagacagagaacatacccgaggggctaacggggagcgaaggacaccgggcagcagaagcaaaagccaagggaaagacggagctccagggaactgaggaagaagaaggaacagcag

SEQ ID NO: 370168 - DNA, 474 bp, Zea mays
tttgctgtaccattggttgacatcactaattacatggctacatgttctggaaatacggactgcttagcaaatggaaagagaattattggggggagaaactccgtatctccattcaaacggccccgttcttccaggttcatcactccaataaaaaacaacaaactatcttctgctggagaatccatagtgccaccaatgcagatcagtccctgtaggacaatgctatctgtacgttatcctttccaacatcaaaggaaaaattataaagaatattttggtggtcctccttgcttcaaatatttgactgaacatgtgactgatgatgtgaagctcatggatgcaagaagagctgagaagtttagatttcagcatatggatactggtgcagaagagtttcagaaaatgctgctcacatgtggtgcttcattgtcatgtgcaacacaagaatgggtcagtaaccactataaatggatt

SEQ ID NO: 370169 - DNA, 511 bp, Zea mays
tgtgcgtatcccgctctcgtcttttctttcggcgacgagccgcatactaggcaaccgctgccgccctaggtcaggtgcccaggtatccatcggacgacccttccccgtcgacagcaagcaccaggtgtgggcaatatcaaatcaaactgtgcacttatggaggcttcaattccaagttttgaaagcatgtacagccaatattatgtggcatgaaagagatggaaaccagtcagacggccaacttggggattcatcaggagctgggaccagagatcagtcaaaatcccatgggaaatcatgttaacccagaaaaggaaactaatgaaattccaggatctgaggttaaccaagagcttgtggaaatatgccagggcgcagtggtggaaactgatacgatccaagaaaatcaagctgttccagaggcaggcttagaggctaatgaagagactgtggtaacatgccaggaaacagctgcagaatctgatgttaacctagagaagcaaacttctga

SEQ ID NO: 370170 - DNA, 215 bp, Zea mays
  unsure (1)..(215): unsure at all n locations
gaaccgattgccacgcaccgacccanaagaagggggaggtaaataaagaacctccagaacacaccagccgggacggagaaaggccaacggccgctgcgcacgagggcggacagcagagagaccaggacagaaacccagcggtggacaggcgaacaaaccggagagcagccacagacctggaaatggaaagaaaccgcacgcagcggagagctacg

SEQ ID NO: 370171 - DNA, 499 bp, Zea mays
acctgattgacttacattgctagcatgtaggggcttggagaatgcattgactctggagtgattatgcgaggctaactctgttttgttctctggtcattttcctggtgcacttgatatgacttgatctacctgcaactagaacatattccatttcttgaccttatttatgtgccacgcttcgatgcccaccgcaacaactcacaatatgatctttctatgataccatatttaaacaaaaaaaaaacagtgctgttctactctgtccatcattctgaactgcaagttgtctgtacgctggagaatacacgaaacagcagcctctaaaggtctggaacacgaaacagcattttgtttctgattcagtgcagagttggattagtccgttgggggttcacttcgagatttcctttccttctactgtacttgttttacagtctcagctttgcctatgcgcattgcttgccgcaggtatgctaatgaaaactttttatctcaaact

SEQ ID NO: 370172 - DNA, 334 bp, Zea mays
gtacttaattgagtagattatatatatagatgaggagggtaaaaattacccatagatagctaatacatatctatacccgcatccatcttgcacccgtctaccgatgggtataatattgtacccattaacgtatctatgataaagaatttattccacacccggctattggatgtatggatttggggtatccattgccaccatctctgcttgtagcagactctcaagacgattatcatcctttctgacactactactttcctgtgtacacaggcttcctcttctcggcaaatgcagctagggcctcaacgcgatcctgcgtgtaaagcagctgctc

SEQ ID NO: 370173 - DNA, 383 bp, Zea mays
accacatatattcgttttataaagactgggatgaatcccatgttgtttatatatatacatgtacaaagcaatagccactacttatttaaagaagaagcaaacttgttgaatcaacaaatcaacagacctggtctacaaacccgaaacacttatgtacggcgccaaccatgcattagtggcgtaacacaagtccctagctcctcttggagcttttaggagcagcacagaatacttgcctccctgcttctgcagcatccttgattccttgaagttgatcagctatgtcctctaagagttgcaactgtaatgactgcctcctttcattagctgcatttcttatcttgtcctgtgcacctttgatggcattcaggcttttctcaagg

SEQ ID NO: 370174 - DNA, 170 bp, Zea mays
aaaaggctggggaggcttcaacaaaccattaagtaaagaatggggatgtctaatattaacaaacatcagctaactgcctaaccctacaccagaggcaattgcaagtttgcaacccttttacctacaagggtacacaaatctacgtagtaaccaggaagaaaaccctatgc

SEQ ID NO: 370175 - DNA, 410 bp, Zea mays
  unsure (1)..(410): unsure at all n locations
tcgttgcagccgagctcctccccaaatccttccccgatgctgcggcgcaacagcgagtgcgaaatcgagtccgagctctgacgcgctcgcatggagctctggttctaggtgtgggctgcgctcctcgtatggatccagatgttctcgtggaaccgtaagcagtcctcctcctccggctcgccctcgccctcctcctcctccggccgccgccgcggcggggcggacgcctccatggactccagcagccgcggcggcggcgggagcgggagtgggagcgggagccgcggacggagcccgcggttggatcgccgcaacgcggtgaagcgcgtcgactacgaggcgggcgcggnggcgtccgtgtcggtggccgcgtcgtggtcgtcctcgtactccgcggatcagcagcgttc

SEQ ID NO: 370176 - DNA, 367 bp, Zea mays
atcatagacccggactctggacaatacgactatgcaataacagccataccgggtgttgctcctgggccacccaaaaaaaaaaaaaaaacaacaacagagcaaaaaaaaaagcccaaacggaaaaaaggcacccaaaagaagagaaaaaaacaaaaagaaaaacagaaaacccaacggggcgcccgttgtgaagaaccaaacctaaaaaacccggccatccgagacaaaaacagaactagggcgcccccgaagaccaagtgacagagggcctcgcaaacacgaggcgccaggaaaaccccgggcgtcacccaacaaaatcgggaggaagaaaacccccccttcgccacaaggtaaaataccaaaaagg

SEQ ID NO: 370177 - DNA, 363 bp, Zea mays
tagtttaccgtgcttcccgctgtttgtctgcaaggaacagtcgtcgagtcaaatttttagttccgtgtgtgtgattgtgatctcggattcacctcagaccctcaggtggtgcaaatagattctaccttcccacgtaaaaacgacaaccgattgcagctgagctgaccagcggcctcccacaagttgcacgttctgttgcttgctcttgcacgttttgttctgtttcatggcatagtacggtcccgtacctcgtactctgaatctcttatagtagtaactgagaacagaggaagcaatggcttcgatttttggtacactcggaatacttgtatgcagtcaaattggactgtgcgtgcaaacaca

SEQ ID NO: 370178 - DNA, 337 bp, Zea mays
ccgccgtctttgcgtccggccacgcgtacgcccacgcgtgcgcccacgcgtccggtgcccgggaggacctaccgcctcgccttccccgcgggggactcgggctactgctgctcgggctccatgggcgccgaggcctacgcagcgcgcgccacggccaaggcgccctaccaggccaggggcaccggaagctacaagcgcgcctcgctggacttcacgggcaccgcaacacgcacccgcatggctgccagagcacctcctaccagatgaagcccgacggtacgctctgcgagccgctcgtgagaccacacctacctcgtcggcctgcgcaagaagaagc

SEQ ID NO: 370179 - DNA, 428 bp, Zea mays
  unsure (1)..(428): unsure at all n locations
gtaaaaaaacaaacaaaaaaaagtgacatactgtttatagatagctcctgactaatgtcgtcgtcatcaggacacacaatgttacgacttaaacaggaaaatcagatcaactagcgaaacacatgctaaacaaacatcgcctaagcggccacagccaatgctagaatacaagtccaagattatggtatcccaacatgttcctgtttccatgtaaaaatgatccccctcagctatttctccgtcgaatctaacttgtgtggttctgtgaagtagcgtccacatctgacatcgccatctcagcatatctctgcgccgcagatccgaatggaatgttctattttttcaagaaaatccgattgacaacgtccaatggcagtgcataggcaggatccaaaggcttcaccccggngtactccattaatgaaagc

SEQ ID NO: 370180 - DNA, 480 bp, Zea mays
  unsure (1)..(480): unsure at all n locations
tttacacattcttccacgtctactcaaccaagttttctcttcaagtgcctttaagccacatggtaatggggtgtcactcacggtgtcatcctcatccaacatttcctccacgggatgcaagcgttgtttaaaatgtgtagcactgcctctcttccactgtgttttacaatacatgcacttgaatctaggatatacgttctccccgtgctgccaaaccgaatcgatctgatctgacattcctaaaaacactagtagtatgagtgatttttgcaagtattgttagccattattgcgaataacagtaagcacctatgctaatttagaagacttgaggatgaaaacggaaaatccccaaaacctagctaccgcactggtcggttatcagcaacacgaggtgattaattgtctctaggggctggctaatcggtgcaaacacttgattaactagctcacaccngtggctaagctcgatgagatcca

SEQ ID NO: 370181 - DNA, 465 bp, Zea mays
ttttcctcaaaacaaggaagggagcagatggagccgcatcattaaaaaaaggacacggaaacttaatccgatccaccaaacaaaaatccctgtctctcgcgcagggcaccgccacgcgcgcctcatccggtaccgccatgacgagcgcctccgagctcttcatcgcgcgccgcgccgcccgtggggcccgcctctccgaccccgaccccgacccggacccgcaccccgtcgcgctccgggaccagcatggactcggcggccggcgccagcgccgcgggtgccggccgcgacgccagctcgacgccgccggggacgtgcgccagcacctgcacaccggggccccgccaccgcgtcgccgcggatcgtacaccgcactggactaccatgttgcacaaagagtgaaacgacaaacgagccttgttcattatagtagcagtgatcgagcttggcatcatgtagtcctga

SEQ ID NO: 370182 - DNA, 237 bp, Zea mays
cgggggcaggattttatttaagaaaaggaaaaccattttacgcttaacacgaggaggagggagaggatcaccaccaggtgatggtggacaaatcagatggatgacacataactatatttacacgcagctttgccattacaaccatttgcaaaccccagcagcataatcaagcgggaccaaaacaaaaacaaaaaaaaaaattctagtagcagtcgcgagcaagatacccagtcagga

SEQ ID NO: 370183 - DNA, 481 bp, Zea mays
aactaaggagagcgcgcgggccgggcaaggagcaaggacgaggtatcgccgatggtgttcttctgcttcctggcggagcagcggcggacggtgcggagcagcaagccggcggcggggatctgctcgcgctgcggcgggtgcgccagcgtggcggacatggagaccgccaccagggtctgctacctgctcaccgtgcaccgccgcacctggcgcgccatcatctgcaccttctgcggcgccatgctcaagtcctaccgccactacaggctctactgactctcggccgatcgatggagttgttcgagtcggtgggtggtggtggaacgcgcgccttcattcttcgcgggcctcgcggcttgctgtgaggtgtagtgatgagctacttacggtactagctagtgatctgttcttcctgatgagtcctctcctgactgggtatcttgctcgcgactgctactagattaaaattatatgttttgtt

SEQ ID NO: 370184 - DNA, 408 bp, Zea mays
agcaattaattcccttagtttacaatcactatatacagaaagcttgaactatttgtacatggattgccaaatacgccgatttcgatttttgcatataggggaccgaaaaacatcaacaaactggataaaccaccatgtgatgaagaacgtgactgcatgcaacaggacaaatgactacactgcatacataaaacacaagtaatagatcatgcataaataaaagctatacatcgatatggcaacaggtttagctcaattcttgtgaagcgtgtaccataccatccagacataaacttaacttgagacccaattctgaagaacagtaacaacatgcatgcacggaatataccatgttagtcatggacgatattttactcatgctacacataataaagttatgtttgcaaa

SEQ ID NO: 370185 - DNA, 174 bp, Zea mays
aacatcacaaacctaccagcatttggagcttatatccatctgcctctatgcaaaaattcatacaacatagatcaatcacttgtggacaaacataagtccgaccaagactggtgtatgacaatttaacataagttcaataaggaaagctgacaacctaccttatgagcctgtatg

SEQ ID NO: 370186 - DNA, 382 bp, Zea mays
caggaccgcttcgcaattactcggtttatgcacgccgccgaataaaatccgccagcaaacccaacaacaacaccaccggtcgactgcacgcacggcccagcgctttgccacgaccaccgcggaccaccagcatgccgccctgctactagagcacctccgatgacccgcccgaccatcccaacaccaagcccgcggccccgccggcccccgccatgggctaccccgtcaatcccgcccccaacgggaaccccagcgcctacttcgtcaacgtgccagccgacgccgccgccggcaacggatccgatccggcgtccttcggcgttggctacccctaccacgccgcatctgaccaccataacccgacgcctaaccaccactaccc

SEQ ID NO: 370187 - DNA, 477 bp, Zea mays
atcgtttcgcgcggcacggcgggcaccgactcggcgaccattgcgctgacttcgtcgtcggttcggccggccggcaagaagcggcaggctcaggccaagctgcagggcgtcgtgctgggctgcaccacgtcctacgacggcgagagcttcctggcctccgacggggtgctcagcctcggctacagcaacgtctccttcgcgtcccgcgccgcggcgcgcttcggcggacggttctcctactgcctggtcgaccacctcgccccgcggaacgccaccagctacctcaccttcggccccaacccggccgtgtcctcggcctccgagacggcctgcggcgggggctcgggctcggcggcgcccggcgcgcgccagacgccgctgctgcttgaccgccggatgcgcccgttctacgcggtcgccgtcaacggcgtctccgtcgacggggagctccatcggatcccgcgccgcgtctgggac

SEQ ID NO: 370188 - DNA, 156 bp, Zea mays
aaaggggaagtgaatgtttgatggcaggacgtaaatccatgaaccacaatgactaagtgtcccttttttactacatggaccatcaacacacaacccagattaagaccaatgtagttatctacttacacattgaaaaggggggccccatgaatgaac

SEQ ID NO: 370189 - DNA, 490 bp, Zea mays
atatctcccttgcgtctccatctccctgccccagcgcctgctcccattgccgcgcgcctgctcgccatggcactggccgccgcgctcctccctgctcggccgcccatcccccttgccatggccacgccccccctcaactgcctgcgctgctcgccgcgtgtcatggcatctgcgcccggccagagctcctgcgcgccgcggcttctcttcccccatttcccagctcgccctcctgctcggtcgcgctctgctgctcaccggtgctccagctcgctggccgtgcagctcggccctgctcacactcggtctccagctcgtcgccatggcgcgtctctcccatgacgcttgcccagtccggccgccggtgacagggccgctcgcagcatcttcctcatctacgccgatgtcgtatgaaaatcgtcgcgctggcacgtcgatgtcgttgatcatcatcctcatctacatcaagccccaaaccatgaagatgctc

SEQ ID NO: 370190 - DNA, 190 bp, Zea mays
attccagggacagttttttttaaccaaccttgcaaatattacccaagtataaactgggaaccgacatgcacaggaaaagcaggggaggggggcaaacaggctttaatttaagatcacatgatgggccgtcagcctttacgagacacgtctaaacaaaacaagacccaggccccagcacagttaatgacac

SEQ ID NO: 370191 - DNA, 243 bp, Zea mays
cgactcgggttcggaagaggccaccaccacggacgcgccgggcgacccaacggcagcccaaccgggcacccgagacgccgcgcacatgatcgcaccggggccggagacccagagcccaggggagccgactacacgctcacaccaaaggagggcacgcaggcaacggagagcgaaggcaccacgaccggaacagaacaaggcgcgccaggacgctggcgggtgccacggcgcccggcctgctgg

SEQ ID NO: 370192 - DNA, 233 bp, Zea mays
aaaaaaaaaaggggcctttatttgggggggcataaaaaaaaagggattgcccggggggaaaaacaggtaccggattattcccagcccccttggcaaaaacccccaaaccgggaccacggggccggggataaagtggccaaggggacccccgggaattgggaaggggcggccccccgggtgggccggtggttgggccaccccttttttaaggggggggaaagggatttcttggg

SEQ ID NO: 370193 - DNA, 308 bp, Zea mays
tctcattcgtacggtgcatcgcgctgtgtctagggctctctccatgcttctctttctagctttggctccaaccctggcgctaacgctaatcgtaccgtggctcgtgccacggggtctgccaatggcactccccgcgtgagagtgctcgagacaggggccgacctcgaggccggtacccgagaaggatagcaacagatgtatgcacagggaggagctggggtaggccctaagctggaccacaagccgatcaacgaccctctggataaggatgtcgagaaggcggtcacgtcgacgtgcacgtcgagggg

SEQ ID NO: 370194 - DNA, 439 bp, Zea mays
ctcgaacacgcaggagagctgcgtatcatttcattagaagaagaaaagaaaaaacagtatatacaaggacctaacacaccactcacacacgcgcacacaaacaacaagaggtaaaaccgcctcctagcaggggttgaacacaaaagctaggtctcaaagacgggtcaagcctttggaccccgcaaaacaccacatattgaactcatcaccgactgaggtaagcaatatagctatagaaggctgagcaccattgaaaacacaatcatttcggggtctccatatactccaagcccccaggaccaccaaggaattaaagccatctctgaggtccttaggaacaacctcagcccatctactccaccaagcttcaaaacttatatcttccatccccggggaaagggcggccaggccgacacgttggagaaggagaaactaaaat

SEQ ID NO: 370195 - DNA, 492 bp, Zea mays
ttatctcttgagatggtttagacatgtcggagacctccgaaggcacaagtgtgtagtgggaccctaagacaccatagtgatggaaagagaggctggaaaaaatcgaagttgacaaaaagagacaataaaagtagaaaaagaataaaatatatataaagatttagccttgagtaggagtgcatggaaaacatctatccatgtgcatgaacttggacttgtagtttctattggggtttcaactctagcctatcccaacttgcttgaaattaaaacactttgttgttgttgtatctataagatatgccacatttcgatagttctgttctgtgagaggttattcacaaaatatttgtgtctcaaatatataggaaagctatgaatcattgcattaagaagaaataacacacaaaccccatcgttcaaatctaattacatgcataccaagttgcaaaaataaatcgaccaatcatattgtagaaaggaagaatggac

SEQ ID NO: 370196 - DNA, 210 bp, Zea mays
ggccaaaaaattgggttaactcccttaattaattagcatatagcgccggcaactggaaatatatgatcgaagggtttcgccctagcgaaaaccagcccaattaatcaacaagccccccttggccatgccttcaaacaaaacgagacaagcagccggccgggttgccccaacgggttaaaacccatgatcgccgggattaaaactactgcc

SEQ ID NO: 370197 - DNA, 306 bp, Zea mays
acaggtgtgtcttgtttttttttgtttttttatacattttattttgtacatgttatatatttttttgtgaaaggaatttcttaagccccccccggtgattttttttttggtccactttaaggtggggttaaataaaagggggaaccttttccttttaaaatggggggggcaccccccaaaggatcccttttgggccttcccaaaatgggcgagggatttaagggggggtttcaacaaaaattaaacttttctaaacctttctccaaaaaggtggggaaacttttttgggcggctccttttttaaaa

SEQ ID NO: 370198 - DNA, 592 bp, Zea mays
  unsure (1)..(592): unsure at all n locations
gcccctgaggaccggccggaatttcggtcgcccacttctttttcaaaggctagaagaagaaaagaaaaggtgggaagtatctgcttttctatgcagtctacattatttcttctacaaacccagctattcactgttgcaccctttctgtaactcttccgtgatgctaacaatgaaattctactaatctagttgctgtttgcaccggaatatatcacaaggtcagctctatttgataatctgttgaccatctgttttcctgagtacatacgtgcaatattatttttggattttgcaagtactacaaacataaatatgatttgagcatctgactgccggatgtgaatcacgtaggttatatgagacaattgtggcttaaggtgcaagtgcaaattcagtaggagtttctgtattccttgaaatcgcgacgttagttatagctacctggaaaaaatcacctgcgattaacacagggcaacatgacttcaatgaaaaaaaaaggtttgggattaaacaaaaaaaannataatttgtgtccacaaatttaaatngtttctgagcaagaagttttttggttttccatgggtatctacta

SEQ ID NO: 370199 - DNA, 421 bp, Zea mays
ttcttgtcctcactgctgcatcgtggccctagcgccgccgctcgctcgccctcatcccccaatcccctaggcctccacttctccgattggggcgatttcatggcaagcgggcatagatccgacatgggcgcctgcgctccgacggccgctctgtcctctgcgcctccactacctctctcgttgttaggcgccaacggccaggaggaggaggaagggtcggccgggccaccgctggtggccatggcatcccagtgtgccccgcccttgcctgctgggccacgcaccgccgcgccgttcctgctgggccacgcaccgtctgacgcccgtgctgctcggtgtgccaccctcaccccctgggtgcgcgccagcgcgcgcccgtgcttgctcgcctgcacgcgcgtgctgctgagaccacagagcg

SEQ ID NO: 370200 - DNA, 316 bp, Zea mays
ggggacaacggttggccatgtatttggatggagggtatgagaaggaagctttttatacaggaacaaagggccggcagaagccacaactggttgaaaaccaaaaattgaaagaaagaaaaaaaaaggtttgggaacaagatggttggccaaaaaacatgaaatcacccgggagcctggaaggccccgaaggtttaatccacgggttcttggtccaatttttttggaaaaattgggagctttggagcagggtcgcctttgggggggagagggctggtttttttgacgggttaaaaaggggggtgcttttgggggggaa

SEQ ID NO: 370201 - DNA, 279 bp, Zea mays
agaaactgaaaaatctcctcaatctatattattaggccggcccggttgggacccaaatgtaaagatcaatcaggggccctcctgggtaaaataaaaactacctgctaaactaaaagtttattaccgggccgaacatttagcaggggggcaactttttcaatacaacttaataattttacaatatgcgacagtagggtccagtccagggggcccacgccagcctagcttttggttgagagttgtgcaagcagtacagtaattttgcccgagaagaagttt

SEQ ID NO: 370202 - DNA, 344 bp, Zea mays
tctgatttttacgcttacgtgcatccagactccagtgagatacaatctaattactggacctggcgtgcacaccgatcgacgccagcggccagttgatgattgtgagcgcagctgtggagatggtgcgatccaagatggctgctccatcggtacaacaaaaacaaaaggccgagatcccacccggggggcgaccagcacattgcaaagagaaggtaggcctaaaggaagggagctagcaatgggtgagggctagagcacgacacacactaatcaagatggtcgggaagaccatgcccgagccggagaccgcctgacgtacagaggctgtcaaggacattcaacaa

SEQ ID NO: 370203 - DNA, 518 bp, Zea mays
ttcctttcataaaatctagggttaagatgtgaatcatgtgagaagtgtctaagtggatatgtaagttaaccatgactacataggtctagtgtttctatcatctagtcgacttattcgactagaattatttgtgccaaggttatggatgcactaaagacttgctttagtagttgtcgtgttctatgtttgttgattggttaagtgtcataaatagataattgttgttacacaaaatatttaggaagcaaacgacatcgacaattcgttgacatttagtaataacgagtctaggttttattagacttctaaaatatatttcactaaggatgatagtgtgggttaaataatttattcttgattaatttcggaattagatccgattagaaagcaggaacatgagtgatgcacttagtgtgtatgggttgtgttttcgaatgtttgcattagattccgttaaattatagaagcgtaattattacgcgtagtcgtctgtcgataactagattttctataaaata

SEQ ID NO: 370204 - DNA, 321 bp, Zea mays
tttgtcttgttcttattcccttgccttcagccgtactgcgggctcatggaggagtgcacgccggcgtacgcggccggcgtgcgcgcgcggtacggcgggcgctggctgtgcgggctctgcggcgacgccgtgggcgaggaggtcgccgccgggggcggctcggtgctggagctcgaggcagcgatcgcggggcacgccgccttctgccacgcgctcggcgggcgccggacgccggccgcggccgagcggctcatcgccgcggtgcggcggctgctcctgggcgccgacgcgggcgggaaggaggaaaaaaccgtggtggtg

SEQ ID NO: 370205 - DNA, 243 bp, Zea mays
ttcgtgttcccacgcgaccgcccacgcgagcgagcacgcgtacggttaccctcgccaccgcacgagagccaaaagccagccgtcccacgacgcgcccgccccggcggggacgccccggaggacgcgacccgcagcgaccggcgaccaagccaggattgcctacgccccatgggtaccagggcgcgggagaaggccgcgcctcggacggagtaagctcggaccgccccccctcggagagttctg

SEQ ID NO: 370206 - DNA, 356 bp, Zea mays
gtataaacttgtttctgatacatttataaacatgtttacaattcacttgtgtctgtgcagtgcatgtatatatccacatcatggactgtatgtgtcagtatacgtagtttgtggtggtgacaagcgctattacgattgtcacaaaagagagatgcatgcatggttggcttatagttcctgctggacctggagaagagcctgctggagacgaagacgccgagggagaaggcggtgacggcgacggagaccaccttcctgttcctcttgatcgactccacaaggccctccgcccacttggagcccgccagcccctggagctcctccgccacgcgctccttgaagccacggaatgcctt

SEQ ID NO: 370207 - DNA, 276 bp, Zea mays
ttcctttcgtgccgccacaagcgccgcctgatcctgcgcctgctccttggcaaagctggaggtacagatgcgactccatggccgtcgacatgatcatggtgaagatcacagtcttcaacatagtcggcgataagatcaccaatgagatgaccaaggttttctaggacactatcatggtcacatttatggtcctattcatggacctctacaataagtactatcagcagcggatactaacccgtgacacagctgcagacaaggctacagaggctgctg

SEQ ID NO: 370208 - DNA, 276 bp, Zea mays
ttcctttttttttttttttttttttttttttttttttttgttggttttgacagggatccagcaggttcattttataaaaattccaatttttgaaatacatgacacattccatttttaacaaaccacaaaggtttagacaccccgttttaacaaaccttaaaagattagacaagtttttggaagcatgtgtcgtttaaaaaaaacacctttttaattaaagaaccctaaaaccttgccaccaaaatttttacgggggggcttcttatgggccataat

SEQ ID NO: 370209 - DNA, 249 bp, Zea mays
aggtgtgctatcgcaccagacgcaaagaagggccggcaacaagctacttcaggagcacggagaggccatcaacaaagaaaagaacgcagggagccctactatggcgcaccctaatggctcaaactccaaccgactgaagcaaaacacatgcaagatgccagagacagctcctggaacagcaatgccagacggcataatgcacaacggaagctcacgaggaacaagaaatggcacaccagccggcgaaca

SEQ ID NO: 370210 - DNA, 392 bp, Zea mays
cgcgtccgcccacgcgtccggaagatttcaacagaattttatcttctcaggcatgaaatataggtgttatggggattgggaaatttctagatctgaatttgtattgaaagttcccattgacaactgaggcgtggtgacactctaaaatatccaaggtgttgggagcctttttgtttgagtaaaattttcacaagtctgtcttagtctcatgaaaaccaaaatgttgatactctctttagcgtggatcaactttggcatgctgtcaacattcagtttgaggctgcacgggacggccgttcagacttgattgaggctggacaaagcaacagaagtggtcccctggaagatgctcgtggtcttgcacatcgctatagcaggatgagacatgaagc

SEQ ID NO: 370211 - DNA, 416 bp, Zea mays
ttctcgtctttctccctgcgccccgctgaggtactcggcgcgtcgttccctcaagctcggccgcctctccctggccgcgatttctcccccccaagctcccaatcatggcaggcccccctctgtttcttcctgacgcgcacgccccatccccaatggcgctcggccgcccagctccctgctcctcccactcgtaggcctcaagttcctatgcgcgcgctccacagctcccatggcgtgcgtcgatgcccagctcggatttcgcttggtcgcccgccgtcccccccgcacgcccatctgcctgctgttgcgttgaccgaagtttcctgctcgctcggccggccatggtggccgcgcaagtctcctgaccgtgggcagctctgtcccaggccactaccgtgctcaagatatggcgcgtt

SEQ ID NO: 370212 - DNA, 406 bp, Zea mays
  unsure (1)..(406): unsure at all n locations
acctgtagtacaagaacccancacgcaagcagngcccgcggataaacgaagggacgcgcagcgccatcaacgaaaggaccaagaaagacgggaacccaaggactcagagacggacaaccaaccactcgatgccacccgcgagcggcaggcgacaaaccagagcccggagaacaancgacatccctcgcgagggagacccggagaacgagatgctccccagaaaacgcgggaaacaagagagctcaacgacaaatggaggccgcagaaacggccgcaactccaacaagcagcgccccggcaagtacgcaggcgaggagcagcccacgagggccctgcaccccaagaccaacgaccacaagccgctcacgacaaggaaccgacggagccacacagagtgggaggccca

SEQ ID NO: 370213 - DNA, 209 bp, Zea mays
atgcaacaacaccaaaacggaacactctcaggttttaaaaactgagccttgtggtatggtacaacaaaactggctttcctttttggcgggaaaactacccgagggggaaaccagaaactattccattgatgaaattgctcaattgggcatggctcatttttcgacccctatggctaagctaatatgccattaacactctttttcttaat

SEQ ID NO: 370214 - DNA, 413 bp, Zea mays
tttgtcttgttactctaacgaccgcatgaactgggctatgtctcgaaggatcagggcgacctgcaactcctgatgaggacataacgaacataccagctggaaagagcaactatgcccagctgagcaaaggggatgaagcaacagatgcaaagacagatactgaaggatcatcctgtgcaggacctctagcatgatgacacagtatataacagagaagctgcaaaggatggttaccatctcaaacaaactggcccatacaccttgcctggtcagaagctcgctcagatatgagtgcagatatacggagaaaactcagagctgtgaccttcagtattattatcatagagtggagagaaacggtacagaaatcactgaattaggtgttctggaggaaccttcacctgtgacaactg

SEQ ID NO: 370215 - DNA, 152 bp, Zea mays
gggggggcaaagcttttggctacccggaaaaaaagtgtttttatttacaccaaatgccccatgttgagggtcaatccatgaatcccagggggccttgtttaaatgggggcatttagacccttggggggaagctcccggggcggggggctttt

SEQ ID NO: 370216 - DNA, 273 bp, Zea mays
gacgcgcatgccagtcctggcaacatgctagtgagctgataatagcaaccacgaccaacacggccagaggtccacaggcagagaacgacggaacgctacgcgcgcgacgcaaaggccagcaggacgcgaactggcagagtcgagctagggagcttcgacgtgggcgccgcgagcagaggaacatggatgcgactgggaactggactcaatccgagcagaggaaatgacgcttggtgaagggagcggcgagggcacggcgagcggacccgtggg

SEQ ID NO: 370217 - DNA, 336 bp, Zea mays
acatgagataaggcatctttataaacacctaatatacaattcgcatcatggacttaacttaatcactcaaagtgtctactaaaaatcgagaatttaagcatattgcaaacattgaatgcattctagctaaactaatcctacgtatccaccatctatgctactaatcaggatagcaaaagagctcatcccacaaaatcagactgtggaaatgacgacgactctgattcaatctgtacgtggagtaccagatgcgccatgtgctgaaaccccctttttttgtcatcacaaacatcctaggtgcctcacctttgcaacatcagacacatacgcatagat

SEQ ID NO: 370218 - DNA, 363 bp, Zea mays
gatcatgttgttgtcaattactttctttctggtacacaacaatgtctccgcccagctgccaatgaatgtcctccgcatttacatgaccgaaacatagtttgttgcccaaggcagaaagatcccgccggataatttccaccggggagggataccaatacgcttcatagatcataggaaaaggaacgctaagctgatttctcaacttctgattgtgtcgattgacagggaggttacttcatgggcatccgcatcaaccttgtcgttgaaatggtcccttaggaattccactgccatgaatgtgaatgctgatgccggaacataccatattattctcggaacacttcccttgaacaagccgcgcac

SEQ ID NO: 370219 - DNA, 281 bp, Zea mays
agccaccttctattcattataccatattaatagctaagaattacaaattataaagcacaaacaaaaggacaggacaccagtccaacataattcacataaataaatatgaaggattattggcccaactcaatatactaccttggctccatgtcgaacataatgtataagaggatccataggaattgcagagttcccataaggctcatacatggataaaataggagtatgtcccaggcatcatggtggttatagacccgcctaaattctggcctaggttcaag

SEQ ID NO: 370220 - DNA, 293 bp, Zea mays
caattcattggcatgcatgtatttgcaacagagaagttggactcggacatctccagccgagcgtgtacatggacatgcaaaacactgttttacactataaaatatagagtttgaaatatgtagtgtgataaagagacttgaaagatgatgccgacggtgccacttgcatcgactcgatccatcgacagccaaggccccatggctattaacacaataacacggacagcctttaagatcgatcttgccctacacgaataatgcacggcggcagcgccagtgttaccatcatttga

SEQ ID NO: 370221 - DNA, 280 bp, Zea mays
aaacacaaacgcgtgggagtagaataaatcgagttgaaatcgaaatcatcgatgccgccattatttccctgcttccatatcgatcggtcctgtgaaaagggaattttctgaagtctgaacaccgggggggccatggggagcaaccgcgccttgttcgtgttacctattctgctcgccggggccgtgcttttccccgaacaaatcgccctcttttgggcagacttccctctcgggggccaggccacagtgcaactgcctccggcgccctaccagcggggct

SEQ ID NO: 370222 - DNA, 188 bp, Zea mays
accccccacattttttacatgtccacaattaatcaaacagttctttttcacacaggcctactaatattctactcgatattttaatttagttaattggcccgaatagggacataactcgctttaactgaatttggctcgatactcgcaaaaactgggaagtcgacgagagttttgggacttacccaatt

SEQ ID NO: 370223 - DNA, 323 bp, Zea mays
aaagtagtaaaaaacggtatggattaaagctaaataaataggcctgtgattacaatgatgcaatgcacaccacacgaatgatccatctcggaacctaatgaaaataaaaaggcaattcgagatttctttttccccaatctcgaattatctctcgatcaggagccagtacagcttcagcagcagcaccacccaccactccgagttcagtgtagacacaatcatcgagtgtagtatatggcatggaagatgaaatggctgtttcctctaatgccatcccatctgttgcagtacggccccgacgagatgcagggagccggtcacgc

SEQ ID NO: 370224 - DNA, 193 bp, Zea mays
ggaaaccaagaggggttcccctgatttaaaaggggggggtttggttaagggcatccaggacaattggccccgttcgggattcccacccttcccgggaaaaaacgactaaacagggggccccccccagctccggggggggggatccccccggggaccccccaggaaaaccaaccgggaatgcccctgccaatcc

SEQ ID NO: 370225 - DNA, 228 bp, Zea mays
acttgctaaggacaggtacccattatcaagatatcaccatacatgtttttggggagctcaaggaatgtccttcccaaagcaggtttgttttttgccacgaccactccagtaaaggcataccatagggattttgcctccattatgggcaaaccatgcatttttgttttggaaggatttccaggaacacctttataggaggcaaaaaaccggattgtttatgggattatc

SEQ ID NO: 370226 - DNA, 346 bp, Zea mays
agaaaagcgtttctcatggaatcgaggaaattcataccacaaataatccaaccttggtttacagcacgcacttatacattacaatatataaacaaagcgtgcatatgagacaagaggaactacactggcaggaaagagtatacttttatgtgaaaccacccatgcattccaaatacattatcaccaaatacacaggcataccacaagcacatcaccaatcaccgcctggatacatccagggggatgccaggatccattcctggctgcacagcaaaaaaaataataatagggaattcatcgcaataagctcgatcatcggaacctcagctgccttccaagcttttat

SEQ ID NO: 370227 - DNA, 334 bp, Zea mays
cacacgaagacccacaacattaattttaataaacaggaccccaattcccaaacatttggaaaaaaaaaattttggggggcccggtaacaacaaaggctccaaaaaaaacttttacgggaggcattatcaaacagaaggggggagatccaagactaaaaatttggggacccgaaactttggaacggcaaaatccttagggggctccaaagtcatgcttatttgggcccaaaaagccacagttgggttcccaaacttaactttttggtttttttgggccccccaaaaaatggagctggggctgaaacaggggctgtgggttctttggggcccgggg

SEQ ID NO: 370228 - DNA, 219 bp, Zea mays
ggggaccagaacaaagttaaaatctttttgcagttacaggtggaatgggcccaatgggtttgggaagaagcgctttacccaatttgacgggtctttactagaggggggcttgaacataccctgcaagggggtcggagccattggcacagggtcttcaaaaacccgaacatgaagggtcccaacgggcggtagcttttctaggaggggcccgcaaggctg

SEQ ID NO: 370229 - DNA, 339 bp, Zea mays
attattatatagattctccactgaggacttatattattattacaccaagcacgtacgtacaagatagcgccttaattaaccagcatgcatatgtatacgtacagattcatatttacgcatatgtacgtatacatatgtgtatgtgcacaataatacgattaccgtaccttggcatgcactgcacacacacatccctgcagtatatatgtattgctttataaagccacggctcgtcgccctgctagccggccgctcattattgtatacacacactgcacgtggtcaccaagcaagtatatagcgcatgctgcctgctcagtaccggccggtatagcaagc

SEQ ID NO: 370230 - DNA, 350 bp, Zea mays
agatacaacagctggcgtatatagtaggcctaagagagtacagagtactgactgtacgctcacacaccgaagaatgtatcagactctgcgtgtaaataacagcattcccatatagttcgagggaatagttcccttacacaaatgataattcactctaaaacaataaccaccccttgtaaaaaaatgcacaatcaacaatttacgctgttggtcagtactacaagaaaggcacaaagggtccatcattgtctgcagcagtacctgcaccgaacaagctattaaacaggggcataacttggatgcaaatccatgctgatttacaacaaaaaattcccatatagcgcccttag

SEQ ID NO: 370231 - DNA, 249 bp, Zea mays
  unsure (1)..(249): unsure at all n locations
ggttataaatatgacgcctccaaggaaggaggtggtcattagttccaacgctggggagcctcaaaactggccggggaaaagaaaatccctggcttgtacctgcaaccatgcangccggttgctgctgtggatacggtgcatacatcagaggaatttgatcggctctgcctgcagtgccttgttcactagctctgactgatcctgcgcatgaaccgacaggaagcctgttgctgtagcagctgaaggtgc

SEQ ID NO: 370232 - DNA, 252 bp, Zea mays
ggagcagcgcgggagtaaagcggagctggggcggcggcagccgttcgcggggagggaggcagaacactggaattgtgcacgcctacactcagatgaatgtttctgcccgttgctcggttttgtgttgcttttttttgtggaggccctggcgtgggagctgaacatgaagctgttggacatgaagcagcggtaggagcagtgcaccacctttctggttgatgaagaaacttaagatcgacaattttttatttg

SEQ ID NO: 370233 - DNA, 428 bp, Zea mays
cgaaaccaaacagtattgtttaacatgagtgggtgcacattcacatcagaaaaaacaaagcgagagaaaataaaacaaattaccacgtcacgccttccacgatcagacagacgactggatccacgcatcattcatcaagcagcgtggatgagaatgacagcgtctgctaccctcatcaacacgccaaataaaatgtggccagggtagatagaaccaatgaggtcactagcaaccacagccaccaggggaaaaaaagatgagctactattttccccctttttgaagtaaaaaaaaagggactgctacataataaatggagcaacagaaatctgtgttagggtactgggtactgtaacatttcagcgtaggacaatgctgatgtagtggtgctagggtaaaatactactaccatggaccaccacccattg

SEQ ID NO: 370234 - DNA, 383 bp, Zea mays
cggccttttcttttttttttgtttcatttaagctaatcaacaaaggctagatgaagggggaaaacagaacaaaggctgcttggcagtgtgcgcatgtctagcagctgcaaggtgcataggaaaacccagggtctttatagccattacactgtatattatttcattcaggatccagctacaaggaactaacgcggaactcttgcactcaaccatctgaaatgactacaatttcacctctaattggtgaatccgtttggagaagacatatgttcatgaccagcttgatttccagcaactccgttgctactcacaggatgacttgagcaggatctttctttaggttgagaagatggtacaatttcacctttgttattgcccttggg

SEQ ID NO: 370235 - DNA, 311 bp, Zea mays
gagaagaaatattggtgattacaatacataagtataatttacatttacaaacgggtgtcgcatgatccatattattgttcggaaacaattgttcatagaaaaaaaaatcaaacatagaattttactggggctactcttggtttttcatgttaagaaagcatagcagcagccatcttgattgttcagcagaagattataagttatctttgctacgagctgctagaagacaggaggattcttaagtggttttgtttctccaagttagatgcctgccacctgcatagtgcaagtgattaaatggtctcaacttg

SEQ ID NO: 370236 - DNA, 171 bp, Zea mays
gggccccgcaaaacaacaacaaaattaactggaagacagcggagacaatagtagcacttgcataccaacaacggattgcataatagcataagggggaagacccacaaaacagacccgagggtctttttttttcctccataagaataaacccagcttaggggacctcctcca

SEQ ID NO: 370237 - DNA, 233 bp, Zea mays
ttttttttttttttttaactgtttcctctttcaaaagaaacgtcaacgtaaagtttttgccggtgtacaaggacaggaaaatgtgtttcgaaatttaggaaatgctaaataccaccgttactggatattattttttcattaataatgtaatgctacccaaaaaaaagtaacggtctttggcagattttttatacggtcggccatgggcccaagctacactcggagccaagtgg

SEQ ID NO: 370238 - DNA, 252 bp, Zea mays
gacgcaatggtccgatcaatttttcaggagcaaaccgggatccatcataagatagcaagcaagcgaagactaacaactagtacaaagctgtttgttccacgggggtgatgaacaactacaaaggtgtgtttcataggttgcctggacacaggcaaaagcgacggtacatggggtacagagtttaaacaacagagcctgaaacgctaggcaacttggctttactactagggggaccgggttctcacacgaagg

SEQ ID NO: 370239 - DNA, 435 bp, Zea mays
gaaaaagccaaatcaatgctgaagcgaacagcgccgatcctaatgtttcttacacaagcacggcaatgtacaaggcacgataacgacgccatcgcagggcataccagaagaccaacccataaactaccgcaatataagacgagaagagtagaaaaaagaaacagctagatcaaaaggtcctcaagctcttcatcagtgcaggtttgactgcccatgagcgtatgtacaaatggttggtgcgctgtgcatgaccccgctcaacctgctgaggaagaacaccggtaaataccagaatgcatgtttgtccaccagaagtcgccactacgacagaatgcaactcaaatcaagagaagattctcttggagactacatcggctaaatccttggcatatagagtgatctcgaccagtaccccacccaagaaaacactaatac

SEQ ID NO: 370240 - DNA, 187 bp, Zea mays
ttccttctcctccgccaaggggcaggggaacgggcacggtttattttaatgagtgctagtagttttgccagaggtagtgccatagttaccgtcacgcgaaccatcacaccaaggactgtacttctgctagtactcctacctaaatattggagataagattgcgcaattattgcacgcattgcagagc

SEQ ID NO: 370241 - DNA, 234 bp, Zea mays
tgcctttcgtccgcttgaacttgatttcttgaacaagcacagcatgtcacttctaatatagtatggcatactcgccacatccactgaattagaagtgacatgctgtgcttgttcttactatagagtagtgtctgagggccccaccgaagtcccttaaactctttcgcgaacatgacgcgagaatgcaggtgctgcagcttgaacttgatttcttgaacaaaattcttggagttc

SEQ ID NO: 370242 - DNA, 402 bp, Zea mays
  unsure (1)..(402): unsure at all n locations
tgnctgcccacgcgtccgctctaggatagaaataggggcagaccaacatggtccttcctatgttcttggattgcgggctgagtcaccttgcatgtcaggcaaggcaggtagcccacgtgtgaatgatcgcgaaacaagtgaggaactacgtgctataaaagttgatccagctgatggattggacatcggtgcagtgattctcaattgcagatagagcacagaacattgaacattacgccactcgtatcgaatcatcgcgttggtctttcactgtgctggatcgatattgagctgagaactcggatcacctgaacgatatgtgtgagacactcgtacatgcactttttgatgcttcagacgcggatgccctagttgtatagtaggttcatgcacgcacatctg

SEQ ID NO: 370243 - DNA, 495 bp, Zea mays
tttccgcccacgcgtccgcgcgccgccgcgagagagggtgagtactgaggaggagggtttccgatggagaacggcgaggatacgttcgcctcccccaccgccgccgccgcggacttctccaccaacggcggggacggcacgcccaagctccacgacgcggcggacgagatcgagtccctccgcgcggcgaagcgcgacctggaggagaagctcgatgccgtgcgccacgagaaccagttcctgtcctccgagtcccgccgccttgaggttctcgtgtcccaggcccgcgaggaggtcgccgccgccgagcaaggtgctgccaccaacgagagcgaggccgccacgctccgcagcgaggtcgagcgcctccaggatctcctcgccgcggagaaggctagccatgaggaggagatgcgcaggggtgcacggctcggggaccagctgcagaccgcgtaccaggagaaggccgccctcgaggaggagatcgagaccctg

SEQ ID NO: 370244 - DNA, 246 bp, Zea mays
ggtcacacaggggccaaaacggagggggtgcggggggtatcagaatgccgccattgaattgtgggaaaacgggcgcaggctggactacatcgagaaggaacgaaaactaggtaagcgcgataactaagagcatcttacctcatcacaggcgtgaatttgcgggcactcagggagagggcaaggtacgctagcaatgcacttgaaaaacactgataaagacaaggcaggataaaaattggatcaaat

SEQ ID NO: 370245 - DNA, 358 bp, Zea mays
tcggcgggggccgcgtcgggagccgggcggcccaggagggccgtctctgggggaggcggcgcgctcgggagcaagcgcctctgggggctcggagggccggagctagcgcgtatacgcggcgtcacccggctcgtgttacgacccaagcaggtccccgagatcggacgcagcatcggcatgaccgccaagagctagcactaggcggctaccgagcacgaaactgaactgaagaaagagcctggggaaggcggcgatcagccccaacctgcaaccaccacagcagtgaagtggaggcgaggagaaggggctcgaggcaactagtaacaaagtgagtgcgtgaggatcaggagctatctag

SEQ ID NO: 370246 - DNA, 499 bp, Zea mays
ttgatggttcatcatttccagttgagaatgttacagataacaatgccgatgatgatgaagttgacagcatatctgtttatgacgtcgacaaagatgaagaaaatgaccacatggaagatgaatatagtgagggcatactgcacggatatcaatcagaaatttccaatgatctcaagactttatcttcaattcagcatgctttaagagaatctaatgatgacacaaatggaagcagatggtctcaagttcgcaagggcacaaaagtaatggttcaagttgtcaaagaaggattgggtacgaaaggtccaacacttagtccatttccatgcctgcgaagccgattttggatattggtttcccgtggcaacaaagttggggtatccaaaaagattactggaatagaacgcaccaggttaaagggcatcacagaattactgcgacctcctggatttacttagacggctcgcacagtcgcagcttgtcattcctgggaggaact

SEQ ID NO: 370247 - DNA, 297 bp, Zea mays
acgatgatgaagattatccaccagggggcaacttttactagaactggaggtgtgtttccaagctgatgcactagcatgtgcctgcatacactggtgaaagggtgattctcccaagtgaggtgattgcgaagaaagggaaacaaggaaccgattatgttggcagcactaaaggtaaatcagatgaaatgcatattgataaggctgtcttctctaagaggagttcctataaaaaaatgattggagacatgaagggtaaactatggagtgaacctacccttacctagatcaaggttgcac

SEQ ID NO: 370248 - DNA, 490 bp, Zea mays
gcttgttcgcgtgggcggacgcgtgggctcgccttctctttttgtgaatggcggcgctgtgtgatctccggcgatgccccctgcggcggggatatctgggacgcgcgacgaacacgagtaggaaggaggtggtcgcgctccgggcggcgaaagacctgggcgctggcagcctcagaccctgacagatcacaacgctgacaggatcacagcataaatggcgagctgagccgaggagaacagaccaggacaattttaagctggaggaggaagaagatgatgatgaactataacagtgttattctccctgctataaccccatacctatcggaagagaaaagaccgatacacacatcctccctcaccggtgctaaaaaggataaagaaataatggacgggcatgagagccggcgcaaatcagagtgcagaatggcaaaggcaatatccatagccacgtgaaattttgtgagaagggagaatctactacgtgaca

SEQ ID NO: 370249 - DNA, 500 bp, Zea mays
ggtcggctcgcgcgacctgtgtgctcactcgacccggggcgggtggcttcagcggtgcatgcggctgctatgcacatgtcggagcatctcgatgcgtggctatgcttggcggtacacagcctaacggtgatctgatgacttcagggggacacaggactgtcactcgggccagacttgcgcttcggcgggacgtgcggtgactgatgctgccagagggcaagtttctggaccgggtattgatcaaatcgtgtcatggggctggccgaagcggatcgcaagaaggggctcgaccgctagcagtgcgacggcactactgttatctgataacgttacagctgcatgctttaggtgctggatcgcgcgggagaccacaccacggacgtcgatctgtgccgggcgatgcccgtagtgcacgacgcacactccttagacagcgacgtgcagagcctctgtcgacagggcgcgcccgacgaggtcaaactcgcgctcgatgagatggt

SEQ ID NO: 370250 - DNA, 365 bp, Zea mays
gatcacagcaaaacatgggctggggactacccaaaccctgaggtaccctgatgcccaaaatacgtgcgcgcgacgtgctcaaaataatatcgctgtcccaggcacgaggtctatcggaaaataacaagagcgcagctagggtgtaccgccatgatcgtacctcccaatgaacggcacacggccccagggaatgatgcatgctgaaaaaatctaaaagcaggcctaattcgatgggggtgtgctacggataaggcatgccaaaaatatgaagctgtgctgacggcaacacgctaaagacatggatccacgtttgggggatcaatataccagatccactcttacttactcaggcttgacaaatacat

SEQ ID NO: 370251 - DNA, 429 bp, Zea mays
  unsure (1)..(429): unsure at all n locations
ccgccggcacgtgcccggacttactggctggatcgacccacgctcttttggagaagctatgcacgaattcatcacactcgctaaggtgctattctctacctggcgtgcttgctcaagagcgacagggaaagatgaatacagcctttacttgtggatgaattcgtaatggggcccatgggacctgcgaatacccattaggtggctgaagatgacgagaggaatgattgataccttggtgccattcatgtacaagcgggggcaggcgaaactgaggatatacatgagntacgtgcctgcgggtgtggaagtcaacatgagagatcctgatggtagaactccgatgtactgggctgtctatcgctgccatgatagggcttgtgcggttcttgcaaaaccaaatgcggacttaaatgccgacgacaactaagg

SEQ ID NO: 370252 - DNA, 272 bp, Zea mays
ttccttcgcgtccgctcaaaactggaggccttttgctccttaccatcgaaaggcggggcaccgtagctgcatccgcgatcggcctcgaagagagcaatttagccagacacagatgcccgtgccctctccaatagttgattgaaagtgactgagttggaactcatagatggcaacgggggccgcattaatactgataacttgtttggatgcccaagtgatatgggagccatatggttacaccgactgagcaatgggaatccactggacccatt

SEQ ID NO: 370253 - DNA, 428 bp, Zea mays
  unsure (1)..(428): unsure at all n locations
cggccggattctggtcgcccacgtgnctgacgcgcaggccgaggccagctgaggaagggcccattcactaggatgcggatatgctttcaggcatagacccaagcaccggccctgggcgaagccgtgcgtttgctaccgaggtgcagagggctgatcagatccatgcaaccacgaaccgtgaggatggtcagaggcctgccgggccaacgaagaaccatgagggccgtcatgcatatgacagggacgaaccctaacgcgcgattgacaaaccgggcagacctgatgcaggtggaggacatctgagcacaatggaggggaccaataacacacgacctgctgcattcgaggccactggtgccgcgagcactcgcacttggacgagatagccgatccagtatagttgatcacgctgcttgcttacaaagagg

SEQ ID NO: 370254 - DNA, 238 bp, Zea mays
cgagaggcaactttttttgcccgcgggacgggtggggccacgcctggcctgacgcgggaagccggccggaaccattcaactccgccgtgtcgtcgacgccttcgtctggcgtgctcaccaagagaacaaaacgcgagcagccaagaatttaacgttcacggttcggccacccttcggttccgcttccttcctccacgatgtattgggactgctttcctggaattccgtgacactggtg

SEQ ID NO: 370255 - DNA, 292 bp, Zea mays
tttcctaccgtttccacttgggtactaccaaggatatcctgttccgcagtgcaggtgagattattcatggcatcattagttaggcatacaaagccacacgctgcgtgacaaaacaataaacaggtcctgcacttacttatgggagagctgtctgatcactcggggactgctacggaaataagcatggacaccaagaatctaccaatccgaatgacgaaaccatgctgatccgaccatgctcatggaacacgatatgactgtttgaaagccaatagaaatacattcaggtgga

SEQ ID NO: 370256 - DNA, 279 bp, Zea mays
ccgccctgcacgccgtgcctatggcctggctttcgcccctgccccagccatgcgcccctgccggagccacggacgctgtcggcctcgacttcctctggtcgtggcatccgtgctgctcccggctccatccattgctctctcctatggtgcactcctactaccgattgcccatggccgtgccctttgctcctacccatgacgggtggaactctggacgcagctatggaacaggatttgccattgtcccttcatggctctagatgttcaagccgatgctgc

SEQ ID NO: 370257 - DNA, 278 bp, Zea mays
acacggagaataattgttgctggagggcactataatcatgacctgccgaatggcacatcgcattggattctggctttgctttaatcggttaccgatcagtgaactactatgcgggctagcttggcatgttctcggcgccccgcgtggcgctggattaactgaagctggcaggaccggaacctgacactggctcaagcctggtggcatgcccgaggggacagaagatgtctgtggtctggatggagccatggacacagagaatgtactcaccgtactta

SEQ ID NO: 370258 - DNA, 509 bp, Zea mays
agctggtaccgcctgctgcgtgctcccggacatgtcctcgggttcgatccgcaccgcagttcttatttgtttcacttcgtttctgaattcttgtcagttgggggttgatattagtcattcggtctgtgtttcaccatgcatcggtacccaggaagcgggatcggcctaatcatagtacacgagggcgggggcctactacttgttctagttatcagtattctgcaaagccaactgaaataaaccgagccctccctgataagacacccaagggcctgcaatggccccccctaaagaaatgggtgggcggaaaaaactctgttcactcttggcggatttagtattgtggacaccgaggaaaggtgggatagagccctatggtccacacacacaaggcacatgcctcggaagccgaggtacttgagagttgtgaaaaggtccaacttgatccataagagaacgtagagcatcaggactgctcctatcccagcatggaaaagtgaggcacatgc

SEQ ID NO: 370259 - DNA, 406 bp, Zea mays
tatcgggcaggggggaggcaaaaaaaatgctgacgacagtgttccaagagttagggcatggaggacgagacgggggcggggggacgacagcgcgggacacgtgaaatgagacaactacaccaagggctccaggtgcatcgaccccggggacgggggatgaggtcgcttccagcgccattgtgggtgcagaagccacgacttccgatggatggcggagggatagacggtggaagattgctgatcctagggcgaccacggccgacgacggcccgatacatgaccgggcgaatcggacgcaccaaagatgacaaccccgcgtggaagaggcacctgcatgtaccgagcgcaagaggccggtggatctgactgctgctgacacaggcacgggggatgctcctacgattga

SEQ ID NO: 370260 - DNA, 461 bp, Zea mays
tttcttggtcgttcttctggagatcattcaggtggagtaactgatagacaatcattataccaaagaagcataatttaaaaaaccaaactagccactgaatcgctcaaactcagtgctggggctcagaccagcagtggagtagtagtcgtgtggttcaaattaagttagatgccataatatatatttccatacactgcagcctagcccctgtcaccgcacacccaggaacccaggagtccaggacccgtattctacacttctgctccaatcgacatgtgttttcagggacctatggtttttaacccatactatgttatgccttgtcatatgcatgataagcatatttgggcggcaggcatagtcgtttgattgcaaaatgcttaaatgctatgtaatccaaggtgaagctataggcttatagctttttcgttgtcataagttataaccataactagtgtttt

SEQ ID NO: 370261 - DNA, 438 bp, Zea mays
cccacgcgtccggtggtcactcagagtgtacctaccccaggaagctagtccttgtttcaattgttcaggcactggttcagaagcgcttcaaagatgcaatacacatggtgaggaggcatcggatagatgttaatatcattgttgactattgtggttggaatgctcctatggattcagctgcagacttggttaaacaagttaataaccttacccatgtcactgaatttgtttgctcaatgaagaataacaatgtcagcagcaaatagtatgaagcctatatactcatttcctgatcagcgtgcaatcccaatggcggataatgaaagttcacctggtttatgtttgggtaacaaagtcacttctgtacttatggccattcgaaaagcccttgaggaacaaatagaagagagctcatcatgagaactgtgtatattgacc

SEQ ID NO: 370262 - DNA, 494 bp, Zea mays
tttctgtggggccgtaaccaaaacggacagctaggccttggaaccactgaagactcgctgctcccacaaaagattcaggcttttgaggtaacaaaggggataacgaaatcttgatgcagagtgatctggatcatgatagggaagttgtaggactaccattttgcactggggcaaacatgctatgcataaaacatgtatgtaaaattgtaaatcatgggtagcaagtcaaagttttttattcgcatcttaataactatgatttggttcacaacactctattagctaaaccactatactcatgagatataccatgtatgtgctgtcattatgttcctcagtaatggtgatgtgaacgttggccagtcacccataccaccttgtttcttctggaacagaactgtcactgtttgatcaatgtactgtgctaatggtcctacgtttgcagagtgtctgcgtgaaaatgattgctgtcggtgcccaacatactgctgcag

SEQ ID NO: 370263 - DNA, 412 bp, Zea mays
cgtccggcttgggacagtcctgtgcctgtcactgtagatggtacacggggcatgtcaaaagacaacagttgtggtggatcaagtggtgcgggaggatgcgatgcttatgttggcaactgaaataaatcatgtgttgtggatgatgcacaggatgaaggatggggcaatggtaactggagatctgctgagtctgaagaaacaaacaatcattgcggaaatgggtacaaaactggagctgatgaccaagcgggtgacaacacttgggatataccgctatgctgaggtggtaatggggggcacatgggtgaagagcaaaactaacctgggtacaggcctgataattttagatgacgacatgtctttgggcgtagacaagggacaggatggggtacacaatctggatatttcaatg

SEQ ID NO: 370264 - DNA, 511 bp, Zea mays
tttgttttacaacaaatggtattattaagccaaggcttctgtaatctaggattttggtttctttaactatttttttctcaaacactaatgctggaagtaagtatgattgtattaaagccttgtcatgactgtttaaaagttgttgcagtgtagaatcagtgaaagtatggacatagcagaataattcatatgtttcaactcttttgcctgttgaactgtttgacttagccaaaaagatacatcactcagctcggaaagccaatcctttcagctcatactcatgaattgtgataccccaattttctgaaaagaagttaaatttctttttctcttttctttcatgttctgtggcattggggtttggagtttcaagaggcattcctcaggaaacagtagatcttttggcattttttccgctagggtcgggagctcaaatgggagagcgagtttgggccattgatctcgatctgatggatgggagccttcttactccccacccctagcgaccccc

SEQ ID NO: 370265 - DNA, 491 bp, Zea mays
tttggacatccttgcctgtacccccatggtggtagggtgtgagcgcacctactgacttgtggatcctccaggtggggtgagctctgcatgtccgttgggggagcacacgtctcactatgtctatacaacttatacccggttggagcttgcggcctggttcgagtgagggagcgctggtgatatgggatctgatgcatcgctggcgtatcattggccttgttgcagctacgcaggctgattctcctagatctacatgcggatggtgcatgtaccaccatacagtatgtccaggatctgtttcacggggtcattcaagataaaacatatcacatgcacaatgtgctggagacatctgtgaaccaggtactaagtgcacctaaagactcatgggtgcaggattgatcactactgggcacccctcctaatggtggggcgccatacgaagtacctgcagaaggtggcagcaaacacaaatgtacctgtgaagaact

SEQ ID NO: 370266 - DNA, 407 bp, Zea mays
ttgcccacgcgtccggaaccttctcccacctgtgctgtgctctgctctgctctcccaggccaggccctgcagctgcaagcaccgaggacagacagagtggctcgcttagccaccactagctgatgcttgcctgccacccaaggatttgcttccatccagatcaagtggcgtagcggcttgcctgaccaagaggcagagctctcgatgacgaagcagggcatggtggtgccggtgcctgaagcggccgtggcggtaccgcccaactcggcgccgctgttacagtacccgccgccacgggccgcgccgggcgtcgccgtgcgcatgaagtgcctgcagatgggcgccggcgccgggcgcatcagcggctgggtggagtacatgcgcgcgtgctggaccacccacgccaa

SEQ ID NO: 370267 - DNA, 468 bp, Zea mays
tgttgaagagggggctggtgttgctgccgacgctgctgtgggggagggcactcggactaggcagccttcagctcacgcaggccggcgggagcgggcacgtcttgacgcgcatgcccgggtgagaccgtccactaacaggctacctggacaccgggtacgtagaggtggacaagcatcatggcgcgcaactctggactacttcgtgcgcttgtagagcgacccctactaggacccgatgctgctgaggatgtacggccgtccaaggtggtccggtagcttgcaggctcgtctaccagagaggagcattacagtgtgatgcccaagggcctggtggatactcgcactcttcttaccgaccggagacatggaccagggcgagcaacatcatatatgcggactcaccggcggggactggggtcttgtacgccaagttctagggagggctcgagaccggcgacaccaagcaag

SEQ ID NO: 370268 - DNA, 289 bp, Zea mays
tttgcatcaccgcagattcggggctcggctctaagtcattttgattggaaaatgatgcctgaaatactcgtggggacggcgtccaaataataccggtatcttctccaggaggtctatggtctaattgcaaatgcggactagcctatacggccatgttctagctgttctgaacgcagacgtgtatgcgaatgatgtttgctgataagatgtatgagtttggctacgtggatttggttgtggcacggataaagtctggatcaaatattctgctctgagaatcggaatggtg

SEQ ID NO: 370269 - DNA, 233 bp, Zea mays
ttctggctcgggcgcccaaacttccgccgacgcgtgctctttctccaggctccaagcgactttcctgggcccacatcgatgaccatggcgatgacgactaccatccggctatcagggatcccacttgtgagtgagacgagctgtacgcagagattgttgactctgacttcgcgctcgagggacaaacagcgcacgctgaccatgaggacccaccacagaagccgggctatcct

SEQ ID NO: 370270 - DNA, 521 bp, Zea mays
  unsure (1)..(521): unsure at all n locations
ttctcacgcgtccgcccacgcgtccgtccacgcgtgcgcaagcccggcctgcagcctcctcccctgtgcgccgacccagctccctctcccatggcgactccctccgcgcatccctggccccagcatggagctcacccagtctgtgcgccatgcttctctacttgccctccccagccatggaacttccagcgcgcgcccggacggagcttcctcggctcggacctttctgccatggctcggcctgctccctgtcgccgcgagctccagcttggtgcccagctcccgtgcgcgctctactcccttccccacggtgcgccctctccctctcgtttctctgctggccgccgagccctgccctctgctccagctcgccgggcgtcctgcagattccagcgccttgaagtttccctgcgcgcgcacgctcctaccgagctcacccctgcccatggcgcgcgctatcctagtcgtacctgcgtgcagctgcgagctctgctcggccgntcctcctgttccctggctat

SEQ ID NO: 370271 - DNA, 453 bp, Zea mays
tttatgtgcctgcctatgctgctgttataataattaaaccaacatctccgtcggctgacgctgatccaccgctgctgctcgctgctaaccgatcgcatcttccccggttccgcgccgccggccagcagtagcagtagcagcaagcggcatccggcatgagccgagggtcgggcggcggcggcagcgggaagctgggccagcacgtgagctggctgtggcgtgggccacggcgggcgctgtgcgcggcgcgcgacctgtacgtgcgcagcctcacgggctgcgcgggccacctgccgggcgacgccgacttgggctacccgaccttcgccgccatgacgtcgttcggcagctttgcgtcctcgaactcggcgcgccgcgcctgggacgccgaccaggacctgcgggagctcgtccgcgccgtgttccagcgccgcgccgacgagctggagcgcc

SEQ ID NO: 370272 - DNA, 361 bp, Zea mays
ttctggccaggcgtccggcccagccggccagcccatccgttcattacggaccgccgcacgggcagcccatcctgttggtgaccactgtagtgctgtggtcgataatcgtcagttggtccacacctccagcacggagcgcgctacggacgagacttagccgtctgataccagcggccagccagaagcccggacgactgcactgacaacgccctagacgccacagggaagtgcttgctcggccgttcgggcctgcacaggtgagcatgtggcagatggaatctacgacttgctggcaccatggtccatgtgtgtacttcacatcactgtgatggacgttagttacaaagatgatggaatggca

SEQ ID NO: 370273 - DNA, 137 bp, Zea mays
agctgaccccctgcaggaaccgccccggaaggaaccggcgggtcgcacgccgctttgtgggcacccgcagcgcgtgcacaccaaaacgcggaactcgaggaccgaagggggcaccttacacggcggaggaacactga

SEQ ID NO: 370274 - DNA, 186 bp, Zea mays
ttctcctacctccccacgccatatcttcctcacgacaccttccctgtatctctcgctccccagtcatggatgcccctcgctgagagctcgctccagccctctgcctcgccgagttcctctatgctctcgtctggcccaggtggtggacacagaggctcggcagcactcaccgctggccctccctgc

SEQ ID NO: 370275 - DNA, 193 bp, Zea mays
  unsure (1)..(193): unsure at all n locations
gggaaggcccccgccngcagccgccccggaagaaccgggtgcgacccacgcggctgcctacaccgccgcccacgcgaccgcggacgcgagggtcgcaacggggggcatgaaccctgcccggggggggacccggctgagagccggggagccatactctgcaccacacactgccgggacagaagccaatccacac

SEQ ID NO: 370276 - DNA, 272 bp, Zea mays
gccgcctgcaggtagccggcgccggaatattccggtttgacccacacgtcttgtcgcgtgggctgcggcgccaccattaacgaggggtttaacctgacgtgtggccgcactcgaggcgagtctcgaggagagagggggatgacgaacctgagaactggagacagaggtgaacgatcttgacagccaggctgctggtttcggactggccactaccaggcggatgggcacgtgtacagtgaacggaccgaacccagaagcaggagtacagggga

SEQ ID NO: 370277 - DNA, 433 bp, Zea mays
ttctcacccggccggcggcgccacgctcgagcagggcttttcagcggatggcccgaccttggggtctggtctatcggcgaggaaggggaattactcggcgactgcctgacgtctggtgcgaaagcgggtgtcgacctggcaacaggggacggccgtagcggtagcagctgtgccggtggctcctcacagggaggagaggcatcgtgataagctcatccaggtcaacagcacaggggcgagcgttgacacacttgcacaaaggtgcgttattcaccttaagaggcccagaatgagttgtagacacatgggaaaagcagcccaacagtgcgacaagggataagacactaacatccctgacaatatcaacagatatctggcaaaacaccacgcgctaaggaggtgatgatgagcatgagtgctggaaggttctacc

SEQ ID NO: 370278 - DNA, 185 bp, Zea mays
tgtctgttagctcgatgggagggcccaccatcgagcggcactccccggcggatggggaggccttacacgccggaagatggtggaggacgggacatacgaccttgacgagctgacatacactatgggagatggtgtgtcactggtggaacggcgggtaggatacaaccacctgaaggccctgccag

SEQ ID NO: 370279 - DNA, 337 bp, Zea mays
ttactttccacgcgtccggcgacgcgaccgttcgactctacgggctgggctttttgaacactttcttcacccgtatacaaaggatgctggaaagctaatgtctatgagagacagactgggtggacaagaagctagagtgtcacacgggaacaagaatgccaggagtccggctgtggaaggcactgatcgatgacatgtgcaaagaagagattggtgaggcggacctagagtacaactcttccttcgacagcgggcagacaaacatggacaaagtaccatatcccgaagaagatgaggacctggagaccccaacaagacatgcttgccaaaccagcca

SEQ ID NO: 370280 - DNA, 387 bp, Zea mays
tttcggccacgcgtccgcccacgcgttcgtgcaggcgttttgattgggcatgctagagttggaatccaacaccaatgacagagccacacggtgccccgctttgagtgcactactatggggaaaaagcatggacgcactagctagtcgatctcaaaatcttgtctggcaagatgagggggggcaatacactgatctacttcaacatccgccgctcacgtgccaggcagagagaaaagaccatacggggagggacgcagcaaatgaaggctctgctgggatgttaacctccgacttaaggactctggcccatgagagagccgacacattaagcagttcattctatatggtcaagatgctgggagagggttggcaatgcattcatacact

SEQ ID NO: 370281 - DNA, 276 bp, Zea mays
tttttgtaacttacagtcacacgatggcaaaacagcatcatctgcatccatgcatgggtcgttcgtcgtcgtcactgcctctcctgctggttccactcgagtattgccgaacgaagggccctgttcggcacgagaaggctgcgctcgaggtcgagattcgtcatgggtgaagggctatgccccctggcaaaccaacccctaatagcttcacccttattagggaattcattccgttgcaacagatactggctgccccatcatttggtggacaactgg

SEQ ID NO: 370282 - DNA, 198 bp, Zea mays
ttcttcccacgcgtccgcccacgcgtccgacgaggcgttttttgacacgtttgcggacttttagccggccacgggggggacctcgctcaccttcggagatcgcctgctggagaacgacctgtcgttcatacgcccggactcgtcgttgcagattacccagtacagaatcaaccagagctgctccaccccgtgcctctg

SEQ ID NO: 370283 - DNA, 416 bp, Zea mays
ttagtagtgacactactatatgaattgcatgcatattgattttattcagatctatgcctgctttataagtataatgtatgaattgcacgtggttttcttctcttcagatttgtgccagctttcgaagttttgtcaacctggtgatctaagtttatgttttagcttaactctaaagctgcttacagagatctctgaggcctggtgttgcacttgcaaaaatacttttggcacaagagatggtgagcatttggcttttgaaatttgtataacaaaactatacttattcatttgtgcagatgcgtagttattattcagaaacatgcacaatccatcccagtgcatcaaattgacatatactccctccatcttaaattgtaaaacgttttgcataattttacttttcaaaagtctagatc

SEQ ID NO: 370284 - DNA, 214 bp, Zea mays
agagacacacaaggggggcttaatattctgtccacatcctttcatccaacaaagaaaggcacgcttgattttcccccggggctcttttattcaagggtagtttgaaaacctcattttcccaagaaaaattagctcattttcacttgggaaaatagagaaacatagagttcccaaactagcccttaagggccttaagaccagtgaagagaagggg

SEQ ID NO: 370285 - DNA, 473 bp, Zea mays
taaataatccctttgtttaaggaagtactagtctcaccatgtccccggaatgattcagtttgcaatgcaagagattaacaatacttaatgaagtttccaaccgtgtctcatatttgaccaatgcatctttactataatttgaaaccttatgactaacacttgacctttggttacaaaaatcatggaatgctgttgctgcagtattgtgtatgctattagacccaccaacatgttttggaaatgccgtataaacatttctctattgtgagaagccaacttttgtaaatgcatcatggcaaaatttatcatccattcgatcatgcttaaaaggtaacaatagaagcaataagccttattcttctccacactatattccaaccaactatgttgtctgaaccaatgtttttgaaagctccttttgtcatgtgactgaggaaaattatgaccaattggttgagtcggacctttagcta

SEQ ID NO: 370286 - DNA, 265 bp, Zea mays
tctttttttttttttttttttttctttttgagagagagaggggacattcaatattctcacaggggtaaggtttacaacgggacgggccgaggaagaacatgtgatctttcctgctctgcccctggacaaacggcagagagcaactcatggtaacagctgcctcaaattcccattccctagcgttcatcggttacattacatccagcagatcacgctaagaagcttgagacatagatgtctaggtccttgagaaactcgccgttgg

SEQ ID NO: 370287 - DNA, 367 bp, Zea mays
gttgacaccacacgctccacggctggggatcacgctgtcacgctcacgcgcccctccccccgccgcaaacgcccacgctgcgagcgcgaatccatcttctctacctcctcgtccattcctagggttcctcctctgccgaatcgcggggaactctgcgggcccaatttggtagggtaatctcctaccaggaggtcaaattccagtcaacgccgcttggttttgtagccgaccggtcgatttgaatccaggggcaccgattggctgggtgagagggcacgctcgatttgaacccgcctctgcccttttcgtggaagttttgggtcttattaggcgcggattactggggtctagggatgtggtacttact

SEQ ID NO: 370288 - DNA, 283 bp, Zea mays
caaacaaacaaagaccaggccccaaaatggaaaaaaccccaagcataattcccagtttaaaaaataaccaaaaaaaccaatggccaaaaaattggacaacgggttcagctaaaaagcccaaaaaaaaaagggtccaaagaaaaccccacccaaaaaaaatccccccaaattttggaaattcaaaccccaaaaaaaacctgaacttaacccccaaaaaaaaggcctaaaaggggacaacccctactcccaatcttgggcaaccggggggggggctttttggccc

SEQ ID NO: 370289 - DNA, 403 bp, Zea mays
tggatgccgaggcgcgagcgcgacctgccgcagcaggcctgacctcgcgtatctctcaggagtcaggactcctgaagttctagccacttgctggtttcgtgcactagagcccatgaacagattggcgtcgacgaggatggctcccgagacattttccaccgtgatcgacgcacttgtcaaggcaggcagggaggatgaggctgttcggctgtttagaggcttggagaggcagagattgctgcctgagtgcggcagcagggtaggaggccatggcgtatggtcgagcagccttgccatggtccatgcattgtgtaagagaggccatgcccgccaggcacagggtgttgtgtggcaccataagagcgagctctcggcagagcccatggttagcatcgttgaacgt

SEQ ID NO: 370290 - DNA, 505 bp, Zea mays
cctggatggacacacaagcgcccgcttcccgcctcccgggacgcctaccactccccccgccacgctccctgccgcatcaccggcaccgacagggaaccccagcgtcatgtgcccctccatgaccgtcgtcctgccgcaggaatccctggcaaggaaatcctccagagtcatctccgcggcgccgccgccgcctctggccccggcgcccgagctggcggcgggagggatagggaggacgggcgcggggagccctacagcggcggagatctccttccacacctgctccgacgtccgacgggccgcagactccggggccgccagggagggctccgccgggccgaggccggcgctttcggcggcggcggcgttgacagcctcggggccgaagatgttacggatgatggtcgccatgttcatcgaacccaagccgttactcttgaatcgcgcgaggtccgaggacaagcccgcctcgagtgctgcggtggagacgacgacgccatcaccc

SEQ ID NO: 370291 - DNA, 385 bp, Zea mays
gatcaatcgaaacgcaacagcaagtcagcaacatgtattgccaaccgtcaagtcttgtaatatcaaaacacattaaaattgcacgtacataaggctcacacaggacaggaccggaccggagtacttccattatggtagtacagcgtacgtatgcctcccttaaccgctacttaaacaacaagcaatagtgcaatacaaacgaacaaagttcaaacgtaccttcagaacggtatactaacacttgtgcatgcatgcaaatcgaccgaccgcgtcctataccatatcatatccgatccatcatccatcggtgaagtgcagcactgcaggtgctccagcacgtcgcggctggccgcgtgcatgcagaagtgctcgaacgcgcgcttga

SEQ ID NO: 370292 - DNA, 143 bp, Zea mays
taaaaagccattcaagaccattgtccctttattctcttggggacacttcaaacagatgcagcagcctcctgctgtttgctggcgaaggcgacacccttctcaatgcttcccttcaactcggccttaaacgcgtcaagcgcctt

SEQ ID NO: 370293 - DNA, 238 bp, Zea mays
ccggcggggccgaggggcagcccagagcggacaaccggcaagagccaggccctgcgccgccagaggacctctggggaggagcccacgacgaaagacgagcggaatggccgccaaccgtgactgggtgaacaaccgaaccgccagctccaggaggcacacaccaaagaatgaccggcgcgacgggtagacaagagaccagacgagcgcgctaacacaaggcctaaacatgggactgggc

SEQ ID NO: 370294 - DNA, 419 bp, Zea mays
cgcggatccagcgcccccccccccgcgggtcgtgattcacctctcagcttcgtgccctcctcaacagccatgccgtgaatcccgcgcacgccagccctccgctgcgatttcaccgcccgcccgcccgcggatccagcgctccccgcccgcggatccagcgccccccggccgcgattcacctgtcggctttgtgcccttcccccgctactgcggcggcgaggaggacgagaagcggcagtggtcgtcggtggctgccagcggcgatgacgacgacgaccgcgaacgccgccgctacaggcaccaacaccgacgcctgcgcagcgacgacgacgaccgccagccgatccaggccgcttccccctgcccccgcgaatcgccgcccgtggatccagagctcgccgacgccgacaacaggcact

SEQ ID NO: 370295 - DNA, 280 bp, Zea mays
cccttgttaaacacccacccacaccagaagacaggggggggcaagaagaacggagcacgccacaaaccccgaggaaaccaaggagcaccccaaaagggcaaaacacacaggcacacagggcaccaaaaaaagccagaaaccggggagagaaacccaaagggaggcggggagcaaaccgacgaaaaaaacccaccggcgaaaaagaaaagacaggccgccgaggaggaagaacaaccggagccagacaaaaaggaggagggggagcaaaaaccgcagcaac

SEQ ID NO: 370296 - DNA, 373 bp, Zea mays
cctcgctctagcgcaggacccagccggcgcggctctagcctccccagtggccggattcccacacgggggctagacgcccacaccaatgactccttctacaccgaatcccccgcgcgatttaacccctcgcctcgttggccgcctccgcttccatacaaccgtgcactcgaaacgcacacgcgctaccggctactgggtcgctctggccacccacgtgcttctccgaccgcaacaaatctccgacggtcagacacgatactaatccgccgcttacggagctgttgaatatacgcggcggctgaggatgggcaaaaaggacgtgactgcgaacgcattctacgacacccgcgggggcaagaagcccaaggagcca

SEQ ID NO: 370297 - DNA, 355 bp, Zea mays
tttctcccacgcgtccggccacttcttccgcaatggcgtccgcgatggcatccgccggggacgccaccagggaccgcgcgaacgtacgcgcgcacctagggcagcctctgctggcgcctcaacagccctattaccaacactactacgcctactaggtcgagtcctacgtacagcccgccccagcgccgacgctggtctcgacgctggtcttctggtcgcccatgtgctcgcggatgctcgggctgctccggcgcctgcgcccgtgcctcgcgtgctgcttcccgcgcttgtgcgcgcgcgcgctcttgctcgtgctcttggtggggctcctcgtggtgctagacttgctcgtcta

SEQ ID NO: 370298 - DNA, 260 bp, Zea mays
cccacgcgttcgcttcgccgcggggggatttatagcccaacagtgggtgctttccagcatcgtgtccttccccggaccacacaagcagtccatatgatccattgactccagcgcggagccgacctgcctctccattatttatgcattttcggccccaccctaaccttttctaattcaaccgaggaccgcaattggatggcactgggagcgattaaaaataggcacgcctttcccccgcatagggtataattacaaaacaa

SEQ ID NO: 370299 - DNA, 377 bp, Zea mays
tcctccttccgttccgatcgagggccgtttaaaccctaatccccgtgcccgccgccatgggcacccccatcctgaccctccccgcaccggatggcaacggcaccggtggcggtgaccccaaccagcagctgctgcatgcgccgccaaagccttcccctcccggggcggaaaacgggccccctcgcgacgggggtcaacccacaacgcgccccatcgggattatccacccttggcccgatatttcggttattattcgagaagacggctaccttcgtcgccaagaacggacccgcattcgagcggccgatatattaccttaaccagggcaacgccaaattaaactacctccagccctcggatccctaccacgccttact

SEQ ID NO: 370300 - DNA, 221 bp, Zea mays
cgccgcccttttgattctacggggggctttttttattgttaacgggggtatcccccactcggggagcaatagtatgcaacaggccttcccgcaatataattaatcacgaaactgacaaaccacttcaattacactgtgaaggaggggccgggggtgagagagaagtctaattttaaggatggaggaaaactgtccacatttctaatatattgggacacttt

SEQ ID NO: 370301 - DNA, 123 bp, Zea mays
actagcaacccgtgctgtgggggggcttttaaactgtcatggggtggtaccccactgggactactagaactaactgcgggatcctggcgtggtcaatcgcccggcacccctatatactggtgt

SEQ ID NO: 370302 - DNA, 178 bp, Zea mays
tcgtgatgttattggggaagttaggggcttttttggttattcgctccgtgttcataacaagattatccacccatcctttgttcttggatcaaagattacattaggaccacactgtattttcgctgagggtgcacagttcggcgacaagtgttgtgtgaagcgacctgtgattggtcgc

SEQ ID NO: 370303 - DNA, 150 bp, Zea mays
tactccgctcttctgaggggggactttttgcggcggtagccgtgttttctcaaccgcggcgcttaggccgcgaacgggccgctgcccggtaggctgggtctccgtgtacagtgaggtgcaaacgagccggttcctgcacacgctgtccct

SEQ ID NO: 370304 - DNA, 218 bp, Zea mays
acggacttaagggggcaccgactttactgattgggaagctcggaaactatattaacatttttgaactaaacacaaaatcatgtctacttctaaagcaacatattataaatttgctcaaaggctgtgaaatggtgaactcaagatgtcaaggaatccaccttcacaagtttgatcttttactaaaattcctggaggtggttgctgaggcaaccgaagcg

SEQ ID NO: 370305 - DNA, 258 bp, Zea mays
gcccacgcgtccgtggacgcggggggccttttgtaacctcacacgggtttcttacaccctcagggggatcagttccaagtcttctgcctgaatggtccctaactgatgcacagattacttaaccaccaaccattgtatatgtggtctgcaattgataaatccttacatgttaggctgattggtaagctttagtgaggaactcgatgatcacagattcatgaggatcctccacagctccagtttcccctaatttagcta

SEQ ID NO: 370306 - DNA, 313 bp, Zea mays
agaaggcagacaaagagagagtaatgtggtgcaacaatcaactgtgcaaaagttactgcaccaataatcaccaaggcattccacctatccgctgcgtgggtttttaccctacgcctaacaaacggcagagatcgcatgcactaaccaagtcaacgttacattgcaagaaagacaagcaaattgttgactattcactacgcacgcgatgcccgtcaggcgccagggcgccacgcacacgtgagcccccagccgcgtgccgtcatcccgagctcaaaaacgggctccacgtctgctgcgggtgcgccggcatggc

SEQ ID NO: 370307 - DNA, 247 bp, Zea mays
ggtccgcccgggggcgactgtcccggctcacctctcctccagctgcaggaggattgggtcctgtgcagggtgttttacaagagccgaactgccagcacaagaccagcatcaggccccgactaggccgggccgctgtccatccagctgatcggtggtctgccgatcccgtgaatggccgcccctgctgacgccgcctacctgtccttcgacgtcacacctgccgctggcggctacttccaccaccagg

SEQ ID NO: 370308 - DNA, 385 bp, Zea mays
atcaaaaaactacagggttatattatattacagacactgtagattttttttagtaacgagttctgctctgctaacaagatcgatcatactacacaaggcggtactgtcgacgtacgtacacagcttggttctaccttgcgcagctgcagatcaatgcatcaatccgactcctgcaggccagcgagcacgacggagccgacgaacagcccggcggctcccgccgcgagcaccgccgcgacgactgcctgtagggcgacgagcgcgacggagtcgtcgggcacgacgaccaccgcggcgacggcggccacgaggagcggcagcgagatggaggcgaggacggagggggacgtccccgccggggtctcgacgaggctgagcaggccca

SEQ ID NO: 370309 - DNA, 322 bp, Zea mays
gggcacatcttgttgtggaccacgcaaagcaagattctgagcttgccctgcttagggctcaagagtatggttcaggggtttgttgctggtcctcgtgttactgcccaaacacaagtggcatttgccaaagaaagacatgttaaagctgttgaggagctcaaattgctgaaagaggagtttcgatcaacacatgaacaatatgctgtattactcactgaaagggatgcagcctttaaacgggccgtggaagtttgcttgtgctgccaaggattctgacaagcaagttgaggagcttactttagaacttattgctttcaaagag

SEQ ID NO: 370310 - DNA, 303 bp, Zea mays
tgacactagcagtcatgacatggggcatttttgcatgagcggtgtccttttctgggccaggcgctgggtgacgagcatggcgcgacagcgcgcgcggtttcatagatgtgtaccatgtcaccaactgtaccctcaacgtcactctaagggggaggaagactatcatgaagctggcagacaattttttggtcgactacacctgcagcgttgccgttttccctgacgacgcctggaccgtccagtgcggtgtgggcactgtacaggacatcaagatcatgtacaagaggctaagcgattgcagca

SEQ ID NO: 370311 - DNA, 388 bp, Zea mays
  unsure (1)..(388): unsure at all n locations
ttnttttttttttttttttttgttaaaaccaatttatttgggttttttttattttattttttgggggggtaaaaccttacattacatatatttgagcatgggtttgaatctgcaccaaactgggaaggattgggcatacataactttgacaaggataataagaccttttttttataaaccggagggaatcattcctttatttgccatggttgaaaaaagcaggcccccattttatccgggaccgagacggggattttatttttcacatttccgcgtggggatgcgtccggccggtaagcccgcaaaggaagccctggcccccccgagggcgcccttgttgggggggcactttgccgcccacggggccggggcctttaatggacttggc

SEQ ID NO: 370312 - DNA, 341 bp, Zea mays
tcatcttgctcatctgcgtcttcatccggctgcacaccttctccagctccatcacccgccagtgcatcccgtccaggagcgaccgcaggttctggttctccagcgacaggtccagccgccccgcgtacaggaccacctgaccctcgtcgttctcgccgccgtcgcggtgcttacccgtggacgggggagggagcggcggcgacacgggcttcagctggcccgcgggctcgcgcagcacgatgctcttcagcaccgtgtgctgcgacgccagcgcctgcaccgccgccctcgtcgggaactcgccgttccgcgccaggtgcttgcagctctcgggcgacagc

SEQ ID NO: 370313 - DNA, 362 bp, Zea mays
tggagcagttcagggtccactcaacttcgtttggccccgtccgtcgccgtctgtgccgagccattgactgcttagagcatcaggacgttctagcgcgctttcagcggttggatcaggatgctggtggtcgccggcgcatcgtctgcggggcggcgtccgagggtgactttgctaggatcccccggtggccccgaggcgttcgagctcgacgcgaggttctgctaccaccgaccgctggacggggccgggtagtgacggcgggcaaacgcgtgcgtgctgcggagcgcggcggagttcctggacatggtggctgcggagaacgcggacgtggccaaggccttcccaagcctggtgcggatgac

SEQ ID NO: 370314 - DNA, 365 bp, Zea mays
caaaccaaagaacccgttgatggcaattcccaacaggatatggcttaactcaaacagtaccttgcactcatgactcttttgctcggcgtaaagattaaacacttgtcttcagaatattttggacaggcctaaccacgccccctgatgcgttctactgcggcattatcaaatacccaaccctgtcagtatatgtaaaactggaagcaggacatgcttcaggacagacaaatcaacccacgacaccaaataataccctgaacaagggctaattttcttgtatgcggatcaatacatcagtaacacattagtcaattcattcatgatagacacacagaacaccaggaagtctaggcattattggacaa

SEQ ID NO: 370315 - DNA, 164 bp, Zea mays
tctagacatatctgctattggggggaattttgtggcttgctggctttttatgtggaatccaggaaatgcattgaaaggcttctctagttgcttgaagatgctttccggaacaaatacacttgttcttgttctctgagttggggatattacaatggaactcctac

SEQ ID NO: 370316 - DNA, 110 bp, Zea mays
ttgaaggcctgagccggtgcttgccgacggaccagttggtccgggagtagcacaggctggtgctggcggagcagtccttcaaggcactccacctcaacaagctgaagagc

SEQ ID NO: 370317 - DNA, 321 bp, Zea mays
tggcttgtggaagaggatcgttttttggagccaaccgcattatattatctgtacggcgcagttgtgcctagagtgaaattagctcaaactaactcctgggctcgagcaaaatcaacccgaaggatcgggatccattgctccaacgatgcgcgcgatcaccattgcagatctctatgaagggtgtgttggagaaagatctctgaggtctgggtgctggtgagcggcgcctaggacctaggctcgggaggaaattgttttgaacaagcctcttctagagctccattttgtgctggttattagaccattttcttaccaaaataa

SEQ ID NO: 370318 - DNA, 278 bp, Zea mays
ggttggataacctggttggatctgtctgtacatgttcctgtgttggattacatgatctgatagcaggggagagaaaaaaaattttttgcatgcatgatccatgatcgggggggagaagaagaaactgcttgtttgatgggcagacctggacctggacttcgatctactgaagttttctatgtacaccgttgttctgaagcagggttagctgacgagaccgttacgaacgaactctgtattggcccggcccttacgtgtgcttggaaccgagtgacccg

SEQ ID NO: 370319 - DNA, 138 bp, Zea mays
gcctgtcactctattgggggattttatgcaccggtgcggtggctgttaccatggtagtcgggaagaacaagaggatcttcaagggaaagatgggtggatagataaagatcgctcatcccttttctaagatggacttgg

SEQ ID NO: 370320 - DNA, 177 bp, Zea mays
ccataacgaccgggcgccaagccgaacagccggggggacccgaaaagcacgagcgggggcaacacccgcagcgaagacgcaccgaggcgcgaaccagacccaggcaacacagcacgggccaggagaaaggaaggcacccgacaacggaggaagggaacccccagagaacggacacgg

SEQ ID NO: 370321 - DNA, 263 bp, Zea mays
cagctcactaattggcgatttaaactgccattaagctgagtttacatgaacatatatagtggaagcaaacaagatagaacttgctccaattaatgtgcacgcgtgctgcagatccttccaatgatatatcatgtgtctctctctcgatctatatactgcatcctgatggggctgttgagtagcacctgctgctgctggtcaaagttcaagaacggtttgttgctgttgtacccgtccccttacccgtactgatggaagaagcc

SEQ ID NO: 370322 - DNA, 383 bp, Zea mays
cgaataatcataatattagtataaaaaaagagaaagatgcagtgtcctacactttctaacattttgatttaattcaacacccttttggttaattcagacatcgttagtacctattatgttccaaacaagacttcattgtagagaacattgtaaattaatactaaacggtatatatcaaattcagatagctaatgttcaggaaacggatatcaaatatcatagaagatgctgagtaaagtaacttggtgagacagttagcagcaccgcaagctttcataagaataaagtcataaacaccagggttgctgcttttaaatgatgaaacactctccggaaagctaatcaaaatatatcacggttgtcataggaagtaggatggtcca

SEQ ID NO: 370323 - DNA, 340 bp, Zea mays
gggggccactaccacaaaatcacccccatttagcactagtcccacaaaagttacacaattcattgggtcggaagaaaagggacccttttttactaaaaaaaattatactttgaaaactactgaaactgggaacttggcaatacccccctacacccaattaacaaggcacggcacgggaacctttaaactggaatcaatgacacccaacgccctgcaaggaaacacaccgggcccctcctatccctccggacaaggtttctggaaagaggaacccttttttttttcccacccacaggaatcattatcaaggacccaaaaaaaaatgtaattaccactacca

SEQ ID NO: 370324 - DNA, 194 bp, Zea mays
aagggaagaaatgaattcatttcgccggatttatgaaatggtctcgtgataatcacctacctagaatggattgattcttcaaacaaacaacccctaaatggggcacaccttcatccataggaaagagcacgaatccaaaatagggtttaagatgtcagcatatcgatacatttttacatttttggggccttttt

SEQ ID NO: 370325 - DNA, 184 bp, Zea mays
tccttaatttttttatctcggcgcgggaccaggagggggtgggtctattaaacgctggaggggctcacaaccgcgctgcgctcgggcgacaccgcgcaccacgccgtggccgtggtccacagcctcctctgcggcggggagcctcaccgcgcggcggtgtgcgagcggcacccgctcctggccg

SEQ ID NO: 370326 - DNA, 165 bp, Zea mays
ctccctttttttttttttttttttttttttcccatcaactggggctcttttaaaccctatgggggtcccaaatctaacatacaaaggaacattatatccagcgctacagctactgcggaatacatcaccttcttttattccaaaccgggcatcccggaaaacttt

SEQ ID NO: 370327 - DNA, 344 bp, Zea mays
aggggggtaattaaattcaaaaggggcacattacagtatatgattcaggtacaatgattattccgcggataccatttaaagttcaagaccgtgactcttgggaaaagccttccaatctggtcgccagaaaaaacacggggaagaaaatgtggggcaacattggcatgagaaaacaatgcaagttcactactttttcttgccggtgacacctgcaaccacctgcaaaagtaacaaaagatcaaaccttgtttcgaccattttcaatcacagtacaacagcatctaaccgcatgagggaagtactctggcttcattgttcaaacgaaggagaccaacaataatggc

SEQ ID NO: 370328 - DNA, 347 bp, Zea mays
ttcctttttttttttttttttttttttttttttggcatatagtatcattcaaatagacgggggtgcatatcggaggattaaaataatccttattaccaacactaggcaatgcgagggctcttgctcccgataaaagacacaaggaaccattaatacgccaatggcagaccaacatctacatggctaatcggaagagagcatctaactccccataagaatctagaagatccaacaaatccttacaaatgttaggcccttgatgttgggatcttgtagacaataatcaagatttttcaatatgtagaggcacacgttatgaggtaccaccaagtttcttttttttttgg

SEQ ID NO: 370329 - DNA, 255 bp, Zea mays
acacaaataattctgattgatagcgtcggacaaaagcagggaaaggaatctgtcatgtttcacatacacatatacccgtagagacatgtaaaaccagggctttagagtcagaacattggtatattgcttggagccttgcaggctgaagcttttatttaggcaacggtatttacaggtttcacatgtttgcgaagagggagcaagaacccgtaagttttaaaagaagctgaaggaaacgaaggtctactaaggggg

SEQ ID NO: 370330 - DNA, 365 bp, Zea mays
tttctttttttttttttttttttttttcagtactattgggggcatcttttgaattaacatggtcctgattcatagctgcaagtgaaagtccaccaacagttatacttccaacagttacaatagtaccttcaatcggaacaatagagctactgataataacaccaccagtatgtgtttttggctcggcagagattttcactgtattctgttcattaaacaccacaggtggatgtttagaaataactgaaacatcatctacctttttcttactcctaaaatgccgggttccctttttgttctgagatgggggatcatcatgtggggcaacaacagccgttactgtgtcgacaggaacattaacattt

SEQ ID NO: 370331 - DNA, 439 bp, Zea mays
agaaaatcttgatttcgaaaacattcataatacaaaatctgaatgagtcacatgcttcgtatagttcagtgtggaaatcaatttcactataaatatcaatcagtaaactctctgttacaaggcatctggcagtgtgtcactttaccttcaatcagccttcaattgtttcagtgacgattgaggaaggttatacagaatcaggcccatcagcaatatcacggcaccaatgatgaaagacgtgcttaattccgtgccatgagggatgtagggcaaaggaagtgaaagaatatagatcgatattggcactaaaattcaaaacaagcataattagtattgtatggttatattcctccattcagtctacccaccagcaatagcaccaagaaagaagatgaaaatgcaggcggggtaatcaagggtcaaaaaacaataaaggacc

SEQ ID NO: 370332 - DNA, 295 bp, Zea mays
atacaagatgcaatactggggagtactaggcaaccatggcattacagagaacatgccagcagcttcatcaacatccaataagaatgggaatgggaatgggacatgtcaaataaactgaagctcatctgtcagacactgtctattcggatgacgcgccggtgtcgattggtactggggcgcctgcagcccccccgttgagatcgccggacaggaacagcctgctgatgaacgacccccagtccgaactcctacttatggagcgcttcagggtagcatcagggaggaggacatgggg

SEQ ID NO: 370333 - DNA, 194 bp, Zea mays
agaatcattatgcagctgacgggaaacaatagtagcaaggacgcaaacagcagagatgttcaagatatctgaagcccatacatttaggtttttcgataagaaaagcacatacattagtttggcggcacctgtagcgccttaagcaaaggcaaggcgatacaccatttaactgtcaatcatttcaaaacaaaaag

SEQ ID NO: 370334 - DNA, 311 bp, Zea mays
agggcctaaaagtctagttgggggctcttggtgagacagggtaggagtatgcacaaacccaaccacaaataaacgcggaggggaacccacccagtgtcgcgaacgaaacgaaaaagaaaaagacgccgggtacgacatcgtgtcggggctacccagatatacaaaacgccggctatatagcacggagcctctatggttaacacgaaaaggaattgtctttttactactggatccaccctactgttgttttttttggcattccttaacccagcgcgacaatgggagtctcccagagcgcgtggctgttgaca

SEQ ID NO: 370335 - DNA, 249 bp, Zea mays
agcctgaaacttgggagtttaaagggcaacgggggctaaacgctggtggggcgccaacacggtctagttttatcatacagggtcggttccacaatggccgcgtccactggccagcggcatccgtggaccctgggcttttcgccgacggagaagctatttacagactacaagcagacgacagcgatctttagagctcctaccagagcaacgagggtttccatttccaccacacaaaccggtgcgtgctga

SEQ ID NO: 370336 - DNA, 240 bp, Zea mays
gcgtgggcccattgccggatttttatgcaagccagcccgaaggcggcttatcttttatccatgagagaaaaaacaacagttctggatgaacgcatgccaactatgtccccggctaaggtagggaaccgataccactcttaagggttcgggatgcttggccactgaatctctaagcacctcagaactgtaacggtgccccgctgagggggacttgcttcctgggggggaaccaccacggcc

SEQ ID NO: 370337 - DNA, 267 bp, Zea mays
gcctgagccacaagcgacccaggcggcccgggggggggatttggaggaacaccccggtttgcacacgggggcgagcggaccgagacggcggcggcggacgtggaggaccgcagcaggagcggcggacgcgcctgggccacggacgaccacagccgacagaacggcagaaggacccacggacaggacccagagcacaaggaccggacccggacaagatccagccacgggctccaccagagcggacccggaaagacacacccgcgcccg

SEQ ID NO: 370338 - DNA, 166 bp, Zea mays
gggggcggactaaaatgttaacagaatcaacttcaacgggttcctgtcacctaaaatgcccccaataaaaggcccaaaaaaagaacctttttccactcccagaccaaaacaggctcttgaagtctatgctttacatgttcccccacctatttgacccttcaagcct

SEQ ID NO: 370339 - DNA, 220 bp, Zea mays
tttttttttttttttttttttttttttttattgttttgttttaattaaatgttggttgggttttttactgcccggaggcaattccaatttgcaaagatccctatctccaggggttaatccaaacaacagggggagttaaggggctcttctgttatttttggtaaaaacaccaaacgggaagcaacccataaaaactgttgcgctttcgggacaactgaat

SEQ ID NO: 370340 - DNA, 378 bp, Zea mays
tgccacgcgtccgcggacgcgtggggcacaggcctaggttaccaccaacgaataggggttctgccatgccaaggatctgaagttgttttgccgccagcacgctgaagacatggatccacgttttgaggatgaagacaccagtttcccttggaatttctcaggtttgacaaatacagctcgcaatctctttggtgcacatagtacaccctcatccttcaaccaatttactggtggacgttgtcgtgtctcggatcgaattgacgacctcgacctcaactcccaagtgttggacctcaacaccaacgtctccttcattggtatgttggggtcatcactgatccacccccacggtgttgaatacaatgttgtgcgtgatgc

SEQ ID NO: 370341 - DNA, 388 bp, Zea mays
gttgcggcctgtccatcataccagagagggaggggggctttaggcaaagctcagcacgtattactctgagcggcgggaggagcccagactgtgtacccacgggcgagcaggattgtgacgatccacgacccgatgaagtggtcggcgtcggtgacgcacaaggcggcggaggtcatcgtgcgctgacgcccaatccctgcttcctctcggggcggtggagccgatgggcgaatggattcagccgtgagcgagcaaattggggtaagcatttatcaagcggctgtggtaagaaatggtacagtgaagtggaggaaatgacacaggacacaagcggatgctggcatcttacggcaggcgcactcgctcggcttgtgtgttgcagctctat

SEQ ID NO: 370342 - DNA, 295 bp, Zea mays
agcaagcaaaagggagagtttcatttaaaaactgattttctgggcagaggcacatgattccatttgtcatcaaaggatccaagcgaagttgaaaggaactccaaagcacagtagacaagatcaaccattgcagaggatgcccccatatgtttatatagcataaatacgcaaagagggcctatagtagtccaaaatgaagtagaggcgtcaatagtgcagctatctctaagctatcaatagcacgatcttgaagggaggatttgcaccatgatgcttcaatcggactagtggcagc

SEQ ID NO: 370343 - DNA, 490 bp, Zea mays
ttcggacgcgtgggaaaagaaatatccaattgctcaccctacccccctcgctgcttccttctccccgtcgacctcgacaatctccctcccgctaaccctagtccagcatcagagatctactccgcgcgaacagccatggcggagacgctcgacatgaccctcgacgacatcatcaagaacaacaagaagagtaacccctcctctcgcggggcccgccgcagccgcggcggatccgcccctggcggcgggaccggcggggtcgggccgaccaggcgcccctttaaaagggctgggaacaggcaggcgccctaccagccgccgaaggtacgaacgaatcgaacgggctgttgctccgcgtcgcccggcggaggatgcgggtgcttcggacttcgctgagtcgggcgggaggagaaggtctggtggctttctcactgtggtgtgacgcaatcgatccaggcccccgacgctgcgtggcagcacgacatgtacc

SEQ ID NO: 370344 - DNA, 295 bp, Zea mays
gagccccaaaatttctaaaacaacttggaagggaacaaaaacgggccctttcatggcccaccaaaaaaacccccaacaagcctggggagccaagccatgcctaactttttaccaacccccggggcgggcatgtgcctccctggggaaaagcattaaaaaaacaattgttcccccgggcaccccacccttaagggggggggggacttttcaaaccccttcctggggcccttgaaccaccggttgggggcggcctgccccttacaaatataaagcttgcccccggaaaccggggggg

SEQ ID NO: 370345 - DNA, 310 bp, Zea mays
aacagggaaagggatccagtttaaccttctccccaaattaggacccagtcaaccatttgtgaggagcaaccgttgcagcggcaggagggggaaagtccccttttggcaaggaaaaaggggggacggccgccaattagggatttaaaacccccacccgcccgaaggggggaaaccggtagggggtgaagaggcaaaacagggcgggtcaaaacaggggggaaaaataggttcactcctttccttttgacagactggccccacaaggttttcccatgattttttaagtttccccaccccttgcccgtttttg

SEQ ID NO: 370346 - DNA, 157 bp, Zea mays
tcttttaacatcattaacaatctcctaaaaatgccacaaccatgccattcacttatgatagaaaacgtcacaaaattaaacactcacatgacatgaataggacttacatgtataaatggctaccaggaattacccattggggtttgatcccccaaac

SEQ ID NO: 370347 - DNA, 436 bp, Zea mays
gctcccacgcgtccgcccacgcgtccgggtgagaagtactgtttgatgaatgtgagctcgttggtccacacaaaggagaatagggacactactctaaacttggaaccttcaccagatctgctgaccaaagtgccatctctagtagaaagaaaggtctccaagcatcccccagtactcaagttgaaaaggactatggccaccaagacaaaaagtcatcttgtggtcaaaggagcttcaccgactccagcaactccaaatccacttcctccggtgctggtgctcaactattaaagtctttggggtttgattcaagatgagtacgtgttgctatctttgttgaatgaaccgggtacgaggatccccacggggataaaatccccgctcgagttgggtacaggaaaaaacctcccatgtggctcttcgagaaggcagggaa

SEQ ID NO: 370348 - DNA, 282 bp, Zea mays
gcccgaacaggccacccatacctgcagcgcgaactccggaccaccattactggatgagcagagggggcaccccgacgcggccctcctgccggcagaggccagcagagcgacgagcgaacggagccacgcccgagagacaaggccaagacgacgaagccgccgacgaagcataaactccgcagagagcaaacagcggggccaggcacagcaaagaccatgtccaagcaaggaaaaggaaggacaaggccaacaatcccgaacacggggagaaagaagaagaaa

SEQ ID NO: 370349 - DNA, 260 bp, Zea mays
acggcctttcctttttttttttttttttttttttttaaccatgaaccagagactcaccaacataggggggatactatataaacattgccttacagatccactggcagcaaaagcatagtacccaccatggctttactgcatgatcaccacaagctcaagcaggagacctggacttacaaaaaattaaaagcaaaacgaagctgagaaacactccattcacggggcagtaagtaaccggctaacacatgctaatgccatgc

SEQ ID NO: 370350 - DNA, 395 bp, Zea mays
aacgaaagcttcttaaatttgagtcctttgatgctcctgctgtcaagtgttaaatcctgctctctacaaccagtattaattcctatgatacaagaatcaaacagattacttccactagacaccctccacatcaactagaagcagaagcatgcagaagggaataaacaaaacgaaaaaaatgaaaacctggacacaccagatcaactttggttccatttgttccctgaagaagtatgatacaacttttgggcggcgacccataaaactcaccagataacttgatctaattttatgcttttcttgaacctcatgtcttattgcaacttctcctcttgtaaaatttgtaacctgtggagaatgttgccttctcactaacttcagttaatctgctattc

SEQ ID NO: 370351 - DNA, 338 bp, Zea mays
cggcgtctgccacgcgtccgctagatcgcgacggccgccctatattttttttgcctgttgcggtggtttgcgcaggagctgtagagtggccgcacggccagatgccggcaacgcggacaggacaaaacgaattgaaagcctacaaaaaaaaggagcccaaaaaaggagcaaaacaccggcgcccccaacagaaaagacaacaaaaggggggaggtagagtgccagagaaaaaaaaaaaaggtggtggccacctttggggacaaaaagaggaagcaaacaacccctggccctatcccggaaaggggagggcgcatgggccccccacgaggggaacaccc

SEQ ID NO: 370352 - DNA, 253 bp, Zea mays
gttggccattactcccgggaggaccttaacctttacctccaccagggttagaaaacccgatcaaaacccctgtgccccgccaaatggaccaccccatcccatacgctttttttttggaagcaacgggtaaacccccaacgcatcgccgctggagacacagccacaagccgcccacggcaggctttttccaggcccgcccactccataccaaaaaacccataccaccctttttacaccattgcttgcgcggctc

SEQ ID NO: 370353 - DNA, 238 bp, Zea mays
ttccacgcgtccgacaaaaagttgatttttctgctcttaatgatatagctgactcagcatttaaggctggtctcaaaataagagatgacaatttacagagtattgatttagtcaaggaactggaacaagcaaatgaatgtctagctcacaaaaaatagagctcgaaacagacacgggtaaagaggttgcaccctatatgcaagatgatcatggcagcaactttgatttcttatgtaat

SEQ ID NO: 370354 - DNA, 362 bp, Zea mays
cgcctgctacccggacggctcgatcgatctcactgggagctgttcggtcactcttgcagctccaccctacactcagagttaggctcttagctctaggctctagctagccgcgccactccttagtgtagccatcagccttctcatcgacaccaatggccactgccgaggtccagaccccgaccgtcgaggcggccgaggaagcgcccgtggtggagaccccgccgccggccgacgtgcccgaggagtctgcccccgccgaggccgaggctgaggctgaggctgaggctgctgctcctgctgctcccgaggagcttccggcggccgagcagcaggcagacgccgagccggaggccgctgctcct

SEQ ID NO: 370355 - DNA, 284 bp, Zea mays
tttcttcttgaccggactgctctcgccggaccaaggtatcagtggggccaaggagctgcagcggcagaacaagctgccagggctgttcatctggtcggcggacagctccaagaagagcagctacggcttcaagtacgagaccgaggcgcagcagatcattgccaaccactgatcgatctgcgatcaggacttagcttaacaagggatcacacattttacaataaataaataacaaacctctgttcctcccaacataaagaagagcttgcagacactaggcctag

SEQ ID NO: 370356 - DNA, 285 bp, Zea mays
tccctcgctttcgtgcacgcgtccgcccacgcggcggggcactcgtgcgcccacgcgtggggttttagcggatttgacctgcattttccttagcttattattactccaaatacgggatgtatatagcgacaacccgggttaggattcatgcctaaacaggtgaggtgaggatgaggggtatcgtatcaacactacatctatgtgcatttcaggaattatacgaattactggcaaccttggcctgccagagaacctaacggaatactctatcaaaatggtcggccg

SEQ ID NO: 370357 - DNA, 410 bp, Zea mays
ttacttacccgccggcgcgccgttgacttgaacggggctgctgcttccctgcaccaagaagctcagctgccgaccgcggcgatcggccgcgcgggccgcgacggctagaagctcggttcttgcgttcgcccatcgcaggctcctcgtgccggccgatctaccaccgctaccgaggaaagcgcgaggccgtccggcgccggccggaatccatcacgatcccctggtaagcagagtcgcagagaacacctaacccccttcatctgtcgatcagccacacatctgcgtttctcaagcgttgcaaacagaccgacgctctcctgttcctgctcatcgacgaagatctataccttggcaccagcgatggcgtcgacggcttccggctggcaggggcaaggcaggcgcgtcgagcc

SEQ ID NO: 370358 - DNA, 437 bp, Zea mays
gatggttgcaatatgaccaggcagtctaatagaaattcaatggggttcaagttcagttacattgcactatttgttcacaacaaagcccagtacctgaagttgctaaaccgatactcagacgggtcaggaaagtaaagcactggtctcgcgcacttcaaacagaagtgaacattgacagatacgcagctgtcaacaattgagtatccaatgcctgattttattacaaaccacagggctgtttatggaaccttcaggtacttaatttaacttactacacattatttgcttttccaggaactggaaaccaactcttacatttaggaaaagcgggagcattccacctctcatagtacaagtttcaatctggtggacatcaacaattcaagcccatgcccatctaccagtgtacgcttatatctgaagagcatctgcaatag

SEQ ID NO: 370359 - DNA, 479 bp, Zea mays
  unsure (1)..(479): unsure at all n locations
tccatcgcgtccgcccacgcgtgcggccacgcgggctgtcacgcgtccgcgggatgatcattgatctctggccttcaagagcaggaaatgaccttaaaacagtgcatcgaacaacttgaaagtgcaggtacggcgaggatatccctgatcaatcaattgaaagaagctgtcagcgaacaggagtcgacgtcaataattctgcgagatcaattgcgacaggtagctagagcagaggctgaacatgccattcaacttagacaacaactgggtcgtgtccttgacacgaacgatgcacaatctacttctagttcgctcatgattactncaccagatcaaacagtagttatgatgcacggatcatgagtaagatggacacctttctattcacaaccactgagacatgcagtgtcacttccccatacagtcagtgcagtgggtgatgagttcaagagaacggcagcaactatggcagataagct

SEQ ID NO: 370360 - DNA, 351 bp, Zea mays
tcgtgacgcgtgggctgttaccgctgtttctctgtgccgtatcccagtttacctcgcctagggcgaccaccgccgccgccctacgccagctgcccaggtcttgggcggaccctttgccggcgacgagcacccaccacaccagatcaaactctagatattgccactctacgtcccaggattctatgaccacatggcttagacagtgctgaccacgtggatgatgaattgtggtgcccaaacggaggcacgaggcacgcctcttgaagataggcactggctggaaacagattttgttggcgctccaagagtccatacttatgtactttgctttctcaaatcataacaaatctt

SEQ ID NO: 370361 - DNA, 187 bp, Zea mays
attatatacgcgcccaaaaacaagcaaaccaggggggggcgaaaaaaaagcagcggggcggacgccgcctccacaggaaggaatgcgaggggcacccaaacaagacgagcaagcggaccgacgccatgaagcaacagaggatcaaaaggccacccaacaaaaagcaggccgccgaacctggtcagca

SEQ ID NO: 370362 - DNA, 349 bp, Zea mays
cccactgaaggggggatttttgattgccaaagttgcatttcaatacctggaaaaagctaacaacagactagcacattaaacagttcgcctttggacgttgcacgtccgaaaaggccacaataataagctacgtgctctgaaaactgatggttttatcagggacggtttttttaaaatgaactacaacactgcctaatctgaaactgctgttttttaaaagcctagccgtttttttttttaaaattttttcaaacctggcatccgataccgaaagcatttggttcaaaataaaccttaccccacacccagtcatcctggcgtaccggggatttatccgccggtccaggct

SEQ ID NO: 370363 - DNA, 554 bp, Zea mays
  unsure (1)..(554): unsure at all n locations
agatcacagcatcacagttcacagcagcgcgcggaggcaaggcgcacaactgcgtgcggtggcgcggcgtgcagagcagccgcgcgagcgaagctagtagcgccgcacggaatcgcagagaaggaagtggggagggttaccggcgtcgacgagcgagcaggctcttttagtcttttcacctacctagacctaggcgcttgattgggtgctcctagacgacgcctagccgtccacgccacgacgacttacccttcaggcgtccgcctagccatcttcaggcgaggtgccgcatcacgatgagcctggccgggcgcctggacacctaggcctcgcctaggcgacagtgcgacaccgacatagcgatgctgtagggaacttaaacgatgcacaagctccgacaactatttctaaatttgtattctcttgataaatttaattttgcagttttgtatatgctggacatatcatgtgtttgtgtcatcacatatctatgtgtccaggtgcgatntactcgtgcagaagctttcgacactatntcttgaatacctggactg

SEQ ID NO: 370364 - DNA, 194 bp, Zea mays
acaggggaacgcgcgagcgtatggggggttttttacaaacagtaaaaaaaagatattaaaaggaaacgaaaaaaaagttttgtcatgcttctgcatggagagaggtttgacctctatactaagtggaagaggccaacaaagcaccaggcttctctacttacaatcacatatagagagagactgatagagagggt

SEQ ID NO: 370365 - DNA, 508 bp, Zea mays
gttatcgtccgggccaaggacgccggcacggcggggcctgcctttgagacgacggggaggtcccttcctttggcgccggcgccggcgccaaagcacgcgtacgagcatgagtaccggccgccctactacgccgtgcccgcgcagccggtgctgagctaccacgcggcgcagcgcagctcgagcgtgtcacacttcgcgccgcaggcgcagccggggtactccacgcaacatgcgcacccgcatcaagcgtactactccgcgcagcagccacagccgcagcaggggaagcagtggtcgccgacgaacctgtacatgccgtacccgcacgccgcggggccggagccttactaccagcaggactactacggtccgcccgggatgcacgcgacgactatgcacgactcgtcgtaccgtatcttcgacgacgagaaccccaactcctgcaatgtcatgtgagaggagagctgatcggcgcggcccgagcacgcgtgggcagcagcagcaggta

SEQ ID NO: 370366 - DNA, 158 bp, Zea mays
tcgtcacacgtccggactcggcacctgagtgcccgagatgttaactcaaacctctcctgctggtggcttaaactagaatggccggatccaaatcatgaggcggaactatgaccacttcaagcactctgacatccgtgtagaaatcctgcactagaaat

SEQ ID NO: 370367 - DNA, 419 bp, Zea mays
ttctttttttttttttttttttaaactctgaaacagatcagggattagtttgcatagttgggctacactatctgcataaataatacatcaattacagaactccgcaactgcaaaggtatctaatagtttgccgcggaaacagaaccttatctaaaccagacttctgagacaataactagacagtcaggaaataggcccaatcctcgcggttctagccagggcaccattgtctacaaaccaaagcttgatctcttgtacactgctataagctgtaaacatcatcatccatatatgaaatccagtaccggccttactaaatttaacttccgattccaaatattgaaacaaagctttagcgcatatagaatgccagaaacacaaaaaatgtggggatggcaatcgataccgacctgggaatt

SEQ ID NO: 370368 - DNA, 309 bp, Zea mays
aacggggggcggtaagaaactttaggggggcaagtaacaaatcacaccaccttataaatttctcacagactaatgcgtccgaaaaggaaataaatcccggccgaacaagcattctagaacgggaagaaggaaggaaagaaagaggaaaaaaacatttcagtgaccctcgggaggaacaaaaacaccttcctccagttgcagttgcagtgctctttggccaagccgccagcctgccctgactacagggggctctgtttcccgtcctgaatcggggacgtcctgaaccctttggcggtggttaggcccatg

SEQ ID NO: 370369 - DNA, 297 bp, Zea mays
tttactacgaccgaccccggcgacgcaaaacgcgggaggcaccatggcagaccaccgagggggaacgccacgaggcggaccaagaagcgaccccaaatggcaaccacacccacagcgggagaaagcaagagagcccaccaaccaagggccggaccaccacaaactagaaaaactgagcgagggcaagaaacatatcaactgctcaacctaatgtgcgaacccggggagaaagacgctcaagacaagtgacagatcaaaaccaattacaacactaagacgaggctcgagaagcagggg

SEQ ID NO: 370370 - DNA, 185 bp, Zea mays
cgtacgaccacggcgacgcccaacccaaggggcacagttagggacccccgggggagcacgccaccaggagggccaaaccgaaacccagggtggaaaccgacgccacagggggggaaagtgcgacggcgcacagcagaaggaccggaccagcacaaacgacaaaaactgagggcgcagaagaaaac

SEQ ID NO: 370371 - DNA, 163 bp, Zea mays
ttcgtcacgcgcgccggcacggcaccgcacggggcgggatcctgaggcaaaccggccccgcccgcgaccagaacacgaaggcacagacccaacagagagcccgagccagcacggagccagaacaagcacacccaggaacaacgcacgcgcgggagacacagca

SEQ ID NO: 370372 - DNA, 324 bp, Zea mays
ccatacgtacgtccacgcgtacgacaaaagccgggggcgtatttgaagcagtccggcgactcctcacgggggccaaggtatctatgctccctgctgctatgccccagatggagctgatccaatggacgccctcgagacggatgctacctggccagagggccccatagagctcatgacgcctcataatgagactcgatctctactcccttcatgtgtctcaagacgcatagccggcgagagatacctcccctgggctatgtgcgcctgagcttcatgttcggccacgcccatgcccaacgcctagccgagcggactcactggacg

SEQ ID NO: 370373 - DNA, 172 bp, Zea mays
gtcgataacacacacagcaacgcctacattgaggagggccgttctgctgtccgcgcacccgggtgtggctaccaggatcaaccgtcccggaggaagcaagggtgtgctgcgtctggtacacgcgatggcggaagggcggtccaacccccatcaccaagaaagcgaggagagg

SEQ ID NO: 370374 - DNA, 178 bp, Zea mays
ttcgtctcacgtgcgcgaacgccagctcaacgcaggagacatgtaaagacacctgtgaagtatatgcgcggggccaaaagcagacaacctccaatcggacgagatctccggctgcggccagggaactcgcacacgcattgacagcactgcactacaaagggaggagtcatacacctat

SEQ ID NO: 370375 - DNA, 197 bp, Zea mays
ttgatcggcccagaaggaacgcgagcgaaacgcgcgagacaggcacgacgaacgcggcggagaagggcgccgggccaaaggaaaagaggccccaagccaaagaggccccgccccgccggcagggcgcgcgcaccagcaagcaccaaacggcctacgagggcaggaagcgggaaaccagaaaacacagcggcaaacgg

SEQ ID NO: 370376 - DNA, 150 bp, Zea mays
tactaactttccggactcagccccgcagaacatgggggcctttattagagggacatggtgggacggtcaaaccttgacccctagggactcacgtagctgcctgcctgccatcgcgcaggggtctggtgctacgatatgcagcgcttgcca

SEQ ID NO: 370377 - DNA, 141 bp, Zea mays
ttgatgacaccaacggagacgacgaaacacggggggggcatgggaagaaacgggcaccagacaaacaccgggacggcagagggaccgcacaagaccatgaaaaaggcgagccagaaccgagcgagacacaagagacataca

SEQ ID NO: 370378 - DNA, 161 bp, Zea mays
tcggtgacaccaacggacccgggcaaacccaggggggcgccagtgggaaacgggccccccacccccagagagagacggcgacggaaccgccggccgcgcaaaaaagcgcgaacgaacggaccgacccacccaagccaacagacgcctccatacaaggcaag

SEQ ID NO: 370379 - DNA, 206 bp, Zea mays
ttgtatgatgaaccgaaccagcggaacaacggggggcctttttggacaatgctcggcgttattaaggcccgagttggcagcgcaacccacggccacacactggtgcagaagaagttcgaccgactgacggaacactatctagccatcctcacgaagaaaggtgtacgaaaggacgttatgggggagacgatacgggcctgatggtt

SEQ ID NO: 370380 - DNA, 444 bp, Zea mays
tttggtacctaaaaaggtaaaagatttcttctccatgtatgcatactgagcttggtgatggggctacaaccttcttctggaccgataggtggctatcgggtcacagaattgcagagttagtccctcgattatttgggatcatccctaagagacgggttagcaagagaacagtggtggatgctatctctaatcagagctggatttctgacattcaaggagctctttcggttggaactatcaatgaatttctcattttgtgggatttaattgactcaattgttttaagacctcaagttgaagacaaacatttcttgcgtctagctgcaaacggaaagctctcctcaaaggaagcatataggggtttctttgtgggatcttctgagattgagcctttacatagaatatggaaatcttgggctcccccaaaaaccaagttatttatgt

SEQ ID NO: 370381 - DNA, 247 bp, Zea mays
ccggaaggaaccgggcggacccacgcaggccgttatcacccccggaagcacggaggaaccgggggcgaactaggggaggggcaggggagaggcccaccccccagccggaacggagcccgatggccgcgcacggacccccagcgacggtggacgacgagacgaggaggcccagcaaggaccagcagcaccacaggctaggaggcgagacgaggagggccaacaccctcacacacaagacacccaaaac

SEQ ID NO: 370382 - DNA, 302 bp, Zea mays
acccttcaaaatggggggttacatatacttaattggggaccaaacactcctcaaaaactccaaagaaaaagattaaataagaggctaccaactgtcactcagccatttgccgttactgagtgcagtaaaagaatagacagctcagatataaacaagttagctccaaggtcacactattatgtttgacgaagtcgtcatcttactggcaagcgggcccaggaatttcgatgcatcacgtgctgacgtgagatgaccgcatggacagagacgagaaggggaacgtggcgaccgacatctgggtc

SEQ ID NO: 370383 - DNA, 283 bp, Zea mays
atcgcgtccgccgacacggaggaaggagaggagggtcttgggaggggaaaagagaaatggaggaggcatcgtcggagcccagcgccgcggcaaccgaaggtgcctctagtacagcgacgatgcggaaggagaagtcatgccagggcatgctatagtacacgctcgcgctcaagtaccgggggtgcaaccgaatcagggacgggagccacagatccatactagaagctacataactacaaggcggatgaaccgaatgaggaggaaacggcgcacaagcatgacc

SEQ ID NO: 370384 - DNA, 360 bp, Zea mays
atatatcaatttccagtacattgggggtcaatctgagttatggggggttcatgtcaaacacggaactaataagccctacagaaatatagggcacagaacaaccgaagttcgaccagatcagaggcccaaccaatctaaatcacctgtgttatgtatcaaattccagcacatatatctggcagcaatgttttccacagaacagggtcttcagcagaaataaataatacaacagctggtgttcaaaaatacatgtgattaactagatggcgaagtcttcattcatgccaatttggtacttgaaaatactgagcggagggcattatcttggctagggaaattactgatatctagcattggaga

SEQ ID NO: 370385 - DNA, 422 bp, Zea mays
aactccacgcgtccgatcgcagggacgctcgagcgggagctttgtggccgacgccgccgtctgcgccccaaaaccccgtatttgcctccggcggcttgcgaactgtggctcctccccaggtcagagaaaaagcgccgcgccggtgcgagcgcggccggcgccgcatccagctacaagaagccgcgtgctttctcggccgcgtcatacgcccagcccctccggtcgaagatgcgccccgacacctgcatcctggccaccactgcgctgcctagcttctgcctacgcttgcaaatgcaaggccgacgccaggtcccttggggaccacgacccgtgcgcggaccccgactgcacgtacatcgaggaggccgaccaggactgcacctacgagaactaccgcatcaaccgcctcgaccttgccgacg

SEQ ID NO: 370386 - DNA, 473 bp, Zea mays
  unsure (1)..(473): unsure at all n locations
tccctttcgtccgcccacgcgtccgcccacgcgtccgcttacgcgtgggccggcattggccaacaacgaggtgccaaccaaagaaacactcgagggtattgctcagtacctccttggtgacacacaaggcccgccggttactgctgcagtcgagagatcactgatggccatggtggactccctctgctgtttgattcagaaagacacagcaccagttgccaaaccaaagcccgagccatatgacggggacagctttggcgtggaagcctcagatggttcctacgaagaattcacctccgcgccaacagggaaacctacagatgccaccaacccgccagccatgtcaagaaaggattcgcttggggagctggtgacaaacctncccctgatcgcctcgataccacagttcctctttaagataccagatggtactgagaactgaacgtggaagctaagacctcacacccttcccc

SEQ ID NO: 370387 - DNA, 281 bp, Zea mays
ttttcttttcatgcgtccggcctgtccttctctgcctcgctcccattcatagacccccggcttccatctgcgcctccacaatggtcaccgtgccgcccgagcgattcgagttgctcatatgccgatggggacaagatccgcgccttcaatcccatcacggaggtgcacaggcacggcgactatgaccgggcggtgcacgtgtggatctacaacgagagcaccgtagagctggtgatgcagcgcctggctcgctgcaaggactcttggcccggacagttgga

SEQ ID NO: 370388 - DNA, 262 bp, Zea mays
tccctttttttcgttttgagctttttgtttgggggaggttttttttcggggctcgaatgttaatggcataggatttctgcaaggagatcacacgaccgggacgcccacagggggccaagtgtctcagggtgataaactcgctcatggaccatggataccacccacaaagggggtcgacgctaaggccgacaaacgaaacgctgatcttcaaggttgtgggaacatttgaggccgcatattttgttactggggaaatgatccc

SEQ ID NO: 370389 - DNA, 418 bp, Zea mays
caaatggtcaccaaggggaatatttacagtaagttggggggtctgatatacattcaaattgcaatggaaaagaaccatgcttgtctgtaggtccaatatacattcagattgcatgtttcttcggatcgataaggacctgacaggcaacacacatgattggtcaacacaacagatgcaagaactgaactatttgcaataggaaagcgaataacagcacgaggaaagtgactggcagtagatcactagaattgaactagcagcaggattggttaacacaacagatgcaagaactaatagcagacactactattaaaactgaacaagtaggactcaaatgtataatacagctatgcaaataatcaaaaccttaaattgaaaaaaaacaaaagaaaatattgcttcagtaaattcacttatt

SEQ ID NO: 370390 - DNA, 417 bp, Zea mays
ttcctctcgtccgcccacgcgtccgcgcgtggaacatttccacgctaaggcgaggggagggcgacgcgcgcggctagcgaggcgatggctgcgcgacacgctgacggtgacgcctgcgaccatcgatcatgcattgatcatgtgcatccccttaggtggccaattttctctccgggagaaagctggcgcgggctgaaggtgggaagaaagagaaagaagatgttgctgcgccttagaatggattgggttggccttggagcgcgtactgccggcgtatgtattcactgttccggccctgattctatggtgcaccactgcgcttagcaccgccccagcactcgaggatgtagcaaactgctgagacttgttctcgctttgcttcatgagagaacactgaacacggtgcgtgtgctgccg

SEQ ID NO: 370391 - DNA, 268 bp, Zea mays
aggggcgaataaaatttttttatgggaaagaacaataaacttatacaattcggacaatgatgagcccaacacaagaattttggacaattccaacaatagaaacaattgcaattattattcacgtataggatgtacccaaacctttaggggcacttgccgatgccacctaacaaaaaccgccgcataaacaaacttttccgagctatagcgcgcacctacataacgggctcgccttacgttttctccgggcgatacataccccaacgcc

SEQ ID NO: 370392 - DNA, 241 bp, Zea mays
tttcttgcgtctggtccactgcccggtagattgaggtggttggattgaagatagaggaacgggcatgcataatccaaatcaggcagacatgctagagcataaatgcgatatgagaaggctggcaagtacattgactgcgtccctgctatgcgtgtggatgatacacaccaactcagatgactgaatatcagcgtgcacctaaacattgctgcctgcaaactccagttccacgattacaagg

SEQ ID NO: 370393 - DNA, 268 bp, Zea mays
aaacccaaaacaatcgggtaaaaactagctcccgccccttaaaaccaaaggtttgggatgttttatcccacagggaccccccccacaaagggggcggataacaaaaagcccaacaaaaagggctttttgtttgtaccaaccccaaactttggagcggggaaaaaaaaaaaggggtcctaaaagggggggcccacccttttgtaacacccccaaggggggttttttccctaactgcaaaggaaaacccttgggggggtaaacccccccc

SEQ ID NO: 370394 - DNA, 493 bp, Zea mays
  unsure (1)..(493): unsure at all n locations
ctcttctcctgttgcaataattttgtaggcgagaattgagagagtctggaggctgccagccggtctagtggctcggccaaggcgagcggtggtcccagcgccgttctttccgcctggtgccggagtttcagtcttcaaggctgtgctcggagtttctgtgttctaggggccgggaggtgtgtgctggtgtgaatttggctttcttttgatccaattggtgcttagtttcagcctgtggaggtttctttggatcagggagttggtctccgtcgaaagaggcttctagcttgcaggctcatcgccgttggcgccgaacttgcctgccgtacagtctttctagtgccaaagttgaattttgaggagctgtgaagccgctttatgcaattacctttgccgaactttcctctaaaggcttgaccttttgggttgcggagttcattgctgatcgacgggtcttggagttttgtctactacctgcgtnatgaacaggaca

SEQ ID NO: 370395 - DNA, 404 bp, Zea mays
tttttttttttttttttttttttttttttttttttttgggttttttttatatatttttgggttttttttttttttttttttttttccccaaaaaactttgttaaaattttcactggcaaaaatgaaggtgcacaaaaacctttacagggggggggaaaaaaaaaaacaggcaaaattggggaacaggggccagggaaaaattttagccgcccatttaagcaaacctgtttttgccaaccacaaaggggggaaaaaaaccaactgccctaaaaaatttttgggaagggcttttgcacaaaaaaaaaaaaccctgcactaacagaaccctactgggtttggtgtggacccccactttaaaaaagacacttggttttactttgaaccccccccctttttgaattaac

SEQ ID NO: 370396 - DNA, 417 bp, Zea mays
actataaacctacagccatgtaatgcaccgttaatatatctctataactatgacccaagacaaagacgttaggggggctacaagtatatgtgtatatggtgctggaccccaaaagaaagaaacgctagactgatccatatatccaggttatatagtatacaagcaggccgggtcggcggtggatcatggcgagtctccagaactagcgaaaagcatggatggggtggacgggatcagcgtcagcggcggacggccagccgattcctgatgctgctgttgttcctcggcttgccgctcagcgccaggttccggctcccttgcttcggcaggtcctgaggatccaccatctggatcgtccgctgcttcttcgcgttgttgaattcttggtaaccctcctgtagcttacgcttcgtagcc

SEQ ID NO: 370397 - DNA, 124 bp, Zea mays
cacgctgggctcctcgggggccaattgaggacaccatgctctgcgctcccatccccgtcgccagcgcgtagcgttgcgtgggcgcctcgcaggaggagccgctccgtcttgtgttcaagctgct

SEQ ID NO: 370398 - DNA, 402 bp, Zea mays
tcccacgcgtccgcggacgcgtgggatggccgagcccgccaaccggcggatggaggccgtccgccgtcacctccttctgccttcacccgcgccgcttcgccctaatccgttaagcagcctcgcggaggtggagcccagcccggtgatcattggcgggatggtgctggatatccatgccaagccttccgtgccgccccatcatggtaccactgtccctggaatggttaaatacatcagtggaggcgtagcaagaaatattgctgagtgcatgtcaaagcttgggacacaacccttcatgataagtgttgttggaaatgatctggcaggggacttccttttgaagtactggaggtcagcctgattatgtacagaaaggtgataatgttgcaaccccagtagtat

SEQ ID NO: 370399 - DNA, 223 bp, Zea mays
aggaaaattcacatattttcattaaggaaaaacatttttttttccccaggatcacattctttttgcattcggtcaaaccacaaaagcatgcccccataaagggaaaattgcaaaacactacatatgctcgtcattcccatattggttttttcctcaatttggcccatgggagggcacccccccggaaaaggggaacaaacaaaaccccttggccttaaactcc

SEQ ID NO: 370400 - DNA, 359 bp, Zea mays
ggggaaatgaataccacatcggggtccaaggaatggtgatgcatcaattgtttattcacacaactcctatcacctaatgcagcatataagggataaaagtttttaaaataaaaggaggggtcaaatgcatcggggattgcctgggataacactatgttagtgtttgttagatgacgtccacttggcgagcatttcacatcctgggacttgatcagatcatccaatcttcaggggcatgcattagtatcaccttgcgaagatgcccacgcttaatggtatcttgggggcgactcaactctggtcctccgcatcacgtgatcaattaacgtaccatattgcaatttgactcgatcatcaca

SEQ ID NO: 370401 - DNA, 510 bp, Zea mays
tttctcgcgtccgcccacgcgtccgcccacgcgtccgttcatgctgctggtcctggtagcctccgtcaacatggagcactgcctcgagctccctatgccgcgcgctctgctcacccggggtcagagttcgtcgactgttctctactcctcgctttggcggctggtctgctcgccgaacctccagcttcctcgctctcggctctaagaacgtcaacccccccttgctactctcttgccagcactcatctccatccatggatgtcgccatctcagcgcccttgctctgcttgaggaaatgccaagccttgaacagccatcgtcttgctacgatgcgtgcgtgcgccactcaccccacgctggtctttgtgtttgggcagccctgtcgcggtgtcgtcaaaccttgccccctcatcgacatgttttccctgctgtagcaccatcgatttgtacttgtgtggaatcgcagtagtgcgtatggatgtcaagggaagtgaaagctccatgcgatgc

SEQ ID NO: 370402 - DNA, 426 bp, Zea mays
agcgccgtctttcggcccaccactcgcccctccatctccgcgctcctcctgcgatttgaggccggccggagcagcgacgcagatcgaatcaggtggcgcggaacaaaaaaaatgaaagatctggggggtgtagtgtggtgtgctgtgttgctgtttgggcgttgactagctatgccgtggtgtacgcacgcatcgcacgcacgtcgagatgggcgggcgagaagtaggacaggctgtactggacggtgagcacgtccgcgcccagagccgtgaagaccgccgccgcgcacacgttgtccgccgccaccgcgatggccccggcgtgccacctcccctccgcgtcctgcatgcgcgcgcgcgcgtgaacaagaaacaaagcaccaggtcggtcagattggattggatgcgcgcgcgtcttggattgga

SEQ ID NO: 370403 - DNA, 463 bp, Zea mays
  unsure (1)..(463): unsure at all n locations
tcttcctcttcaactgaaccaatgcatcctatactacagagcacagacctttcctaaagataaaggaaaatattgcaatctatctattctgtgtaactgataaaacgtttaggtcccaaaaaattatgtatgtttatctgagaatgtgccacctaatctttttctacgttgcgctaaaaatgtaccaatacatgtatgtcatctgatttttttgtataattcatttcattttatacctattgcaggaaactcttactgacaaagataaaagagctgaacatcctcttcaatctcctccaaaaaagtaagcttctatacaataaacttcctaccaatcagtacatatatttacttaccaaaaaaaggtatatacataccatttataacaccttgtacaaaaaaaaactnttagtatatacatatagcaatactaacattaatngcttgcatatgtacttttaca

SEQ ID NO: 370404 - DNA, 337 bp, Zea mays
ttcttttcacgcgtccggccacgcgttcgaccacgcgtccgtctgtctgttcctgatactgcgctacctaagacaaaggcggtagcgatatacggtggcgatggaagcaaccggtatgaggatgaggaggaagaggcggagtgcatggcctccgatgccgactctaatgccgatactactgcaggcgccaccggactgataccagctggcaagtgcaaggagctgaacaagctcaataaagagcctttcgacaaagccgtggaccatgacggatccctggtggatactggtagctatccagcgaatagcccaaagagctgtgtcacaggtggaattg

SEQ ID NO: 370405 - DNA, 516 bp, Zea mays
ttgctctcgtgggcggggactccgatcacccaccaccgatgccccctgtcctccctgctgccgcctgtgccggggctagcccgccgcggagccatgtcgcggtccttgagcatgagagggagcatgagggcgcgccgtgacctgcctcctcctgagaagacaattgaaaggcttgagagtatggtggatggaggaaatttctatgaagctcaacaaatgtacaagtcaaccagtgcaaggtatattgctgctcagaagtattcagaagccttggacatccttcagtcaggcgctttggttcaattgaagcatggacaggttacctgtggtggtgaacttgctgtcctctttgttgacaccctcatcacaggagagcttccatatagtgaacaaatttttgatgtatgaggcattcccaagggtaactgttccacatttccttggagatgactatgatgatgaggggcatcactattctgagctattctgttgccaagtggggcagagagtgctcat

SEQ ID NO: 370406 - DNA, 328 bp, Zea mays
aactgttcacgatgtaaattcttgggggtgttttgaaacctgcaggggggacgtaccaacactagtaatatgcacagataaatcaaatggtacagtgtagtacatgcaaatttcagtattctggcaaagcaacaggtggtaagtagtagcaataactccacaaggcatcacacgcttagtgtaagaggctacggaaggtgttaaattgaatattcctactatgcctggcacttcttctactggaaatgctgttcttcccgttccgtgaagggagctgttcactaggagtcatgaactgggctgtcccagtgcatgtccatggatgaat

SEQ ID NO: 370407 - DNA, 384 bp, Zea mays
ttcctttgccgcagaaaagagcgcgccaacgcggccgggtttccgggggcccagggctgtttcaccgcggagtcccggagggctcccttccctcgccggactgggcagtcgccggacggatcgggaggcgacgacctgaggggactggctgggatgaccgggaagaagcccaaggcggaggcggcgcgcctggaggagactgaccaggctctttacggggccttccggggctccccaaactcgctcttgcagctttacactctcgcgccattttgggaaggaagcccacttaacgccggacaacggcaaaaaatggcgtgggagatccatcggctcctgatggaacacgaaaaaagtttgagggggagatccgccacctaacct

SEQ ID NO: 370408 - DNA, 338 bp, Zea mays
aaaaaacagtggcagattatggttgggctgaatcgaaattggggggagtttaaagtgctctgttcagacagggcccaaagtcgacacgcttccccagaagcagagagctacacataactaccgaagtacttgtacagattgactacctgcacctgacgcgaaaaaaagcatgagatccctaagctgtcaataaaacagagttcatgtacaccaacggacgtgtcagcttcgcaaagagcacttcttttgagaatgcccaagaagatggcatcggccacactggacgatccgcttaggccgcttgatgctctcgatctttagaatattcatcttgggtc

SEQ ID NO: 370409 - DNA, 359 bp, Zea mays
gggaagggatcaatgaaaacttattgggaaacaaaactgagtaactatgaccatctataaaatggaggggatacgttcaattttaaaaaaaaaaaaaaacagatggggtcaacctctacgttcctttctcaacataacacagtttagaattactcatcgctgcctgaatcaatatcagattcagccccttgatgggccgatccgttcacaaccttccccttcccttcccccttgttcttggcgtcctcctcgtcatcactgtactggctctcatagtcatcatactccttttcctcttcctccttttcctcctcaataccatcctctggagcagccactggccctttttcaggcacatg

SEQ ID NO: 370410 - DNA, 309 bp, Zea mays
acgcgtcttgccttgtcacgcgtccacgatgctgccgttcatacagatcgggatctgggccgaacgagttctaccactgaggggcaggccgagcacgccatgctaagacaccgaccgtgcagcacgccgttaaccaccgcccctacaccccgggcggaaccaggaggagcagtgtttgcacgccatccacgccgagctcccgtagcaacggagcgggcccgttcaagttcgtatccaactcgccgacgaagagcgccgggccaaaaccaagcctgatgcaagaccggtcctcgagatccggggacacca

SEQ ID NO: 370411 - DNA, 361 bp, Zea mays
gtttttcttcggcgagctctcccgatggcgggccagaaccgactggtagctacaccgggactggtcgacaacgctattttgtccgtggtctttgccttccagggtaaggttgggggcttttagcttgcgattctgaacgatggcgaccttttatggtgcgaattatgatcaacaacctgctcagacccaggggatgtggcctacaaggcatggtccacgcccgacacggggggatacctagttctggctcgcctcttaggagcaggtgggatcgtctgacatgcaggaatgtcggtcaaactcatagccaatgcatgagttccccactgaaagcgccagttctatagagacatggtcagct

SEQ ID NO: 370412 - DNA, 328 bp, Zea mays
aaaaaaatggaattctttttgcatctgggataaattgttcccccagattaaatcccttaaataaaaacataaccttaacatttttttacaaagatagcatgaatggatcaaccaataaagctctacccgtaaaactgattttgcttccatcaataggggcttttgggcgggtaccgaaaccgctgccccctgtttggccccaccgatgaatttaggctcctgccggagcctgaattttgggtcccaacataggacctatccaaaaacaagtgactatgtccaccatagttgctacggggtccaaaggggggatttgagaagccccgtt

SEQ ID NO: 370413 - DNA, 297 bp, Zea mays
ccctctcgttcggtgagacagattgtcgacaatagggggcgaacttgatataaagaatcctgcagatgcactggaacctatgaacaactgcgtgtacatgctacgactgcacacgtaattacaaagcctgttgatgtgaatctgaccaggagaagagctagggatcgtcttgagcgtgagcaggaggatccgtgatgttattacatgcaagtgaggtcccaggtaccttggggcaattacatgttggcgactatgttatacggactagagaagacatgtccccagacatagactatg

SEQ ID NO: 370414 - DNA, 303 bp, Zea mays
agccaggctgaaaccatatttgttgaggaaacacaatagcattttccatcaatcaaaggcgggaacgaaaacaaatatcgtaaggtactcgtagttcaacaatgtcgtaatattgctcagacatgtgatgacaaaaagtatcatgaaacaatcctgggatcatttcgtagaccatccaagcgctccaacacctaaacgggcgatgtatctttttggaacatcataatcctgggatcagcccccacttcctacctctttgttttggcataaacctcgatgtatctttttggaacatcataatgg

SEQ ID NO: 370415 - DNA, 274 bp, Zea mays
aaaaggaacaaatttcaggggggatatatatataggggatagttttctccctttttttcagcaaacaattggcatcaggatcatgaaggggtttgtttcaacaggaagcttttgggagcatgggaacagtcacccaaagttctcacaaccccctgatagggggctgccgggggggctcggggaacatggggatggattcctcaaacaagtagtattttgggcagtttcggttgatcgccacatagggcccagcagagttttaaaaaaagacagg

SEQ ID NO: 370416 - DNA, 497 bp, Zea mays
gcgtttgctccaaataagcaagcactatactctaccgccaaaggacattgactcggaattcagattctaagagagcattgggaacaatggagttattgatggccatagcttggtatggtggcattggttgggctcccatgagctgaaccatagccgacccaaccttctagagttctctggagctgaaccatagccgtgggggttacatagaggacgtggtatcaacagatgcttggaaagttttctgtcgccaaatgggaaacaagatattgtaggcctggagccgtgaaacaacgacaccgcaagaccgtacagcagcttcaggtgagcagccatctatgagcagccctactgccaccgaggcctgtgctggcaacgacggaagccatttggcgggatctcagccagatgctacgccatatgcttctaccagcacaacgcagaggatgagttccgaagcattagcaagccagcaatgtggatcactaccacaaatt

SEQ ID NO: 370417 - DNA, 471 bp, Zea mays
tgtattatatattgtcatcagggtattctctatacagtacttatgggaaaccaagagcatggtacatgccagcaattcaagcttggttgcagtctatacttgcaacaaaggattttatccatttaatgttctcttctatgctcttcacatcccaattgcacttgaagagtaagatgcaccctttctcctgcaaattcttgtctctgatgtctgctttttatgcctttggatatggttgcctcatcgctagttttatatttgctacagttgctgcactacctgtgttttgctgggcgcttgaccatgttgccagattcttaaggcgtaattttgcgcgatcctctttctataggagatacctggaagaaccttgtctttgggtagagacaaataacactacactaagcctccttagttcgaatgcggagattgccttgggttttcttctgatcatatcactgttctcgtatg

SEQ ID NO: 370418 - DNA, 178 bp, Zea mays
aaataactggattggttccttaaacgcgaggggggcattacaatagatatataatgacagctacatccgtcagcatccgtccggttttcaccactgcatgatgatatgatatacaagttacaacgaacaaatcgagaaactatcgcaccaatacccgtaaaatcggctcggagatacc

SEQ ID NO: 370419 - DNA, 460 bp, Zea mays
tgtagtatatgaactgcttctggtgtcctgtacatctcaagatgaaaaaaagcaccaccgtcctcgccatctccatcttggtcctctcccttgcctcccagttctcatggtgtgcagaagcagctgagggaagcgccggaatttccacagagcctgatctccaggtgcaagaacaagtgcacgggtcgcaaccggaagcttggccatgaggtgaccacagtggagttgaagcatcacaggaggattaccagtgggcacaagggtggcagcgcgggtggaggcgccggtgccggtgccgtgggcgcaggcacgggtgggcataacgtgggcggtgggggcgccgtgacgaggccgcacagtttcagaacggcgcggcggcgctccagtgccggtgtcgtacgttctgacgctggccttggcctgcggagttgttctgtcagtcatgagctactgatgagat

SEQ ID NO: 370420 - DNA, 430 bp, Zea mays
ggtttctgtggttccctgcgattcctctcccctggcgtgcttgtgtcccactaggggatcggtggagaggaatcagaaagagggccgagtaatccgaggtaaggaagccatcgagcacaaggaggctgggtgccaggccgacgagggacccatactctgcatgaataactgaggcttctgcagtagggcggcgaccatgaacatgtgctccaagagccacaaggagatgattacgaaacaggatcaggccaagctggctgcctgctatatcgacaggattgtgaacggaagcgacaccggcatggagcccgttgatgctggcagcaacacggtcgcagctgatggccaagttgagttgcaaacaatgaacgtgccgcagaccgatgatgttgcgcgacccaacgagggggtggtggctaactccaaaggg

SEQ ID NO: 370421 - DNA, 409 bp, Zea mays
catttatttcgtccggccagctgatgcaagtgcagatgccgaccataagcgggtagggggacctggaatgcaggcgctgtcgtgccaggaacgagaaggtgctgaacaagatccaagagaagggcgagacatgaattgacgacatatactcgcacgagaagagcaacatggtgaaggagaccgggccctaggacccggacaagctcgtcaacaagctgagctggaaggcgtgcatgatcatgaagcagatcgagatcgaggagcacgacgcaatcaatgtcagataagggcaatgatgaggaaaccgaccaagaaggccaacagaagaagggggagcgcagcatgccttctttgaggaatgcttagatgtcacaccatgagaaggcttcaaaactactggctatggatg

SEQ ID NO: 370422 - DNA, 266 bp, Zea mays
ggaaaattaaggaaaaatttcccgaaaaccatggggggggttcaagttaggatgacaatgttcccggggattttacagggggaatcccaaatcaacaataaaatccttttggggagcatgccccccaagggatttggggttcctttcgatagggggggaaaaaaaccccggtcctttgggggaaacaaaaaatgctcctttgttcaaaggggaaatgtcaaacaagttttaaagaggctgaaagggggattggtcccacgggcccc

SEQ ID NO: 370423 - DNA, 208 bp, Zea mays
tttttttttttttttttttttttttttttttttttttttgtttttgttaaatttttttggggttggttttttttttttagaaccccagaaggcttgttccctccaaccaaatcaggccaagaaattttgtttgggggttaaatgaccccaaaacaaatggttacattttggccaaatttttaaaggggcttaaacattttcggtcttt

SEQ ID NO: 370424 - DNA, 378 bp, Zea mays
cccttgcgttcgcccacgcgtccgggcgagtggaggttcactacacagaggcccgccggatcttggagcatcattcgcggtcttggcgcgtctacgcaactgtatcctaagggcgtcgaagaggagagacggtacgccggtggcgacaagggatcgacgatagcgagcacaacttctacacgctgaagtgggcgcacagcagcacttcttcccgtcgaccaagctgcaacactactgccttgttgtcgtcaccgccaagccctctgccgcctccattgttcgccctgccaacccaggtatgcgaatctccaatccatgtgaggattcagagctagactagatgtagcttctgacctatatgattagttatatatgtat

SEQ ID NO: 370425 - DNA, 231 bp, Zea mays
gggttggggctgtagcttctttcattgggtcaaagcattacaacataagcagcaaaaccagaaacagtcctcataagcaccacttattagggcagtacaacacaaacgataagcgcggggcagatcaagaaagaaccacaacatgtagaagccatataaaagcatgattaagcacagcagaccaccaaaagcttcttactgaaaaaaaaggccgccttaggcagaaggttt

SEQ ID NO: 370426 - DNA, 178 bp, Zea mays
agagagttcaattgcaatgtattcttgcagacaaaacatggcttatgattgccgatgatagattataaacggatctccaccatcaagcaagcgaggaaacaaatttaaatcccggcctcgccgcccccaacggaataatccgtccacccggaaaaccaaaaaaaaaaattaaagtgaa

SEQ ID NO: 370427 - DNA, 317 bp, Zea mays
tctatgtctcgaccactcggcagattggaccggacgcgaattcatggtggagcttgttgggtcccaatgcaaagggaaaaggtggggtgcggaagcaaccggaccgaggatggctacatgaaggaccgctgctgttagcttgactgcacaccacactgcgagggcagtcttggaaaggaggatggaaggagacacacgctacattagcgacaaggtctcaaggagggtgttcactgaggaggagcgcgcccacctgaacgtgtacattctggagaggggaaggtagaagttggagaaacaaatgaggactgaagatg

SEQ ID NO: 370428 - DNA, 511 bp, Zea mays
tcatattcttaatgctgtttaatagttaaatttcatgcttctttcattctttaacttgcagttctcaacattgcaggtgggttcgctatgatttagccaagcctctactggatgccagtcaatactccgttctatctgattatgctacaatgcaaggtgaagtgccccagcctcagatttgtggtccctctgatgactcttcagcaaaagttgaccaccatgagtctcccagcgatgaggatgaggacgacgacgatgaagatttcgacaactatgaatcagatatgatggtcgatgaagagacaattcattcagaaaaacccgatacagctgaaggcagttccgagataaatgacataaacaacatcaccctggacctgaaaggctcgagggttaaatttaagggccttcagcaagtttttgggccaatcgagaggcgacacctcaatgcgctagaaaggcaactgagcagatacgtcaaggttgttgggaaggagctgtctgatcgaat

SEQ ID NO: 370429 - DNA, 285 bp, Zea mays
aatggggagggggatgtgatcacgggttggggtcggaggaattacaatgttggtgtgtgcgggtgggtggggtccattttctacccatataagaatactgtgagctgatgcgaaaaaaagaatattggactgagctaggggtctctctctctctctctctctatatatgtctgtatatctctctctttctctcctgttggcagatgaatctgtacataatgttgttgtatcaccggtaggcgtcagtatggcttgagaagattaaatgccgaaacgttagaaaac

SEQ ID NO: 370430 - DNA, 323 bp, Zea mays
ggtttatttctccggttacagggtgtccagcttgagaagccctttgggtaagctcgtctagagcgttgacaagggctgtggcggtcatgaagatcaatacgcgactgctcgactctggtgtgctggatggaatacattcagcgtttctagcagagctatgggccatcgtggcaatgcctgaaccagagcactgaacatgagacgccgacgagcaactcccatgaacgttgtgtattgggaggctgccggacatgagtgcacatgatggggatgtatcgctctaaaaatttcaggagctggtgcatgaggcactgctcgagagc

SEQ ID NO: 370431 - DNA, 259 bp, Zea mays
ggaggcccaggccctttatttagcactgcccatgcttggaccagcacttattttgggggaaggggggtctgaaacaattttttggttcggctaatttccctggggattatcggaccgggaaaagtggtgggctccatggggggggggatctacaaaaacctcttggggcgggtgttttttttaaaagttatccttgacaaccattttttttacctggaatgaagcaagacctgcactgtttttcccatcctgacttttt

SEQ ID NO: 370432 - DNA, 526 bp, Zea mays
tgtatttaacatacagtgttgcgactttttgcggtgttgaacagcatgtccactttatgtatggcaccatttgagaacattcagtattcatagagaacgcaaaaagccgtcgccttcgtcttctccaatctccacacacactcccactgcgcaaagcgagcgggcgggcgggcaaccaaccaaccaaccccactcgcctccctctccctcgccgttgccgccgagcaccgcgccgcggggtccccgtcgccatggagagcgcccacaagagcggaggcggaagcgcgcccggagcgggagccggaggggagggcgttctgtgccacgcgtgcgggtaccagtacccgaacgggcacccgagcgccaagcagcggcgcgcgcaccggaagcactgcggcaagccggcgtccgccgcggcggcggcggagggctccggggagcacgaggtcagcgagctgcttttaggtgaggtccgagcccgcgcggcggaatgccgcggcggttcgcctggatctgcgcacgagca

SEQ ID NO: 370433 - DNA, 363 bp, Zea mays
caacaatatgcacggaacatgttgacaagaacaaagggtaacaacatgagctgaatgaaataatgaacttcttttctctagatctcgaccctgtatacagaaggaacttatgtcatatggtacagaagccctgcctatgttagcatactgatcctactagacatgtcaagcatgcaacgatcgcagcagcaatcaggcaacaacgcttgagacctaccctgctctagagccagtgagctttctcctggcatgtttcaaaatggatatgcccatgcatgtatgtatctaccgaaagatggagctggctaaagcaaggatagcaatgtcaaaacacatcagacagccttgttctgagaaagaaac

SEQ ID NO: 370434 - DNA, 281 bp, Zea mays
gctcgcccttttttttttttttttttccaaaatggcaacatggttttgttaacaatcatattaacatggcgctaaaaaaagtggcccggaatttttttgggtttacctttataagcgcccatcccttaggaaaattgtccagatccaaatgaaccaaaaaaaaaccggggcgccgttaaaggactgatgactgaaccacaaatggtggattcaactggaaccccggcttacattttcttaaattaattgaatcccctaaagcctccccttatatgccagtc

SEQ ID NO: 370435 - DNA, 374 bp, Zea mays
ctctttgttgcgcaatactaggtcccagccttgaacctagagagctacttgttagctggataaattagctatagaggtagcaatcactgttagctaataactcaactaatagctaactaactcacagataacaatacgtttatcagctgactcaacccaggtcacaatctgtttgctgactaactatcaaacttaggggttaagaacaggactgtgtacatggacttactctgtgggccgacctgtgcatatatcattaatgagcacaaaaaagggcattgtattagcgtaagtaaggagaagtatcgcgcaaatttagcatcagaatgggggaacacatgagggtacacatgaattccgctatatgccccagc

SEQ ID NO: 370436 - DNA, 212 bp, Zea mays
tttctttttttttttttttttttttaggagaaatccggcgctgggtagatcctaagcccaggggcaactttatcttcctccgcacgtaatcctaatgatattcagattctctatacagccagattctccccacagctagattctcgaaaaagctggtcagaaaaaagctgaaaaaaacagggcccaagagcacagcaagtctacatcgagcg

SEQ ID NO: 370437 - DNA, 279 bp, Zea mays
ttgctctcgtgacggcgcgtctgtccgataccccttcaattcctggtcgctgcgagacgcccctcgatcggacccaggtcgacggcgtcgacctatgatgccaacatacttcatggcttgcggtgaccccagcatcacctgcggggactgggtgaaggagagcgagaaccgctatgtacacatgggctcttgacctgtgattgaaggttatggaatggaaagggccaacatgtatgaacgtgttattatcgtacatgataacctcattggggaaattat

SEQ ID NO: 370438 - DNA, 486 bp, Zea mays
ttgcttgtctacgacgacgacatctttgtcggggtccctggggtcaagagctcctcggcgcgctacgacgatgtgttcgggggaagccatagccgcgaggcgcctccagcgttcgatgacctgctcggtggatttggtaagagctcacaggtgagggaagaggtggatgacaagaggaaacaagaggcagctatggggccagcggcgggtactgggtttgattatttgatcccaggctttggcgggaggagctccccgcggcaaagggatactgttggtgcaaaacaacagaagattttgccatgggtaagcctcagagtgtgcatgctttaaatgcggaagaatttgagagaagtacagcagcagcagcatctgcagctgctatgaaagaggccatgggataagcagaggcaaagttcaaacatgcaaaggaggtactagagagagagcgtgatgcgaagatttgaaatagagaacaacgggaac

SEQ ID NO: 370439 - DNA, 375 bp, Zea mays
ttgttttgtcaaggtttactcaattgcggacgctcgcttgctgctatgtgatccaaaccccgattgggcgagggcgcccgaatgggcgcctcatgttctagtacaatttatgaccaaccatgaacataccaacataaggcaaactttctttcagattctataaataataataactttgcagcggttttcatatagaagctatgtataaagtgggcattaacatgagaattgagaaatgatatgaatatggtgatatgttctgaaatgccaatgcaacaatgcatatatacataggaaataaagctaattgagcatatttgcagaaacaattcttttacttacatgttgcacgggcactatcaaagtgactaaacc

SEQ ID NO: 370440 - DNA, 342 bp, Zea mays
ggcacgcgcccggactgaactggccggaccgactcagtccgtccttttttccggccacgcgtccgagcgagaaacatgctacccacaatgcgaggggtgggctacgcgtccaggtagcgaggccatggctgagatacaccataacgagaactcctagaacgatctgatatccattgttcttctgcatcacggtggggtggccaactttctgctctggatgaaagctgtcacatgttgtaggcgggaagaaagacaaagaagacgaggttgcacgtccacttggatggtatcgacctcaaaacgaatactgcactggcttgtctagaatgatccagtgctgac

SEQ ID NO: 370441 - DNA, 420 bp, Zea mays
tccgccctcgttcccggcctcgcaaccgagaaagaaagatgccgaccccctggcgcgaagtggcctacgcgtccaagaaccggggccacggcgtggatacaccaatatcagacacgcttgccagcactgagcatcaattgttcatctgcacacggtggggggggcactttgtctcttggatagaaagcctacacatgttgcaggctggaagaaagactaagatgacaaggtggcacctctacttggatggtatccacctcaagaagaagtcgtcactgactttggaagaattactaactgcctgcttttgtgatgaaccactgtgatgctctgcctgaggttccagctgggctagaaaatactgctcagagcgatactcccgttactgaagctgtgaagactgtactctggacagaacat

SEQ ID NO: 370442 - DNA, 201 bp, Zea mays
gggcaccgggtggacgcaaagaataccgggggacttattgccatgctgcctgtctgcatgtattataacaaaagcacgtctcactttcagagcccgaatacacacatcatacaggacttcaaaagccttattctgatgcgacccgttggtcacttgggacttcccgatccagcactgctggtctcccccaatccaaaccta

SEQ ID NO: 370443 - DNA, 148 bp, Zea mays
ttctttttttttttttttttttttttttttttttgggaagacaatttaaaacttgggtggaaattaatacgcagacagcattcaggagggatggaacatgtttcacattatacctagatttgcaggtatctctcttatttggcggttc

SEQ ID NO: 370444 - DNA, 254 bp, Zea mays
  unsure (1)..(254): unsure at all n locations
cccataaaagaggatttttatgggtggccggccgtagtacaagtttaaaccagtttccaagttccagcccccttgcagtttctggaaaaacctttacgaccaaaaccctttagactcgacacttgacaacttaggagaaccatggggcaggggccccttggagggacccaaagcttataacgacgctttnctctttctttctttctttttctttttcccttttttttctcagccctaccggttttttttttttt

SEQ ID NO: 370445 - DNA, 498 bp, Zea mays
ctcgcccgccggcaccggcccggccttccttgccggacccacccatgcgtcctcttttgcgtactccaatgctactctgctctgcctaccttacctctctagggaggggccttgaggcttggcctgttacccctcatgactggaagattacaaacttgctcttcccctctgatggaagcgtatcctctgggacaggctggcccggacaccccactcaggtgaactgcgccagagtcaacggctaggggaccatttctgatgtatactgctgcaatcctaatgtggagaatggggaaaacctcttctgcgtctcttgaactggagaatttactctcatctcgtgctgactctctgaccttgctatattacatgctgcttggctgtctctacgtctacctggttggtccactgtgctcagtcttcgaccatgaatgcatccacatgattgtcatctgacgtgatggtgcttatcaccacaccctgagagaacatgaccac

SEQ ID NO: 370446 - DNA, 271 bp, Zea mays
cgccttcgttttcgaccacactatcagtcgccagacataggagacctagctctggacagtggtagccaaacccatcgggtatcctctactgtagtgtttccactccgtaccggagatgccggcatggctggcgcaggctccgtgctgctccatgggggcctctgggcctacaactggggggtataattcggatgggcgcaggtgctggactacacgagcctgacgctgcgtttgagcgggcacaaggacggctacgccctcgtagagaggc

SEQ ID NO: 370447 - DNA, 379 bp, Zea mays
caaaacaattttaagcaggtgtgggattgagtttcgaaacctggtgcaattgattacaacattgagttgagacctggcactactgatgttaacgtctattcttgtgtactctgtttcagaatgagcgaaacgcctggtatcatgggtcagatgcccccattgcctttatccataaatgaagaccatataaattctcttattcaactgaacagaccggtaaggacacacaatctgttagcaaacagaagagatgtttgatatttcagtgcgacgttaacaacaggctctcaattatgtctaagcaacattatcttatcctgaaaggttgcatcatatggcacaacaagcatttcccatcacatgaagcaagagacatgag

SEQ ID NO: 370448 - DNA, 351 bp, Zea mays
ctcgcccgccggcacgggcccggactgacttgccggaccgacccacgcgtccttgcttataaataataaaacaagtgtagactggatcccgactctctatagatatacgtaccgaatcgcctacggggccatcctaaagaatctaatcagaatgggttgatcgatactaatatctttacaaactattaaaacgatggtgaagaccacaccgaagcccccgcctgctctccacgctcgcacccgacctgttacaactcaccaggacaaaccagctgatctgccccatacgcaagccatgcacgggccatctgcatgccggatccgccccatcctgtcgccgtctatccgctc

SEQ ID NO: 370449 - DNA, 368 bp, Zea mays
ttgttgtctccccggatcccaaaccctagcgcctcccggacctcttgagggaggcggcgatgttcttctccggtgacccatcggggcggcggcgggtcgaccttggcgggcggagcagctaggagcgggaccgctaggtgcggcgtggagcagacacccgaggagcggctcctgcgccagggcctacggctccagaacacctcctgctcgaagatccagaaattcttcatagggaagaaggctttggaattggcccgctcagaggttcggaagaatttttgctcaacttttggtgagcatctccagaggatagagtggaacatctttggcactatattcgactttcttggggaatcactgtgcttttt

SEQ ID NO: 370450 - DNA, 404 bp, Zea mays
tctgtttctcgtccccggataccaaaccctaacgcctgccggtcctcgtgagggaggcggcgatcttcttctccggggacccatgggggcgggggcggatcgacctcgaggggcggagcatcaaggagcgggaccgcaaggtgctgctcgagcagacgcgccaggagcggctccggcgccagtgccgaggggctccataacacctccgccacgaagatccaaaaattcttcagagggaagaaggcttcggaattggcccgctcagaggtccggaagaatttttgctcaacttttggggagcattgcgagaggattgagtggaacatctttggcactaattctgactttcttaggcaattactgttcttcttcaatgcaaatgaagacaatgacatcgctatact

SEQ ID NO: 370451 - DNA, 395 bp, Zea mays
actagagttgatggggttttatgcataattggggcggaaccaaacactgtctaatgcaaagtgttaggcgtatacacacaagcgagttgtgtacacgctgcgctataaaaaaaacagacctgccactttaatttgccatgatgacaagcattaaccaagaaccgaagaacggacaaacagattagctagggacgaagcgctcgcggccccacgcggtgtccaatcaaaccgacacgggcggaacttccggaatgacgagactatcccccgacccgacccgaccaccgccagagtacaacgtcctgggaaatggccacgtacgcgcgcgtcaagagggccatgtgaccacatgcaggggcaggggctgtccccctcccccacgagggcatgaaccg

SEQ ID NO: 370452 - DNA, 446 bp, Zea mays
tgatgtttttcagatcgacccaccacccatatgcatgacagcgtctcacagcactattcattttgtcgagacgagtgatgacgaccctctgggaagtttcggatctaaccaggccattaactacgtgcatgaatgtatgtatgatgacgacgagaaaagcacagttctgtgttcgctcgatcggctgcgatacgatggacgaacgtatacagcggatccgtgcgtatggacaaaagcgggagttttgctttgatacggctggctcacagagctgagctattccgggcagctggaattggaagctgtaaactggggtgtccactctaggagcagtaccctagcagagtagcagcatctacgactggactagagtgaagaaaacagcataacggaacgctgctggagcggaggacgatgagcagagcagcggtggcgcgtccgctctt

SEQ ID NO: 370453 - DNA, 460 bp, Zea mays
ggtttattctgagagggagcatgatctgacaggtagctggctgaatcatgacctatctgatgcagcatgagtaacagatagcgacaacgaccatatggcagcgaagcatccaggcatcactggtgctgcctgcggccaccacaagaccaggggaggagaagctgaaatgacaaacaagaaggtgctgaggatatacatggttttgatgctgatgaagaagatgacgatgaacatgactccgataaggagatgggtgtagatgaccaacacggggctgaacaaaacaccctgcaactgcataaattagctgacgaaggtaaaggataacgacctggccacgaggatgaagactcatatgatgatttcagcgacgatgaggagctacactcaccaatagatgaggagaatgcgatcatttgcattgtagaaaccgttcaagcattgcaggcatctgacccac

SEQ ID NO: 370454 - DNA, 320 bp, Zea mays
cgctccttcttgcggtccatggaatgcacaaaacggggcacgggctaggaagacaccctctcccagacggcaaggaatactcgcgggtgcctagtactgatggccccggaggatgcggcggcggcagcagcagcggcaggggccaagaaggccgccgccacgaagcctagggcaccggccgggatcaggaagccgatgccggtctaggaagcagaccacaaagcccccggaggcgcgcgcgaggtaaaacgctccgaggccaagaagctcgactggacccacatcaaggcccacgggcaccagaacccgcccaacaaaac

SEQ ID NO: 370455 - DNA, 303 bp, Zea mays
gcccggcctgagcgggtggaccgacacactcggcttccttttctgtcacgtctcctgagtctaccatggttcatgtatcccacacagcagccgctacctgaccctagcaggcgagctgggcatcagctggcttgatgatgagctttgcagcacccatggagcctctgttgaagactccatgcctgacgatgaactgtttgacgttctgcgatccctgggggatcaaatataaacggatgtcaacttgactgtactaatgtatgaagcgcgcgcttcctgcgtgatacgtgaaatgaggagcgt

SEQ ID NO: 370456 - DNA, 270 bp, Zea mays
tcgcgaacggcctcttcccggccgtggtaaaggcagggagcggggaactctcagaggacaacgcgcgggcgccccacaacacacggcgggggagcaacgacgccccaagaggcccaggacacagcgaagagacaaagcggggcggcgacgacgagaaacagaccggggggcacacagcgtgccccaaacgaaagggggggctggcaaggcttaagacagtcaagagaggggccacccccctgcctatatcgcataaccccgaagccccct

SEQ ID NO: 370457 - DNA, 427 bp, Zea mays
ggctcgcccgccggcacgggccgggcctgcctggccggacccacccacgcgtgcttgctttggcggacctccggactgactccagggcggacgcgaggccatcaagagaatagaagaactggagctggtacaggacgactgtgctttgctggtaactgggctgaatgctgacaacgagtgctgaccttatgacggcctgaggtagattcgggacctgagagcgacggactgggccaggcggcgtatcttgtttaggagtcgggcactatgggtcattgctggcttaaggtgaacgcatactgtaccaggtgtgatgccattgcagccatagcagatgctgccacaactctgagcccgttggcgagaactgaaaaggacgatggccagctaccatccaacccaaaagaggaggaggcgctgagaaagg

SEQ ID NO: 370458 - DNA, 322 bp, Zea mays
aaaaccggggggcctttaagggttaagtatttaaaatcagcccttgggttgggctttacaatacgagcaatcctgaaaataaagcacaaaagggactctcaaaaagaaaaaaaaattggaactcacatgtcccacagattgggcccattgggtgccatcaaattcatcaactggaagagccttgcacaatgggaaagttctggggggttttgggtgttactggaactggggaaattgaacaatcaacaaataatggaagctattggatctggtagaacatactcgattcctgagacaaacactttttacaaggcatatactg

SEQ ID NO: 370459 - DNA, 344 bp, Zea mays
atcctccgaggaacacattacaccaagggggtgatatcacaagtcggcaggtccattaaactacagtactgataacaacgccggctatgtaaaccaccatcttcacacgcagatgaaactatactaattctacattcgaaattacactaaactggcagcgacaaaatgcttcccctaaccaaccaaaatttcccttgaaagaaaagatcttttttccttttctccaagacacactatttgtaagatctgcaagttatcacaaaattgtacaagggttccgtcccgtctgctgtctctgaagacacgttcgccaaaaaaaaatgctaggttaatggaggttcaaa

SEQ ID NO: 370460 - DNA, 160 bp, Zea mays
acagaaaaactatcataactggtgggactatataaaccttggggtgtataaaaataattgtaacatcaccatacaccaaaacgatttttattcaattcggaaattactgaaatcaactatgaccaaaaaaactcgcaaaactgtcatgcccatacccaat

SEQ ID NO: 370461 - DNA, 281 bp, Zea mays
tccactgcagcccggcctcgctttataaccccacgcaggtagggatgtccatccttttggttctcgccgggcctagctccgggaatccacccgaccgcccggtacccaaaccctaggggttgcaaggcccaagcttgccggtgatggggcacaagaggaacgcctccatcgacaacgacgagtactattttccacaggacgacgcggacgacccagccccgtggccgagggtccccacctgcacagctctcgggcatcacattctggcaagcccaagtgcg

SEQ ID NO: 370462 - DNA, 522 bp, Zea mays
gggtgacttttgaacctgttcagtccctagaaccaaacatgccgggactaaagtttagccctaggactaaagtctaggctgaggactaattggaaccaagcatggcctaagacttgctagaatagactagtggctctcttatcgcggcctactggagaggcatacatgctaattacattgaggaccaaatcatccactacatgcttgactaagataatcctatcttgcttcctcacatccaccacactgatcttgagactcttatcaatgaaaagacctactctattagtctctgcgactgtcactgtgtaccaaagcttgaagccggcattgtgcgcctgtatcaccttctatcttgtcacccttctatgtaatctctcggacgcataacatactgacatgactcctagtcggtgtctcaattgactcccttgacttacctggcagcaacactacattgttaaatgatgcattgaatatcaaaatataaacatgttcaagcgtttctattgaataaatatt

SEQ ID NO: 370463 - DNA, 485 bp, Zea mays
gcgtggtttttgtgggcgagcttagaaactgggcagtacctagaacgaaacatgttgggactaaagggaaacgctaggactaaagataagtcctaggactaaacagaaccaagcagggcctaaggcttgctacaaatgaatgtacgaactgtcatcggggcgtactggaatggcatacatgctacttacatccaagaccaaaccatgcacgagaagatagactcagataatgctatcttgctgcctcagatccaccacactgttatggagactacgatgaatcaaaagtcctactttatttagatttgcgaggtgaactgcgtaccaaagcttgaagcctgcattgtacggctgtatcacctgctatctgctgacccttctatataatctattggacgcatgagatacatacatgcatgctagacgatgactcaattgactccgttaacttagctggtagcaacactacattgccaactgatgca

SEQ ID NO: 370464 - DNA, 238 bp, Zea mays
  unsure (1)..(238): unsure at all n locations
ccgggccggaaccgccgggactgacccacgcggccgtctttgcccgcggacaagcgnccacaagggcacggggggccaatggacacaaaccacgcagnaaaccccgggaaccagccgcacagggggaaacaggcaccggcagagggcacggggcccccaaagaggacaacagaacagacaccgggaccaccacgagaccaaacgtcagagacagggagcgccacaggacgggccagaa

SEQ ID NO: 370465 - DNA, 146 bp, Zea mays
  unsure (1)..(146): unsure at all n locations
ttcnttttttttattttttttttgaggcaaatacccccctgtcccctttaaatctttgggggtatactaaaacaacacactggcctgccacaaccaccactttatatttgccattgcttacagctctacatatacatcaaccaaac

SEQ ID NO: 370466 - DNA, 426 bp, Zea mays
aggaccggccggaaaaccgggggaccatcgcgccgggtctccgggccgaggagggggaggggcgggggaacccggggacaacccccacggccacacagagcgcgaccacagggccacaaccaacgcgagagaagccgggccggaaaccgggccaaacagaagagagggccacggaggaccccggaacaacaagccgagagcagggaagagccaccaagcccaacaaaaggcacgccagaagaagccggcccgccaggaaacgggcccgaggaaaggcagggcaaaaccaccccgaggccaacgaccagccagcagagaacgcgcgcaggacagcagagaacaggaggcccaaggacgaaggacccggaagccccaccaccgggacacggaccaggaggcgcaacagggagggacacaagcccccaa

SEQ ID NO: 370467 - DNA, 160 bp, Zea mays
tttcttttttttttttttttttttttttttttttgggggggccactaaaccccaggggcgttaccacaattccaaacatctgtcaaacaaacatttttaggggtcctgtaacaacaaaagctccataaacaactcttaccggatgcattatccaacaaaa

SEQ ID NO: 370468 - DNA, 309 bp, Zea mays
ggaaaaaaagcgcccgggagcatttaagttttgggaaacttggaataacaaaccttaccgttcaaaagtaactgaaattgaacccaaaacatcccgttgccaggggaacctttgagcaaactggaaaggggggattacttattggggatgggataagccccctttttggacaaattttggtacaagattggggccccaagggaacctaacaaaacttttttaagttacaactgggtaagccctccagggacttaggccctttttggaaaccccccgtttttaaaaaactggtttataaaaaatgggggg

SEQ ID NO: 370469 - DNA, 256 bp, Zea mays
gcagcagcagagctgggcatggtggttgggttgtgtactttgcgcctgtgcggacggagggcggcggacggtgaaggagatggatggcctggcagagtcgacccggagcatgaggaagtacgcgtcggaggccggcggtctgcgcgcggcgcggaagggcccccacgggcggacgctgacggcacgcacggggcacagcatgggcacgactgcgctacgcacaaagtacaagtaggccgtgtctctgctgcgcagg

SEQ ID NO: 370470 - DNA, 429 bp, Zea mays
tgggacagggggttgtcatcatttggcagtgactcatgcgaaccctcttcaagttccacgctaccagtccagaatgcacgtgcagaatcagaagctgatccatggtgtaagaaaacttctgctgaagatgattctgatccatggggtaagaaaacagacggcgattctgatcctgggggtaaggaagcgctatctgctgctgacggtgattgcaatccatggggaaaggaaacagtaccttttgctgctggtgattctgatccatggcgccagatagctatatggtcagctggtgaagttcggaacactagtgccacacatataggaggctctagtggcaatgcatgggacaaacaatctggagttggtggatctgatgctggtggcagctacttggacagagcggttgcaataacgagagtgaaaaga

SEQ ID NO: 370471 - DNA, 360 bp, Zea mays
caggaaacggtcacaacgcaagcactcaaatattccatggtgcaaattagaccggaatcaaccttccaggctcaatgtttcgaacaaaatccgcccagcaacaaacattatacgattttcaagttacaaccaagccttctgaaaaccaaaacctttgccagttgctcaatttgaattctcgtaacttcagccgccaaactgtcatcatcttcattcttcaggaagctcactaccatgataaaaattctgtgcagtctggacatctactcgtcaacatgcgcgatctcacccatcatgatacgggtgctctgaaccttgaaccccaaagctgacgtgctcagctttgtacctttcttcccc

SEQ ID NO: 370472 - DNA, 503 bp, Zea mays
gcgtgggcggacggccatcaacgcacggtgagatgagcttgctggggacggggacctgctcggcctcgacctggatctctcccctatcctcttccccaactctggtgagcaggatgaccgccctcccgtggttgctgattccctgtacctatctctcccctacctcttcctcccatgttctttgcgacagggacttggtattcctccgagcacggcttcaacggcggcaactgcgaccaagcacgcaggcaccgggtggtggtcgaatcgagggaggcgacgaccatcaacgcacgggacttggtattcctccgagcacggcttcaacggcggcaactgcgaccaagcacgcaggcaccgggtggtggtcgaatcgagggaggccatgcccctgtccttcaacaactccaccaccgaggattcagcggctgcccgtggcggcgcgaggcgagcgccaggtgtagctgtccgaggcggagatcccgcagctctgcgtagagggc

SEQ ID NO: 370473 - DNA, 309 bp, Zea mays
ggaacaattgtatctaaccttaatttccaaactccaaactttttacatatatcactcaaggataataataataataataataataataataataataataataataataaaacaatctagctaagggctaattaatcctcagctcaaaagctaaaaacagcagcttgctggcgaactcccgtgggggactgcaccagcgagccatttccacagtggctgcaaggccggctcaccacggagctcaggaacgccctcaccaccttttccgacgcgttttttcgaagcaaacacatgacgtactccatgacg

SEQ ID NO: 370474 - DNA, 506 bp, Zea mays
tgctcctgctgccgggggtgtgacaagatagatcgcctgtgcaccctaagtctatccggcagaacctcaagatgcccccggggaagaaggggccgcgagtcccacggtgtcacgcggaagatacagaacctactcctacagactatgagaaacagagggcaattacaatcatgaagaataatcaaatgatgcaacggttagggattcgtcaattacaatcaatgatggctagtattccaagtggaaggatgaacgataatgctcctcacgaatctggatcgttgtatgatggtgatgatattgaggactctgaggatgagatggtcagtaaggaatccctagttgataagtctgtagccagccacatccccaacaatggtgctgaaatctcttcgaaaaatacaagagcctctaaaagggttgttgcaccttgagtgcaagaacaaccaattagagtcactaggcgaaggagtgctaccataaaccaagagtccaaccaaaatata

SEQ ID NO: 370475 - DNA, 236 bp, Zea mays
cgcctccggggggttttttttagcgtgctccgctgttcgcaccaacccacgatgccactccccgacctccacctaggggtccctcgagggttttgccgcgatgtcgctgcggccgacctagcgggaggacatgtccaagggcaactacaatcgcacggtgaacaccctgcagagccagcgccatctcgagggccagacggaggacattcgaaaggacaagctagaggaaaggctcc

SEQ ID NO: 370476 - DNA, 246 bp, Zea mays
gagggcccaaagaagttttattttttttaaaaaacaatttatagacacaatcccactttactgggccattaaaaacaagtcctcccccccaaaaagttaagggggcccctggcaggggcaaaaagtttttttacacgaagggacactcaacccgcccaaactgccccaagggaggcggggaagctaaaaaggaacgggaaattttttccgggccgcggaaaaaaaaaagggggtctggactggact

SEQ ID NO: 370477 - DNA, 250 bp, Zea mays
tgcaaaggggggggtttttttagacgatgtccacgattcaccacgccagtggtatgtgacctggggtgtacaaatctatgattgagccatttggtcaacacaggcctgatatcttggatagcgatattgctatggcagtgtggaaaattacatccaggggaattcttacagatacttgcaccgatgggctgtgttctataccttggttaggcgccaccaatctatgtacatgaccatgtaccatggtgtg

SEQ ID NO: 370478 - DNA, 551 bp, Zea mays
  unsure (1)..(551): unsure at all n locations
cccatcagcctgatcacttacccggagggcactggaggattagggtttggttgaagagggagcaacgaaatggggggcttttgctccaaggagtcggccgtcgacaagtcaccaagcgacactacgctcggcccaggcagggtggtcgaccaccaccatgaccgtctagtggtgaaggaggagaagaaagctgtggtgggggaggctgctgccaagaggattcaagaagagcaacatcaacagcagcggcagccagcgccgccaccgctgcacgtatcggtgtcgcggactgcagtgcctggagcttccgcagataccactgcagcaccatgggatggggtaccaccactggcacggttgccatcgctgaagtcggggatgggtgtggcgaataaggtttcggaagtaagctcaattctgggtagagctagtactgctggccttggaaagcagtggaagtgcttgatacacttggcagtagcatgacagatttgaatataagtaagttttgatcangcactgcaacaagggcaacaaaatatatattttag

SEQ ID NO: 370479 - DNA, 362 bp, Zea mays
gttccaacacatcgaaataattgtttatataatggactaaacacgtatatcaaaatgtttaactgagcattgttcccaggcaaagcatacatgtttcatttctgctgttctaaagcaataaaagggctgctggcggcttccgcgtgagcgaggtctgagcaaggaataacccagggcaaggcttacccagcattttttcagagagaaggaataaccaagggcaaggcttaccctgcatttttttcagaaagaaggaataaccaagggcagggcttgccctgcattttttcagagactgtcgaacccagaatctcttgtctcagtgggaaggcttttttcgatactgcgtcaggcctgttcta

SEQ ID NO: 370480 - DNA, 286 bp, Zea mays
  unsure (1)..(286): unsure at all n locations
gaattgcagcagacctgggcgggtaaagcgtgaacgcctgtactcctgaagcgagtacgacgcaacacgccgaggcggtggctgcngnncaccccaagatgggggaggagtagctgctcattcaaacagagaaggtgcggttcatagacgtgctgtcgatgctgctcctgaggcgccctatcaccatctacgcaatcgtggaggccggcgaccggaccgacgacgacctgtgaagcacgccctgaaactggatcgttgactcacgcaggttatccagaaggcgctc

SEQ ID NO: 370481 - DNA, 396 bp, Zea mays
cacccggagctgcctctggcactcatcaaactttccttcttccttggtttcatgctggcatcgtagggctgatcttctgcacggtccagtgatggtgtacggttcctgagagcgatcgatagcgccagaccgagttaccttctttacggattgctcctacgtatgggtaattgctggtctaaggggaatccatactttaacagcgactatttcaatgcagccaaggcagtcatggcctccatacacagcccatcggtgagaacagagaaggaggatcggcagacatcctcctacctctactgaggtggaggcgctgagaaaggatacagctcgcaatcctttgattgcgtgacatctgaggagctcaagagaacgaccaaaaattccaagcaagat

SEQ ID NO: 370482 - DNA, 423 bp, Zea mays
agctcggcactaaggtagagatggctgtctgcagaccttgctgcatgcacttatcatgcgcatatattctgctgctcgattctcacatggcctatgctgagtgcacattttatatgcttaagggccaacataagatggagagatgcatattatttcatagagtcaagaggctacacgcaaagatatccaacatatgcccgcccgtgctacgtctaagcacacaggacctgacaggctctcagcctgttagcaccatggaatgctcttatttgtgattgcctgcatcaccgccatcataacacttgcaatgatgccattaaagagacatgatactgatgttttcagacctctcaagccaccaagatagtgagttcaggcctctcttgctatatcattaggcactcgtcagtctagctcaaaccg

SEQ ID NO: 370483 - DNA, 357 bp, Zea mays
gttagagatttagacctactcaatttctttcaatccacatgaattaagattaaaatgaacagattctcaatcctctctaacccatatgaattgagattaaaaacaatatgctcgtttatggacctgcctagcccctcctgcccttttttcccggtccaaactgcgagcacgaacaagactagaaaatcaaattctaacgcaagtgattacgtgacagaacgaacgccgcctcacacgtgactatatcagtttcagttacatgccggattgccggttgcgcgttcaggctcaggacctgcttcggcgacgttgctgctgacggcgccgccgccggccacctcgccctcggcgacgcat

SEQ ID NO: 370484 - DNA, 455 bp, Zea mays
tgtccgccccacccccagtctccgcccgtcgcgtcgtaacagacgctgccccagcctccgccccgttctccccgtcgtcggcaccccgcttgacgccccccctgtgctccaagactccccctccgcctccgtgctctcgccggccttggcgcctgctctctccgctgtgggtgtcagttggaggggtcccgcaccatgcagaagctcctcggtcaggcaccgccacacgccagattcgagctcctccccacatgccgcaagatgattcaccgtgcactccgccgctttctgtcacgacgttgaaccgtccaacctcgccatcggcggcggcctcctctctcttgccttcctccccctgtgcaccgaatcatccctctctgtttatgtgctggatttttggagttttaccagagttgtttcctggggtttagcgggaatcctagatgtgtaccccc

SEQ ID NO: 370485 - DNA, 359 bp, Zea mays
aaaataataataataatagtggatacagtagaatttaaattcacaataggaattatttggatactaggaaatttgaagttcaagacatgtgtttgaattagaatgggatttgaaagagaaaatagaaaagaaaatgcaaaacagaaaatgagaaaaagccataaatttgtgcctgggccgaagctgaacttatcggcccaattgccttctgaccggcccacctccaccagcccgcgcgtgctcacaattccgttcgctgccatgtggaccccgcgcgccagcacttggatttcttctctgacgcgtgggcccacgctgtcaggcgccaccttcctcagctaacaacctcgacgcgatcg

SEQ ID NO: 370486 - DNA, 355 bp, Zea mays
gagaaaaagtgggggctagctagagccttgccagcgtgcggcgcgggacggggacacgattcccggcccgcagccgcgcgcgcgcacacacacgatttacagggcacgacgtatacatacacaacaagacccacttgtccctctctctcctgcttgatcgggaacgcgcccggccggtagcagtccactagagattccagggaccgtacgtacagcagcggcggctagcgctagccaagctgctgctacatgaaggacggcgaccggatgtccatctcatgcgtccaagcgctcttgtcctgggcgtggacgtgccagtagctctgcgccaccgcgtccgggtccgcgcccgccg

SEQ ID NO: 370487 - DNA, 106 bp, Zea mays
gtgccacacgctgggccgctgcagggcgcgctctgcctggtcctcgcctatgacgattgcacgccccatccgctggcttccttacgcgcatccattaaggacggat

SEQ ID NO: 370488 - DNA, 135 bp, Zea mays
acggccatgaggagcaacactagacagctcgaggcttgcatgctgaatggaatgcatacatgcgtgcctagcgaagctatgggccatagtggcaatgcctcaaaaagagcactgaacaggagagccgatgaacaa

SEQ ID NO: 370489 - DNA, 515 bp, Zea mays
gttccgtccgggccgactttcttgggaagtctgctctttttgcctctcaacctctcgaggcctcgaccccgcgcctctccaacttctccacgcggtcgcactccccaacaccgacgcctcgtcgacggcagcaagcggcgatgcccttcgccaacgagaaccacacgccgtcgtctgccacgggcactgtcgcacgctgggccatgctgcagtcggtggcgccgccacaccttcttcctccatgcgccgtcgccgccctattcttcttcgagatgcagccgctagcgctgccctcctcccagctcccttcatggtcgcgtgcagctgtctatccccaaggaaggcggcaacgagggggagcctcggcaaggggtttgggttccccctccccttcgatcggtcgagagcaaccaagtgaagcgccatcaccggacaccagatctgcatgtcgtcggcgtcaccgaggcaccctctacttttcacgaaacatccgagtccagtatggaataaaacta

SEQ ID NO: 370490 - DNA, 310 bp, Zea mays
atgaaggtaaacctgaaattttttggttagggggcagcatgttcaaaatattcttcgaatcgaacatttcatgcccccccggacaatcgaatttttaggataagcacccccccccgggttggctaaagagaccccacccccctttaccagggaccccgggtgaaaaaatatcccggggaaagccaaagaatgctggcatgagaaaattgggtgggaattgcagcaccccgattggagactcattcaactcccccatggtcctcctttacagcatttcctgagacccggggacccattggctaaccttttt

SEQ ID NO: 370491 - DNA, 251 bp, Zea mays
  unsure (1)..(251): unsure at all n locations
ccgggatatgaccccacgccgccggccgagtggagggcccttttgaccaagcngcccctgcctcccgagcggccgagagctagggcaccgagatcatgattaatacaacgaaaagaacggacatcctcaacaaagatcaatggcgaaggcagagcagagagcaggatgaccctacaggaagagaaaagatcgggcacggactaaaagctaaccagcgacaggacgacagccacagggagggaggacagaag

SEQ ID NO: 370492 - DNA, 362 bp, Zea mays
cctatgcgcaccccaccccccccgcagcgacagaggggccctgacggaccgaaggtgccgaagccccccgagcagccgagagctagcgcccaccgccccccaaggaagcaagccagcgagcgagccccgacagggcagcagcacagggacccacaacaccggcagagcaccgcgaggagcaccgaggacacaggctaagacgagagcacgcgctcacggagccaaaacctgaaccagccgaagcgcgggacgcaagaggaaggacgaccaggagggggaggccaacgaacgaccgaggcagggacaggaccagcctgaacaaggaaaaacaaacccggggcggaaccgaaggaacgcgaggc

SEQ ID NO: 370493 - DNA, 251 bp, Zea mays
taagcagccggcgatgacaacccccacgcccccggagcaccccaggagtgatttagcaccggacccgccggaccccgccccgaacacgaacgcgcacgcacaagcgccgtaagcaaggaaccccagacgccaaggacatactgggcgggaacccgaacccaaccatgacgttagagcccgccgacggcggccacataaacaaccgaaccgggatcacccactgactggcccaaaagcagagctacaccaag

SEQ ID NO: 370494 - DNA, 357 bp, Zea mays
gcggccgcagaaacccggggcgacccacacgcccgcccagtcgcccgcccaggcacccggggaaacaggggaggggctggtcgccgaacccgcgcgacgccgccgcaaacacgaaggcacacacccacgcgcaaaaaaaaaagagggaccacagggggcaacatcccgggcggagaacacaaccaggccgtgaagaacaggcacgccgagggcggccacaaaaacaacccaacagggaccacccactgagtggaccaactgctgagcgccacaggggccagccagcccacccgactgccccacccacgacaagggcaaacccgagaaaaccgaagccggagccaacatcgagcggga

SEQ ID NO: 370495 - DNA, 320 bp, Zea mays
caggcaccggcccggaaccccgggggacgccatcacgcccgcccagtaaaccaccccgaccgggggcgaaggaccaagggacctaatgccggcccgcgcacgaaacgacccgccggcccaggagccagacggacccccagagggaagagacgcgcgcgcaaagagacgccagcggcagaaaccgggtccgagccgacgggggagacaagggcgacaacaaggcagggccagcaaagacccgcgacgaacccaaaaggggaagcacacgggacagcaacagccgcccaacaaaacgagggcgacgcgcacacaaacggcca

SEQ ID NO: 370496 - DNA, 204 bp, Zea mays
ttttttttttttttttcttattttctctcaacgggggggtggggtgtttcctactggatttaaacacaccttgggcaacaaaggagcaatttacaactacccgctttaattatactgccacgggaattccacaggcattcctaacaaagcggtgattgggctattttccgactggcctccacacagtttctgaagactccccac

SEQ ID NO: 370497 - DNA, 306 bp, Zea mays
ggttagtatcctccgtagccggctgcaaggccgtttatattttagaagaggaggcggaggataccaagagctgggagaggagccaggcgcgcctctgcagcgatggaagtggcggactaggtgttgctggtgctcggcgccgtgttcgacctcacgtctcgacttccgcctgcggttcgccaaggccagcgaggggcggcgcctggtggatctcggtgaggacacatgggacgtgccgctccctggctgcggtggtgccactctcctcgaggtgccgctcgacttttgctttgacaagggttaccg

SEQ ID NO: 370498 - DNA, 307 bp, Zea mays
acttaaaccatcttcaggggggggaacttcatctgctgcggcatatattcaatcctaccgcgacacgagtgcttcaaaatcacgaaaattagcacattacattcatgggactacttcagtaattacaactacttcaataattaggctatcggaaaacttgaatcgacttaccattttaaatctgacgccctatgccgaaacacggtaaggatactgatccagctctttggggctagcacttgatgagcgatgcacacggacctcgcttattttgactaacatccgggattctgggttcaacaagatt

SEQ ID NO: 370499 - DNA, 311 bp, Zea mays
ggctcaccccccggcaggccgagctgcagctcgggttccacctcaatggcgcgcgcgcgcactccggctcgcagatggagcacgcccagccccctgctgcagagactagcgctcaggaggcggatccctgggtgctggccctgatcgacgccatccagctgaatcccctgcacggcgcccgatcttccggggggaattcctccaccgcgctctcctctgcaagcacctgggatcagctatgccctgggcgtcgaaatcagacactgggggaccgaacgcccctctgcaagataggcgtggataactaatgc

SEQ ID NO: 370500 - DNA, 180 bp, Zea mays
cgcgcccgcggtcgcgtgcgtcgctaccgaatgaatgatggtgttcgcttgttgatgagttggcgctttgccgcccttatgacgaggtcataattcgatgggcaaatgagataaaggccgacaaggtgctaactccgttgcttgggacacaacttgtgcggttaaaaacaaaaaaaataa

SEQ ID NO: 370501 - DNA, 124 bp, Zea mays
aacaaacagacactgaagggggggtctttgacagaatggggaggaaccgggttacacgccacatggtgagcaggcactgataacaatcatcgacgctttcattgggatgggggcaccattaagg

SEQ ID NO: 370502 - DNA, 365 bp, Zea mays
gagtaggccaccttcatcgggggcggcgtccgaacgcaccttatgccggccctcgcgcgtaacgagccttctctactgcggctacacgtaccccgcctagatcgagcggccagccggcgagaaaatggtggcgtcgagtaatgactcgtgaggggtgctaccacttccggatccgaatctcgccatcaagtccgctttcttgcctccaggtctgggcgccgccgggaggagaaaatggcctccaggacgtcgccactggtgctcaagagggtggccgggatccggaccatcgctgagcccgatcacttcaaggaaaggaattgtgagtctcgcgttggagaagtcggagactgagagtatatggc

SEQ ID NO: 370503 - DNA, 536 bp, Zea mays
  unsure (1)..(536): unsure at all n locations
gcaattgccatgtacctagaaaagctagaacgacttataatttgtaatggagtagaaatgtagaataataatttttaagtaacacaacctatgaacagctgcaaacatatatatatatatatatatatatatatatatatatatagtatccaattcaatgctcaggatctccccttgtccaggctgagagcaaagaagacgaaacaatggaagcagaaccagatccagaaattgatgtagtccctggacctgggggagaaccaaaggttgggatggtttttctgaatgaggataaggcatatgaattctatgccaactatgctgaaactgcagggttcagtgtccgaaaaggctggttggacaaaacagcaaagaatgttacaaaatctcgagcatatgtttgttccaaggagggatttcgtccaagaagtgcttctatcgaatcaaagaaaccaagcctagaagcaagaactggttgccaggcacacatgactattaagattacagcangcacaaaatatgtagtgactgagttt

SEQ ID NO: 370504 - DNA, 349 bp, Zea mays
gtaaccaaacagtaaaccaaacagggggtctgctgatcctggttaagtgtggacaaacaaccaaacaagtagacttgttttggtttgcacgaatgcatacaggctatgcccagcctgcatctgggctttgacctggatcacctgatcctgtcaaccaaacagtcgcatagggctagttcacccttttaatctattacaccaaaaaggaccctccagacttatgacatgttatttagttgataaggatattaactcctcaagagtaactgcactgggccgtctacagccatactagggtccctttaatgcatgccgggagcttaaactgggatttatccaacaaacacaa

SEQ ID NO: 370505 - DNA, 351 bp, Zea mays
acttaatctatctttcgtgggagtaacttcatcgtatgggagggatatttaatcctaccgcgacacgactgcttcaaaatcacgaaaataagcacatcacattcatcgaactacttcaataattagaactacttcaataattaagctaacggaaattttgaatcgacttaccattctaaatctgacgcgctatccgcgaacacggcaaggattctgattcagctctttgtgtcgagcacttgatgagcgatgcacacggacctcgcttattttgtctaacgtccgggattcggggttcaacgagattgagtagggaagaacaagattcaggcattttgttgagcgcctggc

SEQ ID NO: 370506 - DNA, 560 bp, Zea mays
ggctcctcccacggcacgccgtgctccagctcggattccccctccatggcgcgcccgagcactccggctctctgctcgagctcgcccagctccctgctgcggtgactagcgctcagcgtccggctccctgggtgcttgccctgctcgccgccatcctgctggatcccctccacggcgcccgttcttcccgggtgtcttcctccaccgcgctctcctctgcaagcaactgggttctgctctgccctgggcgtcgttctcagtcactggtggaccgcgcgcccctctgtttgctggtcgtggctccctcatgctcgccgtcattcgatatgccgccacgtcctcgcctcgtctcggtagcgcgcctgccagtgtcgttcctcgctatgtcgagctccctccccgtcctgtccaattcgccgtgtgggtggaacctacgtgcacgctgtcatcgacaccatggtcgtctccctgtgcgttgtgtccctcgtctccagccgacgcactaaggaatgggcgtggagtatagaagaaagtgaacccgaaatgtgctcgccggcgct

SEQ ID NO: 370507 - DNA, 501 bp, Zea mays
  unsure (1)..(501): unsure at all n locations
ctctcgcgtccgcttccattgtccaccaccctcacgcctcgccctcccgtcccggcgacggcgagaccccctccgcctccgactcccgcgcgactgccccggaccccagtctcgcccttgtccaccgtcatggccgcacccgcggttgcctccccgagccgggcgacccccaccgacatccccaccgccgcgccctcgcccgcctccccgccgcgccgcctcgcgtcggcgccgcccgccgtcgacgcgtccgggtcctcctccccggcctccgcgcattcaggggaccagctctccgcccccgacgcctcgagcccgctgctcgcgagcaggagcgaggagtacaggcttctgttccggctgccgcccgacgaggttctcgtgcaagattttaactgcgctgtccaagaaaatattcttcttcagggacatatgtatntatttctgcaccatatatgtctctactctaacatatntggatatgagacaaagaanacaata

SEQ ID NO: 370508 - DNA, 267 bp, Zea mays
gggccaaaattcttactttttttaaaaaaagattgtaaagggttgaaacattccattttttaattagcctcacgggggactaattgccacatgaaaaggaaaagccctagccccagttagttacttcattttggcggggaaatacccattggcaattggtcaccatcaagggatgatttaaaaagggaaataggggggcaaatgcaaggggaaaaaacagggaaccggggggacaacaggattagctggcccattcgtttttgactt

SEQ ID NO: 370509 - DNA, 72 bp, Zea mays
ggggaacatatcacctttttggaagcaatcacttaagcgtccttttagcattatttggaaactggccccccc

SEQ ID NO: 370510 - DNA, 287 bp, Zea mays
ttgtcgcgtgcgctgttgttcatgttgtcctgctgctactctttatcgctgactaggttggtaatatcgaaggcaggctgcgactatagctggaactgtggctgtggtcggggcgaagcttggggagtgggacgagcgggtgatggcagctgctgatgtgatgggcatgtctgtggcgtatcttaagatgggatccataacgcaaaacaaggtgcaagacaagaccaccacggattggacataatctagtgggaccaaggagacaggcaccaggggggggtcggctg

SEQ ID NO: 370511 - DNA, 360 bp, Zea mays
aaaactctaaaaaaacactgtgggtactcaaaataatagggggggttgtacatgatccaagtcaaactagcaggaagacaagaaaacagaagtaaatgcaaaacatatcaaatacaaatgatagtgccgattctcagtccgagccatgaattgatcaagtgctttgatgaaaagaatcttgcaggttagcgagaaagacatcgttgcaacatccaacactgaagcaagaacaaatagcatgcacgtcacaggtcaatgaaacaaatatcatcataacctaggagttcggtggaaatattaatattcacatgcagctctgtttaatttgaatagagattgacagaaccaaatggagacacc

SEQ ID NO: 370512 - DNA, 534 bp, Zea mays
  unsure (1)..(534): unsure at all n locations
cgttctcgtgggcggacgcgtgggctcttggatgcttacaggcacttgtgtctcaaatcctttcaacaattggatccattttagtgaaagtaagatgtcaatgccagtttacacatcactgccattgttctttctttttgcatctgccaacattatgcatcaagtttctgctgatttatttcattgttagaatttatgatgtcactgccatggtgaaggtgaccaaccacgtaggcgcccacaccccacgtgtgtgtacctatttgcggcgtacccggcgttgagcttgttgttacagccaaccatgcggaggccagggtccacgatcaggtggtccaatagtgtcaggttgaagtcccccaagctgatgtaagcaacttatagccttaataattcctgctttgagctgcttcgtgcaagatattgctcgcatctgtaggcttagtggtatttagtttatggaatgaaatngtccattatcatctcactctttatttttgtttggtttatggaatgaaatgagttgatcaagct

SEQ ID NO: 370513 - DNA, 204 bp, Zea mays
ttccttttttttttttttttcttttcaacaatcactggggccatcaaaaatttttagacgcatcatttaacccagggatgaaaacaaatttcctgctcaatactacaataagcgtgctagttttcgacaaagcaaaatcctaaacccaaacaaacagaattgttcttaaaatacaaatcatcatcctggcttgccctttttaaa

SEQ ID NO: 370514 - DNA, 415 bp, Zea mays
cccggcccggaattccgggttggcctcacgcgccgcgggtgacgggccaccatactgatgccactgcgagggcgggacttagccccaacatctaaccagatccacggcgcatcacagggcctccgacctaacacgaggacgagacggcgccaatacatagtcaacatgtgagcaggcgacgtgcactgcgaaacctaatgggcactttccgttgaccagatccatacacgaggggagaggccaaggacaacgacgtctatgaggaggtgctccaggactgctaggaggaccacgacaggacagtcgattgctcccatgctaagcccacctgagaggcaacaaagacaggctactggatgagccaaacatacggatcaagagacttactgatcaagccagagctgataagcgctat

SEQ ID NO: 370515 - DNA, 254 bp, Zea mays
gggtagggagcctggcacggctaaggatgcacacgagacattcttgacggaaaggccgccgatgacagtgcggcaaatggagactcaacatcggcgagctggggcagcacctgcagaatgaagtacaggaacttcggtcgcgccacagacaatagcgacaccaccacgaacgacgagatattgagagtgcatcaggatgggcgccaggacgagcatcgctacgggttctatatgggtgtgacagagaaccaccc

SEQ ID NO: 370516 - DNA, 428 bp, Zea mays
  unsure (1)..(428): unsure at all n locations
ctgttgcgtgccctgaactgccgagaggaaaggaacccgatttttacaactgctagcgcgaacacgcgcccaaccggataggcgggcatgggcatgcatgcaccgacaccgcgcaaggactcaatcacacaccgtgggcggtgcctaccagcgactgcggggccggctgaggctggacatctaccagagagggaaccacaggagccgacgaagaggaggtggcgcccgggccaggagggntgccgctaataacaggggcctggagaacatgatgaagatgaggcctctgaccaatggggtcacggactcgctgagtgagcatgacaatggacatctgggccactggccacaagatcatggtggatccgaacatacgccgggagcggcatctgcaagtcctgctgaagcctgacacggatcaggagacc

SEQ ID NO: 370517 - DNA, 290 bp, Zea mays
aggtggcgagggctgaactatcagaggggaaagggaaggccgatctcgaccactgctccacgaccacgagcccaaccgggtagctctttcttagttcgctggtacccacactcggggatgcctccatgcgatcctctgggtggcgcctaccagcgccggcacggatcgtcgcggctgccctgctcctgcgcagctatcagcgggggagccgacctcgccgatgggtgcgggcggccgaggaggatgtacatgaagaagacgggcctggagatcatgatgaagttgggcct

SEQ ID NO: 370518 - DNA, 274 bp, Zea mays
cctacacgcgcccggggtttcagacgccaatgccgtgcaggcaatgcatcttaggacatgaaaacctagtccgacacatcccgctgagcgacgggacaagggatgctggagatgggctccatcatagacattgcgcgcgcagtggtggccgaccgccgtgagctgctaagccacctgaatgactacagccggcgaggctactaggactgggtgtgaggcgactaccccgttctagcctgccagccagggcaggccggctctgaaatccaagtac

SEQ ID NO: 370519 - DNA, 538 bp, Zea mays
cgattttagaagaaaagcagcaccagctttgcaaactacaattgacactatcagcaatcaccgcggcggcttcaccatgtccccccccaatcaccgcagacctcggctactcatcagcacagtcagaggatagcgatgttgttgagaggtgcctggcagcagtaaatgctcttgcttcataccatttcagagaaagattaggagggagaggaggacagaactcgtagctcatggaatctgcaggaccaaatggcaaattgcaggaaagcataccaactcaattcttcagacttctattgtaaatacttctttttgaagatctcgggtgagctgtgtactggtaattcgctttttattttgattgttttcaatattaagcgaagtacttattaattttttattatcttgtttaatcacaccgccaattgtgtctgaagggaaccagaccatcaaagcatccattggtatttggacttgttcacatttaacttcagtctgctagattttttatataccgtgtattctctgcaacaattac

SEQ ID NO: 370520 - DNA, 332 bp, Zea mays
cggccgccctttttttttttttttttttttttttttttttttgttgggggcaacaaaagcatgcactggttataacggaagggtatttagtcaagcataaagctacctctattacaaccactggggacgacaggtaggggtactctacgataacatgtcaaagacagaaggcagactgaggagtcagccttctgtttctgaagcacaagtctattgggattataaacacataggattaaacccctttccaggtttttttcctggattggggacgactcaatccgtcagtccagcgtcattggttgggcgatgcaacagcggaagcgagcctt

SEQ ID NO: 370521 - DNA, 315 bp, Zea mays
gggttggcctccgccgcccgtgattcgcagggggctagcactagacccccagctcgggccatgctgttgggcatcgcacgagcggtccctgccctctgttgggacagggctgaaccatgaagctgatgtcaagaatgcctagatcatgacactctgatggggtatgcatactgaagccagcccacacagctccttcgccgttactagtcccagtctagtgcgcaggctgtaccctaccgtatcagggctgaactaagctcgccctaccatgtccaggagcttgacctctacatcaaaatgccaagcattaggatc

SEQ ID NO: 370522 - DNA, 350 bp, Zea mays
gcatcgagaacgagaactgagcacattgaacatgacaatatagggctgcataatcctgacagtaagctgctacatcagcacaaaacaaggtatataatttacacttcaaaaggaaacatcttacgccaactgctgctaggtcaaaggattaaaaagtttcaaacacaaaaatttaagtacagagcaagctccagcttcaagtgcaaacttatttagcatcgccagatggtggaactacatgaagaagctcctgtggagttgagcctggatccaattcatagcaccccttgggagcattatgagcttcttctccagtaaggacatggaatggcacttggtgtgaaaaacac

SEQ ID NO: 370523 - DNA, 293 bp, Zea mays
cgtttgggggcgttcgatcgcccgggcctcctgagtgaacaggggacacttactatgcggaacctgcgggagcccaacgcgcggaaatccgctgtcataccgaggcctcaggcgcacactgacgcatcgagtgtcacagctagtggatgcacactaaaagatgcagatacacaaggagatatgccagagaggctcactcaagaggaccaagaagaggaggtggggcctggggtcgcactggggctgctgctcgagaaaagggctgtccagacacctagatccacgatgggtcg

SEQ ID NO: 370524 - DNA, 303 bp, Zea mays
agcggggagcaagcaaaggaagttgggggcctccataatcaattttatccatattctggtatagatccgtgcaatacagtttctatatcatataaccatcaattttaggccttttttacaaaacctcctaatgacttctctctttatctggttggcaacaagaacatcaaacaacaaacaaaacgttggggacgtatttcttattttacatccagacaagccagctcacttcctcaattaaaaaaaattaagagaataataactgggatcagttcgacgataatcaatgggtcgctggtgaca

SEQ ID NO: 370525 - DNA, 253 bp, Zea mays
gaaaatcattacaaacatgggggggtattacatgttcatgggggcaaacatccaacttatgataagcaaactaactctaactaagactgactagactaagacactgaattaagcattattacagactccaactctgtcgatctatggatccaaatctatttgggtcctgcagtctggggtaccatacttgaagcgaccacggggtggggaaccgcaagggcgctaaataccaataggggtgggagaaccacca

SEQ ID NO: 370526 - DNA, 195 bp, Zea mays
gccaatcgtgctgcctggaagtcatccactcacctggcaaagaggatggatgaaatgggcatcctggcatatgcccaacaggagagagagccgtgggacgatgagcccaccgcgacgaccgccagaggctcgatgacggtccagccacacgtgaagatccacgtgacgcgatccgggcaccgatagaggcacaag

SEQ ID NO: 370527 - DNA, 204 bp, Zea mays
tttctttttttttttttactgaaattccacttactcgggcggggtcttataaaaagatgggtcattatataaatgtacccaataccaaggctacttaaaaacataaagctagctagcatgcaaacctaagggttcatcataatctcaccaactattgcttgcttgaacccaatctagaagcagaggcactctcaacttttattg

SEQ ID NO: 370528 - DNA, 261 bp, Zea mays
gtataacttggaaacgggcaaggtccttaaagagactggggagtaatagtgctgaagtggtataggacattactcgcatttttgggaaagaaaggtgaaacagtaatcagccaaaattatggcaatgcccatttatattggtccattcatttcccatcggtatctaaatccgctgccttagcccgctgcaactcggattcaacagcagctacaattctggagaccattggttcaaactggacaagatgccgacccatgccc

SEQ ID NO: 370529 - DNA, 118 bp, Zea mays
acgggcgcaaccgcaaccaggggcgtttttcaaagaggcgcccctgcgcgcccagacgaccgcacacgaggaaagaagcgcaacatgatgcagacccacgcgaagacgactatcgcca

SEQ ID NO: 370530 - DNA, 277 bp, Zea mays
gtcctcgccatcctcatagaaaagctgaggcggcgtaggatttttaatggcggcggccggtgcagcagtagtggtgcagtaacacgagccatgaacagctgcaaacatatagatatacactcgtgtacatatatagagacatatagtccgcaacggagagctaccgatctgccctcggccacgacgagagcaatgaagacgacacactgcaagcacaaccagatccgacaattgatcaacgccctggacctgggggagaaccaaagggcgggatggt

SEQ ID NO: 370531 - DNA, 238 bp, Zea mays
gcctcaaacaccaggacggggagggacagcggggggggagatgaagaggagggccccccaaccccacaaaaacgaagaagacagcagagggcacgcgagaaaggaacagcaggacagaccgccggggcaaaagggcaccgggagagaaccgaaactcgggaaaaaagggcagcagaccagaacgtgagggacggcaagatcccctaaacaacgccaaggaaaaccgaaagaggaagac

SEQ ID NO: 370532 - DNA, 297 bp, Zea mays
atgcaggggggggggttaatttgcatttgcaaattattactgggttaacgcatgccaacgggagaaaggggttttatagggggagagatttacatcaaacaatactactcaactttcgtattttaaatgacacatgttcagttcaaaggggctagatgtaaacatgggaaaccagaacgttgtgaaaccaggtcagccttacaagggtttatattttatttattcaccaattgaaaaaaaaagaactgcttttaagatgaacatatagttgcaagacattgacctgggggggataaa

SEQ ID NO: 370533 - DNA, 512 bp, Zea mays
gtccggatattcccttttcgttccacgcgtccggctcctatctttgtctgtttcggtggaggctggcggcgtttttcactggccaccgggtgctgcacgtcaacggccaacagggggcaccgtgcaggtgggcagaagcagccagcgacaacagttgggcacaggtaaaatgatccccccccccccccactttagaaattgcaatccctattttgatcctcggatgtgcgccatgcacccctggtccctggatgtatttttaatgaattggctatcctaggctacaagcagaaatggtaagttgaactgagcttgaagataactgatttattagcgtggataaatattgtttctaaccaagctttctattctatatttgcatgttcttcaaagggatgtatatggacctttcaaaatacactagacttttgcaagcaaccaaagatactcttagaaaaaaaggttgccttggcctgaatactctctgacttatgttattttgagcattttag

SEQ ID NO: 370534 - DNA, 305 bp, Zea mays
tcttcttttaccaccggccgatttacattgagttctatctgtttgctacccctgacatgtacagccgcatcatgggaggcatggggctgggctagggcggtgataaacgactccgtggggtgctcctgaccaccatgcagggagtgacgactccgtgcatgcacatgctggggaaccggtgcagcctgaagggcatatctgtggtcatataccatgagaccaaccacgatctctaaatctttgtcacgaacgtgatgcgtaaggtcatctcctacacgacgcacgctcggtgccagaacgaaaca

SEQ ID NO: 370535 - DNA, 364 bp, Zea mays
tgttctcgtgggaaaaaaaaaaaaaaaaaaaaaaaaaaaatttataaaaaggaaacccgaaaaaaccacaggccggtcgctctcgggggcccgcgctcgcgtccgcttgtctgcgcggcacatgctttcgtttcggggcccctaagttcaaccccctggccactggtatacccctggcctacctgaaataccttggcttgccccacattcccctccttgcagctgatcccccttcgaccaggccgcgtccgagcgaccaggccaacaactgctcgcccctgccagcagtttggccccctgcctgtagattagcatgcgccctggcgggcgccccttttccccgccggtgggccggttcccttgc

SEQ ID NO: 370536 - DNA, 505 bp, Zea mays
atgctcttagcgcgagattgcttattggttatgtgtggtattttcgttatgactaaacttgatgatgctgcgccaaaaccaagggccccctatggatgcatacccatggttgtgctgctcggttcacgctggtttcacagatagtagccataatccattatgagattatattaataggttatctctacacatattgttcttatcacgtgagatccattattggtgccagtttggtaatggcgtcatggttaaggacttatggtaccgcggcaaaactgagagcctactgtgaatgcgcacacaggattgtgctactcgtcggctgctggtatcaaggtctatggccatgacccattttggaactaccctaatatgttatcttccataaaactcctcccttgaaacgatttcggtgttgattgtcaggtgatcaagcaacatctatcatctattttggatcacaagggcataccacttccatgtgtggactctttttcccttgact

SEQ ID NO: 370537 - DNA, 332 bp, Zea mays
ttttctcgcacgttgcagcttatgctaaaagtccgcttaagtgattgcttccaaaatgctgatctgtttgcaataaaacaactacacggacgatgctaatcccggcacttaatcacgtggacacccaggtgcggcgcgatgtagcagatccaggtttgcagccacatgcttgggaggataaacctcttctttcgggtctcccaaattaaaagcactggccatggtttacacatctacgactgggaaaaccctcggttctcccaccttaatgtggtgggagcaaatccccatctggcgatgtgcgttaatacctacaaggcccccaccgtttg

SEQ ID NO: 370538 - DNA, 338 bp, Zea mays
gtgctccaaagaaaaacatacctaagctttcgaagggtgacttgttaaactctgccacgatagctcaaggtaatgcgtatactctgagaacatggttaccaggccgatgcaactacccatgttaaaccaaaagtaattttagagttttacaagatatcctatgtgacactttgcaaaaccagcctgccttgcatggcaatagtcgctacagtaagcatgttataatcatacaaaccaaaaaagcttgcccagcatcaagggaagaagacaattctgcttaaggatgaaataagcaaatctgaaagaagagctaaggaaccttatactcaaaaactttt

SEQ ID NO: 370539 - DNA, 358 bp, Zea mays
gaattgttacgcctccacgccggggcgcactgacgacggctatagccgtcgacgccctgcgctcctccgagcgccggatgctgcgcctggcccgggcagccttaagggaataggccgatggtgcccgatccaccagacggggctagactaaatcacgcgcaccatatgccgagctgtgaggtggcaacaattctatctaatggaaactgagacggctctacagatgaaatgaaaaagacttgcccgcaataactgatccagaaatagaatctgcatttaaggatacggtggctgttaacaggaatgaacttccagatgcattcgtagcggaagcaaaaaaagcaatagccaaagccac

SEQ ID NO: 370540 - DNA, 373 bp, Zea mays
cctttttcgcgtcgccctcactccatcccacctgggggtacttgaaggcgcctcccgatgcccgcgcggccccaaggaaggtggcggcaaggcaattttcctctggtttggtcgcgactgcccggacctagccaggtctccaggaggtggcagcggcgtgtgtggggcggcgacccttcatcggcgcggttcatcctcggcggcatcctggtggctgtgagcgcgacgttcgtatggtacatccaggcgttgcgggtccaggatgggtgtcagcgcaacatgggggcatgcggccggtcgtggctcgcaagcgcagataaggtgccttctggcgcccccagggcagggagcggccccgtccgtggaggttctg

SEQ ID NO: 370541 - DNA, 416 bp, Zea mays
ctggtgaccaacgtaagagcatcccgaatcttgatcaacgtatagggattgagcttgatattgctattggatagacttatgtacatatgtgatgtggggactctttaatactgctacaacttgacgacgtcaaacatactactgacagagagctaccgaaccaaagcgtgctgtcctgaactgtcaaaaagtgggtatatgacgctatcaaagggaacagggggctacatctatccaaaatactcggagacctgacagctcactgccaaacttgatgtctactctgtaggaataatacgctgagaaattatatcttctcatgagccacaagactgatatgtatggatgaaccaccaccaaagcaatgttgcacaatgggcttttgagaaactatatgacgacctcatgaatgagat

SEQ ID NO: 370542 - DNA, 500 bp, Zea mays
cgcgcctatgcgcacggcgccgactgcccacctcccatgggcgggttcctgcttcccctcctttgccgagctcactggttcccttttcccctctcccatggctgctccatggtgtcccgcccctggttcctgccatggccgttgttccctggtcggagtggattttctgctcggctccctgcatccatggcgatttccccctgctcggcaccgcctggagctctctgtgccgcgccccccagcccctgctcctcgttcctttctccgcgcgtgccctgcctcccatggcagccgttcggctgctcggccttgccatctcctgggtgttcggtcgcccctcctctctatttccaattccagcttgcggcgctccctgctgcagcttgctcggccgcgccctccagctctgttgccgggcgcgtgaagttccttgctcaccggcgctcctccccagcgcgttacgtttttccctggcccctgctcatctctccagccgggcg

SEQ ID NO: 370543 - DNA, 358 bp, Zea mays
cccatgcttgcgcggacgcgtgggcgcgagcggccggcctttttcaacatgttctacaacatggcctctctgttctagcctgtggtaaagcaagagggaaaaaaaaagggcctatggagagttaaatgaaccgaaacaagatcagcatgaacatgtcagatgagagacctacacaagccaccaccaccggaaccaggaagggacctctgcgctaacctaggcacaagggcaaccaccaacgactaaaacagacattcaaactgggtttgctgtgccgacttagcttctgaccacttttttgagcagctgatgacagcccaaactgccacaccgaacccagccatgtgcctttccctct

SEQ ID NO: 370544 - DNA, 346 bp, Zea mays
ccctcgcagccgccgtcctaaaccaggagaacccgggcacaaagggagtttatggaggccacgacctgccccccaaagactgatcccagcagagacccggggacgcggctactcagcacaacaggaggaggatagaaagcctactgacaggagactaccgaaccaaaatgtgcagctctgaaccgtcaaaaagaaggaatacgaggcaaagaaaggcaccacggggctacaatggaacagagcacatgaagacctaagatgtaagaaagaaatccgacgaactgtttcacggtacaatagtcaatacccccatatgaaaacctcggccaaacgatgggcaggtaat

SEQ ID NO: 370545 - DNA, 325 bp, Zea mays
gcccggcccagtattcctgtgtcgtctcacgcgcccgcctctgagcccccaaacggaggcaagagcacgggggctttcttgaagcaacgggtcaggtgtaccgcggcagatggagctaaggggggacctggcaaaaattgcctgagcaggaggctgaacacgtctagacggctgatggtggcagctaaccaagcctggtatggtggacttgacaaggactgtacccacggcgctgggtgtaaaaatagaggttctaaaacgggcaaccggaagactcctggtggacaggaacccacacatgctaaccgaggagaggctaggaaag

SEQ ID NO: 370546 - DNA, 273 bp, Zea mays
tccctaaaacccacgaagaacagccgaaggcgcggggggctgtaaacaaacacgcgccgagacaccccacacaaaaaagaagccaccaccaaagcagaccaccgaagcacacaggaggccagcaagcagcagaaccccacagcaacacgaccaacaccagaaggagaggggaaaaagaaacaaaaggccgaagagcccgggcccacacaaaccggaaacgaacggccacacaacaacacgcccaaagaagacacggacacccaacccaaaaag

SEQ ID NO: 370547 - DNA, 441 bp, Zea mays
gtcctgcggcgggccaccgcggaagcagccatggaggcagtgcttacggcactgagtgagagaacgaacccgctgctcaacaggtcatccggtccatccgtcgtcactcggcttcaacctgacgccggcaacggcgcgggcttctatgacggggcctactctttcctcgacaccaccaaggcctgcgctacccggttcagcagcgggtcagtgacatccgacgactcgccggcggtgacgcccaggctgctgtccttgatatccagctccagccccgacaactgctcctcctcctcagaatggcccgaccgagcggcggcgtcgcgctccaaccggtacctcttcgacgcgaacgcacaggcccggtgcgcggggtacctggacctgatgaggctggaggtggatgcgcagctgggcaggctcaggtgcggtgtcactggc

SEQ ID NO: 370548 - DNA, 429 bp, Zea mays
gcctcgaacacctacctacgcctatctctcccgggggctcttttgtcatcttccaccgggaacccccgccggccccacgcgcgggcatgggcatgcatgccgtgcccgcacgcatgcactaacccacccactgagggcgctcgatgaccgccactttcggacccggctaaatcaggacatagaccagagagggagccacaagaggcggacgaagaggaggtggtgccggcggccgtgctgctgctgctgctcgcggaggtggccgtgcaggtgcggagaacgacgatcgaaccctgccgatcgacggcagcggcgtagagataacaaccgactctcgtgccccggaggatgaccccaaggcattccgaaacatatgccatgaccagatactgaaggacccgctcaagcccgccaaggaaaaggagacca

SEQ ID NO: 370549 - DNA, 231 bp, Zea mays
tttctttttttttttttttttctaaattatagggcatggttagaggtcacgttgttggggatgctctaagcgcatggggtttttcttcttcaggccgaaacgtcacgtttggctcgcctcatcatctccttggcaatggcaagctggagctctggggcctggtgacagacctgctcctgctgcccctgcggcccttggcggccgacgacccggcggggctctggccgaggc

SEQ ID NO: 370550 - DNA, 331 bp, Zea mays
cctatgcttccgcccacgcgtccgttcccatcccatgggctctgtttgccagttccgcggtgagagcccaccacttatgcgtttcaagtgcagaggttgtaccgtccgtcgatcgatctggccatcgcccccggtatggctcatgaaccaccgtgcgagcacgggcgcacgcatgtgccatttcataacagaacgcctacggtctacctagtaacctactctcttggcaacgttcccaaaagttcgatgaggcattaaagaattgcctgcctgcgccgtgcgcgtgcacgtgtgccgtgcaacagctcgtccgggatgggcaagatgagct

SEQ ID NO: 370551 - DNA, 229 bp, Zea mays
acacaaaaaatggggcgggtataataaagtggggggaggtaatgcctttaagcatgacacattcagatttaggccaccacaagaggcggtacacagtaatgactcaagcattctcttttgttgggctaggatggatcgaggaggaagaatgaccaggcataaggagtgaggagaggcgtccaatgaccaagcgtcaaattcaaacggaagtctccaaagcccgtgggag

SEQ ID NO: 370552 - DNA, 506 bp, Zea mays
ccggcccggaattccttttcgtttacgcgcccgtctcgacaccccaagaggcaggcatgaatgggggattttttgttcattcttgcgctaacacaccacataacaaaaaaatcctgacttgattccatcagtgccttgaacaccctgaatgactagaattccgtcagtaccacaagaaaatctctgctggatactagataaaattttaaagtaggtccaaaacggcaatggcgaggctatccacgtcgtcaaaacaattgaactgttcgatcgtcaatcaacgattgatagctcctttgctcccctgctcccaccgtctttggatacttccgtttgattcgacgcttggcaatctctgggagaggtgagagagggggcgcaccgatatggccaagggggtcagagtccatgagcagcctcgagagcttggtgagggctgtgcgctgcgacttggtgcccacctagctgcggatgacgcggtcggccatggccgcctcaccttgtgt

SEQ ID NO: 370553 - DNA, 322 bp, Zea mays
ccatcgtaccttctgttatgtgcgtgttgttcttcaggtatctagcaggtctcttacgaaggccattggattcaaaactcatgtacgctactgtgatgcattgatggtcctgaagtcatggataatgtcaaaggtaccctttagatcaagcaaagtttcgtttcctgtagcattcccttcaagttgtccaaatgttaggcatggaagaacatggagataggaggtggcaatggtgaatggagtttattttatgcaaattattatgggaaccatcatgttactattggtcttccaagaagccaatttttttgtagacccgatt

SEQ ID NO: 370554 - DNA, 473 bp, Zea mays
gcaacatgctttgatctttaaagtctagaatttatccggaacaaacttataaatcctccatgtgcccagttcttcagttgacatgctagatttctgaatgcagttgctatcttctggtcccataaataatagtactcacatcacatatgctggaacccagaagcatcacatatgccccaaccacccaagagtactacagtgctgggtgctcctcaactaattgcggtggtacttcttctgtttctcatgtgcgcctaggaccatgcatggacagccttcagagcaactggcagtgaccacaagaggtaatcttgtatagtccatctctgcagaaatggttagttcataacattctaggcaaggagcaagagaaattcaaaaaatagatctaacttattgacaatcctccatcacagtggcagcaaaccatttagaaaagtaatttatgacaatgtaagtatttgacattttat

SEQ ID NO: 370555 - DNA, 329 bp, Zea mays
aaagttgctcagtgcacgtgatatggttttacggaaagtaatcacgcctgacgagattgactatactactgaaaaggatctattggagcaggattatgaagtcaaggagtgggagaggagatttaaggagctcgagtcagagtgatggacatgaccgatatacttgacacttgcagtatctctacatggtcctcaccatacttgtcggtgatttttatccgcatccaacggagtggaagatggatctgactgaaccactcgtgcaagcgaaactggatggtactggaccctaataattgtcgcgttaccaccagcccaccactgaccac

SEQ ID NO: 370556 - DNA, 178 bp, Zea mays
atctgaggaaataagaggggggcttttttgcgcccgctcccatgggctgccccaaggccccggtcacccagtttgccaagaggcgcgaaggcgtgactcgccgggcctctgctacggaacttgtacccttcgggcgtggatccggtgggagtattcctgcaaacacgaggattgagag

SEQ ID NO: 370557 - DNA, 470 bp, Zea mays
gtccgcccacgcgtccgcccacgcgtccgcccacttcttccgcccacgcgtcctctgctcgtgactgactgactccctccctcagcgtgagtgggttgcggacgaccacatccatccgttcccaccattcccttctcccacctcgcctcctccccttgcccttccacagccggaatcagggggtaatgggccagatgggaggacccgacggcgacggcgacggcggcgcgggcccgcaccaccagtaccactaccaggcgcttctcgccgccgtgcagaaccccagccagggcctgcacccctttccccttcccttccacgtgcctctccacgcaggagcgggagcacccgccgccggaccaggacctggagctgatgctgatgcctccacacacaatgccaatgccgttcaccactctcagccttcaagaggtttcaccgattggagcgcgttcaacagtgccttcgcc

SEQ ID NO: 370558 - DNA, 206 bp, Zea mays
ggttaaaccaaacaggggtggccaacaaacgacttgataacaggggggaaaaggaagaaccaaacctacaaaactggtgggtggtgaaccagcctacgaaaaatcctaaacagatgggccagcgctcataatcaaccaggggtggtggcagcataatactccagtttttacacaccccccaggtttttctccctttaccggggggc

SEQ ID NO: 370559 - DNA, 515 bp, Zea mays
cactactaaaaaatgtgattgatcactcttttatcggcaaagatgtttctttgggagtgaataccgagaggctgagatcaccactgacggccgctgcagccacacggtttgcgtataaataagtagtcagtcgctcatcttgttccttgtgaacatcgcagtgctgtagcctccttcgtcttgagcgagcatggagatgtcagccatggaggaagccctccccaaggcgatggagaggaggaagggaggcctcataaccattccgttcatcatcttaaacgagatattcgagaaggtggccacgttcgggctgtcggccaacatgatcctgttcctcaccgagcggtatgtcatgaccaacgcctttgccaccgtcgttctctactgttggcatgccttctccaactttctgcccatcttatgcgccgtgctctccgacgcccgcctttgacggttccgggtcatcaccctcggctcctgcgttagcctttttcggatgtgcctgctgtggctga

SEQ ID NO: 370560 - DNA, 304 bp, Zea mays
gacgggttgaaatggcaccatatgggttagcatatgtaccagggacacactagagcaagagatcatcccagatcaacgctttactggtcctagggctttgctaaaagtccaccggggcctaagcctagatgattaccgccttttgctcctcctccttggcgacgacgtcgcccaccggggggtcgggggccaccacccggttttgccccttgttgccgtatgcccagccacacactgggaagtacagcacgttgggggggcatagcaccgccaggaccaagtagtagtagtcgtagtgccccct

SEQ ID NO: 370561 - DNA, 454 bp, Zea mays
tttttagcacatgggacccatttctgcgcctagggctgaaagggggacaaggaagctgctctaaggacctccagtctctctggtaaagcatctttgtccgacgctgtgctcaactgctggttcaccaataggagttgccatgaagtcataagcgagaagatatactcattggtgttcgtgtctcaatatcttacacacttgctttatattctctcttttccaaattataagtcgctttgattttttctgttacataattctttccatgagtctaaatttatcatgtgatcccataccaaagaggacctatgtgctaaaagaaccaaggggacttataatttggaacagagggagtagctgatctagggtagggaaatcgaaaacggcatagtcttttttttttttcccaaacatgcaattttaagtagatttatatcatgcctccttaagttgg

SEQ ID NO: 370562 - DNA, 503 bp, Zea mays
catatgactccatgctcagttgttggttcgttttcctactgtttcgttgatggatactcttgcagatgtttgtaatgaggaggctcatattcatgtggatggtctactgctcttcagtgctggctgcttgttccgcgttctcaacctgttgttactccatcgcctttaactttgtcagcacccgccctcctttaactttgtcagcacccgctccttctacaggggtgatgagggtgttggtattcactacaactatcatggcaaagatggtcatgaagatgctctttgctatagaaagaaggcgcataaggcttagactcactgtacttcatagcctgctagtaatgccagtaatagagggttttaggggagttcctgttgattcaatcactcaggagatgcttatgcttcttcgtcaccttgctgtgtcttcatcgccaggtgctgctaattatgggggtgcttggttaggattataatctggccagattatataatctaac

SEQ ID NO: 370563 - DNA, 321 bp, Zea mays
ccgcccctcccccgttcggtgacactgacatgggctgctgttcttaccgacgcctctgcctttgcggcacgggtaccctgccgttcgtcaggcggttcacgcccaaggaggtggaggccgccacgcgcggcttcaccgcggtgctcgacgccgccggcacggtctacagggcgcgcttcgccggcggcctcgtcgccaccgtcgtcaggcgccgtcgcgacgccgacgacgccgaccaccaccgccagggagagggaggaggaggagggaccacggacgccttctacctggagctgcagctgctggcccgccctaaccacc

SEQ ID NO: 370564 - DNA, 488 bp, Zea mays
acatctttttcggcaacaggatctggtgctgacaggggtaactaatgggatagctcctctgatggaaaaaatgcgggaactatatcgggtgctgataagaccgactacaagagcacttcgaatgcggctccggatgcggattcggcggcgtctagcacactatctatcacaccatcaagcaccgcatccggctccgtaaaacgcacggtgagaaccaagactccccattagcacgctgattctctccttttcgcagttctctcgagagctctcgtgcctgctcgcgggcccgatgtgtcatacactgcatgctaaacggcatggggagtgatattggaaacggagccggatacggagaggaaagcgaataggatagacactcgttttagcgatactgagacgcacactgctagagacagtgtaagggcatggatacaggcacaaccacttgagcgtcctatgacaaagaagagaactatgaagacagc

SEQ ID NO: 370565 - DNA, 189 bp, Zea mays
  unsure (1)..(189): unsure at all n locations
atgcggtctaggtgaagccaatcgccagaagcgtcaagccttgcctcgcgcagcgggctggttctggtgggtgccctcttcgccggtggccggaaggcgagggggaagccggaggacgctgagggcggtnnttactatnccctcgaaggacccatcctgtgcgtcgatagctgtggtttcttaggcatg

SEQ ID NO: 370566 - DNA, 337 bp, Zea mays
ctggacgcccgccggcacgcgccgggcctgactggctggaccgacccacgcgggttaactggcgttgacatgcgagagtcgcgttcatgcagggcctgatttcaaactccattaacatgctgttgccgcagcatctggccgccttcggtgaacaacatgaggattcatactctccgcaccaccgaggtaggatcaggcagtgatatgtggtgcataacggaagatgagatatccagcataagagctcgggcgctagccatatgtgacgaacgccaccatttgatagagttaaaattcgagaacggaatggattattccaaaggagagtatgctaaag

SEQ ID NO: 370567 - DNA, 499 bp, Zea mays
ctgtttttctttactccccaacagggtactctcccaggttctctacaagaacagattctcctcgggcattcgagtcctcagaacgaagctccacaccaagattttccaggaacaacagtagcaccaaaaggagcgcagcccttgctttctcggacgaccaccagccatcaccttcctgccgcccccagagagcgaaacggagcgcgcacgaccactggaacgctgctatccacgactggcagaactcgaagcacctcttcccgggctcctcccgcgtcgacgtcgaggagctgaagctgcgggacgccgcgggcgcagcgcagcacgccgccgccatggcgaggctcaagagggagaaggcccactgcctgatgcagaaggctgacctcgccctccacagggccacggtagccctcatgattgccgacgcgatcaaatcatctggcagggacacgactcgggacggccgagggattcgaggaacgagagcgctgactcc

SEQ ID NO: 370568 - DNA, 451 bp, Zea mays
actgtgttgggacttgcttctctcacatacgaggtcatggtagagctggagcacccgtgaaaatagcaagtgggagataaacaggaagagttaacatgaatactgactacgatcagcggtagaaggaagagagagactctgcccgtgactgagagtagaatttgttgggtgtggagtttgttgagatcactattacagcaggaggtatgttggaggatcagatatgtggatgcttcttggacaccacaattatacggatctcctgcattataaccgcaacaagagcctgagctatggatctttgaagccggagacgtactgtgatgaccagtgcgtgaagggggagggcgatcttgaggacccggctccggatagattctcggacgccggggaggacgacagtgacgatgacgtataggacacttaagagctggagcgccagatgttgcac

SEQ ID NO: 370569 - DNA, 448 bp, Zea mays
ggaaccaaaccaacgaactatttgttggctccttttttttattaatgcttcggacgacgatagcagtttctgtacaactcttgatatataaaaaacaaacaatatgacggattaacctaggcatccaatgcccccccaatttcctcctgctatagcgccacaccttgctgctgcgacgactggagccttcccttgaggaagcccctgcacaccttgctccacagctccttgtccggctgccgcacgtcgaagctcgtcttggccacttccacctggcagtcctgccaacaacaaacaaaacaaggacagatattttttttccatgtcacagacagacagacagacagacagacagagagacaaacgaacactcggcacgctgtcgttactattatgattaattaccagtatgtggttgtggcggaggaggcggtcggcgatgctcatg

SEQ ID NO: 370570 - DNA, 172 bp, Zea mays
aaaaagggggggatcagggacacacgtacgggattgaccagctgagcaccatgcatgggccatggatcatatcatcattatcatggcttcatgtgaagggaatggatcggagtacgtgcttaaccacgatcagtacacacgttttttttggaggggcgggggtatcccgggg

SEQ ID NO: 370571 - DNA, 376 bp, Zea mays
atagtgaactacatcttggttggtttgcatatttatcagtgatgtcatttggttcgtgattttagagttgttcacatacttattaaattaaacacaaccataatgaacacaaacagggaaaacagagcacaattgaagggactacaccaactgcacataaccactgagtgcttaaaggtcattggcaaactttagttcccaacaaggacagattattcatcggtcttggatgaccaggcaccaaactactcactgaaacaaaaaaaaaaccgccatcactctataaacaggcacagatatggagttccagcataaacttattgtttccggggcgatggaatgattggatgagcatggaaagaggcgatcaaaagat

SEQ ID NO: 370572 - DNA, 153 bp, Zea mays
agccaaagaataccatgcgtggtatttggtatttcagtactatacaatggggtgctcagctcagtactttagaaccatttagccactatatttacatgaacctgtacggttaacagtgcccaaaacacactaagttatttcactgaacgccat

SEQ ID NO: 370573 - DNA, 357 bp, Zea mays
cctttttatttcatcactatgaaccgtgccggagagcaccgtcttaaaccggaccttctagtgagactccgctccatggggccgactccgatggatccggcacgctggtgctggccgaagaggggaagtacttcttcaacgggttcgacctgatgtggacgcgcgcggagacgaccggccaagaacggagccatggacggtgggttcactgcgctgttggacgacaagttggggctgtgcgagcccacaggggctagggtgacggaccactcggacatggccgggtgcgcacaggggctcgcgcacgactcctatgctcatgcacgcctaccgcgggcatctgaacatgagcgaggt

SEQ ID NO: 370574 - DNA, 85 bp, Zea mays
ggacacaaatctgaagggtgtttctattaaaaaatgtcaataaattacttaacaatcctccacggtacatagtgaaggaatatct

SEQ ID NO: 370575 - DNA, 502 bp, Zea mays
tgtttatagtgtacaaagccagcggcggcggcggtgcaaattagccaccgggttgaatataaataatatatatatgatcctaatctagaattgcatcaggaacgagcatgttcctcatcccctgttcccaaaacaacacagggaaagcaatatgatcagaacccagatagagggaacgcttcgccatcgaggctcgaaagatcgtcactcgatgattcagtcctcgcgatctggtctgtcttgcaggcacctagctcatcggagagcctttcgcaccgcgtagctgcgggagtcgctcttcccgcgggagcgggagctgaagtaagcaagcggataggatcgacaaggaggcaaggagcaacgccgccttctcagtttctcactcgcgtccctctcctgttcctcagcttcgtccagaacttgccttcctccgccgccctttattccaggcttccttagaagaagagcttttcaattgattatttcaggaggatggctaagt

SEQ ID NO: 370576 - DNA, 285 bp, Zea mays
gacccgggaacagttggtccgttccgtccttatccaccagcaccacacgaagacgacgacgacgatcacctggtggggtggtccctcccctaaagcaaaacgggatgcgcccggtttgcccctgcaaaacgggcggaagggggaggttagcgaattgatctttaccacagggggcacacctccccggggccggggagggtccacagggtgccccacggggggccgtccttcttggtggacccgtacttgtcgttggccggggagcccaaaaaactgccggggccg

SEQ ID NO: 370577 - DNA, 384 bp, Zea mays
tttacgcgtccgcgcacttcaagaagggcaagccgtccaagaacgttgagcgcgcgagagcccggttcctcaagcagcgccgggaaatgatgatgcagcagcagcagcagcagtctcttgggcggcagcaccttcacctcgacgagggcggggaccagcgccgcggcgcgtgctgcaccaccggcgccacggcggcgtccggcgacaacgactgcggcagcgcgaccggtgacgcgtgcgcgccgccgccgccgacgacggtagccaccgaagccggggccgacctgatcatgcacgacgccatggattgcttcttgtgccccatgtcctgctgcgacgacctcctcgtcctccacggcgccggcggacaggccggcaccggca

SEQ ID NO: 370578 - DNA, 252 bp, Zea mays
  unsure (1)..(252): unsure at all n locations
ngtggcgaggaggatgttggggtagacggcagcgtggatggcagaacgtgggcgagggttggtggggatggagggatagatgtggaagttgactctgaacttttaataaagatttatatatttgtagctggataaccgctgccgatagactgatcctgatgcatcacgacttaagcagaatcactggatttgcacagatctaacctcactgtgctatggtatatctcacccttgtttaataactgagcccaa

SEQ ID NO: 370579 - DNA, 245 bp, Zea mays
ttttttttttttttttttttttttttttttttttttttttttttttggtttttttttttttttttttttgttttttcaaattacaccccccaagtccaaaaattttatggcagacataaaaaaccacccctttgttttaaaagggactttggaacaatgtttaaaaatacaggggtgaaacgtaaaggcaaaaaaaaacttttccggggtttctgcccccttcttaaggggaaaacgggttttgg

SEQ ID NO: 370580 - DNA, 405 bp, Zea mays
aaccagtccaagcgtgcagcatcaatgatacactaatgatatggaactcaggagtgtgtacaaaagagaataattaactccccccaaagaataaaatgtgttttcgttatatactagcaatttctgctgtagtattacaacccaaaaagaactaaaatctgtactgctaacagttcgtgtatcagctcagagagaaaaaaggtgaacactatggtacaaaccgtatgaagtgagccaatccttcacctttccaagatatgggttactttaccaagcctgagttccatcagttcgagttttagttgtttccgttcgactctttcctgcaagtcaggcagatggaagtacgtatcttctccctcacttgacagacccattcaaagttcttctgtaggagcttagtca

SEQ ID NO: 370581 - DNA, 447 bp, Zea mays
gacccggccaataaaaccctacgaaatctcgattcccgcgaactgttagggcggcagaaaacgcgttgaccattcacaccccttcgccccaccctccagatcccgaccaggcggcgcgccccgccctcgccggggataccggatctgcggtgccgtcgagccgccggggcaccacggccgatgcgaccagcacagcaccgctgccagaatcgccgacgaatcggctgacgcggtaaactagtctcccgcccggctcccagccgatgggcacctgcgggctcgccgcggtcgtcgtgctgctcctcgcctcggctctactccctgcccccgcttccgcttcagccagaagccttctggaaggcgagaaccccagcttcggccaggacgctcctgcaccagccgtttctggccagtcttcagccgcggggcagcaggctgagaacaagc

SEQ ID NO: 370582 - DNA, 296 bp, Zea mays
acaattcatatttcaaacacattgatatatgggcatttcacaaattcacacaagtccaaatatatagttcacaaattcatacaagttcacatccatagttcacatttttagttcacaagttcaaacacacaagttcaaacattaactccatcgctctcgatcaggacatcggattattgttcgtagctccaccactagaattgagacatctgtccgcaaagtcaacgtgagggggaaggagtcacttgatgagagccggaatctggatcatatgtagtatgaactccctccttaga

SEQ ID NO: 370583 - DNA, 368 bp, Zea mays
cccatttgttcgcccacgcgtgcgcagcaatggtgacagtggttgttacagactgcatttggagcatcaaatttctattggggggttcaggatacttacctgtttcataagggcttcacatctcatctaatgtggtggtcaaacaaccttcctgagattgattcctaactatgcataatactgtgaagttgcaggagtacactctcaagtcttattgtattttcggacttaggagctcatctgctacagctaatggctatccagactctgaggagaaaaatggctatcataaatatgatgcctccttttacttctatgttatattacattcgggtactactactcatctcatataagaggaagtgttg

SEQ ID NO: 370584 - DNA, 368 bp, Zea mays
cagaactaatttaattgtattgctctccccacatattttacatatcaacaattaattaaatatttctttatcataaatatacataaatctatagaagtgattaaaatattttatcatcacacacgcctaccaaaatttctactcgatccactaattcagctaagtgaccggaatagcgaaataactcgctataaccgaatctggctcgataatcggaaaaacagcgaagtcgacgagagtttcgtgacttacgcaatttattgagcaccttaatgagcctcgcactaacacatgaattcattcaacaatcgaactattctgaataattcatcagcttaccgtttcaacagctgacacgaagccgcaag

SEQ ID NO: 370585 - DNA, 502 bp, Zea mays
aagttattccaaacagtactttattagaacgcgagggatgtaaacagtacttgacatcccgctgatcgataatcatagaaaaccatcaaacaattatagcaaacagaacggtattaccaagcaacaaacaaaaggacatcgagcagttttcctttttactcgcggaatacgataaaaaaatagtagggagagcagccgcgcgcggatcctttttcctcggcagaacagcaaagctcacagcttcgatatgaggctattctggatggccttgggcgactcggcttccttgacatccgcatcggacgagctgggaggcacgtcgaccgcaggcgagcagttgaagaatccatgtggctgcagggcagaaacatcattagccattagaaacgaccaaagttaggctaaccatctttttgcgaagaagcaacaaaaggtcccgatggttcactgcctatgacaggatatactgaaaaaaaaaagtaaagctgataccatgagcatg

SEQ ID NO: 370586 - DNA, 102 bp, Zea mays
ggaaaaggccgttagaaaggctaacggtttatttttttttttaccaaaatttaggaatagacgatttacaaatggcaaatcctggggtcaaattgtccaaag

SEQ ID NO: 370587 - DNA, 263 bp, Zea mays
gtttttcgtccgcccacacgtatgggggctcgatgctgattctcgattcgcaccctggggcggctgatcaaagtacggggcgtggcgcacccgtgcatgagcgcggagcgcattcggaggcctatgctgtcccccgaggcggagcctggcgcgggagatggtgcggcagggcccgcgcctcccccggcctgaggagctcatgatggtgctcaggagtccaggaagaggacactgctcgccatggacgggcaccgagactgggc

SEQ ID NO: 370588 - DNA, 323 bp, Zea mays
cccactctttcgcccacgcgtccggcatcctatgcgactgaagctcggttcgtcaagatttttcagtcaaggaaagattccaagagtatgtggagaaacaagctccaggtcgatgcccccaagtgctcggcgaaaggcctgaacaaggatcatcgtcgtttattcggattgctagttgatatggtaatcatactctgattcgttattctagctaattaatttgatagatggaatagaagaatattaatcgtgataattattctatttttagcttaaacgcatcatgggtttatttgatgcaggataaaggttgtaattgcgtg

SEQ ID NO: 370589 - DNA, 485 bp, Zea mays
ctgtttttttctacgtcagtgacagtgaaatcacggttgagtggcgccaccgcccgtggggcccatcaccggtgcgcgcgctcaataacgagtgagcgcgccaccgtcgagcggcctttcggcggtgcgcacaaggccagcggtcgaggcgccatttccttagtcgactagggtctccgtctctccgactgctaggtaacactaataaccctttcaccttcctctgtgtgctcgggagtcgggagtcgggactaccagttagggttacgatttctaggatttgagaaaaactgggtaagggttgaatcttcccttcttatttatgctattctaatggacgggaacacgaattcgagtcttgtaggggggttttgctcaaattcgtcgctaaaatgaaggttatgttagcatctagggttagggtcagagcttaaaaccatgtattcgctaccatggtaagtttctactaacgtagctcataaact

SEQ ID NO: 370590 - DNA, 298 bp, Zea mays
ggccccaaacatgaattttccaaggggaagggccttccaatccaaagggggaaaaaatagccccccaacggggttatttttttgccggggggggtgggtaaaaaatttttttgacccgggggcccgggaacaaaaaaagccaaatttgggatgggggggacattttattgggactatcccaggccttacaaggtttggaaattttgggaaaaccccgggggttttaaggggccccggggccccacttggggtctccgggaaaatttttaaaacccgccccaaaaaaggggcggaaaaa

SEQ ID NO: 370591 - DNA, 316 bp, Zea mays
cccatgcgtccgcggacgcgtgggcactttccttgggtgcccttcagggagggaggggagcattgctgtgcggcatggctaggaggaggatgaggaggggaggcgcagccagtagctgcaccttaccctgcctcatctgatgcgctgcgtgcatcccaagtacatgacctacaactactgaaccgtccccaagcgccaccagcaggctctccccgccgagtgcttccatgcagtatcgcccggttataccttgtccgtcctacaatggctcgcgcgcgcgtgtgtgtccttgtggtccgctctactgttaccgata

SEQ ID NO: 370592 - DNA, 271 bp, Zea mays
  unsure (1)..(271): unsure at all n locations
tttnttttttttttttttttttttaaaatttttttttttttttctacccaggttattaacgtaataataacttccctccagcccaagaggatatgatttaccaattccaacatttttgatttattcagcaagccagccaaccaataacgatgatgaactttattccagggacagttttttttcaccaaccttgtaaatgttttccaagtttcaactgggaaccgacaagcatcggaaaagcaggggaggggggcaaaaaggctttaattta

SEQ ID NO: 370593 - DNA, 401 bp, Zea mays
ctcttattcccctgcgccctccactccaccctgcgggggcctgcgctgcgctcccacaccagaacaccacaccgttccgcgtgcgtcgcccgcactcctcgcctatgcccgtctgcctaccgtgctggcgtgctgtgctccccacccgatgcagccgccggcgcgggccgccccgagccacagccggagatgagctccaggaaccgctccgccgccgcctcgtccgctgccccggctctccggacaccgcgccgcctgaggcggcggccagataaggcgtttgcgccggggtcggcaagcgggcggcggagcggacccgcgacgccgctgctgaaatgggacgccggtggcggcggccggcgcggtgaggggaggaaggctggcgcccactaatcggggga

SEQ ID NO: 370594 - DNA, 591 bp, Zea mays
  unsure (1)..(591): unsure at all n locations
gggtcatantttcctcttttttttttttttttttttgggggtttttttttttctttggggggtttttttcccttttttttaaaaagggggggcttttaatttttttttctttttcgcggaaaccggctccccatccgtccccgggggcctaattccccccccccccccctccgggggtgggcaccccatcggggaacccctttggaaaaatccccggccgtttccccccgtttttaaaccccaaattttcggggggtaccccacgccccccaccccctttgtttggggaccccccccagccttttttgggggaaaccacccccgggccccccccccgcccagggggccttaaaaaaaaaaccccccttttcttcctccccctttgggttccccctaaagggtggcccccccctgtttatcctcccccccacaaaaaaacccggtgccccccaccccttcttcctataaacccctcagcggggggggggcgcaaccccccgcctcttgatacctgtggggtaaggggcccccttttcccccccccgggggtgcctttttgagaccccacaaaaaaacccttccgcccccccc

SEQ ID NO: 370595 - DNA, 509 bp, Zea mays
  unsure (1)..(509): unsure at all n locations
cggactttttgggtccggccaccaatagttccgacccggaggcaccaacgccccatttgccactaccctaccgcgcaccggcaaagcgcagcgccaggccgcagcttgcaggggcaggcggcggcgggcagggcaaccgccactgcagccgggatccggcggccagcggcaaccggcggggggcaggcggtcgggacctggtgtcggtctacagccagacagcagcagcagcagcgtgaccctcaaaatcctagaccactaccgtatggtccactgctcctttgctggtgtcgtccactgctcctctgcaacgtcgtttgatctcctgtgcagtctgcacacgcgtgttgaaggagttgattcctggacagcacacgatagcacaatcctctactggttcattcctggactaccggtggtaatctgacctgctatatcgctntgcttattatctatattcatcaaagcatctatttgatcataatgttaaaagcgcgggcaagtttcta

SEQ ID NO: 370596 - DNA, 308 bp, Zea mays
gtcaatgaaacattggacatattttaaaagggaattttgcttgtgacaaattgtaagagtttctttaccggctcctacttctaaaagaaaaggggaaaacagttcttctggcttaaaagataaaaaaaaagtgcatacaataaagacttttcttttctaaagacaatttatttgacaggaacgattgtgcaaatgagttttttatactcaagaagtcgtgccaacgatactttttgaatgaagagacggtctactgagtatgttactgacacctcctcttgaaaattttttaaaagacagcctgcctg

SEQ ID NO: 370597 - DNA, 318 bp, Zea mays
gattgttctggactacttcctgagaccccggacccttggctttcgctcgtatgcatggggccggtcgagccggtgaggcctgaaaaggtaggtagctaccaactatctggtgtgggagggcgttggcctgcttctggggataggtgatggggttgggagctatggcgtgggagtccgctggagctaaaccgggtctggacacaggatcaggaccacatgtaccttgtgaaagcactggaacggcctgctcaagagagcatacgagctctaactgctgtgggacgccgaaatagatctaataatcttttgcacacacac

SEQ ID NO: 370598 - DNA, 411 bp, Zea mays
ttcttcgtccgcccattctaccgcccacgcgtccgctcaattttctggggggggttgttcagacattcaagagaaacatacgaacagaataaaggaaaagcttgagaattttaacaaggagaagttgctaggattttttgaaaaactggccgttttgcaaaagtcactatgaagaaggaagaagtttctgtcaagctcttggaatttttggagtcttcttgtgttactcgggatgtcgttctcactgataaaaagaaggggaagaaacggggaagaaaatctaaagtaggtcgggagacaactgcttaaggggcttttacagagaagacaagggaaagagcccataaacaagctgctgaaggagggtaaaggaatgatggtgaggatgatgatcccactggttctgaggat

SEQ ID NO: 370599 - DNA, 180 bp, Zea mays
aaaaacggtcgggggcactagtagtggataaaccgtgccgcaaaattgtacatggaatggaaggtaacaactattgacctgccctgtcctgtgcattcatccataaagaacaggggtgaccaacaaacaccattgttgattaattagatgaggaacaggaagcaagaaattttctggggg

SEQ ID NO: 370600 - DNA, 367 bp, Zea mays
ttttgtccgacgtactaataccactccactagccagtcagttactgggggacatttagacgtctgctctccgctcattccatcccatgagatatccgacaagcgaagcaaagcactggcatgagcatggaccgcatggcgcggtgttccgtgtccttgatacatgatctggctcttctggccgccgcggtatctgcggactcgagggtgaacgagaagttcacgacggagggccacgtgcgctcggactacaacacgcaggggctgcaggtgacggctttgaacctgacgccccagtccggaggcgccttcagctcgcgggagaagctcctgctctgggagtttaacatccagatgaggctgatccc

SEQ ID NO: 370601 - DNA, 304 bp, Zea mays
gtgtatcggcgcccacaccagccgtgggggggcttttttagctactgcgcaatctctctcgtctaaagcaacgtcagtctctcacagtcggaaaagccacacttgggcacaccggtcaggctcatctcaggggtccatggacctggacgtcacagtaccgaggaactgaacaagccacaagtcagctcggcacctgacgaacgaacgggagcccttgtaggcggagacctttgctgggccctacacgcgacatctatgggaatgacagccaggggcacaatatgatgggacgatggctctgctt

SEQ ID NO: 370602 - DNA, 334 bp, Zea mays
ggaaaacaaacgagcccttaaaatttttgggttcaattaaagggaactttgaaatttgaaacaagaaaaccaatgggttaactagcttttttttttctttcaacaaaaggagaaaagataaggccaatcacctttgaggggaaaagggaagttcaataatttttgaggcacacaaggggggcccaaccagagatgattctgggcgagcccttaatttttgggatgggtgggaaaaaaggggctccataaaattcaaacaggtttttcttctttggcttgaatttatgggaaaaaaaaacttttggaacatacttaaacaaagacaaccattttt

SEQ ID NO: 370603 - DNA, 270 bp, Zea mays
ccgccgcatgcctgctgcctctggggggcatatttaaaaagcacggccccatctatccaacactactatcttgggaacaagcaagcactggcctaatatagatgtcaaagaacaacctacttgcagctatgggctggtatgtgctataacaagataaactccagtgctccacatgttggataaatctagcaaaacagaaggcgatattattattgcaggctgatgtattcgtacgaagaatatatcactatcatgggaattccagaactc

SEQ ID NO: 370604 - DNA, 260 bp, Zea mays
cgcatactctcgaccgctgggacaggcagaggagcgggggcatgattgggaccaacggggtggacctcccggcggccacggcgaccaagacgtgcgacaccatgcacgccgtcatggccgccgccgacggctacaacgacgtgctggacgctgaccccaccgcgtgcaggttccaggcggagatgggcctcctcttgatcaaggagggggggctgttcgagccctacgacaccatggacaacctccagtgcgagctagga

SEQ ID NO: 370605 - DNA, 245 bp, Zea mays
  unsure (1)..(245): unsure at all n locations
ctcgccctttttttttttttttttttntanattttaacaagttctacttgggttgggtgtattcaaattagccgggggggctcccacgccagttgcttagaaacttttaaaaaaaaggcacaacaggaccagaggcccaggaatcagcaccagttgacgtagcaaatacataaaacatctggcagacgtgctcaactgcgtcactttacatgggaggcgtagacgtcaaatacagattttgggat

SEQ ID NO: 370606 - DNA, 389 bp, Zea mays
tctgtctcggcctccttccagccatggccgcgcgtcccggttccagtccgcccactcctcacgacgccctccctctatctcctccctccatctctcttctacgcactgcgcggccatctcccatggaaactacgcgcccagccagcgtccctgcacgccgcgcgctcctcgtcttccacctctgctcctccagcgcttagctcttggtgcggatctcctggccggttcacaacttctagctagtcaagctcgtccccatggcgccccagctcggatctccctccctggcactcggccttgccccctgctcgcccctgcaaccttgccagcaactgcacccagccgagtgtcagctccaacagccagggcgtccgtcgagcagacaaaga

SEQ ID NO: 370607 - DNA, 476 bp, Zea mays
tctgcgagagcaactagatgtgggcgcggtgcgtattgtgagaacatctctggctgacaatccggtaaccggacaccgctagtattgctgagagaggcacaacaccactgccacatgaacctatcatggatagtctgctgatgcgaacctgactcacactacctgtagttgctttcggaggtatagaccgtagacacaacacaagcgaaccctaagctgctggtctaaccagaaaatatcacacggagagtgctgcacttcgcgcgtgaccgcagaactattccacagaaggctatgggcgatgtctctgctggaacgggcatatacatcgagcgcgcgctacacttttcgttgtgggcgcggacacatgagcgacacaagtgacagcaggccgcggagagcctctatcatcctccttatcgtcactggatccattacacgtgcactgacatactcgcagctcgctgctgaagacc

SEQ ID NO: 370608 - DNA, 262 bp, Zea mays
ggataaagaacaaattgattggccagttatgcatacaataacaaaatgatgggaagaaacatatttcacttccatccaaaaggatattgcatgggtcaaagttgaactacagcagttcgacagtacatatctaacaccacacaattgagaaacaagttaaaacaaagcaaacacacgcccatgcagggttgcagctaattggaaacggccaagtagcagcaactgttgcagtaaaccctaggtgccctcgcgaaccgagggg

SEQ ID NO: 370609 - DNA, 399 bp, Zea mays
aaaagccatagccacagttagttacttcattctgtcggagaaatacacattggcaattgttcacaatcaaggaatgatataaaaagtgaaatagcggagcaaatgcaagcggaaaaaacagggaaccgcggggacaacagcattagctgacccattcgcttctgacttgatcctgaattctggagcttcaagaggagagagcgtcgcgttggggtgacatcgaggtgccttctcatttatttcaagtggcaagtctaaagaagcaagtttggtattagcagttgatgtgcgtccggcgaaggtgcgaaatctttggccagctttccccatcaggttcttggcagttcttcttcaagacggggcaatttactatacttatgcgctggagggaggacggca

SEQ ID NO: 370610 - DNA, 287 bp, Zea mays
  unsure (1)..(287): unsure at all n locations
tgggaaatgtaaattgtggcaccttgtttgagggtttaacttgcaatcaattatttacattaccccggnggggcccgagncgtgggcactgtcgcttgcagatgggcggggctggggcggcagcggcggggcctttctgccgcgcgacgctcgtcgtcgacacggagcccccctgggccgcgtcgctgcgccgggcacggcgttctggaggggctggcgcccccgtgcgtggcgctcgacgggccctgcgcccgcggcgaggaggaggcccccttgatcgaggacta

SEQ ID NO: 370611 - DNA, 207 bp, Zea mays
ctaaccggccaaaaaatttatctcaagctaaacccaaaaatccctttctaaatggtatcacaatcacaataaataggttccaagcataaactatttggctaccaaactacaccgggcctggcttaattagagcgaactttttttggggcccagcttatttttcattccaagctggtttttccacaaaactgggcaagcttacaataa

SEQ ID NO: 370612 - DNA, 316 bp, Zea mays
aatactatactatatttcatcaacattcataatatgtgatatgtttataagcgtacattctccgtgtagcgtacaccagcagctggaaacatcacggaccgtgcatttgaaagagaagtcgactcaaccaaaggcaacgggagctgaaagctacatacccaccacactacggactgatacgcagatgtaacgcaccaaacacttgacacatcacagctcaatgctcactgggaggaccagagagtgatcaaggaacctggtatataccaatgcattgctggtgtctgcttcagttgaggatcagtcagtgtataaa

SEQ ID NO: 370613 - DNA, 504 bp, Zea mays
  unsure (1)..(504): unsure at all n locations
tcctcgcgtccgctctcctttcctccgtgagttgcgtctccacctctcctccctcttccttccgtcctcgtcctccccacccaatccaaccccctccccgccgtccccgaggctggctgtagccgtctctccggctctggctcgcaatccaacctccaatcgctcgcgaatgccgcctcctcgccgcggccccaaccccgccctaatccccaccccgtcgcctccgcattagccatttcccagccaacaatctcttctcctcgcgttagggttagggcaccccatctatctattgcgacagacaaaacgacatggacgagtaccaccaccaccaccagcgcatgggcgccgccgccgacttccgccgcgacctcgaggacctcgtctgcgaccacctcggcggctgcttctccccggccccgtcctcctnctcctnctgctccgccgcggcgggcggaggcgccgcggaccatgagcccgacggcgaggccgagtcgtcggcgg

SEQ ID NO: 370614 - DNA, 491 bp, Zea mays
tctttttgctacactctctttggtagcctgtcaaccatttccaggatcatcgaggttaacttttgaaggcaggcatcttaggtcatacttttttccatagaaaatgttcaaagtctgatatcttaaaatggatcccattatcccaataaactatttaattctctagtcaataaaatgcacgagtaaaaatttagcaacttttagaatctgcccttggttacttctgggtatcagatgacacgatgctgagtggctctacttatccccttgtactcaaaattgtcaaaatgatgtctgtacatacctatgaccgtgaactgaatttaatcaatacctaatatctgaaggttttcgatttcttatcaacttgtatgaaggtcaaatgtgtgtccagattcattgaaccaaaatttgtagtaccaaactatgaatttaactttgaatttttttaacctgtttaacttaattgctgtgtgttctcaacgatatct

SEQ ID NO: 370615 - DNA, 262 bp, Zea mays
gggaacaaggttggggttaaccaaccactcaaaacgaacaaacaaaagcttactggggggtatttggttcagcaagggcacacaagagctgatccatagttccacgtccattacttaaaccccaagcatagttttgggtcctttatatagaacattaagggcaaacagggacaatccatgaaaatccgatggcaacaggggttcgatttatgctaggctacggggcaccattttttggaaaagggtacttttaaacaggggg

SEQ ID NO: 370616 - DNA, 294 bp, Zea mays
ttttttttttttttttttttttttttttttttttttttttttttttttgtttggggtttttttttttttttttgggtttggaccgaacaatgcaacacattggtgctttaaaaataacaggggagccccggaaccttttttggggcaaatgaaaaaaaaaaaaccgaggggaaaaaaaagttgcccgacaaaaacaaaacctactggcatcaccaaggaaagtttcaatgaaaatgggcaagtcaaaaccttcagctaaatttccaatgaaaaatcaatgcaacgatttgcaac

SEQ ID NO: 370617 - DNA, 173 bp, Zea mays
  unsure (1)..(173): unsure at all n locations
ttacgcgtncgaggacgcgtgggcggacgcgggggtttttgaaatgataacagcctgtcacccgcgagcgaaataaagattattaataacccgaaagaacggatcaatgacctgcaaaatatacagatggctgcagatggggaaacagaagtcacaaagcttgaaaaagcacc

SEQ ID NO: 370618 - DNA, 210 bp, Zea mays
gggaacagattattcatgtacccaaacacaggcaaacctgctccctaaatcagcaggttcctgcctccacctgcggtttttatttcacactttatttatgggctgaatcggcaaagagccccttagatccatcacaagtgtcactacattgagacccagggcggtggccctgggaacatggtgacggccactgccattgtgggtcaaacg

SEQ ID NO: 370619 - DNA, 505 bp, Zea mays
ttcgtttcgtctggaagacatcgctactatcccattcccagccacagtgcccattgggtatttatctgctcctttgtgctgaagctggaatgtgcagctcgatcggttagcgctacgagtcctcgctgaatccagccaaatgatccccttgagcttgccagttagagcacgcacctaatataatgctggccttccgtcagaagtaacaacagctagctaagagaagcacaagaaaatctggttggtagcttgagttctgactccaactgtgaagagtcagagatggcttatgcaagccccgggactgatgatacgtcgacagatctagatactgacgagaagaatcacatgttggagctagggcagcttgtgtcccttacagcttctgattccggcaacaaagcaaaggacaagctactaggtcaaaaggcactgcgccgtctggcccaaaccgtgaactgctaggaaaagccgtctaagaaagaggcatacgttgagcaactga

SEQ ID NO: 370620 - DNA, 207 bp, Zea mays
gggacggatacttttttttaccaatattgggcccatttacaaacatacacgcgatcgaaaaacattttcttgacaagagaaggttgggcttcacaaataattttggtacagagcgcaagctgggaggtttcctgttaggctgttccccaaactgtaaaatcctgggagctaactgccgaaaaccggggccgacgccaggtccttgca

SEQ ID NO: 370621 - DNA, 447 bp, Zea mays
tcctcgcgtccgcgccgtgaccggcgagatccgctcgcccgcccaccgcaacccccgcgcgcgacagctcctgtgcatgccgcatccgccgcgatccgcccgccctcctcaatccgcccgcccaccgcaaaaccgccgtgatctggccgcccgcccacccgcctcccctctcgcctcccctctgcacgtggccggcgcatgtcgtcgaggaacgtgagcgcgtcccgggccggcgtgccccgacggcagagggaggtgaggaccgcgcggcagtggcatgggtccgggtcgaggaggagcggcgacatgcagcggaggaggtccgcggcggccgagggctgaccggcgcggaagagcgcggcggtgaggatgcgggacgtggcggtgtctgggcccgcgtgtggcgcggcgcggaggagcatggcgggggctgcgcggaggagcgtc

SEQ ID NO: 370622 - DNA, 462 bp, Zea mays
tctgaacgcctcctcgccgccggggaactccagtaggcggatgcggtgcacttccgcctcctcatcctcctgcagcacaagaacccggggcgccgtgtgcggcgctaggtctaggcgcccccgcggtgcctcgtgctcctcctacatggcttcggcgcctcggcctcgatccgatcgtcgcttcctcccccagccccgatcgtcatacagctctagccccaccccagcttgctcgcagaggtggatcatcgccgcaacagttctctcgtgtagttcttgaatgatgaggggttgttttgtcgccagaggatgaaaataagagggagaaggtgattcgagagctcaagaagggattttccgggatgaacggattcaatcgaagttcctggagcaaggttttagtgcgagatgaaaataaaagggaaagaagatagctgctaaccttcatggtctccagctgaa

SEQ ID NO: 370623 - DNA, 227 bp, Zea mays
aaaacaaacaaactggctaaccggttttttaaaaagaaaagaaaactacatttttactgcaagctacaacaatgaaactgactaaagctatatattgaccattggtcactattgcaggaaggatcaaacctaatttgggggatatttccttccccaaaaaggaactaatgggtgacgatgtcaggctattctaccaaattgggcaagggaggcacactttacaaaag

SEQ ID NO: 370624 - DNA, 249 bp, Zea mays
ggataaaaagataggtacgcaagttattttttgtagggtaactgctcactgcagataaagcataactggttcttgagggatcactactgcttggttgtacatgggatgctccaaacgacctggagcacaatgctgatgcaactaaccctcaaactctaatataagatgatgcccgcacggggcaacgaaactagtttatttgctcaaactttgcggcctttcctggcagcattcatgtgctccaggaaa

SEQ ID NO: 370625 - DNA, 339 bp, Zea mays
tgccacgcgcgaaaggacgcgctggcggacgggggcatttagcacgcatgcccttttataaacacacggacggaagcagcggcgggggtgattcagtcatcgattctgcgaacgagatagggagattagcatatagcagcaagagctaaacagcatgcagaacaggggatcgaatctgaatgtgttcctcgtacatctaccattggcatacaattcgagagccgaacatatcctgctatagggctaaaaaagagagtaagggaaacatgacgtaggatggtaccacttcctgatcggcaaggtggactacggagacaaggcctggatgactcacatctg

SEQ ID NO: 370626 - DNA, 367 bp, Zea mays
ttcctttttttttttttttttttttgaaacaggagcgaggaaaaaagcgtggtgtgtgggacacaagggtaatgccccgaatcacaaaaatacaaaggtcctgaccatccataacgaggatatatagtggaattcccaatgaacttgttaccgactgaacggcttcgcaagataatggatttacttgccaatataacaggaaacaaaaccccccacccaacaatcttcgaatgggtggctacagaaccaaatatcaaccttccaagcattagctaggttatacatgtgttaaaccacattttcctgggacccgtacggagtgatgagatgagaaccttggaagctttgaggccactacaaacaaaca

SEQ ID NO: 370627 - DNA, 171 bp, Zea mays
agactaaaaacaggcacacatttacttgcaactgcaggtaggtcttacattacacacataagcattgatcaaaccgggtgctgctactacgtcctgactccacaccagcagttagaaggcatggggcaactgggcagttcttttttttttcctttttttacacatttgata

SEQ ID NO: 370628 - DNA, 434 bp, Zea mays
gccgagtgctctaggaggctatagcactcgacaaagaagttttaccggtgcccagttgttgcttctctgtgtagttgtacacgttgtacacggagaaacaaagggggagaaaaagaataagaaagaatggcacgttctgaaacaattggcccacaagctaagagcgccatgttataaaatatactagagtataatcacccttccaaactagaacattttcatcttaattagcatgtcatgttaatctgcagaagtaaccgccagttgaaaccctcctgcgccagctggatatcagtcagcatcaccatcactgcgtactttgagacagagatgcgccttcacaggcttgtggtcggagctccggacacagtcgagtgattcgtacgagctcagcactgcatccaggcctgaagactggccaaccttgaacagta

SEQ ID NO: 370629 - DNA, 425 bp, Zea mays
ccatgtacttttactagaaataataaataaatatgaatattttttaccaacttattattgtctgtttaatatacatcttgcatgatcacaactgaactccaacagttgtagggtgtctgttgcgtccaggccggggggcgctagaagcctacaactcacaagtcacaattgtgaaatcagcacatttgtttggagtgcagaaggcctttctttgcgtcccgccatcaagagaagaactgctcaagacttggagaattgaatacgttgcctgcaagctgttctccttccaccgtggaaataaatagttggcatcgaatgaaccgagatagttgagaaactatgtcaaggctcgtgtctatgtgaaaatctgattccaactgtcgaacaaatgaagttcgaccaacttcagagctgcaaaagagcac

SEQ ID NO: 370630 - DNA, 432 bp, Zea mays
gttcatgtgtggtttttgtacagctcgatctcaagagtcccgaacacgatacgagcgacagctctttactagatcaatcaatggaggatttaaaaattttcggcggatcggagtgctgctgagccctagtgtgttctccccgttttggccttgccggttgccgcgggccggcggggcctctctagtctctatatatagcgccccggtctcgcaacattgcttcgtcactcgagctcgagcgatcccactcccgatcagcagctgatcgctcactcttgcagctcggtcattctttagctgctctagctctagccctagctagtagctagccactcggtcgtgtagtcatcagccttctgatcgtcacccatggccactgcccaggtacgtagagctcgatccatcgtagtagtagtctttgattcatgcata

SEQ ID NO: 370631 - DNA, 466 bp, Zea mays
atatactatattatgaaggatagggtaaacatgacatgaattcagcaatactgaaaagtgaaaacagcagagaaacacttactagttattaatactacaagtcccagataccagtatcacacaacacacattaccacccagttacctaaagaagatcttcatccaactgaaattcatcacttgcagctccccttccacctgattcttgttcgccttcatcttcatcatcattcatttgttcttgttcatcttcagcaggagaattgtcatcttcttcacgtatgtcttgagctgtagctgctgcatttctgggtcttttttctggttctaacataggtttgtgtctgggtttgagaggaggaaccagcagcagcagtcctaggcaaatttcggcctcggagaccctgacttgcacctagagcttcatccacggcatcccaaatgttatcaaaaaaactcgacctgc

SEQ ID NO: 370632 - DNA, 121 bp, Zea mays
ataacataaagggcagtgcactagtgtgggtttcgcaacttagtgagctgacaaatacacacgtcaaatgttttaaaatgtggcattgggtttgggagggtgattacaacagggagggggg

SEQ ID NO: 370633 - DNA, 512 bp, Zea mays
tactatcctgctttgaagtaacttctgaaaactaccacctcatcattttctggcttcggagtggtttcttccctaccaaaacgaatcagcttcttctcggcttccccgaagtagcctagctttaacatcatgggcatatcagcctcagagacagtagactttccaaagtccaagtggctgggtttggatggcatgacggtgttataatctatctcttcttcatcagcattaccctcttcaatgtcagcctgttcagcttcggtagcaggtgcaccttcctcagaagcaccctctgtcacaaccagtcccgattgcctcattacttcggacaaggggcagtctcagcagcttcggcctcctctctgttgcgtgtaattctagctgttgaacgcactctagccatttgatactaaatttctcacggttttaacgaagttgatgactttttgcagttttgccgaagctccctcttatgacgaagctaaaacaagacgatgctttgattgagaata

SEQ ID NO: 370634 - DNA, 235 bp, Zea mays
ccctagctgtcaccgctgaaggaacgagagcctagggggattttgttaacaaacacaatcccgaccctgaaggccgccaaaagattaatggtggccctaaccataaaaaagatctgacacaagcacgagccaatgaatacgagatattgcaactatatcgcggatacagatatcaaacatttaacagatccgacaaaatttgaaggaccttaaatcgacatgccgcaagaacaca

SEQ ID NO: 370635 - DNA, 482 bp, Zea mays
tcgctcactcgtcctcaagagcttcgcggcgcgaacgtcgttttgtcttccggggggcatatcatggcacgggagggggaggggagagaagaattcttctgctttctttagcttctctttctttcttctattgaatctatgtgtatgtcttttgtttctattctcttataggttgttcttatctcattattgtttccattgttttgaccttttcttcggtttttgtttttactctcttttttgcgttcgtagctcctctctttcctcaccttggttcctttcttttacttcttcctcttttccattcttttaccttttttatttcccttcttactttttttttttctttttcttttcctctttttttcttttttacttttcttttttcttttttttttttttcttttcttctttcttttttctttccttttgttttttttctttttcttttttattttttttttcttcttcttttctttttt

SEQ ID NO: 370636 - DNA, 332 bp, Zea mays
aaatctttcccgtctcccccctccctctcccttgcttccctcttcagtccccagcgcgcgcgacacgacacgggccaatcacccagccgccgccgccggcgatcgccggaactgggcgccggtgcttccgtgcacgctccggtcggaaccatggtgaggagcgggagcatacggcggtccgcggtgcccgcgcccacgccggcgcccgcgttgtaccgtgtcttccgccgactacaggctgctggaggaagtgggatacggtgccaacgccggcgtataccgcgcggagttcattcccaccggccggacgggcgctgagaagtgtctggatc

SEQ ID NO: 370637 - DNA, 348 bp, Zea mays
  unsure (1)..(348): unsure at all n locations
ctttccttncaccggaacaccaagcctgacaggaaccaaaggagaactccaccgaagccccacaaggagaagcacctccagagcacaggaaagcccacaacaccaaaggcggaacccccacggcgcagagacaatcaaaggagactatgcaggcgccccggatacaggagagcaaccgtcgacatctctcaacagaaaagaacaataaaaacgccgccgatgccaaaacccagaaaatacaaggcgcgaaacggaaagcacccagcagaaaaacgaccggccagataagaaccaaaccgcccacccaccaccccacacggccaacggccaaaccggccaacccagaaa

SEQ ID NO: 370638 - DNA, 336 bp, Zea mays
cggaccggaatacctggtccgacccattcgcccggtgtgatattgaccagcgagtcgctcccgatctggggggcttttttctccgtatcgggccttcaattccgatccatccaacgcctgagatcggattccaaccctcatttcggaccgatcgtttcccgagaccgatcggctacggggaaatttttttccgagcgattttcctggaggctcatatcgggtcggtctgagtttagctgatcgtggagcgactctaatcgaggagctccctgtctatcccgttggaggaccaggtgagggctgtgaggattgagctgctgttgccgcgtcctgagg

SEQ ID NO: 370639 - DNA, 517 bp, Zea mays
cggtcgcttgggtatcgatttatttgagcacccatttagggaggtgctagcatagagtacatagggatgaaagataaaaccactctcatcatcacagggcggcctgcttgactcatgagcgatgttttctagcccgacaatcggacaatttattggataccttatcgacaaggggctgcaactcggcatttgttggttttcgaattgacaggggaagtcccaggtaattacatggaaactcctttaactcacaaggcaacaactcagagataatgaccagctcttcatccccacactggataggtgtgactgaacttttggaaatgtttgtcttgaggcctgtagaatgccccgaaatatcaaggagccgagtgaccataaggagatcagattttagtggccggaggaacaatactacgccatccacataaaaagaaatgcgatgtttggcctgctgatgagcaatgggctgcaagagatgctcttgagttgcaaaagtcaaaatggaattcaggac

SEQ ID NO: 370640 - DNA, 466 bp, Zea mays
tttgtgagaataaaggaatccagagaaagggcagcttccattgcatggtggaatagagttagatgccaaaagaggcctgtctatggcacaaacatgatacatgttttgactgtaaagcattatgtatcaaatattcttgataagaggaacaaccctttgtgccacatggactattcatcaagccttgcagatcttggtttttcatctgtggaacgctttcaaaaaatgcttgatattggtgaaataattacaattcccatttcttgttgttgaggctcttccccctgtttgttggtccagcaaaggaaactctcctgtttttattgatccagcatatagagaaaaaatgcatgaacgagtttttctccatcctgtcttctataaggtctgctattgtttgacgtcaagtctactttcctgattggcgtttgatccagcttgattgtgggaagttgcaagaacttgc

SEQ ID NO: 370641 - DNA, 419 bp, Zea mays
ttctcacgcgcttttagtaattctcggctaggagggtcaggactaggcggggttttttgtaagtcctccccggactcgcccactagggtttcacagccgtaccctgatccacttagagctatggaagtccgacgaataccagtacctggagaaggcggtggagcctgctcccccgccggccaatggattcggctccagcgagaaggaccgtggttcgcgtcgccgcgagggcgactagggccgcatatcgaagcgctcccgctcgggggaggaccactagcggggcctgcaccgtactgttcggaagcaccgggatcgggataaggattacgggtaggaaattgagaggatccgtgatagctcgggggaaggacagagacagggaagggagagaacgggagtaggagaggggggtcaat

SEQ ID NO: 370642 - DNA, 440 bp, Zea mays
ggcgtaaaagtaggatatatggggagaaacttaggaataacgggtgcatatcgtcttatatgtacaaagacagaagagactagctgccagtcagtcaggacccttgttaggccagcattaaaccttcaaattcctatttcctcgcaggagcaggaagcagcgcagaccacagagcacacaacacatgaccatgatgaggctggctttaggtgctgtttggtttacgaaatgtaacataaatagcaatgataatgattcgcacttgagtgagtttgaatgtgagcttctcccgatgccccatcctgctgctccttcaatgcttcttcttgacctgttgctttcccgtgccctgtgaagagaacccaacacgtttgttagattcctcgtgattaatgatgcccattctatgcccagatattggtatattggttagagcatcg

SEQ ID NO: 370643 - DNA, 138 bp, Zea mays
aaaaaggggtaaaattccttgaccaggggtaatgaccacaaacctaattacttttagggaaaatttaaaggcataaccttaaatggctattgtacacaagaagaaccaagcttgtttcatgcaacaacataaataaag

SEQ ID NO: 370644 - DNA, 205 bp, Zea mays
caacaggaaagaaaacactacccaggggtactgccaaaaccccacggggaacactgccacctacatgcccttatgccaagacaaagatctgcccatacagcctgcttctaaaatagctcatacttcatccaaaaaaccaaaaatcaaactcacctggcgtcttgataaaaaggacatccctgccatccaaatgcctgattccatc

SEQ ID NO: 370645 - DNA, 313 bp, Zea mays
acctcgcggcacagcaccgccgaccagaacccgtccaccgtcggagcagctcgccggaccaggactggggcctcgacggcgtctgccagtggagcaacgtgtccaggatctgctgatcgcgtgcaagagctgcagggcgcgtcggcgtagccatgccgaatcatcgattaggacacccatccgatccgatgattctgagaagggccggagacggattgccgaccttttcttttttgcttttgaacatttcagcctgtcctatgccaagcatcacggacaaatctgtatgtgttttgtcgtccgttcctgaccg

SEQ ID NO: 370646 - DNA, 300 bp, Zea mays
agggaacctctgggtttttcatagctctgttttgcatatgtattcctacatttatttttctattcaatggggttttcaatcccaatcatgcgttataaggggagcctacatagtacagatccatagggatgaggggccaaaagactcgcagaacaggggggctcgagggagacccggatggtgcagggtcacgggctcacggccccagccaccggctggtgaaattgcaaacagcgctgcaatgctgcatgcagcatgatatgagtttatgacacaatgcaaggcaggaaacatgcaaag

SEQ ID NO: 370647 - DNA, 192 bp, Zea mays
aacccgaggggaataagctctgttcattcacgggccccggtttattatttgcaggcggatggaaacggttatacgaggaggaagggaagtccgtacatctaaaagccaggagggatggacgccaacggtccatacaagcagggaaacccaaagaacaagagagggggagacagaaaaaagatgccaaaatga

SEQ ID NO: 370648 - DNA, 250 bp, Zea mays
aaactaaatatcacataaataaagtactggggcagcatagaacaaatagggggtgcaaatcaatgacagttctaaacattggacggccacataaaccaaatatagcagcaatattgggctgcaactgggacatatctgatacaatacagccacatgttcaaaatattgccattgaatgagtccatgcataccccatactcttgcgctagcgcttgaagattagatcacctctcaagcatgttcaagccct

SEQ ID NO: 370649 - DNA, 388 bp, Zea mays
gccatatcattggcatcaggacagtctgttttacacagcccgttctcactctacaactcatgcactcaaatgcacgttcactattccctatccaggcagaagaatatgaatattagccggcggctcaacgaggacatcttcctcgcgaacgtatgccaaagaatcaactaatgaaacactcagaggttgacgacaatgctgctgagcgttgacaatactagctccgggcaaaacaaccctccctttcggccaggtccgcatgatttgcgcggaccaacatcattcttccaatgtccaatagatgatcaacgacccattaattgatgccacgtgtagatgaattccagcgtgaaagatgtcctcaaagaccatacctgatcttattggc

SEQ ID NO: 370650 - DNA, 221 bp, Zea mays
ggaagggatgggggttcttttttctcaagaagggataggacccaacaaaatcgttgctaggagtacacgtcaggatcaggttccgcgcacgggtacggctgcacatgggcgggcgcatgaaacccggattgctaataatgcctgggccaacctgcagcagaagaggacacgtgggtgggggccgaggataattgcgaggtcacagcccacaggccagccag

SEQ ID NO: 370651 - DNA, 358 bp, Zea mays
  unsure (1)..(358): unsure at all n locations
ttactatcggaccggccgacacccaaacagggggcggatagagaaagaagggggaaccagcccgcagcaccacaccagacacgagaacaacgaaaacacgccagcgacgaacagcagaaagacacacgaggggaaggcgggccaaggcccacaagcgcccaagagaacaaggaccaagcccggaagacacccagaccggacggacccggacccaagaccacagggagaagaagacgcacgagaggcaagccaaacagcaagcgcccggtgaaaaagggcaccgaagcgaaggccgcccaacgccaccgacanggagagaagccccaaaggagagaccggaccaacaaaacccacgggg

SEQ ID NO: 370652 - DNA, 451 bp, Zea mays
tgctctccctccgtcatttccggatggatccgcctatgttatgtgcataataagtcgctactcttactgtgtatgcaatatcgatctgtctagttcggataagaagaacctatccgaagagcgcccgttaatgtctactagtggacaacgcgcgcctacgcgcggtggttataccacttgtctttcaaaaatatacgagaattgagtctctcgcaaggaagcatcaggccaatgggatttactggcacaaaacaccatactacctgtagaggcagagaagacccaaaattaatgggctgctaatgatacgatgaatttagagaaaatgaaaaatgcaacgaaagcccctccaaaaaaattctaccattttcttttgataggccgagactgatgtgcatttgcctaaaagtctcacaaattcattcctcattcatcatgccgacattttaat

SEQ ID NO: 370653 - DNA, 161 bp, Zea mays
cacgtgtactgttgtctcagggcaggtgtcgcgggggcaggttcacttatagaatgggactacaatggcagcctcctgctcctttaagcacgacccgctgtcgatgagcgtgccggaccccgcgctcgaccgctgcctccgggacagcggctacttggacc

SEQ ID NO: 370654 - DNA, 328 bp, Zea mays
tcgcttcccgaacggcggccacaagggggagggtgaaataaaaaaaagacagggcgccgcaccaatctcccctaccatatagagcgaccctgcaaggtttaatccaacagaattccaccggaaatttggtgaagtgctaatcgtttgcggcttgcctgcccggtctcgtggctttgtgctgatcccgctgtggtgaggaaccctaggatggcggcggtttcgatggcggcggcacctgagggggtgctgcaccgccggattgagtttcatattgcacggagaccgcatggctctgtggcggagggcgggggccgcttccggatggaga

SEQ ID NO: 370655 - DNA, 230 bp, Zea mays
gccggacccgaaccggaaggcctacccacacccacgttcacttccaccccggggaagccaacgcaggggaggggacagatgaagggcgggggcgccaccacccaggaggaggacggcaagcacgcggagaaggacgccgcgcccgggcggcagaccagcaggagagagggaaggaggcgaacgagcgccacaccgacagcaagcggaggggacccaaggagaagtaccag

SEQ ID NO: 370656 - DNA, 166 bp, Zea mays
tttgactttttaggcgcccgatcaggagaccacagggcatgggtgacgagagtcattggcctggtgcttgtctcgctgacggaccaccagcaagggtccgggcgacgggcgccattatgaccaatcaaggccacaggtctgatgtggaggagcacatgccaacatg

SEQ ID NO: 370657 - DNA, 317 bp, Zea mays
attgctagtccacggtcagcgggagggaacaccgtagcagcagatgcgaaggcgctagctccagctgctgctacttgcgggcgcggccgcggcagctggcaccgcgggtgccaacgagcccacgcataagatggcctggacgacgcgcccggtgacggtgccgatcggagacaggggccacgctgtggacctgccccacacggacccgaggctgcagggccacgatacggactgggcgcccgatcagatcgacggacagctctacggctggtccacctacagctgggtatggaggatacaggcgactaccaaatggg

SEQ ID NO: 370658 - DNA, 245 bp, Zea mays
  unsure (1)..(245): unsure at all n locations
tacacttgtgcggccacgccggcgaaccacgggcacgctaacgaggngaggggagctcaacatgcacctgatcaagaagagcaaggggcccgcagagaagagccagagggaggccaagacggacaagagcagggcccaggaggacgacctcgatggtggcgccgctgggaacccaagggcggagcaggtgcaccaggactaggtgacacggaagaagcgggcgcaagaacatcaatccagatgag

SEQ ID NO: 370659 - DNA, 372 bp, Zea mays
tccactcttgcggccacgcgggcgaaagaagagcaggcttactttgggaggggagctctacatgcacctgtcacagatgagcatggggccctttaacaagagcaatgaggatgccaagacagacatgagcaggacccaggaggttgtacttgatggggggaccgctgacaaaccaaagggggactggttttatcactacatggtgaacagcatgaagtgtgcgtaagaacatcaatctatgatgaggccagtgcctatggtgctgcacaacagaccactatcgtgagggacgaagcaaacacgcaagtgcaggacgtgcttgtgctggacgacactggagtcattgtgggtctggccactgacggaggagtg

SEQ ID NO: 370660 - DNA, 411 bp, Zea mays
accgaaccggaaggccgggccagacccaccgtatgctaccacccgccggaaccgccaccagggggcgggcgaaacaagaagcggagcccgcaaaaccagcggaacagaccgaggggcgcgcccgcggcaacagggcaagcgaggggaagagccagcagccaagagaaggcaagcaccggcagcccccagagggcgcaggcccagagagcggaggcgacagcaggcaggcgccgggggcccaggagcctgagtggccacaaggcggaagaacgcaggacaccccggcacggacacggcaggcgccggacccgggcagtcacgggaaggaagaagctggacacccctgactgtgccacagcagccgccgccgcggaggcggggcaagcgcagcacgaagcgccgcgcgggggg

SEQ ID NO: 370661 - DNA, 252 bp, Zea mays
cggaccggaacccccgggccgacccacgcgcccgtcccattccgcccagacgggcacgcaccaggggccagggaaaaacaaacagggcgacccccccccaaaaacagacgccccccagaccggacaagctcaagcgcgaccggaaggccgcactacagcacaaacgcacaacactgaacgccacgggcggccggacaggccaaaggagcccgacaggggcccgccagaagaccagggaagacccaggccggc

SEQ ID NO: 370662 - DNA, 252 bp, Zea mays
ttcaatcgtgcggaaacacacccggcaagggggacgggtaacattagggcacgaaaaggaccacaccaccaacgcaggcacacggggccgcgaagacccgaagcacgagacccgcgacaacgagggaaacaacccgaagaaaagaaacccacccaggccagaggcgcccacaccaacggggcgccaaaaagaagacgccacgcgagaaaggggacaggaagacccaaccacaagggcaggcaaagcggccaa

SEQ ID NO: 370663 - DNA, 473 bp, Zea mays
accgaaccgcaaggcccgggcagacccaccttccctttgagcgggagcaggagcggaagcggggaggggcacattaaaggggacgggggcgacaccaccagcacaagcgaacccgcgggggagagcgcgaaccgacgagaggcacgaacagggacagggacgaacacagagaggccggaacagaaccaggggccaacaaagacagcaggcacccgagcgccaaggcaagcggaagaggccagaccggacagggacacgagcaacaacaaagcgcccaccgccaccgaagacgaccggcggcgcagaagaggaagcggaagagccacgagcgatggcaccacatgacccgcccaccgccccaaccaatagcgggaaggcgacacgaagcctaaacccacaaggcaccggagagggcggcaaccccaacgccagggagagggcccgatgaacacaccgaggacggaggcaccccg

SEQ ID NO: 370664 - DNA, 385 bp, Zea mays
cggaatccctgggatgacccacgcgaccgtccaatcatccaacaaccgcgcgagacagggagccggggctattgaagagaccgagcgaccccaaaggaacaagggaagagccttagggacgactgaaactgcaaacaccgagttgctgatgggcgggctgcagaaagcaaccagaggacctgatgcggaactcaagatcagggaagatggatcagcaagcgtctacagaggaggcgcccgcagcacaggcgcatcaacaaagtcgagccattcgggaagctaaaaagggcagggcaagacttaccaagaggcaggtagaagacaatgcttaccttcaagatattaccggccctagttcgaacgagcagtgacataactactcact

SEQ ID NO: 370665 - DNA, 464 bp, Zea mays
  unsure (1)..(464): unsure at all n locations
ttcccacgcgccgtcgaatccatgcgcaccggccacaacaaggggagggttagccttaaagagcgcagcagaccgcacgaacaanananggagncggcaaaaaaaaagcaaaccaggggcacgagacgcaggacgaggcccgaaggagaagaggcgccagagcagagggggaccgggacaagacgcggacgagaaaaacacgacccaccacggccngacaccacgcggagacacttgaaggtgcgttgggatgagccttctactatcccgcggccagatagggtctctccttggaagagagagcctgcttcatcgcctccgtgtaatccactcgggcattcttctagagcaaaaagacctagacaaaacgttccttcacccttactggaataatctgatctcacaaaagaaggtgccaccaagggcgaaatctgattagcttatacacaacaccaaaaatcggt

SEQ ID NO: 370666 - DNA, 352 bp, Zea mays
gcaggaccgaaccggaaggcccgggacgacccacgtttacatcaaagcgcacgaacccagccaaagggcgaggggcaagcaaagaaacggggcggccgcaaaaccagagacggagaggcagcaagggaacaaaggcgccaacagcaaggggcaaacaaccgcaagaacccgaccgcggaacgacaggacccgagcaggaaaaccaaagaacagccaagcgcaacagaagacgctcaaacaggggagggccagagggccaacggaggacacgggacacacgcacggcgagaccagggaagacgacacccaaaaggacgaagacgtcaccaacaggccacaaaagcgggacaag

SEQ ID NO: 370667 - DNA, 213 bp, Zea mays
ttcaaagcgaacgaacccagccgaagggcgaggcgcgagcagagcaaggcggaggcagcacaaccggcaaaggaacggccgcaacagaacaaaggcgccacccgcacggggcaggcgccgacggactcgccgcagcacgacccagccgagcaggacaacaggcacacccaagcgcgacacaagaagcgcaagcacgggagggcccgcgcgccc

SEQ ID NO: 370668 - DNA, 291 bp, Zea mays
  unsure (1)..(291): unsure at all n locations
acggaccgaaccccaaggcccggccagacccacgtgtccttacgcccacacgcgcaagaacgaggggagagcgacaaaagcagagcgcgacgcccccaacaagggggaaacaacccccaaaggagaacccgacgcacagaagaagggcccgagaacagcacaggcacaacgcgggcagcccgcgggngacagagcaaaacagaggcgcgcggggagggcaaacacgaaaacaacgcaagaccacggcagacagnaccaaaggcaacccgaagcccacaggaaaagagcccg

SEQ ID NO: 370669 - DNA, 137 bp, Zea mays
caggggctggggccgccgccaacatgcgggaccccgtaaccgggaacgaagccacccggcccaaggaccaggacgcacagctccgcaggaagagcactagcggcaacacagcagagagcgcagcagccacagcagac

SEQ ID NO: 370670 - DNA, 408 bp, Zea mays
taccgtccgcgtgcgctctgtgtcgctcccggtctggtgaggattgaagacgactggggcgacccaccaccaccaccaccaccctccctatcctcgcctcccaaaaaaggcgcggcaccaaaaggcgcgagagagaggcacggggaccgtccacctggctcgcctgcgcaccggattcgtcactgcggcggtggttgcagcggcggcagcctggccgagagatgtcttcgcgctcggggtccacgggcggagggagcactcccggcggcagcagcactgggggaggcggcgcggtgcctctggccgagctgctcaggcgggaggtggccagcgagcgcaccgcgttcgagcgcccggagctgcactggggcctcttcagccaggccaagaagggcgaggacttcacct

SEQ ID NO: 370671 - DNA, 331 bp, Zea mays
  unsure (1)..(331): unsure at all n locations
ggccggaccggaacccccgggccgacccaccccaccatacaatccgcgcaggcggaggacgaaaagaggagagggagaagaaaacaggggggggaaacacccgccgaagagagagacagaacacacggccacaggccccgggccgagggacgaccccagacaagcacccgcaagacacagcaacctggagcggnaaacacgggcacccaccacagcgccgagggaacacgcgaaggagcaaggagaccaagaacggacgggggaaacggacaccagacaacagggacggagcgcacaccgccgggccacagacaagcactgggaaacgaca

SEQ ID NO: 370672 - DNA, 146 bp, Zea mays
aggaccggaccgcaatacccggcccgacccacgtttacatacactacaccgcccacgccaccaaggccgggtacaaaaaaaacgggggcgggggcaagaaccagcaacactgctaccaaaaagcaaccgcgcaggaaaagaaaaca

SEQ ID NO: 370673 - DNA, 515 bp, Zea mays
gggccggtcccgtaccgctatgccttgccacacccacgtttacttcttcgcccacgcgcccgagcacaggggaagggtgaaattaatgaggggtcaatcaaggaaaacacacctgactattgagccactgatgtggggctgcaatataacggggcgtattggaaaccgcagctaatagtgataatcagatattgtcacaacttagttccatgtcaagaagctaagcagaaattagcaggaatgctattgacgcactatatataactgtggctgctgtgaccatcttccatgtgatggttctggtctacaaattatatagtatatgagatctatcagaacttgaagtatgcatcggggaacgagtacgtggcatacttctgctgctctgataggatcaatttattaacagatcttctgcaagcatagaaacgctcactttcacacagaagatcaatgacaaaggtctggattgtaataaactgaaaaggagaaagagtcagcatttatatgaactg

SEQ ID NO: 370674 - DNA, 239 bp, Zea mays
  unsure (1)..(239): unsure at all n locations
caggaccggaccggaaaacccgggacgacccacgctaccttccacgcgcccgccgacggaaacangggaggggtaaaaacaaaagggggggcggaaaccaaagcggcgagcgaaanacaacaagcccgacaaaccgccaaaccacaagcaaggccgaaccacgcacgcaaacggcaccagagaagcccagaaaggccaccaccggccacccgcaagccaagaacaaaaaagcggaccgg

SEQ ID NO: 370675 - DNA, 170 bp, Zea mays
ccgccatgatggcgcctcactggatggggtaacagccagcgatggctctctcccctacactgctgatgacaacgaaatggatgtactacatgattctgcaaagggtgattcgcaaaatgtacctgagaatacgcattggaagggaaactggctcattcagctcccaggat

SEQ ID NO: 370676 - DNA, 324 bp, Zea mays
ttaacgcggtgaatcacacgaacgatcacgcggccatgtaaggaaacggagtgaccttgactcacaagacaataaagggattgtttctacgatcagtacagaatcatccgtctcattcgatgggggctcgatcagacactcggaaggggatatgcatcgattatttgatatttgacaaaggcataataaaatccttaagaaggaactttcatacgcgaaagaagacttatccctatctgtttccaaaaataatgctgagcttgcgaaaacaatactgagagcagcaatctgtgcgagtgaggcaaagttgctgtacgagcaggt

SEQ ID NO: 370677 - DNA, 436 bp, Zea mays
tccggccggaattcggtcgacccacctactacacgcgtccggcgctacttgtgcaggggggggtttaagccttcatgcttatttatttacgagctggataggtctattatggaatacgaatcatgagtttggtaggtaaataatttatacaatgatccttggacctttgaccctttctgcttcaaggattaatgtgtgactctgtttagccttcaatccaagcggcatgccactaatctcaaaaatgcttgtatgcaatatctacttgacaatttatatctctggtgttgcttagagatattgtgatgtaatatgttacaaggttgttcatgtgagatattgtgtcataaataatattatatgaagattatgggagttaaccctaaattcatagtatctgcattctgcaaattcttgaaaaaatgtttgatctaca

SEQ ID NO: 370678 - DNA, 317 bp, Zea mays
atcacccagcacacgagcacatggcgtacacgaccctcttgggggacgagctgctcgaggatgccaacgaaacaccagagcggtcttggtcacctgaagaactgcaggcgctggtgagagacaatcaggctctagggaacccgataacactgccgacgaggaccccagcgtggacggactgctgctcatgggaccacctccggtgaaacgacaccgtacgcgggaacaacgagatcatccacggcgctgacgacttgagctgccaaatacacgccgcagagggacggacgacagagctcatgtcgctgaccctgcac

SEQ ID NO: 370679 - DNA, 314 bp, Zea mays
  unsure (1)..(314): unsure at all n locations
aataaacactcggcacgaaancaaaagagacggggcatttttatagccaagccttgtgtggtcaccaggaaggaggaccatgagggccgcctgaggctggtggcttacccaatcgcggcgcacgaccggcaggatgtcgtgcattacacggcggacgggcagggcgccaagaaggacatgttgccgacgctggagtggtacagtgtgcccgacggcgcgcggtcgctggcgctgatggtgcatgacatcgacgacaaccccagcgtgccgtggacccactgcgaggtggacaacatgccgcccgctaccagggg

SEQ ID NO: 370680 - DNA, 379 bp, Zea mays
gtacgcgccggcgccgaggccatggcgagcgtggctccttagcaccttcccggcgccggcgtgaccatgctgcaagcgcgccccgtgttcctcgtcaccgactattgcttgagctcggggagcaagaagggcaggaagcccaagagcgagcgcatgggcaaggacaccaaggcgctggagcctgcagcgcccgaggaccgacgcgcgccaccctgaagcgcctgcatattacaggagcagaagaatgaggcggcgtccaacgccgaaggcgccggagggaaggggcccacggaggaggagctactgcagcggcaggccaacgagaacgcctgactcctcgcctgggttgagctaggcatcattatccatgtcgagggca

SEQ ID NO: 370681 - DNA, 408 bp, Zea mays
  unsure (1)..(408): unsure at all n locations
aatgaacgcgcggggaccaanacacggagccgggggctttctaaaactgagcgcggaaaaccccacggagacaggcgcaggcgcagccagcacgggagggagactggagatgcagaaccaacaaggaacaagcaaatgcaggcacgtgttctgtagctacatgagcatagaagagagaagagttactcaaaaagacaggtggctttaaacagagtagcggcgaagcaggacttcaagagccagggcaccgcagccctccatgctaagcaggttcgcggaagagcaccctgatatccgcatcaaggagccagtgaaaaacatatacccatcgccagatcgcctaaaagccaaaaaatccctgcccgggtgcaagaacaaggcattgaaggaaagccaaaacagcgagca

SEQ ID NO: 370682 - DNA, 447 bp, Zea mays
  unsure (1)..(447): unsure at all n locations
aatangctattttgagctctgaaatatatgtgattgactatagaattatttcaagaacaaactgttattggcatttgttcttgcgagtgtccagcagtagcatgcttgtcactctggtttggaaatattgaaaatttcatctttgaccgactgataaagagtagaacaaaatatatttgcatttcccctagtcaatgaaccagttcaatttacaccaaataatttctatacaaaggtatacccttgaagggacacactttatgattcaatggtttgaatgaccgatcatttatgatgtctgtgctcgactgaatctcgttgagagtacttctgggagcctaaaccttcagatggtaagtatatacatcactnttgttcgatttcaccggcctctcaatctttatgattcagagcctcttagttcttatgtaaatgtttgtgttgact

SEQ ID NO: 370683 - DNA, 373 bp, Zea mays
gaacaacgagggccggggaagtttcggcggacgcgggggcagacgcggagggagtgattctgctgccggagaaggagaaaaagaagaacacgctggacgattgagctggagctggcgcgatgaacatgaccaatcacctatgggccggagcctttgctgccatgatatcgagaacagccgttgctccacttgagaggctaaagttggagtatatacttacgtggcgagcagaggaatctatttgagcttatgcatgctattgcaacaacacaaggattgaaaggcttttcgaaaggaaactttgcgaatatcctacgcactgctacattcaaggcagtcaacttctatgcatatgacagttacagaaagcaac

SEQ ID NO: 370684 - DNA, 411 bp, Zea mays
taacctaccccagagaaccaatttggggcgaaattgaaaatcagaacggaagaaaaaccctgaatcagggtaaggaggtctggaagaatttcaaaatcaaacacctaccgattgaactgaaatggactgattgggtacctaccacggatattaagcgcagagatatcatagagaaggaacctgtagtatacgttcctgcgtggttaacaccacctagaaaaaaaagttaaaatagagttgacgagattactggtaaatacagggggtggtgaagcaaaaaaacctgaaccaggtcactttaattcgcatcactcacccgagttggcaaaaggtgcccagccccttcatacgagtgagacaaaccctaagtcttccactctctcacatcttagccgcttcgtcgggcatttc

SEQ ID NO: 370685 - DNA, 365 bp, Zea mays
aacccccgcgggggccggaccggaatacccggggcgtctcacgcgcccgaataattctcgcccgcgcagaacgccagggggggggggttttcctccttgttcgtgaatcctcccccatcctaggatccttgtcttggtcactcgacatagcgccctactctgattgtgtcattagcagcagcatgattattgataggactaatgaaatgggggccagattagcgtcagcagtgcgttatatacagggcaaagccaacggattgattagagaattcgggcacttgatgagccagctagcgccagcttcatatgtacaaggactagaattgatcgccggccgagctcgatataggattaactcaaaa

SEQ ID NO: 370686 - DNA, 264 bp, Zea mays
  unsure (1)..(264): unsure at all n locations
ataggaggcccgcngaacccgacgcccaggggggcgttttataaagccgtcggggttatttcaccgcctaagaggcccagtgacacgtgtacagaccatgcaccccgtggccgatgggggccttagcgcccatggagagaagtacaggaccaccaagaacccgacggcataaatggccgcgttgtgttaccaaacgaacttgtcaaccaactaatcaatggatatcccaacatgtcatcactactgaaaacgactgcaaaagaa

SEQ ID NO: 370687 - DNA, 344 bp, Zea mays
tcgcccacgcgtccgcccacgcgtccgaccacgcgtccgcccacgcgtccgcccacgcgtacgatcttgttttactgttttagggttccttctttgctactgtgctcctgtgggtcggcactgcatttatgatttcttttttctgggctgatgtaatttgtgccactattctgttggcaaaggagttcaggattattttggccgtgtatagcaatagcaactgacatctttgtgttcattgaaagtttttgttcaagagtgtgcagagacgcaggtcttaactgttgccaagaaacgaatgtgttcaacatgattgtaaactgaatgcaattctttggctaact

SEQ ID NO: 370688 - DNA, 110 bp, Zea mays
tcggtcacccgttggcaaacacgaggcaacaaacgacagatatggcgccgagaacgggccagacctacgacgctgccagtcgcattagtggcaagagctgcaggacacta

SEQ ID NO: 370689 - DNA, 263 bp, Zea mays
tcggtttttcattggcaaggatcagtaccacaacaggggacatgggacctggaactagctcagcttggtcgatgtacgtcggcagatggcgtaggagctggtggacaatccagagcacatactgctaacacctcttatgcacttctgccagagttcacaaaggttgtacgctttctagaagggtgtaagtccatacctggggtcgaccagctagacgtattggaggtctgaactgatgattggctaggaccagggaccacact

SEQ ID NO: 370690 - DNA, 413 bp, Zea mays
tcgcttacgcgtccggggaatgagacacagcaagatggtacatttcttggtttctgggaatcaggcgaagcaagtgcaagtggcagctctaacaatgccaaaacagagcatcttagtattggcggtggtctgaggattggtgaaaggcgactggtagctgacaatggcatttctctggatgtggatatcaaccttaacgccaacgttaacgatctatgtggtcaaagttcaaatgttaactgtacatctcagggccctgagcactatggtggcggtgatcgtagtgttgtaaattctcagccaactgacctgagattacacccatacaggacttttctactagatgcagagcaagcagattcttttactttgaaccctagtgaaaaaccctttgtgtgatttttcactgatgc

SEQ ID NO: 370691 - DNA, 298 bp, Zea mays
tcgattacgcattcggtagagaagagagcacgcaatccgggacagaacccggtgaccgctatgctgttccaggctctctgagccacgtgtcttctgtatgacattccagcaatggcaatgatgcgtgctaaaacggcaaacgttgctggaagcattactgaagggctagacgtacctaaggacttgcttggtgaagggctagcatgactaactggctgggtgatcagttgacgtaaaggaagaggggggcgaaggatcaagatctgaagagatggatctctggctgtgatccattgga

SEQ ID NO: 370692 - DNA, 316 bp, Zea mays
tcgcccacgcgtccgctgtctttttatgcttggttaaggggaagatcgaatacaggggcttgttgacagaccccgtatacctgaaggtgcactaatggcacgatgagctcttgctagcactgtcccagagatagatgcaatggggaaaagcgaccttggccaaatctatccaagagctggagaggctttggcagaccctactgaatgtccaaattaatttgactactggcaggttgctctaactgtagaaaaaagcgtcgcttcttagagggatcattgtcctactgctgaccaatgctcgtatcatgctgagaag

SEQ ID NO: 370693 - DNA, 373 bp, Zea mays
ctttcgcttacacacacccgtaatttcattcaggacctggttacctgcccacttacaggatggatagtgggtacactgggggtcttgatccaggaaaaagccctacaacaagggagagtacagagagggctacatcgagcgtgacatgagacaaatcgagcttgagtcctacaacaaggctgtagccgctcttaagggtaaaagggacgtcgatagactgagactgatggacacctacagtctttagtccttgagacctgacggtcactattgggccttacagaacaccctatacctatgccaggggccactagtaatacacgcccttccaacatgattgcttgtactggtgtggccatgccccattgatgca

SEQ ID NO: 370694 - DNA, 409 bp, Zea mays
gttttcgcttggggcaagccctccgtgttctccgcccacgccgtcggtcgctcctcccagatcctagcatgagactcaatcacatggcaggggtttctccaaatctgcagaaagggacagagaacgtgagaagggtatggacagggagcgaggcagacaccgcgttcgctaaaaggtgagggaccgagacagggacacggatcttgaaagaggtgacaaagacagggaccatgattggcaccacagggatcgtagcgagcgcaccgagataagggaacaccgcgatcgctctgatgatcgtgaccgttaccgcgacgattgtagaccgttgtaggagccactgatttgtgaggagaagagaaattgactgagatggcacttcataggcattagtcctgtaccccttcta

SEQ ID NO: 370695 - DNA, 194 bp, Zea mays
cctacgcttccggccacacgtcctgcgacgcgagcggggtcactttgtttgcgaatgtcgcgcacacgactcttgcggacactggtcggcgatctacttattaccattaaagcacttcgtgtgctggctaaagaggtttaaaccggtttgcattatgaccaattcaatcctcgttgatgattcgcacgactaca

SEQ ID NO: 370696 - DNA, 177 bp, Zea mays
tcggttttgccggctgcatgacgacgacaaacagcgcgcgttccaggtttacatgtttggggagaacacggggccgactgacggcactagaagggacctgaactctgtgcaagacatgcgcagcgacatgataccgcacggaatcgttgcattacagtgataatgtcgggactcact

SEQ ID NO: 370697 - DNA, 328 bp, Zea mays
ggacaaaggttcgaatttattattcttgacagggcttcctgatttgctgcaaattcagcagaaaactcaggtagcaagatattttcttcacgcgacaaatgcttgaggaaaggtattatattggagttaaaaaaatgaattagcgatacgcccgagtccgccatccaacaacacgaagttgctacagacaacccaaccggccaacccatgcatcctgatccgaggaccatcacccttacgatgtgtactcgaaggccgggggcggctggggctcatcgtcgacagccatggcagccggctcgctggcgctggatgccagggcgttggt

SEQ ID NO: 370698 - DNA, 359 bp, Zea mays
tcggtttttagctcggtcgcatagtgaatagggtatagagcttcagcaaagttgatagccttctgcatagcgcacttttatgttggttccatgtcgtttccagtaaatctgttgtgcattgtggttttcttttgttctctttgtcggattctagccatctgatcgacagtccatgccattgtgttgctaagttaaatcagtggctcttctgattgtcataggatagcgttgttctgtaatttgacataatctcctgtggcgtgattaatgaattgaattttccttcaacaagtacattttgtagtttaacaggtttttttcaccttttacggggctgccggtttagaggacccaagttt

SEQ ID NO: 370699 - DNA, 335 bp, Zea mays
ttcgtttcgcgtgcggcggagcagccgcagtcgcaccgacccggtcgacggacgtcctccatgttctagccgctggcttttgcttctttgttgaataatcaagatagagccgcggtggtagcgccgacggtggccaaagttcactgggttatctctgtggaagcggcgagcctactaaaccagtaacggcaccagttgcaagtgctccacctgtagagaaaccatctggtggaaagactgatgccgacaaacaggttgctgctggtgttaccagtcaaaccaataactaccacagggctgagggtcagaacactgggaagttccttacggaccgt

SEQ ID NO: 370700 - DNA, 411 bp, Zea mays
ctcaccttaccaccatctccagctccatccgcaccaacatcttcaccaaccgacacggcgaggagatgaacgcgtcgcagttcatggacaagcagatcctcggcctagccgccttcgccttcctgtccggcggcggcgcggggggcggtgggggtgtggatctcagcgatctgatgatcccgatcccccaggaggacggcgaggaccgtctccgtcgccggcgtagcagtagcagcgtcaacggcacatcagacgacatgctacccagctacgattatcagccgatccgcaccggcggcgccaccgtcgtcgtcaccgtgtctcaggcctcgtggggatcgctcgactccaaggcaccctccgactctgcctctgtctacggcgacgtctcatacaacctcaagagtgctg

SEQ ID NO: 370701 - DNA, 245 bp, Zea mays
cgtacgcgtgggaaagagttaaatgtatggtaggcccattactttgtaaggatgcacctcaggtgcacaaagcttgatgccgccttgtttgcttactaatatattaagattctttatgtttaccattagagtcacatctggataacttgggcgttaaaaactaccaggattgacctggctaaaatgcctgggaaattttggagtctaaaatagggaagtggtttcatcccatgcaaattgctgtt

SEQ ID NO: 370702 - DNA, 363 bp, Zea mays
aaaagatgtaatatatatgaaattatgagtataattactcttttctaatgttaaatttgtataaaattaactagcaattgactatactattttatatatacatgtatttttttactcgcgagggtaaacgagccagcccaaacttgcaaacgagccaagctaattctctgactcaattgtttaacgaaccaagtcatctctttaccttaacgagtcagctcaagctcagtcgaaccgaactaagctggctcgatatctagcgagagggagttaaggtgttcgtcgtcgctgtccatctacatatcgtttcaagcaagtggaaggcattttgtaggacaccatttcttatgcgcgtacgttaca

SEQ ID NO: 370703 - DNA, 486 bp, Zea mays
gttatagatcagccagccgcttcgggatcgggacgcggagaggggaaaggcgagtcgtcgactcgtcgtccgggcaggttccctccctctgctctccgcccccggttacctagggcggcctccctctacggccccttccgccgccgaacgatgagcacttcttccgacggcgccgacgtttcacctttgccgcctactgctgccgccgacgaggccgcgcgggcgacagagacggtggtggtacgatgagagggtcgcctgacacgtggacccgctcctcgccgaggcgctcgacaaccctcgccaccgtctcatggagccacctactccatctattaggcgatgtcctgagcaagagcaagtctacatcaacctcaccaatgacaaggtcccatggcgacgtctagattgcagtaccgaggcctctcctagggccaagctttgctttaaagtttaaaaccacacgagacgcacttcacacttttg

SEQ ID NO: 370704 - DNA, 330 bp, Zea mays
caagttaaagtactcttcaatccctgtgaggtacggctgaaacgaaggcctcaataatctccaatgtaccccgaagcacgggtcgccgtgacgctgcccttccctgtaatcatcacacaaccctaacattccaacgaaaatcccgacacatgtcttcagacggcattacaaattcacctgagcaacatcaggtcatagttatacattcctaattttctacaagtaccaaacatgagacgtacaaactcttcggcgtgttgcctgtaggcttcactccccttcgcctacggatcgctgcaaaggatttcggtgaagacggagagtgcgtcc

SEQ ID NO: 370705 - DNA, 279 bp, Zea mays
ggatgggggtgcgttcaaagtttcacagagggcccgggaggggacatgtcattttatcacatcacagtccaaactaccccgggggggtcggtcatttttatttaaaccaaaccccgggcgaaaaacatacagggaacacaggagccatgcacatccatggtcctttacacaccaacgaccattttcaccacagtccgcagcaaaaaacagagacacgtccctacaaactcgggctagctttagctgggctagctagcaccggtcgttttcggccagctg

SEQ ID NO: 370706 - DNA, 350 bp, Zea mays
atgggataggagaccagagggatatagccggaggcttttgggataaaatgggtcgatgcatgtaacttaatatggtatcaaagtctcaaataaaataattgctgcttgcttctattattctacggctgacgcctgaaaggctcacctcttctgtcagcttaatttttttggttgagctggtcagtgcatgtaatttaatagagggattgatcattattggtaacactagcatggataagagcagtaggtagaccccctcacattctttgatttctcggcaggctgaccttttattttaacatgcggtcaatataggcgtaccattttaatctttgggggcatttggcaaa

SEQ ID NO: 370707 - DNA, 221 bp, Zea mays
gggaagaagaacggattcttcctgggggtatactagggattctccaaccctaagcatggggaatcgaatgacccgcctccctccgctagctccggcggcacaccgagatggaaaaccaaagatgcatggctccttgtactggatatacgcatcgaacgggggggaggtggccggatcgcaacggagcggaggtcgcctattgcctgccaaaggagttgcgg

SEQ ID NO: 370708 - DNA, 396 bp, Zea mays
cgactcctccctccactttattacccacggcgcgacgccgacaccgtcccgcgctccctccccctgccgcaccccacccacgctacgctctccatgtcatacgcccacgcctcacgccaccgaggcgggggcatgccgccaacgacggcgctcgcggcgaaggtggccctggcgtccgcggcgctggccgcgttcgcgtccctggcgcgcctcgccgtcccgcgcctcgtggccgtggccgccgccgtgctcccgcgcgcctgggccgccgtgcgcctctggctcgtgccgccctacctctttgtcaccgtgcacctcatcatcctcgtcatctggaagctggccgaccacaggcactcccagcagcaggccgacgtcgcccaatacaaggacgac

SEQ ID NO: 370709 - DNA, 424 bp, Zea mays
acaaaagatcttttggattctacatgggtttgacaattatccgagaaaatcgttcatccacacaatgtggggttagtcgcgaatgaagattcaaaagtaaaaattcgaaccagcatgttatcctatctcgctgttggtaaccagaatgcttcagaagggttgtttaccctgatttgtgctaaccattccatgtaaattgtaatggcagctatgttacaaattttgatgatatgaattctaaacttctggctaccaattacaagacaacggcagatgcgaaggacctcatcccaatagaactagaaccaaggactgaccagccagaacttgcattgtaaacttccacagtatccaacatctgcacactggactgcatgccaccaattaggaataagctatcatcaagataaacagcagcggcata

SEQ ID NO: 370710 - DNA, 274 bp, Zea mays
ccacagcaggcaaaaccattcattccctaataaagggccgtaataaatcaacacaagcccacggggttattatcccccctttaaaaccagccctctccttggaaaaaaacaacggcaccctttttttttttttgggttgggccgccctaaaaaaatcccccctggggttacgctggggggtcgacaaaaaaacgggcctttcccgggggcgggggggaaacaaacccgggggcccggccccaaaaggggggggcccccggaaaccccccccccc

SEQ ID NO: 370711 - DNA, 528 bp, Zea mays
tttcacgcgtccggtttcaagcaaaaggaatcttgcagttcctgacccaaagaaaatcacagcaaattctaaggaaaccaatccatttagtgttctatcaaatacagccgctccagttaactgggctgatgatgtggaaaatgctagtaactcagatgagaagaaatctggtggttcagtttctgattatgacaatttggatgacaattttcttcaaaatcaatttggtcctcattcaaatccagatgaggtcagtcaaacttcctcaggcaaaattgatggccaaggactggagcttattgaatgtaatcatccacttgtcaatactgtgaatggtaaaagaatcataactgatgaatcaatgcttttgaattcacacaatgagcataatggtgctgtggaagttgatgaagtggagattgaagttcacaataacccaggtggtggtgttgggctacagccagaaagacagactgtcctagaaaagctgaaaggattatctttcctacgacagcaggatgccataac

SEQ ID NO: 370712 - DNA, 307 bp, Zea mays
attaaggcagcgcctgcaccacaagtgaaccgggcagtttgaaaaccaaccgggggagccaagaacaaggaagagacaactctgacccgtccaggcaacatagtgcaatctccaacgccaaagaccgcgggctgacgaccagaacgacgtgccgaccggagctgcaaacggcgggcaaccgagtggcggagccggacaccgtccgcccgcatcaagaagtccctgcacaagtgcaacaccatgccgcctatatacgacaacaaagtcaacgggcccgaacattcagccccagccaagaacacccgtg

SEQ ID NO: 370713 - DNA, 227 bp, Zea mays
ttgactcggaggagaaatcccatgaccggggggaagactaagaccaagcacacgcccccgccaatcgctcgatgaaaaatccaaaccaaaaccctcagcgtactcaagggtcccggagggcagcaatgggcgccaggagtggagcggagggatccacaattccctacggcttgagtctaactcaaccatgaccgtagcgaaggatgatgccacggtaaaggactcga

SEQ ID NO: 370714 - DNA, 317 bp, Zea mays
tgtactcgggggcggactcccatgccgcgggggaggtccactccgacgctcaccccccggcaatcgctcgatgacatgtccaatccaaaacccaggacgtactcaagggcccctgaaggcatcaatgggcacccagaggggaggggaggaacacacaattcagtacggccgcagtctaactcaattgtgacatatcctaaagctgatgcgaggtcaatgactagaaaccattatagggaggaggatgctggttaccgcgacaatactaagtgtgtgactgggctctcatcatggggtactgaaagggatgtaaagga

SEQ ID NO: 370715 - DNA, 354 bp, Zea mays
ttcacgcgtccggtgccagccagtcactctgggccgctacagatcgagaagccaaccaccaccgccaccgcatggccatggcagcccagcagcaccggcaccacaagcgccgccgcatcgccctctccccctccccgtccccgtccctcgcgcccatccccggagcccccacgccgccgctcgactcgctggccgacgagctcctcttcctggtcctggaccgcgtggcccaggccgacccgcgggcgctcaagtccttcgcgctggcctcccgcgcctgccacgccgcggagtcacggcaccgacggacgctcctgccgctccgagcggaccttctgcccgccgcgctggcgc

SEQ ID NO: 370716 - DNA, 503 bp, Zea mays
ttcacgcgtccgcccacgcgtccgcccgatcagcagctgatcgctcactcttgcagctcggtcattctttagctgctctagctctagccctagctagtagctagccactcggtcgtgtagtcatcagccttctgatcgtcacccatggccactgccgaggtccagaccccgaccgtcgtggcgaccgaggaagcgccggtggtggagaccccggctccgcccgccgtcgtgcccgaggaggctgcccccgccgtcgaggccaaggtggacgagccagctgccccggcggagaccgagccagctgccgccgctgagcccgaggcggcccccgtggcggcggaggaagagacgccaaaggaggaagagacggcaaaagaggcggtgccccatgtgtgccgctgcagcctgtgtctttgtggtgcttcatgatctctgtctatctactctcaagaatggcagtttgggtaccggccgggatattaagcatgttcgctttttttggt

SEQ ID NO: 370717 - DNA, 238 bp, Zea mays
tgttcaataaagaattcatctgcgctgcaaagtgattacaagtgacataaagatttagttatacataatcggggggactacaaaagaaactttgagggaactaggcaccactggacagaggaccaattgatctcccattctgcggagggagatcgagcaggtcggctacaacgcctagctcgtggccgcgatctaccggtgctcagcctaccgacgatcgcttgtgacgcggtagctc

SEQ ID NO: 370718 - DNA, 453 bp, Zea mays
tgtgtacgcctgggcggacgcgtgggtgctgtgggctcgtaattccattcgcgacacagatgcaaaacggggagagaccgggtttataagcagatagtcgaggaaggagaggttctccacacttcacctcgccgataaggctgccgagccctaccttacttccgcggtcctgctccctatggagtcagcggctattgggtcacaggctccgctctccttccactccagcctttgcaaaggaaaagcatcatctaatttatcaatatacaatgtgaagatcaagagccactgtaggcttgaggtggtttgccatggtatgttatgctacaagaaagttcagtgcgaggataaagaaagaagatagtttcaaggatggtgctgatgagaccgagcagatgaatcggaggagaatgatgagagagatagagcaggagggatcacctgatcccattc

SEQ ID NO: 370719 - DNA, 359 bp, Zea mays
agcaacgaacaagagacccgggctagtagtagcttacattttacaggcttcagcacaaacacaaaacctaataaccttggtgacaaaaccccgtaaacaaaaaatcagttttcactccctttgaccggctgctgggggggggggtatcggcgaacatcaacctatagtacgactgggggacttttttttacttcactcatacgactggatcgcctccctcgcgaggggggggaagaggagattttattccattccttccgcccttctgggctttctccctactatgaactgatctgacctgacctcacctggtggtaatttaatttaatagaacgaaaagccaaagccccgcccgggcg

SEQ ID NO: 370720 - DNA, 251 bp, Zea mays
cggaagccgagttgcaccaacaaaagctttcaagccatgtcaaatgtcaagggagcgacagacattggatacttaacaaaacccgggttttaatttcctatacaaaagtttgggctaaacccactttttaagggttttactggccccttcttaaggggacacatgtttagtcaggggggggagacaccatcctaactcctgattgctaccgcaaggcaggcaaatagctaatggggccaaaaggggggggg

SEQ ID NO: 370721 - DNA, 251 bp, Zea mays
gggaaccatataggggcccttatattgggtttttttaccacggggggggaacaagcttgcattttacagggattataatttttttttaaaacacaaaaacatccttttttgaaaaaaggctaaaaaaaacattttggaaaacacggggccccctaaaaaaaatccttaagctttttactaccctgaaaaaaacatcttccctggattttgggggcaggggtaatagacaaaattttttgggggactttttc

SEQ ID NO: 370722 - DNA, 301 bp, Zea mays
tagaacccatgctacgagctccaccaaccaggccctgtggacagatccttgcgcttgccccttagccattcaaacttgagagctactatctcactgcacgctggatagcgcgtgcgctgccggcctataccggggaagaaaggagatcagtccactcactacccactgtgatacgatcgggttccaggacagcacagccgagggttccgcacagcaataagcgcaaagcggaagagatggagcatatcgccaggttcttcttccgagtttctgggaaatgcattgcgctcttcctatttct

SEQ ID NO: 370723 - DNA, 487 bp, Zea mays
  unsure (1)..(487): unsure at all n locations
ttcacgcgtccgcttcttcctccccgtacgcgcctctctctccttcagctccttgcgcgccgcgtgagctcgccgtgccggagctccactgcatcgccccagctccctctgcttcccagctcggccgctcctccctgctgcacatcgcgtccggccgagctcgcctccgacctctgcttgtcctgctgctgctcgcccatggcagccgattcctctatgcgcgcgctccctgtttccccgtccaaagctctatggtgtccggctccttgcgcgccctgccgagcgccctcccggcttcctgctcgccgagctcggcttcgagttcctatctcccatgccgcggcactctactgcgcgctgctcgccgagctcgccctgcgctcggattccaccttcctgcgtgcgtgcctggatgtgcgcgccgtgctcctactgcttnctatgcgcgtagctgtgtctactccctcctcgcctagtccctgcgcgc

SEQ ID NO: 370724 - DNA, 313 bp, Zea mays
ttgtggagagacgggagaacgaagcagcaggggcagcaggcgccatgcggtcgcttacttccccccaccgccagcgtcgactctccgtgtgcgcgccccgccgggggtggcgtcactgcacccttgggcagagggcgcatacctacctacgtgcggtgggagccacacgcctccctgtagcctattgtgatggactccggaagagagaagtgcggcgactcaggcacatgagggccgagagggcggcggatacctctacgcggctcacgggctcaagaaggagtgctccaacgccgagctaaaggacgtttac

SEQ ID NO: 370725 - DNA, 241 bp, Zea mays
aggggaaaaaaaaatgtagttttattgacaggtttcaaaggaaaatcccccccaggcctaaggggggggctatgatgaggtaaccccctttttaaatcacaaaacttggaatgatgtgccgcccctgctggggccgatagctactagggcccctaggcccaggcaagggcctacgaatgattttaacccgaagccaatgggtcaaacggggggggatacaaaccgggcgccgttttatttt

SEQ ID NO: 370726 - DNA, 340 bp, Zea mays
agccgtcggttctaatcgcggcggcggacacgcccggtcgggccgaccctgagacgctcgcgctgcatcccatgctggacgaaaagctccagctcagcctgcctcactgccggtatgctagcgcagagtgaggccagggcgggaccagcgtggcccagtagaggcgatggctgtctcaagcatcgacgctccaacgcgtaccgccgcggtggggccgaccaacggcagccgaaagtgacactgaaccaaatgcaggagctgcacggccacccactgcgggacacgaaccaccacgattacatccacggtgacgccgaggaggaaggataccaaaaaggcg

SEQ ID NO: 370727 - DNA, 292 bp, Zea mays
atgacaaatcaggggggtttttttatttttttggggggttttttggacccccaaaaacccatttgacattggcttataaattgcgccaattcttatgcaacatgttatacagcccaggaacccttttgacaaaaaaaaacacgttcccttttttttaagggttttttttccaacagggaaaacaatttaattcatttatgccggataggggggaaaacccaacttccgacaacaccccggaattcatgcctggtgccccccaccaaggggggggcttgggggagcaaaaacc

SEQ ID NO: 370728 - DNA, 314 bp, Zea mays
ttcacgcgtccgaccacgcgggcgggggaggggacccatttaaccggtcctagcgtaacccaacagagcacgaaggggggatacgacagttcgaggcaccaataaaccaacgtttgacatggcatatggtaaatgtggatgcctcacaaggagatgacgcacttgggatagacatgctgcctatggggaaaggtttggctaggttgaatggaaatgcgattgggcggtattggacgtggacgatttatagtaatgttaggttgcactctcagttgtaactgcagggggacatttattgcagacaagtgcaagac

SEQ ID NO: 370729 - DNA, 341 bp, Zea mays
ccccggggggaccggacaagaattcccggaccgactcacgcaaccttcattcccaacccccagagcaagcacagaggaggggggggacacataaaacaaagggggggaaaacaccacagccaaacggaaccaaggcaacagccgacacgagaagacaaaaggcacaccaggaccacgacacaaacccacaggcacacaaccaagggacccaaccacacgacaccgcaaacgcgcccggcacgaccaacaaagccaacacaaagacacgcacaaaaggcacaagcgacacacaaagaaaaccctgcgtcacagcaagaagcaccacccgacaaggaacaacg

SEQ ID NO: 370730 - DNA, 264 bp, Zea mays
aacattgcatatacaaactaatataatgtgttaaggcggaaggagcgctttaattgctaaatgttaaccttctagatcaagatgctgatatcacattgggagcctgcgtattttgagatgttgagaatgctagtcgcgatagccatcttggtgtttatctgaataaaaccagagcacaacatctagcaccctgtggcctggaacgcattattctatttcgcttaatggagctgctcgaagcaaggcatccttcttatttcttat

SEQ ID NO: 370731 - DNA, 397 bp, Zea mays
gcctttcgttctatccgatcgtgtgcgttctcgggcatgggggctctccaccggcgctccagagtttatcgagactctgcacgggcgctccagagttcatcggtactctccaccgggagctgcaagttacagctcggcgggctcgacgcctttggcgaggaggaaaccaggattgaggacagagagcgatcaggcgaagaagacggtgcgctgccgaccggagtggtggtggatcctattcgctaccaagaagacacgagatatgatcatgctcaacgccctacatgtatctatggagatcaaagctctggcatggtgtggatcataggagcagcctggaaaaaattcgcacagcgtgactctggggattgccgtgtatgttacttaggactagagc

SEQ ID NO: 370732 - DNA, 268 bp, Zea mays
aaaaaaatgccgggggttttacacattcagggaagaaggcggatcgaaatggcaaaacatgccccctaaaaaatacgctgagtttggggacaaaattcgtgagggggggggagacaggacaggacacaggagcatcatgggggggggggagcaaatatactggaggtttaatgattgtccggtataacacgtgtgccccaaaccgttccttgtgtacacgatgggatccgggcctcccaaaccccatattttagcagggtggcccttt

SEQ ID NO: 370733 - DNA, 318 bp, Zea mays
ttcactaaacacaatactaggtaagagtatgcctcgtagagttatatacacacgttggcaccatttgtcagaaacttgtttgcaccatttctgacacaccgacacctggcagtggagtcctaaaaagaagagacggaaccctcactcagaatggcctgaccggtacaaacaaagacgtttaagttcgcatatggttcacatacacacatgcattacacaggacaagaaaataagcatatgagaatcacactcagccttcttctgtttcttttactcctcgtgctcatgcataaccgaagaaaacgcagtggaaattga

SEQ ID NO: 370734 - DNA, 417 bp, Zea mays
gtctttcctgctcgtcgccgacatgctcgtcctcgcgctcggccgggcctcccagccgctggccgcgtacgaggcattcctcctcgccggcgccgactgcccgcgctaccgcccttcggccttctccgtgaacgccctgctcgccgccctcgtccgcgccgaccgggtcgacctcgccgaccgggcgttcagggcggcgctgcggcggcgcgtgtcgccggacttgttcacctttaacatcgtcatctccgggttctgcaagactgggcagctccgcaaggccggtgacgtcgccaagaacatcagtgcgtgggggggtggagcaaattgcaaaactgcactttgttggagtccactattcatcaaccgagatcatggcgcgctacaatcagggtacgcttgtggggaattgacccg

SEQ ID NO: 370735 - DNA, 212 bp, Zea mays
ctgtacaaactttctttgggggtttttttgaccaaacagggggccttttattttaaactgtaccatataaacagtgtactccatcgaaggcgggaaagggcgctttgcacagccattatgcacgccttaccatggggggagggcccacaacacagctattaactgttgtgccttaacaatgaaaacccattggaccaggccacaagaactgc

SEQ ID NO: 370736 - DNA, 372 bp, Zea mays
gtagacgatgtgtacctccgctccgcgcccgctccgggggggcagttcgtaaccgagtggggtccgtcccaaaccctagccgtcgcctgcgcggcgcgcgccgtcatcgcgccgctccccaactgcggcaacttgctcacccaccgcccacgcaaaccgtgctcgctccccacccctgaggaggaggccgccctcgccgcggaatccggcggctggggccccgccttcgtcctcgacacctggaccgatcccgaagacccatcatccaaaatcggctacggtctcactcgccgcaacggcgccaccgacgctgctgctgccaaggaaccggagaaggcgccgccaccgtgaccgcctggggccactgatgct

SEQ ID NO: 370737 - DNA, 234 bp, Zea mays
ttcttttttttttatttttttttcttttcttctgacggggaattttttaaaaaaatggggggatacacccgtctcgggcatgccaaaatataaattgcacctattttttgtcacgcgacagacattgaaacttcgacaaaaaaccagcaaaatgcaagatgtacagagctttcctgctacttatttcttttgtactcaaattgttttgaactggattggtcataaacctataca

SEQ ID NO: 370738 - DNA, 514 bp, Zea mays
ttcgtccgcccattctttcgttgtgcttcgacgaagaattgatgagatgggtaactgggcattcctggcttctgatagtacacatatttaggcaaagtcgactgctggtagtagtgaaagtgtacacacaaatatgcttggttggactcttgctttgtttattatgttgcaaatttatataactattgcacccttgccaacaaggaaagatgtggcatcatcacatatgaagccaaattaagcaggcagtcaccaaagtcagactatatctgcagtgctagactgttagtagcaaattgagccaacagtcaccaaagctagactacctctgaagtgcgaatagcaggcggccataacctaaccctattaagttgtatgcaccaaccagttcaacccaaaagcttaagctgatggagagaggtggcaattcacttgtattctaacattctccctcacatcgaggctctcttagaccgtctccagcagttcacccatacggttatcaaaacactgg

SEQ ID NO: 370739 - DNA, 368 bp, Zea mays
  unsure (1)..(368): unsure at all n locations
accggacctccaggcccgggtcaacccacccggcataagtaacaaaccccggacgggaagcncaaaaggggggggaaaaaaaaaacaaagggggacggaaccaccacccgaggacccaacaagccgggacaccgagcccgcccaacaggaccgccccccgccgcagaggcccgaacgagcccaccacgacaggccgaacaaggacaccgaaccggggcgagcggaggacacaggaaacgccaggacgctcacccaagaaaaacccagcccccggagcgcaaaggacgggaggaacacagcacagcagagacgacaacgccggaccccgaccaaccgcccacaaaccacagagccccggggagaacaac

SEQ ID NO: 370740 - DNA, 272 bp, Zea mays
tttcacttcgtaccacctcgcccacggatccacccggcgggtttcttttcgagaagcggccggaccatacatctaccggcgcccgacgcggacggcgagccgctactgctgctgccgccagaggaggaagggcaccagggccagcaactgcaagaagaggaggagcagcagcatgcccacggccgcttggggctgggccacatgccgatctggggggccgacacgtccggggagccgggagacgaggtcgactgcgtccgtgcgccgtgggg

SEQ ID NO: 370741 - DNA, 229 bp, Zea mays
aaaaaacccaaatctcccaaaaaattttaataaaaaggggcctccccggtttaaaacaaaataacctgtccgattcaccttatttccaggggaagggtccaacggcctggggtcccccccaacgagtggctaaacaatttttatccccaaaacgagcttaaaaaaacctatccgttttcccttaaacaagggaggggccctgggtcatttaccggggcaaaaaggcccc

SEQ ID NO: 370742 - DNA, 230 bp, Zea mays
ctaggtgactttggactacctcaccggcgtcaactacgaggactcctagatctccatcaacaggggaggacagcacgcccaagctccacaatttggctgacaagatggaggccctccgctcggataaccgcgacctgcaggagatgctcgatgccgcgggacacgagaaccggctcctgtgctctgagtcccggggcctataggctctcgtgtaccaggccccctaggag

SEQ ID NO: 370743 - DNA, 495 bp, Zea mays
ttttcatgcgtccggttatggttcacttacaaaaacccaaaagcttgagtggaacaacaggggcatgtccactatccatgcgatattcatcacagtggtgtcagtgtacctggttttcttctccaacctattctctgatgagctggatggactagtaacatatcggagttcaaatctatccaatttcactttgggggtaaaagctgtcaatatttcattcccattcaagaaagtctatgttatcatttactatccatgtgcccaaaccttgacttgtgggttttgtagggttttagctctagcctaccccaactttcttgggactaaaggctttgttgttttttcaagaaaaaaggctttgtcggtcgttgttattgcctcatatttactgaatttaaatttgtccaggtttctgttgggtatttcatcactgaccttgctatgatattatgggcttatccttctcttgtgggattgagtatgtccttcaccata

SEQ ID NO: 370744 - DNA, 470 bp, Zea mays
cggatgcgtttgcgcgcccgcagaccccgccgcagagggcgggttcgctctcgcagccgagcaggcctgccgcgcccgcagtcccgcagcgtcgccgcgctcgcgcttccccgcgacagccgccatgcgccctatctccgccgtgcctacgcctcctcccccgcccgcccgagacccgccaagtttcccttccttacacggcgagatccaccatcggcgcccccttccctggcgagccacagccgtccacgttcctggccaccggcgacctcccttctctagcccttagcggcgagccaacacctcctccccatggctgccctccagaccccagtcccgtccgcgcatccgctccctcatcagcgacgcaccgattctccccgacgtcgcccatggcgtggacagcgaccttcccaccctgcattctggctacaaaaggaagaatctcttaatcttcggtcacccaaaca

SEQ ID NO: 370745 - DNA, 441 bp, Zea mays
ttaatttttttttttttttttcgccgccaatcatcaaccggatggttaccattatatatgagacagcatctgacattagtctatcgaacaagaaacaagctaataacaatgtaactacattgtccattaggggggggggaacggttgaataataaggatgcaggattcgacttcaacgcaggctcaatgacgatcaattagggtgactgcatgtcactcgaagaatgaatcaatcaggatgctgcagagaaggaagcggaaggagaagaagacttcgtcgaaggcaacacatggtagcaagtggagatcgctgagcaaagccaaagtcggctcaacgtagcatttggcctggtcaattcacttcctggcgctcactaacttgggtcctctgaaggcatgataacatgagtaggtgagtcatcctcatccatctaacatact

SEQ ID NO: 370746 - DNA, 307 bp, Zea mays
cacccacccgccgcgcgagaaaagggggggggaacaaagaaagcagaggggggggacacaccccgaaaagcacagacacggacaacgggcgagcgcagagcccacccgggccagcggacgcccaaggacgaaccaccgacgaccgacgaactgacggcccacaagcacggacagggcgaacaagagaacccgagcgtgagccccacggccacaaaaaaagaacaggcgcaccccgcgcgagaacaaaggcaggacccggacgacaccaggccaaacctgggcacggggcgacgcacaacaacgaggg

SEQ ID NO: 370747 - DNA, 324 bp, Zea mays
  unsure (1)..(324): unsure at all n locations
tccattcctacccaccaaagaccgcnccccgccggcggggtcatttcaaaaaatgcggagcctaaccatgcaaggattacatctctgttccaaaaagaagggaccaagtctaataaaaaagatcactgtatttccattgtttctatgataggtctaatttggctccaccgttaccatgcggcgctagtctatcatgcgtgacaaagcttttaatgcgcttgcattggtagacatcgacataggtcaccatttggaaatgtgaacgattctacccgttaattaatttgctgcacaaatccgctaatgaacaaaggaccttgcgtg

SEQ ID NO: 370748 - DNA, 232 bp, Zea mays
caccaagcggggggggcagcacacaaagagggggggggggaaacccagggacaaagaccaggagaccaaaggcaacacaagcgaggagggcaagacccgagagcagggcgacaagcggtggaaacacgcgcggggcaagggcaacgcacccctcacaagctgaaaaaagagagcgagccgtctctggacgaacggcgcggaagcagaagcgatcaaggggggaggcaaagag

SEQ ID NO: 370749 - DNA, 333 bp, Zea mays
tcaccgccggtggtaaccacccgccaccagcaacaacagcccagcgggaggacaaagaagaaaagaagggggcccaccaacacacaacagccaagaagaaaaacccagcccgcgcacaggaaaaccaacgagagagcgaaacgggaaggacgcacccgccacaagaaacaagacaaccgaagcaagcacacgggcccccagggaaaaaaccccacgcagagaaccagagcaggcaagaaagagagccacaaaacagaacccagaaaaagggccaaaggacggtaaacccgccccaaccagccaggaaaagaagcacccaccaacaccccgagc

SEQ ID NO: 370750 - DNA, 408 bp, Zea mays
gaaggtagtaggcgacccaccggaagcggagacgagggggggggaccaacccagacgggcgcggcgacaccaacagcggcgcggcgagcaagaacgctaccgaccacggtggtggaggagaccgccgagggggagaaaaactcccaccgcaccggagacgcggcggccccaggcggagaggggcagaggaggggcggcggcggcagcagcaaccgcatccaggagcccaacaccaagaagccccacaacaactacggcaaccacgccaagaggtatatgcaacagcacgacgatgcagagctacccgcccccgggacggccatagcaacagctgcgaccgcggcagaaaccccgaagaacaatggacccgccgccgaaaagaaacaaaggacctccactgcagaaaaa

SEQ ID NO: 370751 - DNA, 387 bp, Zea mays
gacgtgcattcgcacacactggcgacgagcacgggcgggagggtgaccaccggcccgcagcggcgggacaggccaccggggcaggcccgggagcagaagctcacggacggccaagggaacagggagccatgtgcgagccagcaacgagagatggagcccatcaggagtagacgccaacaaaggcaccacgagccgcaggcacaaaagcaagcagcgagcacaaagccagtgaatgagcagggacaacggaaacagggggagcgacgatatgtgggaagacgccataagggtgacacaaaccggctcaaggagagcagcaaagcatcgtgaggacgcaagagtgggagccacacatggacactgaatgcagacacgagcacaaagata

SEQ ID NO: 370752 - DNA, 340 bp, Zea mays
  unsure (1)..(340): unsure at all n locations
atgatacccaccccgagacaacagagagcganggggggggcaagaataaagggaaggggcggcgcaaccccacgaaaaacaacagggcacgcgggggagggagagcaaaaacgcgccaggggccgcagaagcccgacgacggcgagagcgcacaggcgcacccggccgccacggacgacaaggacgggcacaagccgaacggcaacaaacaggacgggccgaccaaaacgacgcaggcgaacggaacagcagaggaaggcgcgaaccccaccccacggaagggagaccccgggccacaacgagaacccccagacggcgcacaagcaacgccgacacgcag

SEQ ID NO: 370753 - DNA, 251 bp, Zea mays
  unsure (1)..(251): unsure at all n locations
gaccggcccttaattcccgggttttctcacgcgcccgtccatacctacccccgaangccaanaccaccngaggggggacattttgaaggaaccagccggggcccccccgagagaaaccaccagnccacccaccaccgaaacacccccngcaangaaggaggaaacccaaagcccacgcccggccccggaggaccccccaaccacnagccccaaaccaggaangcccaccccaaccaggccgccggcagaag

SEQ ID NO: 370754 - DNA, 349 bp, Zea mays
ttcttttttgtttttacttttttttttttttttttttttggggtttttttttttttaaacgcagtgcttcccattgatcagatctgatttggtccgtttccgggtttctacggccgggtgacgaccccgacgcgctccgggggggggcgcattacacccttcaccaggtgggggatgcacacctggcccacgggcccgggcccggatccggggcggagccccgggccggacatgtacttgcgcacctgggcgcggatcatttcctgcatggggggaaccagctcgccgttgaacgcgtacgacgactgagacggatccccctgctgagggaaggcggttggagtaaact

SEQ ID NO: 370755 - DNA, 336 bp, Zea mays
aaatatgggggatatttattaaaaacttgggaaccgttttaaccggtacgtgagacttgtagctgtattacatagaaagtgtacatggattttaaagaaatgggaaaaacatattacatgatagataaagaaatctggacacaagacgaaacgagtgtacgtgtatacaacgctccggaccacaacacacccgttccccgggcgcacatgtacgggagccgctggagcacgtcgggaatgtggacgtacgtacggtacggtacgcaggcttgtagtcgggtcagtgcttgagcacgtcgggaatgtggacggggtagcggtggatgcaattggccc

SEQ ID NO: 370756 - DNA, 197 bp, Zea mays
  unsure (1)..(197): unsure at all n locations
tttnttttttttttttttttataagcaccaaacaccctgggtgattatacaaatgaaatgggggccaacaaaaccataactcaaaaaaacagagagaacatatacaggaatatagacactatgacacagaaggccttgtgatatgcgatgacattgacttggtgtgttcccaggctccaggttgagggacccaacgg

SEQ ID NO: 370757 - DNA, 313 bp, Zea mays
ttactcgccggcttccttctctctactcaacaccaaccaacggggggctttactccagaggggtgtttatggcacccctacagtcacagaagcttccgggctggcagaacgcgagccacgtgcgcttggctcgtctggcgtccggctgtcctggcaaggacgtccatcgcggcgccggagcctgtggagcctgtcaagccgcggccagcgcgctcccacgttccacaacggggccgtgctgcagggccgcataccggtgaccatgccttggtacggccgttcacgccggcgcagaatgccagggtcaccgact

SEQ ID NO: 370758 - DNA, 435 bp, Zea mays
gcgagtcgttacccgacggaggaggccaccccagagggggggggctaacaaaagggggcggggcgaaccagcagagcacgcgaaggggacagccaccgccccgccaggagacaagcgccgccgcccaaggaatcaagagacaagcgagcgccgacagtgagcaccgcacagaggcgcggactccccagccacgccagtcacagacacgcacaaccaccccaaacactgctggacgctgccagagtcgaccgccatgcaatccagaaccgggatggggagactacggacgaacaaccaagaacggtccgcacgggggcaaggacacagacaaaggaccacaccacgagaagccagagagggcagagaacactgagaggagacacaaccacgggatgcacaatggggggagcactaggtcaagcgacagcagcagcg

SEQ ID NO: 370759 - DNA, 334 bp, Zea mays
gcccggaactcccgggccgacctcacgcacccgcccattcattcgccaacccgacgcgcccacgcggccagggacgggaccaaagacacagggggggcggcacaaccgaggggcccacccccaagccagccagcacgagcagaagaaagcagcgcggagaagggacgcgcacccaaggcagcgccaaccgacaccgaagcaaaccacgcccagaagccaggaaggaacagaccggacggagagccaaacaaacgccggcgaggggggactccggggcgacaagcactggaaggaggctgcgatctcgcgggccaaggaccggcggagaagcacc

SEQ ID NO: 370760 - DNA, 381 bp, Zea mays
ggggcaaatccaaaacccctaagggatccagctttattgtcaattcatcaggtccggggttggtggatggttgcccatgcccctaagattctcgagctccggttgctgttgctcaattttacaatgcttcatgtagtacatatacacgagcatacaacaaatgacaacattacatgggcaagaaatatggcgcctctgtcaaattgaggtgccgacattttacgcaacactacatatactagagcactagacactagacgcaaaactgcaggagcttcacagcttaacccagaccggctccaagcaggacaacaggtccagtcgtccagaaacatattatttcctttatggccatacctccaatgatcaacacaaaagctg

SEQ ID NO: 370761 - DNA, 127 bp, Zea mays
gcgccagtcaatactgacccctccaaaccaggcccacccaggggggagaggtttaacagcacgggtggcttggacccaacactccctgatcgggttcgcaggcggcacagctcctcagctgagcagg

SEQ ID NO: 370762 - DNA, 535 bp, Zea mays
ttctttatttgttgaagaagtatgatcttttaaagttggtaatgaaagcaaagcaataggcatttcactggttcattagcatgtacagtgcaataatgctggtaaagaacggctcacagagatcatacttcttccacatttgttgaactccactttttacgtttacctatatgtttttacccattgcaggttattgatatgaaaagggggaaactagagccaaaggaaaaggtttgtgaagaacctgaaaaggcaattcattttacgaagttagacgagacaaatatcgcaacccaaaaggtttgggatcatgtattcaaccccttcagcaatttcttggctttgtacaggccagtgtgacacagggtgcatacagttagttcttaagaatttctagtgtattgtgacatcctgcattcccaggaaacatgttaactcatgttctctcagcgcggataaattgaagcatgtacaatggaggtgcttgaaaaacaccttttttttttcttcaccaaccattagcacctgattctta

SEQ ID NO: 370763 - DNA, 314 bp, Zea mays
ggggaccattataaaaaaattggcatttagcatgggtcaattgccgccgttaacaaagaaaaattagaacctgttaatctaggggggggggtaagggagcaaccaaattttggtgagacttcgggggaagattatttcgatgtaatggaacggaaaactatgatttggcataaacatggccctgcatatggggaaatcttttcactgaagtcccagagcccatgtagggcttcccttttataggtggagttggatttatgtcatcagcataaatctccacaagaaatgggctttctttttttatgcctgctaaa

SEQ ID NO: 370764 - DNA, 354 bp, Zea mays
  unsure (1)..(354): unsure at all n locations
ggggggcagattgacagtaaactgcaagtgctaaaaaacaaatttacagatctgtcatgtcttagtgatctctattcctgactcataacgagataaatggacaagcaagagcaattatcaggtccttgacttttgttgatctaagataacattcaagatccttccaggcacgtaaattttcttcctgatgccttttccatcaagatatttggagagtttctcatccgaggctgcaatttgaaaagcatcatcctctgagcacgctttgtcaacaaagattcctccaggtactcactttttgcctctggaaactgttcataggccaatgactgtnggatgtccgaggcgaaacca

SEQ ID NO: 370765 - DNA, 203 bp, Zea mays
ttgtacgcgtgggctcggacgctcagctcccgctcccactcccggacgacgacgatggccttggcgctgcaatggcccctccaactcccactccagctgcaggcgcggcctcccgccgttacctggggtcatcaccggcgcctgcaccgagtcctcgccgtttggcgctccccgcctgttcaagctcgctgttgtgccagcgc

SEQ ID NO: 370766 - DNA, 430 bp, Zea mays
aacaagaacaaatgagtgataaaaatttatcattccaccaatttgtagcatttagatgtgaggacctcataaatgttttctgcctagttattcagtgatacaataccttccagcaacaaccaaatttaggatataacacctaaaaagctaaaggaacagaaaaggtcaggcatcaagcagctggtacaactgaatgatcgtggaatacaatacctccataggaaaatatacatgtcgtgaatcaccgtaagtctgaaggcaaggccaagagacatacttcaatttttcttatcccagtccaagctgaaacaaaacaccatagactttacgctgaaactaaacaacgtagaatttagtattagcttagcacagaagagtaaatgagatttaatccatagaaaagctaagactttctttgacaaattgttag

SEQ ID NO: 370767 - DNA, 496 bp, Zea mays
gcgttcgttccacgctccccgctcggtctccatggaaaggtcctccacccgcggacctggcccccaccgcacccgtcctctatacgggggagaagtttccatccaaatatttggggcagacctcctcaccccgcatctcccttgccatccacggatctggccccgcccctgattcttctcgcgttaagggccagtactcggcgcgggcggcccagagcgtggcgctggtcgcgtaccggtgcctcagcggcagccccaagaatcggctggacatgtccgccgtcgtccaggcgctggagcccctgatcgacctggacgacgacgtgcctgtggcacccctaggccacgccaaccccgtcgtgctattcgtaacggccgccgcgaaggagaagagtgagcgagccccaaggaaggacgtcctcggccacccgcgcaagcccatgtgcgccaaggcgagccccaggagcactccagcgtcggcaccaaggaggagttc

SEQ ID NO: 370768 - DNA, 429 bp, Zea mays
tttctacgcgtccgcaacagattggaggcacgcatccaccagctccagctccaggctcattcccaacgccagtgactcaacggtggctctggcattcatgggcgtaaaggcagcggcgcccttgtgtgttaactttgtacactgaacaatatttcactctgtgtcgagcttaaacgtggctggctggtcctgcaagcgaggcagggccaatggccacgaattagagagattgtagaataggcatgcgtcctctgctatgtataactattcacttttttttgttttgttttgtttgtctgagtagttttaacttttcctttttcccgtttgcattgatcccccgaggcagaagaaagtgactttggaaagaaaaaaaaactggtgtttgcccaactgatggaaacagttttaggactgaaacagctgtgg

SEQ ID NO: 370769 - DNA, 232 bp, Zea mays
ccccccgtccaaggggatttttttaaatttgttgggcccgtccaactttattcacaaagggaagataaacagggaatacccccaccagggccctgcaacgttttttgaaccataaaaaaccttttggttgggggggctagcgcaaaaaacttaagcccatcaactgattatcccagctaaacgtaatccgttcatcaaatcagtcgttttcccaaacctggaataaaaccaa

SEQ ID NO: 370770 - DNA, 244 bp, Zea mays
gcgtgcgcccacgcgtactccaatgcgatctgagtgtcgctcttggtggtgatgtggacaggcgtggtgtcaccggtcgagtaccaggtggcacggaccattgcgtggacctgaatgggcaacccatgactactccagactgggccagctccaagcatgatcgtctgccaacgacactggttgtgttcacgctatgacaagcagtttgcacaaacgtgcgtggctgtgagcaaggcatgactac

SEQ ID NO: 370771 - DNA, 241 bp, Zea mays
gcgtgcgcccacgcgtccgaccacgcgtgggtcgtgtcgctcttgctgttgatgtggacatgcgtggtgtcaccggccgaggaccaggcgggccggaccattgggtgtacctgaatgggcaatccagactacgccgactgggccagctccaaccatagtcgtttgccagcgacactggtgtgttcacgcataacaagcacggtcacaacgggctggccgcgagcaaggcatactacacaaa

SEQ ID NO: 370772 - DNA, 207 bp, Zea mays
ctgcatgggaggaaacatataaaagggaaataactttttttctcgaacacgcaggagaactgcgcgtcattatattaagaggaaaaaggtcccaagtggactaagaaaacaaagtgcccgagaaggcagcaaacgagaagagggggacaaaaagaaaaaaaagaaagaaaccaaaataaaagaaagaaaaactagaaactagaaaca

SEQ ID NO: 370773 - DNA, 332 bp, Zea mays
agggatgcgaccttttgtggtgttttgtgactatgtatatataggggcacattgcatgagaacaatacagcgggcactttctgtatacattataggggcccgttaccactgatttacaacacggtatcagcactttgctcataagaagcattgagagaagttgaggttggaaaaaggaagaaatccccgacaacaagaagcgggggagcctgcactcatgaggacttgcttatccaaaataaaagagcgagaacaaagcatcgatggccatgaatgcccacgaggaccgcttcaacatatttcgttttggattcttcaacggtatgacacac

SEQ ID NO: 370774 - DNA, 436 bp, Zea mays
tttttcgagcagggcccgcgccgggaaccaatcgcgtccgagcgggcggccatgctgcgtccgagcgcgtctgcgtggagatccggccccccttgctgtcctcgccggggatgaccgcgctctggccgccgtggccgagcgctgtacgccgggggccagatgcgtcgtgccgccgcggcctgcgccggccgcgcccgcgccgctcatacgccgagcgcctgcgccatggtcacgggcgctggagcacgcctacccgtgtgcggcctggtctcacccgcccgcgtcggggctcacagcacccacgccgaggcggcgtttggccgtgtgggcctcacctcgtcgtggccgattaggtggagcgatgaaaatcgcatataggtaaaagcatcgtgaaatacttaccatcttgatcctctttctttttctctttttttca

SEQ ID NO: 370775 - DNA, 291 bp, Zea mays
aggtgttcacttcaattgcacattttacattaccagtatcattagctacgcggctacatttacataagcctgaacctgcataggcggctccgacatgagtgtgaactgaagaaaagataagtggaggcaagttttgctccacaaatgcgagaggaccgctcatatatctggaatctggatggccttacttaaatttacactaaagggcactggtatcaattccacttcgacatgtctggccaaagtagatgttgcaaaatcaatcaccaagcgaccgcagcccctgataca

SEQ ID NO: 370776 - DNA, 327 bp, Zea mays
gtctttttcatcttggtaaggtcaggcacaaatacctgcttgtgatggctgagatcgactcaccagacactgactgtggacatcaatgatgatggcacaaacgagatggctaccactgatttccatggacatgtggcagcatgcactgcagagggagaagaaacctgtgaagagcctctaaagagcctgattgcacacacacctactggtggagacgccaatgcagatggccacactgacggtgtggtcccaactgtgtcaggaaacatctatgatcttagtggaaacgatgggacgaaaatccaaccttggccatatagaacacat

SEQ ID NO: 370777 - DNA, 247 bp, Zea mays
acaaaaatagtcctgggtttattttttgggaacataggcgggatcctttcaattcatgagaagaagggtaaacaaccgttacataaccacagccaccaccatgagcaaccggggcttttgataggggtttaacgtcgaccacagactacaaaccaatcacgggggtttttgaatgttccgacaagcctggcgaaccaaaaacacaaggggggggggggttttttttaacgcttttttattgggcccc

SEQ ID NO: 370778 - DNA, 402 bp, Zea mays
gaatataaagaacgttgttggagacagtcttagaacaaaagccaaaaaacaaatacaccttagagcatctccagtctagcaacagccctcgaaatatagctctctatttttcttttgagagcccctcctatttttaagagtctgttttttttcatctcctccaataagagccctcagatttatcccaagagacaatgacagctatcatttctttctcctcggtctcatcagctgagctgccatccgaatctcggacattgtggcggtagagagatgagccaagatgctctttacactacctgatctatctctttagtggctaactaaacaggctacgcacacaagacagttgatcaactacaagaaaataataaaatatgctccacaaccaactacgagatt

SEQ ID NO: 370779 - DNA, 273 bp, Zea mays
gggaaaacaaacaggggcccgggctttaacgcagaagtttacaattcaaaaaccccgggtaaaccccgaacattttaggggggtatggggggctactgaaaattcgactataggtggcaatacattttttagcaaagggaaactttgacccacatttgggggccccccagttacccggaactggttatcaaagacttccttatggcctccacaatcgcagggggctgccctttttttaggttgaagaccctttcgatgactgaaagctcgggg

SEQ ID NO: 370780 - DNA, 293 bp, Zea mays
ttgtccacgcggccgaacaaagccgagcaggccgcggcccccagacgcagccaccccgctgctcgaaggagagccaaaaccagagcgccgccgcgagggccgaccctgacgcggaacagccggcgccgacggaacacgagcgggggcgagaccgcgacaagcggcagacccgcccaggaaaccccgaggaggccacaaaggagcccagccccggccagcgagaccaactggggagccccgcggaggaacagggagggggcgccggcgggcaaggcagggagccccaaaaggac

SEQ ID NO: 370781 - DNA, 285 bp, Zea mays
tcttttttttttttttttttttttttgagatttttaattctttttttttggggcaatcgaaccagataccaaaaagggtttgcttcacacttcctttgttcttatccacatgcggggggcggatcaccggagtttccgttgccccttccagggaaactcaaaagaaagcggtaccggctgctgcggaggccagtcccttgggaaagcttctatggtagagtaacatttacagtgtttcttaaacctggacatatattacagacagttgggtcaagtttgaaaaac

SEQ ID NO: 370782 - DNA, 336 bp, Zea mays
agcgctcattcagagcaagcccaagagcccaaagaacagacctagaccgacagacggcaaccgaagacaggagccaccgcacggggccgggcaacgtcactcacacacccagcaccggagcacgacaccatcgagccctggccataactgccgggcacgtgcacctaccggacgcaccaccgcggaaaggaaccccgagaaccagcgccatcggcacgaccaggcctgaccagggatggggcgtagaggggagccctactacgtcgaaacggcccccccgggggacgtgaacaagaacacagagggggtcctgtaccccggcgtctggaccaccta

SEQ ID NO: 370783 - DNA, 248 bp, Zea mays
gggggggcactaaaaacccccatttcaccatttttttggagagcaagccctgtggccctacaaacactatggacatttttattgatgggataacaaaccttttggggactcatgaaaatttgcatccatatcatatcctacaagatgcattcgccatgcaggggcctgggcgtccttcctcctggggggggtccaaagactccaaagtccccggtggcctacatatcttggcagggggaatccttttt

SEQ ID NO: 370784 - DNA, 434 bp, Zea mays
acctgagtcagacacccgccggacccgacccctggggggggcacacttgcggccttcccctcgccgtcgcgctggaagccggtgacgccctgtcacgcgctcctgtccacgctcccgccggcgctcccttccctcttgcctggcctctgcctcctctcgcgccgactcaccccgcactccgtcggcgacgccctcctgtgcgacgcgctgccgcccgcgacccgcatccgcctcttgctcttatccgcgctcaccccgcgcatccgctcccccctcctgcactcccgcgccgacgtacccatcctccttgccaccgacgcggatgccgccatgtacgacgccatcgccgacgcccaagccgccgggcttcaaccccccaccggcgaatttaaggcgctcatatttgcccacgccttcggcggccgggaccaaga

SEQ ID NO: 370785 - DNA, 224 bp, Zea mays
aactttgatgcgagggggccagaccaaagaagcagggaaaaggaaacatcagccacatacgagccaaaaaggaacaccgaaacaagggtcaccgagagaccagaagaaaatgcaacggatcccgatgcgcatatcccacaagacacagaaatacaccgaaaagaaaggggaaaactagccaacacccaaaacggagggcccccagacaagctcattggggaaaa

SEQ ID NO: 370786 - DNA, 400 bp, Zea mays
aagggaaagcagaaacccccgcaggaaccgcgccggaagaacagggaagacccacacggacgttttgcgaccggacggacaaaaagggacagaaggacactgaggaggatgaggagcaagagaggaagacaccagcagccaaaagcgaaccccccagaaacagacaacagagccaacgaagcgcaaacgacaagggcaagaccagcaacaccaccaagacgaaacagcgaggcaccgcacccaagaaaaccgacggaaaacgaaaccagaggagacccaggggggagaaaaagcacccaccaacaggacaaagcaggaagccaagaggaacgaacaggacagaaaaaacagcaaaacaaagcggaagaaaacaaaaagagcaaaggcacccgagaaaaac

SEQ ID NO: 370787 - DNA, 256 bp, Zea mays
ggaacaaaaccccctttggtttatgggcatccttaaatatggcttaacagcctccgggaattttattttttttgggggctccaaacctttcattcagggaaaaagagaaaatgtgggttttatccctgggggggacaggaaactgggggatcccccttccactgaaaagaaaaatgggaaaaacaaaacaaaattcggtgctccatgtaaactgggctggcccataaaacaaattctggctggggggctttactaa

SEQ ID NO: 370788 - DNA, 204 bp, Zea mays
aagccaaaaaaaaaggctagtttcactggtttttcatgaggccaaaacaaaacgggcggcaacccccctcaaaacctggatcccaaaaccctgggccccctcattaaactttttaaaacagggggcctttttaagctaaggctaacccccaaaatgaactctggtcgaagggctcccttgacactaggaaaaaactttgccagg

SEQ ID NO: 370789 - DNA, 279 bp, Zea mays
caaataagtaaaatcttactacgggtctacaccggcgaagatgccattgccgctcagagttcaataaagacatttaaaaatagtctctgtcctcaagggtgctgattggtcagatggtgtaaaaactaacgcaaaacctgcctaagacagctggccgtccaggccagggctgcatccaaacatgtcctaaaagactgaaaaacagatcatccaactgctcatcagtcctcaagtccttttactccttagtgaccctgccctcgaagtagttcatacatg

SEQ ID NO: 370790 - DNA, 277 bp, Zea mays
ggaaaacaattactgcaccaggccgttttaaaaacatgccttcaaaaatgttgcagaccgtccattgggggggatacattgtttacaagtcgcctccaacggggggaataatttccgaattatgggtaaccaaaagtttgggaaagggaaaaatttttaccctagtctacaagatttcccctccaaaaagacaagactttgggtgccaaacagcttttcctgcttcagcttatattctgatgggggacatgggggccggaacccaagggcccccaaa

SEQ ID NO: 370791 - DNA, 310 bp, Zea mays
ggtgtcagcaagagaatgcttatcttccaaaccgaaataaaaagaaacaaattttctttctgtgtaccgggactccacttgcagatacaggagaatatacaaacaacagttgcgtgaagaagaaaacaagatgaggggaggttctgaaacctctgtccatgcatcaaatcatgatcaccacgaggaggaagcggggagaagcatcaggcggggagagctgccacgctgcccctgcggccgacgacgcgtccagccccgggggcaaagctgcggctcctggggaacacggcggcggaggccgcggaggagg

SEQ ID NO: 370792 - DNA, 247 bp, Zea mays
gggcccccccccacaagggaggaaggcataaaaaacggtttatgctcaaaaaaagggaaattttggggccgcccattggaaatttgaaactggggcgccccccccaggggaaagggggataaacacattggaaattgggaccttacatatagacaagcagggggaaaaaaaaaaaaacgggaaacccccggggggtgactggggaacacgaagattcttttctgccccagggggataaacggggaaa

SEQ ID NO: 370793 - DNA, 389 bp, Zea mays
acaatacagatttcaaacacatgggtatatgttcatatcacaaattcacacaagtccaaatacataagttcacaagaattggagattgtaccagtagtaatacaacacacaggaattgaagatgcatgtgtccatcaatccctcaagactatgttcctaactagacagtatccacctatcactaagagaaacatgtcaagaatggacaccctagctctaggtgatgtctgacttccaaagacgacgtcctttattcactccagagcttagtggtctcatgttcgctcaaagtcgctgctgtagcatgaataaagttacacgactgaaatgagaagcaattgattagggatcttctaactgtactccaacattaaacacctggataaatt

SEQ ID NO: 370794 - DNA, 267 bp, Zea mays
tttttttttttttttttttttttttttttttttttttttgggtttttttttttttttttttttttttttttttttttttttttttttttccccacccaaaacaaggattacggggcaacattttccccccaggcgaaaacaaatggaggggcccattaacaaaaaaacggttgcctgggggcctggccccaaaaccggactggtttttaaaacaggctaacagggaaaacgagggaccataagggcaaaaacatggcacattttggg

SEQ ID NO: 370795 - DNA, 481 bp, Zea mays
ccacagaaaacatgattgacttcactcaattattaccacgccagagagaatatgtgcaacaaaatttagctcagggactatcagattccctaggcaaacatcaccacaaagcacctatgctaatcgcaaaagaatcatcgaccatctaactatttagcccaccattcaagctgacaattatagatagcgaaggaactcatccaaaattaaattcaactaggagactataagcacaacgtcgagctacaatttagcccatgcgtcgagcacctaatgaacgacacctcgggacttcgctttcatatttaaccaaacctccaaggattactatcctcaaaagcacacaataacataaacacaattagcatctaattaattcatgtcggttacaggtactggtgatgaataacataaggagaacaactattccttaccggggtaaacgacgacgtgatcgggactgcatagatcgagatggagc

SEQ ID NO: 370796 - DNA, 168 bp, Zea mays
gcctcactttctcccacgcgtgcgggaggccaggggcgttttcaccgggcgcaggctcgacgacaacaccgaccgaacttgtccgaaacgaagactagctgctgcacaggcctggatgctctgagaccagaacgacacccacgacgcgtgcaccgtggccaaggatgt

SEQ ID NO: 370797 - DNA, 399 bp, Zea mays
gtcatactgcaatgcctgcatttgatttttttttacaaatcatagtcatacactttttaggcaaggtgttactggaggaaagcaacataaacatgaccctgaaagaagaactagagaatcaagagcagtccctgcccctgatgcaaatgcagaattagtatcatcattgcaggtaattctccacttgttgacagttgacacttcctttatctttagctttggagatgcacatgtactacttgtttttttatcatttcaaaccatacataacctgtgttgcttgctgtatgaatatctttgacttcagaaaaggcaagcccaagctaataccaggagcaggagcgagatgttcaatccctgcaaagaagactccgcgtccggattccgaatcgaaccacc

SEQ ID NO: 370798 - DNA, 350 bp, Zea mays
aggggataagcaaatgcattatcctgaaaatggcagttataagtggttagacgatggcccttcccagttaaatgatgatatctcaagtgttaacccaacttgttagaaaaggcaaaggattgaagctatattccatgagtatgcatattctgataatcttgtagtgctggaagatgtgccaactgaaggttattttgctcacgaacaagagactgagctgattggtccagaagttgaaataccagaatcttgcttcagggcttcgataagccaaatggaatgcagtcatccaatgaccttgcacacacttaacaggacatcagataaatgcttccgttcttggaatcagc

SEQ ID NO: 370799 - DNA, 304 bp, Zea mays
ctcgctcactcttccggcctagatctgattgggggggctttttttcgcgggggcgaaggggatggcgaggaagaaccaggaggcatgcgttcgttcaagatgctgcaacctcctgatggcgctggccttctcggcgaccccgctgacgctgtatgtgccgccggcgcgcagcctcagcctcttcgtggaggccatggaggccgtctgccgcgactgcgggccctactcccacggcgctgtctgccgtttccgcctcggcctattccgcgtcctcgccggcctagcattgcgcccttccgcttag

SEQ ID NO: 370800 - DNA, 321 bp, Zea mays
ctccgcgtccgcggacgcgtgggcgccagtgtcattggtcttcctaatgttggcaagtcaaacctcttcaacgccattgttgtgcgatgctttgaggatgacgatatagttcatgtcaatggaagggtcgagcccggatcagacattgatgtcattaacctagagctgatattttcagatctttaacaggtaatttggtcaacggatttcactttgtcttgctatcacgcatttcaaaagaaacttctttgctacctgtgtaataaccgttgatagagaagaggttagataagcttaacaagagccgatcacaagtaaaag

SEQ ID NO: 370801 - DNA, 162 bp, Zea mays
aacggaaatctcaggaaattctttggttctacaggggcaaaagagcaaccggctaaaactaccaaggactacatgccgtggctccacaaaatgggactctaaaaaaaccgaacgaccaaaaaaggctaaccgagctagccccctgcatcaacacttaacaac

SEQ ID NO: 370802 - DNA, 406 bp, Zea mays
tccttttttttctcacggaacgatccagacgcgctagccgtaggccgcgcgtagctggcggtgtgcgctgccgctgcgccatgaagaccacttcgtcgcacgggctccacgccgcgtcggcgtcgctctgcacgccgtacctactcctcctaccgctcggcctcctcgccgtgctgctggcgctcccgagcctcggctcctcttacgcgcgctcccaaggcctcggcgtgctctgccgcagcgcggcggcaggcaccgacgttggcggcggcggtgactactcctcctccgtcgcgtcgggcgccggcgacgagaagaaggcccgggtcgccgagacaccgtggccggggctcagcctgctggtgggcgtgctgaccgtgccgggccggcgggagcggcgggacat

SEQ ID NO: 370803 - DNA, 142 bp, Zea mays
ggcaggcgaccttctttttataacctggtttgatctttctctacatgttcctctgctggattacatgatctgatagcaagggagagaaaaaaaatcttttgcatgcatgatcgatgatcggtggcgagaacccacgcgtccg

SEQ ID NO: 370804 - DNA, 315 bp, Zea mays
gaacccgccgggacccacgacgccggcgtccttgcccagcgaagcagccaaccagaagagcaggctgttacagagagcgcccgcgacacagaggacgggcggccccggccgggctgcactgcagccggccgccgccaagaagagcgtgcacccgggcccggagagccaggcggacgcccaatacagacacggggggaggcacaccccgacgccgacgccggccacccccaccccgaagcccgagaagccccccaccaaagggccaaagccggacaagcccccccaggagcacaagccccccaaggaggacgggcc

SEQ ID NO: 370805 - DNA, 379 bp, Zea mays
ccctcgagtgcgggatccactatcgtgccgtgcatcccgtttcgtttcgcctcggcctccactccagggaccggagaagggcgcctacagcgaatgcgactcccacaacgaatgcgtgctcccgcgacggcttcggccaccccccaggatacacagcaggattgaaggagggacgtgaaggtggtcatcattggtataccgattagattactggagatggagtaggtggtaaagaaacaccgttggagacactttgggagctaggtctgcatcaagggccaccttatggaggatgctttgcgcctcatgtaccggcacatgaaccggaacgcgatgctgattgctatgttcccgtgggtgtacaagtgggttgaccagg

SEQ ID NO: 370806 - DNA, 272 bp, Zea mays
acaaataattacatattaatgaatgatatatattgctaatataaatagcttccataaaaagaacggtactatagttgcatgcgcaatcgagttactgcactagtgtgctgatgtagatgtgttgcacttcaagaaagaattttagtagggctctaaaattataagatatataaaaatagatttgacctagacatatacataataagagaaatcagcaccatggcccgtatcttgtaaatatgaattgcaaacacaaaggaagaacacacaaa

SEQ ID NO: 370807 - DNA, 320 bp, Zea mays
cctcctcgtgtggccgcgcgcacccgcacggggggcgaatccaccgtttggcggaatggccccacagccaggcggcagggcacctaggcctgccaagaagaagacggaggagaggacacaccctctgttggagaagaggccgacgcaagaaggcagcgggggcgcgttggcgcccaagaaggacctgacccggggggaccagggggccagggaagagcgagaacaggcgccagcaccgtatgccttaagcagcgccttaagggaccaccggcgcgctgattccagggccagaatgggcggagatatatccttacaaacct

SEQ ID NO: 370808 - DNA, 304 bp, Zea mays
ggggagaaaaccaagattttttttggtaaacattacagacggggtgaccttgcgaattgttaatacaataaagaaaactgaatgttacagtattgaaagtcagatatacaccaaaagcatcctcaggtcatcctcaaacctgttttttttgcacataaataaatatctcaaaagagttacaaggattaaacttgtaagtctacttcagttttgacttggcagaacttatcagtggcttagcgatagaaacaggagtactacttcttgctgtcttctttacattgtaagttatcgacatgaatgc

SEQ ID NO: 370809 - DNA, 281 bp, Zea mays
ccctcgcgtccgggcagacgtgcctggaccaaagcagattttagccatgcaatggacgctttgatcatggggtggatgatctggaacagccacagaattacatcgaatgggatgctcatgcgcgtaaacacatctatgctgaatatgctgatattgtccaagcacctctcgtgaccaatgaatggatgcgcctgaacgaaagcgtgccccacagatttgagatcaggagccctggtgctggtgacaaggtgacctatgaggacaggttcacgccttgtggt

SEQ ID NO: 370810 - DNA, 335 bp, Zea mays
gcctcgatcgcgagcggccctgctctcttggggcgcgggtttgtgtataggcgcgggggggaaaaaaagagatatatgcgcataacactccacagactctcaaaaaagggtgagcaccggatcacatcggcgtctcatatgtgaagactcgacacagataggaagaggagatgtgtttacacggagagggagaggggagagatatagcggcgatactctatgaaaaaaacccctctcatattttttgtgtgtgatatgtggccacaaagggtgtgcgcaaaaattttccctgcgacaatacgtgtgacatgtggtgagacacttgtgcacagggc

SEQ ID NO: 370811 - DNA, 397 bp, Zea mays
ctcacgcgtccgcccacgcgtccggcggatgctgctggctgtggtgcgggtggggaggatgcggagggcttggttggcggcggcaccggctgcggctgcgatggcgtctaggcgggtaagcaggatggcggcgactccgttgaggctgaggttggctaagagcaggtgcaggaggatgcatctgctggagaggaggaggaacaagacgtcgatcaggatgtggaagaaatgcacgaagatgggggcactgctggtgcttcaaatgaccttgggcatgagacggggaccagtgtggaacccgagagaagccaagacatcgtattcgaaccggccaaccagttacacgagaacgcgcagaacatacatgccattcctaaagaaaaagcctccccagaat

SEQ ID NO: 370812 - DNA, 357 bp, Zea mays
  unsure (1)..(357): unsure at all n locations
ctnctccatggcaggaccgccagagctgaggcggaggctgtttgtgacgtttcaaccaatatttccgctgggagaggaagcctggggaaggtagagctgagcacacagatctctaataatctggcagggagcggaagtgacgctgcagcagtggttcgactctggaaatagaagcactgtaaagactgatcctgtagatgctgttggggcaaggagcaggggggcttctggaaacggtacaggtaccatggttgacctgaacaaaggttcagatgcccactcaagaaatccaaacggagatgcaagccatcaatcagatgtaagaaccggtttcgagaagagaaaaggcgcaaaggt

SEQ ID NO: 370813 - DNA, 231 bp, Zea mays
tcctgcatgactagactggcaagtgggacacgggactgtttttgcttattgacctgggttttctttctaaaaacgagtttgaggagattttgacccagttgactaaaacgaagggattcggcggtacacatgacgaaaccagcttggatgatctcaggctatatgcccaagctgtgcttgccatgcattaatcggtttgtgcatgtgaagctaactccagctactattcct

SEQ ID NO: 370814 - DNA, 277 bp, Zea mays
actccaaataatttttcattgattgtttcttaaaaggtttcctttttagcatttccggcatgaagtcagcataaaaaatgactccaaccccaagaatgatatctgttgtacattaaagtttgactcgaagaccaattagatgaaaccaaaggaattgtgtagaacctcaaaggaagagagcagggtccaaagatggaaaggacttgtgctgatacaggatttgtccataccttgagaaccagaaaatatctggtcctgcgcatgatgtcttgagccg

SEQ ID NO: 370815 - DNA, 300 bp, Zea mays
gcctgcatgcgttgtgaagctgttcgctgggggccacatgatgaggcacaggggctccgtcacggcccgcaaggatcagacggtcaagctttacataatacatagatgcggcgtcatgctcctactctggcacgactaaccaaccgttgggacccacgccatggggaagcttcatccaagggcgcacgagcttcgatccatcgagtcttctactgccgactcataagatgccgaagatctaggggggctagggctggtgccacaaagatcggccgctgctgtacatagagggccagacta

SEQ ID NO: 370816 - DNA, 274 bp, Zea mays
cacgcgtccgtgagattgggtcatcggggagcgtgcgcgagactggttttgtgagggacgggacggactgtagggtggagagagagagagagagagtggccggccgctttagggacggggaggagggagggatgctgggacacgtgcgcaacgcattggaggaagaagagtgtggatggagtagcgagcgccgagcgagcatgacatttgtgtgagggagtgggtgggctcgcggtggcagccatgtcttcttctactccttctcgcgtatcgt

SEQ ID NO: 370817 - DNA, 336 bp, Zea mays
cgcgctcacgcctccgcccacgcgtccgcccacgcgcgcggttggtttggtgtcaggagatgagctcgccactcctagaaaagggaatacatgtgccgcactgacgcaggaagagaagccagccgcggcgggcttgcccccgaccagggggcggcgatcgtgaaggccaccggctcccggagaggcatctggacaaaacgggccggcgcgactgctcttgagagcacctgacaagctctgggaggagctgcatttcctggacgagacgatcacgctgacaccagaggagctttcgagggcgccggctgaaggcctaggcaggagcagccacgggac

SEQ ID NO: 370818 - DNA, 440 bp, Zea mays
agccataaataatcactagatacagtcgccttttacaacgtttggaattacatcccccaatcagtggcagaaataatttgaattttcattccctacgcagttggacaaatgtctcatgcaacaaaataacatgatgaaaaatgaagtatgaaatgagcttttctgacagtttctaaggtatccttcctccccctggaccacataaagctaacagcccaagcatcaatcatgactgcttcacagcttgggcactatggggattcacatgataattccactgaagaagcatccatatgattgacgttcctatgtaaataaacgggcagtgtcgattagagtggctaaacaaataaagaacacaaatggagcattattacaggtaatgcatgcaacaagcacgctgtcagtgcttctattttgcaagattgaaagctggaacc

SEQ ID NO: 370819 - DNA, 401 bp, Zea mays
tgctgacgcgtgggccagtgtggattttgtgttagaggataggttggaaaccacacgacagcaatatctgaatttcttatttgatgatgctcagatacataattttttgactgagccttgatattctcagaaggtgatgtcagtcttttcctaagagaagtaagtagtgttactccatccttactgctcggatgtcggatcattgactaccactgaggtcagcactggcattttttttaacgtagagctctgcagttcttacgctgacaccttataagtgaaagtgcaatatagaggccttgtgactatcttttcgtcagcaagagaacaacatcgatcttgggagttcttagttgcccctgtgtttcggaagtgttgtgtcagattattatatacccatt

SEQ ID NO: 370820 - DNA, 427 bp, Zea mays
tgatcacgcggcggtcgctctgctctcccccacgccccactcacgcgttcctttgccacgccaccggacgaaccaccctcgcctgcgccatggccggcggcgacgccaaggaccacgccgccgaggccccgccgccgcgccccgtcgaccccttcctgcgcttcctcatcccggcccccaagccgcgcccgaccgcgctcacgcgcactgagccgccgtaccgcctcatcgcgccgcgggccccggtcccggcgctgctgcgccacgacgagcgcctctttattgttccgcccacgcgccccgactggcttccgctttcagcccttggccgtccgtgccaccgacgtcacccgcttattccttccggcgaaaccaattctcccccttgccgggcgcgggtggtacgcccgtgcccgacgacgaacga

SEQ ID NO: 370821 - DNA, 414 bp, Zea mays
ccgccgacgccggtggccgcggggggtttttttagccagcgtgccgtctcctgcagctagagggggtccgcttcctccttgactgccccatagacctctaccctctcgcggacttcgcgccggtgcccttccccgactacccatgaggacttatacgaccggcgccaagatactggttgccagcgcacgctaaagatggcggcgaggacgctgggctcgtggtttaagctacgatgatgctcggacttccacttctaaccgggctacccggatgcaccaacacgacggtatatgcgacatagggagcaccaaggacctggaagccaatgattgacgatctggtagagattcttcgagagtttgtgaggttcttatcggccaaatacggttgcataacccatgttgcagggaggg

SEQ ID NO: 370822 - DNA, 380 bp, Zea mays
atagtaaagattagaatattccttaatgttttgctgagatctcgaaaagtctgcactccccacgaatcctcgttggagcacccactcccccttagtttgagcaaagaccaagtgctccatatgggttggttcttcgttgctccggcacggtgaaccgcttgcaaccatgtacaagctcgagttgggtcacccacaagatctttggactttgggtgatcaacgtatccccaatcaccgtctagctatctagatgataccgaccaccaaaagtaacaagcgctaactctcacttgacctaatcaagtctaatgagggtggtggagtggatacagacaagttactcgtaatgcactaatgaggctattaattacaagattatt

SEQ ID NO: 370823 - DNA, 241 bp, Zea mays
caaacaaagaaatatgattgggcatgatgcaacacccatgacaacttagtttttgtttatacgtaatacggacaccactacaccgttttgaaattgggaagaaggacctaaacaggaagagaaaagagagtaacgcctgaatttggtgagtaaaaagaataaaaaatctaccccaaattcacggcgttacaatctcacatcctgggacttgatccgatcacccaatcttcaagttcattca

SEQ ID NO: 370824 - DNA, 416 bp, Zea mays
gatggctacctcgccggtgtgggggccattgggcgagccctggcgggcggtctgttacaccgtgccttgcgccctgctctgaccaggctcgcccaaggggcgacctcggcgaatcgcgcctttgcttgacgccggtgatggccgacgatgggccctgcgtccttccccgggcgtgtgacctaccctcgacgcccctattttttgcctagctccggcgaccatcgggtcctacctcttccattcgcacagcagctgctctggtggtcggccaccccagcggcccactgctgctcttgtttcgctgggctttgtctcgccaacgtcggtcgctgctaccaactaacggtcggggacgcccgatctgtgaccccgacaattcctacataatctggggccttgtgtttgccccccaaaaa

SEQ ID NO: 370825 - DNA, 110 bp, Zea mays
ccacccacgcccgggtgagcgcgtctgttctcattagctgctaggtcatcgagcttctgatcaggctaaccctgcctcgacaccactaccgaggcagagacgacatggcc

SEQ ID NO: 370826 - DNA, 425 bp, Zea mays
cttgcggctaaattgccttgagacgcgcgcagcactgcagcagcacagggggggagaaggggcgggcgctcgagtgaacctccactacactactccgcgtctccctcccctggctacgaggctataataacgagcgcggaagacggccggcggcgcacgcagccatgtccgcgcacctccgcctactctcggccgcccacgtctccgcgcccacacccacctccctccaccggctccgtggccctcctccttctcctcccgcggcccgcctccggctgctgctgcgaccgccgcggctcggggggagccaggcgcgcttcgccggcgccgtccgctgctccggctcggcgtcggcgccggcggtcgcgcgggttggcgaggacagcgactcggcggcgggcatatgggagcaggtgcgggatatc

SEQ ID NO: 370827 - DNA, 349 bp, Zea mays
ggtgcagctgggcgtcgcagcgtgaaggagagaagtgctagacgggcgagcagccaggcgcgtcacgtgtgacacaggcaggtagaccttaacattgctgttgtccaccacatcagcgctatcaagccatcgatgcttactgctgactattgtcggttcatggcagtttcatgggctcggctagaggctcgtggctacgtgactgccactgaaccaactgtattgtaggcgtaaggggagagagctgatggatctagggtctggagcaccacagcagatagcgcatatgacgctttctgatctattgactggcacaccgtgggtgccgggggggttgtgaaacctgggc

SEQ ID NO: 370828 - DNA, 420 bp, Zea mays
gtccatggaatcgagctcgctgctgtttttatttccaatctcgcccaacatcacaaacagactgtaggggcggatcagctgttggtgcactggggccgcgcgtgagaggaggctgcgggcgccagccagcgcgagctctgcacaggaggagacgggaacattcctgttgtccaccacaacagcgctatctaatcatcgatgcttactgctgacttttgtcggttcatggcatcttcatgtgctaagcgagaggatcgtggctacctagactgactctgaaccaacattattgttggctgaaggggagagagctgttggttcgagggtttggagcacctcagcagttagcgcctatgaggctttctgatcttatactgggcacacctggggagccttgtgggtttgcaaatctgggctggg

SEQ ID NO: 370829 - DNA, 415 bp, Zea mays
ttccggcgttcctacctcctcccgcgtgcccatctcctcccaatgcgggtcctcccctcgcttggggatcgacacaggctacgcgtgggttgcgtcgattgatgcgagggaggcaatggcggtttcttctgctccggagaagaagaggaagtggctactcagctacaggaaggtgatcgacaagtacctgcgggaggcgaggaagattcttgcggcggccccagagggtggcggaggcggcgatgcggcggcggcactcggcctggtcgacgcggcgctggagctgtcgccgcggatggaggccgccctggagctgcgggcgcgcgcgctcctcgcgctgtgacgctacatggaggtggcggagatgctccgggattacattcccagctgcggcaagtctgctcttgggaggaca

SEQ ID NO: 370830 - DNA, 457 bp, Zea mays
gctgatagtctgccgccagtgccctgggccgatttgctccgccgagaacaacatggggagaagctataatcacagtccatcgccaccaagaggctacaggagaagaactcgcagcccaagtcctcgtggtcggtatggaggccgtgatactgatagggacctcccaactagtcttttggtgaggaatcttcgtcgggattgtaggcctgatgaccttcgtagaccatttggaaaatttggccccgttaaagacatatatctgccaaaggattactacactcggtaagggaccttgacttaattattgtgagtgggtgtttgcccatggacacctatgtgcaacttggagatctctccctgaactttatagtacactaaagtatatttgctccagaacaggattatgattgttgttgcttgctttaacatattatagcatgttctttacagattttta

SEQ ID NO: 370831 - DNA, 299 bp, Zea mays
ctggccacatggacagggactgggtgggagttttttgcggcagatacggcggtggctcatagcggcggtggaggcggttgctacaactgccgccaggccggactcatggccagggactgcccaagcggtggcggttgtggcggagggaggttcggcggtggcgggggtggaggcaaccgctactgctacaactgtagcgaggccggtcgcatcctctcgcactgttccacatgaggtgggtccgagtccggacaggcaggccgatctgatcgaatcgcttcacctcatgtttgtctgat

SEQ ID NO: 370832 - DNA, 253 bp, Zea mays
cgacccgcacccggaccgaatcaggaagctactacgatgattgcactgctcttcagggcgtaatgtcaactctaacgctgatgcaggcggaacgggctatgggcttgggaatctcctcctggagaccctgaatggcgcctataccaagaagaacaagctcgggttcaccatgcgcccatccggtcacgtgttaacatccaaaaatgaaccctacagcagatgacctgacacccactttgtacgggaaaacact

SEQ ID NO: 370833 - DNA, 457 bp, Zea mays
cgtgggtttcttccccccttctgtgggggcgtttaataaaaagggggggaaacttctctctctttttttccctcccccgcccgaatctgatgcttaaaccctcgccgggaggaggattccaatcccgacgcaccagcccgcgcccgccacctacagccgcgcccggatctccgccatgggcgccgcgccgcaccaggcccagggccccgcatatagtgtgattccgctgcaggctgaacctgcacttgataataatccctccaagagtgcaaacgctagggaccagattcttactggtacggagaatgtgactacaggcaatgcacgcggcggcagctccttgaaatcgcaaaaaggcccgccagagaaggctagctctgtcggaaaaccctgagaacaaccttttccctaccatcaaaatgtgtatgcaccacagccacaaccactctatcctgga

SEQ ID NO: 370834 - DNA, 461 bp, Zea mays
gactgcggaaggcggcaagccggcggtagagcatactcggcgctcgacgctcgggggcggctgaaacagagagacgagcggatttctatacgtcagctcgtttcggccccgcttgggggcttctcctcggcgtcgtcgctccctccgccgcctctttctcttcgccccgagcgctacagagaaagctcgtggacgggcaacgaaccagcggcgtttccatacgcggaaattgcagtacgtgctacaacctacaatatcacatatctcgggtttatccgaagagctcacccatcgacctcatcagtggtgtgattgattcacgttacaacatcttctgattacctcatcagtggtgtcattacgtcgaataatttgattatatggacgctcatatatatttttatttctgaatataccaacaatttacgaggagctgagctacgcctaatcatttctaggct

SEQ ID NO: 370835 - DNA, 240 bp, Zea mays
acacgccacctgggaaggatgcttccaataaaatccctagagctatagggaaggagccaaatctggctaactgagatgacgacagcatggcacaggcgattcaccctggtcctgcacttactaatactacttaagccaggtggcttcctaaggttggcgccgtacatgttaacgagcggatggacgacgtccataaagcgactggacgctacatttgcgagcgtaatctcaatgacggag

SEQ ID NO: 370836 - DNA, 362 bp, Zea mays
gaccaactcctatcggggcgtttacgctgcgcgtgggcgtattgccggggggccccgcggaacgtctgctgcacgaggcgctggcctcgccgagggcccggatgcaggtgctctcccctaccaaccttgttgctgacttcttccgcgcgctaccgaccggggcacccatccccatgctccgtcgagaggtgaaccactacttcctacggcagcgaggctgatcttatccagggcctcatcacctccgcattgaggtgcttcactacttatgggataaactgtagcccaaagggtgcgctagagccagatgcggcaagccagcaagatcaaggaaaccgcccttggccgccctaagggcatag

SEQ ID NO: 370837 - DNA, 242 bp, Zea mays
tcgcctttaaatcctctggaggtggatagtttttcgaggcaaagccgaaggcaagaacggtcgtttcaagtatcctgctaccggcgtccgaaggaaccttcaagtgttccagcggaggtattaggagtggtggggaaaaagggattgtagaggtacccactctgagacatagctctagctcaaatcatacatccagaggtctccagctgtaaaaagccctccagattctgcctctaccttat

SEQ ID NO: 370838 - DNA, 260 bp, Zea mays
ggggaagctgcggccgacggccgggctctttccgaccctatccggcgcgcttctcaaccctccaacactgcctacatatccactcagactacgggatcaaaaccgcaggtacacagaatgcctcttatcacgccctctgatcaacctcgtcttccaacggcgacctttatggcacgtggaggcacaacagcagactgcggcggcggccgccgatggagaggccggttccgaagtctgatgccgacgaagcaggtggactc

SEQ ID NO: 370839 - DNA, 186 bp, Zea mays
gtccaccccactgaccagatatgcagcggacatgaaaacacttctatgcgtcgaaacccaactgcatcttaaaatggacaaaggaccggccagccaaattgtatgtgacggaactgcccagctgagctcgcgctactcaccggagtcaaggcccccggtaccaaggagagccccaacgacgactac

SEQ ID NO: 370840 - DNA, 225 bp, Zea mays
gggaaaagggcccggacccaactcccacactgcggtgtcgagcctccgttctggtggtgctctgggtcatgcatggaccaggagctagggcctacgactgcagttcggccccaagcggtgattatggaccactctaaaacggtggagtctaccacttgcccacattcgggctgctatccaagtggtgcgccatacacaccactaacttaaggaccttctacggtg

SEQ ID NO: 370841 - DNA, 325 bp, Zea mays
ggcacggggggtttttttgctgctgtttgggggacttaaacccgggatcgttgatgacggctcttgtttttactacacaccgtgtctcgttatacacgccttggagcaatgctgcgcgcaggacacatcgctgggtgctgcatggagtccaccagcgcttggatggagctcgactgcttcatagcgggcttaccgctcataggagacactggcgtcaaacacgggaggcagacagaagctttacgagctatctgaggctggatccaaggcctgcatcagtggtgctgctacatgaggacctccagcaacaacggttagagtagct

SEQ ID NO: 370842 - DNA, 245 bp, Zea mays
ggggaagctgcggccgacggccgggcttttgccgtgcgtatccacccctctcgccctgctctctggctttcgctccgtccagccgtcgcgtaaaatccgcggaaccagatgcccttatccggcctgggatcgaatccggcatccgcggcgaccttgagggcactggaggcgcgtagcacgctgcggcgctgcggcggatggggtggcgggttcccaaggctgatgcggccgacgcaggtggactg

SEQ ID NO: 370843 - DNA, 147 bp, Zea mays
caccacgggcattgccgtgacgacgacgaagacgaccgcaaaggcccggcttccccgggctacggcgggtacggtcagccaccgccaccctacccgtacggacgcgcgcccattgaccccgatcccaacaggcgacctccttcccag

SEQ ID NO: 370844 - DNA, 212 bp, Zea mays
agatcaacgtactttaatgacacattgaatgaaagaatatacttccaacttcctatgcaagtcaatcaagtgtcgatccagtcatatccctggatagtgggaattttatccagtagccacctgttaagttcgaaagaaatttagcaacacaaattcagaactatcaaaacgaaaggtattctaactgctaatagagctatgcaagtcaatca

SEQ ID NO: 370845 - DNA, 452 bp, Zea mays
ttgatcgccgcccgaattcggggcagttttggggtgggtgggcggggtgcaggacaacccttacgtggcgccaccgcccgagccctgccggagttactcaccgacggccgccgtgactcagcgcagttcgccgtgctgtcgccatacttcaatctgcattactgtgcttcgtccttacgtggtagacatgcgttaataatccaccttgtggccgcggaccgatcccgtacctccgtggctataaatagccgataggtgctcggtaagatgttttcgtctacaccagtaaagctcaggagaagtcccaaattcgtgaaattccctccaccgttcccaaaattgacagcgcatagtgatgctacacttgtttacggacgtgtggtcttaatattgcctcccaatttcaaacgagaccgttgaggtttaatttttcccttttctggtacccgcga

SEQ ID NO: 370846 - DNA, 219 bp, Zea mays
aaaaaaaaaaagcgacttttattcgttgggcattatatcacagggcattgcccggggggaaacaccgttccagttttgttccatgcacacttgccagaaacgcgcaaccagggcccccggtacggggtttaagggggccatggggacccccggcagctggaaaggggcggcgccctgggggacctgctgcttgggcatcccctttttgaggggggggaa

SEQ ID NO: 370847 - DNA, 200 bp, Zea mays
agagagagagagagagaggggcaccagattaacagtggcatatgaatacgatacaacaatgctgcgaatctctgatcagcttccgtacagaatctaaaaggggggaaaaagaaagaaagaatgatatcgcacgaccaaactagtaaaagataacagatcagcacataataatgctggctgctgccaagccaaattatacc

SEQ ID NO: 370848 - DNA, 446 bp, Zea mays
ggatctacacgcgcgcttttgcttgcggagccgccttgccctctgggaggggttgctaccgcggtgagcgtcccgagggcgagcctgcacaaggacccgtccaagggacccagcttggcaccggttccgtacacgctgggcatagatgacgggtgctcagcctactactatggtgagagcggggccgatgactgcagctgggagatcgctgctcggtgaaccatcattcttcgcttcgccatgtactcggtcctagtcaggagtagaggctgactgaggcatggactcgcgttgcaaaatgagcctgcgttttattgcagtgctttaccgggaaaatggagacgacagagccaaatgacagggatgtctgaggattgaagagaacttcctatatatattcatgtgtacacagggcatttatctcttgtatcaaatgaattttggga

SEQ ID NO: 370849 - DNA, 268 bp, Zea mays
tttttttttttttttttttttttttttttttttttttttttttttttttttttcccagttcccaattttccatgaaatcagtccttgaataaacatcagataatccctgattttttttggcccgcaaaaccatatatttatatatatatatatatatatatataatatataataggctttcggataatcggagatgcccacaaagagacaaggctgtaagcatcgaagtttaaggctttttagtatctacccgctctacacttttggc

SEQ ID NO: 370850 - DNA, 121 bp, Zea mays
aagtaagtgtacattcagatacaagttgcgcaagggaacttttagatcaatacacgctttctttcaccaccacaggaccatacgaaggtcaacgtagcctagattacccctagacaatgat

SEQ ID NO: 370851 - DNA, 412 bp, Zea mays
tgggtgccccgccccagttttccttttggatccacgcgcgctgatagtgacttccacggagctgatcgatgagttggggcactttatagcggtctcgttgtgcctacgagaccgtgcactaaatttaactgttcacttactgctggcccacttgatcacaggctgtttgcttgtgggattatcgatggacatggagtgaaagagaatccctatacacttgatgcatgattttgtacgtgcaatgtcagcagaacgaatgatattagagttgatacataactgtgttcactttgacactgtaaacttacaagatctatgcacaatgttagatgagaattggacacgggagttataagccattatgttacaagggcttagtggtctaccttgtcatctactggtttatggcaca

SEQ ID NO: 370852 - DNA, 256 bp, Zea mays
tgttggtcgacctggtcgtcggaagcaccacctatagccttttgatttgacagactgtactgtgatgtccattaagcagcgtctaatttgatgtggctagaagaacaaaagcaattgataatgtagctagacaatttaatttgtcttgtcaaaagctttgcaggacagggtaccgttgttctgaatacactgcatgcaattactgtgtgaagtcttgctgctgattcgatgagggagcacaggtattttatatgag

SEQ ID NO: 370853 - DNA, 448 bp, Zea mays
ctctctcgtccgcagaaactgaccccctcgtccctccccaccatcgcgatggctgacgacgccgcggcggcggcgttcgcgccctctccctcgccaccgtcacccgtagcgcaacctctgcccgacctctccccgccgccgcccttctccccaccagccggcacccctgcttccggggcgcagacgccgagcctcccggacaccccggcctccctagatccggacacccccttctccgacgccaccccgacccccgccgacgcctccgacgccgccctcgcttcggacgacggcatcaccaacccgtcggggggcaccgccggcaagcacatgacgctcgcgccgaccgacccgcccgccaagaaaccgtccaagaagaagggcggcaacagcgtctggacccgcccgggctcccgcaagggcaagaagaaggcgaggcaaccgggcg

SEQ ID NO: 370854 - DNA, 439 bp, Zea mays
gcgccctcgcgtccggccacgcgtccgcccacgcgggcggcgcccaatttattaccttcccctaatcccgcagccttgcccgaagccaaattggtgctcctcttatctcgccgcgccgacaccgctccattttcgctcccccagcccccccaaaagaacctcgtcaccctactcgcgggattacgcaggccgccgcttgcttagggttcatcactcctgttcacacccgatggccgcggacgaggcgagcagcaatggctggggtgaggagcgggtgcttcaagcgagaccaaccggctatacctgaccgctcggatggtggaaggctacccctccctggaggttgggtcgggcgacatatgcgatccaagtgtgaggttcaccacgtacaaactacatgatcgacgggaagcgggtgatccgcgttaagtcggaccac

SEQ ID NO: 370855 - DNA, 450 bp, Zea mays
cgtgtattttacgcgctttatcggctacttaagggcttcttttatgagagaggtttaagtcttcccgctgcatgggaaaatgttgaaagagagtcaagtaaaatatttgggaatgcgtcaccagatgttgtcaatgacagaagtgccctcattcaagactgtttgcgttctttactggtctcaagttatccatttggaattcccacccctctggttaattttttgtcaccagggaggcctggatacgaatatagttttttgaaaactctcattccacgatctttgcaaagacgtagcaatgatttaaattcaaaagattcagattgcaatggaggtcaacatgatgattctacctcaatgggcaagacaatatcacttattgtagaggataggcctcaaaagtcgaccagacagttgttggaattacaacatttcaactgtgcggggtgc

SEQ ID NO: 370856 - DNA, 392 bp, Zea mays
aaggcgggcccccgcggggcaccggcgcggaatcccgggggagacacacgcgcgcgtattgcgggcccagacgagaactctgacgcgtggctttcaaggacgttgtacggaatatactctagcggagtggggcgcctaaccactctggggccctgcacagaccagaggggcgcattattacacggctgcttagctatgctagccggacgaattggccactgatggccggcgacataaccagcagatactgggtgcaaaactggcacaaaaaatggcatgaaggtggcgagagtgaactggatcgagacatggaactttgtaagctagagcaggagtgccaagatgggtacaagagggaggctgtcccaggagctgactgtataaaactgctg

SEQ ID NO: 370857 - DNA, 462 bp, Zea mays
gcgtgttcgatcttactctcagctggtcgctcactgtggcagctccacccttcactcagtcttaggctcttagctctaggctctagctagccgcgccactccttggtgtagacattagccttctcatcgccaccaatggccactgtcgagggccagaccccgaccgtcgcggcggacgaggaagcgcccgtggtggagaccccgccggcggccgtcgtgcccgaggagtctgcccccgccgaggccgaggctgaggctgaggctgaggctggtgctcctgctgctcccgaggagcttccggcggccgagcagcaggcagccgccgagccggaggccgctgctcctgctggtgccgaggagcccgccgcggtcgaaccgggcgccgaggcggaggctgctgctcctgctggtccccgggagacttccgcggccgagcaggaagcagccgccgaggaggaggct

SEQ ID NO: 370858 - DNA, 432 bp, Zea mays
tttaacttctgactgttttcaagtcggacgacttgttggccgttaattgagattaatcatgattagtctgccgacttgttggccgttaattgcgattaatcatgattagtcggacgacttgggcgattaatcgtgattggtccaaaccgacttgaacgattaatcgcaactaatcacaattaatcggccaagtcattcatctattatactgatattagttcagacgttcagttctcaccagctgatgggcagaggtttgatctatggtgtaaacatctgtttttcttctttatttgtgtagtagtggtcttgttttgtgcaatcatatatacggaatattttgcattgtttgaggtgcagatcagtggagtgcaccccaaacagaggatgtgtttccccaagaagattctttttcttgtttaaccaacctaa

SEQ ID NO: 370859 - DNA, 188 bp, Zea mays
aaaacccaaaccaaaacattgggataatcttggaattagccaaacaatttgggcaggggcaaaatacaatgtccagcaaattggtttgcatcatgtcaaaaccagattggccaagggatacattggttggcggtggcgcacccctcctggccatgttccatgactccattcttgggggccactttggg

SEQ ID NO: 370860 - DNA, 137 bp, Zea mays
cgcgcgttcttgtgcgcccatgcaagggtctgggtggggctcgccatatgaccaagtccagtttggacgagggatccggagagttatgtaccaacgtggcaggcaaccgtttagttggggcaccgctgcggactctg

SEQ ID NO: 370861 - DNA, 459 bp, Zea mays
gagtcctaaatttgacttcttattaataagagtcccgtaaatctgtctgaacaagctaatgtaaaagaataaccaaatatttttcctctaaactgtccgaggttctggctacaatgaagcacctcgaacaggaaccaaactgttggctatacacaacattcgacgcagaacacaaaacaaacaactagtacaaacagagctacatacctaatcagggtggcccgacaatggttggaacgcaccaaaaaagaatcaaaattgactatattctgtcgaagaaacctaaatgagctcaccaactagagtcaccaactagaggatgggtcgtgaggaaaaaatcagtacattcctttgaaaacggggcttgttctgcagatgctggctccatgttcctcgtagtcctcctttgtgtggcaaaactcaaagaagtcagggttagatgcagctagtgaccccccg

SEQ ID NO: 370862 - DNA, 461 bp, Zea mays
tttacgcgtccgctttatgttaagtgtgtactaatggaactggttgacaatgtgaatgtacagacttcactggatgtggccattaagccatttcacactgtacttattctttccctgtggcaataccaatggagttcgtgggaacacggatcaaggattgacaatctgcctatcatatgattgctgcacaatttgttcaggaaatatttgtttctacaaattgttcttatttacattgccatactgaactaaagctgcatattagaatgtaacatttatgattaacttgaagaaatgggttaattctataatatttacggtaaaaacatttattttctagtttttttttggggggggggggtcccaatggaaagaaactagtaagtttgatggttcacacagtgaaactatgttgaattgctaaattgttatcaccagaggtcacatcaatgaatggattt

SEQ ID NO: 370863 - DNA, 444 bp, Zea mays
ttaggaagtaatagtaatacccatgctgctctcaagattatagaagctgaataatggagatatgataatcttatttcttttttcgtcttagcatagctaagcaagcttcccagagtaaaggagtcggaacatgtatccttgaggttgtgggaaggcccaaggcctgtttgttttcctatggctttgtgaggggcggtttggcagttggtggcacttggcagtctggcgttttgtcagtctggcacttggcagtctggtgttttgtaaactgtcttgagtaggtggcacttggcagtctggcgttttgtagtgtagaccagtaggtagagttccgtaatattctctactaaaattttgaaagtttcaaataattcttgttagctttttaatactctaattaactttacttgtttgttattccattatccttgttcacaaagaagt

SEQ ID NO: 370864 - DNA, 270 bp, Zea mays
gcgcctgcgggggccccgccggggtttccggggggagccacgcgcgcgcgtatgcggacgcgggcctgcgaggctacgggggcgcgcccgcgaaggctgaaccgaactcatacacctgtattccatatgcctacgcgacatagtcctgctccttgacgctgtcgacctaccgcaagtgttctttgcaggacgagagagccgcagcgacgtgtcgggggacctctgcctgctggggccggagcgggtgcgcgcgctcgtaaagctgagggg

SEQ ID NO: 370865 - DNA, 394 bp, Zea mays
ggaaaaaaagctccattttaaccccctttccttctgatccattaaatggagccactagcccccaagggtttcctcggatcccagttccgcaacacacccacaggggccttcccttgcttaatgaccccggatttgtatggagtttttgggcctctacaaaaacggagacggggaacacaagaggaagagaaactagggaaaccgttaacaactagccaactggtctccatccagtagcgatgaggagatcgagcaacgcttatggggccatgctgccagttccacagcctgccttggttggtcaccagttcccttgcaccgaatcctggctatggagctctggttgcacgatcgagttaaccggtcttggcgactccgttggagaggacgggtt

SEQ ID NO: 370866 - DNA, 364 bp, Zea mays
cctacgcgtccgcggacgcgtgggcggacgcgtgggcagaagagtactcgagaaactggaacaatactaagtcatagagtaactatacgtaatcacgtgaaagcgatgcatgctggcacaatatatgtgacgcacaatggaagacatgggaagagaatgggcacgcctatttggattggaacaattacatgaccgaagagagacatgttggaccatgtgagggaaggaatattagagggaaaaaaggtagtgtgcacatcctagatcataacatctagaccagaggaggatatggtgatgacactaatgagtttgcgtacggagatcatgagataggcaaaaattgaattgggtggaaagggga

SEQ ID NO: 370867 - DNA, 286 bp, Zea mays
cctatgcgtccggagagatataaaagggaagaacggtttgtccagtggcgactgtgatgagtcagtaaaaccttccaaaaataatggttctactcagaaacatcaatcagatatgccaccaccaccaggtcgaccccctcagaacaataatttaactggaaaggagaaacaaccagtccctgttgcatgagcagaccatgatgacatttttgctggagatggagttgactatacagtttcctaacgaggaaatgagtcagagccctgtttctgatctggatgaata

SEQ ID NO: 370868 - DNA, 297 bp, Zea mays
ttgtgcgtgggctggcatgctgccaggactgacgtgcgccatggctctagttgccacgctcttgcacctatctgggctccttttgtcgcgtccagttctaatccctgttatccgctgaaccatcgctgtgccgggttgcccttgattcatggagttcaccggcttccccgtgcgtagtcgcggatgccgtcgctcaccccttgtgtcttgccgagctcatcactgtcgtttatccctggcgctcgttcggctcaacgtctttgctctagcatgctgtgcaccactcggccgcgccct

SEQ ID NO: 370869 - DNA, 352 bp, Zea mays
aaaacaacaaatcccttagccaatctttaaaaaacctgcgggtccaaaataatctaccatgctggttgggtaatcttataccccagctttgggccttaaatccaggagggcgaataatctaccatgctggttgggtaatcttataccccagctttgtgccttaaatccaggagggccaccccgtttttgttagaccgatcctactattacttaaatgcaagcggggcctacaacgaccctgcctggtttggtataagaacccttgttgtgccctctgcaccagtttcaaaatccaagggctgaaaaaaccttccaaatttgttggttgctcggcagcccttgtttgctgggg

SEQ ID NO: 370870 - DNA, 328 bp, Zea mays
cggttgatactgccgcacaaggagaaagaccggggggacatttacgagcaaacggggaagctacaacagcggagccacttgaaaattctgcccagtaaattgatgatttaccaggaaccgttgatgaccaaactgatatggatgggcaggagatgcgacaccactgtgtccgacatgctgagcagaacctccctgtttagataaacaaccattaggaggtgcttgggcgtgaaacattgaacaaaatggtaactcaatttgatggaattagatgcagtcatcgaagccagcctaaaagggcggatgcactcctgctaacggtgaaaaa

SEQ ID NO: 370871 - DNA, 202 bp, Zea mays
gggaggagtttattttacaccccaatgcccttaattaacataaacaagccagagggagcaaggccaacccctacaagttaatacagccaccgccgaccaccaaattttactacaaccaccgaccattttcttaatgtacagacacgggaaaaacaacctgccacacctaagcttttttgactcaaaggtggccccaaatccc

SEQ ID NO: 370872 - DNA, 409 bp, Zea mays
tgtccgacctccccgaggacatcgccgtagccgtcgcctcctgcctccaggaggccgacgtctgcgcgctcggcggctgctcgcgctcctggcgcagagcctgcgacgctgactgcatctgggagcgcctcttccgctgccgctggccatctgccgtggcgtcggcgtcccctgtgcagggatggaaagctctctacatcagccagcacagaagaatggctgttgcaatatctaatgtggattcctcgatgtccagtttttcttgttctcaaggaatcatagtgcgataatcaaccttattggactgcactactcgatcgcatctttgcatgtgctgccaactgaagtcagtaaagcactccaagctcaccgagtagcagaaagggtagtttgtgtgaacctggtcatt

SEQ ID NO: 370873 - DNA, 327 bp, Zea mays
atcaaaggaaagtccacatcattttttcggaatcgttgcaaggaggcacatttagggcgtgtggtgcagccaaaaaaaggagttaaaaaagcatctgtgctgtccagtacagatggaaggaaaaaggggaacaaaaagcacgcattacatccactgcaaaaactggaaacagaacgcttgctgccaacatagtcatttaggaacatggaaaagctaatggaaccatggaaatgatttgattagctgcgagaaaacgacaatggcaagaggtgtgcacctgcgaaggtagatgcgcagtcgtccaacaacgctgtgatcctggaaaaa

SEQ ID NO: 370874 - DNA, 357 bp, Zea mays
cgctgatacttgttcgtggtcctgtcgccttcatgagttcgttctgcgcgggaaccgcctatgggggacgccgtggaggacgtcgtcatcgccggcgcgggcctcgccggtctcgcgacggcgctcgggttacacaggcaagcactacctaccttacctactcccctgcacaagcacaatccgccgttgctgtcctccgtgctgacggactggctgctgggtctcgtctcgtgcgggtcgcgtcgtgtggggcacgtaatgggtcgaggcgcttgtcgctggagtctacgccggcgctgagcgcgtcagcgttcacggtcaccacgtggaccaacgcctttcgagatctggatgccc

SEQ ID NO: 370875 - DNA, 279 bp, Zea mays
atggacacagcccatgccacaggcataaggggcacatgaatttcactcgatcacttaactggctggccaactttgttaacatggcaagtgtgcatctcgccatccaatcgatggttcagggaaatatcaaaagcataaagatctacaccttgatgcaagcatctaaatcctgacaatatgaagcagatcttcttgctcttaagttcgaagacacaacttgaagtgcagtatgaacagagctatacgtaacaaaaacctttctgcagttttctcaatgaa

SEQ ID NO: 370876 - DNA, 321 bp, Zea mays
ctcgtctcgcgggcttgtggatgactttggtcaggaagcattagagtttctatgtcagtgtctgcccagcagctcatagcaataccgggcaatgatcgaagaacatgatccttttggtgggaaatcaaaatgacaaggaacccgaaatgtactcattgatacccttgttgatgcggagacagaaagcagcatttactctaccatgcttgaggaagggcttgcccaggtccaaagaagcaagagatggaactcttgggagaggaagaccgctctgcagaacctgtaacaggtccaggacaaggcacataatgtaaggctgcc

SEQ ID NO: 370877 - DNA, 386 bp, Zea mays
tccacgcgtccgcccacgcgtccgggatcagcatatatcatgccagcctgacacatcaagcgtatcattagatcttgtgcatgagcctaaaagcggctcactcttttgcttgaaaactcaagatcttgaggttgagtaccctagtcgtatcccaaaacaggaggggaaggggatttctgtgaaccagtcacgctcaacatcagtagcacatgagaatttagctacaaagacatgtgtgcgcgcacctactaacaaaattgatagcttacaaccacttaaggaatgatcacatcaggcagatagggactcaatgactcaatgagagcatctgttagaagagaatgtgatacatagaaatgacaaagtgggcaatcctgtatgtgatg

SEQ ID NO: 370878 - DNA, 283 bp, Zea mays
cctactcgtccgcgaatacgaatccattgcgccactcttatagcgcgtgggggcctcgtcagccaccgtccgtggacgtatggcagttgtagctcgccggcgtgctactgctccagccttgacgcgcgcacctgttcttctatcttcttcaccagcgcccagggttacttgcctctcttctccatggccgcatggcccctgttcgctcagctcgtggtgacctcgtttggccgtgcgtgctgtcctagctacttcggtcaggtaactctactacgaacggaca

SEQ ID NO: 370879 - DNA, 267 bp, Zea mays
aaaacaacatgggcccccattatttttttataaaccaatctttggggggataccagggggtaaaagtttatggggccaccgccccccctgttttttatggccggtttctcccattgggggggctcggggcaactggttaaaacccccccctaaaatgggaccccaaaaatagtgggaaacccggcaccctttttttcacgggccattttgggcccaaagtgggtaaggcaaagggcaaaccccgggaggggggacaggggctgccgg

SEQ ID NO: 370880 - DNA, 350 bp, Zea mays
tgttcacgcctgcgtgaagcagggcagtatgagagaaagatgatgggaagacatatgaacagttgccacagactgggagggaggatagccaacgtgcagtgggcgagggagagagggctgaccataggatctgactacgagaaatgtactaacgcctatgtacagggcatttacaagatccatatgacggacgcaatgacaagggtgaacaccatcactggtgtggcatacagggacaacccgacgatcatagaccgggagctgaaacacgagactgatggtcagtcctacgtgcaggcacacactgtccagacatggatcactgtgaaggaaccacacgttgagtccac

SEQ ID NO: 370881 - DNA, 232 bp, Zea mays
ttaaaaaaaaaaaaaaaaaaaaaaaaaaggggggaatttttatagagatcaccgctaaaaaacacggggcggagaacatataaaatttcaaaaagtcgctacctaactatcagggcgcggccccacgaaggaacacataaagttcggaaggaaaaaatccggacttccttgggggacaaaggtccatccatctaagataggccaggcgcgcatatgaacggtgccaaacctt

SEQ ID NO: 370882 - DNA, 331 bp, Zea mays
tttcccctcccccggccctcgccatcctgggggggttactccaccctgtcgccccggtctcctcggaccagcggcgagcgggtccgtccggtcccgacgccgcaccacatgactgcactgcaagaagcagtcgatataactggaacgtttaaaggaacccccggatcggaggtaccttcgcgcgcggatccgctccgacctcgtccttcatcggtaggcatcggaagcggcggcggcgcgtttccagcctgctttcgaaagggtttatttccgtgaatgcaggcaatcaatcgtcaggccaattgggagccgtgttggggtgaccgggggg

SEQ ID NO: 370883 - DNA, 425 bp, Zea mays
tgttactcctcgaggctttgcaagaggaatcgcatactcagtttcatatgcgaatatgcttgtgtggaaacatatatggtgcagaaacccatgcatatggccctgaagatggatattcgactccgaaaacagagcctacgcatgaggtaacagatgttactgaagcaatgacggctgacgccattgataatgccactgaaagtggagcgggctgttgaaggcacttcttgggacctgtcgtgtcacgtgatgaaacctatcatggtatagaacatcgctggaaacaacatggaaggcatgcaggactgctggatgcacagtcggatacaaagacagctaaaaacggtgaagaaaaaggggatggagcattggaacgtgcacaggatcctgatcaagaagcagatgccaggcctgtggacaggtct

SEQ ID NO: 370884 - DNA, 229 bp, Zea mays
gctccacgcgtccgcccacgcgtgcggcgaatgtttcatgctgctggaaattatgtattcacacaatatcatcgattcaggtggcgcctgaagcataccttttgtctggtgatggaggatgatcaagctcacgagcacaggcacgggctgcgaatgtgggaacggtggctaatagagttcccttgagtagcaagggttctttggtaagcgcaaggcattaggtgttgat

SEQ ID NO: 370885 - DNA, 374 bp, Zea mays
tcttgtacgcgtgggccaacccgactgaacactgcgtcattcggctgccgatggcgaggaacacgaccggaccgtacgcagatgcgagcattgccctccgtccccggctgctgaaggcccctagaaccctgtaccttgaccaccagaagggcgaatgggcccagcgatggcgaccaggtctaccctgaaggacttgttgccatagttctacaagctgagtacatggatcaccgggcgtatacatacccctgcgtctacacacaggttggttcgcgacctgcagaatgccttgtgattccaatgtatagaacaatgcccgtttccggagatgaatgttaacttcatcgtggtatataaattcacatatgtcgaaa

SEQ ID NO: 370886 - DNA, 423 bp, Zea mays
cgcgcccccttttttttttttttttttttttttttttgatatttacaatgtttcatgcaacatatttttgctgtttttgctctctatcctgttgcttgctcttgatttttctttttttaactgctggtcagccaggagctttctcataaaaaaaacaagggtttcccctttcccccccaccccagacgcgggcgcgacaaaaatttttttcaacacaggggggggcaagatttccaggagctaacacatgcatgacatgacgaaatcgcgcccacttcacaaaactaaagccgtatggtcagctcgttagccaggagctaacacgagctgaattcactacgcgactctgtcggtctaaatgcgcacatgttggcgaggagctaacttgtgcacatactcggcgactttattcttctagatttt

SEQ ID NO: 370887 - DNA, 536 bp, Zea mays
actcgtgcgaccacactggccgataacgtatattgctgctggaaattatgatgtgacacaacatcatcgagacagggaccagaatggggaaaatgtccaattgccatctacaattttagcagcaagacttcagcatgtttcttctgattcagttgtcacaaatagattcaagcaagtatctgttgcaattcattcattgaatgtggatgaaaaatgggaaggggcttcaattgggacaattcttaggaggaacaagcttcaggatgctactctcgatgaaaatattcttcgtatgatctttgtactgaattcaactgactccagtgtcaaacaaatacagtattgtgccatcatcctacagcctgttgatcttaagattgatgaggaaacgttaatgaagctagtaccattttggagagcatctcttgcaccttcaggcacgacaagcacacaattttatttcagacgttttgaagtacatccattaagatcatagcaagctttcggccctgtggccgacgcacacatatagttct

SEQ ID NO: 370888 - DNA, 257 bp, Zea mays
aaaaggccccccctaagtttaaaatttggggtggggcggccccccaaaatttaaaggggtaaaaggggcccctttttttaaaaggggggcaacatttatttggggaccgggcccgcacaacaaaaaaaacctggttttttaaaagcggttttttcactaagggaaggggaaataaaagcccgccaagttctttgcacccgggcaaaacaaaaaaatttaatggacccccccttgcagaaaaaaggggggctccgggg

SEQ ID NO: 370889 - DNA, 507 bp, Zea mays
ttctccaaggcccggatggggaacgagatgtctcgcattgccttgtgcctgccactctcgccggcaacgacacgcgcgaggcgaatgaggtcaccgccacggaggttcatgtggaggaagacaccgcgcggagggacgctgccctcgtcatgcagactacacccaatatggacgagtctcgcaccgagggagatccggacccaactggaagtggaagcggcatcttggggccaagcgccgccgaaagatagatacggagaagaaggggatcgcggcggcaacgagtcagcaggtccagcacccatgcttatccttcctttgtgtttctatttgatctgtttttttttctgcccgcgccatattgccggtttgcggccccggtgctacccgccgtcgaaaggcagcagcggagaagaatgtggtcgtggctggaatgggtcagcaggtacatcatccacacttatcaattccttttgtttttgtttgatcaattttaaaattttttta

SEQ ID NO: 370890 - DNA, 151 bp, Zea mays
agagggggggaaaataagcaaagttttgtattaaccacacgtgcccacaatggggacagccatggccaaccaatcaataacatgcccagttattaattttctaaattctgcatggaagccccaacatttccacctgttttttaaacaaagg

SEQ ID NO: 370891 - DNA, 295 bp, Zea mays
tcaacgcggcggctgacccaagggagcgcgccaagatttctaactgcgagcccagccgatgccgccgccgcctccgctagagttacgacgggaggagcgcccaagctcaccgaccgcaggcgcgggacgcgagggggcggcggcgccggccccggcgggatgctacaccgaggccgggcaacccgcttgcgtgagtccccggcgcgggcccaacaccctgcgcaagcatgggccgctattggcgctcggcgggaggctgagacgcaccgccgcaatctcaacggcctccccatcc

SEQ ID NO: 370892 - DNA, 375 bp, Zea mays
tttttttttttttttttttttttttttttttttttttttttttttttttttttttttttttttttttttttttttggggggccaacaatgcctgacttttacggggccctgggcccactaacagggacaaacaggtgggcctttactccctaccttggttaggtttttctttacacttcttttcccactggcccttttttccctttttggataaggggttgggcccattttttttttttgcattttttttggttttggattcggggccaaacccaaccaggttctgatcttgactgggttcctaaaaactactggtactggtaaaaaattcccgcgagaattgacaaaagagggctacctaaaactccattttac

SEQ ID NO: 370893 - DNA, 322 bp, Zea mays
aaagagagccctgaagcaaaacactgggccagtttattacaggtgctttcacaggaaagattacagggggcaatttacccccaaaaaaaacagctttccgggggggcccccgatcacctataactccatcagggggggaagcctttaaaagaagggacttaggggtttaactccatcagagggggaaccatttgaaagaaggaacataggcttgggattttttcaaagcaaatgttaaaaggttacacaaataggggaaaggaaaatgctccggtacaccgtcctttattttttaaaggttatgggggcattcatggggggg

SEQ ID NO: 370894 - DNA, 464 bp, Zea mays
tcttttgtcccattagctgcatccttttgtggatagagggagtacaactttgcaagcattccatctacgaattagaataacgttaacagtcagttgttttggtgtgtgattggtgattataaaagtaacaggacatgctgtcgtgcactcaaaatttggtttgttaacctcgtgattagggatgtaagctctgacaccatatagttgtgggccagttagctacttagctagctaacttctatcccgcatcccttcctttgatatttggatttgttcaatcgagtattgggttgatccaatgtcctaggaatgcaaaactcccatccctactcacgatctgaattttgatgatgtctgctatatatctatttaaatttattcacgaaaaatatgttgaaagtgctggcgtattgtttatggcctgaattttgtagagaatagttgttacaatgtaatatactgga

SEQ ID NO: 370895 - DNA, 295 bp, Zea mays
ggatcacagcattccatcagatccgtgcatttacataaatacgtaatatttattggcaccagtctaaagtccttatacgtttacacccatcactttgttttcattcatcagatcacatgcacgggtgctttccaaaggcaacgagctagttgtcatcaacttgtagagagcaagagcacccccgctgccatcattcgtcgttaccttgggagacgaccttttgcatcgcttgtacgggccaaaccagaatcatctttgtttcagcaccctcggtttcgcagcggtctttttagcc

SEQ ID NO: 370896 - DNA, 448 bp, Zea mays
gcgtaggacgcgtgggcggacgcgtggggttctgcaggatcggtgctggaaaatggtcctagcacagtctccactaatgaaattggtggctcaacttctgaatctggtttgggctcctcatcgatgacatctgaaaggatcatgtctgactcacaagttgagatatctcctcaagggacctcatccacaactgtcatgacaagtgaaagatcagatgcctctcaatctagcttaacatctgtgttttctaactcttcaactgcatcatctgtgatcgtggaaccaatgccagatccaatccctacaacaacagatgtgcccatattcattgggccacatggtgaagctggacggagtatattacatgacgacatgatgagcatcttctcaaatgacggcgtgagacgctctattgattcaagcaacagtgaaacacggaggagtcaca

SEQ ID NO: 370897 - DNA, 362 bp, Zea mays
aaacaaattaattttttatgttattattagtaccatgcaattacatacaaacacggaaaattttttgtaaagatacatacagagcatggggagctcataatatctggattctggagaagctgcaagctacaccaagaccaaaccttattacccggaacacaagcgcggactctcaaattccatacacatacaagccactgcagacatttatgctatcttcggtggcttacctattctcatattcataggaaaacttcactctgcaaataatacattttacagtgcaaaatagtattttaggtgacccatacacagttttagtagggacgacaaccatgaactgaatccaggtacaggcatag

SEQ ID NO: 370898 - DNA, 285 bp, Zea mays
tccttttttttttttttttttttttttttttttttttttttttttttttttttttttttttttttaaaaacccggagcaaatccaaaaccactcgttattttgtttgagacatgttctccacaccacatggttttacgatgaaagcagataaaactaagggttctgcatcactttgcttatgaaattgcctaatttaacaaccaagcggggggggctgcctaaataaattatgcgggtgaagaggggggtagttaccggcaggaggtgatctccccttcctccgg

SEQ ID NO: 370899 - DNA, 320 bp, Zea mays
aaaaagaaaaagggccaatcatcaatctcaggggccccatttggatcgaaccccaaacagggtgggcttgggataattgggattacaaaccctggtgcccccagggggggcctttcctaaggggggagggcagggcaaactttttggatctttccggccttccccggtttcacccctagcctccccagtttgggcatgggggcgaccaaggcctcaaaaaagcccttcggggggggggggaacatgtccacgaggggcctggcccccttgtcggggtaaagcccctggtcgggggggaaaagccccaccccgccctgggg

SEQ ID NO: 370900 - DNA, 325 bp, Zea mays
  unsure (1)..(325): unsure at all n locations
ttttaccgaccgncacgccagaccagaacccggggactattaccgcagaccggccggccgaccaggaaccaccgaaccagagaagccaagcgaaacccgcgaccggcacgcgcgaaggcggaggagcagaccaacccccagcaccagcaagcggaggagagggaggcgacggcggagcagcagcagacgaagagggccccgaagccgagggacccggaccccgcccaggaggcggccgcccaggccgcggagagccacgccgggcccaacgggcaagccaaggaccacgccggccccgcacgacccagcgaggacgccgacaaga

SEQ ID NO: 370901 - DNA, 406 bp, Zea mays
ttctttctcgcccctgtccccctgctcgctcatgctctgccgagcttgctcctgcgcgcaacgcgcccagccagctccctgccgagtcccagccgaactcctccgtacagcgccctatcgagcttcctgttcctacgcgccgagatcgcgtgtagctttcccagctcgtcgttcttccctgcgcgcgcaagttctctgttgggcgcgcgcgaagctctctattcgccatcgaatcgcctgctcgctgtccgtaccgacgaaatttcctcgccgtgcgttctggcatcggctgctgccgatctcgccataaagttcacaagcgctccttgctcggctcatttcgtcgtgggcaatttttccacgcctcaaatccgtgctgcttgccccgtgtgcgctcgctcttcgt

SEQ ID NO: 370902 - DNA, 314 bp, Zea mays
  unsure (1)..(314): unsure at all n locations
cgcggaaggaatggcgggaccgacccacgcgttcatggacgcgtgggctgctttcttccttcctgtgcctgctcgacgcctcctccgacccctcgcacggctggcagacggtgtcgnatcccaaagacaacnaggcggaggcgaaacccggcggcgagcgagagaaagggcgggacatacagacccacaaaggcccnatacacaacgccgactatctggaacgctttggagatgaacattaaacaacacactcacctgagaagggaaatggagagagaatcgtggcacttaaacaaacacaaaaaggcatcaaa

SEQ ID NO: 370903 - DNA, 406 bp, Zea mays
actacgcgtccggggtttctttggaaaggaagaagggaggtcaaaggaggacactgccttttggcttggcagagggtcactaggcctaaagacatggggggtcttggtattagtgatctccgcaaccttgctcgggctttgcgagctcgatggccctggcttcaaaaaacagatcccaacaggccttggtctgaatttacttttcaggtttgtgcggtagttcaaagtctcatggctgtagccgttttcacaagggtgggaaacggtgccaataccctgttctggcaggaccgttggataaatggtaaaggtattaaagacagctccagcaattcttgaattggtgccaagaaggctagcttatagaaaggtggtggtggatgccctttcaaattgtcagtgggta

SEQ ID NO: 370904 - DNA, 383 bp, Zea mays
aactagcaactctctccctctccgttcttgggggggctagacccttggccgtacgctctgcctcactcctccgtctcttgcttcccttgccgccggcggcgcgcggcgccgggcgcggatcggcggcgggtgcatggtggaggccgccgccgggcgccggacaggcaccagccgtcggcggtctagcggcagcggaggggagcaccggcacctggtcgcgctcgccgtcgccgcgcgcgtcgccatggtcaccacccggcccgtgggttcagcagcagtagcggaaggtgatggagcgggagctgctgtaacagatgccggcgccgctggcggtggcggacgatgcatggaggacttcttcgactgcctcctcggcttgctcg

SEQ ID NO: 370905 - DNA, 303 bp, Zea mays
aactgagcaactgtctacctcgaggcacccggaggagctagaccctagggcgagcgctctgcctaactacgacgggtgttgcttgccttgccgccggcggcgcgcggcgccgggcgcggatcggcagccggtgcatggtggaggacgccgacgggcgccacagaggcaccagccgtaagaggcctaccggcagccgagggaagcacccgcaccaggccgagaaggccgccaccaagggcgctaacatggacaccacccggaacgaggacacagcagcaaaagaggaaggagatagagcggaaa

SEQ ID NO: 370906 - DNA, 377 bp, Zea mays
tgatagttcacgcgtccgaccacgcgtacgtcgacgcgttctgcggactaatgggcgccggccacgacgacgactggcgcaggatccatgacatccacagcagccggagacgcagcaggagccaggcgccctggaccatgaaccatagcttcgacgggacctgggcgcaccacggatgaaactgcaactacctgaaggccactggcacggggccccacctatggggcgcgctggaactattcactggaccgcagaggctcgccagcggcgcgtagccctaccgtctgtacacagacggcgacaagtgcgagagaataacggcatgagccgggacgctggccacctgcagcctgcgaggccgaggccaccgagaccgt

SEQ ID NO: 370907 - DNA, 517 bp, Zea mays
  unsure (1)..(517): unsure at all n locations
acctccacgcgtccggtcgttctcaaagctaggggactccatatacttcctcgaggaaggtgagagtgagaccactgggctctacatcatccagtacataccgagcaccttcgactggaaagccacgggcctcactgtcaaccagcgggcgaaacctctgctgtcaacggaccccttcttcaaagtttcgctcaccatttctgcaaaggtatagctaagcttctcaatagcactgtcagccagccatggtctgcaggctccattgctgcctgcgaggatcaggaccatgtgtcttttctttcacgttttccaaatgtttagcgaggtgcccgacaagcgaaggtgagtgtccggatcccatcgtggacgacaactgttggcgcaacggcgatcctgaacggccagaagctcaacctgacacccactggcaactcgactaatggtggtttcctgaccattaccaagctctgggccaatgacaccttgaccctncattttcccattacccttagaactg

SEQ ID NO: 370908 - DNA, 335 bp, Zea mays
  unsure (1)..(335): unsure at all n locations
aaatcacgctgcaggctgcggtggaaaagcagatggaactggtggagacggtggaatctctgcagcaccaaacgtccagcgttaggaggagattttgctgttcataggagtaggattgtcgtcgtcgcgccgaagctgtctgggttagcaaataatgaacctgacgctgcccttggcatacgccaaacctgtcgctggctcgacactgtatgcgcggatgcgtgtaaaatcgatcagattttttttgtagctacactctggcttctgtgatcttcagagcctgcaaaatgtcaaagctttagctacctcgtncaaaaaacattttttcgccaaaa

SEQ ID NO: 370909 - DNA, 241 bp, Zea mays
  unsure (1)..(241): unsure at all n locations
ataataaatcccnccaaccacacacacgcgaaggggggagaccaaagaanaagggggggtcaaaccaacggagcccgacaagaagagcaaccccaagagcgccgacgaaaagcgccacagggcgttcaaggcacgggaggaagcgggcaacgacacggagcccatgagcggggccgcagcctacagcaagaaggaccagggaaccaccaaccagccgaacgagagccagacagggaacaac

SEQ ID NO: 370910 - DNA, 235 bp, Zea mays
agataaccttcggaaaagaaagagttcaggctgtggaggtgatagatcctcttgggaagcaatgcctggtctacaggaggagcggacacctgtatatccttctgaggcgcaagaaagacttccttttgtctctgctcctgatgagtgggtgctgacgggagatcctgacaaggatgatgcaactcgttcatcccataaatatgaaacctctcctgatatcacactgttcaaggca

SEQ ID NO: 370911 - DNA, 560 bp, Zea mays
  unsure (1)..(560): unsure at all n locations
acatgatgctacacgggaataatccagactgggaggagttcttatcttgctgaggggatccgccaatataagactgatccactaccatacttgctatttcctaaaacagaataagtaaactagcaccaattaaggattactttcctagcaaagcatatatccgtatcaacctacagaatgtttttactggatctaaactcaatctaggtcattcctattgtcattgatatatctgtgcaaagtgcaaacctacatacccatctaaacattatttcagagtaatagtttctacatggatcatgttgcttctatggctgnctcatgtttgatactggacattagaatatgctcctttcaagttcttgcgtaaaagaaaattttgcattctgattctactgctttttttggagcatcatgttagctgacacctcaggtgccctggatatgccaagcatccctctggttctgaaaaatcttaacaatccagcattaaagagtgccatttgtgccttttccatgcagataactggcagctaacttcagcgagaattagcagacta

SEQ ID NO: 370912 - DNA, 262 bp, Zea mays
gaaaaagcaacgacagtatccctatattctcacaactcctaacaaaatcagatgcagggataccggatccacttacgaaggagtcttccaacaaaaaaaagaagtttattccaatcaatagcacagacattctcattgcacaccagaatgaagagcggcctattgctgcaccaccttccaaacacgaatgcaagcattttcaccggcagtcaccagaatatcattgtcgaggaaggttaacccatgaaccccaccaagatgg

SEQ ID NO: 370913 - DNA, 413 bp, Zea mays
acaatacatatttcaaacacattgatatatgttcatatcacaaattcacacaagtccaaatatataagttcacaaattcacataagtccaaatacataagttcacaaattcacacaagttcacatccatagttcacattttttgttcacaagttcaaacacacaagttcaaacattagctccatcgctctcgatcaggacatcggattgttgttcgtagctccaccactagaattgagacatctgtccgcaaagtcaacgtgaggggtatgagtcacttgatgagagccggaatccgctggtgatggaagtggctgttgttggccatgggggcgtccccaaggcctattggatgtgtaggatatccacatggtgtttatgaaaaatgcatccattaagcaaatcacaccgatg

SEQ ID NO: 370914 - DNA, 153 bp, Zea mays
acgtatactgaaacggcgacaattcccaagaaaaaaaaacaagaagggacattagcatagtagtacaggacagggccaagatagagccagagccggtgattgataatttaatgctgggcgtaaaataccatatgattggaacggggggggcgg

SEQ ID NO: 370915 - DNA, 301 bp, Zea mays
  unsure (1)..(301): unsure at all n locations
aaacatcaaataaaattactatttctgtgtgagaaatcaagtctgacaaaatgttctagtgtttcttaatctaaaaatgtcagtttttttgctattcctgtaacatttctacaccaggcttctgaagaatagcctccagattatcacaattcagtaggtggcggtggcggccttcgaccagggacgggaggccggcgcggcactgtggcaaactggcggtggaagcaggaggtnggatgccggctcggcactgtggtggacaggtagttgagccgaccgccggcgaggggcggcactgcac

SEQ ID NO: 370916 - DNA, 389 bp, Zea mays
aaaattcttaaagggaagctctcgtaaataggggctcaagacatgctaatttcttatatacaaagcgcgacgcaaacgtgtgctcccgtgcgtccacgtcggcagaaaaaacttggagcgtccattgcaatttgaacggccacatgctacagccgaactccctttctcgaagcgtcggtctttctaggcccgctggcccagccgcctccaaacgaagagtcgtctcgtcgtcgccttcgcttccttctactcctctacgtcctgtgcccgggcgaagcttgcgcggcggacaacagccacttgttgcgcgccgctgcccctgcggacccccgttgcacccgacgggctggctcctttatcggtgggtgcctggtcgcaacaccagcatg

SEQ ID NO: 370917 - DNA, 249 bp, Zea mays
aaaacgggtgggggaacacctgacaatacagggatggcacaggggtccaacagggggaaggtttttacatttttatcccaggggggctccagttggaaataatggggggacacattttaatttccagggggaatttttagcaacaggggggggggcctttttacataagctaacctattccggggggtttttttggggacgatttcctccacacgaacaatgggcaggccaaccgggggggggcagggg

SEQ ID NO: 370918 - DNA, 320 bp, Zea mays
ggaaacgggaagctggaagcagcaaacccaacccaacaaaagggacgggctacgggtagttgccaggggccagttaaaagggttaagttataaatggggggacaaaagttaactgaaataaggcccgggggggggcatttaaaaacacgggtccaaaacgggaaagggggcttatttacaaaaacaacgggggaatcctccagggggggccaaaaaagatttttttacccaaaaggggaaaaaaattgaagggattggggggggaaaaccttttcctaaaagttttccaaatgttttggggggaaaggaaacccagggga

SEQ ID NO: 370919 - DNA, 381 bp, Zea mays
atatcaaattttattataatgggcctttatattctgaacatgtatcagaaccacaaattcacaaacaaacataggttaaagcagttacatcattacattggtgtctacatacaagttactgggattggagaagtttagcagatcccatgctttttatgtttgtttgtgatttgtgaacgtaagacgtatgatgtacatatggttaaccagaggcaaagaaacgtggaggacttgtgctgcttgtcttgtcgtgcgtggcaggcatagccggcgatttgccacagggaggacacctgcttgcgctatcgtgccaccgacgcttggagcatgccgcagatgttcctggacgcgagcacggacttgtacatcttcatgacgagc

SEQ ID NO: 370920 - DNA, 261 bp, Zea mays
agggggggggcacaagaccctcaaaaaaggaattaaaataaaaaaggaagaggtcaatgggtcctttttggggaaatagggatcccacttaaaattaccctactttccaccaaaaaaggtttaaaaaccccataaattggagaaaaaaaaaatttggggcccaggataaagctcaccctaccatccccaggattataaatgaaaaccttaaccttaacctccatacctggtttaaaaaaaaacatgaagggctttttttga

SEQ ID NO: 370921 - DNA, 219 bp, Zea mays
acagggccaaagctcaagttttataacataagaagaatgggtatttttacaaggcctgatagtacccaaagtgcataacttattaccataattggaagggggaagcctttccattagatttttacctcccccttttaaggttcaagggctccacctgaagtaactaaccaaaagataagggaataaaacttttcctgcaaaaacaacaggggataaaac

SEQ ID NO: 370922 - DNA, 301 bp, Zea mays
ggggaacaaaccaattggccccccttccgggccaaggcccctgttttttaaggcccggggaaccggcctttatttggttttcccccggggtgaaagggcccttgcgggcaaaaaaagaatgcccagggttgccccccccccctttcgggggggcgccccaaaccgggggggttcgcttatctcccccttttatttttcggggggaccgggaaaaatctatccccggctagcaaaaaaggggggggaagggagcccccctttctggggcccgggccccaccgaaaaaaagacccccccgggg

SEQ ID NO: 370923 - DNA, 268 bp, Zea mays
gggggatagctgatctgggggcaacccaaggtcgtcctgtgctaatctgcttttaatgctacaagcatatcagtgatatttgaaaggacctgcggaagattttgaggaacatgaccacctggtccttacgggggtggaccctaacttccgtccattagtttaaactaaacgcctgtgtagcttccccaattacaaggttacaagcaaatgtaccttcgttttctggacttttcaatgcggtcccacggccgttaatggtccagttttg

SEQ ID NO: 370924 - DNA, 284 bp, Zea mays
ttccctttttttttttttttttctttgctctttttttttttttggggatctaaaaaaagctggggggggaaacttctttcattgtttcaaagcattccaccataagctgcaaagccagaaacagccctcataagcaccacttattagggcagtccaacacaaacgataagcgcgttgcatatcaagaaagaaccacaacatgtagaagccatataaacgcgtgcttaagcacagcaaaccaccaaaagctttttactgaaaaaaaaggcccccttaggcaaaag

SEQ ID NO: 370925 - DNA, 459 bp, Zea mays
gagagcgcatagtatagtatgatgattagacctgttccagcaggaagaaactgttcagaataagaggaaatggtccaagtctatgtttaggcgatatagttcgggacagacagccaagcaggtggtatatacaaggcactgggattcatactctggccaacacagtccacatagttatgcatataaaccgtacacaagtacatgagcagtttcatgtcgtttacaaaaaccaaccgaatattccatccaaaaaagcgaccaagatgtctatccacaaaagccattatctgtcacgtgtttaaaccacgggttagtcgaggctacaacaaatacgagaatgtcagtataaagttcctaaaaatatttcctatgtcatgccttccaagataatgttaattccaacatgttttatacccaacaatataccaattcttttcttctgtcatagaacagaaaatg

SEQ ID NO: 370926 - DNA, 283 bp, Zea mays
ggcaaccataaatgccaggggtcgtttcctgagtgagaaaaactttcaatcacatgaggttactgaagaccatgttatatcattcagcattggaagaacctaaaccttttgaagactcatgcgctgcaacccatgtcgagtggccaaagtgtacacgccccctccatacttgcagaatccattgcccatcctgggagatcaggaagtccttggggtgatgctttttaaccatatctctcactagctgtacagtgctcatctacagtgggagctgcctcaggcc

SEQ ID NO: 370927 - DNA, 298 bp, Zea mays
cttgtgggttttccttttcagggggcccaaggtttttcctttttgggagggccaactcggttggactaaaaccggggacacgtttaaaaacatcccataggggggggggggccacgggggaaaaaaacgaaaaaaaaaatggttttaagggctggtttgatgctcaaacaaatggagtttatctttggggggaaaaacaccttgctctctaaaattgaatagggggggaggttccccttctagggggtcccccaaattaccgggcaataaaaaccaaaaaaaagggaggggggaaaaa

SEQ ID NO: 370928 - DNA, 305 bp, Zea mays
attgcaacaagctacacgcacacaaggataaattggtgtaccagggggacatttcatcgacggagcgcacgttttacatgtatcatcagtcaacataattacgtattccaaggcttaaaacacacatgctctactgaaggtcacatctcatattgacctgaaacaaagcatgcctgtattttataacgcctactgataaaccttcaaacgtgccaggttctgtgcctaacctaggaacgaacagcgcaagcctatacatacatatattacaaacttcagcaaatataaagagcaaactgtaactc

SEQ ID NO: 370929 - DNA, 443 bp, Zea mays
aaatacaaacatcatttattcatgattaagcatactgctgcaccgacaactgtccctggtaaaacacttgacaacccgttcatgaaaccgaactgcattaagacacaaatcacatgtacttgaaactttgaagaacaccctactggcagagaccacaggcacaaagacaacccaggtgtacctgctgctgcttattttctactgcaaagaatagactgatcggtttatgatgcgtacagtcttgatctcgatctcccaatctccagcaatgtgcacaagaaatgaacgggacttgatgaaaaactaatgagcgttactccaggtgccaaagctgcatagtgtcattcaatgatccaaagctcagcctacagaccgaaaccgctttcagcgttgaatgaactgaaaacaattgtatctatgaatatcttccgctgcagattata

SEQ ID NO: 370930 - DNA, 447 bp, Zea mays
gacgcaaagaaaggctttgcattcattgactggcttgtgagctgaatatacaggcttatacaaaagagattgcctctaacatggacctcaacggcaaaaatatacaactgggcccagtgtcgtggttacaatttgacgactcaaggagtttgccctcacaagaaccacctccagcaacctagggtcaaactacatggaaggtagcagtgtggcaccaaaatggtgaggagaaataattatctacctggcaccgaggaggctacagttagctcaaagttgggaataaagagcactatcatccgcacacatcttccacagcacggacgcctgtacaggtaactttacaaggggaagggaggctcttcagaaatgcaggcccagtatggttcagcatcatccttgtcctgaatttgaggggtgagcatatacaccaccttggacaacagg

SEQ ID NO: 370931 - DNA, 244 bp, Zea mays
attacttgctcgacttacccacccgttcatgcttcccgatctggcaaaggtggcagaggagcgggtttaaaggcctttgtgttttttgaccccactgacagggtcgccggaaatgtgctggtgaggaagcttaacggtggcaacgcggtactggatttggtgacagctgtgtttccaattgagcatgacatgtgcttcccggagaacttggaggacctttacttcgagaggatccattgggctg

SEQ ID NO: 370932 - DNA, 62 bp, Zea mays
aattcaaacctgcatccctggcaacagataaacccacgcgcaggtggcaacagaacaactac

SEQ ID NO: 370933 - DNA, 403 bp, Zea mays
aacaaaatatagaagttgaattaaaatggaacttgttcttacaataaaatcaagaagagagggaaactgaaaaggcagcacaaactgaggccagctaccccaagacaaccacgattagattgcactagtcaccacaagtatagatgaaaaaaagaaaaaaaaagtatagatgaaattgaaatgtggagctgtcgacggtgtgaatgacagtacttattggggagggttgaaattgaatagtactgcagaaggaaccatctgccacgtctaaacacgaatctcttggacatgttgcatcttatgatgcattccagtgttgttccactcagtcaggaagtccctgtgcagcttgacaagagagagcttcttcagggagcgaagcgattcaatgccttgagggacc

SEQ ID NO: 370934 - DNA, 347 bp, Zea mays
ggaggaaaaaccccccccatttaactttttcttggggttggagttaagggggtgggccatgggcccacattaactgggtcccccacacaagcccactggtaaaaactacccggactggggccttaaacacacacacaagccctaacgggacaaacacacgggcagacatggtggacacttgcacagacggggctacagggaaacgaactttacacgtacgatataaatttttggtacgggccatacccacgtaccaggggcaaaaaacgcatggttttactaaaccaggcccctcccgcagcccagggccagtttaagggggggacgcccccagggccagggccccc

SEQ ID NO: 370935 - DNA, 223 bp, Zea mays
cccccgacggagccggaaccgcgggcgctgattcaaagccggcactagcagcaaacaacctagcacgccagcaactcagtgcatcagaagctgaagcgcagctatatgaacggcaagctgatccaacaagcactaaagcaaaaacagggcaacccgaacagcgcgcaagcttgacggagggaaatgacactcagaaaaaaccaacgatcagcggaaatgcgac

SEQ ID NO: 370936 - DNA, 247 bp, Zea mays
ttcgttcgctactcctgtcgtgacccattcccgggcctctagtggactaggttctgtgttgactttagccgcagaaatttctgtaagacatgggatccaacttatgtaaagactatctgactgacagcttacaacgctgaaatctggtgattattcctgttgcactgctggatgtcgagctcatttttaacaatattaagctccagaaacatatggacgaatgcgtttcgttgcaggacgctcttta

SEQ ID NO: 370937 - DNA, 202 bp, Zea mays
gcatcaatgtcgtccacactctgatcatgttcgaagtaagaacttttgtcatttgcacacaaaggggataagatttgcgctgcacaatatgcgggtgcgtgagtacgtattacttaatcccgcggctctggctgtaagtggtttataacggcgtgccgggagcaatcaaccgatcctggaagattctggggaagcatggcgc

SEQ ID NO: 370938 - DNA, 374 bp, Zea mays
  unsure (1)..(374): unsure at all n locations
tcgttcacgcgtccgagcgatccatccaggcgtcgcgctccgggaggaaggggctgacggtcgctgcacgcgaagaaggcgtgaagcggcggcggacagcatgctggcgcagccgaacgtggaggcagagctgaaccaggggcggccggtgtccgagaagtcgaaccggcagaagctagacacgctcgcggctgagctggtgaaggagcaacatcggcgggcgcacaccccgggcctgcccaccgtggcgagcaggcaggcgcgccccacggtcacagacacggcgtggatgggctgcgacaccgaccgctncatacgacaccgtacggaccggctncaccgtgccgtacccgtgagggcaagggtcctaccag

SEQ ID NO: 370939 - DNA, 436 bp, Zea mays
ttggttgtggtgcgcatcgtgcttggcgtccgcctgcgcgggctgcacctggaacctctgcacgcccgggtcatgggcctgaccccgccagtgcgggcgactagctcactgggggctgttcaccgcctgggttatgctctgcttgttgcgtccccaggtcgccgagccggtcctcaagcatatcccatggataaatgcggatgatcaaacaccaccagaagaaaggtttcaaatgaatgctgtatttcgtgtaagcctggggaacttcttgttctttgcaatatgttctctagtgatgattgatgtgaaagaccaagatgaccggcgagatgcctggcaccatggtggctggattgcaaagattgctgcatgggctgatctcattgttcttatgttctgtgtgccgaacattgtcattactatgtacgaggtactt

SEQ ID NO: 370940 - DNA, 285 bp, Zea mays
tttcttaaggtgggtggacgctgcttgaggctccgaaactccaggaccttcaacgtcactgacggcacgagttgtgtgcaacgcacggagcgttgaagccggcgcccgaatcggataggctcgacggcgatgtgatgataagtagcagatgaccagagtctactccccagtcgagcgagagtgaagagtcgtagcggagcggagcggaactgagtgtcgatcgccgactcgaatcgcggaggccggtacccggtgatgagggttcaggacggggacctggaccgc

SEQ ID NO: 370941 - DNA, 514 bp, Zea mays
tttttcgcgtccgtctacatcagcagcagagcagtctagggttcagtgggtgtttcataatggcatgtatcaggatgaccaagtgacttacggcagacggacatcataacaattggacttgttaggctccagggtttgccgtttcaggtttctttctcttgagattttattcccgtgtgtgccatgatgaggtgatagatagatcatgtctttcttgcaagttaatatactagccattgcttctacagatagaggagtgactgaaactttgttgagaaaatatagcattttacataagaaccctgtggaacaggaagtcaggaaggccatgaaaatctgcttaataagagctccatcggcatacagtatttgttatggaagctttatgtgtttaggccttgttcgtttaggaggtggatcgaggggaattagaggaattgaataggaagggatttgattccccttaattcccttcgatccccatacaaccgaacatgggctgagtagaaagttt

SEQ ID NO: 370942 - DNA, 502 bp, Zea mays
tggttgttccatcgttattcttctgtattatttggatcatcttcatgactcagctgcacctcagaataaacgtggaacaccacacatcaaatattttgatagggatattattcaagcactaacaagagctgacaagggcaagatacgccaaggacaagaaccatttggacattgttcgttccgaagcaccacagagacctgctacacagctgtaccacctgttgaagcacaatttaagcataagaccaggacaaacacttttgatgtaccgcgtcctgacccatctggacagcacacaattcacatcgaactccgctcatcagggatttgatatcaagcaagctgaatcagcttccatcctgccaccgcctgagtttcatagagaagttgtcacattatgatacagaggttggtaaggcttggtcagttattaaacagactcttcagcagattgttgagaaacaatacaatctatctgatgttttttgcgagttaattgatg

SEQ ID NO: 370943 - DNA, 285 bp, Zea mays
attcgctctagcttctttccctggcacatatcatacatttgctcgatctctgcacgctacatacatacaccgacataacccgaaaaggaaaagaagaaaaagaagagtagattaataggaggatgaatgaacacatgcacgcacggcacggcgatgccttagttgtttccgtcgccattggccttggccttcctgaggtgcgcgatggccttctggagcgacggccggaacctattcatgtgcagcctcacgtcctgcttgtcgaggtaggccctcttgagggac

SEQ ID NO: 370944 - DNA, 270 bp, Zea mays
gggaaaaaagtgcagctttattaatggagggagtacatcttttttattacaaggaaacatctttttattacaaggaaaacattcataccagatatgcacacagatctctcgcactccctgcaacaacccacagatctcccggctcccgatagccaaatttctctcaccacccacatgccacaacatacagttctgtcccgagggaattccgcaggctgtgcaaactcatgccggtaattacactctgccgatgtacaaagagcgaaaaac

SEQ ID NO: 370945 - DNA, 434 bp, Zea mays
ttatgagtttcagaaaaatagtttctccaatgtgggcaatgacattgcttagcttgtatgttagagttcatgtcaccatattaggcagaatctgacgcctttaatgtaaatggacacaagaccttcgttgcaatggatgattatcttgtcactgacaaaatcactgcattcatagtgcaaacgcaacatgcagcaactgaagtccttaaagaaaagcaaccaaaagactgtatgaaatggaccaagtattgcagacaatattacaaatattggacacgttcatggctctttctgaagatactcatggagaaattatcttgtacctgagaatcccccttatttttgcacaattgatggttgtgtcctgtagtggctttgataattcatcactcctaaacgattttagaaagctataccaactaatgtgtggagga

SEQ ID NO: 370946 - DNA, 459 bp, Zea mays
ttcccacgcgtccgcccacgcgtccgatcttgaatctgtgaagcgagcccaagaacttgctgctaagatggggtttcgccaagatccacaatttggtcctcttatcaacttattccctggtacatccactgaagttactgtgccacaaaggcctgcaaaggctcctgttcttcgccttgatgcccaaggtagggaaattgatgagcagggaaacgttatcagcatgacaaagccaacaaatctgagtactctgaaggtcaatataaacaagcagaagaaagaggcttttcaaataatcaagccggacttggactctcttgcaaaatcaagtgttcattttgatgaacggatgggcataaaccaaaagaagctccttcgtcttaaaaggccaggatttcagttcgttgaagagggtaaactcactaggcaggctgaattgcagaaaattaagagtcaatt

SEQ ID NO: 370947 - DNA, 291 bp, Zea mays
tgtcacgcgtgcgaggacacgtgggcagacgcatggtgggaccaccttccaccttaccccagggagtggctcggtgaacaaacgccaaactgaacaaatctgcgactgacgaccatgcctacggcgagcctattgggtcaggcgacgggatcaggtgacagcctgtagctgcttggcctgacggacatacactatgtaaaggagttggttatctgccaaagggcccttaaatgcacggacggtccgggcagtgagccactcgggaacctgaccataggacttcaagggatc

SEQ ID NO: 370948 - DNA, 447 bp, Zea mays
tcttcttgttttggattgttggcagggtccaattttgtgaaaggaatgcttttgctccccttgccttttcggatcaaaatcttggtgttgactgctaatgcagttttggattgttggtagggtccaattttgtgaaaggcatgttgaactgctgatgagtgacgaggggcgatgatgctcaaccttttccaaaatgcatggcactgagcaatggagcctgctacaactgtctactttgagctaaccctctcccccacatgaagcctattttaatcacccctttttggtttgtggttgtgcctaggatggtcattcaaatatgtgacaaccagcacagtttcacttacattgaggtgattaggtggtgctgcaagaaaagtgagaaggccgcttgcatggcagaataagggtgatgctgagccctttttgtgtttacagacttatcac

SEQ ID NO: 370949 - DNA, 214 bp, Zea mays
tttcctgtcttcttaacggttagataacacacgaacggattaccatgagataacacgtgagttaggcccatcaaggttggatatgatgcatcagacatggggcaaaggacggtacacattgcctccttcaaaaacaaaaacaactactacttgacctcatactaccgccaatacggtctgtgatagatggtcaagtagatatcagagttctgca

SEQ ID NO: 370950 - DNA, 302 bp, Zea mays
ggaccaaccggattcttctttggcagtcttctcgcaacgtcaactcaacagtgaacagcaaaggagcagagaaaaccacatcaccgagagacggcaacttacaaagcagatcaggaggatttaagacgtcccaatttgactgccaaagttagacaatggtggtttcaggaaatacagggttacaggaaactaaaacactaatttcgttcggtgactcgaacgctacttcatcccaaaagcaaatgacagcttcggccgcgacttgttcttgcccagcagtttcatctggttttgcctctgct

SEQ ID NO: 370951 - DNA, 333 bp, Zea mays
  unsure (1)..(333): unsure at all n locations
aaagtacgcccgccggcacctaccgggccggcccgggtcgactccacccactcttcttcacacacgagaagaaaanaaaaaanaaaggggtttactgacagactttctgcagaatggagccgcagagcgaggactgaagagcaaaagaaaaccacacaccaacaccccgactcaacgaaaataaccaaccagcaatgaaatcatatcaantaaaaccaaatacaagactcataacgacaaggcgccgaggacaaggggggggagacggagggcgaccataaggcggcggagagaaaaacaacattctcaagtctggccccgaccaatgcaacc

SEQ ID NO: 370952 - DNA, 333 bp, Zea mays
tttttgtccaacgctcccacacatagcccaaaagactacaatctgtcgtcgaatacggctactacctgccagagagagaaagagagagagagaccgaagcaagggctagacccggaccggcgagcatgaagggcggcggcggcgactggatgatggacgataaacagagggtggcccatgcatgagatccagaccagtttcagccccgatctgcgcgcctgcatccgatgccgtctgggcaagagctaccaccagttcattggagaacgggtgcgaaaactgcccgtttctagagacggacagagagcacggcaacttcgtcaactgcaccac

SEQ ID NO: 370953 - DNA, 372 bp, Zea mays
tttttgcccaacgctcccacacatagcccaaaggactacaaacaggcgtcgaatacggctactacctgccagagagagcatgaccgagagagccggacgcaagcgctagacccggaccggcgagcatgaagggcggcggcggcgactggatgatcgacgatgaccagagcgaggcccatgcagagatccagaccagtttctgccccgatctgcgcgcctgcctccgatgccgccttgtcaagaactacaaccaggtgatgtagaacggatacgaaaactgccacgttctagagacggacagagagcactacaacttcctcaactggacgagcgagaacttcactgaaaataggtccctgatggaccccagtc

SEQ ID NO: 370954 - DNA, 372 bp, Zea mays
ttttgccgtacgttcctgcatttgcccgccgtgccaccacccggtcctcctatacggctgtgactccccgtgcagaagccgggccacaaaagccaaaccctaaccgccgaccctccgaggcgcgccagatcggcgggggcgcccactgctgctgctccggatccaatgcagtggctgccgtagcgcggaagctgccgatctgaggcggccgcagcggcggcagccgcggcgcttgcgcaagtgggacagggatgacgtctgcgccggaggcaggggcggccatcgagcggaatcagcacgagggaggtggccgccccacggcgggcaacggagacacggttatcaagagtgggcctcttttaatatcatcca

SEQ ID NO: 370955 - DNA, 332 bp, Zea mays
tgtttaaccaacctccctagagctgacagctgagagagggagagaaaaagttatccgactgaaacgtcatgggcgcggcaagggcaagagactggaaggccctgggcgcggaggttccgagcacattagatcggcgagggtgacaccggcttcctctgcgacatacacggtctcagatcttgcgcgcctaaggccaggccgccaggaggccctatgaaggaggcagtgggccgggctccaagaacgtacaggagatgctccatggaattaacagatacatgccaacccaggcgattcccccttaggaaccgggactcccaatgcctccgacc

SEQ ID NO: 370956 - DNA, 183 bp, Zea mays
gacggtcgcccaaaggatgtacattagcccccagaaaaaaagggctccactatatgaatcttttacaatgaaacattgtacatactgctttcggaagaagaggggtcgctaatataacaaagaattgctgcattttctccctaaatcattttactggcccgggcgtaaaaaaaattggaaacc

SEQ ID NO: 370957 - DNA, 224 bp, Zea mays
tgtcctgtcagccaacccgtgcacacaggcatatctggagatcctgtgacaggtcccagcgggggacggggaggcgagagcttgccgcttgcggcattcgacacacggccgaagtcgaagaactggtgctcataaccaccgaatgctacaagggccctaagttctacatgcgctacttccgatgggcggggcagaccgcgtaggagagcgcctacgcatggaac

SEQ ID NO: 370958 - DNA, 146 bp, Zea mays
cacatcaactctaaaccaaaggatagagacaagcctgcctttaatacaagggccgcactagcacccagcgcaaaaatagcacatgccgggggggtacttattgcacttcgcgcttggccacaaaaggttcagggtctccacccacc

SEQ ID NO: 370959 - DNA, 399 bp, Zea mays
tcttcgcgtacgtccacgcgtccgcccacgcgtgcggtctatatcgcgagcggacgccctttttttttttttttaataaaaagtataggtagtgaaatatatatgggagaatatggctggagacagtcttatatacaaacatggaaatgaacggtgtgaaataccgaaatatacagttgtatgctcttacgttccaaacaaaacatacatattccgatagaggcaaagcattttaccttgacaggaacctactattatagaattctaaatacctaaacctgtattgtaaactgtcacgctttacatccttgcctggaatgctagtcacaccaagtatgtttaagcggatgatgcgaaatcgctggaaagtccatcattctcaatggtgtgcaagtgagc

SEQ ID NO: 370960 - DNA, 273 bp, Zea mays
ttcttcttcgtcgtggcacagcaacatcagtcttactgcttctaatcttggcaaccggcatgggcagcagctgtaccactggcttgatgattttctccaggtcattgaaagaaacagcaggcgcatccggcgcagaacatttcttagagtgacgctttcgcctaaaatatacctgaaggttggaagggaggccacctctgcgattaatggcagcatcctgcggctcaacagacctatgcctcttatcagggcgaggattaccctggttagaca

SEQ ID NO: 370961 - DNA, 340 bp, Zea mays
acctgaagcgagcagcatctattttatttttgggacatatgtggaaaaaattgtactgatacttcccccactgatgtccacgccatgtgcattgcctgctaggcatctatgtatatatcattgcatgatagaatcatcatggagacgaactcactgatatactggaaactcgatcgatccataatacatgtcttgtaaaaggtccatactgtcactcaagtatcctgagagaccactgtggctctaaaactattgattaggttacataatcgctcgagattataataagggcttagatcagcccactcctactaagctgggtttattaaactattttgat

SEQ ID NO: 370962 - DNA, 238 bp, Zea mays
ggtgggggccaaaaccctgttcccctttttaaggccttttttttttggccgggcaaagtttattaacgggggggggccccccggggggggggggccgaaaaaaccagggtcttccggggggggcttgtcgggataatttcaccttcttttgggggcttggagattggtttaatgattttattaaacaaagtggtgcccggccccctcaaatgcacccgccggggggggaaaagaacaa

SEQ ID NO: 370963 - DNA, 268 bp, Zea mays
ttctagtcgcggggtcgcctgacacctcctggtggctcacttccacctgaagctgatgcccatcccgccctcggacttgccacccaccgcaatgcatgcatccatgcagccgtctgaaaaccaaacccacattcaccagcgagcaagcttcccctgccctcctgcggccgcctcattctcggttccatataaatctgaaactgcatggacaacccaccacaggacacacgaggtgaaaggagatccgtgaggaggcgcctcccccatg

SEQ ID NO: 370964 - DNA, 195 bp, Zea mays
gggggcccatttttctaccacttatttataaacctcagaaggaaaacaaaatccatttttaagggcataaaggagggggcaacctgggctttgggtacccctgggggtggggccgggggataagttcagaggcccccctggggcagggggataaaaaaggaaagggcccatttgaaataaaactttgactggggg

SEQ ID NO: 370965 - DNA, 424 bp, Zea mays
aaagaaaattagaataactgataatttacaataaagtattttacatatgttctgtgcatggtctataatcaacatgatggcccacaagaatttttgcaaaaccatatattttacatctcatgtgttcatcgtctataatcagcaagataacccataaaaacttatgtatatacaccttggcatgatgttgcccacaatagacgcttcgaaaattgaactattgataatgtttaaaaacctactcatctgcatcctcatcagaatcctgcacaacttgttttgtcttagctctcttcgtccgtgctaataattcttcctcttctctatcagattcagactcctggactggactaccatatggaatgctagacctaatgatttcatcagcatctgcttctgctggagtgtttggacctcctgcatc

SEQ ID NO: 370966 - DNA, 252 bp, Zea mays
tgaccacgcgttcgttcacgcgttctgtgggaggggttttttaagagtttgttttgtatttgcattaccgtgagctggtggagaatgaactatagggatggattgattgattgagtgcactttgaacggaactgtcatggttatggcatttgagatttacgtgatctacatcgacgacatgaacaacatgggccactgcagcttcgaattgatgtccaattggctctgcaaatggtacattcctaacaagta

SEQ ID NO: 370967 - DNA, 305 bp, Zea mays
tcgatcgcccgcgcggccaggcgttcgcttgggagctagtactctctacatgccaatatacaggcagatctgatgaatagaggcagaacagtggcttccagcggctactgttcagggggaaacaggggctgcttctctccctgtcttccactcggacttttaggggtacgagtctgtctcgtaaacctccacttgttgaagggcaatgattgcagtcatgcatctatcgctgtctagggaatatgtggaggggagacttgcttagacccgtgccccatgaggcgttattgctggtcatggaactg

SEQ ID NO: 370968 - DNA, 446 bp, Zea mays
tctttttttttttttcataaaactccggtaatttatgaattgatattcattttttgagtatacagttaggcagctgcgtgcagcttacgttctttacgaaacaaatggaaagaatagtgcaattgaaggtacaatagtattggcacaaagtgatagtagagatttttaagataaatgcttggcgcgtgatggtaactggctaagcatacttgaaattgtcactggctaagcaggagtcacgttattaggaaaaaggataatgagtccttgcctgtttgtcagcttacaccatatcaatgtgtaatatgggcccgctgtttgtattttcatggaattcccattttcttgaaacctgcacttcgatggttgccaacatatcttgaggttttaggctacggagtagagcacccgccattttctgctttagtagaaatgcttgaacaaat

SEQ ID NO: 370969 - DNA, 116 bp, Zea mays
gaagaaattaaaacaagggcctatttgtgttggtgagaaaaacggtacaaacaaggtttgcacggtcacttaaaaccaatgttagatggcctatgaaagctttgggggggggatcc

SEQ ID NO: 370970 - DNA, 423 bp, Zea mays
gacgctgaaaagattgcttcgtcgcgcgttctccgaaccaaggaggcggcggattagatcaggcaagggaacatggatggatgattgcgcctgtcaaagcccgaaactgaaagctaaaatgcgtgtttttgttattacatcttcatatttacacagtacacacggatgagcacagacaagacaacgcagcagaggatcttcccatcccagtcgatctcgagctgaagcggagcccagatccagaaactgcgcgagacgaacaccaaagcaaactgcatcgattcaagaaagggaactctttttttttcgtgcctatttttccccccgtgccaagatgtgacactgactgagcagccgtcgccgtcggtggatgaacggatctggtccttcagcgcggctgctggatggggcgggggctcaccc

SEQ ID NO: 370971 - DNA, 145 bp, Zea mays
cgaaagggaatcattagagggttcagtacatgtgtattcacacgaaatgatccaggactacacacacctactggctagaagacggaggcatccctgggaagcggctcgcagacaccctgggccatgaagaggccgacatagacca

SEQ ID NO: 370972 - DNA, 154 bp, Zea mays
atcgaacacgtcaaggttggcaggtggattgacgagcttccctgccctcggtttggggggaagcaacatcacatatgtccaaggtacagtctggacgccgcaccttcatccaagagagacatcattccgtgagccagtcctggttgtaacactc

SEQ ID NO: 370973 - DNA, 265 bp, Zea mays
gtccaaaccttttctttgggtttttttttgagggaactggacatcattaatacagagggtattaacagcctaataaggctaaaaaaggtaccccctttttacaaaatggggcctgggggattagacattcaaaccagagccctaacaagagggcgactattgcttttatgttccggccactagccttctctgattggccttttcacaggtccaaaacgtttttgcatttttcccctccctgaactcaaattcattggggagggaa

SEQ ID NO: 370974 - DNA, 271 bp, Zea mays
tcatctcggacgcgagggccagctctcccagcgcacgagcacatggcgtccaccaccctcctcgctgacctgctgctcgcggctgcgtccgcagcggcggctgcggtctggatcacctcgcgacctgcaggcgctgtcgagcgcgaagcatgcgctagggaacccgtgaacgctgcggacgtggaccccaccgtggcccgactgctgctcgggggaccacctgctgtgtaacgacgccggacgcgtgaaccacgtgttcattgaccgcgcg

SEQ ID NO: 370975 - DNA, 330 bp, Zea mays
aggaccggccggaattcctggtcacccacgtttcctttcacccgtcgcgcttccggacgcaggggtggatggacggaactgggtgccgacagcgcatgggctaatttgtgcacacagccggaccagctccgcgtgccgtagacgcagtagttcatcccgaggggcgcgtccgcggcatcgtcgctggccgagccgttgtacgacggctcgtcgttccagcgtcaggcgttcgagagctacggctaccttaccaagaccggcgttatgttgttgatcccgaccagcacgctgggttcgcccccgaggccgtcgtcgttggagtccctgcca

SEQ ID NO: 370976 - DNA, 308 bp, Zea mays
ttctgtcacacacacgcgaagaaaaggtgatggagtgcaggttacagacaggcagcgagcaaagatgtgtggcggtgcgaccctagccgagctcatgccgaccacgccggcgcgccgtggcggctcggcgtggcccgccggcaagtgcaagcggatgatggcgaacgacttcgaggctcggttccgggagttcgacgaggactccgaggtggaggtggcggtccacgaggggatggtggagagcaagcccgcttgcgtcgtgcgcgcctcgtccgcggcgacgcataccatggcgcgccaggagcagt

SEQ ID NO: 370977 - DNA, 184 bp, Zea mays
tctcacacgcgcacggatatgaccgccgtctgcgtgcctcttcaggactgctgctctacaccccactgccgggcaagagcggaagccgaggtatggccggccaggccgtaccacatatcgtccaggggagggaggaccgccgggggcaaaggcatgatgaccgggagctcgccgcataggagcg

SEQ ID NO: 370978 - DNA, 166 bp, Zea mays
tcttttttttttttttgtttaaaccatctttctttgggggtgcataacacaacagggccacaccgccaagtgtttatttttatggtgctcaaacatgaccattacacgcactttctaagagtcaaaaagcccaggcttattacgttcttacaagctagccattgca

SEQ ID NO: 370979 - DNA, 379 bp, Zea mays
gtgtggtcaagcatgccaccggggtatatgatataatcatataaatacaaaagcttaaagaggatagaaatgtacaaacttactatccaacttacttaacaagagataatcatagagcactgaatacaaaaaggcagtttcgacagaataatatactgtataagaagacactttgcaaaaaaaaatgacctccaacaaaaaaacaagatacttaacccattattctgaaacgttgaaagtgaagcccaatctgattatatcagccgtgcatgatgagtccgtgacacccatcccttggtgtgtttggacaagcatcctgactcaaggtgatggacatcgttgcttgaaaccggcgatggcaggcccaccgtaccagtcc

SEQ ID NO: 370980 - DNA, 190 bp, Zea mays
gtggccaagaccaggggggatgatagaataaacaatggcaggcacatagaactataggggggcaaactccaatccatctcgcccaagtccgcagcttgggacatacattgcggactgacttcacaaaggcagcattgaaagcatcatatgatgaacaaaaagagagggagttcccttacgaggctcccct

SEQ ID NO: 370981 - DNA, 155 bp, Zea mays
tcctcgtcgacgcacggacacccggcgtcaggggcggcgcacaaggaggatccagagggtggaacgcaccagagtcggcaggaaagggcgccaacaggcccaccccctgggacatgcgggcaagaagcacacctcgaccgcggcaggatatgccc

SEQ ID NO: 370982 - DNA, 203 bp, Zea mays
ttcttcgcgcacgcggacaacgcgaccgccgacggcgacgacaaggacttactgactgtggtgctgatgggggtcttactggaggaaccgaccggcgggaccgcgtgcgcgaccacccttgcgcacgctcaggatctcatccacgccgctagggacgacgacttcaaggaggtacacatcctgcactgcggtggcgtcatgct

SEQ ID NO: 370983 - DNA, 205 bp, Zea mays
tggacgcgcgggcggtcacgtgggcagggcgggacttttggggccggacgcgacacgctcaccggacggattcagggatggtggacatactgctcacaacgcaggacaggcgacgctaggcgagagccccagacggagcatgccaccatgtgcagcaccctcgatgacatcggccggcatggggtctcccatcggaagcagctgc

SEQ ID NO: 370984 - DNA, 279 bp, Zea mays
ccactagtatattggtactgtgctagtatatgactggtgaattacaactctcccctttatctgcacactgaagcgagaccattgactcctgtgagtcataccacaggttttcatggtcaaacaaccatttgccggtgttgccatagactttcatccaaacacgcaagaagaaatttgcccataacctagacagcgctagcattgctgattctcttgaccctgaagtatacaggatctttgagctccttgactttgacgttgctccactcgtttgtgctt

SEQ ID NO: 370985 - DNA, 411 bp, Zea mays
ttttcgctccggcgcgtcgagtcccaccgcgagcccaagcccaaggccgcgctgggccacctgggcggcggtgaggagcacgagcaggaccaggaccagcaccaccgcatcaagtgcgccggcttcttcggcggcggcctgggcgccgcggccccgccttcgtcatcctactggctctcggcacccgacggcgccagcgccagcgccagcgggagcgcgaggggctccggctcgcggagccaccggagctgggcttgggcgctggcgagccccatgagggcgctcaggccgaccagcttctcgtccagcaagagcatcatggccgcgcccacagccgcgtgagtgaagggcagcggcagcatgcatgcagatgcggggggtagctcatggggttgatgctgccgctgcgtg

SEQ ID NO: 370986 - DNA, 347 bp, Zea mays
cagcaacggaaggcatatttcagcacttcgagtgtccaaggcatatactaacaagatgtacaaagtttctgatgcattttttgtcctgtacacatgtcaaaactcaccggttagccaggcacacatctggacacagcagcaccggctacctatggctgttgcaggtttatttttgaacaaatagctacgacgacatattcatcaggggtgaagaacagagcattgtcccaaacaggtttgtggatgcagtccagatgtacaactatttacacagacatacaaaactttacacttaaacagcgtttactttgttgcatttttgcgccctacccatattcaaaccgtgc

SEQ ID NO: 370987 - DNA, 219 bp, Zea mays
ttcttgggaccacgggctgtccgccgctcgaggggccgtggatacagacctttgcggtgatgatgctgcttgaccctgttgagggcgagcccgggcaactggcgttatcttggtcctggggggccattgactttgtgtggctgagtccatgatcaaagatgaactgactggccatcttcgttgctgggtgaacaacttgaaccgcgcagggagcgtgac

SEQ ID NO: 370988 - DNA, 245 bp, Zea mays
aaaaaaaaaaaatttgaataattgggactaaaagaaaggtaaaccgcctttccaagggaaaggcagcacgcaggccccaggctgggatctcaggacagacttgggatttttaataagtatgaaagagggacccgatgaccctttcagggcccggcaattttgatttattccagacaagacacaacggcctttaagggaaatataaaaaaaagactcggcacccattagggggcagcgaagcgatc

SEQ ID NO: 370989 - DNA, 165 bp, Zea mays
ggggaggatgaacgatttatacaaaaggaactttacatgacctcacacaagctttgatgcttacaattccatttttgtaacaaaactttatcaaccatttaaaaaagcctgaaagttttgttttgcacaacaggggggaaaacaaggataattaagctattacta

SEQ ID NO: 370990 - DNA, 311 bp, Zea mays
ttgttggggcttctgttcagtgagcatgacatcagaccttacaaggcgtggcccgcgggccaggaccggcgcaccatgcaggcacctacagcggtttgctgtgacatcacacaagacctgatagggccagtgttaggggtctggtatgaacaaggtggatgcaaagctgacagacattgccgctgtgatatctattgggagggcgttttgatttaaggcaatgctagaacttaacctgaagatactacatggagaagaggcggtaagtgtcgagcacttgagtgcgactgactcgatatcgatggacaacc

SEQ ID NO: 370991 - DNA, 365 bp, Zea mays
ggaggcaacagctcagggggcaagtacgaggacaccgagcggaagaacaagggcgaaagacgcgagacaccacacgccataactacagaacggagacactgagccaaagccagcgtaccaacccaaagctgcaccaataatacagccacgaacgccaccatcagcatatatggcagaataggaggcgcacggatagcatcaaacaataggagacaactaagccaagcaagcatgtgagctgtatagccaaacaactagcacaacgcccggatgtggtacgggaacacgaaagcactgaacattggaagcacaagcactctcatcacctgaaaggtagaactggaaaatcaagcaaaaacaaataa

SEQ ID NO: 370992 - DNA, 528 bp, Zea mays
tctgtttgaagctcggcatgctggtctcgtcgtgcaagtccagccccttccacccgccaccgcagcagccggtctccgccgcttctccgtcctcgacgacgccgccgccgtccaaccgcgcctcctccgaggcgccgccgccgccactctaccctcccgcggcgtcgcgcaaggtgatgcccgcgcagagcgcgggcggcggcggcggcgggctcaagaggagtaagtcggtcgcgccgcggccggaggagccgctgccgccgcccgcggtcacggcggacagcccgcgcaagaagagcttctggtccttcctccacctctcgtcgtcgtcaggcagccacaagggcggcgcgtcatcggcttcggcgggcagcggcggcgccgcgaggaggaactccgtgtcggtggcgtcggcctcgtcggcgtcgctcgggggccggctggaggcgatcgtggagccggagagcccgggccgccggagcgagggctcctcgttgtcgtcgttcgggcggaaggtggcgcgctcgc

SEQ ID NO: 370993 - DNA, 100 bp, Zea mays
  unsure (1)..(100): unsure at all n locations
tgatttgttgtttcagcagcaccggatgtacaagtattgagtttgggctagcaagaataagtaatcaaagaatgcgacacgactctgtctttatnaactt

SEQ ID NO: 370994 - DNA, 543 bp, Zea mays
  unsure (1)..(543): unsure at all n locations
tctttctctccacattcgctcgcgctaccccgcaagtcgaggccttccgctggcgctcgctcgctccgtgaccggctgcctctccgctccacccctgcgctgcgaccggaggcgaccgcgccccgcggtggcgctgcgacccgcgacacgatcagtgtgactgagaggggagggtttccagtcagtcatttatgaatcctgaggcctgtgcttactagagggagggcaaggctcgttgggatccgggatgaaggggagaaatgactcggggcacagcaagaggccggttgtgctgtgctgtgtgatgattgtgtgcctatgtctcctcttcttgtatttctcgggctccaatggacaggctgggagcgccgcatttgagtacgggaccaaattctcacggtcacttggatggggcagtgatgatggtgaggatggctctgaagagtccatttttggaaccggngatgcagatgatggtcagcccaagagctttcctgtgtgtgatgacccgcactctgaactgatcccctgcttggataggaa

SEQ ID NO: 370995 - DNA, 519 bp, Zea mays
gggctaatgtcaaaggctcatctggtagggatgagattacctttacagaaactgagttccgtgatgttagtttgcagcggaatcgtctaccacggaaggcagaggatgtagggagaaaggttacaggtggttctgattcagattcttctggtcgccagggaacaaatttgagcaggcaatcatctattaccaaccaggaactaaacttgcaggctagagtgatgggaccaggaaaagggaaccaagatcggcatggcgaattgcaaatgaaggctaatgagttggagaaattatttgctgaacacaagttaatatcctcccgacgaggcaaacctacagatgttcaggttgatagcacacgtacggtgagtgaggtaaagccgataacagttcttcatgagacaattcatacaaaacaagttgtaaaggagagtataacaaccaatgattttgatgccagtgagcttctgaagatggtgagtaatcaaggatttaacattagcacaccacaaaaacttg

SEQ ID NO: 370996 - DNA, 256 bp, Zea mays
cacagcgcaaagggcagaagccgcactgctaggggacgacaccgaggaggaggacgaccaggaggagggcgcagaggcggagagcgacaggagcaacgagcaaagcaaggcgagccagcccgcggaggccaagacgacagacccgccagaccgggccgagcaagcggactgcgacacgctggcaggggcagaccacaagggcccgggggggtacaagaactcgccggggaagggcggaaacaacaaaaaccccaag

SEQ ID NO: 370997 - DNA, 221 bp, Zea mays
gcaaaaaaaaacagggggaaaatattaatattcgcatgaacatttcaaaggaggcttatacgaaaaataaaaagagtagttgtccctagtcataactaccagtgctagtagatgtgaatatgtgatacaacgtaggggggacaacaattcaacatgccaccatatctcaatgagcaatggagccacatgagtactactgccaccattaatgaaggcacaca

SEQ ID NO: 370998 - DNA, 471 bp, Zea mays
tgttgtcaaactactccgctccacacctgcaggcaggtccgttccttacgtgcccgcacacagcggagccccaatctttccaccacgcgtgacggcgacaacgccccatgcatctccagggcgtgtagaggcggcgtccctccctctcccgggcgtggcggtggccggatgcggaggaggcggagggaatcgtcattggcggtagcggcagcggaagaggaggcggtaccatgaggggggcgcggacggaaatgggcgctggctgcggcggcaggaggtgggacagcgagcctgtgagcattcaagataaattccgggcttaagaactttgacaggagcagagttgcatttggggtcacagttgcaaataaggtgtggacaatacatctacctggcaacgctcacctagaggcactatttagctcttgcacacttgtctgagactatatgatgtgaaaagagaggtgtcta

SEQ ID NO: 370999 - DNA, 489 bp, Zea mays
ggctgttcagcccgagcacaagcaccagccgacgcggggctccagcaagaacaacgtccagaacccacgcatccgccacagcgccagcgccgtagcgcgcaaacacgagcctgaaccaacagcagccgaagacggcgctacaccggcaccaaccaggcagctcaagcacagcgcagagaccagccaaccaggggacagccggaccagagcagcaccaaggcagcagcctccgcaccgaccgaccagccgggagcgctggaccagccgccggaggccggagcaccgagcacggggagcagccgaggcgagcaaccgagcaccgacatcgagcaacagagaccgggagccaagcagggctctcgcaagatcaccacaggaacaaaggagcagaaaaggctatgcagggccgaaggaagctagcggattggaaactgcaacgacgccaactcctaacctcgaagccgggtgcccaagcataagcatcccaac

SEQ ID NO: 371000 - DNA, 521 bp, Zea mays
ggaatttttacagcgcgctctcctctcccagctttcgctctccgtgttccttgcacctggtacctatccccaatctgcaacatcgccggtggaggtccagtctcatctccaaattgcatcgcctcgctttagcgccggtgaatctctgttcctcccgttcgtcgtgccgaccactgctcacggcccacctcgccgatgttcttcacctcgatgacgtcgtcctacagctcaccgacgtcctgcctcgtagtccacactgcaaaaccccctaaggttcacgcacgtcgtctcgacacttgttgttggtcgtaggccattgatcctgcgttcaacctcgcatcgccgtgtgctccacttgttatgtcgcgccgacgactcacagctcgaccacactaggtcgtcgtcacaacgtcaccgtagtattgacaatagtggtgaccatgctgtccgattcttctcctcaccgtggccaagttttttcacggttattgaaacggagggctcgctgccagtgaacatcg

SEQ ID NO: 371001 - DNA, 277 bp, Zea mays
aacaaaaattaacggggctgacaaattggcataaaaactgcccattattggggaaagggttgtttccaagacctactttccgcatagaatataactaaatatttttcaggcggctcaatcttgacattgggccgacttgtgtccacaaacccaggaaacttaaagcatcagattcttcaaaggggccaactcctgaggtgctgacaaaaaaatcgtcccttcacggaatccaagcgcatggttttccttcggcccatcaagtcttgcattgcgagac

SEQ ID NO: 371002 - DNA, 203 bp, Zea mays
acgcgcgcagtttttttgtgcgaacatcgctgaccctgtgctccagggtgacattgccacaacgcggtgactgcttgatctccttattggtgaaggcacactggactacctgctggccaacgttgacccataccgtgggacgccatccagtttagtttcaaccgacatggtgcaggggagctatgtatgaacaccaatgctgg

SEQ ID NO: 371003 - DNA, 175 bp, Zea mays
cctaaaaaacgacggggggttaacaaaaccaaacttccgatgtttcgcaacaccaaaacggggttttgccgcttaggcaacacagggaaaatccaaaaccccctacaggaaattgtagacaaaaaatcccaaattccagttccggtcccccacccgggccgaaaaaccccatttt

SEQ ID NO: 371004 - DNA, 225 bp, Zea mays
tttccccgcagaagcagagtctggtgactacggggaggatgaacctgacaagacgggtgctgctaaaccctggggcgccgctgctgaaccaggccagcagacaggctaggacgatagccagactgaggctaatacttctgctgatgcgcaagacgatgcagctaaacaccctgaccgactatatacaacatctgcggctggcgctcaaactgaaaggggtcattc

SEQ ID NO: 371005 - DNA, 303 bp, Zea mays
ggttgggatcgaacccgagtccccgacttatgcaaacttcagttttgtagaatcattattcatgggcgacaccatttttggcaagagttttaccacaattttgtcctttctttgggggccttggcaccgattggggggccagggttgggttaaatttacaggcccgtttctggtttttcaccagttttaaccccccgattgttccccaaaagaatgggaaaggggaattattgggaagggatcccaggtttcacgaacaaaactggtggggggtgttttttttttttgaaactgcccaaaaac

SEQ ID NO: 371006 - DNA, 244 bp, Zea mays
ccaaaccaggggggtgggcccccattggagcccaacaggagtaaccgcccaaacccatttatcaccagtccaaacatttaaccagcattaaaaaaaacaccaaagtactaatcaacagcccggaaagagcgattcatggggtcaaaccaacaggcagaaagatataacctgtggatgtggggcctaaactagatgggtaatataaagccccggtggaggaaacggcccaacaggggctcgtaaa

SEQ ID NO: 371007 - DNA, 263 bp, Zea mays
ggcggtgatttcgtccgggaattcaatgtctggtggctctgcggagcagggctatcaccctccgggtcctcagtcaaactggggccggacttgtgagcgagctcagtagactggttatggctgtatgcagtctggcgcttattctggggcaccgtcacagtatggtgcacctcatccaccttatggtagatataccgcagcacatggtggctatcagactgggtgggagtcagtctcaaaaccagcaaaggcatacaactccc

SEQ ID NO: 371008 - DNA, 278 bp, Zea mays
gggcataattcatctaatttattaataccaggaatctgcagcaggactgacacaaaagcaaatgtggctcatccatgacccatacaaaaaataaataaataaagggaacacatcaaaatctaaaaaaaaatggttcgaggtcccaacaaaaattatgaccaccagaacactttaaaaatctaaacacatggtacaagcgcctcctgtctgatccatgcatgcactcaactgttacaccatagcaactcaacactaaggaacagctttaccaacagccc

SEQ ID NO: 371009 - DNA, 178 bp, Zea mays
ccccgggttaactttttaatggggtttttcccacgaagggaaaagggccccggacattggaggcccaatccttgggcaaaaggaaacaggcccaaaaaacacccaacagttttggggggtaataagggttgaacagtaccatcgggccccattaaacaaaaaacttttttggggccgg

SEQ ID NO: 371010 - DNA, 284 bp, Zea mays
ccgctacgcaaacgctctcggcccacgtggtcaggtccggcacctaaatgctacctgctcgatcaataactgatactgtctgtgggagtctgtctttatggctggctggctgcaactgtcattgccacgtccgcttgtccggtgcccttgttgctgctgagccttggcgtgctggtgttctgctccttcgccgaggacagcttcgaccacgagctgaacataacgtcgggcgacgggcctggcaaggtccttgactactggagggtgctgacgctgtcgctgga

SEQ ID NO: 371011 - DNA, 470 bp, Zea mays
aggttttcacatgaaagatgctctgcaacaaattcaagatgctgtttatatgactaaggcaaacatagttagaagcaatgaggagactttaaagacaattcagagatcaccacatccttcaagaactttatcagattataaatcagtacctgggaatgattcacagaagttggatccagttttagccctgagttctgatgggtatgacatggtgatgcctatgccacctttatggctggcacctcttcaacaccaatatgataggcagaccatgtgatctctgtgatgtgctgaacgatttagttgcaggagcattaccacttgcttataagcagcagcgcacattagatttaacagaaatttcacatccacttcatgttgctgatgaggaatctgctttaagaaaagccttgagtaatctgattgagggagcgctcctacgtacacagaatggtggagtagttcaaata

SEQ ID NO: 371012 - DNA, 357 bp, Zea mays
cagacaagaattcctagtcttttttttcgggtggtttcgagtttcgatgtacaagtgtattaaaagaatagcgatcttttagcaggaaagaatcagcgggttacagaactcgtgttctctatatcatcaaaactatactgtaggcctgggtggcatcaactcttcattggcaagttggttcctcaatacgactggggagatcaacctccagaggtatatgctagccgcgaaccactcgttgatgatcttcacccatgtacttgcccatccaacatctatgctccactttcttgttgggtgattaagctcccagctaatgaacagcattgcgaagtacatagcccccatcgcaaacac

SEQ ID NO: 371013 - DNA, 117 bp, Zea mays
gaaggcacctacgccttatgtccgtgaccttacaaaccgggcggtcattagccatgccgcgcaggagttcaccatgagtcagacattaccggtgatgatgctggctttccccgagga

SEQ ID NO: 371014 - DNA, 478 bp, Zea mays
accctcctgcgctcccgaaaccctcgccgccgacgccgccgccgccgacgccgagaatcctcgacgcggcggcgatcactgctcccctctatgatagcggcgcgtgagggcggcggacgcgcggtctgtcgctccccggtccgcgtgcccggggcggctctgagagcccagagctcgtctcggttccctgccaagcgcagccgagcaccgcgccggcgccgcgtggcagttcaggccgtagtctgggcgctgttctgctctggttctactggagtgcggttgggatttttcggttcctactacattcgggggcgctgaacgacattgcttcacacaataaggcttctgactgggtgcagtttggtttccatgtgaacccccacatgtcccacgccagaaaataaggcgtctctctttcatggcgcagtcagggatggattctgttccagggaaggagaacaacggcattgaccctaac

SEQ ID NO: 371015 - DNA, 156 bp, Zea mays
ggacaaaaggggggggttcaaacataattttccaggggtaaaaccctgggctcaatcctggggccaaaaaaattttaaggggttaccatttactgggcaattttctgaaactggggaaattaaaagggggtgccataacaaaaaattggtttcagg

SEQ ID NO: 371016 - DNA, 409 bp, Zea mays
ctataagttaaacgcttgttagaaactgcaaaactgtacaacaaagagagaggaggatctactttggtaaagttaactctgaacaatgaacaggattaatccgctaggctagactgaactaccgccatgaaagacataaaaaccctcattgcatatgagaccacactgaatcccggatcttcatacgccacttcatcaagccacagaaacttaacttggcatccaagcttactgcatgcccaacatgcttgtcgagtgcacagaggtctaaacctttgactgagctatagctacgaagatggaaatgatgcctatataagtacagaattacatggtattgatctggtcaatgctcttctggaccacgcatatagtctgggtaatatgtgttcttggttgatcttgcggc

SEQ ID NO: 371017 - DNA, 247 bp, Zea mays
aaccaaaaggctgggccccggggaccaaccaccccccctctcgggccaaaacacccctggggcgggcaacccgggggacccgggttaccccccccccaaaaaataagccttggggcggggggaactttcccccaatcccggggggggggggggcgggggcaaataaaaaacggctgggcaacaagagtaaccgccccagcaaaaaagggacccccccgaaaagctgccctcgcaaaggggggggggg

SEQ ID NO: 371018 - DNA, 239 bp, Zea mays
ggggggaaagaaggaaatccattgcattggtgtttgggccacacaacaatttagtccattgcattcccccatcacagggggaactcacccggggatgccccttgggatcaggggggctaacggcagttttttctgcattgggggccccccccccggggtcggggtccaggggcttgggggcctggtttgccctttttttttcctttggtccgggagggccctcgccgccccaagggccc

SEQ ID NO: 371019 - DNA, 534 bp, Zea mays
gtgtttgagaggatagatgtcgagccgaaggtcgtcgtcgtcgtcgtcgcacggcaacatctccgaggacgagatgaacgagctcgtctccaagctccaggccctgctccccagctcccgccgccgccgcggctccggccaggtgcgtcgtcggtcgcgaacagatggctgacccgctcaacatctccggggcactgtgcagtgcatatgcatgcatgctcgcctttttccagttttaaacgtctaaaatgcgcgcggcggggcggggacatgacatgcataatgcaggcgtcgacggcgaagctgctgaaggagacctgcagctacatcaagagcctccagcgggaggtggacgacctcagcgaccggctgtcggacctcttgtccaccatggaccacaacagccccgcggcggagatcatccgaagcatcctccgctcctgagcgcgcgcaagggcgaggtcaacgaacgccggcctacgatcgatcgccgacagcgcgcgctctccggccggatggtcacgtgcgggagct

SEQ ID NO: 371020 - DNA, 412 bp, Zea mays
cgccgtgttttatgacgatgacaaggatgatcacgaagggcagcacggctgaataggtggggagcacgttcccatggacgcggatgctgccgccgccgaggcaggagcattgaaccgcttcgccgcggaacaacaacagcagctgcaggggcacgagcaggaggttggggaggaagaggaggaggaggacgagcaggaagactccgtattccctgataaggtccaagccgtgcttttgctgcttggagggagggagctgagcagcctgagcggaacggcgtactctgcaccttatagtaagagggtgaattatccacattaggtggcatctctgatgagatttagggaaaagcggatggagcggaactttgagtagaagatccgatactctgtccggaaggaacttgcactt

SEQ ID NO: 371021 - DNA, 378 bp, Zea mays
aaggctcaagttcacccggactcacatgggcttcgatgcccttgtggcgtatccatggggcagcggtttgggggaactgtcgtcatgatggccatagagggccagtgattcactgctctagagctcattacaacagaagcacatattgcccgattgcggttgaatcaaatacaactgaaccgtcatatcagtcttgatgtgacgctagtaacccaattgcactttgaacgcaagctcttaagaggagctagtgaaactaatgcttgaccatcaggatgagctggaatctacaactctggaacctggaacatgaacattgaaagaacaaatgtctatagagttcccatatacattacgtcagctgaattcggaggcgat

SEQ ID NO: 371022 - DNA, 510 bp, Zea mays
cttgtgaacccctctacagaacgatggctgccccgggcgtaaccttagaggctcaccgcacgaaattgccgcgagatcttggagctcggtctctgacgatggctacgactacatcgccaacctccgagagctctgtccccctgcctatcctccaccggtggcgggggatcctcggacatgttcctcccgaggcgccggcccacgcgcttcggcctccgcgtggacatcaagcctttctgatggctcggaacagaggtcagttactctatgaggcgtggcgaggttactgcgggccactgggaggtggagggggaaggggaggacgagggcacgggcaagagagcgcatagcggtggaccgtctcttgatgacaacaatgggacaggcagtcactgccctgagctgctgagggagaagaaggacacagttcgaccttgcgatcagcaacgtccacatgccggacatggacggctttaagctctctcggcttgtgggcctcgagatggacct

SEQ ID NO: 371023 - DNA, 416 bp, Zea mays
aacaaatatgtagtagctagtttgataagttattagttacaagttacaaagtacaaatacttacaaaatggtactgatagaactgggcgagggagtacacacaataaaatataattacaaattactacaggtcgtacaggggtttgtattcagcagaagagccgagctccataagctgtggacatgaagtggtggtggaagtgatcgacggccttgtgtaggaacctagtagcaggcccatagcaatggccctgtatgcagattctgatggatggaagccatcccatgatccatacttctctggattatcgcacagcttagggcttgttcggttattcctacgccacatggattggacgggattggaaaattttagtagacattttgacttgtatggatttgaacccacccaatcc

SEQ ID NO: 371024 - DNA, 385 bp, Zea mays
accttgtgtgccaccgactacggcgtcgacaacagcgttttgtaatgtggttccggagagggttggtgagactaattgtgatccgcagtggctactgaggatgctgttgtggctgccgtcctggcgaccgaggtgccagcggacgttctggccgaccaggtcgacgaggcgaccaaggccaagaaggcgcccgaggataagaaggcgcctacggtgaagaagccgaacgcggcgaagaaccctgcgtaccatcctacgtacgctgagatgatcgttgacgtgatcgctagcctcaaggagagctaggggtccagctccgagtacatcaacaagtacctcgaggggaagctcggcagcaagttccccaccaactttcgcatgcagc

SEQ ID NO: 371025 - DNA, 364 bp, Zea mays
tgcgggccccggctcaaaattccgggcgcgccttacgcgcgcgttttattgacgggagaaaggggttgccttatatcttgggctgtgtatatgaatgtgtgatgactaacacagctacttaatacactgtatacactttaaggctctggttctgactagctatctccattgcatgattactgtgcaccatgctggggcacctacactgttcttaagagaatgaggggcagtgaacacatagacgtgtgcacagtacacgtggtacgcagtctggatgggcacttgaaccaagttcgagatattcatgctcttcaaatcaagcacagtatggatagttcggcaactatgtgagccatgacttcat

SEQ ID NO: 371026 - DNA, 353 bp, Zea mays
ttcctggttggctaaacgaggtgcctttgttggataggtgaccgatcgtaagagctgaccgttcgaagatgggttctttggtctagatcatgtcggacttacttgttcagtaggtgtgctggagcatcatcgacgagaagaatatctggggtggaatgttcatcaaaggtcctggattcaattggcatcatagacggcgcacgatccaaatatgccacaaacctgtatgtacattcattgttaaggggaagtactgttgtcgtgaattacttgatggatacatgcaaaagcaagatatgaccataacatctcctttatcttgtccatgggatcatggtaagcctcaaagactg

SEQ ID NO: 371027 - DNA, 299 bp, Zea mays
ccgaaacaagatcggagacctcggggggggccttcttaagagctatacggtctgcttaaccggcagtcaaccctggaataggttcagtccatggttgggaacagcacccggcagagcaccgtacatggtgcgccgtccggtgcgctcgcaaatgcccttgaacatatacaggacacaatacctcgcactcacaatcgtactaataatcgaatgaggactgcaaggtgaacatgcaataatcgatgtaacaaaagtcgcaaggaaagatgcttaaactgattcaaaactttggttaaaag

SEQ ID NO: 371028 - DNA, 137 bp, Zea mays
caatccatggtttcttgtgggttttttttggaagacagaaaatcagttctagacgtattattcatttattccagctacaaaatccgaaacaaagacctatttatatatctttccccacgcgtccgcggacgcgtggg

SEQ ID NO: 371029 - DNA, 177 bp, Zea mays
tacatctggtgctggggtgccctcgctggtgtagcgaggcactgctggtgcaccagttttcggcggggtggagtttgaaccaagagctggacatcacgtggggcgaaggatgggcaaggtcactagacaactgtcggttaatgatgcttttgctggaccagacattcggctccgggt

SEQ ID NO: 371030 - DNA, 152 bp, Zea mays
gcctagcgccggattggcccttttaaataggctaaagggcccaaacaatttcccattcccccccaggggaggaaatgaaatctatctcattcaagccctccttggggggtaaaagctacagggccccccgcaataaaacccagaataaaaag

SEQ ID NO: 371031 - DNA, 116 bp, Zea mays
ttttcctctgtctaccgcacgcgcgcgagggtagcgtgccatttgtgcgcttcgtcgccgccgtttgcccactccaatggacacggattggctcgccgacacccaccgcggcctga

SEQ ID NO: 371032 - DNA, 306 bp, Zea mays
accattgtacgggggaccggatgtgaactctgggccggtggaggccgagtcatgcagactggaaacgatagggatgggctgggcaagccgagcaaaactgtgacaaaaaccggccaatgaggcccggaagggagtacacagctaccgggagatcacgggcgcgaagtgacagaacgcgcgggaggacaacgccgcaaaagtggggaagctgcgctgtccagatacggcggataagtggtggacaaagggccatgagctccaggtgctccagaactcgcacatctgctaccagaggatgtaggtacc

SEQ ID NO: 371033 - DNA, 138 bp, Zea mays
gcttgagcagggggaggctttcgccatgactgggaaggcctttccctggaagcacacagggcaggcgatcggcatcaagatcgactcggcgacatcgaaccgcaacggcggcaaggtccgctaggatgagcggctagg

SEQ ID NO: 371034 - DNA, 381 bp, Zea mays
gacgtggagcattcacaatcacacatcagtacatcacacaaggcgagcctctgcacacagacagcaaagtaccgtgatgcatcagcaattttcggcactggcacaaacaccacgctttcttggtcgccgttccaactagtacctcagctggcgagcgagtcctgctccgccgcaaggtcctcgcagatgcgctccacgacctccttccccctgcccgcgttctgcgcgaacctttccgggcagggccgttccacgagctcggccaccttggccgccacggccgccagcggcgcgcagcagcggatggtcgtctcctgccggaacagggtccactcgtcgggccgcgccgggtggggctcgtagctgcacagctcccgcacg

SEQ ID NO: 371035 - DNA, 362 bp, Zea mays
gccatgttaccgcccccaccgctctcgctagtcgctaccatggtggtattctacacggaggagcacgtgtaccgccacccctggcaccgggtgaccgccgcggcgatgcgcaagttcacggacccggccgcgcgcgccgccttcggggcgctctcccacatcctggagacctggacgttcacacgctgtcccgcgacgtggacgcgcggtcgggccggctgcgcgccgtgcgcgccatcgcggtgcggacgccgtcggttccgtatcctatccgcgccgtcgtggcgggagcggacggctacgtggtggtgctctgcgtcgagcgcacggacgtggacccgcccgcgcgcgacatgcgggtg

SEQ ID NO: 371036 - DNA, 204 bp, Zea mays
acggtggacttttgacagggtggtgtcggctttgacacagcaacgaagaaaaatgtggaggctacggtgctggagatcctccggggctgcgatatggagtacgggacggagtacaaggtccgtgccgctgtcagggaccgcctcggcatagacctgtccatacccgaccgcaagctctacgtccgcggcgttcatgaggaatac

SEQ ID NO: 371037 - DNA, 232 bp, Zea mays
tttttttttttttttttttttactaatcctttcattggggggcatgaaagcaacacgttgaaatcaatacggggaacatccaaatcaaaaacctagcgacttgaaaaacctggaccgttggacggttaatccacctattggacaaccccatctgaggagcggctggtagaacaggattttttgatccctagcttattaatgtgggggggtccgttcattagttacaacgctt

SEQ ID NO: 371038 - DNA, 422 bp, Zea mays
gggtcgacctttttcgccgggatgcctcagacgctgcatcgaacacagctgagcacctgggtgttttttgaatgcgctcggctgctttttaggagcagctagcgggcgggctgcccgtacgtcgctgagatagatacctaagcgggccgcttccgctgcacaggcacaggcatggtgtgcggggcgtcgagccacaaggacgccggggcgcgccggagacggacggggagcgtctgcgacatggtcgatttcctcccgggcctccgggtgccgagggccgtcgacttcgcccaagcgctcagaggctgactggccagggctatagtcgagcggatgtcgactctgaggtcgcaggtcgacgagatggcaacgcaagaatcggagagagcgctcaagcccatgcggaaggcgggtgcacagca

SEQ ID NO: 371039 - DNA, 454 bp, Zea mays
ccacgcccagatccagtgcataggatgcccgggcctccccctctccgtgatccgcgcgtgccctagcctagctgagcgctccacgaaatccctcgcccagctactacctccgcgcaccagatccgtggcgtccggggcgacatccaatttatcaccgacgagctagccagcatgcagaccttcctcagcagcctgagcaagtgcgaggagggccacaacaactagacggaggactggatgaagcagatctgggatgtcgcctacgacatcgaagactgcatcgacgacttcgcctacagcctccgtccagaccccaggggcagcggctaggtgacggtcgtccgcaagattctctacgagatccggacgtggtacccctgccgcaacatcgccacccagatcgtcgatctaaagaaccgcgcgcagcatatcggcgagcaccgaaccaggtacg

SEQ ID NO: 371040 - DNA, 511 bp, Zea mays
cccatggagaaaaagagacgagacggggatttttacaagaggttctcagatttttcccccgacagagaggcaccagaactgatacgtggctcagcacttcacgctcttggtgaatcatcaggcagggcgaaagagacgaatctagttgacatgctaacaagggatatggatgattcgatcggtaatcatcgagatattcttcggaaaaatgaaattctaattggcgtcgatgtcatgaggactttgtcttcagaggaaatagatgagagactgaagcagcacctaatagtttcacaggaacttcatccagcactgttatcttcagagcatgagtacaaggatcttcaagaaattgtcgggggcattatggctctagcgatgagaccacaggatgctcagagcccgctagttcgctgcttctccagggaattgatgacctgcctaatcttgcagcctgtcatgaacttcgcaagccctgtatacatcaatgagtcggctgtctaccctctaa

SEQ ID NO: 371041 - DNA, 545 bp, Zea mays
gtggtgtactcgccccgtccggccgcccctctcacgctggcgctgtttcgcttcctggccgcgatgctccagcccaggctccgccactcgtgctctcgtagcgtagagcgaggccagggcgggaccagcgtggccggcgagaggggatggcgggctcggccgcgtacgctgcatccgctaccaccgtggtggcgatggccaagggcaacggcaacagcaagggagtcagaggcggcggctccgcgggcaccaacaaggtgacacgacctcctaggattacatctaatgttaagcagaacttgaggattctaaaattttggaaggaatttgaaaggaggcaaacaagtggacctcagcctgctactaggtaccgcaaaaagaaaggaataaaagaagtgcttcctgatgacacagacttctacgaggatccttcttccactcttcacttgtcaggcttgtccttcctttcaatccaagactactctttttctttaaaattagggatgattcacatcgggcattctgagctgctgactttggctttt

SEQ ID NO: 371042 - DNA, 105 bp, Zea mays
ccaggagaccaagaccacacgcgcgggattcatgaaagaacctggcatcttggcccgctgaaaaccatcgaccggagggccaccaggcggcagaaaagaccgaac

SEQ ID NO: 371043 - DNA, 165 bp, Zea mays
gaattaccgggacgacctacgcaaacgccgggcccgaacgagctcttcttccttaccgacgccagcgcggaatcctacaaaaacgccagtgcgcgagcgtctcctcctcctccttgcagagactaccgcgccatacgcccctgttaaaaaggtacaaagagcact

SEQ ID NO: 371044 - DNA, 278 bp, Zea mays
cgacgaagcgcgctaggttccaccccgcactgctgctccctggctgggaggcgccccgggaccgacgcccacaagggtgactgaggggagaccacggagaggacggttcaaacgcccctgcggcggccgccgccgagacggcccccatggaggagaacgagcacagggcgctagacgcctgcatcgagagcttcggccgcaaggggcggaacggctccgggctctacccagacccctgcagccggtctcccatccagggggagccatgtgatcctctt

SEQ ID NO: 371045 - DNA, 125 bp, Zea mays
cgccgcgggggaccacgagacacgagagcggggtttgtctcggtgcgttctcgctgttctgccccaacgagggcgaagggggacctcaacgaccagaagtggacctaccagatcgggctccaccg

SEQ ID NO: 371046 - DNA, 260 bp, Zea mays
gaatttcccacccgccaacaacgagagcgcgccctcccgcagagccaacacaggggagcgggccccggtaagggaggggacggtgggaccaaccaggcagacgagcagccggagcggaaccagcggggcgaaaagccctgctgccgcgaccccccaagcgagcccagtgattaagaagagcgctgctggagccaatgcggcggaagaggacaagaggcgagccccccaggccggggccccggggagcgggaaggggaacc

SEQ ID NO: 371047 - DNA, 389 bp, Zea mays
  unsure (1)..(389): unsure at all n locations
cactggagagctctgcactgggggcatctttgaagcggagtgcctccgttgtccggcccacgcagaccacacacacacaccagaacgcccagctgcactgaacccagggccagcggacaagggcaagaacgccaagacggttccgtccaggaggtaggccaactaaccgacggctccggcgccgagaccccgaacgaggagaccgctgctacagcggaggaaaccgaagaaggtaaacgatgaagacacggagccggccgaggccgagactgagacaaggaggacgaggtcaaagctgaggaccaggccaaggccgaagctgaggctgagccgaccgaggcagagcccgaggccgtctngacggcagcagagacagaggccaaggaagc

SEQ ID NO: 371048 - DNA, 357 bp, Zea mays
acattccattatttatgatggggtaactagaaatcagtttttgcaacctattcaattgcttataatcaagatgtatagcttcataaaaattacattcatgccctcaagcctatacgcatgagctacaaagatgattaagggtattgtcgtcttttgccttagtaatcttgataaacaagtctctgggatttggcccttcttttgccacctacctcatcacgtgcatgcgccgcggtctgaagtttgtagcttcgtcttggcaaccgtgatcaccgcgcatcatcttcgacgaaggtgtcctttagcatttaccctgttacacttgaaacagactcaaaaaataactgattagttaat

SEQ ID NO: 371049 - DNA, 439 bp, Zea mays
aaacccgaactatcaggggggggcgttttggaggaggtttctgcgttctctccgccggcatgctccagcgcggcagagctgactcgcttgctgtactgagttcaagaaaggaagaagggcgaagctgatcttccgaaagccaagtcaaaaaaagaatgctactcctaaccttgagagacgttcgaactgcaaaccttatgtgggagctatcattatactgtcgcaatgtcaaggggaccaaaatggaagatcgaaaagactaaaggcaagggcgaattccggctgcaattccatgccacaaatattccatcaacaggatgggacaaagtattcgtgcccttcatctctgctgatacgggaaaggcgagtgcaaacacaaagaaagcacatgtcacgaacggaagttgcaaatggccggatcccatctatgaagcaacac

SEQ ID NO: 371050 - DNA, 427 bp, Zea mays
  unsure (1)..(427): unsure at all n locations
ggggaaatccccagggggcggtttggtatttccgggttgacctactcaaacggcgacctccgtccaaccaaggagngagcaccacagcatggggccgttccggagggggtttcgccctttcccgcaaacgggagggcgggcgagcctgctcttcctggctgggagagagaccgaagaacaggagagagaggcgcagcgcaacgcagcgaatgctcgcatctcccccctccccttgccagctggcccccgctgcagctatgctccgggcggctatggcccaccgctctgctgactgctctgccgctgctagatgagcatgcgcaccaccaacccaacgatgcgcgcggagcggcgtaggcaccatcatgattcatacccgcgacgacccaccacccacccctgcagtgtagaacatcccctttcccac

SEQ ID NO: 371051 - DNA, 507 bp, Zea mays
ccgggcctgttttccctggtcgacccattctaccggcggtttgttccgagacccttctcattcatcttcctcttggaggcatcctgttagactgcttgtctccgttttccacccagatctccgggcagccgattgaccgagaagtttgtggctgcggcggcggcggagagggaaacggggagcgggagggcggcgcggatgccactgctgcgccggcgccagcggggccggtgatgcccgccgtggcggtcgcttgaggccgccgcgcgtgggaggtggacgggggagcgaggcggtgcggaccgaggttgcgtcgggtaggattcgattgggctgcgcctgctgagaggcccatgctctcggaggacagcaatggatcagtgacatcttgacacttctttcctggacggtgatccgacaattcttgctgatttgggatgatgtaagcaatattgtgctaacacaggaagcggatattcacacctggctgcataccttctctgagaa

SEQ ID NO: 371052 - DNA, 376 bp, Zea mays
ctcgtgagaacacaccagccattgtacaatccatcgacaagaactcaatacagatgaagcattcgcagcacagccaggaccaggagagtctggcataacatccagaaccaagatttacatcagtttgccatgctttggccaccgatcgggctgcaaacaatttggcaacacctactcgactaacagaaagaactgaagatttagccgccgaaattctccgtcagacaaaaccacgcttcaatttgtcggaccaccttcacctgcctgtaatgtaaggaggcaactctcctgcagggagctcccagttgtcgttgtcctcctcgtcctgctccttgagcccctggtcatcgttggaaggatatgggcccttgaagcg

SEQ ID NO: 371053 - DNA, 472 bp, Zea mays
aaactctccttcccttcgccggcgggcacgaccatcactgcaccatgttcgccgccacctcggcggctgctgccgtctcctcgtcgcgcccgtatcccctcctccaacccgcctccagacccgccctcgtttccttccctcggcgacagctttcatccacctcggttgccctgtccgcgccctcccagctgtcgtcgcggggctcgcggctggcgccggcggccaacccgaagtaccacaacgcgaaggtggacgcgggagacgaggacgcagacggtgaggagctcctgcggcggttccgttggcaggtgtcccgcgcgggtgtcatggaggagatcaggcggcggcgcatgcacgaggacgcccgggacaagcgcaagcgcaaggcgcggtcggcgtcgctgctgtaccgccggatgcgccttaagggcccatatccttccaacgatgaccaggggctcatggagcagga

SEQ ID NO: 371054 - DNA, 384 bp, Zea mays
  unsure (1)..(384): unsure at all n locations
tcctgggtcgacctattcgtccggcgtttttttgttcccaaaccgncaacccacaccaccggggggctctttttgaggtcctcttaccattttttcccggaacaccaactcctcctcctngtagggtttggcgtgttcacctcacctctcgcggcgacggcgaagcctcctcttatcttctcttcgctacgctccgatccgctcggtgtttcagccaggatgtggcgggcgtacaccaacccgctcgacctcgcggagggcaacttcgcggcgctgggcccggacgccggcgccggcgccggcgggcggcagaggcaggggtcgttcgggctgaagcggatgtcgcgggagatgacggtgcccgggacgctctcggagctcgac

SEQ ID NO: 371055 - DNA, 318 bp, Zea mays
gagaggactggcacacaggggggccttatatagaggttttttagctcattcccccgaggagagagctgggacgcgatattcacgtatgggatcgcagactgtacatgacgcactccctcacgaaagaaaactgaccgactatgccaaatgacgcacaagatcccgagaagctgaccgaaagctcatgagaacaaaccaagggcgtgacatctggccaacatgcgaatgctgagaggcctctagaacagaatccaccactgatgtgggaagcggctggagtttcagtgaaatcatgcgccttgacagcacaaaccaacc

SEQ ID NO: 371056 - DNA, 389 bp, Zea mays
cccggccgaaagcgcaacctgcacaacggccgcaaccgccaccgcaagcacgtcgaggacggggcgggccatcgctgcctatacccgacctacacgaaaagccaggcgcgggcgggacaacgaccgaagggacaaggagaacggacggaggtgcgaccgaatggacgatgcgaaggaggaggacggaaacagcgcgctgcacgggcggaacgagctggagcaggatgctggggcacggcaactctgggcgggtgcacgcggcgcggcacctgcacacggaccaaagcgacagaggcaaggcagtggccaaggacaagctggaccgcgcggacatggcggatcagatcaagccgcagatcgccgaaatgaagatggcgacccaccccaac

SEQ ID NO: 371057 - DNA, 346 bp, Zea mays
ggggcgcgccggggacggggggggggactctcgaccacctttgtcttaattttcccgggcggcacactgatggagttgcgaggtctgctggcaaaagagcatcgggggaggactcctatgaggcaagaacagacgacgctgctggagagaacatcggactggtcggcgtatatcagggccacggcggaggacgggcagccgaatacgttaagcaggacccttacagcaatttagacaaacacccaaagcacatcacctgacaccgagggtgcgaccgccggaacttacaccctaacagatgcagaattaccgaaagctgatagctgacaaacccgagatgctgacc

SEQ ID NO: 371058 - DNA, 333 bp, Zea mays
cccacgcgggcgcacggagaggagggggggggtgcttggagggatcttactgttattcaccccagaatgctcttggcatgctaaggaatacaaacaaagctaagggcggaagtacgtaaaccgggacttgggctaagaacaagtgatgctccagcggggtcaattaaggatcggaggcgcatggaggcctgatagatcaaggactactctaactggccacatgccctggaaatgggacagggtaagctcgaacccggctattccatacgcgaagagacaaccgcgcactgggcgcgggagatggcgggagtagcgctgagccctcctggctag

SEQ ID NO: 371059 - DNA, 396 bp, Zea mays
tatgcgaacgaattcttcgaaaaccggagcggacgacaagcgcggggggagccctttttagaggggatggctgacttatcccacgcggatgacgcagaaccggcagccggcgctgacgggcaccaaccgggcctgcctgacggcgcagccgaacctccaggtcagaaccggctaccacacgaacgtgtccaggaccaccccggagaccctagcagggatgagcggcctcaactgcgtaaacctgtccagcaaccagggtgacgggcagcacccgcgagacgttcgccaaccagaccagactcgggacgatggacctccggaacaaccagctgacgggccccagaccgtagaggcggatgcaggggcagaacccgccgatgggcctgtacacaacca

SEQ ID NO: 371060 - DNA, 207 bp, Zea mays
aaccccaggccctatatgtatatatatatgtatagggatcacagcgtttgatcgagcccaaataagtgacatggttacggaagcaaacacacttaagttacagggggaactaaaaaaaatgggataagctagcatgaccttctttgcatttaccattcccaggaaattgataaggaaaagttggatgttaatggccctctatgatac

SEQ ID NO: 371061 - DNA, 511 bp, Zea mays
cccatgcttccggcgttcgttcttgactggccgtatgggaggtgatgtgaaagcttttgttgggtatgcagccctaatcctcggcagtcttccctaatttatttggcgtctagctatagtttccaatcgccatcaactttttgtcctacaagaacactaggaatgtggctcctacaagagcactagaatttgaaccaacccagatgagcttaaatcgaaggcaaaggtatggtccctaatgcgcttgtgcatcagcagctgaaacactgaccttcactgaagtgctgtcctcctcgcttttttctcccatcgtgtgcatccataactggaattggacgcttgcaaatgctcaaatctgaccctcggatatgcagcctatttgtagatctgaaaccccagtggctctcatcatttgcacctgggaaaatcattcgctccaatcacctagtaatcagtggatctcaccattcatggcccaagatgatgcggcttgagctcattactggcttac

SEQ ID NO: 371062 - DNA, 472 bp, Zea mays
  unsure (1)..(472): unsure at all n locations
actcgcttccgcccacgcgtccgtaaatttattgggaaagattataaacacgaagagcaggatctgcaggaaacaaaaatttctgattgtaatgttttaggcctctgtcctggtgaaacatgtcactttatgagcaaattcttgattacatggaaagcttcagaagatgtcaatgaaatatgttcgcttgaaaataaacaatctctgtccaagctttgtactgtgaatttgggtggaagtcttgaagtccggtacatggttgatactgattgagtgttccttgctgaagtttgcaacacctcttcagtggaagagaaccgtagttatccaagagcattctgttccaagatgaagatggattctgccctgcattactccagattgttgcaacaatcagtacagagagctcttcagattcttagatctatttcagctgcttgaagaccaacacttncagttctaatcaatgcac

SEQ ID NO: 371063 - DNA, 312 bp, Zea mays
cagcccaatccggagacagaagaccagccgcagaggacacacccaacacttcctcctccagcctacggatgtgggccccgagaaccagctcgatctcggcagcaagtgcaactcaactgcagagctactacctaatgcctacaggtgaggtgaggtaccaggggggcgttggaccctccctgcaacgccctaggctacaataacccgagagacccgggcaataaccaaatgtaccagaagcctgcatggagaaggcacagggcctgcactgatgactccccacacgaggggcccctcaaagaggaagcccca

SEQ ID NO: 371064 - DNA, 355 bp, Zea mays
tttcttccacgcgcttatttttccgagcgagcgcatcagaggggtgtggatggggtgccttctacatggtacagatatgggaagcacacagattatttaaccacacacctgtgatactaaaatcagcgaaagcaggtgataaggccgttagtgcggcggctgtgaacacaaagctgactgagggagagggtgttggctcacaggaggtgtgggtctatctttcaaatgacaggatgcagtccacatctgcagtattcgttgtgctagctgtgactataatgatcatataagcatggaggaggcggagggtacatgaccatgacacaaaaatagattcgcgtaaagaggagctcaa

SEQ ID NO: 371065 - DNA, 414 bp, Zea mays
tttttgacccccatgacatctctaatcgctctcgggaaattttgaatcacatatggggggtgtgggagcccgatccgatcgccagatccgccggcctgggcgccgactcgggcgtccttccacagatcctcttccttctatcgtaggctcgccctagccgttcgctggagcggaggtctctccctgcagcccatactccttgattcattctattgcctcgccgccggtaagggattttgatctgcacactctgctgctatgaattgatcggagagccgtcaaattcaaattattattatcccgacccgaccggtttgtcgccgattcgattccattgcccttgcccccgtcccccgtgcgtgtcaattatgcgatccgagatgtattgagcttagaaccagggggtctcaaatt

SEQ ID NO: 371066 - DNA, 306 bp, Zea mays
tctcctagtaattgattcgccaactgaagaaaatgtctcattgagctgaatatgcagtcccccatctcacttgagccatgtctgctacttctcctaccagctaacagaggaccagtggaatccattgatgtgcttctcgcataacccaggtgattccacttagaaacattattcctagccaaggagctttccattctttctcaggattgtttcttcggctacaaagatagataacaaccatcgagtacgcagcataacagcgaagactatccgtcataaaccttgctggacacaacccttccatac

SEQ ID NO: 371067 - DNA, 458 bp, Zea mays
  unsure (1)..(458): unsure at all n locations
cttacgcgtccgcacaccacccctgataaaagaaggggtcgcacgctcccgctcccgctcccgccgcgacgccatggacacctgggaggccaccaaggcggtgttcgaccgggtgcgggcgctggacccggacaacgcgtccaagatcatgggcctgctgctcatccaggacaacagcgcgcgccgacctcgccgccaggcccgcgtccccgccgtcgcccgtgcccggcccgctccaccagcccgcctcgccctgggcgccgccctccgaccacgcgctcgggtacgactacgacggcgccgacgccgacacattcttctccgacgactacgactgctggtccccggccggcgccaccgnccaccgncgcagcttctcgcttagcgacgccgagctcgccgccgccgccgncggncccggggcgtggcggccctgcatgtacttcgcgcgcgggttc

SEQ ID NO: 371068 - DNA, 326 bp, Zea mays
ttatgcgtgcgcaccggtccagctctttcacacccggctccatttaggatcggtccgcgatgttgaactcctgcagggggaccgcacataccccaatgagggtgggctcgtcggaggagggcgcaataaccatgcgcacgaccgcgagaaaaccgacagcgccaacgactacgagaccctgggactgcccaaaccggggtacgaacatgatctcaataagcagtacgccacggatgttactaacaaccacgttcacaagggactacacctggaacacctcaaggatctccgacaaccctctgaccttttgcgagaaccacaagcac

SEQ ID NO: 371069 - DNA, 294 bp, Zea mays
acaattgtcatcaggatcatgaaggtgtttgtttcaacaggaagcattaggcagcatggcaacagtcacccaaagtactcacaaccccctgatagggtgctgccggtggtgctcggtgaacatggcgatggattcctcagacaagtagtagtttgagcagtttcggttgatcgccacatagtgcccagcagagttttagaaaaagacagcgagctcatagacttcgaaccgaccaaatgatatcttctccttgctggtctgttaaaatgatttccatgggacaccatagcaaat

SEQ ID NO: 371070 - DNA, 318 bp, Zea mays
tttattctagtcttcctataaaaaaattacagagcattttgaaagaagaatttactatgtcacttctatcgtcgttttttacatgtcaagaaatatacagaattgagagagagagagagagagagagagagagaaggatctacaaactgacacggctacagcctacaaggtacagacagaataaattatgaatgctaagttaacaggttgcaaattctacgattcaaattcttctatcttggagatttggtcgaaatgcatcttccacacaatatgagccttgatatggtgcgtgatcttcgattcctgaccttaatt

SEQ ID NO: 371071 - DNA, 233 bp, Zea mays
gaaaggaaagaggaaaaataggcagtcaaagaacctaacctaccttgcctagtgatgtttgctgacctaaaacatggtttcacttctcgtgtatcatcgtctatgtgactatgtgcattacaccaaaacagaccgataacatacatagcctagcattgtatccagcattgtgtagtgccaacaaaataataatggccgctggccttttgtcatctcccagtatgtatgacctg

SEQ ID NO: 371072 - DNA, 267 bp, Zea mays
acaatgctcgcacacatgtagatgtagcccatcgacgcaaaccattcggtgcaacagccaatccaaatcaacatgcctagcaatgcaagaattgtcaacggagggctcgatggatactgcatccacccaatctgcccccttccgatatgcttcatccagctctgctaaaatctacagaacatcttgtgggcatgaaagaaccatccttccgacatagagttccaggtatccgtgtcaaaatctttatccaaaatgcaacacacgacg

SEQ ID NO: 371073 - DNA, 401 bp, Zea mays
ccacccccccgttaaaaccccacgcgcgagccggaggcacacgtggaggacatagagaacgggggcgggatcaaaccccgcgtgacgagcggaacagtgctggcggggggcgacaacctgggagacctgaacacaaacgagcagaccgcggcccacggaggacccggccgaccgcaaaccgccgtgtccgggcgcaacgcggacccgctgctacaacacggtagagggactggaccatgacctcgcgctggcggcgggcgcgcagcacccggccccgaatgcagcgcccgcggacgcggtggagaacgaggagaacgggaacctgcgcgcggagctcgagtgagcgctgtacagggcgcccgcccgggggatgcggatcgaccgcctatacggggtggggc

SEQ ID NO: 371074 - DNA, 319 bp, Zea mays
ccaaattcagaatcacaatactgtcattatctcatagttgaggttgattcatcataggctgataaccaccacattcctctggaatcttttgttcctgttgaacctccttggttgtaactaacaggtcctcaacgagaacaggaattggatcatatgtagtatgaactccctccttagagtctctggaagtgcaaaaagcatggtcatctctttgcatcaggatatctcttacaatggtcctcatattgttgcttctcacattgtaccatcttcctgttctcatcccaagaaaacccactatttgctagcataacctcaa

SEQ ID NO: 371075 - DNA, 256 bp, Zea mays
attacaaattcgtgaacatggttaaaccaccagaaaattgcaatgtatacaatccagtggttacaaggaaaaaaggtatatgggtatgacacaaaactacgacagatcacagggcatcatcgctgatacatgcatatgccgacaagtgatagacacgaatatctatctgatgaatggtcaccatgtggtctctagctttttcttcatggttactggccaacaaaggatgaaacaaatggtttagggggtatcttaa

SEQ ID NO: 371076 - DNA, 526 bp, Zea mays
  unsure (1)..(526): unsure at all n locations
tactgtctccgcctccatccgccccgcgcccactactggtcttttgctttctccctctctcttcgcgcgcgcactcacgcacgcagtttgagagggtgtgcggcgttcgaggggcgaggagcggggtgagccatggcagaggcaggctgttctgcggcgaggaccaggacggcggggctcgccgccgccgccgcggcggcggcgctcctcgtgctcgtggtggtcgccggcagcgcggcgctccctggcgcgcgggtgagggtcctcgacggcctccggcacaggagcacggccgtggcggcgggcggcgcgaggcggtggctgcaggactcctcctggccggccgcggcgacggcgacgacgaggggcagggccgacgacggcgacgccggcgggccatcgagggccgtcaccggcgcggtggaggatccggaggccgtggccaacgacgtgcacgtgttcatcaggaacagcacggnccggcgaaacctcgggtacctgtcgtgcgggacaggcaacccgatcg

SEQ ID NO: 371077 - DNA, 440 bp, Zea mays
  unsure (1)..(440): unsure at all n locations
cccgggcagcaatggtgacaatggtggggacatactgcatttggagcatcaaatttctattgnggggttcaggatacttacctgtttcataagggcttcacatcttatctaatgtggtggtcaaacaaccttcctgatatttattcctaactatgcagaatactgctaatggctatccagactcggaggagaaaaatggttctcagaaatatgatgtcttctttcatttttatgttttattacatttgggtactactactcatctcatataagaggaagtgttggaaaatagagagaaggataagagttagagaacttagaagcaaaatggttctcagaaagatatcatctaggaggcttcactgtgcaaaatccaccacgaagcacagaagaatattttaactngtgccatgctagagctagaaaatatattgagagag

SEQ ID NO: 371078 - DNA, 135 bp, Zea mays
atatatcaaaactatgtatgccttgcagatacttttttccccatgtctgttctctaaaggctagaaatctaaaactataggagcagaaactggactacaacagcatttcctcccacgcgtccgcccacgcgtccg

SEQ ID NO: 371079 - DNA, 118 bp, Zea mays
gcacgatcaaagcatcatgcatccaaactgtaatttgcatcctaaccatttgtgagcatctaccaggtccagcacatgaattctacatcatttgcctggccaccaccattttcttgga

SEQ ID NO: 371080 - DNA, 301 bp, Zea mays
tcaatcagggaagtaatggatgacgatgacatcccggatgtaaagcacaaaccgctcagctcatcaggcaggcacacccagccaggaccaagcgtgcgctatgccgttagatcctcctcccatgttctattacacattagagaatcatgtgctcacccctatccatgaaccaattcttcaccaaagcatttgttcaactacgttaggcaaccgtaccaggtgaactgccacagatatcccatggacagcagctttgcagcgggcagttgtggcactggcacccacccacgcacgcacaaca

SEQ ID NO: 371081 - DNA, 206 bp, Zea mays
ctattgctagaaatgagtcaccaagtacctagaaaaccaaaatggcctgttacatcggggctggaaatgaaaaaaaaacaagttatattacaagcacaacacatggcatgcgttgattttacatggcgcctaagaccagctgattgtggcaccaagacatgatcgaaccgaatctgcatttgcgttttggacttcggctgatgcca

SEQ ID NO: 371082 - DNA, 338 bp, Zea mays
gcatcaccaaagcgctcgggaaatattgacggcttggaagatttgaagcccgtggacatgaacatctgggtggaatgctaggcctcgagaagagctcgattcaaacaaaattcactggcacagttaggcgagctcatggcgagccctagcaatagatgctacaacaacagcaggcattgacacttggtcagggagtgcgcggagactaacatgagaactacaataaaggtgaaaaggttcctggtgaaaagctagaggactctacagttcgaagaggagctatgatcaataaggatgttagagattctgcaaaaatgaggagaaagaatagtaacccc

SEQ ID NO: 371083 - DNA, 532 bp, Zea mays
  unsure (1)..(532): unsure at all n locations
taattttttcttggnttagcctgattttgaatctggctctgtttttggtttctgagatcctgaaaccatatcattaattttactgttttctcctgattcatgtacaatccttatcttcgtgtcattcagtaatttttctactacaaccagatcttgtagaaaactgtaaaaaaattggctgtgatgtcctagttcttatctagtcattgtctcttctttttcctttttttctttaacaatttactctgtgctacttgatatactggaggcaacagagtccatataaattcattgccatatgttgatcatggtatttgaatcctatcgatgaaaattgaaatgtcagtaccgctttactcacatgggaatgaatctttccaccttttgcttttgaatttctgatagtcattgcagtaaactaactatgaatatatcaatttatgaatagtgtaaaagtactttttcctaacaatatgttatttcccagactacntgccctcacttttaactttctttcaggctgcaattgagt

SEQ ID NO: 371084 - DNA, 470 bp, Zea mays
ttttctctgttctactcacttcgtcctttgacgttttgtccgcgacctgctccagccgctgtagctgtattatgtctccgtcgtgcgtgggattcccgccgcaggccggcgccggcggtgtcatgatgcagcatgccgccgcgttcggcgcggcgccgccgccgtccgggttgccgcaggcctcggcggccaacgttatgcacgggatgtcccttgcctttaaccctatggcttcgccggacgcctcgtcacccataagcagcatgaagattgtggacatgccgctggggtctatgtaccgccctgatttcggcgcgacgggctttgcagcagcagcagcccggctccggtggcgttggtgccagcggtggtgctttcgtcgccgtcagcggcggggaccttgtgaagaagaagagggggaggcctgggaagttcggcccaaatgggagcatctgcttgggacttaagac

SEQ ID NO: 371085 - DNA, 343 bp, Zea mays
tttgtcctttgacgcgtgggcggacgcgtgggtgcgtttgtatacatatgtaatttatgtattaaatggatctagtgagcttgtcttgctttaaccggtgaaagggtgagagctcgtggaactggccttcacgagacagcatgaacgctccgataactacacagtaagaccaagcaaacatacaaaccaacaagtatattaacaaatgttcaatatattggtcaataatggtgatatatggatgtgtagagtcttgagcagaatctgtgtcatgtggtgttgtgatattattggtggagtgctggtgcttaccggaagggcggattggaggttaagcgactct

SEQ ID NO: 371086 - DNA, 265 bp, Zea mays
ttgctctcgggtttcgcacacgcgccgcgaaccctacctccgcgccacaggagcgggaggagaagggcctcggggcgtgcctcctgcgccgtgcggaagaccgtcagcttaatgccccaagcgtgcgaattaagaaccgcggagaacgcagtttctgacacaggactgtttaggggagatggagctctacaaattgacacccaaagcctggggcccggggtctcacagtttcaaaggttggaatttggttgagaaaagggtggga

SEQ ID NO: 371087 - DNA, 200 bp, Zea mays
acgccatcgggggcagtgttgagcttggtgatgggatattcacaagcagtatgcccacaattaacaaaagatttgcagcaactcttggggagcttgtcggtggactagttggtattggttactgtactgtgggtgacactaaagtcacaattaccgttgctaggagggatgcactgattgtccaccaattttgtccacca

SEQ ID NO: 371088 - DNA, 151 bp, Zea mays
accgagagagcctactcacatccacagtggggtgctgtgaaccgctccaaattcgttcgaacaattgcgcgccactcggcctcgccaccatgagcttcttggcatgagcaaacagcaggtgttggacgccggtgacggggagggggaagag

SEQ ID NO: 371089 - DNA, 255 bp, Zea mays
ttttcccgggtctgacccactcatcctttccgcttttcaggccaagcactacacctggaaggaccgtgccccttactgcaccgtattcgtcgtctctaagcgctggcccacgctctccaaggatgcaagggtgatcaactccctttagggcacggaaacaacacaccttttgggaacagatactaaatgtgctgatgaaccccttgcttcattggcaatggataaatggaccgagaaagacgagggacttggcta

SEQ ID NO: 371090 - DNA, 422 bp, Zea mays
tctacatctccgcccacgcgtctggcggtcacgactgctgttgctgtcctacgccagatttccaggtcatccccagcccatttgtccacgacaagcaccgcacttgatcgagcgagatagcggccgcctgaggcacctggaggacgagcttctggggcagcccaaggaggaggtggaccgccagtggacggtgatggcggaccagctgggggagatcacgacgtccaagggcgagaggacgaacgacctcaactgcgagaggatgaacgacctcccctacgccaagatgaagggcaaggcggactcctaccagtggcataacgagggctcgatggaccaccacgtcggtctcaggctggagaagaacgatctcatgatgaacaaggccaacgatgccaaaggaatgaggtcgcctttggcgc

SEQ ID NO: 371091 - DNA, 397 bp, Zea mays
ttcccagcatccacccgccgccgcgtatggcgtacccgccgccgtccagcaaggctgacgcgtatgtgcttctagctgcctaccagcatcctctagccaaggccgacgcgtaggtgccccctgctgcttacccgccggcagccaaggccgacacgaacccaccttccatcggcacctacccattcgcgccagggaagccgattaaggggggcgaaccagtatggcctaccttgcggtgggtcccagcacgacagcgctctacgctccacctccaccgcagtacggcgaatacgggtaccccaccattaggccaccgcgcaccgtacggggatggttacccatcgtaacatgccgtcgggtacgggtaccagcagcaggctatcaacttaaggaatgg

SEQ ID NO: 371092 - DNA, 332 bp, Zea mays
ccacttttccgctgatcccaaacgcattgggactgactgtgacatgccgcaagtgaggaatgcatcttaactaaagggcacagggactgcaccatttcctgtacagaagatcgtggagcacacacttctatgtgcaagttccggcattattctcaaccgtctaaggcgcacttactggatgggtgcaccatgctgcgcaaccaggcgaggctcctaagggaatggatcatctaccactcgcgcatacgtgtggagcgtgaggtaatttacgacaacaccacctgcgactgattcaagcatggcctggaggccatggaccggttaacacacaa

SEQ ID NO: 371093 - DNA, 407 bp, Zea mays
  unsure (1)..(407): unsure at all n locations
cgcgcacgaccatcatggttaaatttaagagccaaccgggctatttccccagggtctcatggatggagaaaccccggactcgtctggtctctatggacgcacaccccaccgagccatggatcataactggtcatgaatgtggacgtgtcgccattcagaaccatgacacacaggcaaaaactctaatttatttatatatacctgttggtcacttgttttcaaatactgtgaattaagaacaacacaacacaattattaagtattagggaacttcttattccgaagcattgtttcctcacggattcaatgacaaacgtcatgaatgacataatcctaacatttcggaaataaattaaataacagacgttaaagaattcaattgttaatacntatagatccttattcct

SEQ ID NO: 371094 - DNA, 408 bp, Zea mays
ctgattgatcactcttgccgtcttcattctttagctgcttagctctagccctagctagatccagacacttgtctgcgtgtactagccttttgatcgaacccatggtcactgtcaaggtccagaccccgatccgtctcggtgaccgaggaagcgtcggtggtggagacctcggcttcgaccgccgtcgtgcccgaggaggctgtccccgccgtcgaggtcaaggtggacgagccagctgtcccggaggagaccgagccagctgtcgccgatgagcccgaggcggcccccgtggcggcggaggaagagacgccaaaggaggaagagacggcaaaggatgttgagccggagccggagccggcggctgctgatgaggtgtatgaggaagcttgagtgccccgctgccgagac

SEQ ID NO: 371095 - DNA, 388 bp, Zea mays
cccactcgattttcgagttttgactcgacaccccgcattcggcggcaaggtttcgtactactccgcgcgtgtatgttacgtacagcattacacattgctttatagcctatatatacacgtaactaaccttactaacacaggaatgagatattggcagtatataagtatacgctcagctgcgcttactacatataaacaatatgatatatatccgccgaacttaatgagggtctaatatattaataatataacacactgcagacgaacgttggtgcatgcctcgcgcacaagtgcatgcaccgtcggggacaccggcagctttttcgctcggaattattcatggtggattgcgtggcgctttcacttcaatcaggttgtaacaaaacac

SEQ ID NO: 371096 - DNA, 117 bp, Zea mays
attcccgggtttccccattcgtcctttcacacccgctgagctgcaggaaaaaaactggcctgcttggaggcgtttcacatcatgtttggatgcactcgggtgggcgggaggtgtccg

SEQ ID NO: 371097 - DNA, 195 bp, Zea mays
gtgctgaactggacactcacgaagggaaacaccacacattcactagagcacagggacacacatgagtcaggatgactttccaaatgaaaagttagcatttatgtagacaaatgtgacaaatggtcaaagagagagcccagagcattgaaggagctagtccagtgatgctccatgaacagccgaccaaattccacc

SEQ ID NO: 371098 - DNA, 483 bp, Zea mays
ttctatctctcctaaaaatgaatcagttgtattaattgagacgatcttatctttatacacaataactaacatttttgggtgtttggtttagggtctaaagtttagtccgtatcatattaggtgttttgaatgtatattacgagtattaaatatggtctaattataaaactaattacacagctgaaaactaaacaaccttaaaatttattaaacataattaattcataattagtaaatatttaatatagcatcacaaacggatcataaactaattaggattaatatgtttgtcttatcatttagtcattatatgtataattagactatactccctccgtttctttttattagtcgctagatagtacaaaatccgtttttttctattagcacgttggatagtgcaatttttgttcctacctagcgactaattaaaagaaacggatggagtatttaataaacttacactttccgatttttttattt

SEQ ID NO: 371099 - DNA, 391 bp, Zea mays
ttcccggattttcggactgacccttttctactttttgggtgaaaggtggggggacaacgcggagtgatctagaaagatgagagagagagggacgggggcggggccggcggaagcggagcctgcgcccgtcggaccgaatcctcgtcggatcgaccggcctgccggggcggtgctgcggacggcctgatccggctggaatggcggccggccgacgagggatctagcagaggtgggagtcgcgcggcaatggctgtggcggaggctcggcgccgggcagtggggtgggccatgctgtcgctgatgctgcggatgttccacccgggcaggctagtgctggacaacaacgaatgtgatgcattgcctagattcgtggactaacttaaatgattct

SEQ ID NO: 371100 - DNA, 242 bp, Zea mays
ttcgaccttttcgttttcgaacgcgaaggcctagctcccggaccggtgcgaaggctgccgcggcccgtcgtggtcccggggcgctccttctcgtggcgcacctctctgctggcgctggttgtctctcgtcactgtctggacgcgcaccaccgtgggctgaagcgccgcctgcggaagcacgagattcactctccgatcaagaccgtggtggtcgcggtgatggagaaccgcaggcttccacc

SEQ ID NO: 371101 - DNA, 169 bp, Zea mays
accggtggtcagcggggcgagaggacaagataagcgccttgccggggcagacaccggtgggctcgccagactcggatacatcccggggacgcgggggaagcgctcctttttctactcgcccaggcggagcgacccgggcaaccgctggctctggctaatggaggctggg

SEQ ID NO: 371102 - DNA, 108 bp, Zea mays
aggcttaaccaccggcaggtgacacaaatacagaaacaatatcaaattccgccccctcaccgagcacaagtttgaaagccgctaagaccgaacatcggtacaaaagga

SEQ ID NO: 371103 - DNA, 135 bp, Zea mays
ggccgattcagacaagggggcacccccagaccagcagggctatctatgtggcaacagttgggcggggcacgcttgtgctacaacatccagaagaggacccttcacctggtctccattaagggaggatgcagatct

SEQ ID NO: 371104 - DNA, 187 bp, Zea mays
gaacactgataccgtgtggattcaccggtgggcccatcagccaggtcgggacacggctcgactctggaggcgaggaaaggcatagcaggtccgggggtaggaagaatccctgaagcggtagggggctccgggggtgatggaagtcacctggacacttagcatgtagggcggagatgtatgactgtag

SEQ ID NO: 371105 - DNA, 368 bp, Zea mays
tttgaatttactgcggccgaaggcgctgccctgccgactgccgaccgactgtccaccttagccctcaaggccgccggctccttccgccggtgctaccctctcctccgtcttgacaagcgtgggccagatggtgaagaggagcaagaagagcaagagcaagcgagtcacgctgcggcagaagcacaaggtgcagcgcaaggtgaaggagcaccaccgcaagaagcgcaaggaggccaagaaggcgggcaaggccggccagcggatgaaggtccagaaggaccccgggatccccaacgagtggcccttcaaggagcaggagctcaaggcgctcgaggcccgacgcgcgcaggcgctccatgagctcgagc

SEQ ID NO: 371106 - DNA, 360 bp, Zea mays
gttcgtctagctcgccatggccccttgctgtagggcgcatccagctttcctgtgcacgcttagctcgaagctcctctgtgcgtccagccgcgtcgctgcctcaacttgccgagcttgccgcgccatcgcgttgctgctcaccctacgcgctctgtttattgtgcgcgcgtgctcgtcgtctctgttccagtcgtccgcacaattttctctgctcccttgccggggtcgtcacgtgcctgcgcgcagctcgctgagttcggcctctgttcctcctgcgcccaactccatgcgcgcgctttgcttcccgcgcgttggccacagctcggagtttccctgcgtgatgtcacaaaatccactcat

SEQ ID NO: 371107 - DNA, 271 bp, Zea mays
atcctactgtcacacacacacacacacacagacaagtggtttccaaagccaagtgtgtgtactagcatccagctagctcgggcggcagcaggcagccatcatgtcggaggagaagcaccaccactttttcaaccaccacaagaaggacgaggagcagcccgccggcaagtacggctactccctgaccgatgttgccaccgtcacacccaagggcgagctcgcgaggtacacgaaggtggagaaggagcacacccacacgcagtacctccgg

SEQ ID NO: 371108 - DNA, 284 bp, Zea mays
gtggctgtggcctgtgggttcgtggatcgctcgggagcaagcaagtagtagtagtcatgcgtgcttatcaaaggggcgcttactgaagagttccttggcattctgtccacctcctctcgccgatcttgcagaaagtttatcagttctgttgcattttttttttggaggtgggcatactgccaatggagctgtgtaggcctccctttgtaaagcccacatgacataaatacgagctatacgttggatttgatcatcgcctgtgtcagaaacgccttcattaagct

SEQ ID NO: 371109 - DNA, 293 bp, Zea mays
  unsure (1)..(293): unsure at all n locations
ttcntcttgtcggcgacagccgagtaagcacggggcgggtgctcctttcccaacaaccaccgcggggtgcgccgaccgcaccctctgcttccggagcaccgctctggatcatatgcaactacattcaccgtgcccgaaatcgcaccccggcttcgccatacacgccgatcgaaccccaaataggaggcgatgagcgtggtcggcttcgacgatggcaacgacaccctgatggacgacgcagcgcggcagctgagcatcgacgtgctcctgaacgccgagtgcaagcgcgagtg

SEQ ID NO: 371110 - DNA, 410 bp, Zea mays
gtcaaaatttgggagggaactttatctggccaaaggcaaggacagcctgtaataatttgtaaactcgaaggttataggagtggaacagcgtctgaaacacttgcagcggactggccagaaacaatgcagattgttcgcctcatagcccaggagcatatgaacaacaaacaatatgttggcaaggcagactttctagtttttcggactttaaatcaccatgggtttcttgtacaactacagcaatttcaacagcagcagcagcagctgcaacaacacatgcatatgcagccgcaaggcctcccacttcagcaatcacagatgcaacttcagcaacagcagtcgcagatgcaaccgatgcagcatcagcaaccttcgcagatgcagcagcagatgcaatcgatgcatcagca

SEQ ID NO: 371111 - DNA, 375 bp, Zea mays
gaaccgacaaggagctcggcacggggagattttaaagtacgattagcgctattagcgcaacgccgacatgccacgcaagcgaaggcggctattccgaggccgagtacgccgccaccgtctcgcctgccgacaggggttcgccgcccgcagacagcaagccctccgggatctccgaccacgccgactgccactactacgagcaccagcatgagacacaatcacatgacagagggtgctcgaaatgtggagaaagggaccgagaacaccataagggcaacgatagggagcgtgacagggatcgtgggccaaaaaaggggagggaccgatacagggacaaggatcgggaaaagaaagacagatacagatatcgctagc

SEQ ID NO: 371112 - DNA, 394 bp, Zea mays
gtatgatccagtcgcagattctcatggcgactggtggcaaggctcattttattactaagagaacctggtggcctctccttggagaacaaggtaaccgggcagcactaaagtgcaaaagaaatcaaggaaaaactctacggttctacacatcccaagttaaggctctttgccgttgttcgatgtcttctttcactctagaggcaacttgcactgtcgttttgaaaacgccgttgaagattcttctgttccgttctttccagatgttccaaatagtgtaaatcactaccccattgaatctacctttacatcgttttcatatagtgtgggcaaataattaattaccgctatttcagtattattttggctgattattagttacacctttttagtatgc

SEQ ID NO: 371113 - DNA, 357 bp, Zea mays
gctacataaacgggcaacttttttgcggaggtttcaccgagttactaccagtgcgtgatgctgcttatgaagaaggaactgactgggggagtctcggagagcaacgactgccccagatttggcctgtttcttctgaacatcaggcccgactggcacgttgactccattttccccaaccacccaatcgtggagctgaaaggggacctggggacctacataaccgactgcccggagcctacgaacgagaggaacaccttcacccttcacgtgataaacgtctgtgtccaacgaggccagtgctgccaccctgagaggacaggggtagagactttgtgctattccgtctatggctgtcat

SEQ ID NO: 371114 - DNA, 373 bp, Zea mays
cctattttttctgttaaaacagcagaggaccttggtcacaaggatagttcacctgaagtgtcctacgagtactggggaagggtggtcactgaggtggagtgcgatggctacatagagacaaacttcagggtgaagtttgtcacatgagccatcctgcgtgccaccactgatgagagaaagatagatggtgtctatctggatacccttattgaggacactgtcagtctttgtggacagcatcgtgacagtttctgggctgaagtttatagcaaaaagcggacgccttatggtttctgaatggacctgtggcattgtagcaccacaagcacctaccgtttgctttggacggaggacacaatgaggcccattcttt

SEQ ID NO: 371115 - DNA, 121 bp, Zea mays
taccctgacaacggcggcgatgaagggggacctgtttaaggacgctttcatgcaagttccgctagagcgaccggacactcgacggcggcctgacacacaccaagctgccagtgacagacag

SEQ ID NO: 371116 - DNA, 332 bp, Zea mays
gttttgtgtggcgcgccagtacggagctgggctcgggggccccgtctacgatctctgcaaccctttcccggcgggccgaagctcgctcctcggaggtggcggctgctcccctgccgcgcgtgtctatcacggcgcctcgtgatctggagcgtggctgcctgcctcctggagcttttgactatgtacccgaccattgatgtagcatggctcgcctcagatcaagcggtgtaccttgactcacagtgtggctccctagagcacatggttcgatggtgccgaggtacagtggcagcgtccatgggctgctcacctgcatgattggagtaaaggct

SEQ ID NO: 371117 - DNA, 315 bp, Zea mays
tttttctggatcgagaccaggactatgatggagagggatattttaaggcaccttgcactgcatgtacggctagagggatggttcacatgaaagggtgcatgctagactgtggtctgcctgactggcaggctcctgggcaaaacgaggaaaacgacaggcctgacgacaaccctgaccataaatcaatccttgaatacagggctgcaaacagggtttataatggggaacatacagatacacagtcgaatccaactgaatttcagactgagctatactctacactagacagggccctacaaaacgtcactcctaaga

SEQ ID NO: 371118 - DNA, 266 bp, Zea mays
ggggtacaagtggaactgaactgagctgagctaagctaccaattaaagaatagcgcgtgcatgcaaggtgttgacgccactccacacctgcactgcacgcacacgcttgcatttagcaatagcaatagcaaaccaaacaacgcgctagtagtgtatttaggacgtttggccagggtatgaggcaaaggcccttcctccgggcagcttaactactgttgtcggacctggccggcggcggcggccatgttttgcttgttcggccaggg

SEQ ID NO: 371119 - DNA, 106 bp, Zea mays
tcgccgggacgactcacgcggactttctatgaaccgacaacgcctacgggaaatgctgcgaaagcattactgaggatgagccgctacttaagccgaagggcaggga

SEQ ID NO: 371120 - DNA, 277 bp, Zea mays
aacccaaaaaaaaataacaaaataattgagaacaacacagcatcatgttttgctgagggcaccataggcagactacacatggaaactggggcacagcttattatcaaaataaaaaaaaatcagcagggcaagacagcaaaagcgggaatcctcagctttgactccagattcccagcgcttgcgttcagacaggtatggtgcaaaagcaattcctgaaaccacaccattcaaacagatcaaaaccactacatgacataagtcatggatgctggaaaac

SEQ ID NO: 371121 - DNA, 194 bp, Zea mays
aaattcctcacatgaaatgtcgattgcgcctaccatctaggtactaaaattacttagcaaataatttcaggttaccagcatcaaacgtgacttaatacttgggagaacgtatttaaattctagtttgggtttgtttgccaacatttgacaggggttgagatcttccgcccacatgacccaaatgggggtgatca

SEQ ID NO: 371122 - DNA, 340 bp, Zea mays
  unsure (1)..(340): unsure at all n locations
ttgtgngtcgctgtctttaacctcaatagctcttctgatatgctcctcgccatgcttcgcctcctcgtgatcagccccatctgggtcatgtgggcggaagatctcaacacctgtcagatgttcgacgacaagcccaaactagaatttatcaacgttctcacaagtattgagtcacgtttgatgctggtaagctgaaattatttgcttagtaattttagtgccttgctggtaggcgctatcgacatttcatgtgaggaattttagtcatgcgaggaatctgggtcatgtgtgctaaaaaaaaaaaagaacatgaagggggcacaaaaaaaaaataattaaa

SEQ ID NO: 371123 - DNA, 325 bp, Zea mays
tgtactttcaccggggacgtctgctcaatgagggggatcttcttgacggataaggacgtgtgcttctaccagacggtgaggcgatagcacacgatagaccggacgcagctagaggggtggagcaaccactggccgagagtctaggtggtgcttctgaggaagaagccgcacggacacgtggccatgctctgtgcactgccacacatcggtgggacacttgggcgtgggcctgacctacagtaccgggtactccgtgcctaccacggagagggtcatggttcccccgtctgcgataaaacctgttctgcccgaccacattgttggc

SEQ ID NO: 371124 - DNA, 353 bp, Zea mays
gattgtattattttgaaagtggaaggcatgcatcgaaaggagcaagcacaggtgctgctgaagattaataagacgaggaggatattgaatgacatgatgattttgaagacgatgaagaggacatgcttgagcattatttagctcaacagtcatagaactcagcaccttaaccttctaggccaaacaaaggacctttgcgggcgcagctgtaccttaagaagccaaacgtgcgtatatgacgcacactgagctctagtgcgcactatcatgtgtatgtgtctcatcatgcggatggatttgtggatgctgtctaggtgtattaagggggctgtgggatcacattaatatatacg

SEQ ID NO: 371125 - DNA, 301 bp, Zea mays
tgatactctcaacgggcacgtctactggatcagggggaactttttcacggaggaggcagcatgttactaccagatcgtgatgcggttgctgatgaaagaccggacggggggagtattgtagagcaacgacagcccgagagtctacctggtccttctgcacatgtggcccgacgggcacatagcctagatagttcccaaccacacagcgctggagctgttaggcgtatggctgacctacattaccaactactcggagcctccgacggagaggatcacgtttaccctctccgcgataaactct

SEQ ID NO: 371126 - DNA, 241 bp, Zea mays
tgacaagacacatactattacaaagtgacctgctttcaaatctaattgaaactaattgaagaggatgcacatttctttcttctttcttccaacccgatcgacatctacactcaccggtttcttcagtttgtcagacaagcagtggggcttccattgcaatggctttcggagtggtgacctatagcctcagaatggatgtgaccaccagggagaggacggtgaactatgaggagatcaggcc

SEQ ID NO: 371127 - DNA, 472 bp, Zea mays
ttttatcgtccggtttttacgttggtttgccggacctaacacaaccctcctcctttaccgggcttgggaccggctatgttgaaacgactcaaggaagtcttccaatcaacataggcggagttatacaacttaacactactattttctcttaattttcaaaatatttaaactaacaaaacaaactaagatcatttcactaactgtatgtgctcatttgatatgctggtttggtacattcgatatgactgctggaccactgcattgggagttgcgacctattcgattgataggcacttattggtttaagacttaagggttctgttctgatatagattggaatgtatggacatagctggctctttgatgctgtatatcgttttcttatatgttagcagatgattaaatcagtttccaaagtattgacttattactaatcagtgccagttcaatgttggttagattccctttttgc

SEQ ID NO: 371128 - DNA, 292 bp, Zea mays
gcgaacagtttaagagacacaggggggaatttaccagacttagattgtttttcacgaatgcgaatggccctggacgctgcctggggtttgaagtaccttcatgagcactggaacacccaagatcatgcaccccgatgtgaacgccatacctgagctgcccgaagggaacgttgaaaaagcccgaggagaacatgccatggccaagatggacagagacagggagcactccagctacagccgaggagcgggggactgagagccacgaagctcctagggacataaagaccggaag

SEQ ID NO: 371129 - DNA, 385 bp, Zea mays
gttgttgttatgccggccacggcggcggcggccgcggaggcatctggcacggccatgggcaggcctgcgggcacggaggcggaggccacggcggcggaggcaagccgggtaagaataagcacgtcaagttcgacgacatggacatggacatggacgacgacttcgacgaccttgacatggacgagccggccggccgccacgcgcacgcgcacgggcacgggcacggcgacggcaagccgaagatcgtcaggacgacaaacacccccatcgaggcgcggctggaggcgccccgcacgggcccagccatgtcgatggccgcggtggcgcccgtgaggatgccgatgccgatgccggcgatggcgccaatgccgcagcaacagggcat

SEQ ID NO: 371130 - DNA, 280 bp, Zea mays
ccgggccgacccacgcgaccgcccatttttacgcccacacggacaccgcaagaccaaggggaggaagaaggggaggcgcagccgaatggccgacccgggcagcaaggggaagacaaccatgggacagaagaccaaagggggggacaccaggcgcaggagcccaaccattggagtgaacatcaagaccatcaggggcgaaaaacaacgcgacgaacataaggcaggggcggaggacaagaagacaagacaggacgcgaccggagaaacgaccgagagcaga

SEQ ID NO: 371131 - DNA, 228 bp, Zea mays
aacccgaggggttattttttgggttttacacaaagcttacaaattttttttccccccattcataaatcccttcatttccctacatacctgaacgggccccaaaggaaaattttgggcagggaaaacccccaagaaaacccctttagttgtaaagagctttccccaaattttgccgtttaaaaacttacccaggattttaacaggaaagttttaaaatattttggggaa

SEQ ID NO: 371132 - DNA, 505 bp, Zea mays
tatagcgccgttgttcgcgaccgcacataccgcgccacctgcgccaacacctgcgacaggtccgcgcgcaacggctcgaagcccgcgttgcgctcgcgcgtgacctcgtccatgtacagcgggcgccggatctcgatctgcaggctgtggcggttcaacgccggctggccgatctgcgcgatcagctgcacgcccttgtagggatcgttgcgcgccaccgtgtagccgcggtcgcgcagcgccgtctcgatcagcgcgatgaattccggctcacaggtggtgccgtcgcgatcgcccagcacgaagtccgccaaaggatgcgcgctctcgcggcccagccgctcatacgcatcgttcggcatcgaatgcaggttcaggtgccagaccgcgccgaaatcgcgttgcgcctgttcgatggcctgcgccagcgccgcgtggtacggctcgtagtacgcctggatgcggtgccgcacttcctcgagcgtcagcttgcggtcgtagatcg

SEQ ID NO: 371133 - DNA, 324 bp, Zea mays
ccactctaggctcagctgattcctttgggcctgacaacccagtgatccacacggagacggggaaacaacccatgggcgccgggacgccgcgcttcatggtcctggagggcgacctgaccctcgcgctcatccccggcggggctggatgacccggccgaggtgctgcatgttgccaaggagcccgccttctggactggatggtcgtggagcggcagcggatccaccagaaccctgagctgggatacgaggagctccagacccgggagctcgtgcgcccggagctccacgccaggtggagtccatacaggcaccccttagcacgca

SEQ ID NO: 371134 - DNA, 520 bp, Zea mays
acggcaccgaggaacggaaacaatcgcctttttcacaccagactccgggtgctgctcctgggccgaagactcctcccccgtggtcgtggcagccgccggtccctgtctcgcctccttctccggcgccggcgccgcctcatggtgcagaggaacagccgaagaagaggcagaagcaaccgcaaccgcaagagaccaacgccacgaaacgggcggaagagctaggcggtggagcgagaggcacgaaggtggtggacaaagccgctagggatgagaagcgacccaagaaggacagccaagctggggcatcgccagcggtgccgagtcacgctcagacgacggagaccgtgaggccggagccggcgcggcagctgctggtgaacgctgcggcggctgtggccgtgctcgctggggtcatcgccgcccgatggcgcaccttgcaatgaacagtgtgggtcgcttgcaccatgtggggtttaacaaacgcctgttgacaccatgtaatggccaagctaatttgtac

SEQ ID NO: 371135 - DNA, 248 bp, Zea mays
ggtagcagcacgtaacaccgttttaaggttaaaaattttggggcattatcaataaggaatggattttttttgatgagttagggagatgcttaaaaagctttacagccggcttatttctttttgcacgacccagaaaacaattttaggacctgaagccagagagggcctgatgctgaaaggagccgggggcatatttttttacccgccctgtcttcaaaaaaaacacaactttccaaagcctacaaaaa

SEQ ID NO: 371136 - DNA, 150 bp, Zea mays
ggaaactaccacctccattgaccactcaaggactacagaaaatgctctggtcaatgcttcagatgcgcgattacaatatgtacctccttctcaatccaagaatgagtagatccgtcggcagaatatacagcatcctcccctttatatgtt

SEQ ID NO: 371137 - DNA, 379 bp, Zea mays
  unsure (1)..(379): unsure at all n locations
tttccacgcccgctttatactttcnccgccgaacctctcacgctctcggtggctatttttctgcgcccgatgcttcagttcaccctccgccactcgagacatcgatagcgtagagcaaggccagagcgggaccagcgcggccatcgagaggggattggggcctacgacgcgtacgctgcatccgctaccaccgaggtggcgatggacaagggcaacggccacagcaagggagtcagaggcggcggttgccgggtcaccaacaaggtgacacgacctcctaggattacatctaatgctaagcagaactggccgattctaaaatgttggaaggaatttgaaaggaggcaaacaagtggaccttagtctgctactaggtacc

SEQ ID NO: 371138 - DNA, 541 bp, Zea mays
tttcgcgtggggccggcggctgtagggagagaagggagaagagaatgatggaggaagaatattctctcatactttaataactgatcagggttacaatatatataaaaattctaaagggtctaatgggctgggctccataacatacacaaccataaaggaggctatctaactcggatatgttgtcttttccaacctgaaagttacttttgatggcgattccagcaggtagagacaagttttgcgagtggttaggagaaaagcgaattgatcttattccccggtggtggttctagcccgtagtcagacaagttgtgcgactatatcgataattacctcacccgtcttaatccatgctacaaccaaagcaaaattagatccaatctactatgcatattgcctgtatgcaaaccatctagataaaaaattgtgcatgacctagctctgatacccaatgtggaaagcgtataagctacacaatagcattctaccacattcaactaagatagaatgtgattagaggacatgggattgtgccactaga

SEQ ID NO: 371139 - DNA, 382 bp, Zea mays
ccttgtagttctaagggcggcccactctaggctaagcgggattctttcggcctggtaacccattatccaaacccaaacgaggcaacaacccatgggcgccgggacgccgcgttttatggtcgcggagggggacacgaccctcgccgtcatccgcggcggggctgcatgacacggccgagagggctcgcgccttgccaaggagccaccctccctggactggatggtcggggagcggcagcggatccaccagaacacggagctgagacacgaggagcagcagaccagggagctcgagcgcccggagctgcacgacagggggagcccatacaggcaccgctaaccaggcaccggcctaggatcaacaggcaacaccgagcgcccg

SEQ ID NO: 371140 - DNA, 142 bp, Zea mays
caaaagcctaatcttccttaaagattttttcaggggttttattcagcacctattgacgacttcgtcgacgatggagttagcgaccctcattacatccagcgcttttttcatgacgggatcggccaggggatcgtatggctcg

SEQ ID NO: 371141 - DNA, 411 bp, Zea mays
caagagctcgcggtgaaacggatgattattctgtactaccacgacgtggtgccgaacggcaagaacatgaagggtttgacccaccgacacaagatacatcggaaccgccacaatgccgaaatttggtgaaggaacatcttccactgtcgaagcacaacaagttgctgctgccggtcggagcgccaaagaatcggttgcagtaccgaaggattttagcaaccggatcggccgaggcgttgatacaaactgcctaagctgaaggaaaaacaggcgagaagccagaccgagaggaaacaacaggatcgtctgagccagaattaccgaaggtgacgaaaactactgcaataactcccacgaggagaagaatggcatgcgtgctggacgatgtcatggagacaacaagggcattga

SEQ ID NO: 371142 - DNA, 256 bp, Zea mays
aaatgctataaatatacagaaaacatccctatcctctattctctgggtgagagaaaaggtagaagaaagagttttttttttgggtggacgctaatttttagctaagaatctaaacctgcaccagatctcgctagcttgactttaggcatgactaacaaccaggcctagcatttccaaacatgctctaattaaccacataaagcgagccatagagggagagagcgagaaaggtggtctaaaggccttgtttcctttt

SEQ ID NO: 371143 - DNA, 352 bp, Zea mays
tggtggctctgccttaccaatctcttctgcttcttcgctagttttggctgggttctcatatatttgcaggtttttcgttctgaatttctccgctcgcgttctgggctgattccgctacacagatctccgaaccgttcgttccgcgtggagtccggtttgcgagggttctgatttctggggttccgaattcacgcaggaagacatggttttgccgttccttccacccattgatgcaggtgttggacatccctcttgctcgatccagccgctgactcgagctccgtttgattgattccgctgcagatacccgaggcctagctcagatggcctcccgctgcccaatggcatcggg

SEQ ID NO: 371144 - DNA, 332 bp, Zea mays
aacccacaaccattagtttttggggtagctgcaaaacatccattaattttgggaatcagtttacatcactcacaaaaaattttttcacagaaattgggtttaaaaagaaactgaaagacaaaaccaacttagccctcccgcccatgtgtttcgaccctagacaaatgtagttgatttttgaaaacaaaaaacattctttctaatttggacctttttttggttagggacttggggcccaattttaggtttttggggactggcaaaacccctacacgggaatagccatgggggggtgaccgtattccctaattttttttggagctagggcaggg

SEQ ID NO: 371145 - DNA, 380 bp, Zea mays
ttcacttgtccgcccacgcgtccgcacacagtacccaccctttgtctctacatatattcacgcccgctgcttgctgccccacgcttgacgctcccccatgcctactgcgctgcctttctctcacttagccgccacttccagtctgtctctatctctccactccttacaggtagatcctagaagccaacaaaaacagacgggggcagagagtaaggggagaatcgtgctccaggaaagcaaacctgatagaattcacctctcccccaccctctgtgtctctctagatctacgcaagccgcctcggtatccgagatcgccaccgtccgcggcggctgatgcctccgtgctgctgcgcggaggtggcgctacgctgttagctg

SEQ ID NO: 371146 - DNA, 173 bp, Zea mays
cccatctttctgcggaggctccgcagctgcgcgggcaggtttcttgcagcggcagcggcgtcacgcgagcctgccgccaccacgcgtacagccgcaagcagaagtcgctcggccttctctgctccaacttcgaggcgctgtacgaccgggaggacgtggaggcgattgggctg

SEQ ID NO: 371147 - DNA, 257 bp, Zea mays
atattagaaacaaatactgtggggatcatatattcaaatgcggatagatcaccatgtgcgccattattaacaactaatgaagatgcatcacacaccatgcgtgtaataatttataagattttacagtacagcacgtgatcgatcatttctggaacaaaatatatatatatgcgcagtcctaggttgtatatggtatcatgatcgtcgtcgagcacgcatgcatgcatccatgcacgagctgagtatccccgatcgac

SEQ ID NO: 371148 - DNA, 230 bp, Zea mays
tgtacttttacgcgtgggtccgggcccactcgagatgtgacttactgagagtgggcgatggggcatcttccactgtggctttgcagaccctagagccagacaccaaccatctggaggggttatggggaacgccgagcactgctggggctggaagcagcactgatatgatcacgggacgcctaaagggcctcacggagcagaggaactacgagattgtcaaggccttcaac

SEQ ID NO: 371149 - DNA, 224 bp, Zea mays
atatttttttttttttttttttttttttttgggggacttttcaagattgggtggtttcatatttatttccatcaattatccgtgaggacaaaacccaaaaatgaccccaataatgcatgtatacgttgatcctacttagcaatggcaatatcaaaacggagaagacggctctgtgctcttggtttggagacgccactctttgggggcctggttatttaacatga

SEQ ID NO: 371150 - DNA, 349 bp, Zea mays
gggtggaaacctgtctagtcagccttattatacttagagggtgttactcagagtcgatgacacgacaaaacttgccacgtcacatatcaacatttggctgacatgccacgttggccggccacccaccatgaagagaagtccgaatctacttgagtttcttgacaccagatagaggagacgccatgcaatgcccagaaacatacatatgtatgaaaatgagacttgagacaatactggtgttcagatcagatgccatgcctagggtaccacactaccacctgataatgcttcagtcctttgccaccatcttcataattacatcgttccacgcatcaataggcccaggcaa

SEQ ID NO: 371151 - DNA, 292 bp, Zea mays
tgtacttgtacgcgcgggcacatagcaaccggggagcagtggattgccctactgatggagagacaacccaagatggacactcatggggcatggataaggactccctatggaactgcgggaataagggtggactctgtttactattagtgacattgtgttatactggtatgttgttttcatactgcactgtctggaacttacctatgcggattgtttcccatgagggtgagaaaggtgattcagatctcttctttgggccacaaggtcttcccccgataagaaatggaggttg

SEQ ID NO: 371152 - DNA, 334 bp, Zea mays
aagacgggcgaaacaccctgggcttcgggtatcgatttatcataaagggaaaattgggggataagaaataaaccatctaaaggggtagggcgcgggcaccaacacgcgaggggggggccattttttttagctcctttagaaaaaaaaaaagggggggggccatttgaggactgagccttttcgggccaaccaagggaagtttttgtcaacccttgggggagctgtcaggggtcaaccaaacccctccttgttttcagcctcacagtcacaggagttttacgcaatacgcaccaagcccccaacaggtgattttttactaatccaatttccaaac

SEQ ID NO: 371153 - DNA, 493 bp, Zea mays
tttccttggacgcgtgggtttatagcaaccgtggagcaatggattcccctactcatggagataaaacccatgatggacactcatggggcatggataatgactccctatggaactttgataataaggttggactctgtttactctttctgacattgtgtcatactgttatgttgttttcatactgcactatctggcacttacctctgtggcttgtttcccaggagggtgagaatggtgattcagatctcttctttgggccacaaggccttcccccgataagaactggaggttcctcatctggtaattcagttgtcaaggaacagaagccgttctttgattctgttcctggtaccccagtggagaaatccgtctttgattccatcccaagcacgccatttcagaaatccgtctttgattctatcccaggcacgccagttcagaaatccgtgtttgattactctgtccctagcacaccgatgcagaactcagtctt

SEQ ID NO: 371154 - DNA, 306 bp, Zea mays
tgtgcttgcaccggatgtaattgctgtgatgtcaaaagggctctggttgcaacagtaaggcatgattctctgttagcactaggaactgcaaccagaattgtctgtaataccggtagtatcaaatttacctagacacttcgaacgagcaaggcgtctgtaataccggtacttacatgtggtgcctggagcttccaaatctggatagcgtgggtttttcattgagaatgttaagttggctcgggttcctatgaagtcaaaaaaaaaaacaagaatgttcaagatgaggacaaacaaacaagaaaaaga

SEQ ID NO: 371155 - DNA, 277 bp, Zea mays
ttattattttttttttttttttttttttttttggggggctttttttttggctggaaagatagggccattaacattgaaaccgttgctgtacattcagaaacaagttgcataattttacaacagactacatgttcacttttttccaccattacaggaccctaggaagattagggaaacgaaataacacctttacaggttttcaacgaaactaccaagcgaatggtaatgggtagataacatttgtccaagggaccagttccctgcacgtttggggaag

SEQ ID NO: 371156 - DNA, 83 bp, Zea mays
gcaaccactcaaccgaacagggaggaaccataatttgccacaaccagaagccataactttggcgttctgatcggacccgtggg

SEQ ID NO: 371157 - DNA, 132 bp, Zea mays
caccttcattttccccggaacacaagggcagacgcgtggggaatcattgaatggcgggatcccacacacaaatggctcgacgtctgcagccatatggtgggatggacacctacagtgccctgactacttatg

SEQ ID NO: 371158 - DNA, 360 bp, Zea mays
ttgccgcccttcgttttttttttttatgcacaaagactgccgctttattcattctctacatcaccatatcacaaatgccaacggccagctgccaaattgccaataacagatacagatacaggctgtcgaccgtgacatgagcggcaggcaagcacggtggtggtcggagaagagaaggagaatcggggctggatcttttactttttactaataaacatatgacattgggaggatggctacttgcgcacgttggaggaggaggaagcagacccctgcgggcctgcgggggagccctcgaagagctggttccggagcacgtcgcggaggccgtcgaagagcctcttcttgacggaggccatg

SEQ ID NO: 371159 - DNA, 346 bp, Zea mays
ttatatttttttttttttttttttttttttgttgtttttaaggcgaacgattttgcttactggttatgggggagaaacagctacaactggccaaaaaatacaaaaaaaggctcatatatatttcccttttttccccacatgttcgacacaaggaatgaacaaatgttgcatctaacttgtacgggttggcagggttcaaaccgatcgggcggtcaaatccgtcacactcgctaggcctggtcgtcagtcttgcgggcgccgtgcgagacgcgctcctgcaacaacaacccggcctcctcatcggcctgcgccgtcttcttttgcgcctccttggccttgagcgcct

SEQ ID NO: 371160 - DNA, 272 bp, Zea mays
tgccgtctcacgcgttcgagtactcggaggcggacgctttttaagagtatgaacctctcaacacctgactggcagacatgtaggctatataatagttgcacacgcctaggagcaacattctactaagatgctaacagacggagagcacttttctcaaagcatgttaacgaaggcctggaaaggctataacgacatgcattgtgatggaaacctgttgccttctgtgtttgaaacaaagggaatctttcaacctttggagtacatgaaaaaga

SEQ ID NO: 371161 - DNA, 375 bp, Zea mays
ggactgaagcaaatgatgcgtaactttttcattcaatgatggtgtgtatttatacatagtgaaacgacagaaaacttgtccgttcgctaaagacggtttcctcgtcgtaggagagagggaaaaggtgcctgttcggaaacaggatttacataaaggaatattattaacactaatcctattaactaatgaccgtcgatcttgttaatctccacctttgatattaagtgtgtttcttcctccggattgctgacgtggacgaaatcattttatccttaacaagcgcaacatgcaggacatccacggaccagtagcagtacaacggggctccaatcgacgtccaacggacgctcaccagagatctcgatagccttcacc

SEQ ID NO: 371162 - DNA, 143 bp, Zea mays
acgtccagaaatcagcctgtacttgtttatatgctggcattttaataagtacaggctgatttctggacgtaaaaaaatgccagcatataaacattagaaattttgctgtgtcgcatacaaaaacaggcctttttcaattgaaa

SEQ ID NO: 371163 - DNA, 324 bp, Zea mays
actttgacttcaactgctaaaggagattgatttgtacatggagccgacagaggccattacatataatgccgggctgatactgaaggtacatctgacagcttccgacaaggcacacgagctcttgactagcatagcctctctggaaaccgctatgacaaagcttgcagaggatctacattacctgtactaccagttatgtgatgcgagaaatgaagggatacttgcacaaaataagccagaatgctcgctacctacagcgtcagagtggcaaccttctacagactgcgagtgtccaagggtagagcctgaacaaacattaagata

SEQ ID NO: 371164 - DNA, 427 bp, Zea mays
ttcacgcgtccgggcgtccatccaccccgacccatccaatccgttccattcctacgtcggctcggagcctcggacctcggagacacagggatcgtcttcgtgcccttcccgtcgcctctcgccttgctgcacccccctctctcctgtctcttgctggctcgtggtcaacccacccacccacctgcgctacgccccgcttccatggatccatcgccgatcggccttacacgtctaacagtacatgagtttctaactggtgcgagcccaagtaaagttctgtaattagtcatattcctgcacaatgtcgaatgcgaaagtggtgcttgagcctgcatttaaggagctggccataaaccaggaacagagatatgaggatcgaggatttaagccagtcgctttgcaaaatcagactatggcaaattctact

SEQ ID NO: 371165 - DNA, 141 bp, Zea mays
tttttcttatactaaatgtctaacttatttctgtttatagtaaaacctgtgaacttgcctagcttgtaactacattgcatttgcatcctgactgaagtaaagcttttacttgttttggttgaaaaaaaaacaaccaatacc

SEQ ID NO: 371166 - DNA, 207 bp, Zea mays
tatcaacaacatgaggtggatcatatgtatctggccgtgaactgtaaggaggccgtaaacccgggtaagcgcgtaaccactaaacacataatggcccattcctgcccctgtgctagggacccattagttgaacctaacactacgaggctgcactgagcaccgatggattgcttcttcatcagagcatgcttgaataaacgctctttg

SEQ ID NO: 371167 - DNA, 390 bp, Zea mays
tttcctctcttacccactgccaactcagcgccaaactgtggagaattttttttttacctatttctatttatggtggtggtggtgtgcgatcgcaggaacaatcaccaccgttattaagaagatgatgcgctgcgctgcaacgggcggcgggtgcgtcgcttcgtggagcggcgattggagattgccggcggtcaacccctgcagcgtgcggatgccgacgggcaacgatgggtggtgcgccggcctgaggtcgcgggcggcggatctcgcccgcctagagatggccaacctgcgcggcggcgtatgggggctctttcgcgcgagcccgcgctaaggcgcttgcaagccacggcggcagttgaccctgaagatattccattggagaagggt

SEQ ID NO: 371168 - DNA, 330 bp, Zea mays
aacaattaagattttgtaacggcagtaaaagtgacacaagtagcaggcgaacaaggagaaccccgcccccctcgttgaaaaatggctacgtacagcgcaccgcagttccgcagcgatggcgccaaagcacaagcaaacgaagcacgcaccaactccgacgaccagcacggacggacggacggacgggaggtagaggacaggcggacagcgccgccaggcgctcgcgccgtccgtccgtccgcccgccggcccccacccttctttttctctccactccacatgggagacacagtggggcggcagaaacggacgacggcctgtgactgacgc

SEQ ID NO: 371169 - DNA, 417 bp, Zea mays
tgtgtttttcctgaacatgcctgaaaggttcagttctctacgccagaggttgagttctattgaagcacataaggtgtccttggagactctactgccttctggacacaaaattaatgaattgttaataaatttctggagagtttgcaaaacagactatcaaccgtataacaaacacattcttggtgttcttggtaatatgggatctggtgggatcccttctgggccaacttactggagctgggaggactgcctgctggataatatttgatatatatgtggagaatgcaattgatgggaggcatctaagtgctatatcagctatccgaattataaaagaaatgaccaagacaatgcatgtgcttaacgaagcaagctggcaggaaacatttaaagctctgtggatttctgcccttcgtc

SEQ ID NO: 371170 - DNA, 160 bp, Zea mays
  unsure (1)..(160): unsure at all n locations
cacttggttttttacgcggccgcaaagagctggaagagacgcttcngcatgaaactcttggacactgggcggatgctgttttcacatagacagtacagagtagcttactagagcacacggcatatgcaatgagcctgccctcattcaaggaataatggta

SEQ ID NO: 371171 - DNA, 325 bp, Zea mays
gtcttttggaccgtcccggccaccgcgccggagagggcggcggcggggctggagggggacgagatcgccgccaggaggagaggggcgaggagcgcggacgccaccgcgtagcgcttggaccaccggtgcgccgcgatgtccgggatcgtgaggcgacgcggcaggtacagcggccactgcagcgcgtggagggcgtggcgcgcgaggctgctcctcccccgccgcggcggtgcggcggcctcggcgtgcttggacgagatggggagcgcgggaggttcgtcggggtcctcggcgaggagaggggcggcgaggtcgggatcgggac

SEQ ID NO: 371172 - DNA, 447 bp, Zea mays
tttccttctcacgcgtccgctagctctgaggcttggagtactggagagaggcaaaggcctgcatcaactggcatagctcagcagtctgcggtcgatgaagagtccgaaatgctattgaaccggttatttcatgattttatgatctccactgcagttaatgaggcatttcaaaagcttaaagcagcaggagcatttgagaaagagggcgagatgaacatatttgttcggatgagcaaatccattgtaaacacattagctaaacactggacaacaacaagagaagctgaatttcttgcctcaacaattgtttcatcccttgttgagaagcagcaaaaacacgagaaattccttcagtttcttgtcttataaagtgtcatgaagaactcgcttcaaagcaaagagcagcaatgctaactgtcatggagcatggtgaaaagctctctggaa

SEQ ID NO: 371173 - DNA, 338 bp, Zea mays
acaggaagcaaaatgtaactgaaaaacatctgtacattcaaatttctcttttcaatcttattacaatacacatacaagatcttgttggatgtcaggaataaaatcagaagatgaacatgtactataccactgatccatctatagaacatcataagcacatataaataaacaacttccatctagctgatatcacattctgcatgcttcgacttaataacatgtacatactagaaatggatggtgccgtacccgctatcatgtgtaactatgggggaaaaactgcaaactgataccatttgattatcaggcttttaagaaactttgatgccatatgactg

SEQ ID NO: 371174 - DNA, 454 bp, Zea mays
tttagaaggttgctcatcttctgccaagagagctggtatgagacaaaatgctaggtcatcaggcttccaggtgcgccagttgggtaatgtcttccgaagagcacagactgagaatggttaccccagtacgttgtgtaaatatgagattgaagattcatgtgatcagagtgagtccgtgataccagataaggaccagtttcgatgtggtgcctcccgcaaactctatcttaatgagacctcagtcccggacctaaatgcagaggtagtcatgccaacagagtgctgccagaatgagaacggctgtacttctggaaagaatgcattcacaaagtcgaacggttgtggtgactctgagacctgtgcagaggggcatgtaggggatgcaccagccatggaatcccggtcccagagtcacagcaggcatcagatttggagcaggagacctgtcttgatg

SEQ ID NO: 371175 - DNA, 233 bp, Zea mays
cagaggagatagagtgtgttcacattaccagggatcttgcagaggtttggaacaattgggcgaaggacttaagaaccttcccacagctgaccttggagacactcttcggtctaagttcatggaagcactttttggaacaattgggcgaaggaccaattgtgcagtctaatgcaagcacatggttcagagacatcagtctactggctggccatatcaatacacagcaggacaaa

SEQ ID NO: 371176 - DNA, 392 bp, Zea mays
tttgttctaaccctcacgcttggttcgaaagaggaggagattgtggaggctagagcacataaagatggatccaatcagatcacagcagcgtttgctcgtccaaatgcagattttgatctcagcgctccaaatgaatgatcctactggtgcttttagcgcgcaaaaacctcggtgcggagcgagttcgcgtggtgttaagagcggtggcagctcggtggtgttcacgggcgagtgctcccacgccttccacttcccctgcatcgtcgcccacgcgcgctcctgctccaacaacggcgtactgtcctgccccgtctgcgcctcgtcgtggcggcaggcgccctttctcgcctgcctccgactgcactgcttcttccacgacgacaagcacctag

SEQ ID NO: 371177 - DNA, 338 bp, Zea mays
cccacggtgggccgcggccccttccagcgcgcatcctcaacgtttgcggcaaatccagaccgggcgggctacttgagaccgcgcctcgccgagggctctaggtgagctactcagcatcgcaatatcatgaaatacggttgctgcatgttgtgcaggctcatatatgattactggatacggccaaccgccgacggatcctgtataatatcgagcttgcgtgcaaggatcttgctgctacgcttaggcggacgagcagggcgtgatctgctggtggagccacatctggagaagaactcgaagtcgccgacggtcaggtcggagcggatctgaggcgacca

SEQ ID NO: 371178 - DNA, 166 bp, Zea mays
gcccaacactttgatcgtgcgagccgcggtggctacccatcagggaacaagtgactacttgcttacaggccacgcttccatgttccatgtacactagggaagcctcgttagctgtcccacccttttggacagctcctccacggggacgcccattgtcttggacacc

SEQ ID NO: 371179 - DNA, 350 bp, Zea mays
ttggttgcccgcggggggcgccggtccatgcgagcgaggatgccaaacgttagcggcggtttgcaacacagggggggtcccaagagcgctggtagttcaggcaagcaggacagattggtgccatctcagcaacataaatcatgattatcaccggtaaaggagagaaggagactgttaatgaacacggccaacgggagaccgaagggtgatgaatgagcgatgtccactgttgaacgcagcctggtcagtcgctgacgcgatccgggagttagtgcatcaatggaaggcccccaggggatgcgaagccgaagacgacgaagataatgccacgccggctctgtcggcaaccg

SEQ ID NO: 371180 - DNA, 510 bp, Zea mays
cacgttcctttctgttattcctttgtttacccacgcttcctttcgaacctgccggcacacttgctgcctatggttatctgtcacataatcgtgtcttattgtcctgagacgacatggacttgccatagaggagcgtccagctacagccaacatgagggtctggacgacacaatggaaatagaacgggcagctggccacatggatcctaaagcctaagaggatgacaagcgcaagagcactggcaaggaacggatcgatccatccacgagacagggtgtgcatgtctccaatacggcgggtgctacggggatgacacaggcggcaaaactgacaaatgcggaccgcaaatataagcatccgagaacacatgggatccagactaacgaggactcgacatagcttacttggaagactcctctttacagcacatctccggatctagaaactcaacaagaaactcaccttatggcctgatggctaaagcatggtctgcttaagaaacaggctctc

SEQ ID NO: 371181 - DNA, 459 bp, Zea mays
ctctcacgcgccggttgatacggaggcgtagcgtatgctgtactggttctcccgcgtcggcacgctgctcgtcgtgctcgccgtcctcgctccggcggtgatggcgcagagctgcgacgacgagctgccggctcagctcgccggcaacttctcggggctcgcctgcgcccccgtctggaacaacttcgtgctccggtacgcgcaggacaaggacaacgtgctgcgggtggtgctgtcgaccatgtacagcacggggtgggtggggatggggttctccaagaacggccctatggtggactccagcgccatggtggggtggatcggcaagacggggcttccgcacattaagcccgtctcgctgcggagcaagaccccctcccaggtggtcgcggaccatggctttctcgtttccagggacaaccacaagcccaccgtgcttttgcagcacgactagatcta

SEQ ID NO: 371182 - DNA, 383 bp, Zea mays
tgtccatttcctccggccacgcgtccgcccacgcggtcggatccggagcagccgtagtcctatcgtccccgtcgtcgggcgcccaccatctccgtgccgctgcctctcgtttctgttttcaataatcaagatgagccgtggcggcagtgccggaggtggtcaaagatctctgggttatctattaggaagcggtgagccccccaaaccagcagtggcaccagctgcaagtgctccacctgttgagaaaccatctgatgcaaagactgatgcggccaagcaggttgctgctggggataccagtctaaccaatatctaccacagggctgagtggtcagaacactggcaacttccttacggaccgtcctttaaccaaggaccactct

SEQ ID NO: 371183 - DNA, 388 bp, Zea mays
acctttcctgtatttttgggtttatctacgcgtccttttttttccaacatctgcaggcgttcaaccctacctaggatttgaacatatccgtggggctagcaacgaaggtgcggggtctggagcgctggtcgttttgcgtagcaggcttgcatgtcgccacctgaacatcggaaacaatagacatcaacgtgaaaggatgagaggagggaaagctgctccaccaattgaggatgtctgacggtgatgttcgacgctaacgggctggtcacatccattactcgttgctcactacgattggggagatccacgctactgtcaatacccgccaagatcgtcgaaacaccttactactatgaaagggtctcagcttgacaatcagtatgagggc

SEQ ID NO: 371184 - DNA, 259 bp, Zea mays
tgatttcacactaaagaccgcagggtagactgagcacattaaagggctggcttgaatttcacagacgcaacctaaaatttttactatgaccatgggaacaagaaaacgaagagtttaaatcccgctagaaagccaatagcttttcacgatcttcgttggcaagttcaaactgagttaaatcctcctcaccagagtcatgttctggggagctgtcttcttgctctgctagcctccttggctccatgcagacaaactttag

SEQ ID NO: 371185 - DNA, 413 bp, Zea mays
cacaagcataaacgtcaggaacgattgattttttacgagtggttgctggttttcagaggcggccagtgggggcaccggtaggtggggcgcgtggtgccagcgaccgagagttggtggcgcggctcccgacctccggacagggactggtggcgctgctgccttctcggagtgcggcagcggtggcgccggagcagtgctagatttgcagctccgacggtgcaatccacctattcctgggcttcgcattgggccaggatataacaatcaacaagcaagcttttccggtactccagtagcataagtaacagctacctgctatatgagggttgctgctatctgcctatcttcaccttatggcgctgctagaaagttgtaaaagatgttttgcgttacctgaagaactctgatgcgac

SEQ ID NO: 371186 - DNA, 335 bp, Zea mays
  unsure (1)..(335): unsure at all n locations
gcccacccccggggccgtcgaggggggtttttagacccgactcgcgttccccacagntcatcatgccgtgagttttttgttcctagctagctagctaagtgatccatcgccatttgccatctacaatccttcccttgatcgcacatctgatgagctagccaacacacagcagcgcgagttggagttcgttcttccggcgctgctggtctaggccgctgctctttgccttcttctccagcggcttgcatttcgcaaaagatttctcgagctgccccacacggccacacccacacccccaccttcttttgtctgcttcattcacttgaatcatcact

SEQ ID NO: 371187 - DNA, 479 bp, Zea mays
ttacacacgcagtcaccgcagcgggatatatataaagataaaagaggtgtgtggagcgggagaaggccggactgaaggaggaagacgagcagggagagggaggtagggcaaaaggaagagaatccgagaataaattcagagagggagggagggagggccatgatgatggcaggcgtggcgtcgtaggtggttaaagcgaagggcgcccctcgtcgtccggtctatgagctggtaccagaactgctcataatattcagggaaaaaaaaaaggcaacatggcggaatcgaaggtcgcaagtctggatgcccgaacgacgaagatcagaaacgtccccatcgcagtgaccccagaagggttctggtgctgcccgtcgcaagccgtgctccagaagacggcgaagagccaaaacccgcaagcgaagacgaagcccagagggggtgcctcgcctcttgcataaaagcggcaccaccaatccaga

SEQ ID NO: 371188 - DNA, 337 bp, Zea mays
  unsure (1)..(337): unsure at all n locations
ctgcnggttcctgtcctttattccttgtttttcccacgtttccttagccccctaggtggcgacagagcagggtgagagggataaccggagaagagaggtagctcggtatacaagacaagcaggcaactataggaaggacgaaggaggagaggagggagctctccatgggggagcccctcctcgcctccctctctatggagaacagcaacagccacccctgcacgctcctctccatggaccctgccggctcgcaccaggcctccgccgaatcttcgggcggcggtagcgccgtgaccaatggggttggggttggcaatggtgtagaccgggaactctt

SEQ ID NO: 371189 - DNA, 108 bp, Zea mays
aattacaaaaaggaggatgaaattgatctccagggtaacacatgctctcgtgccccttgaaattttaaatggacgaattggactgccctgaaattaattgctgaacaa

SEQ ID NO: 371190 - DNA, 444 bp, Zea mays
acccacgcttcttttccaccgcccacgcgtccggctcctcctaacactgctccgtcacgccgtcgtataccaccggctgcactctccttcctcctcccaagttgcaagagccggattgccaggtcagtattcaaaaatgggtgatccaagtgagaggaatggacacggcgctcttacccgggtgctattctgtggtccatattggcctgcttctactaactacaccagggagtatttgcaggactatccattcattcaggttgatgaagtaggtcttgagcaggtacctgatgttattcacagctatcatatatgcgtagtaaaaaataagcgcattgcatcagatattattgtcaaggtagcggatatgaacattatggcgcctcatggctgttgggttagaaggtgttgttgtaaacgctgctacagaacacataatcaaag

SEQ ID NO: 371191 - DNA, 298 bp, Zea mays
cccacccttgttacaacccaacagaaacgcgcagacggggggggatttttgagaaaacacgccgggtatccgcgaacaagaaaacaaaggctggcggaaagaagaaacaaacaagggtgcggcgaagacaacaacgactacgaaagcaggaggcggcgagaacactgagacgagaaggtccaacgcccgcgattaacacaaaccatgggcgaaagcgtgcccatgtcggaagccggggaaagccagatgcgtctgaagagaaaggtgagccaagggacaaaagacagcgcgggttggc

SEQ ID NO: 371192 - DNA, 303 bp, Zea mays
tttttcagcaaaagctagggggggttaatttgtggtccaacagctaccctaattttttttacaagaacacttgatttactaattactacacgacaaatttcgaagggaaagaaagactgagacatgagaaacccgcctgctttgttcaaaaacaacggttcctctgatcggccgctgacgagggaacgaagcagtaggcaatgcggccatgctccgcatgcacccgacctccagcggcctgggcgcatggccacccggtcactccttgatccggagccagcgtccgagctgcgacgggttgac

SEQ ID NO: 371193 - DNA, 526 bp, Zea mays
ttgattattcagatttccctcttcagcttgaaaaagttgtgagaaggtcctttatgcagattgattgccagcttgctgagacatgctctctccatagagcatcgtcctccggtacaactgcacttacagcaatggtttttggaaggtactttcctgtcacaagtatgattatccccagcttttcatagtatatttaagagttttttttatcgataccatgagttgtatatgtaatgtaatcgatttccttagaaagccttattgttcaatgtctatcagatggattacataagaaatattttggtggacatctggtgaaaatgtgtcaagtatcttttagaactgaggctacagtgttcaatcatgtctgtacaatatgtcatccccctttaagttttgcctttaaagatgtatagagctagtaccatggctgttcagaaactgtgctgtactaagctagtcttcaacgtgttctaatctttgcacaaacatttgaatattgacttctgttgatgccaagtagcac

SEQ ID NO: 371194 - DNA, 387 bp, Zea mays
cccacgcttttttcccaaccccaagccagcgccacagccggagccataacccacactgcactcagatcctaaaccagagccaaaaccaacaccacaaccactcgcttaccacaggccgagcctgaaacagatcccgaaccccaacccgaaccatacaagccaggacctaaaccccaacctgaaccattcaagctagaacctaagccaggatctaaacctacaccggagccaaaaccctaaccagaaccatggaagcgaaggcaccgtcgtatataccaccaccatttggtacaggcgtcgtggaagggaactgagaggagcatagtggaaccgatcattatcgtggatgccatctatagcttgaggctatgactgataagtaatact

SEQ ID NO: 371195 - DNA, 337 bp, Zea mays
tttccttccccaccgctccgccagcccgagcacgaggatttgtgcggcatccacgcttcgatgagtgatgaagataacactgctgattgtgatccgcacccaacgaaagaaaccaagctcacagaacggatcctttttgctctgtcacaccaggcccgtactttctcatccatggcatgatctacaaatgggccctgatgctccggtgctgctgaatgcctataccaagaggacaaatgttggtcaagaccaatgttagctagacgagtacactggcctaaccactgtggaccaaggcctgtactaaccacatgggtaccacaacgagcatgccgac

SEQ ID NO: 371196 - DNA, 391 bp, Zea mays
  unsure (1)..(391): unsure at all n locations
tcctgggtttacccacccgtcctttcgaacccaccgnggcgcctacccccagccgggcgctttacagcgaggacgcgggttttgccgacaataagcagagggacaaggccaggggcaggggcgggctggaacatcgagggcaaaagggtggcgaagaggggggagaatgaaagaaaaaccgaggagagcaggatcaacaaggcaagaaggaaggcggacgagaagagactggcaaggctggagcgagaaaagctggaggaggaggaaaggaagcacccagaggagatggctaagccagcagaggaacggccgaagcagagggatgaaaaggcacacgctgaagagcgatcaaaaagcgctaccctggttggggagaaagatgctaggaggg

SEQ ID NO: 371197 - DNA, 120 bp, Zea mays
ttgtatgagcctgggggcgacacccgcgcctggagtttttggttgcaggccgtgacgaaacttgaccccgggggttaccgcgtgcgcgctagactgtcaggcatacactaaggaatacgt

SEQ ID NO: 371198 - DNA, 371 bp, Zea mays
cacgcagtcctttccttgcgtccgcggacgcgtgggttcgaaagggcgcccaatttctagttcgggtaattaggtgtcgcaaggtgaacaagtgaagagcctaacaactggaactggtgaattaatttcacaatccaataatcaacctgttgatatcatgaagacagagcagcatgcacacactggaggtgctcctgtcctcgccacaaatgtgccaaatgaaggcctgcaaccacggccatatccaccaaattttcctatgcctcatccgcagtttgattcatggcgtgcacctcctggtcatccccctgagggaatgtggcatataggactagtgccaggtgggccatacagacccgttggcccccctg

SEQ ID NO: 371199 - DNA, 329 bp, Zea mays
cgatacgcatgataatgctgctgcatgtgctgcagggataagtaactctgaaatggcggatggcgatcacaaggctgaagtaagggctagactgtcaggaccactacagagaccacctagaatgaaagatgcatcgagaggaaaatggagaggataccatggtgccacacgctgagggcgtttacagatcgctaggactacttgacgaagaagacctacaccacgccttgtgcgacctgctggtggctacttaccaccaattaagagccatccattgaaacgacccatatacatcaccagatagacgtgctgctatgacaatgctagat

SEQ ID NO: 371200 - DNA, 389 bp, Zea mays
tttcactgcatcgcctgctcatggcatttggcgagcttttattctgtgctcgctgtctctctctctttggcgacgactgggcgaccgacgctgccgccacacgttgggtgctcacgtcttctcggggcccttagccggcgacgagcatcaccagttgaaagatggccaggattccgtctctgaagagcctgaatgcgtttacacatgctgaggaacacttgttgaagaacacttactctggtgctgttgtgacaattgttgggctacttataatgagtacactgtttgtacatgagctgcatttttatctcaccacatacacagtgcatcagtcgatattgtctgcagatgtctgtacatctataaccaggagagactgtgccaattca

SEQ ID NO: 371201 - DNA, 471 bp, Zea mays
gcgttattgtcagtcctgtccacagatcctgatgtttggtggcacgcttgtcaagaaatacgcgggtatactaactttgaacttttgcatttagtgcttttttatagttgggacctaatgccctttgttttagatggactgtgcttgtctggaggctcaccctgtaagtggtacattaatcctgatgttcctgaagtaagtgccctcatggctagtgcgagataagcgcatagtcccattaagtggaacgaggttctatcttcgaatcagcctatgcctcatgttcctgaggaacaaaaaaatcgcttatatcagagatctgcacccatttgagaataagtcatgccatagttggttggaactgggaatatagtatgagtgtatagttacatgttcgtgcaagatagggaattcttggtgacagtcactgtataaaagattggagataggtggtggtacagtgcatgcaaa

SEQ ID NO: 371202 - DNA, 492 bp, Zea mays
tcgttccgaaacccctggccctgtcaagcagacgcagggtgacaccaggcagcagcccaccttcacgcgaacacgccgtaccacaccatcaccggcaccgcagcacggcagccagtcaccaggactccaggagtgatctttgatccccaccaggccgccacgctactgtcggtaaggccagggaccctgctgcatctgccggctgctcctctccccgcccccggttccatgagaggtcggcggtttcgataacacacaccaactgctccctccactccttccccctgccttcagcccttcccgcaccactcccaactcgtaaacgctgtgcgccaacgccgtcgcccttccggatccgtcgttcttccgccggcgccgtgatggacccaagcgattccaactccgccgcaggaggaaagacacaaaatgtttcagtaccgcctgttgaaggtgtagcttgaggaggaactagctatggatgggtggatgagg

SEQ ID NO: 371203 - DNA, 375 bp, Zea mays
cgaattaaagaactaacattaagcagaaaagttaggtaaaatgtggcaagctaggcagcgaccaaacaggtcatattacagaatatcatgaaaaccttcttaatggacgaaaaggaaaagtaatagacataaacatgtataagatgtcacactagtattcgcactgatattcactaagctaacttagtccctagccgacatttaacagaagtttacgcccatttgaccccttctccaggatcacccggaaacaatattcaggtagcctttggggattctatctttttgcagatggacaagaggtcctgcagatgattccaagtaacttatgttcagtttggcagctgacagcaagggtttaactaaaatttcaat

SEQ ID NO: 371204 - DNA, 401 bp, Zea mays
gggggatttttggaagcatgtggtggatggttaaaggtgcggtgttttctgtggcgcattcggtgcaaatgtgatggaatcatgcgacagaagaaagtataatgttccctgaagttccaattgctctaagattatcagggcatcttcttctaggtctagttcgcatttattcatggaagactgtgctccatttgagtccattacactaccatcaacactaaatcttgacgccttgaacttggatgacgcaatttctctgatggatacgccagataatcattagaagactcttgatcagattaccttgcctgaaggagaatatgtgatgatagaacttgatgaggatgccagagtagagcaatcaggtcctgctccatcattacacacgggacctacagcaa

SEQ ID NO: 371205 - DNA, 309 bp, Zea mays
  unsure (1)..(309): unsure at all n locations
accctnngcagaataaggaggaaacataaaaagccgccggggcttattgaccagtgaacgaggattctgcaactcgagccgaacatgcaaagattgatgaaggtcacacataacaagaactgctgctatctggtgaggccacggtagaccaaaacagcgagctactcagccaatactaaaaaccggctcgtaaagatgcaaacaaggaagaatctgctgctgctaatgatgcaccaagacagctaactactgaagtcgctcatgcaagtgaaaacgcgaaacttggtgaacatggcacggagctgcaac

SEQ ID NO: 371206 - DNA, 340 bp, Zea mays
gcacgaggcattatatgctaagatttttctcaaccagaaaaaggtatgatgcctcatgtatacagccagaatataacatcagaacatgccaggaaaaagcaatcaagtgctagtcttgtttaatgtctccaaagaaaaggttgccccagagcgagtttccgacactgttgggtgtgatgttagtatgtacagtacccataagtggaggcataccaggtacaccaaggcccaaacctgcgccttcggattccgcctcaagaagatatgcccggctgaaaagatcgaatcgagctgtcggatcgcagatcccagttgctgctgtccagcccgtattctgtcg

SEQ ID NO: 371207 - DNA, 199 bp, Zea mays
aaacaaccacatacaagacgtttgttattaaatccatttaacccaaactttcttatgtatgccaccaagggggacgatccaccgatccaaagactacccccattttttggatttttttggggtttcttgggccacaaccattatactcactttttttacatcagggtggaaaactcaatcatttcacaatttttttttt

SEQ ID NO: 371208 - DNA, 406 bp, Zea mays
  unsure (1)..(406): unsure at all n locations
ttctcacgcgtgcgtttttgcgtccgcccacgcgtncgcccacgcgggcgcccacgcgtncgtccacgcgttcgcccacgcgtccgtccagatccaccgcaccggacccggacccgcccaacgactccggccactttttacttactagccagcggcggcgaaatccagatctccatagcaccggacccggacccgcccgccccgctggaacaggatgttcggacttcaggcgagcggcgcggcggcctcgtgggtggtgggcggatgggcaccgacgcgcatctctacgacgaccccgacgacgcctccatccccgagctcctcgactcccgcttcgacgccgacaaggtcgacgccctcaagcgcctcctcgccctcatcgcgcaggacgtcgacgtcgcgcacc

SEQ ID NO: 371209 - DNA, 411 bp, Zea mays
tcatagcgtccgctctcgcggcgacggcgggggggacgattgggcggccgttgctgccattctactaggcaggcgcccaggtattcttcggcccctagggcggcgacgagtgtcaccaggttcctggactgcggaacgcagcgcaaagcagatcgatctcggcccagcaggggcctcacgacgtgacttccaaggctgactcgatctgtacggtgacgaggaccgagatcagactccagggctggatcgtgttccttccagggtgcaagctgggatcttgtaagtgtggcttagaaaggaccgggcttgctatttgctgccagagtcatgcacagtgggggcgacatgaggcctgtgcacaacagtgtcgatgcagcctacgctgttgctgccgccatcggcaccgcggag

SEQ ID NO: 371210 - DNA, 219 bp, Zea mays
aggagtaggagccagcatgcattattggactggtaaaagagctaatgcttgctttaacaccctacctcgccagagatatacacaaaacacacccgctagttgttgcagagcaagactgccctgcccccacaggcatgactcatgggccgcagatgagatcacagcatgggcgtcccctggtgggtgggactcccaggggcgggcgacacgatgacttgg

SEQ ID NO: 371211 - DNA, 250 bp, Zea mays
gcgatctagaacctttgtttgttaccttgctgtacggagtttttgaagtcgtagtaacaatccattgaagaccggaacatgctcccaaatcatcactgctacaaaactgggtacagcaaggtaacaaacaaaggttttacagcttgatgattttggcagatggaactttggctgcaccggcgaacattacgccttgagcttaccaaagagcgtctgcttttcatcggaagtctggaagcgaccgggccca

SEQ ID NO: 371212 - DNA, 423 bp, Zea mays
tcgtccacgcgtccgctaaaccatacgcgcctaactccgtgtcctcccccagtccctcgaagcggccaaggcggcggcagcagtgccggcatgggcgcaatgtcggcttcgatttcgtcggtgaattggctagtcgaggatgacatcctcctcaagaacgccgtcgagcacggcacctcttcgtcgcccgtctctgaggccgcgaccggagatcttccacaagtacaacctgcgctgtagaagagcccacatcagtgggtttgtgattttgtgaagccaacacagctggtgcttcgttagagtccttagccagaggagctgtatgtttttcccgtaaattcactcttcatgaaatacaggaccgctggaattcattgctatatgacccagatatctcaacacaagcagcttctcggatggctg

SEQ ID NO: 371213 - DNA, 181 bp, Zea mays
ccgctgcatctaattaaattaaaaccccccaaaggggtgtccaaaactaatcccctttgccaagggggaacactactactttactgccttaaaacaatagcaaaggaaaaacgggggcccttaagcccattctggggggaaccaaaaccaaaccaaaccaaaccaaaccaaaaggacccgt

SEQ ID NO: 371214 - DNA, 189 bp, Zea mays
tttttaatttttttttttttttttttttttttttgggtttttttttttttttttttgttttttttttttagggcaaaatcccgggcgcgacgaccatttcacaacggggggaccaactttggatccggggcaggccgaacgcgacagcaagcgcgggacaatcccagcagggtaggaaggagagggatc

SEQ ID NO: 371215 - DNA, 424 bp, Zea mays
tcttcgcgtccggcgcctgctactggcgctcggcctcctgcccatcccctgcgtttttcctctgctgaagcttttccatggcgtcctgttttctgcgcgcgtttctcggcgcccggctccctgctcgagctccccaaccatggccgccctcaaccccatggtcgagctcgcccagctccctgctccggtgactagcgctcagcgtccggatccctggatgcttgccctgctcgccgctggatcctgcgtgctccagccatggcgccctcccttgcttctctctccctctgccatcctccagctcgcccagcccctgctcctgctcgccatggctgccgcgcccttccagccgcagagttaccgcgcgcgtgagcttctctgttggccatcgctgttccctggtgcggtcgcctatgccgcgcgc

SEQ ID NO: 371216 - DNA, 191 bp, Zea mays
ggggggacaactgcaaccccggtgttattggaaaaaaaaacagcccgggggcccaccctgggtttgggtacagaacgcaacccactttagcatggtaaaatggaaaccctggacaggaaaaaccttggaaaaaaaaaaaaagtacttggtacccttaaaccccccggacatttttttactgggaatggggg

SEQ ID NO: 371217 - DNA, 418 bp, Zea mays
  unsure (1)..(418): unsure at all n locations
tcgtgaaaatcgaacttatggtgcagagagaacgaagatgcctcatctcttcagatcatttgcacttctccagtcacaagatgaatactttattggcaatcctcaagacataggtgatgctttgaggccgtaccgcttaactattacaactggaggtgcagaggcgatcagaaattgtattagaaagttgaagagcttgaggacaataatcctgtgtgggagttcactaaatgacaggaccctggattctatttttcagaagtacacacatctaagagttctagatcttggaggagatacacagattgaccgtgttgcaaggagtttgggatccatgatgcaccttagatatcttagctttgcaaacacccaagttagtgagattccatctgacattgagaaacttangatgttgcag

SEQ ID NO: 371218 - DNA, 421 bp, Zea mays
attgagtaaagcactccgtattgcagctactgctgacaaggaaaaattaaattggcatgccaagctgagcgaaaaattcctcaattacatatcatcattaaattctgaatacccatgttttctaaagcctccaatactctctggtgaggatcatgaggttatggacaagacatcaaagactgatgggtcttcaaaagtacgtcttttcctcaagaagttggcgaagaaggcatctacgaaggctgccttagagagcaaaacaagttcaggaatgtcagtgcaaggtgaaaaaaagatacttgataaattgcgcagctatcagggtgcaccatttattgaagcattaataggtccacaagaggacaagcttggtggcaattcatcgcaagatactgtaaaagccactgccccgcctgctgca

SEQ ID NO: 371219 - DNA, 239 bp, Zea mays
tcttttattttttttttttttttttttttttttttggttttaataaaagagtagaggtatgcatccacttatatcatgctggtttacaacaacctggcacattatttattcaagcgtagaacaccttatcaagcggggctttatgaccaggaacatttatacaccatactactacaaatacactgatatggttggcatgcaaaggattatgtagaaactgataaaacattattttatat

SEQ ID NO: 371220 - DNA, 384 bp, Zea mays
  unsure (1)..(384): unsure at all n locations
atcacgcgtccgtgcccttcctcttgcttggtggttgtcttcctcatcttctttcatgtgttggatcggagtctcagctattcgtttctccctcttttcttgcagcgcgattccggcaggggagtagacggttccagcaaatttggtccaacaattctttgtttggccgcttgggctccggtctctcgattcttcgtagcttggtgggagggcgccggatccagcggccatcatggttgtcgacacggtcagcgcgagcacctccataatagccccccacctgttcgaccacaggtccaggggagccggcgcttnccaccaccacctctcgcggacgttccatgtcgttgcctgccgacccctgcccaccgccttcgccggacg

SEQ ID NO: 371221 - DNA, 201 bp, Zea mays
aagctctgcaatctgagactacatgtcacccaacagttttgccacgcgcgatagcatgtttccgatcacacaaaaccaagaatttagaccaacacagtttgaccagaaccacaacagccaacgcaaaaaaaaaagggaaccgccaccagccgttgcaaaaaaaaaaaagaaatggagaaactgcaggcaaagaacacaggt

SEQ ID NO: 371222 - DNA, 422 bp, Zea mays
taccacgcgtccgcaaatgcctagacctgtgagcacgtttgtactgttatagttgtgattcagcgcggcgggcgaagaaaaagcagcagagcgcggatcagacagacgagccaccaccaaaccgccacatggatccatactactcgcactatagaaaccatgttccttacccatactatcctcctgccagatgggaaatcccatccggtcatccacaggcaatggactcatcttattattatcggccaccaaactgtggaacttggccatatcatgatatctcacatccttctgagttccattgttgctgcaaccgggcatatcttcctgattactacagtttcagacccccattccctcaagagcttccaccccctcatttatactatcacgtgccatctccacatcatccaaatgcatgt

SEQ ID NO: 371223 - DNA, 383 bp, Zea mays
tcgtccacgcgtccgcggacgcgtgggcgcgagcgcgacacgagcgcacacgtgcactcttctacgccgcgagagtgctagggatgagccccggcgccggtactgccaagaagcgtctcggcgttggcgccggcggggggttcgcgctcgggtgcggctgcagggacgccaaggccgtggcggtggcggtggcatcgtcgtccgtatcaccctactctgccgccaccagcgccacggagacgacgacatcgacggcgacgaccgcgacgtggcgcggaagggaacccaattaactactcacccgtcgtctgtgtccggatccacgggcacgctcaccgtgccctacgagtcgatgttgtccttcccgtgggaggacatggacg

SEQ ID NO: 371224 - DNA, 412 bp, Zea mays
agcttacgcataccatgaaaggggttttatctcggtgagccgaggttgtgcgtcagactcgccatcatagttggggaatgtcagcttgtggcaatgagggtcgaagttttcgtgcaagctcccgtcgaagaaaccatcgccaccagcacttggaacacgaccgctacctttgctgccaccaatggagaggggatcagttggaggcatctcagatgtagaattatccgtgggtcgcttctctagtcacgccaactcgcgatcctcggaggccattcaattgttgagggttgtaagctgcggcaagatctggtccaattttgcaatgtcggaagtcgctatgttaggatctttgacaatgccggacatggttgtcgatgtgtcggctgttcctgataccaattgatgtgttcta

SEQ ID NO: 371225 - DNA, 232 bp, Zea mays
gtctggtgttttgagggcaacgccgtcatggagtggatgggcacccgccgcgggtggcgcgaggtggggccctacccgccggggctcaaggccggcacggcgcgcgccgtctgcgtcggcggcggcgagaaggtggtcgtcaccggcgcgctcgacggtgtgggcggcggcggccggcacgccctctgggtgttcgatgtgaggagcaagagctggaccgtggtgcccccgc

SEQ ID NO: 371226 - DNA, 276 bp, Zea mays
actctcctcccaccactctcagatctccccacccctccccgtctcgtgtcgccaccgcccccaaaccctatccccgcctcgttggatcgggtcagacctcggcttcacgccacgaggagcatcggtggcgcccgctgcgtcgatgcggagctctatcgcgacctaccgggagagcctgtctcggctcgccggcgaggtcgacgacgccgctgtcgacgaggtccctgggccgccgctcgccccggcagctaggggcgtcgacatatccggcacacc

SEQ ID NO: 371227 - DNA, 193 bp, Zea mays
tctttccatcccatatcttacacctcctatgatcaggggagacatcacgctttacacccttatagatataaatagagaatccacttactcttctcaagtgaatcatggaattacttttttccacgaaccttattgctaatctccacttattcgcttcctctctgatattcggaacaaaggatggatatacacg

SEQ ID NO: 371228 - DNA, 390 bp, Zea mays
cctcttgctataaggatgttgtcaaagagaacagcgagatttggttggagattgatgcactactgttatttgaatgatcaagttagggagcatgatgctcaaacttctactaagatgtttccagctaaagtcgaagatcctatgatcaggggagacatcttggttcaaacacttaaagatataaatagagaatccacttactcttctcaagtgaatcatggaaatacttttctccaagaacttgaaagtgaatttcaattaatgagccagattggtgatattcggaacaaaggatggatatacatggatgatgagcagttccagttcttatcacgattgtgtggatctactcacacttcttggaatggcatatctgatttgccagtctct

SEQ ID NO: 371229 - DNA, 180 bp, Zea mays
cccgctccatgttggcggcctttggcgggctttggagaggacgaggcggtggctatcgagcgtgagctggacgcagcagctgcaggagcagcggaccttccatcgccgcggtcgaagaggccctcgccgtcgaccccttcaacgccgacctcttcgaggattatgaggagtttcttcgct

SEQ ID NO: 371230 - DNA, 264 bp, Zea mays
ctgtaaagttgttgctgtttttataagcggagtaaagtacatcattaaaagattggtgtagctttaattgagataaagggacgagtaaactttggcttttaagagtttgtcgttctgtttctcaaatcttaaagccgttctattcaatgataacccgttctgtcgttgtgaggagggtacatcggaaagaggtcgctcaaaatatcttgcagactatctgatgtatatatcattagattgaagatgagttaggatctagcttga

SEQ ID NO: 371231 - DNA, 179 bp, Zea mays
ttggccggtggacgtgcgggtcaccgcaagccgcgagcgatggaggagcagttgggcaccggtggcggtgacgcacctgctggagcacacgctgtggagccatttgaccggcgacgccccgtagtgggtctacgccgtcttttggcgcatcctgtcccggaactacctcgtccccaaat

SEQ ID NO: 371232 - DNA, 302 bp, Zea mays
aacaggcctgggattggcaattccccgaaattcagacgtccccccctttaaaacttgggggtgggccctttagcaaaattcggaaaaaaaaacggttttaaccagagtccgagatttgctggtgcaaaaacattttttgggaaaattacaacgccacatggcccccgggcccctaattatgaaaacccccaaaccacagctttggttttgttttttcccatagaaaaaaatcccaaagggaatgggtggttacacaaccctggcggccaattcttaaaggggggctccccgactgggacttt

SEQ ID NO: 371233 - DNA, 278 bp, Zea mays
gttacatggcccccaaaagccgcactggggtgcactgccatggtgttgcaaaaaatttaaggtggtgtttccagttccagtcctggaaaaaacatgcaacggggtcagggcagttgggacgaaacgttaccccaagagccccccataaaatgcttgggggaaaaaaaaggaaacttttttcttttcttttcgaaaaaccaaccacaaacaattcccaccccgggttttttttgaaaccaaagggccaaacctttacacacccccccgggctaacccaa

SEQ ID NO: 371234 - DNA, 325 bp, Zea mays
aaatcggcttcttctaaaatgcaacctactaagtaacctcctaagactttagatagccgtcttgggaagactagaagcccagatataaagtcagagatgtctcaaaatggtatgcaagctgggagctgtagtgagaaccatgcaaaacttgctgctttgaagacagagcatcagaatgaaagtgaagaggtcggtagacactctgatttgcacccaagagactctgtcctgggtgaagactcagaacttgatggtgcttcaagcagtcaacagcatagtgaatattgtaagaagacagcttcttgaaaagcagtatcgtgacaaa

SEQ ID NO: 371235 - DNA, 325 bp, Zea mays
gaggccatggtcttcggcattggttctcgccagcaacaacccccagagccggagggagatgttgacccgggagcccgtggcgacaagctcgtatttgaagcgccgactaattccgtgagggaggactacgttcagaaccgccgtcaagtatatcttccaccccaaggtcaggggctcccccgtcgaatacaggcgatccttcctcgataagaagggccttagtaccgaggagatctgactagggcttactaagggttcctgagcctaaacccatcactacgggttccacttattcggaggagcaggttaatcagccagaatcaat

SEQ ID NO: 371236 - DNA, 209 bp, Zea mays
atagaggtacctcatgatttacataatactaacaccaccggatctggcactatagttgacaatctcatgacatccatacgtagattgatacaccactcagttggcccaacatacgcaaggtttgtagaccacattccaccatgggaccatactacgacattacgaccatgttgccaaacaccataatttttgaaacccaattttatttt

SEQ ID NO: 371237 - DNA, 171 bp, Zea mays
aaaaaaaggatcagtttggcagtttatatgggtgcacgtgtgtactttgaactggaccagttttttttccgacccttttaaaaaattggacctttccaaatccgggtttttatgccattttcatcacaggatttttgttttacaaaaggcaaatttttatgcacacgggga

SEQ ID NO: 371238 - DNA, 345 bp, Zea mays
acagtacagatcaagtatgtggtgagttattgaatccaaaggtctaagcgtttttagattacagcagcaaccaacacaagagcatcgtggtttacagaacttctacaacatacaacctgggggttggttgcacagcctcatacgtacacgtaagtaagtaactccagcctctaggaggagcaacaccttgaaaccatcaaagcacgctgacaacacccaacattcacaacagacgcacgccgtcaagtagcagcggcagcggcagagtcggcaggcttgtcctgctggttctcgccggcctcgtcgatggccatggcgtctgcttcccgctctgctgacgcgaca

SEQ ID NO: 371239 - DNA, 302 bp, Zea mays
aaactagttatgggctttcggaaggccacaaatactgtcagtctgccagactcacagatttcagctattgcgaatggttcccttctcagtgagacactcttttctactgcaaatgaaagcataggagtagcaagtggttatcctggatttcttcactcaataaagggagctgcagatttccatccaagctctctatatgatcatcatattaactcagctgacggggatgtcagttggaataaggcagataaatttggcagcaggccagaagaggggtctttgcaatttctacaaaaaccaag

SEQ ID NO: 371240 - DNA, 367 bp, Zea mays
gaattaaagaaaaatgaataggatcaaagatacttgtagtggtagtaggtgttctttctgtctcggtcgctgcatgcgactggctaataacaaaggaagatgacagcgctgaagacagctctcaaagaagcccaggtattccgctaaactgatgtgtgctgtcttgcgccgggacgcatacatgagtacgtacgcatgacctctgccacggttgatcgataatgacgcgacatccgatcagaaacatctagactgctgcacggttgttcagctgcctgcctctgatgcatcgcaatggatgcgaaaacgacggtaacggctgcgcggcccgtgcgtgcatgggaaaagggcgggaaggagacgacga

SEQ ID NO: 371241 - DNA, 144 bp, Zea mays
atggacaccaacgacatattttcaggcaggccattacttgctggatcatgtgaggactggtaggtccacgacagaacacctatcaagcgctcacaatataatttaccgggggcttttgtggaagccacacacacacacgcccaa

SEQ ID NO: 371242 - DNA, 349 bp, Zea mays
cgagacgcgcaggagaactgcgccccattatatattaagcagaagaaaatagaaaaaaaaaacaatggtttacagataaaacctccttacggaggccagaaacaggcatacaaataaggatccataaggggatcaaaaaacatactactcaaacttcctaagcctttatcactggtgcggccaaatgaacaaggccttttgcaccagcaacttcccattttcttctttcctcatccgcagctctgagacttaaggacaaacttggattgcagccataaaaaatgcagttatttcggtgattccataaagtccaagctcccaaaatgatgacagagttaaggcccttttt

SEQ ID NO: 371243 - DNA, 273 bp, Zea mays
tccgccgtccgagttgacgtgtgtcgccgtggtagtcgcccttccggccgtgagcgcggtccagctgcgcgcgccgtggccaccgccgtcctcgaggcgcccagatctgggccctagcgccccccttccttctataggcctttccccgttgtatcgccatggcgcggcttactgctgtggtggacagagctgctcctacccataccttctcgcctgcgtaggtcctgccgacgccgacgtcgtgtcctcgtcccacgatcgtgcctggtgcct

SEQ ID NO: 371244 - DNA, 108 bp, Zea mays
ctcccagtcctctgtcgtacaccctgtcccctatgtctcctacacctaagtcgaccccgtcgacgatcactctaagccctaatccttcgacgcccaagctcgaccctc

SEQ ID NO: 371245 - DNA, 265 bp, Zea mays
aacccaaagtggccagggcctaaggatctaattgaattgcaaccttcgtataagcaggatgattgggatcccgattggcaatcaacatctagcagcaaagttgcttacatgattgagaagctaagaagtctgcgagaagcacacatgaatcatgggaataacataaccaacagtgttggtcattctaatacactatcttatcaaccacaggcaatgctggacaaagttataattttttctcagtttctagagcatattaacgtga

SEQ ID NO: 371246 - DNA, 182 bp, Zea mays
cgacgacgccgtggctgcggccaccgcctactatggcatttctgagtctactactcctccttggctgcctctccccgtcgatctcactggcgggtgcggaggcggcgggggttctgagacaagtggttggtggggacgaccgcgggacattcttcgagccgttcaaagtgacctacgaccac

SEQ ID NO: 371247 - DNA, 319 bp, Zea mays
ccaattatcacgcatggctgtaatcggagcactcgcgtcggcgcgaggaagcctagccacacggagatattggaggaaggccggtcgtgatcaagatcgcacggcgtgttgttgtggatccacatgctgatgaacacggtcgtgccgcagacgccgaggagcagcaggtttgttcggacgcgcgagcgcggcgcacgtacgttgagggcaaggcggcggtggatgctgtacctgtactgcttgatggcgagcgcgaggatgaagttccgaggacgaatgagatgacgtcgaggatatgccgaacgctggaaagaggaca

SEQ ID NO: 371248 - DNA, 261 bp, Zea mays
aattccaaagcacgcaacttggattgttgagctggatccacttacaagatctggttataccttattcaggatcctattgttatgatccccacccgaaaaccaagaagcaatactcatcatgagagttaaccagctacatgcttattggaagacggcagtggatacaaggccgactgctttgttgcgattccgccagttgaaggcctttgtttttagtggacattttatccttccacttctcccttgcaggaggatcttggg

SEQ ID NO: 371249 - DNA, 373 bp, Zea mays
ctgtgttatgttatttttttgatgtattgatatctctttaaattagtataactttttgtgttgtactgatttctctttaaaatagtatgacataaatttgctctgtggttcaatgattaaacataccgagcttgttggctaacctccattgttcaaggtttgcttttgtttttcctagatttggccatgcggcgatctgggggctgcattgatataatactggatgttttgagaatcggagtggatggtttgggacttcggatagtagagatggattgtgatgcatgtatgacatgtgggctacaatcaggtctaggagcaagataggctgacagtaagaaaatgtgaagtaaagcttgtggttgtatttaaa

SEQ ID NO: 371250 - DNA, 293 bp, Zea mays
cacgccggagtatcagaagcagtcttagcttcggattcagccaccatgatgctcactttgcagtactctgccagctctctggtaacactctgcacctgcccgataactcttttatgttcggttatccctgctccctttcaaatcaacgctcaacacatgctctactactgtgacgtgcgccgctgcttgctacttgctatcgtcgcagggtgcgtgcataatctatcgtacgcgtgccacctggatcgatagaattgagcagcttgttcaatacccatcatcccccgggttcg

SEQ ID NO: 371251 - DNA, 216 bp, Zea mays
aaggctgactcgtggaactggccggcatttcatgaattatcgaccatcagttgctgaagtttattgatgtgtatgacacagcaaaatctccacctgtgatcttgctgtgctctttgcttgatggaagtgtaattatgccccttgttgagcagccactgactattccgtcattaaaaagttccagcagtttgctccagagatagttgtaattacagt

SEQ ID NO: 371252 - DNA, 351 bp, Zea mays
accacatggtccacctccaccttgacccgcgccaccaccaccacgtccacgacaaccagcagcggcacccggctcccgtactcttcccctacacccacccgaacccaagcgcggcgcctgggcagccggagccgccccgcgccgccgtaagggaggacgtggaggatttggatcccgagccggggctgctgcacgcggaggaggaggaggaggaagacgaggaaccggtgttcgtgcttacagacgagtgggcggagttcttcttcaaattcgaggccaagagatgactggctaaacagcacaagaagaagagctcgaagtgatctgatgtgtctgggccatcatcagaca

SEQ ID NO: 371253 - DNA, 156 bp, Zea mays
taccccggagaagcacatgagcttgtgtgccggcataaccgtggagcaagcgctagcggggaagcgtctgtttattctggactaccacgacgtgtacctgccctacctgctcagggagcgcgagctgtcggacaacgacgctctacggctgcccgc

SEQ ID NO: 371254 - DNA, 386 bp, Zea mays
gcttttatacaattaggctgccatctaatgtgttggacactacaaagaaacatcatgttgtttcttcaattgaagtaccggatcgcatgcggtggtgcatgttttttacctgtcatgttttacggtacaacatacatgactgccataatgttgtgtttcagcttggcactctctcgtttaattgtttgatgttctgagcttgcagactggaattgaaggtttgcaggcaataaaacctcgtctgagagatcagtgcaataaaaaaggaccatcaaacaatcatgagatgggcagagattttaatacttcaagttatgttggtgaccatggagtttgatgtgaagctaccatggtcattggcgaagtcgagattgagggtgccaaat

SEQ ID NO: 371255 - DNA, 236 bp, Zea mays
atagggaacacccttttgtggttctgttaaactaatgagagctcttccagaaagtattttttccaaacatatcccggttagaacaggggacaacagaacaaagccacagggaacaacaatgaagtttctgacatccatttcattttaccgatagaagtctcatataaatataaccggttgacagctaaaactccaagtttttgacatgcgactctggtaaacaagatgcaaccctt

SEQ ID NO: 371256 - DNA, 162 bp, Zea mays
gaacaatggggacacttcaccatagttttggttatttggggcatttgcatataaggtcccaaagaatttttacaatttgccatttgcggaagaacaagggtcttttttggagacccaggtcaaccattttggacaactttgcttccaaaaaaaacttgggat

SEQ ID NO: 371257 - DNA, 297 bp, Zea mays
acatggaacagttcttactaggggtagttacatatatgggtgactcgcaggaccatgtatctgatcggatgaatacaggacagaaaaataggtccaccatgttttgggacagaatgtgctaggacagaaaaaaatagttgtagttcacacgccttggaacaacacgtgtgtttaacgtctgacaggatccctgatggacacatgtatcgcagccctggaatgcatagtagccaaccatgacttaatgttgcatatgccgctatgtgcaggcgtgaggataagcctagggcccttgtg

SEQ ID NO: 371258 - DNA, 331 bp, Zea mays
gatggcaaggagcaggcagataacagggctcggttcttgtacaaggcgctgtgttacattgtatgcatatcactcgttcactacaactttacaatcgatacaggtgatttatatacactacaaaagggattccactgccgctacacaagattggatacaaagcctgcagctggctgacactattttgtcttctctcgctaggtttcttcgctttgattggcggttccctatgatctccatggtgctcgggtcttcagattcatttcgagcttctgtggctcgccctccacctgggggaactgcacgctgagctttgaatacctgacctgca

SEQ ID NO: 371259 - DNA, 235 bp, Zea mays
tttcttttatttttttttttttttttttttttttgaatgggggttgtttcttttcactatcagtaacagaccattgccgtaaagcagcacatggatctgccagcactaacacttgatccactcgacttttgagttttgacaactagttagatgagggggataaaataaaacagttcatctgatttcccaatcgttatagtgggcgccacgcacggcacttcacacagggaacacc

SEQ ID NO: 371260 - DNA, 150 bp, Zea mays
  unsure (1)..(150): unsure at all n locations
ttnttttttttttttttttttttttttttttttttttgggggcggatgggcactttacgcggatattctccataaacacacttgagatttatgatacattcatacatatcagggtcacacactacaggcccctggagcacaaagccgaag

SEQ ID NO: 371261 - DNA, 158 bp, Zea mays
tttttattttttttttttttttttttttttttttgggggctttttttataaggtcagtgaacaaacaggttaacttacaaggtaccatatttataatagtctcattgttgcccttttcttaacaatgacacaaggtggattaacaacactgggataaa

SEQ ID NO: 371262 - DNA, 220 bp, Zea mays
ggggggggggcacccaaaccaaatttattgcccaatctttttttttaaaaaatggggggaagttttttgcaggaaaaaaggaaatcaacccccccgaaggggggaagggttgatgcaagcttttacccttaaaaaaggaatttggaaacccattttaatttttttcgacccaacaaaactggggggatgggaaatccccacaaccattgggggggaaacc

SEQ ID NO: 371263 - DNA, 197 bp, Zea mays
aaccagaaattgttatgggattgtttttttgtgaagctgcatgtgaggcattgcgtcaagtctgacatgcaggtagaagttgacagccttgcattggcagtgcccccatgccaccatgttaccgcatttgtacattatttgtggttcaaaggcagaaacaaacaactggacgtgaagttcctctagttttacagaca

SEQ ID NO: 371264 - DNA, 303 bp, Zea mays
ttttcttgttttttttttttttttttttttgagggggatttttagattatttgggaacctgccaacccacccaaacaggtaatagcccttctatactggcacaagaatgattgatacctgcgctagggatacaccccggggtgaatgagaaaacccgaatccatatgccaaaaacatcccaatcacagtccatatgggggcaacacatttatacaaacgccctttcaaaggctcctttcgaaaaaaccaaagatcctctcctccatgtagatccgatcaccaaggcgacgtggcatgtgcctc

SEQ ID NO: 371265 - DNA, 101 bp, Zea mays
ctacttggggccagttttattacggtgcatttcgcacagggaacactggttttgctaaaccccggtgatgttgcgataaaattcaattcctccttaatatg

SEQ ID NO: 371266 - DNA, 306 bp, Zea mays
atgggtagttttattccgctgcatttcgaacaatgatcactgcttttgctaaactccgatgatgttgtaataaaatttaaatactccttaatatgggtttatgttttattgggtttgctctatgcctcaccatcgtgtgagtacgtggtacttgatcctgttagtggcctcgtcggaccagatccgagggactgacgtgttattcccatttaagtgtggtctagcctttaaggttggacttaggcacttaagttggaaaaattcgggcggttccgccacatacacaacggtactcgatagaccatg

SEQ ID NO: 371267 - DNA, 193 bp, Zea mays
aagccgggaacactccatcttatggcaatgcctgtttatgtaccggaacaaggtctgttattttctttcgccaacattgagggcaccactgacccttttgtaacttgaaacgttgcccatgaagcaggattagcaatgggtaacaaaaatgcttggaaagccccttcaatcctttactggaagccttcccaag

SEQ ID NO: 371268 - DNA, 317 bp, Zea mays
gggcaattgaatctgattaaacatacatcataacacctcatccatgaggatgcggttttagggctaccacttttgttgtaacaaaggtttgctcttaaccaattcaattgctaaaagagagtgcactgtagtgcatccaaaaacaaacacgacagagcagacaaatagattgtccaaaggcagtttaagtagtaactgtaactgtaatacatagtttactttattagttagaagcaaaatggaaaaggtaaggaagacgacaagggcagccctctacatcctgcagaaaccctgccttcttcgtagtgctcaatgct

SEQ ID NO: 371269 - DNA, 204 bp, Zea mays
gggggggaaaagggaaagggaccccaagaaaccccaggcctggggggcaaataaacccttccaaaccaacctattgggaaacaaaccccaaaaggggggggaccagaaagcctaaaaaaacccggggcccaaagggaacccccaaaaatggtaaggcagggggggcccacccccaaaaacccctgggaccctataacaaaagcc

SEQ ID NO: 371270 - DNA, 309 bp, Zea mays
accaaacaagggggtttttttgacatgacagcaaagcatagttacagcaaaggggtcggtggcacagacaggaagggaccaaaccataatacttgctgatccccttcttcagtcctcctgaaccttacacaaacaagcgctcgacaaaacggtacaagcttacacaacacactgatcaaacaacagaaacttaagactaaccagaatcaccaaccgcagtccggaggcttttccttaaaaaaacgtattaacctcctgacagcagccactgaaacccaaacaaaacgagaccagaccaaaccaaaccag

SEQ ID NO: 371271 - DNA, 346 bp, Zea mays
gacaaatgccatggcggacgagagcctgttgttgttggcttgttgcaacccgggtacctgccttttttctctctctctctctttgtttgtttgttccgacagacaagaggggctatgtttccagagtcacatgcatcaacaaactataataataaatcactgacgcatgcatcactgccggaatccagactccagagctaaaagctgtatgcacaggcgctctatagcatggcggaatctaccgggccgggccgaccgatcggccggcgtcgctgctcccgttccaccagggggtaacaacacacaccccgcccgcccccttgcgccactcccccggggggctcct

SEQ ID NO: 371272 - DNA, 237 bp, Zea mays
actccaggttggttgatcatcatatactatataagcacagttaaaatacaggtgtgcggggtgcatcaatccatcgtagagcccgcgagatgggaggcaggcggggtaaggggttccctccgaacggagggggaagcggtttaatagggccgccaccgtgatcggggggaaggcgagggaaggagcccccaggaactgagcatgcccggatgcacccaggatggttagggtccaaac

SEQ ID NO: 371273 - DNA, 169 bp, Zea mays
gggagaaaagccagtccaatgactgaaagctattatgcctctgcgcatgcatgtacctttccccaattctatcttgctctaattttctatctttctttagttttcttttggagaatacttatgcctcaagttactggcagtggcgggagaagacagaagagtcccaggg

SEQ ID NO: 371274 - DNA, 247 bp, Zea mays
ggggggaagacacaaaccacttttttatattggtgagggaacaacaaatttaaattggggttttacaaattccgggaaactagaaaaaaggttacagcaccgcctaaacccccattacaactttgccaaatcctaaagaaactgccattttcttttttttccaagtgtccataaattggggacaaattttacacgatgcccacaaagcaaacctcaatttagggaaaaggactataaaggcccctat

SEQ ID NO: 371275 - DNA, 137 bp, Zea mays
gagctaaaaagaccctagggctttaaaacaaacagcgtttatatttttaaaaagacctaaaacatggccctgcaagggcgggatctccaaaacccaaaagactcgttgggggggcgttctgaacccggggggggggg

SEQ ID NO: 371276 - DNA, 228 bp, Zea mays
aaggcccccttttgccaagaacaatgaacattttgtaatatcgcccacggggcccgggggcgggtgataccaaccttttttaaagcaagcaggaagccccaggaccagggaaagggcccatttacataacagccccttcctttttgtaaggacccccaaaaaagtttttaagagatacccagtgttgttgggggccggccccgctgggttttgaagcctgccaactta

SEQ ID NO: 371277 - DNA, 409 bp, Zea mays
gacgacgtatgtattctcttactacttcattgatttatgagcatagtagtaaaaagattataaattcatagcataacgtagtttagagacgtttgaagcagagcgtgtgccccccccggtttctgttttgctacagcagaggacgtgccctcagttttctcatttccagcgggcgtttttgacgcctccttcctatgtttcttcctggtaaacaaggagactttcttcctccacttttctcttgcagttcggcagctctttgctcctagaagagacaggcaccttcgaggctgatttttcaacagatgtctctcgcaaaaatggtctgttctttcttttgcataaatcctgtatataaccacttggtatggaattgccaatacccaagagaagatccactgttatggtt

SEQ ID NO: 371278 - DNA, 215 bp, Zea mays
acaaagttcacttttcattacaaaaattaaggtttacatggaagaaagggatgtatttcatgcaagggtagatcggactggaaggacataactaattacaataacggggagggggaaggctttccaaaagaaaaaaaaaagaaccttgttaaattcaagcccccccaaggaagtaaccaacccaaggggtagggaaaaaaacttttcttgggggg

SEQ ID NO: 371279 - DNA, 389 bp, Zea mays
cgcgtcagttccttgcaaccttacattagatacacaaaatagttagatgtcaactgtcagtacaattaacttatcgcagacccagatgacagccacagcaccttagctccccctaccttcgcaaatccaggaccactagtgcatgcaccgacagcgcacgacactagcttgtcgagctctgctgccctcgcatatatgaactcagccatgtcacctcagcaacatacatccaatgcacatcatggctgaccacatctcctcgcttcacccaacgattggtatgaacaaatgggggattcttgactaggatgattgatacacatcgctattgcccttgcaagatacaagaatcagtgagtccaaagctgccttcacctcggccctgacag

SEQ ID NO: 371280 - DNA, 229 bp, Zea mays
ggaccaagagacacttgtatttcagaaggcgagaagagacaaccatggttaatacagttacataataatatggttttttttttccagacgacccatataccatgttgttatgtgctagcagcatcatagctttaaaacttccaccccaaaaaattaaatagcctaaagaatggaaatggtacgtcgttagaaacctattctttaagtatggacagtgaaaaccccaagc

SEQ ID NO: 371281 - DNA, 247 bp, Zea mays
  unsure (1)..(247): unsure at all n locations
ttnttttttttttttttttttttttttttttgggggacaaatatgttttacagtgcctgttattgggggacaaattggatattcccaatagttttacagtcaccacatacatgtgatgcactcttatttccctgactgatcctgttcggaacatagctttaggaacatcctgacatcctgtatactgttttaaggaagttggtaattgctagatgtctggtgttacttccaacccaatttgccaggg

SEQ ID NO: 371282 - DNA, 165 bp, Zea mays
acatcaacggctttgatattcagaaacgttcaacatgcttgcaccttttagcttgctcaacaaaattttgcacctgccgtgttgattatctacaggaactcccagcattcatctcggaagacccaccaggctggagaacaaattacaacgtcaggcaaaaacttt

SEQ ID NO: 371283 - DNA, 252 bp, Zea mays
aaggggtagattccttttgatgaggcaggcaccagattaataagctttacagccgcattattactttttgctcgacccggcaaacaattataggacctgaagccagagagggcctgatgctgaatggctgccgccgtcatatccttttacccgtcctggctacaaaaaaaacacaacttcccaaagcctacaaaaatagcagttgaaaacggccatgctcaggctgatatccttatctttactcctagcaca

SEQ ID NO: 371284 - DNA, 368 bp, Zea mays
aaacgggcttaaacatagtgggttggctcagatcacaagatcaaagcacaagagcacacatatatcctgatttacataaagtattccgaaacttaaaaacttcttaaacaaacatcagactaggtaccctggggccctcaattttactcatcatcattagttctacttgacctgtaacgccgagagtttgccttcgagtttgtatgcatctggggcgttgacgataaattactggcatcttcatccatctcgcattgatcaggttcatcagaggcacctgctaccaaaccaattacagatgagttggaatcaatagctctgggaccgtcatccactgccatggcatccactgactttttgcgagggat

SEQ ID NO: 371285 - DNA, 259 bp, Zea mays
gcggcggcacgtttggctgattggattcgaatcggctctccggctccgctcattatcatttcatatctttggtcccattcccgaccaaaaaaaaaaaaagaaaggctgtccaatctactagaaatttagaatccagcccgggcgcgcgtcactgacacttgcgcgtgtcggaggggttgcacccttcctgcgcgacgtcgaggacctgcaccccgggatcgtagacgcgggccgtcttccaccgggggggaagcacctc

SEQ ID NO: 371286 - DNA, 190 bp, Zea mays
aaaaagggtaccatcccttgactttcctccatgggggagggtttgatattccccacaagaagattttttatttcctacaacattaatatcttcccgggatgatatgaggtttgaatacaataaactgaaggaaccttggggcaatcttaaatatggggaacatttgaagattgataggttgggttgataa

SEQ ID NO: 371287 - DNA, 193 bp, Zea mays
gggaaaaaactggccattgcaccagcaaatttaaaattttccaatccaaaagaccatagcaatcctggtacatacatatacatagggcccctaatattttttgaacctacatacgcatacatacatacatactactggggctgggggggacacacacatacatacatacgggccctaatattttttgaacctg

SEQ ID NO: 371288 - DNA, 238 bp, Zea mays
cgggtatccgtatctattgcatttctataaaaaataatttgagagtacaaagtcgattttattggttataccaaacaaatgggtattacttttacttggaccaaaggagggttttttaaacccttttgggaaacattttaaagagagaattttttataacagcaccgccgaacattgggtttctcagttttatttttctagatcacttccaggataattgtgggtgcttccttggaag

SEQ ID NO: 371289 - DNA, 108 bp, Zea mays
acatgcaaattattattatccatcacatctggcaggtttttttttcagaaggactcaacaccagcagaagtagatgtagatctgcagttgacgaacaaccacacctta

SEQ ID NO: 371290 - DNA, 252 bp, Zea mays
aaacacgacagggatattttccattccatttcctatttaaaagtttactccgtaaacgatagatttgatttacaatcacgcattcattctattttccatttaataactttgggaacactgaattgcagcacgcgatctgtagggactcgggcaaaaacgggtgggattgaacatttccccaaaaatcacctcctccggtttaaaagcttgggttttttcacaaccgggaccccaaacccaacattcagaaaa

SEQ ID NO: 371291 - DNA, 156 bp, Zea mays
actagttagttgtagtttttttttattattaaatcagcatatagtcaacttgaagcatgacagatccatacataggtatacagacgcaaaaatgagttaaccgttgagccagcctattggagtccaaacaccgaggcattgctttttcacaatatt

SEQ ID NO: 371292 - DNA, 299 bp, Zea mays
aaacatgaaacttcaaattaagtactgagttattacataaatcggagtttttgcgtagtaaataaagttcacaaaataaagggcagcggataatcgatgtcgtcggtaacgaggaatcgggcaaggcctagcccactactcctcgtgctcctctcctgccggagccacatcccactcgaccgtccaacccagtggcagggtggtaggccaagtcacaccatcaaccatttcctgaatggtacctgcaaaaattgtgccacaagcaaggctgagtatactaatactcagctagacttaac

SEQ ID NO: 371293 - DNA, 284 bp, Zea mays
gggggttcttaaggagaaattatttattatcacgtgcgtctttgatttagttgcaaccagaattattatcacatgatcgatacaggattcaacaccaccacaagcaaagaagaaacacaatctcgcaacctcttctcttggatcttgcacggatgcatgcattttgaacaaaatcatctatttatctgggtcttctgaaccacaaaagctttgttctttgtggagtagagggggaaaaaaggaaggccgcgttcgtcttatatgaaatgaaacatggagcatgg

SEQ ID NO: 371294 - DNA, 186 bp, Zea mays
aacaaaattccccccaaaacggggtttcgaattaaagaaaattaactttggggctgggacattcgactcgaatgggacccaaaaaaactcacgggaatattactggccacacaaaggaaacatagggctatggaaaaattaggggggggcattgcccaaccaccaccattgccgggcccccagggg

SEQ ID NO: 371295 - DNA, 317 bp, Zea mays
aggtcatcatccaaaaccaatataagcaatagcactgcagttgcagttgtctgtagcaggtagtagtaggactgaagggttagttacatatgcattcattgtgtttggtatccggttacaaaatgctaggcttgataacaaaagataagacattgtgatgttctcatgcgtttacatctattaattaacgggggtttactggtcttttagctggtacaattgttgatgtgcagggatccatgtttaaccctatgaaatgaaatgtatagttttattaatctgaccaatcattaggtaatgaagtagaaagaaaatgc

SEQ ID NO: 371296 - DNA, 193 bp, Zea mays
ggggaccggggaaaaaccaccatttatttatgtccatacacagatcttactaaagtgggacgagaagagatgatttagggttaaaagaaaagaaaagaaaatcgccctactcgcattggaacataaaatctttaggtttgggaagctacaagggaaaaaaaaacttttgttttgtaccgtcggaagggaatgc

SEQ ID NO: 371297 - DNA, 328 bp, Zea mays
gaagtgcatggccatgcgtgcttgcccacgaggttgcgaccccagttcagacatcacaatatacgatgcataaactaaagacaaaaagatctgtctgcaaaaggtaaagctacttttcagtcatctaagtttacatccatgtatgtcagaccaacacctgttccagttttctaaaaaatcatggaacatcattcctagtgagagcaaagaaccgaaatgttccttcttttccgaagcttggttccatcccctgggcccagttaaacccacatggtgtgttttgtcacaatggataccagcttgcgaagaaagcattttacactgcaag

SEQ ID NO: 371298 - DNA, 200 bp, Zea mays
  unsure (1)..(200): unsure at all n locations
ttntttatttttttttttttttttttttttttgggggaatttttgaggatttgccgcctataaagccaaaatgcataagtatattatccagaatcttgacaaacaaattttgtggcgctcataaccataagccatacagtttagctgtattacacatacacacaacgtatcaataaataggagtaaaatgaaccattttc

SEQ ID NO: 371299 - DNA, 187 bp, Zea mays
gaaatggaaatgaaagccttgttagacagggaggggtaaaagattaacccagaagggcaaaaagggaaaaaactgtgggtgagaccaaaaaaaaaaaagctccggatgggccactactagacgttacaacagtcaacccggacaggcatcgagccgattgtcaccacaccaactgcgctagttttac

SEQ ID NO: 371300 - DNA, 208 bp, Zea mays
ggaaaaacaatcctcgcatggcgggtttttttaagattagctgtttaaatggggcaagggctccccattgtttataaatatactaggtatatgctcgtccgttgctcccaaatcaatatgataaaatccattggtatccaagggctcacagtctagcataggtgggaataattgtataaagcagctaccaccattaaacaaagatggg

SEQ ID NO: 371301 - DNA, 287 bp, Zea mays
atgtcgagtgttcttgtaactggtattacctacctgcagaatggaaattgccacaattgtcatgcacaccattgctcttggaagactgtactgtaatcgaatcgcttgcagtgatttgcagctatcatactcggccgttctgtttttaggtgttaggcatagtgccgtgtgtgtgatgtgttggttttgaattggaataccatctagtgtgttttagagccaaagctcttaaaagccatccgggacataaactcctagttagactttttttaaaaaaaaaaacagac

SEQ ID NO: 371302 - DNA, 383 bp, Zea mays
ctccaaacaaatcctttagagctgagcgggatgaagtttgtttccaggtttttatgtaaagctgcgtgcgctacatccaaatccaagacgcattccaaaaaattaaaaggaaaaaataaactgtcaccaacatcctatatggatgggtgctaaatatatacaaaatagaaactagggtgatgaggcctgtttcgaacgaccagggcgggcttctgttgctactactttttttttatgcacagataagtttgaactgcggcggcagcacctaccgaggaaaggcggaaaaggaattcaaatgggcggggcgggtacgatggttatgatgatcggtacatcgcgtaacagctatttcctttcttttcttttcttttcttttttac

SEQ ID NO: 371303 - DNA, 198 bp, Zea mays
atcccgaggttcggccaagcctgaaatgcttgcctagccctcgttggagttagccacacctgggcttggagtctatttcaactccttcctccgtttgctcagatctgtcaatatgacagatagagcctttcactattgagtggggttacaacagaaccgcggctgcttacaaacttcttggcagcactccggcagagt

SEQ ID NO: 371304 - DNA, 401 bp, Zea mays
acacaagctactatttataaagccatcatcatgtagtgcagtactgtaccatctaaacaggctgactctgcaggccaacagacgcacgcttttttctcaggggctgcacgtctcgaataatagcgtgcagaggcacatttcgacaggagaggaacattgtgattgtaatggcataggacacaattatgagctgtttcagtcgagtaggtaccctccttccgtccgtccgtccgtccgtcacaaaataacgagaccatgttttgcgtgtacatgaggaaaagcagagaagaattggctgatctgatcatcaaaaccccttgacaacgctgctacattccaacagaacggggaaagctatgcccgagccggacccttactcgaacggaatgggcgtgccctgc

SEQ ID NO: 371305 - DNA, 361 bp, Zea mays
gaccaacaaccacatggaacatgtgctgctgctttgctcattcactgccgccactggttccttccaatgaccacttgacaattccttttttcccccttacaaaacaaacaaacagcaaataataataaataacagcaaccaccaacaagttgcctatgaactaactagattcattcattcatcactgggtttctgggggcgattgagtctgcccgctctccagcagcatgctgcggctgcagtaagaggacctggtcgtgctcgacgaggaatgcagagacctcatgtcaccgccgccgtatgggaccagctcgttccggtgatgtgcgccgccgcacctgctgctccggggatagaagcc

SEQ ID NO: 371306 - DNA, 259 bp, Zea mays
gatcaaacagttctcttcacaaatgagtcagtaagtacaagatgattaatggagataagtagaacaattcaaaatggagggatagagaagggtggagtcattagttcattacaatagggctatggctacttctgctactatacatgtgttaatgtatgatccttgtaggaagggcacttggttccagataccatgacccttgtggtatatcatgatctttgatgtcaacaatgtcaaaagcaggaacacggtgggaaaa

SEQ ID NO: 371307 - DNA, 322 bp, Zea mays
atgtgaattataaatgtaaataaaatataattcactatcaagtctgtatataaaaaagacaaatatgtacaattacatatatttgtaggagtctaaatattcgaatttagacgccctaactcaagttagaactaaatgtacatataaaacagggttttatactaaaattcagaaattataaataataaataggccacatagtccaatctggtcgagacggcccaccggggcagcccgcgtggccagccagcaggccggagcggcccaggcgccaccaggctggggcagtccgcgccccacgcatccattataaaagggaggc

SEQ ID NO: 371308 - DNA, 128 bp, Zea mays
gcaggggaaataaattatttattacaaaatggttacaagttacaacatttacaagttatagcaagattacaatatatatcattggggttggttacaaaagaaattgttttcaaaggattacaatttga

SEQ ID NO: 371309 - DNA, 205 bp, Zea mays
ctggggaccttaaaacacaaccaattgcagggaatttatggatgtaacatcaaaacatgacaccctgattttttttgttgccagcagtaagctatttatataattttgcagattcacaccaacaaagattgctcaaacaaaaaaaaaactttgattttaagctccgtttgatcttgtttcatcagcatattcattatttggggtt

SEQ ID NO: 371310 - DNA, 353 bp, Zea mays
gcgttcttctttgaccactccgtgccgcgccgcatctcggtcaccagccgtgccacggcgccgtccagcgcgacgatcgtctccgcgccgacgcgcttcgtcagcgacgccagcaccgccgcggtggcctcggcctaggcctcgccgaccgcggccagcgccgcctccgcggcgccgggctcgacgatcctcggcacgttctcccgctcggcggacaggcacaggagcgccgcgagcgcgtccttcttggtgctggaggggcccgtgcgcgcgagccggacgacgctctcgacgacgcgtgggttccgcccgagccggtggcggtactcgtggacggccgccaggctgagcac

SEQ ID NO: 371311 - DNA, 253 bp, Zea mays
aatctaaaattaatcttgtggttaaaacctgatacagttaggatttacatgaaacaccttaacaaaacattaaataaacaaacaaatagtagagtcattccactaataacacttcggtgttaacaatgttgtgcaactccagagtccagaggctaattcactctttcataaacaacacctgcatggttattttcacatgctcctgcacatttctggttaacaagactcccacatatggaggtggtcaagctcg

SEQ ID NO: 371312 - DNA, 109 bp, Zea mays
aatctaaaattaatcttttgtagttatattggaatacaccgggggccacaaccacgggggccacgggagcactctacactctgcctctgctgccaagggcgaaccggag

SEQ ID NO: 371313 - DNA, 199 bp, Zea mays
caaaatggggggttgcatataaaactatgttgcccttgcacagaaattggttacattgatatttttgaaggccataatatcagacacataccatatctacagaaaagcccaagatcaaaagagtgcagaactatttggggacactgaatttacattttcgtttgcgtttcgggtgatctaaaatacgccctaataattt

SEQ ID NO: 371314 - DNA, 305 bp, Zea mays
  unsure (1)..(305): unsure at all n locations
agcagaaaagtaatttaattacatcaagatgtccaagacatccacagaatctaatacatagccatagtgttcaacattaatatcaaagtgtggaaatatgaaacttacaagataagcctacacatgcagctgattgggggtttgccactaaaataaactagaactcatcgtagtcctgaaactcctcaaagtcctccatgtttccagcatctcctcctgagcactgagtacagtagggacacctggggnggtgggntttggtaaaacaaggggtgagtacacatcaatgtactagcaaatgtccc

SEQ ID NO: 371315 - DNA, 308 bp, Zea mays
aggataagggtagatagattacaaggtcaaataagtgtgatgacaaataccagatctttaaagaaatcgaaaaaaaacacaagtatacaggcaaagaaatacataatggtgtgtgaggcaaaaggtccccaaacagcaggaagtacaaatgtacagggggcatgtgtaattggttggagtttagattggcatgtcctacacaactaagcagattagtttgatgcaacagaacacacagttaaccttagttcaaaggtcgagcattgcttggttcatacataaattgccagctgcttttacagaaacat

SEQ ID NO: 371316 - DNA, 381 bp, Zea mays
aggctgggggttttattgggcaacgcccggtagaatgattgattgaattgtcatatacttacacactgttacatacaacaacacggcatctgcaatggaatcgtgcgtctgatttgtttgtttggttgtaggctggagtgggcacccggtctgcgtgaagcggtaccatttcatcatcgagaacgacagtagccacctttttggccgccggcgcacctgctgcctccgctgcggaacacccatggccgctggagaatcaaggtgagaggcacatttcagaaagaaaattatataccttctcacacaccagcgaatgggggaaatggaacatgcttgtgcgttcgatgtctataatgcccaatgttaatacatgaccaactt

SEQ ID NO: 371317 - DNA, 339 bp, Zea mays
ctaattggggccccagttttcctaatcctggcctttgccctaggcatgaataaaacggccatacaagcagtaaacctattcaattttttcgccaaggcgcacaaaatacatatacaccgccacaacactggaaaaacttgtttaaaagggatttttccatgacaacgggttatacagaaaagactttttcacacatcccacttagggcttggggggggttctgggccccttgattcacttgggggggcatcaaatgaaagctttcgggggaggggcctcgaagaaccataagggagcacatgctgcttgatgtttctccattgggatgactccaccgaa

SEQ ID NO: 371318 - DNA, 174 bp, Zea mays
  unsure (1)..(174): unsure at all n locations
ttttttttttttttttttttttttttttttttttggtggctttaaaaaatcnaaggggtttcaaacaaaacactacatcctaggaagcccgtcgagttttacagctttcctaccgtttttattcccaatcattttaatgtataagggcgatttttactggtttcattggggacc

SEQ ID NO: 371319 - DNA, 291 bp, Zea mays
atataattggagcttattaagggatacacacataaatgtatgggtacagtatcgaatagatagaatagacgacgaattcgcacattgggaagtgagtcgattgctgttccttgggttacgagccagagacgtttcttcagtgccacgatttttttacaaataccttcactatttttttgcagacagcttatttaaatattttaacagcctatacattaaacaacaatatacatgccccgggaagagcaaaaggaaaagacactttcaggttgtgcatacgatctgcttgct

SEQ ID NO: 371320 - DNA, 251 bp, Zea mays
gggaaaacagaaatattaacttcattgtatataggtacaacaactccccatttttcccacacacgcattaacatatgatataatcatatataacggagggagggaagatgcgtcacaatagaagtgcagtttagctgtataagtcgtcatcgtcggctgcagccgcagcggatgcaaaggggtcggccgcaccggcagagcctgcagctgccgtcggttggtcggagaaccggaactcgctgccaaaccca

SEQ ID NO: 371321 - DNA, 196 bp, Zea mays
agaaacagataatggtccttatagagggtagcattgcatttgattaaagaacacctgagaaaaatctacatgccatttaagggcacggatctgaacagattgaatttagtttgggggacaggtgtctttttttctaaccattttctgcaacggggttatatgcgtctgaaaagctggcttctttaaactttttttt

SEQ ID NO: 371322 - DNA, 366 bp, Zea mays
aatgaggacagaacttacatcacttagttcattttcatacactacaagatctgggaaacttattcattacaataccatgattcagagtgcggaaattaaatagtgaaaattaaataaacatcaactcatcaaggatctgtctatgcccaccagaagctaaaatccttcacgcagtagctaactcctcaagctgcaccagcgttgttggagtgcaagatatgcttgagaagcagattgttctcttcctgttgcttcttaaactcctcaaactccctttggagtttttgccaacttcttgttgagttcatctacttcttggtggagagcagttgagccttgcttttcagcagtaagttcctgaagcgc

SEQ ID NO: 371323 - DNA, 123 bp, Zea mays
cttgggggctgaaaaccgaactgagggttgtcatggatggatacaaggaaaaaatttttagcctaaagaaagcaggtagtttgcctagccattttgaactaaaagcggggatctggttgttgg

SEQ ID NO: 371324 - DNA, 258 bp, Zea mays
gtcaacagatacttatttattaggtatgattaatacgtcgggggttacagatcagttcatcacccgctgcggttccagcagcatcagagcatatgtacacaaattcatcagtccatgaatcagagaggttacaggctcttcacatcagcaccgattgagcggcaattcagattggcatggcatgatcaagaagcggtaggggatggataccagaagcagggaggtcccagtcgtctcagccttctcaggcgcgccccg

SEQ ID NO: 371325 - DNA, 214 bp, Zea mays
aaactaacatttttacgggggggctgcttatttaaactggactggaaacaaaataaccccgtaaaaatgtagagttccgatttttcacttttacctttcagacaaccacaggaccagcacgtaaaccagttggtacaacttggcgggccaccttttaaataaccagaatttgctacgtaagttttgtacaacagcaggacacatccctgcacaa

SEQ ID NO: 371326 - DNA, 248 bp, Zea mays
  unsure (1)..(248): unsure at all n locations
ttttnttttattttctttttttcttttccaatagggtgggtttttttaattggtgcgggggatgacccaacaaccattggactcaaaaaattggttgggcactcaacataagacacgaaggggggggcccactactttttctaggtatcagcattctgcaaagccaactgaaaaaaaccgggccctcccttataagacacccaagggcccgcaatggcccccccccaaaaaaaggatgggcggaaaaa

SEQ ID NO: 371327 - DNA, 335 bp, Zea mays
ggctagaaggcaatagctttgttaatctggcctctcacgggcactgtgcgggggtatttataggtacctgagcgcccggcgccttgtgttaaggatgcatgtgccctcagctacccaggttatccccggaatattcccataaagcagggttacagactgtaattacaggaatgcctttacaaatgaggcccgtaacacacgggggtcacgcagggcccgttacaatgggccggatcgcacgtgggcctcccaactggacgaggccgcacggggggaggaccttgtcgcaggccttcgtctgatgtcggaccgagcgactgcggcgaaaacttaaa

SEQ ID NO: 371328 - DNA, 212 bp, Zea mays
gttatgaagtaaacatccgcaacattcatttcacatgcccgggacatttttgtacacgcctacaaggttgaaactggtcgtttagttttgtagactgcccaacacccacagcacattaacaggggccacaccacaggggacagggacacagagaatgctgtacactgagcaggctacattcgaacaacggaccacatactttacgggccacg

SEQ ID NO: 371329 - DNA, 350 bp, Zea mays
aacaaaagaacacggtgtgtgtgtatatatatcatcagcatgatagttacaacaccagccacgaggtatcaagagatacgaaagagatacgaaggaagaaatgtaacaatccatgcacgcacgaacgctagaggtggcagagccaccacaaaagattgccgagcgccctgcaaccgagctctctccgaagccatgtcctgatcctgtcggtgcaaacagagcacgtgcatctgaggccaagatgagaagctgtcccttgtcgtcatcaccgcatgtattgttcaccgactggcttgtcgtagctgccgatgccgagaaagaagagagggatttcgactgccattacatta

SEQ ID NO: 371330 - DNA, 237 bp, Zea mays
ggggggggaacataattttaacatttagaaggaatcaacagaatttttaaaaacaccattaaagggcggtcatgttgctggctcaagaaccagagaaaagttacaattcaacatgaccgggacgggcgcccgaccatgacacctatgtattttcaactgtagtataatggggaaaatgtaaaaatgcaaatgatcagcaacgacagctttgttaaaaaagggtattttgaaataact

SEQ ID NO: 371331 - DNA, 240 bp, Zea mays
ggaccaaagcttccaaagaaattaactgggttccacacaagacgagcaatggacaccattaccggggggaaacgtaacaaggtggacccctacagggtacaggtgacaacatccaaaacaaggctgggcccttattaccccccccccacataaagcataggggctcccatttaagacaggttatttttcccttacaggttactggccattttaagcctggggaagctggggagaccaaac

SEQ ID NO: 371332 - DNA, 365 bp, Zea mays
ggaccatcacattccatttaccatgatatatataataacccagaataaccaacggactggtatctccaaagaatttttcagggaaccacaacaacaaaggggaaaaaaagacaaccttctacaataattcctggattcacccaggtaatccaatgaaaatcaagtttccactacttcctgatggaaaagaattatttcagagcaggctacttgctgcccaaaataatctcctattctcacagatgcccccttttcatcgctgtcaaatttgatggaataaactagaatttcactgcaccggtcagtgaaaaatatggataatcagtgagttagcagtatcttgagatctagtcctttttggccta

SEQ ID NO: 371333 - DNA, 155 bp, Zea mays
ggagacaatatttttttattctggaaaagtaaaaggatccaccacacaatttccggggctctcttgaagggcttttttaaggcctccatgtttcgcattttctacaccaaaacaggttgacaacctacccattacaaaaacttttttgactggtt

SEQ ID NO: 371334 - DNA, 375 bp, Zea mays
tcgcgatctagaaccagagctgcctttacctcgtcctggagctctgcgagggcggggacctggcggccttcatccggcgcaatgggagcgtagacgagcgcgtggccagaaattttatgaaacagatcggtaatcaagttgttgatccatgattgtttgactcaattgtgtcgtccaccgtctggggatgtgatctgtgagaaatggcccctgtggcaggagctggcttacaagtgctgcaccggcaccatgtcgtccaccgggacttgaaacctcagaatatcctgctctcttctccgagaagcagcgatgcgatcctcaagatatctgattttggtcttgcaaggtttcttggacccggagagtacgcagaca

SEQ ID NO: 371335 - DNA, 387 bp, Zea mays
caagtgaacacacaaaccgtgtatacctttattgttggtagcaagtacatcactcgatctgacacttctctgtagtgccagtcgccaaacaccaccaaacaactactaacacgccgcgcaggttatgaagtacgcgacgacagacgatattattgaacagcaaggcagcaccgtctaattagctacgtgctttactccgtgagcgcggcgctctccgccggctgattggccgccctgcagtgcctaggcggcggtgacggcgaccttcatgccggcctggcagtggcctgggaagctgcagatgaagtagttggcgccgcgcctcagcgtgacgcgggtcgttcccggtggcgagcgccctggcgccctcgggcgcgctgcacgagc

SEQ ID NO: 371336 - DNA, 241 bp, Zea mays
agctccaataaatcgggggatatttttcttttttttaaaacacctcatttagtcaacaaagagaaattggctaagtgaaagaaacaaggggctggggcgcaatatttactgaaacgtttttgaaggggaaaaaaggggaaatgaaccggcaaaaatcaaccggggggagcagcccctcaataccgcccggttattttgctggcaagcttaatccttttggaaccctttgactggtctttcc

SEQ ID NO: 371337 - DNA, 321 bp, Zea mays
accaagaatactatacactacacgtctgcactctgcacaaaatgacacagtgtaaccatcacgatcccactcctatatactacaatctacaacaatggagctatcgctaagagaattcactgacccctgtcggagggacaattaagctactgttactagtcgtataggattaattaacgagatcatctctacttcgccgtggtgttattgctcatggagctcaacttctgcgccagcgcgtcgacgtaccaagccggtcgtctcctctccggcggcagcgtctcagcctcggcaccgcccttcatcccttcgttcagcagc

SEQ ID NO: 371338 - DNA, 190 bp, Zea mays
attcaaaccggtacttcagcccaccgggaaaaaaacattgttcagggggtagaacacgattcagattaaagccaagcgaattttaacaaaaagcagccccccccaatttattacaaagaacaacgttttggtctacaaatacaacagcccaaaagggccagcttttaaacattttaacggggtagggggg

SEQ ID NO: 371339 - DNA, 307 bp, Zea mays
gaccggccggaattcccgttcgcccacgcgtttattcctgagaagagcccggccagcgggggggtaatctgccccctgccgggaggaaaaagacctagaaaaacgcacctccacctcccctgaccatcagttctacacagaaggtgaaccagatgctactgctctgctcaaacaccacataaattcggcctgcaagacaagagcaacgagcttaggacaacctgactgaagcaccgacttgatacacctgtcaaagcaatgatgtggacgcctcacccaacgggaaagtccaactaatattcaggca

SEQ ID NO: 371340 - DNA, 160 bp, Zea mays
gctgaaagaccattgcaatacatgaagagaagggcctgaaggtgaggcaacggaaaggagcaagacgccacccttgaaacgaactgccacaaacaacgcgagcaaaagaaaaatagagaaccaagatcaactgtcagaaaaccacaacaaacctccaaag

SEQ ID NO: 371341 - DNA, 315 bp, Zea mays
gcgtgcggaccagcggaagcatgctgctgtatttcatggagataggttatgtttgcattcgaccagatggaacatatgaaataagggcacactaggctggcataagcaagtcctcaatattacgtctggatgcaagtgcaaggatgcacgtgcagatagtttgatgaactgataactcgcgtaccaacagacatcatgagagtctataactgtcgagattccagtcgtccactgtgatgaagaaaaaaagaatgaagctggagggctacgtgaatgatgactatagttgaatgagcgaagaaagcactatggatg

SEQ ID NO: 371342 - DNA, 204 bp, Zea mays
accttttccaaaacggaaaacgggaagcagaacagcaagacacctcccgaagaagggccgccaacggagcgaagaacaaagtagaagactgggaagaaacacgcccaagcgaataaaagaaggctacgggagaagaacaaagaagaagcccaggcaaaaaaaaaaaggcagagagacggagaaaaagacaggcaccaaacagca

SEQ ID NO: 371343 - DNA, 387 bp, Zea mays
ccccacacaccccacacaaggggggtttttttgggctcgacggtgtttctgtataagcaccgaggtgcggccaagtagccacgcgctgccgccggcgttcctggcgtgcatggagtgggggcgcgcggtcgacgcggccactgaggcgcgggagatggacggtctggacttcttcgtcgccggcgtcgggtcggtgagctcgggcgcggctgccgggatggagggcatggctgggcgcgtgctgtgtgctggcatggcagcgggcaccggcgccttggcggagttcgcggcggcgtctggcgacagctatgacgccgatgtcgcagctgtcgtcgtcgcggcgcgtgcgccggaacgcgggaaagaggaccgcgtgggacaagtgcc

SEQ ID NO: 371344 - DNA, 386 bp, Zea mays
ttgcttatagcccctgcgtcgcgtctccagacatgcgcggcaacggctctgtaggactctgtactctcaccgtggccgggtcaccatgactgcattagcatgcctgctccagctctctcccatggccccccgggctcctgcctcgtggccgtctggtgcgtcgtcgggacggacctccgcactctgattggcgttaccgtgtccagcagcaaacaccgccgcgcatataggctgatccccggtgcggtgctggtcgatcgcatggcagggcgcacctgttcccaagcacgccagtggaactggtcggggattggccggcagagcccgccttgtcgccccctccagctcctgcatttgtagcagagccctgacactagacactatgc

SEQ ID NO: 371345 - DNA, 418 bp, Zea mays
tttctgttggtgcaccaagtgaagcatgctactggtatttctcgggcgctatgtggtctttgcgttggacctgcttggcacatctgaaataaggacacactttgctcggatttgcaagttctcttttttttttcttggtgtgtctggacggatgtctgtccaggttgttagatgaatcgacaactcgcggaccagcagacttgctgtgaatctatatttactgagcttacaatctttcactgtaaagaaaaagaactcaaggctatgcaggctgatctaaacaaaaaagaacgggaattgaaaaggaaggaaaaaggtggcattccaagcttgccattgtgaatgtagaaaaaaaaagggccgccttttttaagtttatccaactactactttttccaatggaaaacctatttttttt

SEQ ID NO: 371346 - DNA, 425 bp, Zea mays
  unsure (1)..(425): unsure at all n locations
ttgatgtcacgtgggggggcgcgggggtgcgggcgggcgtcttcacacgaaccgaacgatggccttttatgccgcccttgactgggccgaaacgcacctgctgcgggggagccatagtccagactgtttcgcggctgacgcctagcctttcacatacagcaggaggagcgaactctggagcacctacatcggcaacgatgcgtacggcgacgactccgggactaggcgcagacggagatccttcgagagggtagcccatcgtgaatatcgccaaggacagcagacacttccgcaggtgtaaaaatggtggattgttaagcccacatgatgaaaaggttgtaagagaaaagcctctttgtgatcagcctcgcgcagaagagnagattgggtgtggccttgatggtataatggatgacaggcaccct

SEQ ID NO: 371347 - DNA, 171 bp, Zea mays
tccatgcgtgctctattaggaactaataccgggggtacatttaagggtgctccctgtcgtatccgctggcgcgggacagggactaccacgactacgtggccaccaatgtcgaagggacgcacagtctcgccaggaccctgtacggagcgcgaatccagacaggacgccgca

SEQ ID NO: 371348 - DNA, 338 bp, Zea mays
gggcagatctccacaacaagaacccattcaattcgagccccccggtgcccacctaacggggggcctatcgccaacattgcccggccctgcagggtagatgactgcacataatcataagcaggatcaggaatggtaatcggcatcattaccgggaacaacagaggggatccataaagcggcccagcctgctcctcctggattgaatggcaactggctggccctgcccccttgttttacacggcgacggacaccgagaccccagggaagaacttttggcccggcgcgaggaactccaaggggtattaccgggccttggggccaaagaagcgcctccacct

SEQ ID NO: 371349 - DNA, 275 bp, Zea mays
cccacgcctgcccccgacgggctgtcctgctcgatttcgtaagctccggcatacggcggcatccagtacgaccgacggaagggccgaatcgtatctttcgcgaggctgacccagaccagcccgataatggctggccacggaaacagtcatggaaagagacagtctgattctactgaaaatagaggcagcaagagaagaaatcccggggatgatacatatgcacctggccctgataacactgtgtatcactacctctgtgcttctagaaaaattgg

SEQ ID NO: 371350 - DNA, 107 bp, Zea mays
ttcttcttcacctcctgcttagctctgaggggggaatggcgattgtatagagcgagagtgcgtatctatgcctagaggcatagctaggtggccacttgaacgaagat

SEQ ID NO: 371351 - DNA, 392 bp, Zea mays
tttgtgtgctacgctcttacatctttcatctctggatatgctagtggtggcctctattcaaggaatggtgggatgattctgcatgtgtttctcttctctactatataaagcatcatttctcacggttccatgtactctactcccccacatttaaatggtaaaaaagctaaaactatgcatcataggaattcgaaccatggttggctccaaacccacatgcacacactcacctggccaatagaacacatatgtctctgcgttttatactacatactcgagcataaatggaaaccgaagcaacgtacatgcactttactagctcattcaagtacctctgtatgcttacccatgttcttttgctccaataatagaatccttgatttgaaaatttc

SEQ ID NO: 371352 - DNA, 441 bp, Zea mays
tttttaagacccaagaaattgctgtctacgggcttggcctggctgtgaatgggcatatcatgggtccataccacggctggctacagggcgaggcgacgtccatggagtatacaggggactaccgatgagcttgtgcgactctgaatctaagagctgtgaggcactagagcaagtctttggtggacggggaaatgtgaatggggcctgaatatcccactcgaggagatgagctgacctataacaacatgctgggtgatggggtatacaccttacttatctaccatattaaatatacaaacagtgcgcaagtgcacctacaattacatgtgagctttgcatcgtgtagactacgcttactatgtggacatgaggtggcctcacacaaatgcggtgagttagcctatcctggcatatgatccttgcaggtctaaatatatgacg

SEQ ID NO: 371353 - DNA, 240 bp, Zea mays
cagaagcattggatggaagggctgctgtgcatgcacaggggggcctgctgtggcattattagtgcgaggaaactggcggcagactaattggggtattgccgaacactgaaagaattatggaggcagaggctgcttaaaaggctattgtaccagtggacatgtgcctactggctccacaaacacaatctcaacacggaagattgctggctggtctagtcttggtgatttttttcaaaacaa

SEQ ID NO: 371354 - DNA, 421 bp, Zea mays
ttttgtattatctcaacagaattatggccgtgcaaatttgtttatccccttgaacggggttaaccgcagcaggtcaagcggcgaaccaaacaactgtgctcatataagcatggaggttatgtgagcatgcaatatggtaccaaaggggctctatctgtaatgatcaaggctcacgagtagaacatctaggttccattcccctgtggtatgaaatatgcgccaaagagcagagctcaatgcagttacaggtgtgggctattggtgctagcatgttgaccacccattcttgggctctcatttctttcatagaccaaggagaagggaggccatgatatacaaaactagggtcggaccaaactggggatgccctgccttgtcgaattgtatgctgttcttcagcatacttgctagccaaaggacc

SEQ ID NO: 371355 - DNA, 294 bp, Zea mays
gaatatagaggaagtcgtttgtcatatatcctaacaagggtgaggtatgggctctttacaaggggtggagcatggaatggtgctcagatgcagataatcatagatcatatgagtatgaggttgtggaagtcgagccaagtaatgtcagccaatggtggcacgaccgctgtcccactggtcaggattaaccgatttgttagtttatttgcaacagctaaggacaataccttcatttgcgataacaataaagtgagaacctccccctttttcttacagaatttcttcttttttttg

SEQ ID NO: 371356 - DNA, 252 bp, Zea mays
ttggtatatgagggggtcgaatgtcatatatgctggcaggggtcagggatgggctctgtacaaggggtggagcatggaatggtgcttagctgcagctgatcagagatcatctgagtctgaggttgtggcaatcgtcggaagcatgtttacgaatgacggcctgaccagggtcccacaggtcaggacgaacagatgcgatagattatttgcaacagtggaggacaacccttgattggtgaaaccatcaaggga

SEQ ID NO: 371357 - DNA, 371 bp, Zea mays
tttgtccaacccctttttttattcctccgccggaaaccccacctcccggggccttgtttctagcctgacacccgttccaacgccgatgctgggagagaaagtgacggcaatttcaacctggagaggaattgagccaaaccaatcatgcacaagaggaaagactctacggaggcaagtggcatgcctgatgaccacgtgtcgcatggggacgaatcaacccgtgccagcggaacttggaacggatcacatcgcgaaggcgagaaaaaggaggcaggggacactaaaactggttatgaaaccctgcctgacgacgcctacacggacccaactggggaccgtggtactgacaggctttctgacgacacagggaa

SEQ ID NO: 371358 - DNA, 314 bp, Zea mays
tccacgcgtccgcccacgcgtccggccacgcgggcgcctacacggaagcccacccacaggcgagcccaaggagagaacacgctaggagggcacccgcagactgcgagagagagacccggaggagcaggcggccttgaccacggaggaggagcacagccgccgaggcaaggggagggcgacggccaacgccaataacgcggaagagaggggacgctcgaggcgatgaggccgcagaacccgtgaaagcagccggcggaggcagggaaccaccccgagcgagacgcccgtgctaagatggaggtacggacacaggg

SEQ ID NO: 371359 - DNA, 266 bp, Zea mays
ctcctgcgcagggtggtgatcagcctgcccatgggcgggcttagggacagggtcgggctgatgaacatgctcgacaacatcttcgagcccaacatgaacccgagcagggacagcgtcagcgacagggagaggccaaacgcgaggccccaccagaggatccagatggagaagggtttgttcgaacagggcatcggacactgcaacgacgtcaacaacagcatgatgaacaagctgatgcagcaggagccagagcaggagcaacagca

SEQ ID NO: 371360 - DNA, 352 bp, Zea mays
tttctgtccacgcgtagggtggggttcagcctggctttggtcgtgcacaggcccatccttgggcgtatgaccatgcacaacaacatctgcgagggcaacatgatcccgagcagggaccgcgtcgcacgacatggtgaggccaaacgcgaggccctaggcgaggatccagatggacgaggatttgttcgtacagggtaacggactgctcgacgacgtctacaacagcgtgaaggactgactgttgctgcaggagcacactgcagccgccagagcagtattctatccagggcgtcacgccatacgagagcccattgggcggcatcttcgccagcatgccacactgcaagttcgg

SEQ ID NO: 371361 - DNA, 364 bp, Zea mays
catgaagaaggcatttgtccctctccaaaactataaacatgggttggtctgagaaaacatctaaaggtccagtcaatagagtttcaagaggacactacaacgggaactcccatgaaggctattcaactcagcacactaaatcatatgtactgctcagttgcagctcatcctcttaatctttatctttactggtgcaaattagttaatttaagtagaacctaatataaaaaatgacgaaaagaatcatagtgcactgaaatgtgcccccaatattatatactatgagttgcttagtgcacttgccgcatttgtttccttaatttgaaatggggccctccctatttctaataaataattgaatatt

SEQ ID NO: 371362 - DNA, 292 bp, Zea mays
ttgtttgttcttggaacggggaaatgaatagcctggctttatgggtgagtgcaacggaatacctgcgggcaaacaattggggacggaggtatggtaggagctgctcagcactcacttggggagacatgattgaccacaagaatataggtgacttgggggcttacaaaagtgaaacagtgtggataaggggacagattttagcctctgtaatatatggctgagagtagcatatagaaaacatgacccatgccagggctattgctgctactatgctcctaatgcgcccttaagt

SEQ ID NO: 371363 - DNA, 224 bp, Zea mays
ggccttgactggaccacgaacgacctctcctggcacaccatggaaagcacactacagggaggaccgagcgacaaagaacaacggaaagcgggagacacaaaggtcccgcgattatgggtgtgcaatatccatcacggaggaggggatgcggaacgccattaagggaagaaagggcagggagccagacggccggaagcaaaacgggacacgaggcccagtcccgg

SEQ ID NO: 371364 - DNA, 214 bp, Zea mays
catcatatactctccatcccggtggtttttttaatatcggggttcccccccctcgacagtcatctatcccaacacaaataacgaccacctctctccttttcttagagtcggaaaaagctctctgcttattcggccggtccaactccaccgaccgattcaatccaacccactgaccattgggtttccgcctgtgtgctgatgcgcccccatccct

SEQ ID NO: 371365 - DNA, 353 bp, Zea mays
tcgttcacgcgtccgcaccgccctctccatctgcggcacggctcccaaacccctcccttgcttctgctacggcgaaccctctcccatctccttctccttcctgcagcaagcatcaaccccacctcccatggccgcctgcagcttctcccatggtgagctccctccactgccctaggtttccattgccgctcctccctcatcttcctccccaagctgagctcgcccagcccctctctgtttgtggcgtgctccagtttcctgtggcgtcaaagcccctagccaggtttccagccccctcatggccgctcctctttgctccctggtttctccccacgccagcagcagcagcaagc

SEQ ID NO: 371366 - DNA, 389 bp, Zea mays
tcgtctcacgcgtccgatcgctcgctcctgcatctcctagctcgagctcgcctctactccggtgcccagtcgctagactctcgctttcctgtgccgctctcgtccgtggttgtctctccgcccagcctagtgtgctgccctgcacgacggtcgtcctcgccgccccgacgctcgtcgcgcgcgcgagttcctccgctggtcgcgcgccgggatcatgaccgcgcacccttcctgctgccgcgcttggtctttgtctctatcgcgccgatctgcgctcgtccgtggccgtcgaacctgcttcagctcggatttgatcttgccgcgcccctgcgcttgctctgctcggaatcactcccatggcgagctcgccggcgttcatcccctgcgtc

SEQ ID NO: 371367 - DNA, 270 bp, Zea mays
gctgccacgcgtccgcggacgcgtgggcgggggggttttttaccgacgaggtcggttacaccaactacgggcacaacgaggattatgcttaccttgcctcccgcggggtcgatgtccctggcaaggtcgtgctcgtgcggtacggtgacatccactgctaggacatggtgcggaacagctcgctccgcgggcgccgacgtcgctatcgtttacacctatgtcaaggacttcggcgggagcgcggcgaatggggagacagcgcaagtggtt

SEQ ID NO: 371368 - DNA, 390 bp, Zea mays
tttattttgcaaatctcaagaagctttacctggccgggatgccaaaaataaggagactgggaagagagttgtctgataacactggagggctcaggaatttgcaaatcttcactttggaatatatggagaacctggaagaatggtgcacaactatgacaccagctacgggccagcagcagcaggaagaattcatgtttcccgcgctccaagaactgaccatataccattgccctctgttaacgatgcgtccctgccctccaagaagcatagattattgggaagtaagagcaagcagtggtgcagcacaactgcttctttagaaggaccacatgatgcaatccggggcaaactatatgggcttgcagtgtccctttgcttacaccaacgagc

SEQ ID NO: 371369 - DNA, 240 bp, Zea mays
ttcataccgggggggcaccggaccatcacggtggggataccttatcgaggcggggtcttcgacgccgggatcctcgggggctgcggcgaccatgaaccgggcttccacgtctaacgcgacgacaaagcccatgataggcgccatctcacatgcgttcccgagcgtgcctacccccaaccccaggacaccgggcgctctcgcgggccctaccacaacaggaacgctcctgcgtggacctga

SEQ ID NO: 371370 - DNA, 416 bp, Zea mays
  unsure (1)..(416): unsure at all n locations
nttgcttctctcttctctctcccgcgacatcagcggcgtttcagcggtggggtggggggacggcattgcgagctcacagtctcacaccacccgccgcgtggtgattccgagaggttgctgtgccgctggcttattaatgatgtggacccggatcttgacggctatcccccgcttaacgggcggcggcgatgaacgaagcgagcgccagcgctggcgtcgggaccggctctggcggggaggtgccgctggtatacaaggcctggaaggggaacaatggactggcactagattgactcgtgtcgtagccagatgttgggattcccttgctgttgctgagcttggcaaatttgtttggtcactggtggcttaatttttttttggatgacctcatttcccccccgttattttatgatttt

SEQ ID NO: 371371 - DNA, 459 bp, Zea mays
tctttacggtccaaggcgacctccacggtctgcgccgtcaccattcgctctgcctccatggtctccacggtctgagccgccagcatcgagggggagggacacgagcggatccgaggcggcctccacggtctgcgccgccaccatccgctctgccgcccttcgctccacttcgaagtcatgtcaaaggaagttgcaagggcggcctggaactcaacatatgagaagggtttagtcgacgtactacatgattacaaagataacccaaagttgaagggtcaaaatggatggaattcagagggatggaagtgtatcactgctaagtttaatgaaaggttctctttggctcatttcacaaaacaacaactacaagagaaggagaaagaacttaaatcaagctattaagcagttagagattcaagaaagggaaagggaactggttggaatgacttcctatgtatg

SEQ ID NO: 371372 - DNA, 326 bp, Zea mays
tcgatacatcacttaagaaaatgctgggcatacgggggttttgaatggagtactatggtattgtacgtacagaaggtacaaatgccaattactatatgcatgtgagtgagcctcatgtccttcaagcacaacagctttcttattatgcaccagtatctgggagtggcgtatctgtgtctgatgatggcacatgtattgccccagaatcttattatacccatccttcagtcactatggctgccagcgcagtagcagctgaacattctgtatactatgcttcatcaatctctggcatttctagcagcgcagcacatatcaaaacatgc

SEQ ID NO: 371373 - DNA, 462 bp, Zea mays
tcttcgcgtccggccctccacctttatcgccggcgcctccgccgccgttgctgtgttccgtctcttcgccgatggcttcggccaaggtacctttccctgttcaaatcgattatgacgctggcatcggcctagggtttggcttctgaagtttcccccccttctgtttatgatctatttgtttgggtaagttcggtgctgcccagcaggtggagaaccgaggcgcgctgtccaaaaggtcacgtaacgacggtgaggcacttccccactctgatctgttcgctcgcttgttagaccgggagttagggtttagtcaagttgcaaacgggagatcttctcgtgcaggatttgctctttttgtaaagaattagcgattgatcaatcgcaaggccagctgaggcataattgagagacaggagcggctctaatagatgccattaggagaatgtgcgctagaactgacat

SEQ ID NO: 371374 - DNA, 261 bp, Zea mays
ccccaaacatgctgctgagcgctttttatagaattttgggggcactaaccaaatacttatctttaaatacacaagatgcatcagatgatgctacaactgaatcgctgggcattcctttcagtagtccagaaataatgcaccatgaatacaacacttgttgtttttaaccaacttgtggcataccttcgtctaagaggaaggaattcacattatagtgccgccaaggcattagacagtttattttgtgctgaccatgttagg

SEQ ID NO: 371375 - DNA, 378 bp, Zea mays
  unsure (1)..(378): unsure at all n locations
ctcgtcggaggagaaaggggggaaagcaatgggaggctcgagccggcgagcgagatgggcgccnggagcagccgcgcggacgcgccgtcgcggcgccgggcgcgcctcggcctcggagggtgcttcgggacccgatcctcctccttcccagccgccgccgccgaagcgcacgacggcgggagcttcaccttggccgggtcctcctcctccagcgctatcgaggtacaatcagggcgaccagtacgtgccctgaattttcaggcttctctagctgctaaggatctacagattttcaccgcgtcaagtccaaagctgcattcctcttcaagtaccataagccatcacctcagatttaatcacctcaattggcatgaaaac

SEQ ID NO: 371376 - DNA, 492 bp, Zea mays
  unsure (1)..(492): unsure at all n locations
ggtccggccgaattctgggtcacccacgcgctgngagatatgtcgtgagttcagatcatggggtcttttttgaattgtgaagattatacacttaaaattatggaaccttatagtttcattagacagttatggcatttataatttttttagtaagatgtaaaacatttcctatcaataagtaccactaattcaatggcatagtttatctgaacctcaggttcattttgctataaatgcaacatgtaagtaaatgactcaatgtgaacttatcgtgggccagtttgtttttcttttctacactgtcgaatactggaatgtaataagtttggtgcaaagtatggttaaaatggactgcagttaattcaccattttggctcctaggatagaaagtattagaacatttttccgtactatttctttacaaatgctacaaagcattttgacatagaattatgaaaataatattttgggtaagctcattcatttggaata

SEQ ID NO: 371377 - DNA, 379 bp, Zea mays
cggattcgtgggcgctcccgccgctcccggccgtgtgcatgaccgcggagtcgcccatctgcgcctacatgcgccggctccgcgggatgccgacgccgatccacgtgcccacgtcgccgctcgggttcggctgcctgccctcgccgtggacgccgacgtcgcccggcgtgcccatgccggccaccaggccacgcgttcgcgacccgtgacgcgggaacccaccaccactgctgcgccgccgccagcgccgatgtgtagatacggctggtgtaggagagagagatccggcgaccaaaggcggaagcagagagaccttcacatggtgatagctccatcgctctctatctctatcgtcttgagcacatcctccttatgtcag

SEQ ID NO: 371378 - DNA, 244 bp, Zea mays
gcgtcgcaaccgcccaagcggccaccgacacggggcgaaatgagggagagaagcggtcgacgccccaacccaaccgagcggaggggaacgcgaaacgggggcaaggcacgaacgaggcggaaaacgaccaaccgcacgcggcaacggccaccggaccgggccaagggcaacacccgcccaggcgccgcgaaccccgacccgagcgacgcgaacaaggaccagaaggcccacgggaaaggcaaag

SEQ ID NO: 371379 - DNA, 337 bp, Zea mays
  unsure (1)..(337): unsure at all n locations
gagccaagccgtccggtgtcgtctggggctgctagacgccgctcaccggaacgtggtggatggcaccgaacgatatacaccgatctncgtctacatgacgcacgactccgaagggatgaccttcttcaaggcacgggacagatagcagtgcgatgtaaagtacctgggatacccactgacgccagcggtgacgggcttgctcaagatgccgacgaagcaaccctggctaaaaccgcggcacacgaagatgccatcagtgatccaccggcgcgaggtcctgttaggagataccggtcccgtaggagagagggagacggacatcaaatgccacaacatg

SEQ ID NO: 371380 - DNA, 513 bp, Zea mays
cattttccatatacacacagctagctagcttcacatatcgcaagcacccagatcggcaggaccagcggcagcggcagcggtgccggcaagaagcaggccgcgcgctccactctccgaccccggccgaaacaaaggtgatggcgcagctgccgccgagggcgccggggggcgccgcgccgcaggaccactggtcggcggcgggggagttcctggggttcgccgcggccaggcgcggcgcgcaccgccgctcggcgagcgactccgccgcgttcctcgaggccctgcccatggaagacgtcatcggcggcgacggcttcgaccgcctcgacgacgaccagctcatgtccatgttctccgacgtcgacgcgccagccgtctccgccggggacgcggcgcagctcaggacgtggcggacgccgacgcggacgacgacgggtcggtcgtctcgtcgcgcgccgccgggacggcgtcgccgctgaccccaaagggtcagaggatattgcaaacagcagt

SEQ ID NO: 371381 - DNA, 292 bp, Zea mays
gactttcatcgcctaaggcagccgaatgcaaacacgtaaacgtacagctacctccgcgagcaagaggcgaaacgctgctcggagcgcccaacgaagtctgcaaacatgcccacgggcacagccaccgcggcggaggcaggatcagctgctccgtacactgccagggaaagggccctgtctactgatgatgaaactctagcgatctcagggaaaagacagctgagtgtgtcgcagtggcggcctgctatgtgctgaagaagggctgggacatgggcgaatcaccaagctaaga

SEQ ID NO: 371382 - DNA, 491 bp, Zea mays
ctatcttgttgtgacaagatggagcacttgatttatctatttatgttcttgctttgctataagttttgaatgtcgttgatataagctgctgattgctatgatcaaacttttaaatgttatacgtcctagtcctacctctccttagggggctagaggttgttgagatgaatcttgtgagaagggtttgggcaagcattattattttgtatacacattggttggtgagctttccttgtgatagaactgggcattttgattggtaagttgagctgaacgagaaatattcgagaactttgattgatagacacatgagacttaggtactatttttttttgtagataacttttgttaagatgtcaataaacaacaaaccttgattaaactctaaacatatatactacagcaagtttcatatttttttctacagactgcttagcatgcttctaatccataatcatcttgatgctggcttcaaatggaagggcaattag

SEQ ID NO: 371383 - DNA, 478 bp, Zea mays
tcctcgcgtccgcccacgcgtccgcccacgcgtgcgcccacgcgtccgtcggactagcacgttctcctctacctgcaggaatctcggcgactcccgcacagccacgtgcggcctgtactgctcccccggcgcctagcagacccaccggacagccacatgcgtccagtcctgctgcctcggcgcccaccagtccgggctggttgcctgctcccgcctcaaccccgggaagtacccaggccccgacgtccgtcagccctgcatcacctccggagcacacccagggcacgactgctgttgcccctgggaacatctcaggctcggcgtcccctcctcatgacactgcagaggtccagcgccgaccttctgctgggactgggcacactacgatccaacagccacctccacgacgcttcgacggcatcgtctactcccgccgacttgctgcacggcggtggctgctcctccaccgacagccacc

SEQ ID NO: 371384 - DNA, 279 bp, Zea mays
tgctgacgccccgggcggaggcgttaacggactttgcgggttccccaaacctgggtgtttactggcgattcggggcgtgggccaactacgatacactcaggacggttcctgctgctggctggccgagatgcggattagtcagtacaactaggttcatcatagccatgagggaacattgaccatcggatgagaggggcctgacgaaggatgaactgatggaccgtacaggattgttcgtggaactaatgaaccgagataacagactgacgggacacaaag

SEQ ID NO: 371385 - DNA, 320 bp, Zea mays
atttggagatatcaactatctcaatgacacagaatcaagtgatggaagtgctcaagagatcagatcgcacttcagatgtggactgcctacaatagctagatgttataataggatgcctacaatagctagatgtgggctgcctactattattacttatgaagtctttatggtttgtagtttgtcatgtagctagttgccaagttatgaacttaaagttgcttagttatgttctattatttccataattgtagttttgaataaaggaagatttggaacatacaataaaactgaaataaaaataaacaaaaaaggagattggg

SEQ ID NO: 371386 - DNA, 283 bp, Zea mays
tcttgcttcaaacaggaagagggaccctcagagggtacttgtggacgaacgaggcggccaactagacgcggcatcctctcatccattcgagccactgactgtgagggagttgagtcaaacgatcttagtggttgccgcggtttaatacagaaactcgtgaccatgctggtgtccctactctgtacaagaacactactactagacgcatggacctcccacaaggatatttcgagatgcgccaggtacacatgatgaactaatgcgaactgtaagcaacctacaa

SEQ ID NO: 371387 - DNA, 202 bp, Zea mays
ccttctcttgcgcgcacgcggccggtgccgaggaaccaggttgacaaacgtgtgaccgtaggtgcagcggtggagatggccgccaagcgctcggatccacctgcgccgcctccgacaccggctggcttctgcgaggagaccggctatggatcgggctccgaggaggaggcagacgaggaggaggaggtggcggagtaggcag

SEQ ID NO: 371388 - DNA, 405 bp, Zea mays
ccttctcgtccggccggacgatgtgatcggcggcgcggggtgccccgacaagtactggagcccccaccccaagaccggcgtgttcggcccggcggcggtggacaccaaccagctgggcgtcgccgttgacgctgccgccgcgaatgcggctgcagcaggaggcacggtgctggaccagaaggtgtggttccgcccgctcgaggacgtcgagaagccgccccccgtcgtctgaaccgcgccacgcccacgcgacgcgacgctgccagcccacactgctgatacaagggcggcggccgggagggagagtcctggcaacgtcatgctcgtgcctgtaataagaacaagcaggagatgtgtgtgcctgtgatgtaccggtgtcgttatcagcgttatacaagtacttgc

SEQ ID NO: 371389 - DNA, 167 bp, Zea mays
cgcccgaggtaggaggggctagggtgtacattagctgctctcggagggtttatgatgccctctcaacgctcttatcctaccaaggctggactgggccgtcggtctagggactcggggacagacgatcgccaagccgaggtgccatggctccccacggaggagcacac

SEQ ID NO: 371390 - DNA, 316 bp, Zea mays
gccgtgctaaagcgcaaagcgcatcaccgcagggggagcttgtcatggggactgcggttgaccactcccattcaccattattggacgcgcgccggagggactagttatcgtaccggcgctgtatgatcagtgtccgcgacctctcgtcccataccctctttcatgccgtcttctttgatcatagcgactacccggataccgacattctacttgccgtcgcctacagagacggttccctcgattccttcttcctttcatactgaattttcgcatgttccgctacctcccaggtggataccgtcgtcactctggtcga

SEQ ID NO: 371391 - DNA, 434 bp, Zea mays
atattattaactatatggcctttgctcaagtcgaaaaaggttgaacttctatatcagtggactgtttttcttcattctctttcaggatgtgtattttgacgatgaatcagctgaggttgtaatatcttctttgcgtctgggagatgaccaggacaggtaatttactatctcgaaatgttctgtcacccttagtttttatgtgatggctgatagattatgcatgtatgtgtttataagcagctccctctttacaaattcaaattggttcacatttgatggagagagaggcattgatgatcgttcatctgcctctgttccttcatcatcccccaattctctggagacttcactagaggccgaagaagctgatgatggttaagtcattggcactgaggatgaaatggaaacagtatatcttggaaatggtagtgctg

SEQ ID NO: 371392 - DNA, 521 bp, Zea mays
ccttttaaagaatgtgcgggtgtgcggccctcgtcgccggagcccggccgccacggcccgtcctcccccgcaggctccgtcgccgtcgagggagctccgtccgagcagaggtctcaccaggcggtgagtcccagccgaagaaggtcaccgtcgcaggcgccggctgggccggctttgccgccgcgcaccacctcattaaacaggggtacgatgtcacgcttcttgctgcggagagtggcccaacggaggaggttggcctcagaggattctggcaaccgtatcgcaacatcttcgctttagtcgacgagctggggatctcgcctttcacgggctggaataaagcagcatactattctacggagggccttgctgtcgaatttcccatatttcataaccagccccgattaccagctccctttggagtctttgcatatccagaattccctaatcttcctttgagtgataggctgacatcaattcctgtcatagctgcagtcattgacttcgacaacactgacact

SEQ ID NO: 371393 - DNA, 292 bp, Zea mays
gacttgcctgcgccgggacacgggcagggacggggggaagttaaaggagcttggccatgaaccccaaggtcagggcgacccagacaagcaagagaccgacggccagcacggggaacaggccggcaccgaaggaacgggccgtggaagaaccgacgacaaaccaaccggcatatgctacggacagaacggacccgcacgcggaagcgagggacgccgcaacaaaggcagaacgcaaacgcggacagacgaagcaagcgaccaaagaaaggtaacgatgagctagcactacaag

SEQ ID NO: 371394 - DNA, 446 bp, Zea mays
cccatgcgtccggtttcgagaagctggtgaagtgtgcgatgctatcattaagtctggcaggtggcagtgattcaggagcatcagtttcttctgctatcgttggatggtatttgcaaagagatggtgtgaagcatgctaggaagatgtataagagattgcttgctttacctcggccaagcctcaagttcatgcaatactgcatagcgctggaggcgaaccttgcatcactcggagacaacggcgccctcaaagatgctcggcggctatatgattcagcgctcgacctgtatccccaggaaagagaagtgtggcggagctactacgacctggagctgaagatgggaacatcggagtctgccaacgccgtgtactcgcgcgctcgtaaggtgctgggtgactccactgcctcgactgcctccccgggctaggtcgcagcatgcaatgta

SEQ ID NO: 371395 - DNA, 275 bp, Zea mays
gtttgtcacagctggtgctcatccatcggagggagagcgcttatggtgtgaaggcgtgcctgtcttacctgtgggactagcgagacgacagctcacacacctacaccatgatctggaacgtcaagagcgtactgtgagggtggacgacctcttgatgcagtgcttacaagtgcgacggcacctggcgtacccgggcgggaagcccatgtaggtgcacgccacgctgtgggacggcagttactgggcacacgcagcaagagaaggtgaaggaggac

SEQ ID NO: 371396 - DNA, 497 bp, Zea mays
  unsure (1)..(497): unsure at all n locations
aactgtgtcgcgctcctcgcctactccgacgaccacggtgcaaattaaatatatgttttttctttttttatataatattctgtttacactttgcttagcacacgaagtcagtcaagctcatgtttttttaaacgaaaaaacaaaagaaataatatactacccaaaaagaaagggaaacgaatgggtagacgacctgatcgagcaggctttataatagtgatctggaaaaaaaatgcattccaaattgccgcgcgcgtgacatcactttactccctacctaacgagagttgagagcaaccgctatttattcatttatttttttgtacggcgactcccccacctcctctcgtcaaacctgcgctgcacttcagcttggtcgtcgcctcgctgtcccattcccatcccaagtgaatttacccatgtccagtcgagtagagtggtaaactaatgattgttactgcatgcatgcagaggaagaaggcgcgctngtgctggag

SEQ ID NO: 371397 - DNA, 493 bp, Zea mays
cccttgcgtccgttccattcaagtttatgttagacagtgatattcagtatttgtacatgatacaagtggctagtcaatctgtaaatccaaactgatcattgggtaagagttttctgaagtggtcccttatcttgacgatcatagtttagatttagttactactatgtaatacataatacatttgacttagaataattttgtactttcacaagacttcgagcagctgtaaaatgctctttaactggaagctgcaattgtccttttaaaactgtatttggtattgaaaggttgctgacggttaacaatgtggtcatgcccttgacaagttacggaaggtgcttttgtcgtaggttgtttactattttctagctgaacttttacgtttttttcctatcctttatggttgaattgtcatgagtcggctgagctggctacctcaattgattgacatgtgcagcctacttgacctggataataacagtttttcttattt

SEQ ID NO: 371398 - DNA, 298 bp, Zea mays
tctagtacgcgagcggcgccctttttttgtttatggggggtttttttattttcttgtgccacattatgagaagtcttcagaagaacttgttttgttaccagggtggatggagcaaaaaaaaaaaaaggggggggggaacacaaataaaggggggaggggccccccggggaacagaaataaaaaaacccccgcgaaatggggggggcattaatgaagaaagaaaacgggtcaacatgtgggaaggagaccatgtgcacagggataaagagaaagaagaggaacaacagatggaaacagg

SEQ ID NO: 371399 - DNA, 503 bp, Zea mays
  unsure (1)..(503): unsure at all n locations
cccatgcgtccgcttatttcgctttttaagaaaaaggcaattcggcagaaaaaggtaattcagctataaatgattgagtaaaaccagtgagatagctcctttatgaaaaatgtaataatttagtttcttctttgtcaccatcttaatctatctgtactattgtatagtttaaaagtataaatttcgggtctgtatttgaaaggcaaatgtttcccccctcacaacagaaataatagttatatctctaccaagtttgatttaaaatatatccctattttaaattattaattgttagtattataataatgatgtcttacatcttaaagtatttatcaaaacagttagtttgaacgacatttgtcttggtactttatgaaatctataaacttagaagtaggatcatatttatttatgtttgngttgacggtccagattctaatgtttcaatattgttattttgtttttaattacagctatgagcaaatgttcatgaaaatatttat

SEQ ID NO: 371400 - DNA, 99 bp, Zea mays
ggaattcatgaaccctgaggaatcgattttcgcactgtgatttgtaatgctgtactgtaataattagacaaacgcgtggcacgtggaatcagtgctggc

SEQ ID NO: 371401 - DNA, 371 bp, Zea mays
tcggagtttgccatgcattagtgacacccataggccagggtccgttgaacgaccaccgggggtcgatcagagcagagccatgggtggcggcactacaagcacagcatgggagacatgctaccgggggccggtacactgggcgcctgcctgagcagctgctgacgccatcagggtctattacctgcgcatggacgcgtacggcgccgaccatgaggttcctggcggcgctcgacaagctcctcgggctcatcatcgtgatgcgcgggaccgactgcgagtgtcccaagtggatgttcgtgaagcgctccaccttggtgccgtactacgccgacgggctcatcgcgatccaccgcgtgcacaaccacaagcac

SEQ ID NO: 371402 - DNA, 354 bp, Zea mays
cggcccggaatcccggggcggcccaagcggccgggcctctcacccaaaggggcacgagcacagggcgggaaccctgaacgagaagcggggccaactgcgaaggacgggcggaagcgaccacccgcggacagccgggaagaggcatgcaagaccataacatcgaagcgcagagcgactgcatagggcaaagaccgcgtccaaggaacccaaagtagcggaacaggcacgagcgcgggctccccagacggaaacaaccactgggccgcaagcgtggacggacacaacacaagagccgcggatcaggccacatggcacagggccagcaagcccgcaaaggctgtcgacgggaaggac

SEQ ID NO: 371403 - DNA, 498 bp, Zea mays
aatttcgatcaccgccgcccaacctcacctcccctccgtcccccgagccacctcacaaaccctgttcggtgcctctcactccggctgccagatggacagcgccgacgcggcgacggcgctgggcgcgtggatccggggctacttcacgccggccacgttcttcctcgtcgtcaacctcgtcatcggcaccatcgcgctcacctcccgtgccacccagcagcgccgccgcagggagaactactaccacgacgacggccacagccacggccacggccaccaggaaacgctgcacccgcagatggagcagccggggtacggtcactactaccacccggaccacacgcacacgctgtacgcggtgccgtcttcgcccgcgccgttcgcgcgcacgttctctgtcctcgaccgcctcaggtcgctcggcctgtaccgcttccgctccggggacttcccgcccgagtacggtgccacgccgtcgaaccacgcgcaggatgtgcc

SEQ ID NO: 371404 - DNA, 356 bp, Zea mays
tctcgacaccgagggccaacctgacctgccgggggtgcctctagccacctgacaaaccctgtgacggggcctatcactccggctgccagatggacagcgccgacagggggacggcgtcggggcgcgtggatacggggctacttcacgccggacacgtttttcctggggggcaagctaggtatgggaacgatcacgctcacctgccgggccacccagcagcgccgacgtagggagaactgctgccacgacgacggacacagccactgccacgggcaccaggaaacgctgcacccgcagaaggagcaaccggggtacggacactgctaccaccccggacacacggacaccgggtacgc

SEQ ID NO: 371405 - DNA, 331 bp, Zea mays
ccctgcttgcggcaaagcatgcggtggcgatcggggagagagatgggagaaattacgcgtagatcagcagcagccgccgcaaccagcagcccgcccaaccctacccgcgcgcccgtacgcctccccgtactggcccgcgtaatggacccaggtacccgcttttagtattcccctccagctcgggacgccgaacgagcccggaccaaatgccctcgcgctaccacctctggcactgcacaaaccgtaaccatagctggctgtcgacaccggtaccctatagtccgggtttgtcgtcggaattgatggtcggacttttaaattgctttcacgc

SEQ ID NO: 371406 - DNA, 265 bp, Zea mays
ggaccgggcccgaatcccggggcgagaccacacgcgccgccctcggaaccgcacaggagcgcggaaaggacaggggcggtcgagacactgaacaccacgaacaccccacacagcaagagccaccggagcaacgcgaaggcccgagcgctgacaagcaaaacaaggacacggaacaaggccagagaaggagaacgagaggcaccaaccaacccacggccacgaagggaagaaccacgcccaaggatacccggacaccggagacgag

SEQ ID NO: 371407 - DNA, 436 bp, Zea mays
ggtgaacgctgaggtccggtccggatttcgggtcgccacgcgttcggctttcatatccggagagggatctgggctcttaaccgttgaatagtagtaccgtttggtttgccttgtttggatgcttacacatgttgtgccctagagtggtgtggtggtctaagtgggaagaacgatcattatatggattggttctctcgttggtaattcgcctggtgtgagatgtgattggcgtttcccttacttttgagaaatgttcgctgctaggaatgttgtctattggagctcggagctgaaagtgatcagaggaagcggaagtatttggcttgaactacatacctttgcctcggcgtggttacgtgtttatatagagcaaaccagctctcggataagtacatatcagattacatataaacctcatctactgagcacccttatc

SEQ ID NO: 371408 - DNA, 333 bp, Zea mays
gcgtgttctctcggagccgtcgtcctgtctctcatgcttcttcgttgttgagcaaagcgggctcgaggaggagatgatgctgagcgggcacggcggcgggaggcgcctgttcacggcgtcgcagtggcaggagctggagcaccaggcgctcatcttcaaatacatggcctccggcgcgcccgtgccgcacgacctcgtcctgccgctccgcctcgccaccggcgtcgacaccgcgccctccctcgccttcccgccccagacttcgccgtcgctggcgtactggggctgctatgcgcgggggcgccgttcggccgcaaggcggaagacccggag

SEQ ID NO: 371409 - DNA, 317 bp, Zea mays
gttggactatcacctccgcgttctacgtgtctgacttggaccggagggtcattttacacgatacgatcctattgccgggtcgcgtctgctcgtcctctcgacactgctcatggcttggcgtctacatcagcctcatggactgttaccaagagaccaccgacctaccgctcggtgccccggaggaggatacgggccgtctggacggtcccagcgcggggctgccaccccagcaggccactgtctacgacggcgcctactgtccctggaccctggaggactccgacctgcgcgaggtcctgctgctccagtcggggctg

SEQ ID NO: 371410 - DNA, 485 bp, Zea mays
  unsure (1)..(485): unsure at all n locations
ggcgctgcctattctgtgtgctacgactggtatggcagcgacaacggcaattcactcccgtggtcgtgccccctgtctccaccagttcgtcgctgtcggggcctgcctgctagcccctagaaatgtagtcgccttgccgccgtgcatccacggtatgctctcctcacgtccccacttgtcgacctaggccgcctgctctagcctttcgctgctttggttgtcactgtgcatgtgtgcagattcaaggtcgattgcttctgctggcttcgaatgaacttaccttggtgccgtcattattagctgagagattgctatgtcgccttattacttgcatgattttggttcatgtatgcaatgcgctcatcttttcttacacgaaatatgtctgagcatttcttcgaggaagcctccatcgttaccaggctacaccttgatagcaaaaagnttgataaaggttctgaacgtctagcacactcaaaagctag

SEQ ID NO: 371411 - DNA, 436 bp, Zea mays
aagatacataagtcactacccaaggggatggctgctgcgtcactgtcactgctgaccttatcttgttgcttctgttggttgcgccgtcaccccgacactttctattgcagcggcatcgtcatcctgggccatgggtttgcttccacgggtcacacataggggtgagttcctgggccagggtgaggaaaattctgggattggctaggctacaatccccattgggctcaaccgtgcacctcttcgtgggccaggtttctatccaggctgcagtgactaaatagctattcttatgtataattttcatctaatattgtgctgatggtctcacatgaatactgctcagcaccttactgctgcagcatcatcaaacagtgatcagcattgtggtttgataatctgatttaggaggagagtccactgttgagaactgccagat

SEQ ID NO: 371412 - DNA, 523 bp, Zea mays
  unsure (1)..(523): unsure at all n locations
actacatcccgcacgagccggtgttcccgggggggactgctggcggcgcggggcccatcatgaagagctccgcgctggcggccggcgcgctgctgccgccggacaaaatggaggacgcgctgctgttccgcagctccagccccatctcggtgctggagcacggcagcggtggcagcgccagcgccagcggcagcgccaccggctccgcgtcctcgtcctcctcctcggcgtcctcctcctcggagtccttctccgggagtgggagtggcagtggcggagggcatgtttggtcggcgccagtgtcgccgagcccggcgccgccgccggcgctcgtcataccggcgcgcgcacggagcaagcgctcccgttcgtccgcgttcaccggcgccgccgcgcgcgccggggcggagacgcccaccatcctcgtgccgacgcccatgtactcgtccgggtctgcccactcggaccccgagagcatcgccgagtccagcccgcacccgcgccgnccatgaagagaagaaga

SEQ ID NO: 371413 - DNA, 388 bp, Zea mays
actacgcgtccgcccacgcgtccggtcgctggggggacacctcgcctacgggtgggggccactcgccggaggctgccgccaccgttatgccatggccgtcatcctctcctccgcggcgccaacgatactgactcgtcccacgcgccctcggaggcagctgaggagcggcctccgcgggggcctcgcgcgcctctcagctgcgctcggcctcgcgcacgcgggcgccggcgccggcgccgcactcgccgcgccgatctactacgaggagatgctgcgcctctcgtccgactccggcggtgatgttggcgggttcgcgctcccggagctcggactcgacgggctcgtcgacttcgtcaacgagaaccctctcgtcgtcgcggcaggcgtc

SEQ ID NO: 371414 - DNA, 494 bp, Zea mays
tgtatgctctcatcacaagggacctgtccagaggtgggagaatctcctctctctcctcagctcccccctgcctcgctagatataacaacccatgccagcctgcttgccagctcccaccagagatcagagcctcttggctaagctagagtgggagggagggagggagagctcgccgtttccgacacatcgatatcggcagcggcggagatcctgaaaagagacagtttgcagatgaggacgacagggaccatcatgaaccttcaccgagacatgtacggcagggagcagatgaggacgaccatccagaaccaagaacaggtcttcagacaacaggtacccgcaaaacgagcacctgcagtctgcacacgtacagtatgctgaatttcacttgtacacgagctgcaccggctgtaccacgtccagaagcagctgatgcaggtgcagcaggcacacgcgcctgctccggcgacccctgctccagcagtgctcaacga

SEQ ID NO: 371415 - DNA, 401 bp, Zea mays
catactgaaagaacaccggaggcggagagccacaggaggaggagctcgagggacgacgaccagctgaattaggaccggaggggatgtaagtttccaaactagcccttagaagaaaattttcctgaagcctcatgtttccaaatatgaatgccataatcttgagatagggctgtgccttcgattaaattccacaactgaaagtattgttggatacctgtcaaggacaggggtgccttgatatctctaacccaaggtctgttgtccaaagtttgctccaccgtttggaatttcagagctttttcgtccactttggccaccatatgagggaccagatcagagatagaggcacccataagctacctatcagcccagaaaaaggcattcttgccattacccacatg

SEQ ID NO: 371416 - DNA, 515 bp, Zea mays
tttttctcacggagctaccggtgtcagttttacaggataataatatcagttctatacatgaacattgcatatcaaaaaattctcattgattttgctgaaagtcaccggtgtcagctgacaccgatgaactgacctagctccgccctgggaccattaccaataatatgagtggatttttagaccaacccaagttggagataaaaattaccaatataccatgtctgaagccttatgttaccaaaagaccattgggctgtcagagtgacaagtagtcaaaatgcaattttgccaatgatagcagagtaaattttgcttagcataatgcttatcagagcataaccttgttctgttctgtgttgctgactttttgtccttgttatatgtagtccctctagccttattcaaaaccatactcctatagtcctatctgttatttccattctggggtattatatctcgcgtgatagggagactagcttgtcttacagtgagggagcatcaagccaactcacatg

SEQ ID NO: 371417 - DNA, 277 bp, Zea mays
aatacgcctccgaccacgccggcgcccacgggagcggatttctcaaggcgcctgggttcaccacacactgcacgccgaccgaagctagtgacagcacacgcggcggccaccttgggacagcaggctccaaatcacaggttccaccatacatgcatctacagttcatgaaagagctacccctgatcgtgatggagcttgataccgaccactctcgtcgtagggaggccgaggagggggctcagcacgaccgtgccgaccgagaactgcaccattccag

SEQ ID NO: 371418 - DNA, 251 bp, Zea mays
tgatccccaggacgcagagatggacaccgggggacgttgaagctcctactggaaactaacgaataatacagctatctatgaatgaatgagacccaaggcgaagagatggcctcaaaagcatgggcgatatgaagatgatcagatccattcagggctagcgtcctctaaaactggaccagaaaaagaacttgatcatacatccttggcaatgttgacagcacaagtgttcaatttttctgcacagaactata

SEQ ID NO: 371419 - DNA, 567 bp, Zea mays
  unsure (1)..(567): unsure at all n locations
ttttggtttctcaaaaccaacaggctcctgaaagtaaagaatttgaaaaaataactgtaatgggagagatggatgagccaacagaaggtatcacacctcagcctgtagaagtggaactcgagatgcatcattgcaaagaaagaggtacatcagaggaaactcttgtagtagaaaaggatgcatctgctatgcatgaaaatgttgagaaacaagtaaaaggatttgatatcgaggccaaagctgaccgtgcctttatgttccataaaccaatgaaagaacatgctgggggtagtaaggaagaggttgccaatacaaatcttatgacaagtgatttgactgaagataaaagaaatggcatagaatttgatgtccttagtaagaaagttaaagtagatcattcatgttcactgggaagaggtcttgactcaacattgcagcgtggtgtagaaccaacacaaacatcaaaatctgcttcaaccactngtgtaaagacagaacatgatacaatcaagctagagaagcttgatctgtcattgagcttatcagtttgtttgcagaattctgaat

SEQ ID NO: 371420 - DNA, 536 bp, Zea mays
ttcgccatctatctgggaggcaatgttggtcacgaccgcggcggcaaagccaagaagatgcttgctgagatggtgaaggtgagcatggagcagagcctgaggcacttgcagcgtcgggcctccttcgcctgaaactgcatccaggtggcgggtgccccacccccccttattttgcaatggagatagaagatagtccaagaataatgagatttctggtgatgccggtccaggccttgacaggaccgagtgaccggtctaagccctcgtatacttaagctcttgacgtagaactccttttccccctttcactcgccaatcttgtgttctcgttatgaagaaaagaggtatgattttcgtctcgttgtaagttccccttcccaaggttttgttgtgcatgtttatcaaatgaaaacaggcagcacaagagagagagagataagagagaaaagaaaagacatttcctgtggggaatggattgtacataaagcaaaggatcccattcctcatgtctgaaaaaaaagcctctctgctggttc

SEQ ID NO: 371421 - DNA, 316 bp, Zea mays
aaagcacgcacccacggaaccacatagggggacattttgtggagagtgggcgtggcgtcaaccgccggcgctggcacctcagctgccacagtcacgggacggcgagggagtggacacctgggaggaccagcctgaacgcagaaggagagaccacacgccgccacctggagcgaccacccggggctggtactcgcgggcggctaccgagaggcaaaaggtggggtgcacaaccagaagcggggaccaagccttgaacccgaggaccaggacgagggtccacagtagtgaatcgtgacctacacacacccattcccaa

SEQ ID NO: 371422 - DNA, 369 bp, Zea mays
gtatattctggtgctgcatcggccggtgacactgaggctaatgcagacgtgactgaccattttgtctgggagtcctgcgtagagggagaacgctatgagctagagggacgaaaatcacaacccacatcccatggacctgcatcacctgaaacctcgttgcaggatgctgtaaaagtcatcaaaaccagaatggcaaacaaccgtaactctatgaactaaaacgccaacagtctttcaacagaagcgaagagaactgtgatggatcttctttggcagcctacgggcctttattcctttgactagcactgggcttgaccaagcggaaggtctgcatgggcaaacataggggaacaaactctatatgacctg

SEQ ID NO: 371423 - DNA, 250 bp, Zea mays
cggaacccccgggtccaccccccccgaataaaaacccccagccacaaggagaacacagggggggataaaaaagccacgcgggaaaaccccccacacaacgggcatcagaacggccacgacccccgccaggagcccggaggcagaggcaaaaacaccccaggagccggagagaacataactgagccaacaacgaaccagcctaaaccaaatccagtcagccagacccaaccaggctaaaaccgatcaccac

SEQ ID NO: 371424 - DNA, 260 bp, Zea mays
aagaaagggaaaaaaaattttatcttacaatggaggggtccaaaagggccttaggggacccagcatctcatttagttttattttagaaaacagcatgggaggggcctcacagactaaaacaggtcaactttgggaagccagctgttcaacaggtaaaaactaaaaactaaaagtccatgctgatctagagggtcccagcaagacataatattcgactatgcccttacacgaaattttttttgggggtttttgccatgccg

SEQ ID NO: 371425 - DNA, 99 bp, Zea mays
aagtttgattcgaagtgaataggaattaggatgtttattgtcacagttaaccaacgaactactagtgggtgctactacagagatgccaagtatcactaa

SEQ ID NO: 371426 - DNA, 386 bp, Zea mays
tgcaccaccacgggcttttgtaacactcggggcagccgttctcctgactctcgtcatacttcttggggttgggctcgttgtatttcttggggttgggcgcttcctagtctggactgaagggacgaacacagcaaagtccatggaatcttcgcgaagcactgtcttgaaatcctggtaaacagaggctgcgtcctgcaggcagctcggcagactgaggttagtgttgccaatattaaaagaaacattctgcctggagaatgtttctccagatttcgggggctccttcagggaaaatgcctgacagcgggcatcatctaaaccataaacaactttcaaatgtctcttcaatttcagaagtagctggagggctattgcatcatggcaat

SEQ ID NO: 371427 - DNA, 271 bp, Zea mays
gggccagcccaacaacttgttggaaaaatgcccaaaagatcatggcccgaattttggaactttgtagaccagacgggaagttaatgggcaaatatctgggggcgcagaacagcaaaggggagctaaagctgaaagaaaacaagggctcacaagtccactttttatgagaggtcccggaggggttatgcttactactcacacggtttgcatacaaaattggggaaaaaggatttttggaaagcttttccccaattggggaattacttgggac

SEQ ID NO: 371428 - DNA, 280 bp, Zea mays
acgcagcagagccatattacatatctgtactattttcgaatagggaatgtaaatcaggcccaatattcgatacaagtcatccgacaccaccatgtatacatgtcccacaaactgtgtcaagctgaatgaattgcttgataagctccgctcagtaacatgtaaacctttacgctcaatctgacaaattttcaaattggaagtcgttctagcttctctgcatacgatgtatttagatatgatatacatctatgatctatgacttataatttaaactgagggg

SEQ ID NO: 371429 - DNA, 505 bp, Zea mays
agaagagatactagggggggggtgatcttgggtacaccgccgttttttcttactagatagatgtggtgaattcttctcacactttcgcaaccggaggcacatctaccatggaacactggcatgacccaaagaggctggtggacgagatcaagatcagctcgaacgaggagacctgcgccacctacaacttccttaaggtgtcgcggaacctgtttcggtggacgaaggaggccaagtacgcggaccactaccagaggctgctcatcaacgggatcatgggcaaccagaggggaacacagcccggtgtcatgctctactttccttcccatggggccggggcggtccaagagcgtcagtggccagtcaccgtctggcctttcgtccaagaacccagggggggggggaggttccaacgaccacgtctggtgctgctatggcacggggatagagtcgttctcaaagtaggggacttcttaacttctttaggaagggagagttagaccat

SEQ ID NO: 371430 - DNA, 450 bp, Zea mays
gcagtataacatgggaatcaataaaccaaggcaccggtggcagcaagtctcctgtacattcagcagaaaaaaaaatgcaaaaaacacgccagggcatgtgcgcgaactaagatttgaagacatatatatacaacttcccgacctgacataggagatgtgtagcgtagaccacacgggtcacgcgacggcctacacaaagtccgtattacaaactccgttttgccccgtcacgagtcgtaaattgcagtaaaattttgacggtttgaccccgccactatcttgtcagtgagaaatatcaaccacccacgctctcccgcgctaacttttccctcacaatgtccccggaaccactagtccactaccggtctaccactaactacgggctgatgaactgatgaagtgaacaagattagccgtcagacaaggacatggcagacagcgcagacccac

SEQ ID NO: 371431 - DNA, 529 bp, Zea mays
cagtatgaccacggttggggcggcattttaaggcgtgtcctcttttttcccccctcagggaagtggtgggcgtcggttcctctgcggatgacttgcctcgtttcgtttcggagtagtgggtctgcgctgtctgccatgtccttgtctggcggctaatcttgttcacttcatcagttcatcagcccgtagttagtggtagaccggcagtggactagtggtgccggtgagattgtgagggaaaagtcagcgcggaacagcgtgggtggttgatatttctcactgacaagaaagtggtggtgtcaaaccgtcaaaattttactgcaatttacgactcgtgaccgggcaaaacggagtttgtcatgcggacttcgtgtaggccgtcccgtgacccgtgtggtctacactacacattttccatgtcaggtcaggaagtggtttgttaatgctttaaatcttaaatcgactcatgccctgccaggcttttgatctcttttctgctgatgaacagggacttgctgcccccgtgcct

SEQ ID NO: 371432 - DNA, 303 bp, Zea mays
atcttggccaaccgtcaagtcttgtaatatcaaaacacattaaaattgcacgtgcataagggtcacacagggcaggaccggaccggagttcttccattatggtagtacagtgtacgtatgcctcccttaaccgttatttatacaacatgcaatagtgcagtacaaactaacaaagtttaaacgtaccttcagaacggcatactaacacttgtgcatgcatgcaaatggaccgaccgcgtcctataccatatcatatgcgatccattatccatcggtgaagtgcagcactgcactggtagtggt

SEQ ID NO: 371433 - DNA, 343 bp, Zea mays
  unsure (1)..(343): unsure at all n locations
tcgcgagcggccgcccttttggggggtttttataagnggacacgccgtgtcttccccagacgctgcctaagaactcgacattgcttccaaacatggttcaccacgatacaatgtgaaaatgaaataaaatcttaacaatttgagtacttgacattgatacccgtagaacagaaacagctgataggtcagcactattcttttttggaacccatttaaacatatctagtaggtcacccatgaatggacttaggaaggtgcaccacatgacatgactgcagtgcgcttgtcttacaaactgggaacaaaactgcatgatttatcatacactcctctactttttaaa

SEQ ID NO: 371434 - DNA, 481 bp, Zea mays
aaacagtgacaatatcgaggagttagtttgacaaaccatgctatcatgtttcacttgcactcagcattggctacttactaattatctacttactcaaataatactacaaatgcatctagcacaaaaaatgctacatttaaatacatttccatttgttccaaacataggtgcagcacatgcaactgaaacccagcagcgtcaatgcatccttatcacgaggtggggttatagcgaaggtgttgctcatagtaatcaataagctgcaaaccagaataataattgttgtggcgtcattccatttttacttcattatgtgaaatgagaaaacaatgaggtcataccaccaggggctccttagcttttcaactgcttatcgtccacgaataccatttccccgtcagacctgttaaccatgttggtcaagagcaatgttcagcaaagattatatgaaagacacatgtgctatatcaataacataatg

SEQ ID NO: 371435 - DNA, 233 bp, Zea mays
  unsure (1)..(233): unsure at all n locations
gaactccagccctcgggggggacctattcagacgaccgccgttttcttccagagangcgctccccgttggccactgtggctgttaggcgagggcgcgtttgaacgggcatccccgcgcgctgggccgcggtctccccgatgaagctgtatgtggagctggtgtccactagcgcggtgaaggccgtcgaccccacgtgcaccctgagttggatggtgctggtgacaatcacccc

SEQ ID NO: 371436 - DNA, 417 bp, Zea mays
  unsure (1)..(417): unsure at all n locations
gcgtccggttcactcggagggacctaatgggtgtccccctcttccaccggagctgactngaggtngaggacgctctccgagcagcagcagcatacataaggcacggcagctgagctggctcctccacctttctcatccatccatcacagcttcgagactcgtcctccatgggttctggcggcgtcagatggaaggctctgccgctgtgcctagctctcgtggctctgcaagcatgcctccctgctcgcggggcggctcccaagacttacatcgttcagatggccgcgtctgagatgccgagctcgttcgattttcaccacgaatggtacccatccactgtgaaatccgtgagctttgtgcagctggaaggagacgcggtcgaccattacgccgtgaggatcgtcttcaactaccaga

SEQ ID NO: 371437 - DNA, 387 bp, Zea mays
caaatagaggacttctcccaaccctagcgcccccggccccggactccgtccccccgccttcgccgacgaggaaacgccccatgactgggaagaagcgaccgcccaaacagatcctggagggccataccactaaaggttctgacagagtcatcaaaccctggcgaaagctagctaatgagggcatttgatgtttcaaagacaccccatgaggcaagaggcgaggcaattgaagtaacaagaacctcaggcaccaatgtgagagaaccaaagcggcggcattatccgaccagaagaagtccatagggggccggccgccatatcatggttccaaggaggttttcctctatgaccaccatgatggacaaagagctgacaccactgagggga

SEQ ID NO: 371438 - DNA, 210 bp, Zea mays
cccctttttggggggtttttttgaaggggaccccccctttctcccaacgaaacgttaaagaatagcaacttctgctcgaacgatcaaacgagcgcgagtctccggcgataaccaagagcgcgggcacgcaaagcggccaagcgggaaggaagcatttacgatggggcttgactattacaagacccctaggctgttgacaagggcgtccac

SEQ ID NO: 371439 - DNA, 506 bp, Zea mays
  unsure (1)..(506): unsure at all n locations
ggccatagatgtccttcgcatggggagctcctatatggagtatcgccgtntaccaccccngacttttaacccttctatttggtctctccggtgcataagatatttatgtctcctattcgttgtctcaactaacactcttaacttacatataacgatcctacattttaactatctaaacgaatcttagttggttcaactagctttttacccttcacaccttcgatgatgggaatatccttgcatattttttcactacacccggatgccgccgcaacgttactaagaaagcagcaatccgatcctcgctcgcttgatatcatgcccaaatcacgatatggcacatcatcgagggggtgccgatctggccctttcccatttaacaacatactcaagttctgatattgtgcatccctaaaagggttaggctatcttaagcagccttacctatcccacctttttaaaactgcagtttatgcagcctacaatgcaaaacggccatatacaca

SEQ ID NO: 371440 - DNA, 381 bp, Zea mays
ggccggtacactcgccggggaggagattattgggctgcgcccgtggttccccccgactcgggccatccccgccgtcaagccgcacctcgctgtgaccgccagaacctccccgagccaaccctgcccttcgccggacctatctcgccgccggtaagccgcgccacccttttctttcccgcgggtactgtttacattgggggaaggactgcgggtgagaggaagaaaaggtcagggggctttttgaactgtcagcgactcaggggaatagtggcgcaagggtagaactacgaggattgatttagtttaaacccaaggacctcggtgtaaactgcttttccaggaaactcttattaaatctgctttaaattggaccagaacttt

SEQ ID NO: 371441 - DNA, 449 bp, Zea mays
  unsure (1)..(449): unsure at all n locations
ctcttcaaacgccggcggggggccctaatgagcatgcgctcggtttctcatccccaagcaccgngccctggtggtcgccctcgtctctccctgcccatggatcttgccgtcgtcctggaccggtcgagaaccctacccagtcgccggaccgctcctcgccttcctcccgctcgttctccatgggtgccgccgtgagctccatgctctgacatccgtgccgccgattcgcccgaccgtcatccccatggctgcaacgccgtcctccactcggcctccctgcaccgcgccatggtgaccgcgggaccggccgtcccctgctccttcctcccttagcctagacgtgctgtcgccggaccgtgcaccgtcgtgcgtcaaacctcgcctcgccgtgctctgccgcgagctcgctgtcgaccctgtccaagcaccggcgttggcaccatgcccct

SEQ ID NO: 371442 - DNA, 105 bp, Zea mays
aatctagcgaataatgttaattatatgctcataggatgggttagtacccgttgtctcttctacagtaaagattatgctattacaagaaaaacaatagtaatccct

SEQ ID NO: 371443 - DNA, 402 bp, Zea mays
  unsure (1)..(402): unsure at all n locations
aatctggagattcagaggaaggccatgagtcttgttgcgacctttactacgcctgncgatgctgagatgaagtcaaatgatgtgaaacctttagtttcaggtcaatctgtttcctggtcaggaaaagcaggtttccaagaaatttcaaatgctggtaccaaacgaggtggttcaagtgagaacagtccaaaaaatccagtgcccactctttcatcatcaaaaattttgactgataagcctgggggcacagatgctgaagcgaagttgaaccctggggtatctgccttgtcaaattcacaacacgtgcaaccgacaaatgttactaccaatttgaaggatcagccctgcaaatcaactggtggaactggtcctgagctgcctactgtaaaagaggagaaaagc

SEQ ID NO: 371444 - DNA, 205 bp, Zea mays
agcgcgcgctgctggctgctcggctggccgacgatgagcatggggcgcttcgtcaactccatggatccgacgtcggggctggaggtgatcagagactggaacggcgtagcccaggtcgtgctccgttcgccaagggagccttcgcgcgggtgagcctgtgcggtgggcaaggtcgtcttatggaggaacgaccgcggcgaggagc

SEQ ID NO: 371445 - DNA, 118 bp, Zea mays
aacccttaaaaggagactacactggacttatacagcaacagcactagtttggttggagcacaaaacaggggcattacttttttaaaaatcaggagcaccttacaccacggggatttac

SEQ ID NO: 371446 - DNA, 128 bp, Zea mays
  unsure (1)..(128): unsure at all n locations
cctcgncagccannangcccaaggggccgctttgagactgactccacgcgccgccggcctcgggcatcaccgtcgtgtcgaggcagcacgttcgcccggacgccgcgtcggcggtcggcgacctcacg

SEQ ID NO: 371447 - DNA, 304 bp, Zea mays
gatcccacgctctgcattccagtaactgatccttctaagtttgttgtgacactacaaccataccttaatattcaggttgacagtaaatcagctgcccagttgcttgaaagtattatttttgtgattgatgctgttcttccactcataaggaagccaacacaaaatgttgttgaagaacttgagaaagatctgaaacatatgatagttcgccattcgtatttgacagttgtacatgcctgtatcaaccctgatctggggccggattggcgtttgttgccggcggctatggttggggacggcgggc

SEQ ID NO: 371448 - DNA, 172 bp, Zea mays
  unsure (1)..(172): unsure at all n locations
cggagcnnagcgggcgcgggcncggtggctcttaagaggcctggccgctgcgtgcgcgcccaaaagcaggaaagccacaaagtctcgcgttcctgggggcagggaacaactctcctctcgactggctctnttaaaccaagaggcgaggagtacgacggagcagcatgaggct

SEQ ID NO: 371449 - DNA, 175 bp, Zea mays
aaggcatggacgacgaagggacgcagctaggccggctacagggcggacactgggaccaggccgcgaagctaggacgaccgggcgccacggaggcggtcgacgggcagccggcggcaccagcggaggccagcgtcgacgggcggagcgccgaagcggagaccggggaggactacga

SEQ ID NO: 371450 - DNA, 212 bp, Zea mays
  unsure (1)..(212): unsure at all n locations
caagcaaaggcgncnattaaagaacnagaccccggtnaaaccccacccctcgacgggagttagactactcccagccccttcagacacagccagctacaaaatataacccatctgttgcacctaaaaatctgccaccaatctccatgcaagagacttcaaaacagggaggcttccccaatactcagtctacgcaacaggtacccagtacaagc

SEQ ID NO: 371451 - DNA, 132 bp, Zea mays
gacatgtggcgaggggatttttttaaccctagcctgaaattcactcacataggtagtcgaacttaagacctgacaccacctaacaaactctactagaggccttttcgcggctaagtgaattattattataca

SEQ ID NO: 371452 - DNA, 396 bp, Zea mays
acggcctgtccttttttttttttttttttctataactggggcttcaaaccaacacatgcctcaaacttgtctaaccttagacatacaaactatgataagttagacaacaaaccaaataacccctaaatccaaacatagctacagcaactagtcgatcaggatcctggatcagaaatacattaaattcgatgcggaatccacactggaaccgtgaatggtctacatcggaatcctcctgatcacagccccggcggcaacctgaggctactcccaaaagaaaattcgctcaatcctctacttcggcatcctcctcctgatcacagcgccgtacctcccggcggcaacgggaggccggcgtttcctggccgtggcggcgtcgtcttccttcgccggaac

SEQ ID NO: 371453 - DNA, 99 bp, Zea mays
gtcttgcggctatgttcttgtcttttatacccatcccttcatatttacatgacagctgacaactagcaacgaacgacaagagtatgacacagcccgtcg

SEQ ID NO: 371454 - DNA, 211 bp, Zea mays
gtgaaaccttgcctgtaaaggtatttaattgaaaagccattacaagttgaaaaaaacatactattgtgtttgccaacataacacatttttcgcgaggagaatgtgacaacttatagaaagaaaaatagagtatgttctatgctaagtttgaccgaatcttctggacatgagagtggtatgacttttctcattttctgcttcctataggcca

SEQ ID NO: 371455 - DNA, 397 bp, Zea mays
  unsure (1)..(397): unsure at all n locations
ccccccacgcgnccganggaaggacgcaannctttgaagcctncgcccccgncctgccatncnagccctngnccaacactccatcgacggaagggcatggttccagggattgcctccccagcagatcccaccatcctcgccccgcctgcactccgncatcctcgccgncaccatccacaaggcaacaccatgcccccgctcctctaccatccacgccatcctcgccccacgcccgcccacacaccttgccatacttgccctcctccgcgcaggacctcgatgccccttcccccacccctgtcgaccccgcaaattccgaaccggggttcgctcgggttgccccccctcgccggggacccaccaaggcggtcagggagcctggtgggtgggggaagag

SEQ ID NO: 371456 - DNA, 212 bp, Zea mays
  unsure (1)..(212): unsure at all n locations
aagaccagcaacnnngacgcgggccgcgataaaaacggncgccgccnncgccacgncaacgctgagcgccgnctngaggaaaggaaggccgaagccgccgaccgccagctagaaaagctcgccgagaacttcatcaagaagaaggccaaggaagcgggccgcggcggcggaccctcaaccgctgaggtggacaaatatctagagaagaaccg

SEQ ID NO: 371457 - DNA, 262 bp, Zea mays
  unsure (1)..(262): unsure at all n locations
atanctctcatttttttttttttttttggataaaagattggagccggttgctttgctttgctcccaggtgaactaaacatgggcacaacggtgaagactatcacggcataagtgcatcacaaatggggatctaaagagaagctggagaaaaattacacttctttgcttggatgaatgaagcctgaaagagagagggcgatgacggggggaaaaacgaaaatttgaaccaacaaaacaatgccctgaaaagaccaaaaaaaga

SEQ ID NO: 371458 - DNA, 350 bp, Zea mays
  unsure (1)..(350): unsure at all n locations
aattcccgtttcgactcacgcccccggttcctgaacgncnccgacaacaaccncaacgggggcatttttaaagcgctctcgcacttnccgcgggaatccttcgncggaaacctccagctctgcggggacccgctgccgccctgcaacagctcgttctttcccccagcaccatcgcccgggcttagccctggccccgcgaccggccccgccaagaagcggaagctctccggcgccgcaaacgcgggcatcgtcgtgggcgccgtggtggtggtgctccctcctctcatcgccgccgtgctctgcgcggtgtccaaacgatggaacgccggcgcccgtgaggggcccaaggc

SEQ ID NO: 371459 - DNA, 463 bp, Zea mays
  unsure (1)..(463): unsure at all n locations
tatcgngcacacgctggcagctgcggcttttgaagctcgcctacctggcctccgccgcggcggcgcccgctcgctcacaaggttttggtgctggcgcggcggcgtccgctcgcccgcccgcctggccgtggtgccggtgccggtgccggcgtggcggcggttgcgcctgctcgtgtatagtggatgtgcagcctccctgccttggtgctttcatgcaacttcttcttctctctcttctattactgatcgaagcagcgtccgcgcaaggcttgaaggtggctgtgctcgcacgcgcttgttcgacggcgacgcccaccctcacgtgctgggctgcggtggtgcttgcccgtgcgcgatgtggtcgcggtggcgcacgttcgcgcgctctcagccgtgtggcagcggctggtgctgcacgctcgctcgcccacggagtggtggcagcagcgtccgacatgcgcgc

SEQ ID NO: 371460 - DNA, 174 bp, Zea mays
agaagaggtacacacaacacaacacaccgacgctgatgaaaagcaaatgcacgtagtcaccccgatggcaccttggtaaagcactgtaccaaacaaaagagacaacggggcgtggatccctttcagcgcccagcagagcactcaaatagttacacgcacaagcaggacatgatt

SEQ ID NO: 371461 - DNA, 274 bp, Zea mays
tactgcacgaccggctggcgtgcggcactcaggggggactgataacactgtggtaagtggcatggaagaatctggactcattccaccgtgcgattttcaatggagcacaccctactcgatgaatatccaattcaaccggagcttcatggtttctatagagtacacacagacgtacaatatgcacaggttgaaggcaaagatcatggaggcacggatggagagcccgaagatccagctgcggcaggtgcttaagcagaagatctagtgcaggcca

SEQ ID NO: 371462 - DNA, 291 bp, Zea mays
  unsure (1)..(291): unsure at all n locations
gcgctgggngacgagcatggcgcgtcagtgcgcgcggatcagagatgtgttccatgtcacccactgtaccctcaacgtcacttcaagggggaggacgactgtcatgaagctggcagacaattttctggccgactacaccagcagcgttgtcgacttccctgacgacgcctggaccgttcagtgcggtgagggcacggaacatgacatcaagaacatgtacatgaggcaaaccgaaggcagtagtattaacaacaacaacctggttcgtgtgcgcgtgcgcgtcattcctgc

SEQ ID NO: 371463 - DNA, 421 bp, Zea mays
cgacgtgttctcgcccgctcttcgtctccgactcggcggcctccgcctcgccgtctcgggcgtcctttcgccgccttcgcacggtcgcagtcgtatcgattggggaacccctgccccacccaccactgcgggctgcagcctgccgtttcgctcgaacgaagcaatgctccaggagatccaccgagtgtttggcgagtggaccgtccgtttccagattgacgcggccaataaggagaatgctgtcccgttactcttcactgatggtcactttgcacggcaaccttagccggtgctacaaggccatgagcgcgctgcggccagatggggtatccaggcacttcatgtccgctggtggtttcgaacgcgtcgttttaaggggggtgctcgtcatgtccatctcgggagctttttatacagcacc

SEQ ID NO: 371464 - DNA, 434 bp, Zea mays
tacgaatatctagatagtactacaccatctacatagtttgtaatcaatataatttacatattattcttcgcacgcctttataaccatagcacaacaggatagtagctcacagactctttaacaacaactgatgttcacctttttctgtataggtaattgttttgcatgtctatgacgagcatcgtcacttttggaccacgaatgtttttgtgtacatataactaaactgctgaaacctttttagttctttatatgtttaagctatccctagctcttgaattgcactaatgatgtactatataaatatgtatgaacctgtcgattgactacgcaactactgtaagcactataactatcatctttgaacactatatacctttttaaacactggaacttggttaactttgtttgtacaacttattaaacactggaac

SEQ ID NO: 371465 - DNA, 163 bp, Zea mays
aaaggcttctctgatggagatttatgctaatggtggaaagatgggtgacaaagtgtgttcttggtacaacaggttagagacagaggaacacgttgacattaggttgtattgagatcaaacgatggttatgattaattttacaatgtcagaaggcttagaaggt

SEQ ID NO: 371466 - DNA, 173 bp, Zea mays
  unsure (1)..(173): unsure at all n locations
acggagcganaagnaaaggaggctctcctagggtctgtaccaggacacggcggagagagtgagctcacactgcacgtcagccggtccgaattcgaaaagtgtgcttctcggtatgcatatatgcatggcaggatcgggtattcattgaggcctgggggcgcacatctctggag

SEQ ID NO: 371467 - DNA, 232 bp, Zea mays
ttccactctgctcggacttcgttccagtcgaaaagcttcagggacagcgcgcccctccagtcgaagatcatgagcaccgtggatgagctgaagggcgacctttctgagctgttcagtcaacctgcggactgcaagcccaggccacacccacacccttcacgcccttccaaacgagatggtggccgcacggttcgtgcggacgtcaccgtccagcgcacccactcgggcgtat

SEQ ID NO: 371468 - DNA, 209 bp, Zea mays
gtaaggtgtgcctactgcacatgggattgatgtaagacatgctgcagaaactgttgaagatgcgtccaaaatattacaatcatgttggagcttatgataatacactgattacaaaagatttggggttcacaggattactctgaccggcggaagaaagggtctctatgttgagatgggaaatatgttttgcactgagctgcgaattgctc

SEQ ID NO: 371469 - DNA, 118 bp, Zea mays
ccggcaagggcggtggcccggctctcggcatcgagcaaggaacgacgtactgttgtgtcggagcgtggagacacgaccgcgtttagaacattgcgaaggtccggggtaaccgggccac

SEQ ID NO: 371470 - DNA, 154 bp, Zea mays
  unsure (1)..(154): unsure at all n locations
tccaggcgtangagagctaccttacctagagcatcatgtgctcggcgccgaccagcacccttctgacgccggccaaatcgccctcgtcggagttcccgccattgtagcccgactttcgccgtgggtgctggccgggcgccgggccccccggtaa

SEQ ID NO: 371471 - DNA, 202 bp, Zea mays
caccaacggggcattcggctggacaaagatcttcaagagctctcggctagagctgatattgcagagcggcaggaaggaatgaatgatttgggcgcatgcctcaaagacttactctggtggaaagaccacacgtgctatgaaaaccttggctgaaaatgttgatgaagcaatggatgacaaaagctcgacaatttaacggagt

SEQ ID NO: 371472 - DNA, 248 bp, Zea mays
gccgtcgaccgtcagtttgaaaagctcgccgagaacttcatcaagaagaaggccatggaagcgggccgaggcggtggaccctcaaccgctgaggaggacaaaagtctggagaagtaccgaaaggatgcttatgactgggtcaacacggatgaggaatccgcacgtgcatcccttggaaagcggatgaccgcacctaaactggcctctggcgcacaccctgggtagcttaagatttggttttgaaagaa

SEQ ID NO: 371473 - DNA, 343 bp, Zea mays
  unsure (1)..(343): unsure at all n locations
ccacatnttcaagtattatagttaattgtttactgaaactcttggtgggtatctctgtactaacgatgatccatcttgctctctcagatgggcggttgcttggcaccccaaatgaacaggtgtggccaggtgttggcaagttgctcaattagtatgtcggtggaaaccgacaaagccactcttgtgcccaatcttgacactgatggtcactactctgtcaatagtgaatcttgcagcgtgtgaagtactcttaattttgtgcaatgaacacaactactatcctttcacagaaacgctaagatattgaggtcaatgataacataagttgcacgtttttcgtgta

SEQ ID NO: 371474 - DNA, 354 bp, Zea mays
  unsure (1)..(354): unsure at all n locations
ccgacgtccgncaccgncgncgcgggcccatccacatcggtcgccacacccccttccgcccaccaccaggccgccatctgaggcagaaggcgcccgcccgttcgcccgccaccacgccgtcgnctcgcccctctccgctgccgccccgtcgtcagctcggccccgtccgcagccgcggctccatccacatccgtcgtcacacccccgcccggcgcccgctcaccaccacgccgncatccgtccccttccgaagtagtgaagtaagcctgcgcatcctctaactctctgataaaactgggcttgggcccgctccacctcgaaagaacaagggaagggaaaggaaacagcaagcgc

SEQ ID NO: 371475 - DNA, 295 bp, Zea mays
ggctcagggaggtacatgtggaaaatgtcgacagtgtcatgcggcttaccaagaactcagggtaccatcagctgttgttaccaaactctttctttgccctgttcttatatttatatatgagtggtcatggaatctaaattttctagtttgcactgttgcccatgttcatgtgtgattgattccatctttaattatttagctgaaccttgattagtacatagctatcaaaaatcttgcaggctgctggtcttgattttccgcctcctgaggaaaattcagtcccgctgtttacacc

SEQ ID NO: 371476 - DNA, 300 bp, Zea mays
aggacaagctcaagtttgcaatgctgtcacagaggatatcgggcgtggagagcgctcgggagggagagcgccgggaagaccgtcgggagcccagacgagctcgacgagcgccgggcagagagagcagtcgagcgccggagaagacgacgcagaccggacgtggatccgttctaagaaaacggactgccgttacaacgagaagcccagtatcggtgatatcacggttccaaaaaaactccaaattggccctgaatctgccaggaagacgtatacatatagcagccgtatgtggcagggcat

SEQ ID NO: 371477 - DNA, 278 bp, Zea mays
tggctcacaccatttacaccttcctgtaacccgatcgataccggaggcggacgtggcctagggtttccgagccaggccggcgctatggtgggctgttctaggggctccctccccacctggatgaccgccgccgaccgcgggtcacccttgggccggtgtaacgcctttgcaccaaggcccatcctcttggttccccttctcgggtccctctccggccgcgggggcggaccaggagctcgggatgtacgagcgcgcgttcttcgatgtcggcgccgact

SEQ ID NO: 371478 - DNA, 149 bp, Zea mays
cggccgtcctttttttttttttatttttgtcgtagaacaatattatcaggaataacaaatgggtgtgctgctttgtaacatataggagggtgaggaatctgctatggctagattttttggacgggttaaatagggaaatttaggacacc

SEQ ID NO: 371479 - DNA, 111 bp, Zea mays
cgagtcgatggtacaaaaaacgaatatttgcaaggcgattgatgccctaataagttacagtaaacaaccgttcaacaacttctacacaaaggctgtctggcataattccct

SEQ ID NO: 371480 - DNA, 232 bp, Zea mays
ggaatcctcagagcacagcacaagaaacacatgcaactgatggtcaaatagggggtatacaaaggaacacctgttttgatgctcacgggcccctgaagcgaggagggtcctcccccaagttcaaagcacgatttgacaattttttttttgaccccattgcaacatttcacaaatttgcttttataaagcaagaggggttttcagtcggccccaaactatggaaatgttttaa

SEQ ID NO: 371481 - DNA, 253 bp, Zea mays
ggtcgacgacgtgcgcgtgttgtgtttggcggcgcgcgcacgcgctcgagccggcgccacgcgcgcgccgcgggtcgaaccactgggtggctgaaccctctgggcgcggcggagcgtgacgcagaagcgtcgccgcacggtgccatgccgtcgcactcgtagcgctccttcgacatgtcgggcagcgggtcccaggcgtcggccccggcgtcgtacgccttggcggtcttgagcgcgttcttgtgcttgtcgt

SEQ ID NO: 371482 - DNA, 108 bp, Zea mays
aagcttgttcaaacagttctttattagaacgcgagcaatgtaaacaggacttaacatccaggtgatcgataatcatagaaaaccatcaaacatttatagcatacagaa

SEQ ID NO: 371483 - DNA, 110 bp, Zea mays
aatctaaacacgtatattaaaaaacaataattggatggcaaaaagttgacccatagcttcatatataattgcacacaacatggagactgagactaaactgctaattagag

SEQ ID NO: 371484 - DNA, 513 bp, Zea mays
  unsure (1)..(513): unsure at all n locations
ctctactccggtgcccaggggggggtcnctcagatttcctgcgccgctttcgtccgcggatgantatctgcccagtctccatctcccttcccagccatggccttcctagtgcctgcccttcccctgccgcccctctccgtggacgccgtccatggagggtcgccggctgcactgcttcccatctatcccaccgccatggagctcgccggattgcgtccctgcatccatggcggctgcttggccccagctccttgccgtgcccttccagtccctctgccggccatggagctcggccctagctcggattcttgcgtcgcgcccggctgtttctccctggcgctcgaaacccagtcgcccagcccagctgcagctcgtcgtgccctcgctgctccctgctccttgttcttctcggcacgacagagagtttcctcggccgcgcgtccctactttcctgcgcgtacgtgcttgcttcctctgtcgcagaacgaaactgttttttcccgtcgcgcgcag

SEQ ID NO: 371485 - DNA, 103 bp, Zea mays
cccatcaagagactgggtgggtaaagatgcatcgacaggcttgtgctaccgagcggatcatgcgctgaaggacctccgtcatgatgagctttagaaagatcac

SEQ ID NO: 371486 - DNA, 508 bp, Zea mays
  unsure (1)..(508): unsure at all n locations
tgcattccactttgctagcgagggttnataaatcacgtagctagctttttcttcagcagctggagcagcaagagtaacagctagcgacgacgaccatatggcggcgaagcagccagtcgtcgctgctgctgcctccggccaccccaagatgggggaggagaagctgatcatccggccggagaaggtgcggttcatagacgtgctgtcgatgctgctcctgaggcgccccatcaccagctacgcattcgtggaggccggcgaccggaccgccgccgacctgggcagcacgcccggcgactggctcgtcgcgctcacgcaggtcatccaaaaggcgctcgccggcgcctactacccggctctcgtggtcggcgccgtcgtcgagttcctcctcaacttcgtcgcgctcaacaatggcatactcggcatctttctcaacctcttcagatgtaagctggtgatcccactgaaccgggaggcgcccaacttcggtccatgatcgggatgatcg

SEQ ID NO: 371487 - DNA, 171 bp, Zea mays
agcaatcaaccggcacccatttcccttgcattaaaccaaacttaaccaaatcaagctgcagggtctacgggccaaaccgaaagcacatctagaaattttgaaactccagcaggcccaccacaataaatgtggggaaaaaatgatcgatccatcgttaggtgatcgacccgg

SEQ ID NO: 371488 - DNA, 179 bp, Zea mays
aggccgatatttattgagttgcgtccgctgtagtttctaattttctagatgggctttcggtttggtctgtagaccctgcagcttgatttggttaagtttgatttgatgcaagggaaatgggtggcggctgattgctttaaaactaaaaaaaattcttgcccttacctaaaagatactcg

SEQ ID NO: 371489 - DNA, 313 bp, Zea mays
aaatcaaatagcattacaaacaatatgtattgaactaataaatcaaatagcagtacaaacaatatgcgaaagtggagctaacactttttcctagttgtacaacagtagggctttttttcttttcccgttgaccaattttctttcctaaaatggtgcacttatggaatgaatcggagaagaatcccaataaccttttcgtgattggattgtttctacatggtttagctgtcgcgatccacatcagatgcgtgtgtctcatgcgtgaggtcttctgagatcacgcgtccacacgttgcggcgcaccgacagatgc

SEQ ID NO: 371490 - DNA, 257 bp, Zea mays
aaacgcatcactagatgggaacttgctattttagcaaataaaagtgcgcaggctgacaccatggaaacaccaaaatcccccaactcatgacggttgctactccagctttaccgaaggcaaatacggaatctacttaagcatgatacatgggatctgaggcccagaggctagccaagtgctggccagaggtggtcagcctatggaccttttcaggggcccaaaccagggcttcagttctggcagggtggatgatagcg

SEQ ID NO: 371491 - DNA, 457 bp, Zea mays
  unsure (1)..(457): unsure at all n locations
tgacgcgtgggcggacgcggggggcncatacaaagatggccgcctctttctttccgcncanngttnactnagtcttaggctctcagctctaggctctagctagccgcgccactcccttggtgtagccatcagccttctcatcgccaccaatggccactgccgaggtccagaccccgaccgtcgtggcggccgaggaagcgcccgtggtggagaccccgccgccggccgttgtgcccgaggagtctgcccccgccgaggcccaagctgaggctgaggctgaggctgctgctcctgctgctcccgaggagctttcggcggccgagcagcaggcagccgccgagccggaggccgctgctcctgctggtgccgaggagcccgccgcggccgaaccggccgccgaggcggaggctgctgctcctgctggtcccgaggagactcccgcggccgagcaggaggc

SEQ ID NO: 371492 - DNA, 284 bp, Zea mays
gaagaacgtacttgctccgctagctgcatgcgtggtgagttcagttgatggtcacaatcacgtacgtactacgtactacgagctaaaaaccgtgcatgtggaagcacttgttacggcggccaccaccggctccgagtgcactctcgccgtgacgccgatggcctccgccctgtacgagtacccgcggctcagcgccacgaaggcgcccaggttggccgcagccagcacggcgaggaacgcgtagtaccagtcgaggtgcgacgcgttgaggtcgtcggtcaccc

SEQ ID NO: 371493 - DNA, 299 bp, Zea mays
gctgatatagtgaaaatgggaagacctcaagtgaggtcttctggaaagcctatggctgcagcagacacatcatatgctggtcaaaccccatctttatctagctctgtaaaccagaactcgaaacaatctgctagcacaaccctaccaactacttttgatcagggctttcctgctctcccagaccctattccacatactgagaattctagtcatggttctgctgggaacaaccatacacatgagaatgattggtttcctcaggatgagcctcaatctggagttcagtccacaggcattga

SEQ ID NO: 371494 - DNA, 348 bp, Zea mays
ttgcaagacatttttgggggggcatcctaaaggtaagccccccttcctccctctgggagggtattatgttgcttgctgctgttccacatcatcctgccttatctcagccacaagattttgtttcgacggccacggatgctactcatcaccgcgagccttcttcgcatatggtggactgttgaactcttatcttcaggtgcattctataccttcatacaaagaactgtttgggaaaaaagacaccgaggcatgcgcctccatccccgcttgctgcgctcgcgttcgtctcgctgctcgcttgaggcacaaataatgcttgggatggtgacaccacagatgatgcttatg

SEQ ID NO: 371495 - DNA, 376 bp, Zea mays
cagtgcctgtctagcttatagacataatcaagacatgattgatattcaacttctagaccttttcatggataaaagtattctgcacatctgtaagctttggcgatgaatttgcaaaatccagtccaaattcatcgctccctccccgtgtacgtcgagcacagcattgtcatctgtcagtactatctgtagatcacaccctcacaacagcgactgaaacacgaccagaatgcactccatggcatcggaacttgggaacagaacgcacggcctagtgcatggtgttaaatatattattatatgtacaatggacagaatgccaaacactctgcaactcagatacgaaaaagaagattgccataataaatggctatatttt

SEQ ID NO: 371496 - DNA, 260 bp, Zea mays
cccccaagattggttcatgctggggaaatctgcattgtctgctgctgacaaacaggcacagggtttgttaaaattaactaatcataagcagcttctgagtgtattcggacaacccaggagcctctgatagacgtgacagtttgggtgggaaattagatttgatggctgcagaggcgagaaaaactgatgtcctgggcaatagtagcttaaggcaaaacgagggtgataagaaggaacatggcttcttcctttttggctga

SEQ ID NO: 371497 - DNA, 399 bp, Zea mays
tttttttttttttttctttaaaataaattgatatcatttgtagtcacggaaactggggaacaaaagcttagcacaagataacccaactttgttccgagcagatcccatgcagatgcaggtgccttgctcagctaactcaagcttgccgcgttgttccacaacagaggggtggagcatgtccagaaaagaatgacggcacgtagaagaaaatatgctaaaagatggaaccttaaaagaatcatgccacggcctggatctggcttattattttcatctacagcaagattagactctgttagagaaatcagactggttatgatgcacagttcccaagcttcctctcattgtgatggaactcaggagtaacaagcagataggcgaaaagcgatggctgccgct

SEQ ID NO: 371498 - DNA, 384 bp, Zea mays
acttggattcctatgggggggtgttaagatgtggaaccccttgtttgtccaatgtgaatgcttagactcgagttagtgccgttcaagtatatgtgccaatgttgccgagagcggtgtgttgttgcagacctaaagcaccaaccgagtacatgcgtgcacataatcagcttgatcttccctggatgccccactagtagctctgagggcggtagatggtgtttgtttggataggtataaatgagaatagaaatgatgtaattggatggatgtattgcattgagcccctgggaagtttatatagagtacatgacttgggaggcatggcaacccatatagacatgtggcaattttacaatcacaatttctaaactaccaaatttactt

SEQ ID NO: 371499 - DNA, 240 bp, Zea mays
ggaaaaaagaagaccattaccagataaagcaaaacattaagtcttatgtttggactgcttccctagactatttttccttctggcacacaccataacaaaataaatgccgcaggggggaatagtaataacacaaaagttcaaaacttcttcctcttctggttttgagactcacccaaattcttaatatatccatcaaaagttcaaaacctctttctcttcttgttttgagactgacccccc

SEQ ID NO: 371500 - DNA, 301 bp, Zea mays
  unsure (1)..(301): unsure at all n locations
ggcttcttcgnctgagaacaagctcgaaatcaactattatcaagatagtacttaatatgaaagcaggtgataataatgacgtttcacgacaacctgaatacttggcaatctgcagcacgaatttacatcgtctagcttaacctagaggaaagcagtgttttactatctatttgtgctggatctagattctacagcatggatatttaccaactgcggcaaagagaaagctaaccagagaccgtatgaacaagagtactaggctaccacgggacgggacgctagcggaatccacagttgaggc

SEQ ID NO: 371501 - DNA, 302 bp, Zea mays
  unsure (1)..(302): unsure at all n locations
ctagcgtcccttccggggggggccctaacaatggaccctccggtccctcgccagcttggtntttggcgnagttggtaaatctccatgctgtagaatctagatccagctcaaatagatagtaaaacactgctttcctctaggttaagctagacgatgtaaattcgtgctgcagattgccaagtattcaggttgtcgtgaaacgtcattattatcacctgctttcatattaagtactatcttgataatagttgatttcgagcttgttctcagacgaagaagacgcacaaagaaagtcaaaattg

SEQ ID NO: 371502 - DNA, 534 bp, Zea mays
  unsure (1)..(534): unsure at all n locations
gttggacgcgttcccttcgggggggcactaaatatagagcccctgattccccacggccgtgctncttgagaccttgcctccccgagtgctctcggtgagctactttgtttcgatttatcaagaaatccgtttgcttcatgttgtgcaggctcatatctgattgctggattcggcaaacccgcgttggatcctgtatcggttagtccttgcctgcaaggttcttgttgttttgttttggtggtcgagcatcgcatgttctgcttctggatccagatctggagaaatcgcgaagtcgtcgtcgttcggttcggagcggatctgaggcgaccatagatggaggcggcgggatctctcggtctgcagtcctgctccacctcgatggatgatgtctctgcgctgataattattggatcaatttcgataattatctagagatctatgagatatgccgcctggaagaggcgaggtaagctgcagcatgctaaaaagagacaaaagatgtgacattctagaagaggaggccttttccatgat

SEQ ID NO: 371503 - DNA, 489 bp, Zea mays
tccattaccacccctaggtgcgtgtttcttttggttataaagccctgctcagtatcccggacagagcagattaaacaaataatcttgggacaaaatttgattcttttcccttcgaccaaccatgtacatttttttccgtaagggaggctccatttatccaaaccttgtgactaatccattcaattcacagcaccgtattattagatagtttcttcatgtttggtttcttattcttcaaattatccagcacaccactgcaagaccaaccatgtacatttgttttctgtaaggcaggcttcatccaaaccttgttctgattttaatccattcaattcacataattgttttattatgtagttatcatgtttgattccttgtatgctaaccaaattgtttgttcccactataggatatactgagacaaagtttggaccatgatattgcgccagctattgctcatttcttaaactggttcgttgggaaagttta

SEQ ID NO: 371504 - DNA, 458 bp, Zea mays
aaaacctacctggaatatgaatcaccgaacgagtgctaaaagaatacatatgtacatcattcgctgtagcgaccctagctagttacactgccaattccaaatacctccccattagccatacaagttgccatcaccacacacaaaacacaaagctatactaccactgacgtctagctcagcttcttgcaaacagcacccatggtccataaacgtgtctcgccattccggcatcctatgtgaaacagcagctgtcatcgcctagccaggatggatggatggctacgaagctcgttttgtcacgatgatgatccactgctgaagacatctccctcttcagcgtccggtgttctagtgccggccatcttcttatgcctcctcatgacgagggcgtagagaagctcgttccaggcatcggggactccaggaagacaccagtggctgcagtcctgtctgtagcg

SEQ ID NO: 371505 - DNA, 294 bp, Zea mays
ctgaaccacacggtcatgtttcgatggcttcacctcagaaactcagcacgaggtagcatgtcatgtatggatcagtctccaggaagaaacttattaccttaccacagtgtttttaagctacagcaaatctcaaaaggactttgcatattcttcacgtttggttattctgaggaactcaaagctacatgtccattgcatatccatagtttcaaaagccaaggatgagttgccacaggcagtgcgcgcctgggaatggtgtcgtgcccacttcttttcaccttatggtggaaacac

SEQ ID NO: 371506 - DNA, 415 bp, Zea mays
ttgtctccagacatccggggggtctgtatattaggactctgtcctttcaccctggccgggtcaccatgactccatcagcctgcctcctacagctctctcccatgtccccccgagctcctccctcgtggccgtctggtgcgtcgtcgggacggacctccccactctgattgtcgtcaccgtctccagcagcgacgtccgccgcgcctataggcttttccccgctgtggggctggttgcccccatggcagggcgcacctgctttcccccacgccagtcgacctcgccgcggcttggccttcagagcctcggttgtcgccccctacaggttcggcattttgtgcaaggccctgacacttgcccctatgcaacaaccaagcttgccaggtccgacgaggatcccggcgaacttcccttg

SEQ ID NO: 371507 - DNA, 295 bp, Zea mays
tcgccgtcgcccgtttcttgctcaaggagccgcctgccttctcgccgcccccgacgccgccgcaggtggcggagacgggcaaggtgggatcggccgggggcggtgctgctaggggatcagatcggaattcccggtcggcggcacgggcacagctgtcgccctcggcggaagtgcaagactccggtggctcatctcctcacaaccagtcaagttccaagcttggtactccaggtccagatttctggtcatggttacctccagtacaagatagcaagtaacaaaaggaaagcaatac

SEQ ID NO: 371508 - DNA, 444 bp, Zea mays
  unsure (1)..(444): unsure at all n locations
tttntaggctaaaagaaaaaaggtgtttcagaatatacggcaaaacttctacaggcctttctattcatatcagtctgaacattcagttcacaacagcacatgctgctgatgccagcatgatctcttcaggcttcattttcgtggtggcggcggctgcctcttcacggaccggagttgcggcgagttctcaaagcagtggtagaacccaaagtgtgggaaccgctcgtaccacgtgtcctgcggggcgtgcgtgtcccagtgctcgtcactgctgctgcgcccgtacttgtgcacccacccagacccgttgtgccgctcaccccaggtgcggttccaccgggccccatgcttgccgcccaccatgtcttcccctgcttgacgccatgcccattcacgtcgaagtgctccgtccacttgtcgccccatttagaccaccccttgccc

SEQ ID NO: 371509 - DNA, 215 bp, Zea mays
cggaacccaatccagaggaccatgcaaaaaaaccttgtttaaaaatacccggtttggatccccaaaacaccagacacggggcacacaaccaatagtttttaacagatcgaagtttccgggcccaagtccaaaaaaaacgggggcccagggggggccccattattttttttttatgggagcctgggtaacctgggcaccaggggggtccttttttt

SEQ ID NO: 371510 - DNA, 437 bp, Zea mays
  unsure (1)..(437): unsure at all n locations
cctttctcccccgnctgaaaacgcggctcacataatggggnggcggccgttctttccaccgggagnnnnnnncggcgagtctcccccctagtaacaagaaaatatggatgtacctgttgatgaccctgtggagaacctcactggaagtcctagtacccttggcaatgaggaagaagccactacttatgctaatgtgcaagatcagtccaaggaagaaccagaaaagctttacgaggaacccaaagacccaatgcaagacgagttgggtaaccaagggcatgtgagcatgaacaatgaagatgtgggaggccagaacaaagtggaccaagctacccccacagagcacggtgaggaagctggggtgaagcagcatgatgcttacagtcctgatgacaagaaatggcctgggtggcctggagagagtgtgttccgtatac

SEQ ID NO: 371511 - DNA, 526 bp, Zea mays
  unsure (1)..(526): unsure at all n locations
tcaagaccggtatctgactcattgtttttatcaggctgctcggcatcacttgcaactactgtttcctcatgtttagggctctcagtcacttcctcatgagttctcagatcctggtaacttggaggagaatccaacagctggtggtgcttttaatgttattcagatgaaaagcttggagcatcttgtttatgcaccatctgatcagtcaaacataccggatttgccaaatgaaaagaagcagtttattccttttgcatctccaccgcccgttctttctccttcggtgggaaaagccgagacagttccctcaccttctctgtctcctccagtgaagccgacagagccagaaccagaaatcctcacaaagaaaattgatgaagtgaccacacctccagtacttncctcagattatattttcacaaaacagccagaacaagtgcggacaatctctcctttgagagtggggcaaatattgacttggacgacgttttatctgctgcgcagacagctgctgaatcagctgagc

SEQ ID NO: 371512 - DNA, 263 bp, Zea mays
  unsure (1)..(263): unsure at all n locations
ccgcgggaggctgcccgcgggtggtgttcnatagtactcgacacacgccccgttttatccccacgagggcgagggggagggcgcttatcgtgacagccactgatgactgggaagcggctgctgaaccgcagaaggcccccaccgccactgccatgaaggaggagaaggacttcaacctctggctcctggcaaggacggatactgcgaccgttcctaaacacactcatggtatcaacaccgacgcttacagcgagacaaccgcc

SEQ ID NO: 371513 - DNA, 303 bp, Zea mays
tcccacgcgtccgcccacgggcgctcactaggatgcgcacctcccatttcttcccccggaggaatgcctagaggcggttctccaagaaggactcccggtggaggctctacagggaggcccatgccaggggtgctccctgggggtagtgactcctggaggttctcctggtggcatgcccggaaatgtccctatgagtgaaaccctgaatgaccatatccttaaaagtactatataaccgcccaacagatgatggcattctttacacgaagtgatgaacaatgctttacacgatgctaagaacaa

SEQ ID NO: 371514 - DNA, 231 bp, Zea mays
aattcaaagacgacataatttattattatatacactatgctaatagcagcagagacatgacaacaaacaaaaactaataaggatttacataatacggcaggcctttcttacccatatatgccatgtatgacatttgacaagtaaaaaaaatccattgatacatcttctggcatcttagcttctgcagaccagcacaactgatgccgctggtgcatcggatgcgatgaactc

SEQ ID NO: 371515 - DNA, 468 bp, Zea mays
  unsure (1)..(468): unsure at all n locations
ggacgcgngggcggacgcgtgggttgattaggtggttgcgcactgtgcatccaagtgttcttccatggcatgttgcttgtatatccaccctggccttcttttcttttgcactgataataaattacatgtactttcaatcttacctaaaacatttcgtatgctggcagagaaaatttggcaaacttctcatcaagtaatgatatttgttgaataagctggttaatgaatcggaagctcaatgttcgagcgctaaatctctttacccatttcgaactctctgattacttttgcataaatgttagtttcattaatcttactttaagctttatttgccctagttaattctgtgttagcattagtcgtggttggttatgggtgtttggcgctaagaattgaccagtttgtggaagtcatataattggtacctttatcaaaaagggtacatattgttttcgtttatgccaactt

SEQ ID NO: 371516 - DNA, 434 bp, Zea mays
ccacgcggccgctgggaggtacttttgatatagtcaggtacacagtgtttcccagcagagggacctaataagtatgccggcagcttgcatgcacgagactgtaaagcacacaaggctttctcaacactcagtctacgcaacatgtgaccgatagcagcataccatatggggttgctctagcacaacaattgcctgaatgctgtgagccaagtgtgcctctcgggcctgtgaccagcctgggtggatatgcatactggcctcagaactactacctaccatctgtgggctttcagcaggcgtactaaagtcatgggacaccccatgaatccggcgctcctgctgagcctggagctgcgatgaagtattcgacgccacaatacaagagcagtcgacctgcttggagcctaccacagccatcgtgactctttggttat

SEQ ID NO: 371517 - DNA, 99 bp, Zea mays
agttgaaattgccccttaccaaacatgtattgcagcagtacattccactgcaatatacaataggatgtctctcttccagcacctaacccaacattaaat

SEQ ID NO: 371518 - DNA, 341 bp, Zea mays
cagggagaccagtgactcccgtgagagagcagagatggcaggtgagagcttgactgagcacgcacgtaacgcaacaagctcttctcccatctccgtctatggcacgagagagagagagcgccaaacatgatgtggtcgcacgagccgagcgcggagcagaaggcggtggcctaagtgccgcctacccggcagcggagctcctgggccaatctgacgacggccttcatagccttggccaacctcctgtgcgccttcgtcagggcgaacaacttcatcgcagacccgatgcagccggcgccgaggctgagcttcgaccagcgctgagccattgggctcggcat

SEQ ID NO: 371519 - DNA, 517 bp, Zea mays
tttggcacactatttgacaattcttattcatttacagaatgttgactagctttcagaacaccttaacaaaaaagatcttttctaaatttgcctttcaatggccaaaatcccatttttatgcaaatgagaaatgaacagcctacaaactatttttgttgtgcatctccactgttttgggcttccaatcttttcttgagtatttttttactttcaattaccccctcttatagtttcatcattaaaaagtattgttttttactttcaattactccctcttataatttcatcgtgttacacaatgttgatgtcgatatagatatacacccagaccatctaaatgcgagttcttatcaaagcaaacttaggttcctttttttgatacaaagtcgtctggtttctcttaaacctatctagtattttgtttcctactaatgtcaataccgacctgcaagcctctcctacctcactcttttcgggatcactatttcacatactttaaaccacatatgaaattatg

SEQ ID NO: 371520 - DNA, 169 bp, Zea mays
  unsure (1)..(169): unsure at all n locations
cccacggnaaggncaggcggaagaatgctatagaggaacagtggtaccaggacgcgtccagggcgacagggtttgctgggaccagctcggcgacctggtgggtgggatgtcctaaggacactgattattccatgtggagaattgtacaaataaccccttgggtctggag

SEQ ID NO: 371521 - DNA, 425 bp, Zea mays
ggtgacctctcgtctcttccgaggttttttttatgcattactcgatcagaccaacacaaacccaacctgccgtcggccgatcgcgcaaaccctagcgccggcgtctacctctcggttctacaccgtgctctccagcctcgcccgtgtgcaccggagatcaggggacgtacgttgcccgcgcgcaccgtagatcaggcaatcgtcgtcgcccgccggagatcggaattctgtatttttccttccgtgctcgcggctgatactgcgatggctgccggcggtagcaggctcgcctgcgcggtggagcagtcgacgatcggcagaggcaacgtcttcgccgcgctcgagacgcttaagaagaataagaatccggcggataagggggccaagctcgtcgccagggaggaccccaagccagaggttttttt

SEQ ID NO: 371522 - DNA, 422 bp, Zea mays
ccctccgccttcgcgcgtgcgcggagtgttttcgcgatggccatccgtatcaccgtatcctattcgggctacctggcgcagaacctggccgcgtccttcggcctgcgctgcaccgccgccgcggctgcgggcgctggcgccgcgcccggtccagggtgccgcttcctccaggacgcgttatcccgccctttctgcctcttcgcctgctcccgccacgtcgacccccaccatgacgccgaggatcagaaccacccgaagcccgggcccaaggctctgtcccctgccattgcagcaagaggcgatggctactcactgttgctgccgcgatcgtgttccgcgaaagcgccgccgccggtggatgaccccccagcgtcgctggccgtggggctgctgtccgtgttcgcgtctgagatgggatcgac

SEQ ID NO: 371523 - DNA, 315 bp, Zea mays
agctatccttcgagcttctcgcgggcgacctcaccgccgacgacccggacgacatctccccgcgctccctgcccgatacatcgtccgatgggcagcgccggcgcaggaggcggtctaagcgcaagcgtgggttccggagccccccgatccaggaggcggtttcggagggggagcagcagccgcgcgtggagggcggcggcaactcggccgcggcgttcagggtcctggatctgaagtcgactgcggagacggtgtgcgagagctcggacgcggaaaggtctgcggcgagctgcgtgacctatgttggcgtggagc

SEQ ID NO: 371524 - DNA, 363 bp, Zea mays
cacaaacgcaaatgaccaaaatagcacgggaccattccgcagacacatacaaagttaaaagccatcacaatcactggacgcctatatagggcctattaaatcactatctcgctggtagtagccagccaccccccatccgttcgtttcctccacaggctagagccatggaaccaatctccagtttccgttccattccacataggatatggactagggccgatatccatgtgcctgactgtcacagcggcctgactgtcacagcggcagtaacagtttttcccctgccctaccgcctaccggcacgatactctgataggttcgagcatttttttcagaaaacgggcactaccgcactacgccaat

SEQ ID NO: 371525 - DNA, 245 bp, Zea mays
gggggcaatggccatattattaaaaaggggggagggtacaaaattgaacttgcatcttttatactcggatatgacgatgtgcatgcatagggcgtgagtaggggggggggtttgctgatgcaggggttttttagaacaggaagtaattccgggaccggggcagggggggtgctggttggcatgtaaaaacctttccatcagggggcactggggaggtttccgggtcgacctttatttttgggggg

SEQ ID NO: 371526 - DNA, 366 bp, Zea mays
gagtctaggaaaaaaaatgattatgcttgaaacgaaacaaagaatatacatggtgttttttcctgacttgcgagttcgatacatataccccagaaccgctcttgagacttgagagagccatatgtccaaactacttactagaaatattaagcagtagctacgcacagcggcaacccttgagtgcgtagtgcgtggatgagatcacctggccctcttcttcccctcatctcgagtcttctagaacgtagaggcaaggacaagaaagaaaccagtaagaggagagaacatggatcactaatgggtgcgcacgtgcttcatgcgcctcagctatgtacacgacgtaagcaaggatcgattgggtcggat

SEQ ID NO: 371527 - DNA, 187 bp, Zea mays
  unsure (1)..(187): unsure at all n locations
ctaaaanataatattttttggggggccggtggtcaatagaacaccaccagaacaatagaagctgaaggcttacaacaaaaatatgttgaatacaccttgggggccatgcaccattacttacaaaaatcttactagtaatgccatttacaccaggttgattttttataatacaataaaaaaagaaaac

SEQ ID NO: 371528 - DNA, 219 bp, Zea mays
gggggggtgcattgagttttaggggcgtttttcatataatatatactccggacatctgggcgcgtcagttgtacattaaacacgccttgaaatctgctggccagacaacgggttccggacccgggtgtttttacactactcacatcaagctacatgcaagtgcccagggcaaacgcttctaaagtatttggccatccacctgggaccatggctggaata

SEQ ID NO: 371529 - DNA, 434 bp, Zea mays
ggaaccaataacagaaaacacaattgaaaaaacaaatcatcagaacacttggcttctgctatatcggccattgttggggaactaaactatatcttaactagtaaattgtgcgtgctccgcggtctagaaaacatttgagtatgtttagtgtatagatgggtccacaaatagtggatggtagaaagatatgatagagccactgccatttaacatggaagaaaagccccatatgcatttcattccctgaaagatctcacagaaagaaataaggtcgtgaaaccataacaccacccggctgtatccttaggcttgtctgcataatgaaaaatgtagcaacaacacgcatagcccacttcacaaattgtgatatcccagcatctacacttccatcttttgaaaggataaatctcctgaccatccaatagccaaaacca

SEQ ID NO: 371530 - DNA, 396 bp, Zea mays
aacaacctctaggactctggagtaatccagtcggtttcagtccaagtcccgggaaaaagagagtacagttggatcactctcttcagggataggctaggctaacatgagttgttgacaaggagatgcatgaatgcaacaagcagagatcgagagagtggtggagatcgacatgtctcgacctgtctggagtaatcagttctttataaaacttgcagtccgtcgaaaagagctgtgtcgcacagaaattccaccgaagctttgtgtagagctcaccgctgttgacagttggacggagacgacgacgtgttgaagaagtaggcaccgataggttgtgcagggctatggacgacactgaagaaacaaggattgcgcaaccgtgggtagttcgtggaagaa

SEQ ID NO: 371531 - DNA, 231 bp, Zea mays
gggggaacattcagagctcatttgcggtttttcaaaggggatatcgttttaataaaatcaacagctgtaagctactgaacaaacgaccaaaattttgctcaaccaaagaagggcaatgcccactgctatctgggggttctccgacttttggggggacattcaaagcagtccgagcatggatgggaggccttcactccatttttatgacctatttgaaattgggggggggaa

SEQ ID NO: 371532 - DNA, 186 bp, Zea mays
cgaaaccaagttttgcgtattacgatttacaaatgaaccacggttcacatttcagcgtttatgaaaactcaaaataactttagtcgaaccggaactgtatttatgaacacttttggaacatttactgcaagcgtacaggtgaacaggagctatcaactcttcagtttattatgtactgtggggcag

SEQ ID NO: 371533 - DNA, 295 bp, Zea mays
atggggctaatttactaatttataaaaaagaatctacgaagttgaggccgggctgtttacatttccacacgggactattattggttattcggttttaaagcttttgcctgaattgacacaaaatgaacctaccacgtacactttggctaattccacacttcaaatatttttacaatagatttttggtggtttgcctagttccacagttttgacatgttacatatgccctagttggggccaacaaatttttttacaaatgaaagaattttgtacaacacctggacaagatttgggg

SEQ ID NO: 371534 - DNA, 195 bp, Zea mays
ggggaaaaccgacattacatttattaccccctgggaaaacaagcttttggggaaaagataggcccgccctacccaaaccaactggggactcactcctttataccggggggggcgggccatatataaccccctccataaaaaaggggaaaataaacgggggggcccccccccgaacaaggaccaccattcccaaac

SEQ ID NO: 371535 - DNA, 208 bp, Zea mays
gaagcttcacgaaccaactctataaacagctttccatatgaacattttctcacctatagactattataaacttaactctatatggcatgtggtggaagatcatggcagtctcaccacaaaaacagtttctccgcccacctgccaacgaggatcgtgactcatgtgactgccaaacagccaatctgtgtgggatagcttgcaggatgga

SEQ ID NO: 371536 - DNA, 271 bp, Zea mays
agaccgaagcccaaaggaatggcccttacaggagtaagccagacggttcacaggaatgaccatttgtaataaaagcaactttattccttttccatctcatttcttttcaatccctcctcttctttagatttacatgtaggtcactgtttacatataatatgggtgcagaggtataggagacaacgatgcaggaccattgtgcacggccctgcaaagctgcggcaacgtccaccatagcttttccaagacctgagcaccacaatacagtacc

SEQ ID NO: 371537 - DNA, 282 bp, Zea mays
tcctttttttttttttttctctttttttttttttttttttttttttttttttttttttttttttttttttttattcacgccaaattcacgggataaaggactggtgtttatttcagcttcatgagttccacagggaaaatttaaaactgtaaaacgcgcacctcaaacaactattagatgctctgggggaaacatgcaaattcccaaactttgcattctgagcaccatgcactttccagagattgttccattccaccatgggattcggctgctttggggaaa

SEQ ID NO: 371538 - DNA, 152 bp, Zea mays
ttctttcttttttttgctttatttgttttgtacgcttcaatagtttcaacagacagtggacgcaacgagttgcttttgatgcaagacatgccagattattatgtacacggattcttgagacgcctattttttttaagtatttacaggaggag

SEQ ID NO: 371539 - DNA, 455 bp, Zea mays
cccatcgtacgcggacgcgtggggtcggattggggtggattgttacccagatgagggatatgttcttgctaagcaggaagatgtggttgatgggatcacttcctttatggctgcatgcttgctatcacttaaaagaaccaaggacctgccttctgatcaacttcagaaagcacttaggaagatgttttcagctgaaaagaagaaaagtaaatatagaaaggcttgggatggaactaaacctcatctattatggtacttcatggggccccactgctgtttggttctacaataatcgagcattacttacggtctcaagtacaacatttcggacttcctgccgtgtgatatccaagttcctttgatattgtgtaggggatgttagaactgcttgcggctgcttttacgttcttcatcttattaaaaggttgcataaagtcggaatccatttacttaaa

SEQ ID NO: 371540 - DNA, 388 bp, Zea mays
caaaatcggatccgtctagaccatggcatggaatggtgggttttattcagcagcaagcggcggtctgggggagatcactagcctagccttcaaactcgtcgaagtcttggaactcctagagatctgctccggcagcttcatctgagcaagggttgcaccgagggcaaccttgtgtctatataaaaagcaaaggctgctgccatacatactggttattcatttttatggctgtgagctccagaatggcttttgcacttagtggcagcttgcacttgtttcttagtgttgcatccagacgacttgagaaaggaattctggactaatttttctacgcatgaatattacgcaccgggtatccaagtgacaaaaccaacccaatgcattgaaa

SEQ ID NO: 371541 - DNA, 187 bp, Zea mays
aggggttccatgacaatgtttcaacaaaagaaattggcccatgttaaaaacttcccagatcattattttacaaatgggtgatcaatcaaatagttccaaattagtccttgacctaccctattttcaggacaaatgtctgtcccgacaggagttttttttagttgcaaaaggacctaaaattacccct

SEQ ID NO: 371542 - DNA, 325 bp, Zea mays
ttcctgcccacgcgagggcgactaggggtaggggctgaggggctacaccaacgagctagccaccgtaggtcgccaagcctgctcacatccactaagaaatgcagataaagcggaccatgctaccactacactggactcgaagccgagttcacataccttacaggcccgtctgcgctatgaacgaactgactcagccgccgaagactacgaccacagtgactggaagtgctgcaaactatgagccaaacacaaatcatcacacagactcactgttaccaaggaatatttcagaatcactgcaggagaggttcaccatctcgaagct

SEQ ID NO: 371543 - DNA, 198 bp, Zea mays
cggacgtgatggcggacgcgtgggcggacgcgtgggcggacgctttttcagacgcgtgggcttatattcaccacacaacacctttttttgccgcttgccgttgaaaaggtaggcccacaggcccgcgaaaacggagtcggtaacaatggtgtagacagaggccgtggtcggggacgagctggtgtactggctactttg

SEQ ID NO: 371544 - DNA, 186 bp, Zea mays
atctactaggggatcatttattatagagaactccaacgggggccgtgtcttcgcgcaggcaatgttacacagtagttaggctgcattactagcaaccgtagcaagcatgcattatttgactggtaaaaaagctaatgcttgctttaacaacctagctcgtcagatatatacacaaaacacaccagc

SEQ ID NO: 371545 - DNA, 550 bp, Zea mays
cggaatatcccggttcttcttcactcgtccgccctcgtagatctcaaaagaatctctactgcgcctggtgggtcgttcttgcacagctgtgtgtgttctgtactggtaggtagtagatgcacatgcagccccccggcttctcgcgcctgattcctagctcgcccctccatgcgcgtgccactggcagcccgtgtgacgacctgttcgtcggacttctctaccttaagatctgttccagccttcctgctggggatgtttgagttcgcacccttaacaatcgggtatttagttggaccggatgcaaagcatgtccaaccacaacttcagcttctgcagcaacaaccttgtgcgctcctgaatggggacagggacattcatctctcgatacccccactgcccgggcaaatttccgcaacactcacatcagtatctaatatgcctgtccctttcctttttacatttactgattaggagtcatgatgccggatacaaaatttcgtctacacatcgcaatcgtattttttttttggctgtaaaaagtgcctaagag

SEQ ID NO: 371546 - DNA, 369 bp, Zea mays
gggccggttcgaattcccgtttcgtctctattcgtccgcacatcatatcagctctctcactccccatcgcgacactggggctttttttagagctctcaacggttttgctccggcgcaccatcaaggaacactactacgatctacaaacaagatgatcagttgatgcccggtgtcttcaggatcttttcaggttcgcgaggtcccattttgcttctcccccctgtcttgcagatgcgttagagagcacctctgaggctatggatcgccctcgtgctgcttacttaagattttccgtcccgtacacggggttgcatttctcatggcacttcggtgactcctgatatgctgttgcctagatctactccacct

SEQ ID NO: 371547 - DNA, 368 bp, Zea mays
ttgttgttgaccatgggagactgtgatccatcggggggtgttttttaaaaccaaacctgctaagcaacccaagaattcgccggaggtgccttttttgaagattggagagttcaccacgttcaaaacggtcattttcccacctaggctatgcttcttaggggggcttacccttgatcggtaaaaaacagatgccagatatttcccctggttctacaattcttaaaaaactggacctgcatatcaatttccttaccactgaatacaactggcatgatattgctaaatgccccaacctaagtgttcttaaggtaaggaatgtgactggtgatagaggactataaggtgtatgctcatacatgcaagaagct

SEQ ID NO: 371548 - DNA, 268 bp, Zea mays
acaaactcaattggatcattataaagaaattgtcatttagcatgtgtcaattgcagcagttaacaaagaaaaattagaacatgttaatctagggtggggtgtaagtgagcaaccaaatattgttgagacttcgtgtgaagattatatcgatgtaatgtaacggagaactatgatttgtcataaacatggacctgcatatggtgaaatctttttactgaagtaccagagccgatgtagtgcttcccttttatagttgtagttggattta

SEQ ID NO: 371549 - DNA, 356 bp, Zea mays
cacaaggcgagcacgggcggcgttttttaaagggcatgcggttttctccccgcggacccctggctcctggctggggcgccactaggtggctctgcagcgggcgggaggcgctgagctacgacgcggagatcgtgggcgcagggcccgcggggctcgccgcggcgatccggctgaagcagctctgccgcgctgctgacaccgacctctccgttatgcgttctggagaagggctccgaagtcggtgctaatgtgctgtctgggaatgtgtttgagcccccagcccttggacgagctcattaccaagtggaggcaagaggattttccaatcagaagtcctgtttcatttgaacaagtct

SEQ ID NO: 371550 - DNA, 484 bp, Zea mays
  unsure (1)..(484): unsure at all n locations
gcaacggnngaggcgnngcagggggtcttttttaaaccctggcggggtttttgacctgccccgcgtatcccacaggaagggaaggggaggaagcatcagcagcacacagctttgctctcgctctcggctccccgtccaccaaaggaggaaacgcgcagcccgcagcgctagccgtcgtctatctcgtctcctagtccaaggaaggaaagaggcgcttggcatgaagcgacctaccaagaatgagacgctgggctacccctggcacaagtagagcaagagccccagcaaccgagccacagtgaggaggactcgagggaagagatgggcaactgctgtacgcgggaggagaatgccgtcgtcgctgcgcacgcacaagttcaacagctccacttgttacataatcctgccaagaatgccattggagataggaagcacaaccgcacctcatcagatataagtgatccttccacacctaggaaagctg

SEQ ID NO: 371551 - DNA, 449 bp, Zea mays
agaaaagggagaaactacaatgtagaaaatacgacaaggttggcatttatgactaaactaactatccacattccagcatcacacttactctgaccaatgagaataaattggaattccctaaaatctagattatctatcaagactgatacatgtatctgatcaacaaattaggagggtgaaaacatgattcccttgatcattgcaacaccccgaatacaaacctggaacgcccaggcttcagtttttgtccaaaaggccagtaacaggttttccagcaacaggatggctgctggaactctgtgggtctgtttttacaacaggcacctctacttttgaatatggtacttgagaaacaccatttacctgtccaggatggccagatgtttcagatttgatttccatggcgtacctttcctctttcattcttccgtatgtcacaagtttgcgga

SEQ ID NO: 371552 - DNA, 182 bp, Zea mays
aatcatcccatgccactcgtgcggctgcctgtgcggcggtcgtgctcccacaccgctcctgattgcctaccacatgtgcgggatgcaaatgccaatgctaaagcggcactgcaaggacagaagtgcgaccaaagggtggactgggctgttatcctactatggaaggaagcgcaaatgcttct

SEQ ID NO: 371553 - DNA, 381 bp, Zea mays
cggtcgttttcgttcactcgttcttatactcgggggggtttttttataccatgtgggttttcgaaaaaactggctggctttaacaaagtgcgccttttgtggtttccaagggttagatcacactctcaaatggctcttaggggttcaccttctttggaacgaaggagggagctcctaaatgttcgttataaaaaacaacaaaccctctttttttgcaccccgcgccggacttagaacaacgaggggcatccccgggccctggaatgtgtacacatgtggccactattccgagacaggggtgttgatgaatcaagtgacaaatgaccaaccctgggccccccagggttaatggttctacggggggtactaggcggtctcggg

SEQ ID NO: 371554 - DNA, 172 bp, Zea mays
ccccaaccaactgccaaacgccaatcgaagggggttccaataaaaaaacagggaccggtaaaggggtatggatggcaccggtaaaaacaaaaaaaaaaacggggggcccccttttaagccaccgaattttttttggggttggggctaccaaaacggcctttggggttaaatc

SEQ ID NO: 371555 - DNA, 89 bp, Zea mays
  unsure (1)..(89): unsure at all n locations
gnaacaacaatgcaacacttgatagatatcagaatacaacactatctcagattcagaatagcattttggacaaaatatctaaataagcc

SEQ ID NO: 371556 - DNA, 354 bp, Zea mays
caactggaaataatcagcaccaaagcatcatgcactttcaaatgaatcatttgcctctttcagctgatacaatctcatcagcattctgtgatctaccaaaagttcctacaccagaatcacaaggaccaactcgagtggaatacgagaccaggtctgcacctccggccatccacgttgaacacgatgccaggctgcacggcagcagccttccccagatgcaagttcagaaatccctccacctgaaacagttgcggtttttcctcagtgcctctacgcaagctcacgccccatccaaggtcaccttccggcgtatctgacagtgtgagggcccatctcagcaaacgtgagcttgac

SEQ ID NO: 371557 - DNA, 345 bp, Zea mays
aaaaatgtaaaatcagtaaccacctgaattgctcaaaacaattagttcatgaatacaacacagttaacaacagcttttaacataatgttacttagaccacagtttccctttactcatcttgttatacaatcggccttgctacgctacagggaataacctgacggcgtcccaagagaccctgatgatgccaccattcctcgcctccgcctcctggaacgtccacccaaatgcctccgaagggtggggggagctccctccacttctcggtcctgagctcagtgacatcaaccacgcaaacgcagctctccgttgggctctttcctggctcttggaagatcttgcccc

SEQ ID NO: 371558 - DNA, 108 bp, Zea mays
  unsure (1)..(108): unsure at all n locations
gcacaaaattataggcagagggcccattgagtatttntctttttgacacnagacttacacggacaaaggctttggtnnactccacaagnaaaacccctcttctctttt

SEQ ID NO: 371559 - DNA, 270 bp, Zea mays
gccgaattcagctgttggcgaacagtaaggaaagctggcagttatagctactaaccatgtgtatacagttgaccaattacaaaaatattctttgcgcaatacaagccactgagttgtacaatttaccaaacatatgtctactggggctatacttgctaaatgtgactaatcaaacacaacataatggcttggaagagccgggctatgtacaaaaaattgggccaaatagccaacaagttcaaggacctagaaatacattttcaaagtccg

SEQ ID NO: 371560 - DNA, 408 bp, Zea mays
tccgtcaccaccaccgcacccgcgccgccagctcctgacgacggcccgcgcgccgcggcggcgtcacccttcttccaggcgaagcactgcactgcggccccgtcctcgtcttcgtcgttccccggcgtgcgccggcgcggggcggcggcggaggagtccatctcgtcgcaggcgcagacgcggcagccaccggccgcgccgaggggcagccggaggcagctcctcctcctgcggaggcggcggcggccatcgcgctcggtcggcttccagtcggggagcacatcgtccgctggctcggcgcggagcagggaggccaggctattgctgccagatctctgtagagctctcggcatgggagcagcaaggcgagttcaagcgctaggtggagaagaagtggtgcgcggagga

SEQ ID NO: 371561 - DNA, 402 bp, Zea mays
gacactcaagtataaatgtaaaggtagcaacgtatgtgtacttgctagtataactactacatctgttccttttccttccgtcggtgctctactctacaaagcgaaccacaagaaacacgacaacatttttacaatgtaggtccttgacttttatctgcttttaaaattcctctatctatacgtacacgacagtaatttacagccacaagcaagcctttcaccgagacttctaacaaagtgtaattaaaaaaaaacgcaaatcctttcaccaacgatggatcaccaaccagggttggagtctagtcgaggccgaagtagtcggtcatggagagcaggtcgcagaagccggccgcctgcatgtgatcgatggcatcgaagtgctcctggaactcccaacagccg

SEQ ID NO: 371562 - DNA, 412 bp, Zea mays
ggatactctactattcgtctcaatacacatgcaaccccttctacacatggattgagcgcgcgccccacgtacacggtattggtgtcagggggagggggccggtgtatggttggagtccggctgaaggcactctgctcgcgcacacatgggtgacacaactgcacacccaacccagagatgaatggcgaaatactatgacggtttattgaggtccgctgtcccctgcagcgatcggactactacactacagactacagacactgatagcgggtttaccattggaaaaatacagcggtaaacgagagacgaatccagtcatttgtttgttacagactgttgttgccggtcctgtgttcgaagttagagggagttgaatgaatgtaatgcggccttggacacccttcatgtgtgc

SEQ ID NO: 371563 - DNA, 313 bp, Zea mays
caatacaagggtttttattagcttttttgtaccccaacgtgcttgggacaaaaaggctttgttgttgttgttgttgtagttcgtaaactcgaacaagcttcaaacagagagtggaaaaaaatagatttgtggtgttaagcagggcctggtttaaaaacatgcgataacttggggggggatggatgtccagtccctgcgtagtaattagaaactaacagcaacagcacccatttttgcgttttcctcctacacgttaacaccaaaacaaaacaaaaatttaggttgcaaaacttaaaaagccattcaagaccat

SEQ ID NO: 371564 - DNA, 185 bp, Zea mays
caaagacaggagtgtaaagcaattaaggggacactccggtacaggcacagtaagttcttcccggtggctgcagccctgaaaaaggccgacacgaggtgccgcttgcatttatagcagcataatatactttttgattagtcatatgctttttggttggcagggggggatcttgatcggtaagcagg

SEQ ID NO: 371565 - DNA, 142 bp, Zea mays
caccacgcgcttttgtcagaactcgatacacgaacacaaagtgggtggttttaccaatgtgggcgatagccaccacggacctattcaacacggtcgtaaccagactccttcacctgccggaggtgctggaccgcctcgcctc

SEQ ID NO: 371566 - DNA, 390 bp, Zea mays
tgcggtcgcccttttttttttttttttttttggcacattcaactaggatatgcattgctcagcataactttgttaaggagtagacatatgtttacactcttgtttcatgcaacaacccagtaatgcttggtgcaccataccactgacaccgggccccaccagcattacaggctgaatcgcactctattgaggccacgtctcttgcagcccgcaccgaacaagtccacgcgacagtcactggtagctacgtaccgggctacgtacgacacacacacacagagagagacgccagtaaccggagcgtactgaacagcaaaatcccgtgtcatactgccatgtacgcgcgcgagcgactaccccgccacgcgcgcacgccgatcccctgggccc

SEQ ID NO: 371567 - DNA, 428 bp, Zea mays
tgcttttgcaatggaaaataggggaaaacgggggggctttcttgtaaaaaatggtgaatacatacaccttctcacaaaagcttctgtttttgttgattatttcttcaggttggcatttcgagtgctgagacatcggcttcattgaatcctaaagcacggttgagccatggctggctcccttgctgcctcagtcttcttccctggcccaggggcgtctccagcagcatccgcgaagaacttggctggtgaagtaccggatagtttgagcgtccgtggtattgtcgcaaagcctaatgccaattcttggaacatgcatgtgaaggctcaagcacaaaccctttccaaggttaatggcaccaaggttaacctcaagaatgcaagctcagacacagaggaggcgataccctacactgctcccaagacatttt

SEQ ID NO: 371568 - DNA, 274 bp, Zea mays
attctgataattggtaattgatatcctcttagcctatacaattgtccttttatagctgcagaaacccacttgtcccctgccaatggccccacatggcagccactcctaacattccccaccgcttgaaatgcggcttgccctcaagccgctgaccataatcgccaagttgtcggaggccatgtacagtccaagcactcaaactccttaggtggaggccactgttgcttgaatcctacactatgagcaagtcctgctaagtcatgaaccaggggct

SEQ ID NO: 371569 - DNA, 316 bp, Zea mays
gcctgctggtaccgccgcggcattcccggggggtcgcacgcgtccttgttatacaggacatgggaagagacggggcacagactaggcgccggagccggaagagatcccgagtcgcctacgcctcctcgtaggcttccgattacttggactccgcatcctgtccgagcagtagccctgagcgacggatccgcagcagtaagcggaatagatcatcctgatcgcaccgccacagccgcaagaaaagcgaccggccgcggagatcccgcgacgaggaccgccggcggtggtgaagaccgggcccggagagaaagcggca

SEQ ID NO: 371570 - DNA, 407 bp, Zea mays
ggaggtccggtccggatttcccttttgacccacgctcctttgacgcgtgggctattttgagcctgggagggtttttttaggcacgaatgcaatagccgtccatgtatcgtgtggcttcaatcatactggtgcaatttacgagtgctccgaggactttgactgacgtgccacctgcagacagcagatccgcatgtcttggagacttaggttagttatcaaattatactcgctagaagtgcatataaacagcagaaataagctctgatgttggacctgcatttatgtgaagagaaatatagaacaagtgatatacacccctgagagggggatgtaaattaaacagaataagggatgaactggatgcattttgtgatgcatcagagttacttgccagtgtatagcattcc

SEQ ID NO: 371571 - DNA, 540 bp, Zea mays
tgtttttgcaagagctgatgctgttcgtcagcttgaacttattatgcatgcacagtcacaaacaaggaggaggcaagcagatcatttgctggagttaaactccaccagcagtcaactaagagaagtctgctttgaactttcacactgtcttgttaatacattcagtaaggatgtggaccttatctgctatgtggtgaacttcatgaggtcttctggtaaattgatggatgacacaaatacgatggacataccgattgcctctaaacatgttttgtccaaccgcacaaacaacaagaaggctcatattccaaatgctcctttggaaattaagacggatgatacggatgacagtcagtttttgcatcatcttgctattgcatgccatgctttatctgattgtgttaaggactgtaatgatctcaaaagaaacattgatgagcatgacttttcagttgaacagatagcaaccgagctatttgatgttatgtccaccttaaagaataagttcacttctcagcataatgaagtggaatctttgag

SEQ ID NO: 371572 - DNA, 136 bp, Zea mays
accactgggatcgcgtcgggtgtccggcaccagcagcagcagttggactcggggaagccccgcggaggaccgagttgggaggacctgacctctctggatcaaccgaggcctttagacaggggaaaagggccgacct

SEQ ID NO: 371573 - DNA, 475 bp, Zea mays
ctgcaggttccgctgcattcctggttttgctccaccacgctttcttctaccccaccgcacgggagcctgggcagccgcccggtgtcgccgggcggcgagtcccccactggtccatgttatttcctagacaaccaatcaccagctcaatgcagcctggctcagcaatactagcaaaccaaacatgattgcctgcattcacacaagctggccacgcttggcctggttctactccccagccacactcaaccaatcaggcccattctgaatgagccagtgctgcttctctttcccacgacacatgaataataaactcgtgaaacatgttttagtcgtccgatccatcttctggtgcatcttgactgttcatattaacaccttaccccatacttcggacttcggagtccccttaggttttggccatatctacatcacacattacaccacatgagccgtaaagtcattgaacccctctatt

SEQ ID NO: 371574 - DNA, 353 bp, Zea mays
aaacccaggaggtttgcgactcgttcaatcaacaagacaaaggtgatggtaagaatgtccagattgggctgttacaaaggggaatgaatgccttttacacaccccaaccaaccaaccggttacacaacatgttcccctgaaaaaccattagctccccttgaatgtttccttgcccagaaacccacaacacacactgatccccagttctttggtttcgaaacaactttggtctgtttcctcgatccttataccggtgggcttttgttttggccaaatccccaggttgggtgtgggtaatgcggccctcccccatgtgcctgccatacttgtggggaccaaccaaccaaccaaaa

SEQ ID NO: 371575 - DNA, 249 bp, Zea mays
ccacccctgtgcgatttgccggggtggttttttgcaagctcgagcgcgtctgcacacagccaccaccgctttcgttgctttagctctgttctcccgccaagaaggctactgggagacggtgtggtctgagttgaggcagccagccagcatgccagtggccgcgcctgtgctctttggcggttatctatggggatctgagcgatgtgcaaacccgtggcgcaagacgtggacatgtacctggcgttcgtg

SEQ ID NO: 371576 - DNA, 196 bp, Zea mays
gaaagtacggattaaagccaaatcaacaacctgacaattttagaaaaaagagtctttttaaatgcatttgcacatgtcaaactatatttatatttactgaacccgagaccaaccgcacgaacgagaaaccactagtcttctttgtcgaaagagggggccgtcagtgaagtacagttctgcaatggcagcatgcaaa

SEQ ID NO: 371577 - DNA, 284 bp, Zea mays
gcacgcgcgggtgctgttgggcagggggagcttattttggatgctcaggcacaaaccaggcagaggcaagctgattattagctggctggaaacttcaacaactgccaacagaaatatgactgactcgaaccttgacaacggcttatccatacattcatgaaggatgagggaccttatcaaatattacgtgatctgaatgaggataaacagcaaaatgatggatgacacaaataccatggtcattccgaatggaaataaacatgatgtgaccacccgcacaaaca

SEQ ID NO: 371578 - DNA, 250 bp, Zea mays
tgttgcccttgggcggccattattgacattggagtgagttcgtgcaggctcttcatgattatacagacaatcgataaagagatataacccatcctacgggcaccgtgacaaggatgggtccggggacagaaaatccctgactgcatcaatgaggtggggaggtgccatccactacaaggtggtcccttaacacacgaagatgcaggactgccgtaggctccagtgaatgctttcgagaatcactcgaagc

SEQ ID NO: 371579 - DNA, 351 bp, Zea mays
cgccccggcataatcgggtggtcccacgcgtcttccttcgcgtgcgtttgagcctgggcagactgcggttccactgactcaggccctgacgatgcattgaggcacacaaagtggaattcaacaaaaccgatggagaatagggcagcattctaagcaagcatagctctcatcaggcttcagacactgatgtgaggaataagtagctatcgcggctcatgctctccatgacatggtttacacagaggtgttccatctatggactgcaacctacatgaggtacggcggcctgagattatcatctgccgatgttagacaaacgcttgcagtcacaggggacagaccacttgggta

SEQ ID NO: 371580 - DNA, 378 bp, Zea mays
gcgtgcgcgaacgcccagcccacaggcggactttctccgccaacgcctgtgtcaacacctgctgcatcacggcctggatcatgcccttgctcggcgactcccacgtgggcggctacctgggccgctaccgagccggcaccatctactgcacggtctacggactggggtctgggatggtgacggtgccggcgatggagccggcgctcatgccctggaacatggactgcatggaggatggcgtatgccaacccgggtggcacacccggggggccgtaggaggcgttcttgtacgtgatcctgaacctgctcggcatcgaccagggcggcgacatggctttcgggctggctcacgtggacgaccagcaccacggggagcac

SEQ ID NO: 371581 - DNA, 280 bp, Zea mays
tatcacgcgtccgtctagattcatttgggaggtttcactataggtcttcacagagcctgcatggttgggggccttgttttggcaaagctgtactgatatatccctaccccaagaatcagaagcctgccaaagttttgcgactatgtacctcgtttgcgcttgtgtattgaggtgcacttgaatgatgcgaatgttatatcgaacaataaataaaatataagttaaactaaaactcaaaaaaacactataactataaatactaacttaaaaacataaatcg

SEQ ID NO: 371582 - DNA, 364 bp, Zea mays
tcctgcggacgcgtgggcggacgcgtgggcggaggcgtgggtggtgcctgacagcgcgtgcccggaaacaatcagggaagaggaaggcagagtagatgctagtgatcatcggtatttagaatctgtagtgccacggggaatcgatattcaatgtgacacccccattgtttttgagctgctaagggctctcgatcctttcagagtgttttaggttgggaatatgaccgtgcatgacaggctaggatactctatagaattggtaagcatatcgcgttgaacaacactgccttttgtttttcgttgtaacaaatgctggtactgtgaacatgctggagatacaacaatggttacctgacgttttttt

SEQ ID NO: 371583 - DNA, 582 bp, Zea mays
  unsure (1)..(582): unsure at all n locations
ccggacttactggctggaccgacgcacgcttatttccagaagcaactaggagcgatgccgtgatgctgtaccactgcgccgcggggagggctaagaggaccagcctcggaggcactgctccagctcgagaagatgcacagggtgctgtccctcaagagttgacgcgggctctgccacaccgactccacttgcggctgctcgtgacgctgaccgattgctcgcccaattgctcctcttcatggggcagccgttggattgtcttaccctggacaataagttgcttttgatctctgagctattaagaaaggctactactaatactttggaagaagcgcaagatctgacccatctggaagctaataaagatatatggtctggaggttcactccagccaattaagatgtttaagatgcatgccgagaaatcaaccgttcaagctatgccgatggttggttttgatgcgatggcaagagctaagtctacgcttgaagatttttgtaggtcgtactttatgtttcatggtttggatgttaacaagccacaagcncatttcaagtatctacctgttcttttctttacaga

SEQ ID NO: 371584 - DNA, 134 bp, Zea mays
ctttatgccatttgataataaaaaaaacccaatatcacaatctttcgtgtgtcgtcgacggtatgttttgaggggcgcacgtatcagcaccccatgacagcacagttatagacaaagttacccgagggcttgct

SEQ ID NO: 371585 - DNA, 172 bp, Zea mays
taccggtcacttaattgcttggtcgacccatgtttctttgcatctgctaaagcctgccggttggagaggtttgctagaggaggagggcagccgaacaggagcgtcgcagtggtggttaagcagcatcaacgacgactactactacgactcttagaggttttcccgttcccga

SEQ ID NO: 371586 - DNA, 393 bp, Zea mays
tcttccttcgtccgcccacgcgtccgcccacgggttggtccactcgtccgcccacgcgttcgagcgagtcgaggaacggctcgtctgcctctcccgttctccttcctctcctccccagaagatctgatccatcatcgaggactcgccgggaagaatcaaggatatatagataataaacaaacaaaggttcctccagagcccagaggagggaagtcaccggccgtcggcggggaggagatgtcggacggcgcgggctcccggacgggcgtcgctggcgcgctgggcctctcggtcacctcgtcggtggccatcgccatctgcaacaagtacctcatcagcactctaggcttttttctttgcgacgacgctgacgagctggcaccttatggtgac

SEQ ID NO: 371587 - DNA, 538 bp, Zea mays
ttacttatgtccggtatctgcatgctgtgtacgaagcaatgttcctactccatgagatctgcaagaggttcgatgcggttgatgctcaattcgaccagcacttcgccaggctgccgcagccgcaagctgaggaggtggacgaaccatactgtgacgcggtgaggccattgcctcctcttccccttgtcgaggaaccgtaccgcgacgtggtgagcccagtgctgcatcctcccgtcgtctacgagccacaccgcgactggcgcgagcagccacgcgggaacgaggccctcgacgtcgtctgtgagctgtaccgcgaccggcacgagcagacgcacgggtactaggcccccgatgcgccgtcgttctcgttaggcagcgatgacgacatcgacgtcatggaggagctccacatcccgatgagaggaggccgcccgaagatgcaagtgcatgagtccgcggccaccgttctccctgggcttcaacgacgaagacagcgatggtgacatactcactgccgaccaacactacgagcaagttc

SEQ ID NO: 371588 - DNA, 191 bp, Zea mays
catgaagatgctgaattcaattgtaatccacccattcccaggatcaaggtgtatctgtacatgatcttattgttcactgccagccgcagactttttggttacctttgtgcaagcaacaaggcaaaagatccatcaactttggcactaaaaatggtttttgatacttggagggcagtatggccttacaaggg

SEQ ID NO: 371589 - DNA, 281 bp, Zea mays
ataagttcgttccggaagagtcacggacaggggaagttacaaaagatgccgagtcgttctctaaacttggccaccgcacccgccatcatggtgtattcctcgttcccgaactttcttgaccctcccaaatggggccagatgcatatgcaataatattaaccactccagtgttctccttgaccgcggtgctggaatctaccaccaccacctgatgcctttctcgatctgtctgaagccgctgttcggaggatctgctgacacggcggcgagcgctccaacgg

SEQ ID NO: 371590 - DNA, 356 bp, Zea mays
tcgagaaaggcaggcacagccagtgataacgggcaacagtcagtctatttaccgcgtctgctgcctgctggctgctgcctcgccccgcgtgaatcaataatcattgaatccattctaccgctgctcctcctccttgctctgccgagaagccggccatgaggggccccaagaggcatcaagtgagcgccagctctgtcgccgcgcttgtgaaggggagggagagcaccaagcagaaggagaaagaagctcggaaggagaaggaggcgagggaggcccgcagggagcccgcggccaaggagaggcagatgaggcgcaaggccgggaaggagaaggagactgaaaccggcggagagggg

SEQ ID NO: 371591 - DNA, 378 bp, Zea mays
aagtccatctctattctaagcttatcttattaacatctaaaaatatcatgtcacagtaacaaactgtaccataagtaacaagttcattcaacatacatcaatatttacttgaagtttagtatttgcctctagagctgaaactgccttaggtcgatcacatgttctctgtcttcttggatccatcaccattacctttaccaccaccagctctctgacttctccatggctcctataatcttgactctcagcaaactactgttagcaaatgaaaaaaaaactaagaccatgaatggattaggagaataaaatgattattttattgctcaagagatctgatacgacccaacaatattctatataatagtgatgaacctacct

SEQ ID NO: 371592 - DNA, 475 bp, Zea mays
tgatatctgatttcagcagcctagcggtcctttgtctgtctaccagcccccttcgtaggctgacaatggccttttatttataggcgtcaaatcgtagctacggacgcgctgtgcgcacgatacaggagtggagaacgtggcttcatggcttacgtgagagagagaaaaatgtatgaatttggattagatttggcgcgcagatgcgaagacgtctcccgcgcttggcatggtcaagcttggatttgctttggcgcttggcggcaaaaccgatatacgcacagagagatctgtagcgaaaaggctgcatgcactcatgcaatgatgctatttaattattatctttattatttattatttggtcatattcaatcctttttatttcatttattttcagaaaacattctagattaccgtgtgcacgttcgtgcaccaccacacaatttttttttaatttatttgtttatatatatacata

SEQ ID NO: 371593 - DNA, 336 bp, Zea mays
tgctgctagtcggggtgccagaattcctcaacggggttttcctcctccaccgggggggcgatctccacgattggggtacctcgaagcgccgatcgctggtgagtaaaccccatgtggttttgctatactttccgccacgtataagacttattaatggggggaaattggtcgttcgaacaccgggtgtaagtttttccgattagggcgccatcgctgcaggactctgacgccggctgtctttgggcggcggaagaagatgaggacggaccgctggatctagaagcgccggtcgggattagaacccagagtaccggttcgggcagttacacaaatcca

SEQ ID NO: 371594 - DNA, 172 bp, Zea mays
  unsure (1)..(172): unsure at all n locations
tccttttttttttttttttttttttnnttttnnagagcttaattcgaattgcgcttttggcacatacacataccccgttttccgataaacaaacagcccacacctcttttttcggaagggggcaaggcttggaacccttttacaaaaaacattgcttccgttctgccccaat

SEQ ID NO: 371595 - DNA, 270 bp, Zea mays
  unsure (1)..(270): unsure at all n locations
ccacccacgccatggactctctcctnggagctactttaataccgacggggactctaaccaggccccacctgctcctcctcctgctcattcccccgccatcgccacttcctccggtggcagcacatgcggttttttctcctcgctcccgcaacccaagttcctccccgcaccgctcttcttctgcctcccggcgcccaaatccacccccacgccgctcttctcctctctcttgggagcccaaatccttccccacacctaaccccaactttc

SEQ ID NO: 371596 - DNA, 300 bp, Zea mays
tccgaccacgcgtccgcccacgcgtgggcctattcgtacgcccacgcgttcggtattccgatacaccacagaaaattgagtaatacataatggagggtagtcgaagaaaggtttcagaaaaaactaagtggatggaaaggtaaacttctctcagtcggcggtcgcctggtgcttattaactcgatacttagtagcttagctatgttcatgttctctttttacgaagttgcatgggaagttctaaaacgtttggaccagtttaggtctcgtttcttctgggaaggtgggggactcaaaaag

SEQ ID NO: 371597 - DNA, 376 bp, Zea mays
cctacgcgtccgcggacgcgtgggcaaggaagggagatattctaaaagttttctgagaatggatcatcccctataagagatttatgctgtgctggactgaacttccttaactgtagagattgcttcttaaagggttattcaagtcaaaatgtcctaaaaaatggaccacactgtaccatattctttaattccatctcatgtcttcttcctcagatatgggttatgtctacctatactagtacagtcctcatttggcatggtagtcactcattcatgaacacgaaataactctctaactgaaagcacatggtcacacgtggctgcatcactgaaataactttctaactgtttagcacatgccccaagtctaggctct

SEQ ID NO: 371598 - DNA, 347 bp, Zea mays
cgtaggttgtgacactcgacgaggcgggctagtgtaactagctgaacacgggcgacgacggggagccaaggacgtgggcgacgacaacgcgttgtcggtagcgaggggatgcagtggtcggaggaggttccccacggcgaggcgggctggtggagcgaaacgcgaagaggccgcgaaatgcggggaggggcgcgatgaggcggagccggtgggagagagggagatagagacgaacgactcacggcggtggtgctcgggaggccaggagggacgacgtgggagagagaagtccgagaggagagaaggtttggacctgtgcgggtggccatgtttagagagcagaaatt

SEQ ID NO: 371599 - DNA, 204 bp, Zea mays
aatagagcaaggcgacgccgccgccgaattatggggagaagcggccactactacctctgatcctgatacaaaatccaggccagagggcatgagcctccaaaagagaccactcccatggtggcttttgccttgttcgagacccgcgccaatcatgctcttgtcctattctctctgctcttcctgctggctggctttcagcacaca

SEQ ID NO: 371600 - DNA, 323 bp, Zea mays
acctaccacgcgtccgacgccacgcccgagagggcgcgttaaaatgacgccggcggcgagcacatcaggcaaacgcgccgtcgcgatagacgagccgctgctgccggagacctcggtgggtgggcggtacggcggcggggcgtcggtctcgggcgccgtgttcaacgcgtcgacgagcatcgctggcgccggcatcatgtcgatcccggcagcgatgcgggtgctcggggtggtccccgcggagctcctcatcgtcgccgttgccgcgctcgccgacgtctccgaggagctcatgctgcggttcacggggcgggggtggggcg

SEQ ID NO: 371601 - DNA, 181 bp, Zea mays
tcgtgatgtcctgcaaatcagctccggataggctggcggatgctagtcaggcatggcgcagctgccgccctgccggtaccggacaaggataaaatgcggaataaagctagagtcgacaataccttctcaaaataaaaggaacaaaataacaacctgatgacccacaaattttacacaaatc

SEQ ID NO: 371602 - DNA, 221 bp, Zea mays
tcataacgaccgcacacgcgagcgaaccaccagggggcagtttacagccagggcctctgcattccgccggctgctggtcccttcttccaccgaccaaactaaagcccgagccatggatcgcgccgaccccgcgcggggccgccttgccgagctctcctaccacctccgtggtgcatgggcccaggaggcggctgggctggagaggtatccggaatccgcgc

SEQ ID NO: 371603 - DNA, 411 bp, Zea mays
acctgactccctggggttttgctgctcttcgctgctgagcagtgattggaggggctaccgggatttttgctacttgcctccgttgatggcttatcttcttctccatcctcagttcacttgctcccagcccccttatcatcgattcaggggtcaaatacattacaagacaaacattatggggaagaacatggctaaatctacagtgagtttgcttaaccgcagtgctaattttgcatcaaggacttctcaagattccgtggatgggttaagcgatgaaagtgatggtgaaacctcaacgaaaaagaagagaaccccaagacgtggaagaaagaaagccacccgtgaaacatcgagagatgtaagaagaagaaattcgaagtcatcactgaacaaacggccgctgaagagact

SEQ ID NO: 371604 - DNA, 443 bp, Zea mays
tgtgttgatcagtgctgcttccgcttgaaaatggagaccgccatctgaaaacgcgcttggtagctggtgaaagtttgtctgtcccgtcccggtcgtgtatgcatgggacacaccattgcgtgattgcagcagcacccacgccccctccatccatccacacacacacacaaaaaaaaaaaaaacaacatccctgtcacgtacagccggagccacagtgcgttgcacgacaacaacaacagaaaaaaaaaagttgctcccatacgacgaaaagggggtccgggggcggccatgcaatattatcggttggtgttacgttctcgttgtcgcaattaattgcgttgtccgctagctgcactgacctatagcaggactgcaggagtagtctctaatctggtggaggacgtactccaggcagctatccttgtcattcatggctacagcct

SEQ ID NO: 371605 - DNA, 446 bp, Zea mays
tcgtgtaaatatatgagatacaacatatggctagaaaccattttagtctcataggagaatacgggatttaaaaaaaccaacatttcatacggggcctaaatgaagtaatggtatttcggcccataaatcccaagaacgctgggcgaaagaaaaatgaagcaggtcgaggtccagggtggaggtgcagcaggcctaaatctgatggacacaggccggttcataaaagagaggagtcctgttgggactctgggagggcctagctagtcgctggtcgacgggccgagccttttgttccaccctacggaaaacagccacgtctggacaggcgtagcgtaagtgcctgctgccatcaaccactaccgcgtacaggtccattccataagacagcctgtcgtcgagttcatcggagacaggcaggcctaaaaggctagtcagggcctgggact

SEQ ID NO: 371606 - DNA, 282 bp, Zea mays
tcgtccagtcgttcgaccactcactcggatacggggcacatgtccaacctagtgctgaagatgccacagctgacccatactatgaaggccgttttaaactggaacgtgggcctttagcacatccaattgtccaggcaagactcagaattcgagggaatgacactaacaaatgctgacaccagacaaatgatatatagggagatctaggactaccacccgcagaggctttaggagttcataccttggggatatcatatacacttgctataccctacagcggta

SEQ ID NO: 371607 - DNA, 213 bp, Zea mays
tcttttcctcgcactatacgagcatctaaagggagagcccattttgacgtggccggcttccatgaagaactgctcgtgaaggacctagactggctccatagatctgctgaccctctgaatggttcctatatactcgtctgctaccatggtagctggaacataaggtggctgacattgcattctcacacgtcagatggcataagtgtacacgaa

SEQ ID NO: 371608 - DNA, 336 bp, Zea mays
cctactcgtccgggatatcccagtggctatgacagggaatactcaaagtgaacgtctttgtattggctgtagcatgccagtttatccatctctgcctaagggagatctattttccttctatgaaacttgccaaagctacagttggatgatagcagatgagaaggttgtgacattccaatcagctaaatcctggcgatacagacttgaccaaggactatattcagatggaaaaaagagtccatggttttccaatggcagcagcaaattttttatcagtcatatgcttggaaggtctgctggcaaaaccaaaatttccatttcaggtgttttgtgatt

SEQ ID NO: 371609 - DNA, 327 bp, Zea mays
  unsure (1)..(327): unsure at all n locations
tccacgcgtccgcccacgcgtccggacgtccagaccattctcctctccgaatgcaataattcctccgccgcaccacgcttcctcctcctctgctccgcctcttcatccagcgagcgtcctccgattgctgacggatccctcctcgccgccgccgcgggccgaccgtggggagaggaggggaggcgggaggtcnggaaggcttcccatcacggccaggccttcgccattggcttcacggccgatacttgtatggttggggcacgatcgttcttagagcactttgtcgaggattccgaaaccagcgtaactacggtccccagcccgggg

SEQ ID NO: 371610 - DNA, 331 bp, Zea mays
gtggtacccacgggcgcctggactgggcggggggacagttataagaacacaacgttcttaagcggtggcgagaagggcaacaccagctaccagtgacgaagatgcgctagcaatgagcgatgatcacgacaaaagcctcttgaaggcccacacgccaaagggaacacgcaagaagaggggcggagagggcacggagtcagagcctgaggagatggagagcccgcgcagccccgaggcggagatcggccaccgcttggaggacctcaggaggaggttgaagaggcaaaagctggcatcgccggccttcgggcactgaatcgacgctttaaca

SEQ ID NO: 371611 - DNA, 372 bp, Zea mays
ggaccgggccggaaaccccggggcgtcccacacccgccgtgacacccaccaaaaggccaaggcaaccgggggaattataaaccaaagagggggtcccaagcaagcaccgagcagaccaaggagcaggacaaccgaaccggcaagggagccgggaccgcttggcacaaagagaaaccaagagcccagcctaggtgccatggaggcaccaccaggcgccaagccaggtgaccgaccccaaaagcgccagcagcagggggaaccacaccgggacggcgcaggaaccaagaccaaaaggccgaaagacggagacagagccacaacacccaggcaaagaaaccggtcccgggacacagcaacaacccgcaccccatg

SEQ ID NO: 371612 - DNA, 426 bp, Zea mays
  unsure (1)..(426): unsure at all n locations
tctcacgcgtccgaataatctcaacgaaggggacgatgttacggccaaagcagctatcgcaagcaagcaaccatgcatgcctggagcaggaatcacgaacctggatctcatactctcccagatgagcacaatgagaaaccagattcccagaggcggggcaattcaggcaccaataggcgccaagccaagcgatagatggctcaagcgcctgcagctggccgtaccacaccctgacgctcctggatccaagaccaagaggccaaaagtctgagacagtgctccgccacccaggcaaataaaccggtcctgagacgtggtactccgtcgcaacccatgaaaacaggaggagcagagctcgaatggaggggnggaaagcgcatggcaagagcccgcccgattccagagaggagcgtcagtcgctggata

SEQ ID NO: 371613 - DNA, 413 bp, Zea mays
tttcaatcctcctatctgctgcacgtacgagctaccccgggcagctgtcgagggccacgcttcccacgcccgatcgatggccagtggcggcggcaacgcggcggcggacgccaagcacgtcgatgcggaggtcgtcatcgtgggcggcggcatcgcggggctggcggcggcgctggcgctccggcgggcgggcgcggcgcgccgcgtgctggtgctggagcgccacgcggggcatcgtgccaccggcgccgcgctcaccatcttccccaacggctggttcgcgctgcgcgcgctcggcgtcgcgcacaagctcgcctcccgctacgacgcctacgaaacatccagggtgaccaatctcgagaccggggcgacgcaggtgtttcgctttgccggcaacaagaacaagggcgaag

SEQ ID NO: 371614 - DNA, 339 bp, Zea mays
acgcgaccgcccacgggggccttttagaagactatgggcgtctcgaaccgaggtcagcagatgaaccctttcgcccgctgactacgagtacgcgcaggtgccaggctgagcgcaagggccacggacaggaagcgctcgtcagacgaggtactgggcgacatcaggccgcagagcagcggatgcaataccactccctgtcgctcgctaaccaggccagtatggaagtggacattgtcgcaaatggaggaagccatccccacttgtcactgagagagaatccatcaattcacatccacgagaagaaaacagtgcaatttaccggaatttcaaagatattct

SEQ ID NO: 371615 - DNA, 360 bp, Zea mays
aattgtaacgcgaccacccacgggaccagacgggagaacatgaaaggaacaacggggcacacaccccagagggaaccaaaaggcagagtgcacgggaaaccgccgccgcagaaccggagcgccgatgcaaagaacgcaaccaagaccgggccacacaccaaccagaagccggagaacggacacacccacgacagcgagaaccaccacaccaaaggcaacaccgaccggaagacggggaggcctcgcggcaagcgaaacaaaaccaccaccaccgagaacaccacgcacgacgctagccagaacatgaaccgaaaagagctcgacggcccgaaccacaccgaaaaccaagcccacacccaa

SEQ ID NO: 371616 - DNA, 308 bp, Zea mays
agctaataatcagttcataatagctccacaacatgttcattacagctgattaataggtctaaaatagattcgaaacagtctgaggtagttgctattacaatacacacacaaatatgtgtatataatggtgctaaacattcagctatgagcagcaccatccatctccttaagccttattgatcagcttagaagacgtgcaaaagaatcaggcatcaccaccgtcataaacatcacctggccactgagcaaaataacaggcaaccacctaaggaattcacaccaaaacagccagtcaacaacaccaccct

SEQ ID NO: 371617 - DNA, 286 bp, Zea mays
aagaggcaaaccataagcaactttttagggggtacattttacattggaaacatccaaaccggcggttttgtcgaacaaacaaaccaaagaaaaaaagggggcaaccccttaccaaacctttacaggcccaacaaagatcattaaattgccaaaagaaaagaaacaaccgcaatcccccccgaaggacacgtggtcaaaacaaaagaaaagaaaccccttgccggggatgttagacacaaaggagtttattcctgggaccacaaaatgttggcaaaaaaggcttttc

SEQ ID NO: 371618 - DNA, 483 bp, Zea mays
aattatatagtaaacatcatatatttggatagagtataaacatgaacggtactagcaaacacacacatatttcaaaactgaagatatgttcttatggacacttgaaacccaagaacgccctatatatctgatatgtactgactacttcactattaatgtatatatctgtacactgtactaaaaggagcaatagacaaaagccgatagagccgtaccgctgccggtgccgcaaatgatgtgcagccattagctgctaacttgctaagctctgcttccgaacatcaggtatccaagaagtgaagataacaagaagacaagcagcacaaacgcagagaagccccgaggagacgcctttgttttccggaggagatcctgaaaaagagcagcttcgactgttagtgatcagaaatcaaagagaatctaactgtggaaaaaatctagctctagagagaatctgaatatcatgaaaattacgtgtgaaga

SEQ ID NO: 371619 - DNA, 426 bp, Zea mays
ataaaatcccctccaatcctcctcaaacctcttgaaacctaacaagccctaaatatcatttgcctttgcgttccctcagattcataaatatggatcttgtgctgatcacctgctgcatagcatataatcttaaaagaacggatttaacttcggtgttcatggaaatattgtgctctaaaaattcgcagtagttctttcttctttttgatgctattgattacactgaatagtttagttttcatgaacttttatcataatacctgcacccctcctcgctcaaccagaaaacacacacacacacaaaagaggacagaaaaaacttatcataagatgacaacatgctcctggataactgtaatgtgaacacctttctcttacatgttattgtatcagaatgacatttgacagttgacagatttgattcct

SEQ ID NO: 371620 - DNA, 296 bp, Zea mays
gcacagcctacgggggctgatgtggcgatactgatagatgatgaagaggcaggaggagattgagaagaacaagcttggctcgcagaggaagaagagggatgctgtgaagcaagcagcccacgctgtggtccgagcacatatggaagctgcgaagaacctgtacaatgaggagaagaatgccaagatgaaatttggtgcaactgacactgatgagccctcagaatcggatgccaagtctgactaagccagtgaagcctctattgaacaagaattggccctagcttgcaccactctta

SEQ ID NO: 371621 - DNA, 401 bp, Zea mays
gattactaaaagaaagaaatcaatctttgactttgaattccaacatatattggtttgttggaacacggtttgtgtgatgaacgtataaaaataatagcatacatgttttctaaattctgatgtgatctttcagttctattacatgcaaagtctgaagattcatctagcaaactaaaatctctccatcacctcttccctacaacatagctgggtgttacgccaacggctagcatgcatgcgagtaatcattttttcacacacttcaagcactctgatccttgcttccagcacctgttccctacaacatatttcaataatttgtcaattactatatcaacaggtctataaactcccaacagaaaatacaaactgaaagtttaataaaaatattatatagagct

SEQ ID NO: 371622 - DNA, 186 bp, Zea mays
aattcccagttctacagttttatttgaggctaaaaaggctggatcataagggccttacgtgacattttgcataaaaaattaacagcgggaatcacccaagttattttccttgtttgcacatgacaaccattttgtttagtagctaagtaccccacacccctaaaatttacatgctaaacttttttt

SEQ ID NO: 371623 - DNA, 371 bp, Zea mays
atgctgcctgaattgactgctgctgctgtcacaatgtgacaaaacatagtcggcaaatcattacagaaacctctgcatggtagtgaaattctataattcagtatctgacagattagacagaaattggttgtgtgtgtgtgtgtgtttttccgccacaaagtttactgggccttaattaaaagggaataagcagttcgacgaataatacaaggctcacgataccccccctgaagtgattgctgctgacacacagatgtccggttcagcgacaaaaaagggagatgtccccatcctttgaggcatatgggatcggtgacagatcaggtggataggtatccaatcaatcgttctgtcgagatcaaaatgctggc

SEQ ID NO: 371624 - DNA, 433 bp, Zea mays
  unsure (1)..(433): unsure at all n locations
ttctttcacgcgtccgtggagttgcaagtatctaattatgccattgtttttatttgtaaacatcggtgaactgctgccctggagtttcaagcagtctacaaatcattggcgtgggaaacctgcatggcagtacctttgcttaccaaccaactacagcatttatgttcaacactgaggagcctgttgtctggaactcaggattaacaagaggatcgcagatcataaaatcaagatcgctggagtacatatactgtagagttcatataggttgatggcggaagngaagttatccaatttcagttatttatctcgtttgaggctttattgttggagttcaacttttatatgatgacctaaatcatttaaaacatcatcatttttaatttatagggcatttttataaggcaccttgttttttctcgaaaacgcgcag

SEQ ID NO: 371625 - DNA, 415 bp, Zea mays
tccacgcgtccgtggtcaagtaatagatatttatattccatctaacagtgaaaaagcttttgtccagttctcgagaagggaagaagctgaagctgccctaaaagctccagatgctgttatgggaaaccgctttataaagctatggtgggccaacagagatagagttcttgatgtgggagagggcagaatctctcaaaagccttcccagttgtctactacgccggctaattcttaccccaacagagtcaaggaaaatgttcaaccaacagctccagggcccagctctggatcttctgctgaactgttgagttctggtacaccaagttctagaatgctgccagcaagtagtgcgaaagcagtaccaccccatgctccaaaaaggcaagaaagcctagaactattggaagaactacgt

SEQ ID NO: 371626 - DNA, 225 bp, Zea mays
acagcaactatttttattgtacggccaaaaacaaagcttaaaaacgaaccccaataaaaagaaaacagcgcgatattttgtccccagcccgccgccgccaccttcgccgggatgatggctccaccattcacgcgttaccataccgtcgtcaaaaaccccaccagcgcgagcgcaagtagcgcgggcgcggacacgccggccgcgggcacggcggcgttgggggac

SEQ ID NO: 371627 - DNA, 344 bp, Zea mays
tttgttaacctgctaacacgtggagggctcgccgtcaaggggaagcaacatggaagtaaactcgaaagaagcaagatattagagatgtctccaacaacaaagggttcatttatgtttttaaggtttgaagctcctgacttgcttccagaagattagtacaagctctgcggttttgatccctagttgtagttagtaatcttggctgtagttggtaaatttgtgtttggaaattaatcctggtgtctgtccatgtaaaaacatagtcgggtcttattactttccattcctcgctctgacagaatgacttgctagactgtcctatgctattagttttcatacttgta

SEQ ID NO: 371628 - DNA, 355 bp, Zea mays
tcttgcaggcaggcccactggccgtgcccccgagggtttcttactcggatcggcggggttctgccgactgcctacgtcgactcgaatataataggggtgcgccgctcccgcttaggggctgggcgcacagcgcgggatggcgagcggatgcctcaactgggagccaagcacggggcctcaggcgaaccgggggtactacctccggctgggctgctcctgccgcgacccatgcagcaccgacaagctctgcactctacggtatgaatggaagccagcatcaatcgacaagactcaagctgggtctctgctgagtaccaaagataagccggagtactgtgggatcctataataatca

SEQ ID NO: 371629 - DNA, 407 bp, Zea mays
ctccgtaaagcaacaggccagccggccgtagctggggagcgttagccggagccggagccggagccgggagctaaggggggccgtgatgtcgtcgtcgccgacggccgcgccggcgccgaccacgccatcggctccgccggccaacgcgacaaatccgccgcccgcgaccccgtccgcgccgccaccggcggcgcccacgcctcccacgcccaccccgtccacgccgtccccgccgagcccagccgcgccgccgacgtcacccccctccgacccggtccccgcgccggcctgcaccccggtgactgcctatgcgccctcgccctcctccgcttgctccccgggcacgcccggcaccccgtcgactccatcggacacccccgtcggcgccatcgtccggtggagggggc

SEQ ID NO: 371630 - DNA, 427 bp, Zea mays
tgtcatcgcgtccgcccacgcgtccgcccacgcgtgcgcccacgcgtccgtaatcaaataatcatactcttactatgatttaagtagaagttgctggtttccatttcccaagattatacaacatgcttatttgcttgtagcatattcttactatgatggaaattaatcctactcttcatttccgtgatcccgataaagcaaattttggattatggtcccctatccataagcatatatcccttgatccctagaacctgtaatagttgaaatacactggcatgtaggaatagtttgctttactgttatttcatggcaacgagcttataatgccatcgaatatgccacaactggatgagcaagtgattgctgctttaaagatcaatttgttaggctgaactatagctatgaaaagtcacttgcatataag

SEQ ID NO: 371631 - DNA, 458 bp, Zea mays
atgaaaccacaagactatatatcagaattaggggtcatatgctatcactattcactaatatgctgctgccgccacgccacgccaccagtcccccaccccccaaaaatacgacatactaccctcatcagagccagacatctcctgcttccaaggatgccgctgctgctaaaagggggcgacgatatcgtgccgctctactgttgcctatccaacccatgcacatctacgttgcacagaccagcccagcccaaaaaaaaaaactactactctctacgctatgctactcctcgtcatcagataggcacaccacctctctgctggcgccggagccgcatccctgggcagcggatgtgccggggggtcctccagccaggtcagaacatccctgtcccaaggggtacgtgccttggtgtccacgaatcaggccaaccctgagcgtcgcctcccactcgagcaac

SEQ ID NO: 371632 - DNA, 421 bp, Zea mays
gctcccacgcgtccgctctccccatctccatgagagattctactgcgcggagcgggtacaaagcttgctcctttcattgtcatcggaatcacctctgtacattcttccgtctattttggttgggcgggagagggcaaccgcctggccttgccgccggccatggtgaaactgaaggagtttttcctgcttggtcccgcagaggcagcaagggaggaccagcggctgctgaaggatcttctcgcttcttcgtcatataaggaaggagaggatgaagagagtacacagacacagtccgatgaatctactaggggggattgtgataacggcgggtccgtagccgccttatcgagtgaagatgtcaatgataggcatggtagtgacagcaacagacaatgtgctcaatctgatggtgcttgctgtc

SEQ ID NO: 371633 - DNA, 411 bp, Zea mays
aaaactaaagtgcacaagcacataaattaaattgaactacaatatgtccgcaaacatcaaataataccagagtaattacaacacacacattcaaaactagacataaaaacttaacagtgtatcaaagcattattacaacaccacacacacaagctacttcttattaatatgattccattggaaccttatccaatagaggcgtccctctttacttgtcagttgaagaaaaaacttcctatttatatcgtttttgcaaagaatatttgccatgcagtacaaatcagagtcttcttcaagtctatcttcctttaagagtcgcacaacttcggcaacttcttgtccacgactaagagttctctggtttctgatgctaatgaactcagaaatattagcaacgtgatcttccaaact

SEQ ID NO: 371634 - DNA, 249 bp, Zea mays
ggcacctaataacttaaaaatctcatttaaaaaacatatgttggcccaaccctttcctccaaatttgattccagggaaacccaacattaaattttttttaaaaaaatttgggccacagggggccccgggctattttttaagaccataggtaaggtttgaaggcttctactaaggcaaataaagccactggatttagaatcctggggaatagggaacggattgaatttttttttccatttttttttcctt

SEQ ID NO: 371635 - DNA, 240 bp, Zea mays
cgttctttttttttttttttttagctcccaatgcattggacatttcaacacaaaagatacaaccactactttaaaaatgtgccctttacagatgacatacccaagcgtggaccattgccacaggagcaaaaacatcagaaaagaaaagaaaaattaaacagacaccgccagattaacaggatatgcttgctactgggtttttgcagggggtaagatatacatcacaaggccagtacgttc

SEQ ID NO: 371636 - DNA, 200 bp, Zea mays
aattctattatgaatcgtttcgacccaccaatccggcacaaacaaacaagaccttaggctgccatgtccagctagaagcaggcaaggagctggtggccaaatagcccctcctggaccatcaagagcttacagcgtgaacacctgacacaccatggatagctcatagctgagtagtacaacagcgggaagtttttacatat

SEQ ID NO: 371637 - DNA, 159 bp, Zea mays
acgccctggcaacaaaagaacaaaataattattggaaggaaaggtttagcttaagctaaattttaacctatgatgctttgttttctaaggcttacatgaaaaaaaaaagtattagccggatttttagtaattttgtaacagcttcatgatgttttggaa

SEQ ID NO: 371638 - DNA, 475 bp, Zea mays
caatcgtacaattcaacaagcaaccaaatatttaggccgcttcttcaaaataatttaagacttctgaggttatagcattccataggagacgaatttcatatccctgtcaagttacggaggaatgtgctaggcaaaccttggagggttaacatatggtcaattgacaggcgacgttaaacccaagcagcagcaagttacacaactcggcgcagctctcctgtgatgagcgcaaacttacgatgctgtgacagaatggatgccaccatcgtgtctttcacttccaggttggtgagatcgtcagtatctttcaccttcaggttggtgaggatcgtcaaggaaagacatgttctccttggctccactgaggacagcttgaaagatttgtagtgggtccccatggctgacaataagaattgcagagccatgaaactgtgtctctgcagataacagcacagctgaaaatctactagcaaca

SEQ ID NO: 371639 - DNA, 227 bp, Zea mays
aaatgggtcccttatttatattattaaactctactaaggaaatcaaccgtgtaatggacataaattatacaattttaaactataggggcagaagccataatgcccttcacagaatgctaatagcacgcccaaagaatcaaggaaggctccacctttttttggcactatgtagcacaacctctaaatctttaaccctttggtttgggcctttttttccaacatgaagg

SEQ ID NO: 371640 - DNA, 173 bp, Zea mays
ttctttttttttttttttgtttattactgccactaattatcccgcccgtcatcggacttgaagcacaagtttacatggaactcagtttcgcgctagtaaacacctaaggtccagccaagttcatcaaagaaccagcccggcttttttagtccagacccaacgacgcgtagcag

SEQ ID NO: 371641 - DNA, 221 bp, Zea mays
ggaaaacaaactagcaggcttgattgcataaattccaatatggcgcaaaatatacaccttagttcgtttatggaaaaaaaaacaggggtaacgtcaaatttaaaaggctttctggtttttttttggctaaacacactggcccatttagacaaaaaccttagggggtataaaggattatcatgccttggggcaacaaatcattttgggaaaaattgaaaatt

SEQ ID NO: 371642 - DNA, 101 bp, Zea mays
aattcaataaggctgctcgaccatcacatttgctggaagggatgcaccaaatctacccggtattgctaaccgtttggatggcgtagcacggacttgacgat

SEQ ID NO: 371643 - DNA, 195 bp, Zea mays
ttgttcttcagaccaaggcagaaactcgtgcggttgctgggactttagcctcgagaacgactccaggacccctgacataacttgctggcctgcacccagcgctaccttgggccgcggaggcgagtatgccttcggccagaacaccggcggacatgctgtggggtattctgcgacggtgaacgctggtgttgatct

SEQ ID NO: 371644 - DNA, 428 bp, Zea mays
ttcctcacgcgtccgcccacctccaccatcgtgcctcagcatcagcactcgaatgccacgagactgacctctccctcgtcgccgcagccgcgatgcccgcaccgaccgccgagccggcgctcccggcggccttcctctgcgtcccgtccccgctcctctccacgccgctccccggcgctgcactctccgcctcccccgcgccctcctcccaccatgcctccttcctcccgcgcccgcgcggcgggccccgagcgctctccgtcgccatctccgtcccgggccccactttctccgtggcgtcgcggctccatcagatgtggggcgagttcgcgcggttcgtgcggctgcacgggaaccaaatagcgccgctcgggttcgcgtccatgggcctgggtttcggcggcggtggcggggataaccgtcgcggt

SEQ ID NO: 371645 - DNA, 336 bp, Zea mays
tgactccacgcacacccacgaaccatatggggcgacattgttataatcgaatgcaattaggccaagcctaatacacaggccagcaatcttttactgggagttggcatgccacctgaagtctagtcggggttgctataagtactttgacacctacccagcctgtcatgcacagcctttaaggacaaaatattgaggctgcagaaaatatgggtcagttaactactggaatggctcctgcaactgcaaatgcagaaatgggttaatcagatgtgccttgccagaaccaaatgcgggcttctttaccccatacagatgacagattagctgatggaattg

SEQ ID NO: 371646 - DNA, 541 bp, Zea mays
  unsure (1)..(541): unsure at all n locations
atatcacatcactaattggttatctagtcatcctgatgcctttatttcgattgtggaggtcatttgtagagaaagatgaattgcagctagcttagtattgtgtttcttatatgtgccgtttttctggggactatgtgaggtacagtttgtaagtaatcattttgatttgtgatggtacagatatatcgactgtactgctaaatttcatctgtattgctgtttcgtttcaatttgcctaattttggtgcttcagacctaaactggctagttgtgttgaattttagacatatgtgatacaatcattttatttttggtgctttggacctactccctcccttccaattataagaaattttgacttttctaagtatgtaggttttactatgcgcttacatatatctagatctatagtaaaagcaatgtaactagaaaataattgactagttgtgtngaattttagacatgtgtgatgcagccattttagctacagataagttttatgacaaagagttccatattactgcatactcatcatatggta

SEQ ID NO: 371647 - DNA, 420 bp, Zea mays
ttcggacgcgtgggcggacgcgtgggctcatctaaccaagctcccgagagcagagagctgagagagggagagaaaaagtaatccgacggaaacgacaagggcgcggcgagggcggggacgggaaggccctgggcgcggaggcgccgagcacatggcatcgtcgagggtgataccgtcgtcctcgccgtcgcacacggcctcggatctcgcgcgcctagcgcaggccgccagcaggcccggcggcgggggcagcgggccgggctccatgaacgtcgaggagctcctccgcggcatctacagcgacatgcccaccccggcgccgcccgcgtcggaacccggacgcccgatgcccccggccccggcgccggtgagcgccacgcggaagacggcggaggaggtgtggtaaggagatcactggcg

SEQ ID NO: 371648 - DNA, 368 bp, Zea mays
ttcggacgcgtgggttcttccttcctcctcgtcgcattccacgtccggatctcaaattgtcccatcccgtgctcctcctccccgatcccatccctccgctccagatccgcacgccgccaccggatccgcagccagcgcggccggcatggaggagacgccgccggggcagcgcccgcagccgtcgccggagcacgcgtattctccgttcgcctctgagcccttcacaccgccgccgcgcgtattatctgcaggcctcgtcgcctgagcgggggacgcccagccccgggtggggggccggccacgcgctggcggacctcaggacgccacccgtgcctgccgtcttctcctcaggcttgcgccctgcggcc

SEQ ID NO: 371649 - DNA, 280 bp, Zea mays
gctgctggccaacgcgtcggtgtccaccttccccagcatcggcaaccaccaccgcctcctctacctccgcgtcccctaccgcatcaacgccacctccgcgccgcggcagcggacagtgtcccgtctccgcattcccttccacgacgtccccaacgacgacgccctcctcgccgccttccgcgcatccctccgcggcttcctcctcgcgcgccaccgccagcgccaccgccgaggcggcgacgacgtcgcgggcgccatggccgacctccccgccctcctc

SEQ ID NO: 371650 - DNA, 301 bp, Zea mays
ttttggtgcggtttatcattgggttcctgctaattccgtttaattggtgctcggcgttgggcgacaaggacacgtagaaagtaggtgtggctttcccgctggtggtgagcacctggcctttcacggaggcaggacaccagcgtgctgtaatgttgattaaaaccttgtatgatggcgtggagacgttgatgctgtagctgattgctgattcttctgctaggacctacaaatgtgatggtacagaggctcacatgtcagaaatccagatgagaacggagaaaccactttagatgctcattgt

SEQ ID NO: 371651 - DNA, 402 bp, Zea mays
acagcaactgtattattggcgcacaatatagaaataatacataaccgggtacaaaagggaaaaaaacaaaatcatttccagcagataccgccgggcgtccatacgggatcaactccgctcactggtgggcgcagggatccaccgttgggttgacaaatgcggttaaggtttgcgtgcgtgaggtagtctgcatttcaagggggggggatttgacgtgacaaaaaaaggaaaagaagcgaagatgcggcccggtaattactcgggcggatcctgatccaatttatgggggggggcccaaagagcggttccaagtcgggcggccattttatccagggggtccaggaagatgccacgcacgtactacgtactagtgtgctgcgcatgcgacggaccccacggggg

SEQ ID NO: 371652 - DNA, 250 bp, Zea mays
acttgttcagtaggtgtagtgtagctcgatagacgagaagaatatctggcgtggaagtttcttcaaggcctatcaatcctagaaaagcttgctgcgcctttggctcctttaattgttgggcgcaccggtgctcaactcttcctcactgatggtgatcctagcaagccacctctcctgttacacaattgcatccgactgtgatgacaaaactacatatcagccttggcagcttttaagaaccgtgtcctgt

SEQ ID NO: 371653 - DNA, 292 bp, Zea mays
ttcacccggaggagagaagaaaaaaaagggggaacttatagcaacagaacgcgaaaaacaacacagaacaaacccagcgccgggagggagcgcgaacaaacccacgcccgcggacgcaccgcccatcaacccggccgagcggacacgaccggggcggcggccaagctggcggcgccccaggcggccgggccgccgctccggcccgcgtacctccggaccgtcgcccccgcgttcgcccctgacccgcaccgaggccccggaaaccgggaccggcgagccaccagccccatca

SEQ ID NO: 371654 - DNA, 448 bp, Zea mays
ttgcttcgttgtaatgatctacgactggtgaacctatcagagttaacaattggtatcagagcctacgatcctcggcggattttgtttggggccgcagatctggagccgccggctcatcaccttcattttactcgtttgcggcgtcagcaagtgttgatgaaccccgacacgcaagtcatcctcgacgagatcgcgcggcgcttcaccgatcatgaggcgaagtgggatcggcgcttgtccaagcaggactcgcgctgggcggcgacgttcacggacttcgccaaggaccagaaaacccgtgttcaggcgctggagaatgcctctggggtatttgaggaatggcggctgagcatggaaggagtcgtcgacgacctgcgcctcgaagtgggcaaggtatccaaacactgggagcgggccgtcgtcgacaaatccacggcgatgacgggtg

SEQ ID NO: 371655 - DNA, 149 bp, Zea mays
gttcataaggacgctgcctctttattatttgatcataacagctgaaggaattgtctgttgcacatatcatccaagccaagcaatctatgtacaaaggaagcacactgagactgcaatatccattcacacaacaggaggggggggggggg

SEQ ID NO: 371656 - DNA, 196 bp, Zea mays
ccttggggcataatctattttgcacgttgatctagctgtactaactaagtaaaaaaaaccccgccaacatttaaatatggtcttgcaattgcagtgatcaggcccctatggtttttgctcaagctttaacaccgcaaaaccagggggggaaaatacacattttcgacattacgtttttttctaagggaagggggaa

SEQ ID NO: 371657 - DNA, 114 bp, Zea mays
gtggaccagaacagccaaccatttatttaaacgaaacgggggcaagttcacattgggtccaccctcatgccaaaattggatacaacccttttaaaaacctgggaattggggaca

SEQ ID NO: 371658 - DNA, 388 bp, Zea mays
attaaaataaccaacgtacgatctttagctgaaaccagagaagtgcatatatagattgctgcatcaaacgctactggtactgcacattttaatccattggaacctagcatgtttcgacatggatacagtagccttccacactggactacactggagcaggcataccattgaaggccacacaattcatgcaaacagatcctacgaagtgtagggatgctgtactgccaatttgccattgttcacatccacagctcattagctcactaaactcctgcagttaaggggcactgcgtcactgcaagagaccagagttgttagtgtagtgtacatgcacatgcacagacgagatgaaaatgcagaataggagacatgagactatgagaataaa

SEQ ID NO: 371659 - DNA, 392 bp, Zea mays
agtaactaaattcacctttatttagcaaaccaggcaggctgatgataagcgataactcttatatctctttgtaaatacgctgcacctctaacctgtcaacagcaatcagaaccagacctctcctttctctagagatatttacatccatctctgacgagggtgcgtgtagcctccaggggtcttggaaatatgtgaccactgtcacgaggtagtgaggtactggtgccaaactaatctgcacccattgctccagaaatatcaaccttgggaccgaatcaaatcttgcccaaaagtggtcgagagctacctgtttcgatgggagtatcatcaatgaacaaactcacgagcctgaacttgacttctgaacccatacttggctctcatgagcacca

SEQ ID NO: 371660 - DNA, 355 bp, Zea mays
ttttttttttttttttttttttttttttttctctgtttttttcataaagggggggacttatttcacaatttttttttaaaacaatgtttctccttcagacgtcccatatccatggggagaaccccaaaatccaccaattccttatttcgaaaacacaaacccgccctgttgtaacattgaaatagctaagggcactaatgttaaaacacaattgccagcatattgccacccattcatgtaactaggaatggtatttcctagtgcagccatactagggaaggcatggccttcacactaggggatgagaaggacctaacaagcagggacaagtttcactacaatgcgaagcagaacc

SEQ ID NO: 371661 - DNA, 300 bp, Zea mays
gggggaaaacaagggccttgttttacaaaaaaagcggggggcccaaacaaggggccggggttccaaaacccccccgggaccaaaacaaaacaaaaatggaccccggaagaccataagaatccccaacaaccatttccattacctggccaggggtaacatggggccccctaaaaatggcccccccccccccggggggggccgggggcaaaccggaaaaccccccccccccgggcaagggtcccctccaaaacccccccaggggggaaaaagggtaccccccctttcaccccccgggggggg

SEQ ID NO: 371662 - DNA, 511 bp, Zea mays
  unsure (1)..(511): unsure at all n locations
ggccggctcgcggatgccgtcaagctcaaggatgagatgctcacctctggattcgtcgggccggatcccaaggtctacagccttctcatggctgggttcgtgggtgctggggatggagccaaagccgtggagctgtaccaagaactcaaggacaaggttgggggcgaaccaattctggatggcattgtgtacgggactctcatgaaggcgtacttccttatgggaacgggggaaaaggtntatggagtgttacaaagaggtgctgtgtgttgaatcggcggtgaggtttggggccgagagctacaatgaggtggttgatgcgcttgggcagaatgggaggttggaggatgcacttaagctgttcgacagaatgcttgaggaacatgacccaccactgcggattgcagttgatctgagaagcttcagggtgatggttgatgcctactgtgctgctgggagatttgaagatgcagttgcaatgttcagaagaatgggggaatggaagctggtg

SEQ ID NO: 371663 - DNA, 207 bp, Zea mays
ttgttttgcacggtacccagagatgatatgaagctttggggtgcttgagcggtttaactcaattcttatctcaagctatcaatcttacattgtctatcatttaagattgacccaaagatgaattgagttgttatatcactaacttcatattcttctctagcaagaacttgtgttgtagggaataaggatttacctttgtaggaatca

SEQ ID NO: 371664 - DNA, 308 bp, Zea mays
gggggggggcaggggcaaccactacaggttaatgcaaccaccgccgatcacaagtcatatacaaccaccggccaatatcatcatgtgcaagacacaagaaaaaacaagctggcatcaagccaagcccacctaattttcttcatttctttcggtcggaaggcacaccacatcccataatagacatatctctatctatttcaacttcagctgccttggtcttttaaggcacgtaatcttttttttcattcaagcttcacaaatcatagacgagaatgaacctggtaattccaaatggatggaccaaaact

SEQ ID NO: 371665 - DNA, 517 bp, Zea mays
  unsure (1)..(517): unsure at all n locations
ttctgcccacgcgtccggccagccaccattcctggctgggctgcttcttccttctacatcttttctgctttctttctttcacccgcaaccgcaaccgcaacggccgcgcgccaaaccagagtttttttttcagcatcttccgctccgctttccgctgatgtttacagctcaaccctaccagtatatataccgacatgtttgtgttgatttgctgctggtttcccaattccaatccgccccccgctggaggaagaagacggggcggagtcaagaattggtacaaacggaacgtgttgcctgcagaatggattcggcatttgaccccgctgtcgtgctcgcacgtacatgatgcctctaaaccagagccatctgctgcaggtttcagatatctgcagatttcatcaccacagctacaaagattactgcgctactctgaaggaggatatccaatactagatgtcaggacttcttgcagaagctcttggagcttgtgcanggagatgtgcactactactta

SEQ ID NO: 371666 - DNA, 188 bp, Zea mays
  unsure (1)..(188): unsure at all n locations
aaaaatccagatctccttgctgtttcgattcccccttcttaaccaacagcgggggcagttacagacaaatctaccatatgtacacagagacggccagacagagaccgggctacggaggnagcgcatcccaccgaagagctggccgagcgcgcacccccctaggaggagcgtgcgaggcgcgacgcgat

SEQ ID NO: 371667 - DNA, 252 bp, Zea mays
gggaacaaagcctattttattggaaaagttttacaagggggttacgcccatcaaccccccggggggggggggcaacttaccaggccaccggagggggggggcccccacctaacagaccaaaaactttagcctaatgggggtgggttacaaccatttttttggggggggccaagaatattttaacctttttgggttttgactggtccaaggcgaaaaaaataaaaactttgatcgggggtaaaaaaggggggc

SEQ ID NO: 371668 - DNA, 374 bp, Zea mays
  unsure (1)..(374): unsure at all n locations
aactgatcactgntcttttcgatccaaatacaaagtgtttgagctatagagattccccaagcccacaactgcaagaatcagcaaagcaccgatcatacatgtattaacttagctgctaaaacacaagccaagaatgctgagccagggaaaggtggtgtggtatgctaaaactgcattaccattgccagcagcgatgttggcttccgccaccaccacaagcgcgatgaggaggaggctgactgccaatgtcgaggatgaggacctcgacgacgaaggtgggctacaggttgacgatgtcctcggtgcggaggctagagctaggagtcgtgtcgtagttgtgcagcgcctacacaagctgcgccggcttcaacagc

SEQ ID NO: 371669 - DNA, 259 bp, Zea mays
acaagcaggcagggcgcccataaataggtttaaaaccagagtccctacagaggacatagccatatatttacaattaaattctacagtgcgtgcacagagacagggatagctggaactgttagatcgagtggacacccaaagagggtcctacgggtttagccaccatggatgacacccacagccctaacttgcacatgctgccggcccttgttctacgggtgaacgaccacacggggctgggcctattccagtgcaccct

SEQ ID NO: 371670 - DNA, 276 bp, Zea mays
gttctagaacaggctagttatacttccgcttttcacactgccaacacgggtattaggaaccaagggaccccacagatcctaccaaccatccctatagtgctcttccccattgcgctaacacatacctattccatactacgggacgggaagcatgcaaaagagtcaaaggaaaatcacaggcacatttttgccacgagccagaaaactcccggcaggactaagcaagcggtctatacaggggacctctgcaattcccggcacaccaaatcaacgaac

SEQ ID NO: 371671 - DNA, 295 bp, Zea mays
ccaccaccatccttatttttatatggaaacttaactctgcaggataaaaactgaaaaacaatattttagatgaacatataggcaaactaacggagacttttaaagcataggccaaaccaaggtagacaaacatggccaatcgtaaaactttacaccatagggttccatactaaagagaaaataagggcatctgggtgaaacgcaacggagaataggcgtacaggaatgtgaaagtgccctggaacaaggccaatgaccgacctacgggtggcacaacttgaatgaagctactatc

SEQ ID NO: 371672 - DNA, 210 bp, Zea mays
ttatttattttttttttttttaacactccccgcctgctccctggctgtctgctgcttcatgtgcctttcatttttgcttccatacatgatactagtagaatgcgttaataagccaaataccagtattcatgtatattgccaccacatagtgccggcctctagtcaagcatgccctctcccaaaacatctcccgaatccaaagcccactca

SEQ ID NO: 371673 - DNA, 260 bp, Zea mays
aatccaaactgaagttacactgcttgaacaaaggtgtgtttaaagataacaactgggggagtccaaacactacaagattctgcctttaaagattgactctgaaagagtgcgcagttgaaagggacaaacaaaacaggacctgaccggttggtcacaggggacaagggcatttttttactgcccaaaggggactcccaggagatcaggcaactataggaattagcttcaggaaacacctacaactgggctacatgaattta

SEQ ID NO: 371674 - DNA, 358 bp, Zea mays
tttctttttttttttttttttttttttttttttttttttttttttttttttttttttttttttgggttcagaaaacaggactaaacatgtttggattagcaaaattggatttttttaatgacaacctgacatgcggtttaagggacctggcgaagcacttgaagttcctcgggttcgctaaacaaaattagggggaaaaaaggcaggttaatttttcaaatgccctttaaaaaaacgaatcggtgttatcggtttgatgcaaagggcaaagcatccttgcacagtttttccccgggacccctgatatccatgaagggtttgggcaacacatccttcgaaactttgaaggggccggccg

SEQ ID NO: 371675 - DNA, 325 bp, Zea mays
ggaaccgcactaccggagggttatgtaacagaacttataagggaaacggggaaagcatccagtagaatatcaggaaaccccttcccgatgtttggagggcgggaaattttggggggaaataaaaccgattcctgaaaaatttttgcccgattcctaagaattcaggggctccaaaaaggggctaactttttacaactaactggactcctgggtccgacttcggttcctttttgaccggggggctgaaaagttctaactgtttctggatctacgactccacgaatcagagctaaaattttcaccggttgaacctgggggacctttt

SEQ ID NO: 371676 - DNA, 286 bp, Zea mays
  unsure (1)..(286): unsure at all n locations
ttccatgcgatccggtttgattttacacgtagagccaaccagaaaagctttcttttacttttagcgtgtgagggagagacaatgcatgctaactggntggctggtattgaaaataccgctgttaaacaagaaggccatgaccaccttcatatataaagtctaccttggatcaaaaacatgtcttggttcaacacggtatgaacgaaaaaaaaactgctcaagagtctcctggatattttaacaaagcactggctggccattttggctgcctactctataaagaaaa

SEQ ID NO: 371677 - DNA, 382 bp, Zea mays
agttcttttggtcccggagctcgctcctgccatcttagttttagctgctgccagcaatggcgagagaagccaccgcgctggcgacgcaagcaagcttcagctctccggtatacaagaaaaccagcaaccaaatctgggacaaggctcggccacctctcttgggctgccccagctgcaacagaagtggatccagcaagaaactggcgactagtctgctgacttctctgggagtgcactggctaacactctgtctggcgcactccagagagttgcgagcagtccattgccaccgcaagaacttttggagggcgtacaaaccaaagttagtgcccagccaccaataacaatggcatctgtgagttcagaacttgttgagaggact

SEQ ID NO: 371678 - DNA, 366 bp, Zea mays
tttctcgcgtcgggcaattcgtaaattctaatttatactcgctgatcgaacagctggatcataagtactgttgatgctaatgtggatccactgattgcacttgaacctaaggtggccaactgctttgttcagagagggattgtatgtagaattgattctggatatgaggcacaaaattgcagtttactaaacctcttgggtgtacaccatctgttctgtgaagtgtttcggcagtatggatctggtaatcatgaccaatagatggccatcaacttctgctgtacatcatcggacagaaagttgtcctaaagcggcataagggaatttaaaccgcttccgatctgcggaaattcagagtcaaatacc

SEQ ID NO: 371679 - DNA, 407 bp, Zea mays
tctgattactgttcttgagctgcttcatgcgatagcgtctggaccaaagttgtactctgctgcctccccgtgcctttagtgattcggtcctcgggtttgcgtgcaattgtagctattgcacctccattcccttagttgtttttgggttttgtttgcttccttgttccaataacctgtttcttatggattgtttcttctggatcagatgaattacttacgcatcgtcgttggaattggatgacttattgattgtgcttgtggtcctgttacgtggtcttagtaagtgtcagatcgaatttttaaggtgtagagctactgtagtttctgctttgcagatactttgctctgtatgtgtcttcgcagatcatgtgcagtaagagttgcaaccacaaaatatgaccaaattt

SEQ ID NO: 371680 - DNA, 215 bp, Zea mays
cttttgttttcgtcccccagccgcctactccgctggtttttttgttttgggacaggaccgaggaactggccctgcactcaaacgagaatcaagagtcctagtcttaatactagttctgatgaacactggggggataaaaggactaattactgatatcatcgccacattaagcagggcaaagaattgacatgcgcacaccacatggattagactgt

SEQ ID NO: 371681 - DNA, 507 bp, Zea mays
  unsure (1)..(507): unsure at all n locations
ggtcgttgtgcatatccgaaataggaacaattttatatttttcacattttacagagttcatatgcttgtgttgatctttgcacatgagcatacaactagaaatcaagagtaatgcatcatgactgataagaggctatatgtttgtcagagaactgttgtgacttgtgacaaccattgattcaaattgaaataaagtgcttcaccatgttatttaatcctcatcaaagcaaccataggttttaagtgattaagtccacttgtctaaagaaaagtgctttcttcaatttcatttttaatgggggtactgtggttatatgttaaatcatattaacaaattagctccatagtccctgggaacgtgaaaccatgccagattccttgtccaaaaatgtttttcctgttcgaagaacacagaagcaatctcgtccccaccgtgtggcctgtcaaaaccttcctgggaactnggtgactgtgatcaatctcgtccatgctacaccagcaaatgag

SEQ ID NO: 371682 - DNA, 449 bp, Zea mays
ctgttcgtttgggcggacgcgtgggccgtatactgtttctataagcgcagggaggcgaaagaggatggataattggatcggatagccgtcccctgggttctgtctggggagcaggagcagcagtcgccgagagcaacccaaagcaagctgcagttcgtaagaggatcaggggccggcgccggaggagatcccccgcgctatttggagctccccaagaaatgccgtgtgcactagaagtgattgatgcaaggttacagagcacatcacatattcagtgcagcagatcatttgaccaaaacattggaagacgcttttcaaagggccatctgatacaaaaacctgttgccatttgtcctgagaacagtgacacctcatcaacaatacttctgtttcggcacgaaccagactggaaacaagcaccattcttgtctgacactcaagaggtcaac

SEQ ID NO: 371683 - DNA, 246 bp, Zea mays
aacaacaggggaaaggggggaaaataatacaatacaacttttttttaaccccttgtaacagttttttgcccccccgccccaccatgggaattaaaatcaaaccgcttatggtccaaagggccctttgaacaggaccagggggcctttgccttttgggccaaaaaaggggggggggggaaaaaaaaaccgggagaaaaaaaagacattgttttaggacaggcccctggtcatgcctggttttttttt

SEQ ID NO: 371684 - DNA, 203 bp, Zea mays
ccggcctacaggaccatacacgggtggatctgtcatttagggacaggtaggggaatcaggaacgaaacctgaagtcagagaagaagccatacgacccatctagtatatggaaacacactaggtcgctataaatactagtaacaactgaaacttgagactttgcacagctcaatggtagtgaagtccacacaccaactggaggc

SEQ ID NO: 371685 - DNA, 109 bp, Zea mays
atgtatttataactgatgagaccatttggttttataatttgggggttcgatgacattatagggaagcctacaaataataatagcaaaattgataatgttcgccagggga

SEQ ID NO: 371686 - DNA, 497 bp, Zea mays
tgtatgtattttgatgaggaaaacgagaaaagaaaagtcacttcagtgatcgatgttggtctttgcaaacctgttagtggaactatgcttactagatcggttaggggtagagacagaaggcaaactatttattggagaggtgctgattgctcttccagttacttgtagagtatgtgcgatcttgattggtcttggttgagttcagcattgactaccctctggagaaatcatttctgggcattggagaactgcatatataacttaagagctgacacagatccccttgtttatcactactgtgtcttgacagcaatagctgggaagatttctctgtgcccatactgactcgagaaactatttacaatgctgatggtaactacacttttatatgcccaggaagaaaagctataggtgcagttaatcaccacaaggcttttactgcatgaatattgtgctatatgtttcaagaagcctttctgctagttcctattttcttg

SEQ ID NO: 371687 - DNA, 345 bp, Zea mays
cgttcgctcgggcggacgcgtgggattcgatctatttctgtttcattggacgataaatcatagtgtctcctcggcatgaactctgaaagtttcaactcgctgttttgctcactctatgtattcagtgatattgctgttcaaaaacaaaagaaacaactactcacataaaactacaaagcgcagatcccgaccccgcccccggctcgtgtctacgaccaccgaatctacgcacgcctcactgcccgcatggtcgacctcacccgccgtaagcagctcgcccaaatcatggaggaggtgaaagcgagtgcggcgtcttttgcgtggggcctggttgctcaacacctt

SEQ ID NO: 371688 - DNA, 268 bp, Zea mays
tttagtatacgtccgtgcacatggcggccgtcaggtgagtcttcttctctgtccatcggcaggggcgctcatcttgtgctctctatgatggtgcctgcatggctagttgggtctgtacctgccgctagcgtgaggaggcaggcggatccatgcgagcttgagaactaggagaacgagactgcctacgcggatgacaagcacagaccgccatgggtgtgcaaaggcatggcttcgtaccacaacgatttgaccaatgcgtccactgcgc

SEQ ID NO: 371689 - DNA, 224 bp, Zea mays
ctttttctccctaccaagcgaacgatgccctcgcggatgttggatttatgacaaggggggggcaggtgcagcgccagaagctgtcgtagaagaacgaagacgcttcttctattgcttgccaagagagaggctctagttgagaaccactaactaggcaacttgacacctaccacagatggtgcggggtaagattccaataacatgaggaagcaaccctgtatacc

SEQ ID NO: 371690 - DNA, 351 bp, Zea mays
ctttcttttagctggtcgctcactctggcagcgccgcccttcactcaagcttaggctcttagctctaggctctagctagccgggccactccgtcgtgtggccatcagccttctcatcgccaccaatggccactggcgagggccagacccccaccggcgtggcgggcgaggaagcgcccgtggtggagaccccggcggcagccgtagtacccgaggagtctgcccccgccgaggccaatgctgaggctgaggctgaggctgctactactgctgctccagaggagctaacagcggccgagcaatatggagccggccagccgcaagccgatgctcctgctggtgccgaggagcc

SEQ ID NO: 371691 - DNA, 444 bp, Zea mays
  unsure (1)..(444): unsure at all n locations
tgggtcgaagcaattctatcctcatcaatcatgggtagggttccggcgattccccatggccggccgccaccgaaacccgctgccaccttcctacccccgcgccgccgctgccgccgccggcaaccatctgcctcccccgcttcacccccaccttccgccacaccatcccctcgacgactaccgcgacccgccgngccttcccccgcaccaccatatcgacgacttccgcgatccgtcccgcctgccgcctggccaccccgacagcttccaggagccgccgccaccgcatcttcgtcatttcgtgggccacggccacggcggtgccggtggccccctgccacctcagccgcatgtggtagcagcgctggaggagcggctgggcgctgagatcgacgaggcgcatgcgctgctcgcgcagaaccagcgactggctgcgacgcacgt

SEQ ID NO: 371692 - DNA, 529 bp, Zea mays
tttcttcgcgtccggaatattcctagcttgagattgcaagaggaggggaggggagccgagcgctcagctctaattttgtccatctattgctaacaggtgcgccgctttcttcgccttccgccttatctttgcctggtccatccttaaatccgggcattctggctgttgcggtcgagggctgctgcgcccgccgattggagtcactcttcttgacgctctccactgtcattgccttgtgctagtttcgtgagcagtatttggttcaagctaactgccagctgttatgcgaaggctgttatttttccttatccagttcagttgtgaactgtgtttgtgttccgattggggatatataacctgcggccctgcgccttctgaatcgtatcccaatgcatttcgatgcaacggcccgttttctgcagtggcagcacagtgttgccatcattattaccgtgattcagtatgcgttctgcgttctttagtttcgacattcatcagtatgcgatcatcggtgggattcgttctagtg

SEQ ID NO: 371693 - DNA, 411 bp, Zea mays
ttggtcgcgtgggggtacatacaaagcattaggagattcatcttctagcattttctttgatcaggtgttaataaagccttatggattataatgtgtatttttagcttctggatctgcacgatgtgaaattaacaattgaggatgttggaaagatagcaagaatagtggggcatactctacttgtctttaagtgttagttgaggttttgttgtccttaaaactgccctattatcaggaggatcttgtccaactttttattaaggagttctttaaaatctgatattttgtttatgggtctgttatatgctggatgatggttgtaaatatctagatggattcaagggtggcagtaggcacagatgtgaaggtaaggcacattttcgaggcctgtctttctagaagtgcttgcat

SEQ ID NO: 371694 - DNA, 283 bp, Zea mays
catctaccttgcacttggagcccctgcggctgttgtgtttagaatcctggtcggccgtatgctggatcagaagctgtagtagaagcagtaagtcgcttctggtatttcccgccaagagagagacatggggggagaaccgctaaccaaggtgctgcaagtttcgcacagccgatgggggctaatattgcaggaacatgatgaagctccagtgtatatccttcgtccactatctgtacgctgcactaaatgacggtgaagactgtacgtacataaacctgaacat

SEQ ID NO: 371695 - DNA, 396 bp, Zea mays
gttttgtttccgcccacgcgtccgcccacgcgttcgtccgcgcgttcgctgatcgtcacccatggccactgccgaggtccagaccccgaccgtcgtggcgaccgaggaagcgccggtggtggagaccccggctacgcccgccgtcgtgcccgaggaggctgcccccgccgccgaggccaaggtggacgagccagctgccccggcggagaccgagccagctgccgccgctgagcccgaggcggcccccgtggcggcggaggaagagacgcccaacgaggaagagacggcaaaggaggccgagccggagccggagccggctgtggctgaagaggtgaaggaagaagcggaagcacccgctgcctagacagaagcagtaccggcagacgatgagcccga

SEQ ID NO: 371696 - DNA, 335 bp, Zea mays
ttgggtatggctccagcaatggccttcctgttggcccgcaagcctctaggggcgttacaagatcgcccgcgatgcgatcgccactattctttgctaccagctgggcaggacaaactgtggctggacctagatcggggcgcggaggctcaggggcctctgcggcgggggtatgaacaccgcggctgccgatggtcgtgaacaccacgaggacaaggtgtacagcagcaaggccgagaacgatgccaaaaacccaccaaggaggcctgacaaggcgcacgataaagctacaacactcggggtcacccaaacctaggtctgtgacggaagtgctaaaa

SEQ ID NO: 371697 - DNA, 290 bp, Zea mays
ttttgttcgcgtgggggctgttgctggctcacatcaggtcctatgctcaaagactcgctcaagaacgcgtaagggttgcccggatcgcgtgactcgtgctcgctgaaatgcgctctgcgatgcttggggaaacttgttaggcagacacagatcagacctggagacaccgtgcgaagactcagactgcttgcaatcatgaatctaaccgcctggctaggcctaattcctgcaaggacactgggcggacgacaaacttaaccacttcggatagatcctggtgtctaattgag

SEQ ID NO: 371698 - DNA, 372 bp, Zea mays
tgcatattctcattaagatttcatcaagttatgaatggtgctaagttctatggttatttagagaaagaataacagaattgataaaagggaaaaaccactttgcactggggtccctggcggtttttctaagttttcctcgcgaatcagtccttaggttactattcatatgagtcgctgacattacagaaaaccactcgggttctacagaacctaacccgaggtccttcttctacctcaaacagtagccgctgcgaagaaaagggcggaggggcttaccggcggcgagactgtttcggtgaagtggttgacggcaaaggggaggtcgcggggatcacaacggtgtgcggaacgtcaaccgagatggccggagtt

SEQ ID NO: 371699 - DNA, 296 bp, Zea mays
acacgcattcatcaaccaagagacgatgcatgcacgcatgcatgaagaacaagccatcaatcaaggcgacctgttttgctcctcctgctgctgctgccccgccgcgcgcttcatcgtctccttcttcttctcctcctcgttggcgtcctcgtcctcctgggcgacagcgctcttgttgcccatctgccacgcggtggcgcccatgatgccgagcagcgtcacgaacggcacgaacacgacgttggggaccaggtccagcctcacgctcttcacgtaggggatctgcccgctggccc

SEQ ID NO: 371700 - DNA, 177 bp, Zea mays
cctacgttttcggcgatgtataggaagcgaaattgtatgtggtttctatagagctggcatgcctcccactagctttggacccgtcattcgaacgagagagcgattctggtggcaatgacaaacagcgaggttgcgttgattggcagcgaccatcgcgccacctactttagcgggggg

SEQ ID NO: 371701 - DNA, 283 bp, Zea mays
gtttcttttgaacccgggcgccggctacgggcccgtggacggttactacgggccgggcaacacccctgcgtacggcgcggcggtgtacaacgtgactacaggcgagtggcggcgggagcgcggcgcgccgcccgtggggccggtgttcgcgcagtgcgcggtggtgggtacccggctggtcgtgctgggcagctgggaccgcgctgagcttcgagcccttggcggacgtgcacttgctggacgcggagacggggcggtagccgagcggagcgcccatgcagat

SEQ ID NO: 371702 - DNA, 303 bp, Zea mays
tgaggcacataatccgcacatgtaaccaatccagttcaacaacttgagcaaatcctgaacttctggcaaaacgaggacactgaaaatttggggtgctcactgatgttcagcatagcatatcaaacccagttgtggattggtgcaaatgcaaaacacccatattagctagaggtgcaaacttacatatacaactaactcaagtgcagctacgagaaccataaaaaaggaaattgttgttacactcagtatgctaaaagcataaaactaactgtcgggtcctatgatctttgttgggaactgaac

SEQ ID NO: 371703 - DNA, 423 bp, Zea mays
tttgtttgtcgcacgcgactacacgagctttgttggttggtggttgactcgttggcagcccgtcacccctgctgtcatttcgtcgagcatctcgccagcatcacgaccgccgggcgccggctccctcggcatcgcatcggttgattcccagcgaggatggagaggttcttctccaacccttcaaacgccccgcggtgcgacacagacaccggcatcaccctaatctcgggccctacgtgttgtgcccttgtcttggtccaaggtcagcgggaagacctcgcttctctttcagttcgcggtgaaccgcgcggcagaaagtggccgcggcgtcatgttcatctgcagcaaggggaggctggagagcaaccctcctttcctgtcccagggcgtcgatccatcgattgagcttacttcagaggatac

SEQ ID NO: 371704 - DNA, 427 bp, Zea mays
tttgtttatggagttgatagtaccattttttaatgttttgccaattgcaaatctcttttctaccccggtaattcaagcttttaaacatgactccaacttgatggaaactattttgtcctctagtgaaccatctctatcatctagcaagcaaaatcatatgccacaatatttgaactccagctaacattaatctgtatgctggataggtgtgcatactctttaatttttcacaaaaattattctgctttagtactgatatttgtaaaatttgactgtgccaccttgtctatttgaaacttctggaaatgtgcaaaatttatgcttccttatatataaaagtgtgcattcctgattctgtgtttttgacatgtcatcattttttctgaaatgtcatatgttttttgcaaagttctactgttacattaca

SEQ ID NO: 371705 - DNA, 214 bp, Zea mays
ttgtgttagtagcggtagcgtttacactgccgtggacttttaatttaaaaaaatctgagtgggaataacagggaaggcgtgccttatcaaatcacaaatgggttgccacgaggatttgtgaacatggtcgtccagatttctttgaatctggatgatgcggttatgtgaggatcctcacgcaatttgtttaaaaaaaaaaggagagacatctagg

SEQ ID NO: 371706 - DNA, 217 bp, Zea mays
acgcgaccgcggacacccgggcggggagggttcatttaaggtcgcggtgaacgcacgacagccacgaccaggaccccaaaagacgcctggagccccttatgcagggaacagagcccaaagactggccgagtatgccagaaagacaggcccaacctacacattcgaccactaaaggcgcgcccagatgcagtagacacgggacgacagggaaagcaac

SEQ ID NO: 371707 - DNA, 438 bp, Zea mays
tttccgtccacgcgtccgtctgtttcctcctcatcgggattggagcttcgcatagagtgtccctcgtcatcgccgccggcaccgacgccggcagccatgtccatgctccttatacagaaacaacccctccctctctccgttcgtccccgcacgactctccgccagtgccgtctccccacgactcgattctccgccgccgccgccgactcggctagccgcgctgcccccttcgccgtcgaggactacctcgtcgccgcatgccacctaaccccggcgcaggcgctcaaggcctccaaggtgctctcgcacctcaagtcaccctcccgacccgacgcggtgctagccttcctctcggacctcggtctctccgacgccgacatcgccgccgccgtcgcctacgaccccaagcttctctgctccgaggtcgagcgcacgctg

SEQ ID NO: 371708 - DNA, 227 bp, Zea mays
  unsure (1)..(227): unsure at all n locations
ttcacgctaccgcaaggctcccctcctccacagcctgcatcccatctcacgaggaccaggaggagaagaagttgcatagccgcccatctgcatccacactccaacagttgagtccctctctccctaccaccccccccccccnnnnncnngagttggcttatctcatcacgtgctaactacaaccatacctcattgcgccggctgccagaaaggaccagctaccggcc

SEQ ID NO: 371709 - DNA, 570 bp, Zea mays
gcacctgcaggtaccggccggatattcggtctcccactcgtcgtttggatctaacttggctcctaccttttctgtcccctcttggatgtcggtcatgggaggcaatgcacgctccttgggacttgtaagagttatctgttttgttgcttcgcgggcccaaaggacgcttccctgcaccatctgcctttgtttggaacggcttggaccgccgtggtccttttacctgcagcaaggaaaggaatggctgggagggaatggatactgctatcgttccgtgtgtggcaccccgtgatctgtttgccgtgctttgtaggaggcatggcgtattgccgggtactttggttttggagactgctactgactgctgacgtcgtcgggccgctcctctcacctctggtaaataggactttgtacacaattattttgttagtagcagtatatgtacatcatcggtcgtgttgcttgctacatgtactcctatgtagcatcctcccctgcattttagtcctggctaggtatcagatgctctggtgcaaaaatgtctctgcttgtcccacggcatgctctttt

SEQ ID NO: 371710 - DNA, 368 bp, Zea mays
tgtacttatgctctttcagaaggattaattgtagacatgtcggtctacttttgcaaaatcagatggttagaacattttgacatgaaagtgaaacagtttctaactttgcaaaactggagtggcatatttctaattaaccctttttagaacctctggccctctgtagttgcatgcatggacagatatagacatatagtacataatacaatcaccaaaagaagcagacatgctaatgaactctgcagtctgcaggtattagatttttgcaataaaactaaagcaaacaaacaaatagatgatttaattaattgtgcaaatgattgatttttcatacatttgattttgtagtgctctctcagatatatatt

SEQ ID NO: 371711 - DNA, 391 bp, Zea mays
  unsure (1)..(391): unsure at all n locations
tcatacctttgaaaatttttcttggcggggtaatttaattcgttttgtctccccaccgtnggggcccggcctgggtcgaaaaaatgttggcccactcctttagtaaaaccaccaaatctgatgcccctgcccaaaatattgaaaaattccagaagggccctctggaacaccccggcaaaaaggtcttgggggagggcccaaaccctaaaaaaaagctagaacggtggttcccacaggggaaaggttttaaaagaaagggaaaccttgaaaagaggaagaaatttaaaaaaccgttgaggggtcacaaaagggaaaatgccaaaaaaaacggggaaaaataacctggaacggaggacaaggccctaaaggctcttaaattggaagacccgcc

SEQ ID NO: 371712 - DNA, 469 bp, Zea mays
tggacttgtgggcggacgcgtgggcgagcagagtagcagaccaccgtcctagcgcccacccactccgaccgaacgaccgaacgaccgacccatgccatgccatgccgttcccgtccatcgctggcgtgtgggctcacatactgcagcttccgtggacccggttgtggcaggcacggggagcagtagccgggccccacctcgttgtataaagacctgttccaactcgtacgcgccaatcccctcccagttctgttcccctctcccttccccgcctcctcctgccgtacgccacgtctcgagtcccctcgtcctctcctcgcctgcgcgctgatccaccgaccgaccgctcgcgacgagtcaaaggggcgaggacccctcgacctcttcctcccagcaacgcagcgagcatgacgtgtaccggcggcggcggcgagcactactcgcggcaggtccgcgagctctgcgcgct

SEQ ID NO: 371713 - DNA, 326 bp, Zea mays
tctacttttacttatacgattcactaggagagggcgccgtggcatattctgctgttgccaacgacctggaggtctaactcgcccattgtaatctggcctatcaagatcagagcatcctgacgcaactctatatcggcgacctcgatatctctaacgtggacacaggccgataccatgtataggattatatataacacatgctctgatggctatgatgcatgcactcacgcacgataacatggcctttgtggtcgcgacacggacttgggacttacggtcgctggactttcacacacgctgcttgcagagctcatctactcagatgg

SEQ ID NO: 371714 - DNA, 345 bp, Zea mays
tccacgtgtacgcggacacgagggcagacgcggggggggttaaattaagaatggggttgcaactagaagagaagaccagcctgctgctaagaaggcaccgcgtgtggatgctctgcaagccgcgcaaactcctgacgaggataagatgacgcatgctgaatgggacccaaatgatcctaccaagatgtaccctgaggaaccggacacagaaacggaggtgaggaggagaaacaaccacggaccatttgacgctaagtagcggacgctggacaggcaagactgaaaggcaacgaaaccgaaggatctgggagaacaattgaaaacaaaaggatacaagaaccagga

SEQ ID NO: 371715 - DNA, 167 bp, Zea mays
tttcacgtgtccgcaagaaatgtacttgtaactgcagtaccctactgtaaccgtccacaagtaagaattgagatagattttctaatgcgtcagagaacgccggtggtgtaggtattctgatttattcagtgttatactttctactgttagttatatatattctgtac

SEQ ID NO: 371716 - DNA, 377 bp, Zea mays
ttctacatgaaggttgatatctctggtgttaatgtagagtagttttatgacaagtattttgtaagggagaagaaggcaacgaagactgagggtgaactttttatacacaggaggcaaccaaggacctgccacagctcaagaaggacgaccagaaggcggtggacgcttagttgatcaaagctattgaggttgtgccggatctgaaaacttaccttggtgcatggttctctctcagggacgacgacaagccccatgagattgttttctagatttgcctgatctatcgtaggatgctctttgaaggaaggagataatgcgtataatgtgtgggatgatatattgcttgagccctcatgctgtttatataagagtacatg

SEQ ID NO: 371717 - DNA, 384 bp, Zea mays
tttcctgtccacgcgtacgcggacgcatgggcggacgcgtgggcaaccgggctctgttccgacaatagcctgccgccgcaccgcgccgtcgatcgacgcgccatgaacggacccagcggctaccccctttctacaccggcaccttacccctgtatggcgtgatccaatgatagcaccaagagcgcacctacccctctccctgacggcgtcaacctccccgcacggcggcgcgcgcacccgtaccaagaagaggaagaaaccatgtcccccaacctggacagcgccatcaagagccaagtgccggcgctgctcctgaggcgtcaattgggcgcgacccggcgggacgaggccaagcagctacagcggaccccggccccggtgggg

SEQ ID NO: 371718 - DNA, 459 bp, Zea mays
gtgtgtgagtcgagatccattcccaactgcagctgcgcgcctcgactggtagcccgaaccctagctagctgccgatgcgccctttgtcgtcgcgcacaagaaggtttcgctctcccgccccaagccgggcgtcgagcgcgtcgccgtctccctcgacctctacaaccagggatccgcgactgcctatgatgtgtcacttaatgacgactcttggccaacacaagcatttgagcttgtcactggagagaaatcgaagacattggaaaggcttgaccctggtgccactgctacacacacatatgtcctggagaccaaaacacagggcaggttccagggttcaccagctattattacgtaccgtgttcccacaaagactgctcttcaggaggcctactcaactcccatcttcccactggatattctcgctgagagacttcctgagaagaagtttgaatgggc

SEQ ID NO: 371719 - DNA, 240 bp, Zea mays
aaacaagaacacgtacagtcgtagtgacaaggacgatataggaactgtaaaagccaatgcctgtcaggctgtcacataaaccagacggaacaggtaaattaaatgacagttcccacaagctagctagatagatagatactagcctcaccactctaagctgaacaaggttcctgtgtacacactaactgcgctgatgagacccgtgtcggcgacgcttgacaacttgttggttttggggtc

SEQ ID NO: 371720 - DNA, 512 bp, Zea mays
tgtgtcgcgtgggcggcgctgctgcttccctccaccaagaagctcagctcccgaccgcggcgatcggccgcgcgggccgcgacggctagaagctcggttcttccgttcgcccatcgcaggctcctcgtgccggccgatctaccaccgctaccgaggaaagcgcgaggccgtccggcgccggccggaatccatcacgatcccctgaccgacgctttcctgttcctcctcatcgacgaagatctataccttggcaccagcgatggcgtcgtcggcttccggcgggcaggggcaaggcaggcgcgtcgagcccgtccgcgccgccaccagcatgggcgctctgcccctggacgccctgtacgacatcctgctccgcctcccggccaaggaactctgccgcctccgctcggtgtgccggccgtggcgctccctgctctccgaccccgcgttcgccgccgcccacgcagcacgctaccccgagccactcatcatcgtcggctacaactacaacgaca

SEQ ID NO: 371721 - DNA, 368 bp, Zea mays
aattatttttcttttttttttttttttaatttggttttttttggaatttttgggcccattaaataaaaatcatcgagaatccaaactttttacagacaaatatatgttatatattacagggaagcaaataaaagtcagacactacttgggttcaattaaagggggaggccataaaacagcacgcaacaatcaacgggctcaaatttcatacagtacttttgttttatagagaaacaatctcgtgaactgatggttgtttcaaacgtgtggcctatggtcgccatcatcattgatggggaggttgattccgggactgcgtagcgcattgaggacggctcaaagagaccttggtctggttattgaaccat

SEQ ID NO: 371722 - DNA, 550 bp, Zea mays
  unsure (1)..(550): unsure at all n locations
cggtctttgtggggcacggttctgccccctctgctctgtgatccccaatacgcgcagatcccgtctcctccgccatcaacggaaggtggccgaggatttcctccgcccctctgttccacgatccatgtcatctgcgctgccatcaacgctccacccctgccgcaaatcgcctaccgccgctcgcgatgcgctcggccccaacaaattctctcacaagatctggcaaaacccatcacctccgctctcctcctctaccatcgggatcctggtggccaacgtcgtcctcgtcggtgagatgacctccaaactcctccaaacctcacgctccatcgatgaccggaggcctccgctccttcgggatctccttattcacaaggcgtcgaggccgtcgtcgaccacgtcatgccgctgcgctaggagacgccgaccaacgtcggtttcatggtggcctaggcgtgtagtgctgatctgctccgcgtttcgcccgctccctccccaagctgcttctaggctactgcgatggaggnatcagcaacaccaggtagccctc

SEQ ID NO: 371723 - DNA, 277 bp, Zea mays
gcatccgggggaggaacggcacgaacgggggaatgcgaggcgatcgcgggtgcgtgaagaaccgtgcctattaactggtgaatataccagctgcagtcatactttaccggggacagctaattgaaggcacgcaaggtggcttcactgttcattaaatatcaacacagctacaggacgatacagggcgcgggcacctaatacacagatccaacatgcactgggaacggatatggatgaaattcaccacgctgtggtgagagctgacgcgcacactctt

SEQ ID NO: 371724 - DNA, 224 bp, Zea mays
  unsure (1)..(224): unsure at all n locations
nattattttttttttttttttttttttattttgtttttttttgaaatttttgggtcccaccaaaaacagctttgcccaaaacaaaatttcaacccactaggcagcaggcctgtcaaagtaaaatcccccgaaggtaattttaacacccttgcacccacagggggaggcgggtttttttcctgggggccggctcggaacaaaaaaaccaacatccggcccccatt

SEQ ID NO: 371725 - DNA, 384 bp, Zea mays
attaattttttttttttttttttttttattttgttttttttgggcacattttggccctccaactgccttctttgaaaaaaaacacacagctgtagttggcattttccttttttttcctgggctctgatccaaccagttttagggaaaaatcgtcatattaattctggactagaaaatgggaggcacaaaacaacaggacccatttttttttgcttggataactaactatttgtatatttgggttggcttggatcttcctttgcttatcatggaatgtatgaattggaatatggcctctggcctgtgtctgcaccaactcatgatcgatcatgtatccatccgcttcggctggatgttctgctccactgcatgccgcccaacatg

SEQ ID NO: 371726 - DNA, 536 bp, Zea mays
ccggtcatggtcttcacaaataaacaagtgagcggccttagcatgctgcattcaagcaagggaccggctagccatgctccacctgccattcagtttgttggtgaggaattaatcagcaatcatgttgaccggtatgcagatggagcagaaaatctagatgaagcggatggatacatatcgatcatgaggtggcatagacaggctagaggccacacttcacttcatccatgccatggttccatgatactatgataggcaaaggaagatccaagacaacacataagtacaaatagttatacaagcaaaaaaaattgggtcttgttgttatgtgcctcccattttccaatccacaattaatatgacatttgtttactgaaactggatggatcaaagcccaggggaaaaaaggaaaatgacaactacaattgtgtgtgtgtgtgtgtttttgaaagaaggtagatgcacagtgatgatgtgctcacttgaggatgtcttcagcttgtttagactctatttctccccagggaatatatatc

SEQ ID NO: 371727 - DNA, 333 bp, Zea mays
aataattttttttttttttttttattatttttgtttttttttagagattttttggccctttggaaaaaccattgattttaatgttgctcatggaaccagatacagggatcaccaaattttacaaagaggaaaaatggggagactagaatcgccaaggaaaacaaaaatttagtacaggggccgtggaatttaaaatccttattggttcaattgatcaagagccttcaagagcacaggtctgaaacggttgcagacaagccttacattttggggatccatgaagggttgcctgacgaactcgaacccgtttttgtggaacgcaagcgggttttt

SEQ ID NO: 371728 - DNA, 517 bp, Zea mays
  unsure (1)..(517): unsure at all n locations
cgttgttctcctcttcaacctgaacggcaggctgtcgggggaccaggcgccgcgctcgctcttgatccgccagcgggttgacgccgacgaggggagatccgccgaaactctcgcctcagccaccggagatccaaaggtggtcgaagacgatacctacggcgaggaagccagcgccaaagccagagccaacgccaatgcccgagggaccactgctgaggaggaacggatgctcgctagtgagcccgagcagagaaaaagggcacaggaagccactacatctgagattttagctggggaagacgaccggngaaggaaaagccagcaagagggacacaaagagcaccagcagcacaagttgaccctcccaactgtttcgaattataccattcacgatgccactgacggcaccgacaatggcaaacaggaagatacagaatttaatctcactccggatgttgaccagagaaatggtcgagacagatctcatcatgcagcattggataatatggagcgggac

SEQ ID NO: 371729 - DNA, 300 bp, Zea mays
aaccggaaaaaccaacccatataaaagggccattcatactttgcacggatgctcaaaatacaaccctttcaaaattaaaatacatacaagcgggacaggccaagccaaatatataactatcagcttttccagccccccacaaaaaaccaattaagtttgacaacccatttaacaaaccaggtgtaacgacaaacacagggggcttgcacatggattggagccacaacaaacaaaggggggggcctatccccaaaaaaactttagggccgatggaaacaaacaaacgtattatgcaaattt

SEQ ID NO: 371730 - DNA, 439 bp, Zea mays
ttatactcgtcggagcccggttcctaggcgtcccagcgcccgactggatctcctggctcgggccgccttgatggtccctggggtcggtccggggtggagttcgaggcgatgagcaggcttgcgtcggggctccagcgcttgcggaggtcgtcgtcgcagtgggaggtgctgtggtcggcgctcgcgtcatgcggcctagtgcttttctcgcagctcgccgtggcgatggttccccgtctcttccctttcctctccctcctcgcgatgctccccatcgcgggtcggtgctctctggttgctcgcttcctttttggttctctgcacagctgcactgcacccgattgcgggagtttctattttttaagcgccagagcgattctgatcttccttcgactgcgtgttgcatagggttggtgttcatcgcggctatcgtgctcgg

SEQ ID NO: 371731 - DNA, 196 bp, Zea mays
aattattttttttttttttttttttttaatttgtttttttttaaaaagggtaggcctaacaaataaaccagacttatagcctggccaggaggacaaccgataacgggccaaaaacctcgaacaatagtgaaaattaagctatcacaggtagcttagctagggataagataaacggcaagcatgcgatgcgacactt

SEQ ID NO: 371732 - DNA, 527 bp, Zea mays
  unsure (1)..(527): unsure at all n locations
tctttttttccgagaggcacccctcctcccctgcgaatcgagagcccctagggccgtaagcccgtaaccataagtcctcctcctctttccgaggccccgccgcccgcgccccggacctgctctgagcgtccttccttggtggcgttaagcgttgcggacgaggatggcgagggaggaggacggcccgcagttcgtgcggtggagggaggagttcgtgtcgcaggagcgcggcagccgcgtcgtgcactactacctcgaagacgcggccggcatgtcacatctcgccgtcatcggcaccgagaggagcctgcgccatatgctctacgtggtctcggaggacttcaacgccgcgtgggggtgcggcggcagcgctgacggtggcggtgcgccgcctgtgtttgcgcgcaagtggcggtcacgccgggaggtggtggattggctcgggtccttcctcccggtgaaggcacttgactcanaattctcaaaatatggatcttttgcggataatgacattgggtcagatggat

SEQ ID NO: 371733 - DNA, 166 bp, Zea mays
  unsure (1)..(166): unsure at all n locations
caaaaccctttaaaaaaatnncagccattcacatagtcatcacatagtacacattccatatttcagccatgtactgcacaattgacttaataaaagactaatattgttcatatttttgcacgctgaatagcacaacaaaacaagttattacaaagcattgccaatt

SEQ ID NO: 371734 - DNA, 536 bp, Zea mays
  unsure (1)..(536): unsure at all n locations
tttttgtatcaaaaacggatacttcaatgcctgtgtgcagagagggagatgatgagcaactttcaagttcaagtgatagcgatgaagatgacgttgaccaagcaagagttgaaggtgatggcagtgtaactagacatgtgccacatccagctgaaaggatcactgcacaaaccggaactgcaaattctcaccgacatgctggtagaagaagaccgaagtccaaggtgtgggaagaattcagtgctgttttaagagatgacaaaattcaatgggccgaatgtaagcactgtaaaatgagccttggtggaacaagcacaggaagaacaacccatctgcggcggcatcttaagatctgtccagcgctacctgcaactgatcggatgcagaaacagaggtcatctccacatcctggttccaccattgagagcatctggaagttcgatcaagacagatctcttgaattgctcatcaanggtttagtgtccaaccttttctccttccattgacaagcagcacaacttttagacagctttggg

SEQ ID NO: 371735 - DNA, 522 bp, Zea mays
ccttcgtttccgcccacgcgtccgactccccgaggtgagctaaaactcatctttgctagctgaagaagatttggagtgctcaaataacttgagtcctctttgtacatatatcatgagaagctagtgtaatgtagcatcgggtaaataattgatgaaagtagcacaagcatgaccctcgaggtgaaagcattactacatggtggttacatgattacacgacatgtgtggatttggaagcacaaagcactatgttgtgtgcttatgcagttcagtcagtaatgtgtatgctacacatcaaccaggagagagcatcactgacttaagaagaacaaaaatataaagaaagagaccctgtgattgttggaacaaggttcactgacgttcgggaggggtcactaacgtgtgggccccatgtgcgacagggtccacgtgcagtgaaccaactgcacggtgcagtacgtcattggtaggatctttactttaagccactttttggtggcataggcttctggcctaaatgac

SEQ ID NO: 371736 - DNA, 521 bp, Zea mays
  unsure (1)..(521): unsure at all n locations
ctgtcttttgggctaacttgtgttatagtgaataaggagtaatctttgtgggaatcaagcataaggcctacaaccaagtgatatccaaaggatggtaacaattaattcttaagtgcaaatttcttttaattagtatattcctttgtgtcttttgtagccacataggaaaaatgaagcacttgagaatgaacttaaaagattttaccttgccttggaaaagatccaattatatggtagattgcaagtttatatgtttatatcgagacaatctacatgctttaaattggttgtatgtgtcttgtggcatatttcaaattgattatcgtattattgccataacctagacataaagaggattatcccatgttcttaaatgaatagagtgctaagtaagaaattcaaattcttaaagcacttaccaaaagggaaattctctatatgactagaagtgtgagactaatgtttntatctaagtgatttatgtagtttcacaacatgagaatgtgttttccatatagagt

SEQ ID NO: 371737 - DNA, 156 bp, Zea mays
gcccccaacattgctagctccaaaaaaaaccgggtttttaatcacaaccaacccaacagttccggggtacattgttttaaacaccaagcgtgcttcacgtaaaaaaggtttcatacaatacaagcttcaacgaattgaatgtaatgaacccaaact

SEQ ID NO: 371738 - DNA, 218 bp, Zea mays
ataaacaaccacatttttttttttaaacaatgtgggtccttcataacaccctgtaattcacctcgcactgtaatggcataccagtattagactgattttttctcatcgacataacaattccgttttctttttgaaacaaaatttaattgttgcactcccgttgagatacaaacatttagattctttaattcgtcgactgaggtgcctgccctacaaac

SEQ ID NO: 371739 - DNA, 283 bp, Zea mays
gtcaggtcgagccagcgaggagagctcgggcgtgcgcttgcggccgtgcgcgttgtacacccacagcgaaaccgactagtgctggtccgacgtagaccctgatgtcgaagcctacggcacctaagttgaccggcctggcatacacgacctgcccgaaacctgcgctggccgaagccgacctgaccaaccttcacgctttcggcgaggtggacggcaccaaggggtacctcgtgtacgtgcactacacgccctaagctaacgggtacgaagcgttctacgcgca

SEQ ID NO: 371740 - DNA, 368 bp, Zea mays
  unsure (1)..(368): unsure at all n locations
ntttaatttttttttttttttatttaaattttgtgttttttaaaaggcagtgggtcctttaaaaccacagtttattgccccttttttattcaccattcacaaatgaacatacagccagttgagttcgagcatcctggcccaaaatgctcttgctaacagttctggaaggggaaagaaaacaaataactgaaatttaaccacaggccacagatgacacaatatcccaaatattgccgtgaccgcgagtcatatacaaaaaacttgcgctcatcaacagaaaagaattggacctgactacacataaatacagggaaaaggccatgaagccaatctgttcaatttattcaacacttgccaaactattggaa

SEQ ID NO: 371741 - DNA, 251 bp, Zea mays
  unsure (1)..(251): unsure at all n locations
ntttatttttttttttttataaattaacatttgtgttgttttaaacaaagcgggccctatataggatggggaacgcaggactgcttaaacatacataaccaaagaaacaagtgaacatgtccagaatgttaaaaaacaaccaacatccatccatcaatccatggatttgcagacattgccatggagatgaacgcgtgccatatattatgcacacgggattaaactaaattaaacaacactaacagagcaca

SEQ ID NO: 371742 - DNA, 455 bp, Zea mays
tccacccattcgccgcctcgtgccacccctagaggctagcagatactcttggtgtgtctgagagagaggatgagagacaggatggggggcaccctcctgcctgccctgctgctggccctcgtgagcctggccgtgagcctccacgccgacacccagtccgactccggctgcggttacaccgggacgtccaccccgaccaccacgacggccacccccacgaagccccccaacaaggcgcccaccaaggacacgccgcccaacgagcacacgacggcgcacgagcacgcccccgagcccgggaacccgcccaaggagcacaccccggcgcacacgacgtacacgcccagttacacacccaggccgaaaacgtagactccgacgtacactcccaccaagacgacgccaaagacaaagactcccacatacactcccgacaatacgacacaaaaacccac

SEQ ID NO: 371743 - DNA, 440 bp, Zea mays
cctaaagaggatacccaaccaattccactcctatgatgaaattctgttagtgcgtagttcagcgcttagtctatcttccatctctccctttcatgtttgcagtattagcctataaaaggaaagcttatttatttgtttcattgtttgtttgtatcgagctgtcatcatttttggtagacaattaattgttatgcagaactagctgctagattgatgtacaacgatgtgtctgtggagaaaggccagtgggtggggtgggattaacgatcttggagtgaaaacttttttttttgaaaaaatggcaggagctctgcctttcagttaagatagggaagatgttatgtacatgcttagaattaaaaagaagcacgctcccaacaagtaaccgggcagcactaaagtgcaaaagaaatcaaggaaaaactctacggttctacaca

SEQ ID NO: 371744 - DNA, 361 bp, Zea mays
ttcttctccccacatctcaagtgaagagaagtggatcttgtttaaagaggacaacaggatattagatcaactcgtacgcaagccaatggaaaaggcaagatgcggagcccaaggggtggaggcggcctggaccacgtggatctgattgcctggatccccaacaacgtggacgcggactgcctggaccgtgtacctcacgcctcacaccgcactatgcgccatgtctgccgtgattggcatagcaccttctcggcacccggcttcgagtacgctctcgccgacgctggcgccaacaaggacctggggtacctgatgcatactgggaacccgtccgacgacgacagacccaaggacagtgacg

SEQ ID NO: 371745 - DNA, 518 bp, Zea mays
  unsure (1)..(518): unsure at all n locations
tttttcttgttccatgctagcggcggcgctttcctctgcttgcgtcatcacgcatcccagccgtcgagcaccagacggtggccctctcagcgccagacgacgccctcgcaactcaggtggcagcaaccttatgtgcggttgcgctgctcttccctgcccgtgtcagcgcgtccctgttcgcaacagcgctcccttcctaggtcctggtagcgcccgacgacggaggctatcctcctggtcgacaaccctccccaacccgcgggcagtacctacaaggaaaacaatacgtagattgtctgttcgtgtgttcgattttctttttggacgcaaattcttgtgcgtacatgcttcaaattccgcgagtcaaaaatatctttgtagtctatcgtactcgaatttgtgtcacatctgttcttctagtttacttgttgatatctgtctntttataaattactagtagtctatcactttgttttctagtttcatcttcgttgtccagtaggttgaagagctagcgt

SEQ ID NO: 371746 - DNA, 481 bp, Zea mays
tctggacttgctatcttcttcacatgagacgggggggtcattaaaaagattgaaggtactaatcacaaacatatcattttgatgacttaaccgtctcatgtgtacttgctatcttcttcacaatgcatttccaatatcgtacatttcgtgaacttgtaggtatcaagctcaacttcaaaagaacctcttgttcctggctgcgattgctgatgcccaaccccagcctccgcaaaaccctgcaggtcgccctcagatgatgcagcctggtatagtgcctggagcggagcattacatgtaacaagtaccaatgttccctgcaagaaccccattaaccccacagcagattcaggagcagcagcaacaacaacagtttcagcagcagcagcagcaagtgcaggctcttacatttcctggacagatggtcatgagaccagtcaccatcaacggtatgcagcagcatgagtctatgcatgctgaccct

SEQ ID NO: 371747 - DNA, 548 bp, Zea mays
cccaaaactttcgaattatggccatcagtgtttaagttatattgaacttccgtgtaagtatgtaacatatgtgaccttagattaatcaataggaagttaggaagacttccagttccatggcactagacctacgattatctaagggcatggcagaccgagtgccaaaggccccccacataagtcggatctggggaagggataaaccgaggcaagctttcccttcgctaatgcagagaggctgctttgaaaccgcaaactgctgacttagtgagatatctctcaccactgtaccagcctaccaggtctacccttctacctacgattatgtaagttttaaatattgattgatggattagagcttcaagaattttggcaaccagtgtgagtggagacaataagatgaatggtagagggaaaattcttgaccaattcatactttttcttgataatagacagctggcgacacataggtatactatgtttagttgaaaaaattaagaaaggcacagaaaaaaagatatgctatgttttatctttttctaactgta

SEQ ID NO: 371748 - DNA, 536 bp, Zea mays
  unsure (1)..(536): unsure at all n locations
ttcttagacaattcgttctgacctgcatggctgcaacttctttttaatggattcttcaagatgagcaccaaactgcatgagcagagagtgcaaacaatggagtgctaggtcagattaaatgttatggaggtgctatgatccacactagaaatcatcatgccacgttagaatccactcaagcagcatgcaatgtggtcaatggcggtaaatctaggaagagacacaggtgctagaatacaaaagcaaaagttgtagggcggtttgatgaaccccatatttacagatgggttttaggaatttccccttagcacgatcgtcatccaacaatgctcttctgtcaaccatgcttaataattcttagacaaaattctctttgccatggagtgtagcctgctggtataatactatcggctttgtcagtcttccattcacagataatgtggtttgttaggctacactatcttgatcngttactagctgtgacatgctagcagtcatgtacttgccttcacaatgtgttggtgtctaaaactgaa

SEQ ID NO: 371749 - DNA, 468 bp, Zea mays
ctttgatgtcattgctgctgatatgtacagtgccttattaagaggaggctcagcttcgggcgatggctggtgcgagaggaatctctttgttggcccttgtccctagtgaataggccgttctaggctgtttgtgcttgtaagaaaaaagcgcgtatgtaatttgtgaataacttacgggtgtgtgggtgtcggtgtaatcgaggttctttaacctttctttttcttctttaatatcatgatatatagctctccttcgagaaaaaaaaatagttttcacaactgaaagaacacagctgtaaaacccactaagtcttgggcaagttattatttgtgaggcgatatagattgcacttgtgtcccttgatgctgataccacttcatggtttcttaccgcttaaagtaatgaaaataatatttttgcatgattttatggaaaggattcataaaaaacaatagtaaatacaaact

SEQ ID NO: 371750 - DNA, 526 bp, Zea mays
ttctatactatttagtagtcctgtatatgcaagctgctgctttgttagttgactcactatgttgcggagtaaagtatgtttgattattctcctttcatgaatgtaacagttgcattacagagtatacagtggttcaaaaaacaatcgaacaaagattcaaacttcaatttaaaactgcacagcatgctaggtggataggtatcattcacctccagcctccaccaaactttctgagtttgtttgtttttgaagtgatgtttccacaatagtgtggaactcacacttcagtgcatcaatatgaatgtttagagaaaaggaaaaactggggggatgggttcagactcaagagttttggtgtgtgtaggaaccatgagctcaacattagagtatcattcacttgtttcattacaataagttatctgtttttaaacctttccatttcaagcacatcctaacttctcttttttgccctctatagtaatccctgcttgtctaatatttccaatgtaatttcagtaagagctgc

SEQ ID NO: 371751 - DNA, 307 bp, Zea mays
ttgtgttattccggcatttctagatgctccatgctattaggatgattatttacatggagaaaggaacgttaatctgctatttgagattagcagacgcttctcctggctgggcaattctgggaggatcaatgctaatggagttccaatatgcttttgcaaagttacaccttacagaaatagatggtagagagttttctccttttgtcaaaatgcagctttcacatgtaattgaccggcgtgtctcgttgtcttttggtgatgtcgaaaggacctatgaattaatttaacatctgggtgctattcatct

SEQ ID NO: 371752 - DNA, 440 bp, Zea mays
tctttggggaggaggatatgaagaggattgacccggatccccctggtggggaggcggggcaaactgctcacgatcatcaaaatactcttcctcatcttcagctgacataaagggcacccataggcctgctggtgccattcattgatttctggtggaggaggatgaagaggcacatcaggcgagcggggagcaaatggcatacccatggaagaagcttgacgacggaggttgtcgtcagtctcccgctgacgcctagccagctcatgcacattggaagatatgttcctgcacatggaaaagaatgctgcaataccatgggccagtcgagcacccatcccgcgaccacgacctcgaccacgaccatgtggtgtgagagatccgcgaccaggagaggggcgcgaggtgccggcagcatcacgttcacgagagctggaaggggc

SEQ ID NO: 371753 - DNA, 544 bp, Zea mays
tctgtggcgtcggccgccgacttgcagcacatcgagtccatcgccctcgacaccgtctccttcgaggagctcctcggccactgcggcgaggcgctcaaagtctacgcgcgccacgccgacgccctccagtcgcacctcgcttcctttggctacgagcccccggacgcacaacaccccgtgatcgatgtggatgtggaagatggagatgtcgggaaggttggggaccctggagatagatgcctcagcgtgtcgcgttcagtgctcaggtcgggtaagcggcggtttgatggccacagcgatgcgatatttgaagagtcactgaaggatcttgggttttcagatgcttgtctagccactctttcttctgaaggcgcacattatggtgagagcccaaagaagctctacaagaatgctgaaagtactgatgatggcgaaaagatcatgaatgaagctgaaattatgactcccctaaacgaaagaaacggtcaaggtaattcttttgaggagtgatagggcatcaaggaggatatgagcactccctcta

SEQ ID NO: 371754 - DNA, 547 bp, Zea mays
ttgaaggtgagctttggggttctgttagtgctaagaatgataaagtctctggagaaagtaaagattttcttatagtcgcttgcaaggactctgcctgcaggcggggtgacggtgaaggtactaatgcgctgtctattggcgctgctggctgttcggtgacccacatcaggaacccaaagctaaaagagaactacacttatgttgatgttcgttctggtacaattgtagcacctggtggccgtatggattggatcaatgtgatatgcctgctgttcagttcaggttcaaatggaactgaaaagtcagttgataataacacagtaaatagataccaattgaatgatccttattcgtcatctttgtttctcgagttctctgatgttgctgttagctatgaacctcattttaaaaatttcactcttagtgctgcagcaactgaccccagtttttctcatgccttttagctgcatcatcatttaaactccataataaatctgcatcagcctctgcagctgctgatttgatatcccattacgtgatcttggaa

SEQ ID NO: 371755 - DNA, 291 bp, Zea mays
ttctctgtctcaaacaccaagcgcgccggctggggtggatccgccacgcgcctctcttttgctcaaccgaagcgggcactcgctctcgtcgcggccctgctctatcgcgccgctgggagcatgccgcctactgcttcctggtccgagctgcctaggacctctggccctctccttggtggaatccggctggactcttacctactgggatgcttacctgctggggtgcactaattgccagcacattggaccgataactgcgagctagcatgtctgcactgaccccagctctga

SEQ ID NO: 371756 - DNA, 355 bp, Zea mays
tggggggggtgttcaaacggcagagagcaaaatcgaccatgaccaccgcgcgcacatggctgcaacatcacagcacatggttacaccaccacttccaagtcccaaccacacaacacatcacaattcatgttgcagtcccacactgcccgacttctacagtactactacagctgtgtcgctctatgtttttataggctgtggatcgtcaaaaatccacgcagaaacgcctgacccacatggtttctccatgacttccagcaaaaaaaagggggggcagacccacatgcttttcacaaggtccgcaagtcggctgcaccatgcttcttggaggtctaacagaagagaagcgcacaga

SEQ ID NO: 371757 - DNA, 189 bp, Zea mays
tttgtcttcgtctgtggagtctcggccagccgttgtgctcatagctactgttcttgactgccctgcagcgcttgaacatgatcacccacaaaagactgacagggttctggatgctggttaccggtggattgctccggacccagtatatgaggtcatttgttgccagggacatcttgattgtgtccgact

SEQ ID NO: 371758 - DNA, 345 bp, Zea mays
gtagaacacaaaaaaaaagaaaaaaaaaaaaaaggggatactagaaaaaattaacaaaaaaccgaaaccaaggggggccgctcttcaggaggcaccctgccttcggcgcgcgtgctgcgtggtcatcgctctgttgtggcgcctcgtaacttctgtttgcgcgcggcgcttttcaccagcgtgtcgggtgggacgagcgcggcactcccctgattggtctggtagagcccccccctttttccgcctggtgtcttcgcttaggggtggcctggatggatcgtcccctgcacttgcagagcctgatgggtggatggtgggcgcccttttgcgtccctttattgcccc

SEQ ID NO: 371759 - DNA, 234 bp, Zea mays
gccccccgagacgcggccacccggggggcttctagcaacatttctcgccagtcccccagggcaagaacaagaacggcatcaacggcctggggaggaactgcaggctggtggcccgtggctccctccagagcgaggatgaggagccacgcgcccccaaggatcacctcaataccgacggaccacaagacccacaggcccaagaacgacccccttcaggggcacaggaagcccagt

SEQ ID NO: 371760 - DNA, 372 bp, Zea mays
tcgttccgtagttccaacgctctgcgcggcatttcgccgagcatacaccatgcactccctgcggtgcgcccttcgctaccccatccccagtaccgccgtctctttatccacctgcggcctccgccgtatctacttccaccatggcactccaccggcgctccgctcagcgaccaccggtgaagaccagtggaacgacgcgtgggagaccgcatggcttccaggcgactccaccgtctcctgccgagcgccacgcgcgccatgggagtctcccgcctcggcttcggagtacgccatcccggtcatctgcgccgggggggatccagacactaaggccttcgtggcagacatggacgagcgctgggccgagcgcca

SEQ ID NO: 371761 - DNA, 430 bp, Zea mays
ttaattgcagacttttcttcacaagctgaatccttctgcaagaccatggacagaacatttactattgatttgtattcgtcctatataaaacagaaactatcagaattttctctatcaaatagttctaaatgtcttgtagcactaattatagaaccaggtaaaaaagtttcactctttgagcttcttgggaatattttcattttttcctctttagcctttagtatgtaactatgcgcactatcatttgatgctaatagctggaaaaaaactcagtacttttccatgccatttactggttcaacctcttaacccatatttgtgtagtaatatacaaggtgcaggtggaatcctcatgatggatcctcttttccagcgagtacttgtgagtgagtgtagaagtcgaaaaatacctgtcatatttgatgagata

SEQ ID NO: 371762 - DNA, 510 bp, Zea mays
  unsure (1)..(510): unsure at all n locations
tcgtgtgcggaccgcgcccacctcgcgagagaagctcgccggagacctcggagttcgtgagaccgccgcacacctgcacgtcttaaggccacgttcccatcacctgaaatccttgaccaccttccgttatctagaactcaaaagagccggccaccattaccagggagagctcgaaggggataaatcggttagtgtcgccgcgtcgccgctgctgaggtgtgcgtgcggtggtcgcgggtagtgccagcaagcaggaacacacacgagtgagatctagcatcggaagacggctgtggcgggcgaattgcccaacggaatcgaagaagaaggccgcggacgcgggcttcaccgtcggggtcgatctaccactccctttgcgcaatgaggccacgagtcatttgaagagcatcctgctacctggcatctcaagtcctaggcangttgtgcccttgaccacttttacccaatatgttcttaatatcacttattcacgcataggtttaatttgat

SEQ ID NO: 371763 - DNA, 434 bp, Zea mays
  unsure (1)..(434): unsure at all n locations
cccttaatttttttttnnnnnnaagctgcaaaggggaattactttgtctcaagggtgacaggacaacttaatttacatgatgcatagaaaatccaaaaaggatctaatgtttagaaactctaagcaacaatgcaaaacttcaaaaaagatctaagaaaaacagaacatctgtatgtacggacagacttttttttggcccaagagcaccaataatctctaatgtttatcacaggggaacttcaaggcagcctcagtgcctcacaagtcacaatgttcaacctcatctttatcgtcaaaacctcctatctagcaaccacatatgtctggtgccgttaactgaaacaccctatttcatctggggcttcatatcattgcaacatgtacaatgcggcgagtggcgaccctgaaacaaccatgcgcttccatgccaactt

SEQ ID NO: 371764 - DNA, 375 bp, Zea mays
  unsure (1)..(375): unsure at all n locations
ttctttcgtccgctcgctcggcgtcgcctgcttcctcccgcaccgagagtccgagacgccgcttctcctcccacctacctacacctcccctntatccatcctcccagcctgatctaaaccctaaccctaaacccctcccccaccaacccagcaaacgtcgatggcattgggagatctcatggcgtccaggttcggccactcctcgtcctcgccgtcgccgtcgttggccccggtgccgccgctaccccatcaccaccacaaccaccaccagaaccacgtcgcggatgacctccccgtcgccagcgggccggagcccaagaacgggttggaggtccccgaggcggagaagccggcgcccgaggcgtccctgcccca

SEQ ID NO: 371765 - DNA, 460 bp, Zea mays
tttactcgtccgcccacgcgtccgatatgtggtccaacaatactaccaaatgatatacagccatttaccgatggcctacctgtgtaattttcggtaggtcactgttgttaaattgttcaacttgtgccaacccaaaaccagaagccctgcctgttcggctggctggctgcggtgtagcagccaactaactgatctgactatctgaggaggcaaatagtagtagaacgctagcaatagtaaaaaaacaacagcaacattagcttagaatctgaagcgctaagcttctgtattacctctctgggaaagcctccaattactaatcattggagtaaggaatttggtgcaactatgcacctgataacctgtatccacacaataagccatactaatcattaatcgccccctcagaaatctctaaaccctcttcaacctgcagacaccgccgatgttactgcctggt

SEQ ID NO: 371766 - DNA, 224 bp, Zea mays
aaacaaggggccttgataacattatgtaggggacgcactcttccttatccagtttctccatttccctttcaagcccctttgagactacacattatcaactcgggatgcttatccttgggtggtggtggtggtggtggatccttctgattatgggggagttgagcttgcatatccggcatggagttggacatctggtgccgcagctgaatttgggcagggaaaaa

SEQ ID NO: 371767 - DNA, 398 bp, Zea mays
tgtcttgctaaaataaataaataaataaataaatggcgtctgctaaagggacattcccggccatgtcaagcaaatacgacccaaagttccaggacgggattagggcgctggcacacagtccgattctaggggaggtacgcgtatgaatctctgaatcaacccaaggggctgttggttcgaatacataacttcgatgctcctgtactccagatacgtggcttggggatgattatgggtaccgaattcacaaacaacaagtcaccgactgatctgttccccgccgaatggggtaagtcaatgtagcagctacagccaatacacacaatggggcatggcgtgttccactgccccgccgaatggcctgtgtgtatgatgtgggatgatacctcttttcaggg

SEQ ID NO: 371768 - DNA, 379 bp, Zea mays
ataatttttttttttttttttttttttttgttgttttttaacaccttggggggggtatttgatccactgacacaccatggtaattataatcaaacagcttatgatgcaaaaggccctttgatcaggagcagggtgcctttgcattttgtgccaaaaaaagagagagagagaaaaaaaaaccggtggcaaaaaaagacattgttataggacaggtacatgttcatgcatggcttctctcttctgtataggacaagatgagacttgatggacactgactgactctttcactgacaagctgggcacggagagaacagttgacacaccaaaacgacttcattgatcagggagatacagaggcctgaagggcagggaccaccag

SEQ ID NO: 371769 - DNA, 357 bp, Zea mays
tttcttaccaccaaaagagggtgatgaaaatatgaacactgatcattcagaagctgttgtccataaacgtgcagctgatgcaagtatggcacaggaagatcctgaagacgtggaagatcctgaagaaatagaactatatgaagatgacgaggacatggatgatgctcatgctggagcacagaatggagaacagactgagaacacaaatgacacagatgctaagccagaagtcgcgaccgcagatggtggaactaacagaagtccaacacaacctgcagtaggaaatatcataatactccatgaaagagctgcttaaatggaagacaaactgtctgcggcagagaaaggagattctgt

SEQ ID NO: 371770 - DNA, 173 bp, Zea mays
gcaaaagggagttttttttaaattggaggggctaaaaccaatttctgacattttcttttcactacagttgttctattagacgacatcacttcatcaactaatgaagggaaaaggctatagtttaattacaaagcaacacaatgggaaacaaaaaaaaatgaagactactttct

SEQ ID NO: 371771 - DNA, 314 bp, Zea mays
cgtggatctcatagtagaagctataaggaagcttagcgagccttcagggtccaatacggcaatcatcgctggatatatagaggtccgtggatataaatttatagtgtgctcacttgtccgcatgaaagcccgatcgttcagctcaactgaacccagctgtcctactaattcttttctggtcattgctatctgtaatgggaatcttgagtctaatccttccagatgaaccatctctgctgattctctgctaacttgggacaatgatccattacctgtttttctgggggggggggggtgatccttataaacattga

SEQ ID NO: 371772 - DNA, 341 bp, Zea mays
  unsure (1)..(341): unsure at all n locations
gcgggagcttttttatgagtncggggggtaaaaaccacacgcgtatgtgtccctggaataataatctttatctttacaactaattaagtattcattgtagacgtccacatacgcggggttctgcctccagaaatctcggtcgtggtagcgcccctccatcccaccggcgccataatcgcacccaatcttgcgctcccctgtgctccgtgacctccacatttcacgcagccgatctctgctccctgcggcctcctccttcccctaatcacgcccctgtcccgctgatcagcagctgtcgccttcccctgcccgcatcacgcgcatctcgcttcccctaatca

SEQ ID NO: 371773 - DNA, 412 bp, Zea mays
ttgttcacgcgtccgctctggccctcctctctctgatttcctcatacaagttgttgagttcctgtccctgttcttggacggacacatatccaatccacctgagatttgctcaatttactccagacacactggcaacgaccggaccgtcgaacctcgtgtctcaggagacatgtcgacggtggcggcggaggcgcggccaagctacgggttccccggatccgggaagggggcagcggcggcgggcatgggaaggaggcggacatggcggcggtcgggaagaggaggagcgacgacttcttcatagaggaagaggcggaggaagaggtgttgaccgatacctcctcggttgggtcaccgtcgggctcgtcgatcggtgagaactcgtcatcagaggccgcttgtcgtctacttc

SEQ ID NO: 371774 - DNA, 299 bp, Zea mays
ataatttttttttttttttttttttttttggtgttttttttgaaattgggggggcccgaaaaaacggattactggtaaaataacacatctgagttcatttccaagagaaatggcaaaaaaaaatcaagagtctgcaagtgacagcttttttgttagttaggtggggggggggcactaccatttgtaccagcagttcagtaacctaacacggtaaaacagcatcacgggaaacaacaacggcatcgataggaatctcttcctcttgagtggaaaaaagtattcttatggttttctgcatc

SEQ ID NO: 371775 - DNA, 354 bp, Zea mays
gtggatgccatcggagcttaggaaggtgatcatggctgcgcaaccacaatatgctgggtggacgcaaccagagtatcagccctatatgcaaaagcaacagacgggctacaaccatgggggtgctactgactaccaggatggtgctgatactggctaccaaggtggaccttccgtggtatgaaggcggtgaccaagggaacccaggccgtgcctaccaaggtggtaacactgggtactaaggtggcaacgcaccaccttgctaccaaggaagcaacccaccaccttcctaccagggaagcaacccaccacctccttaccagggaggcagcccaccaggggcaccaccttcctacc

SEQ ID NO: 371776 - DNA, 338 bp, Zea mays
tccacgcgtccggcaaaggccaaggccaagcgagacagggagggaggagatgtaaccaactgtataaagcaaccctaccgaccgaccgactgcctcttaattggattttcttcactccatactcaccacgacacactctgcattttccctacctattctcttaagaaagaaccagctagcgctcgcacccacatacaagcctgaagcctacccatacccgacatgcctgcgtcgcctgatttctacaagccagcgccgccggcgttctcgccgtgcagctcgccgctcctgctgcacggtgcagttgcagcggtgtgtgcagtatctctgtagagcgc

SEQ ID NO: 371777 - DNA, 106 bp, Zea mays
ttccactcgtccggagaaagggggatcgcgcgaggcgagatggatgtataccccgtggggaggtgcaggacaccgtgccatggggaccgcaggcagcgccgctcgt

SEQ ID NO: 371778 - DNA, 130 bp, Zea mays
agctaatcttctttttcataacgtcacacgcgtatatcttcctagggtcggttttattagactttcacaatttctctcacgggaggctatcattgagatcctgtgctatatgccggagcacaactggtcc

SEQ ID NO: 371779 - DNA, 267 bp, Zea mays
tttatattgtatcaatgcgcgtagctcaagttatgcaaggctaggtctgttcagcttgggcagaaggtcgttccgcacttgaacatgccccactccgatcttgcccacgtgctttatctccacgctccaacggatggcggtggtgctagcagccggtggcggcgtcggtaatcctcaccaccaacaatagggacttttcgtgcagtcccttggcggcaccgtcgtgcccggtagcatcagttcagacgaggacctggaggatgagcc

SEQ ID NO: 371780 - DNA, 312 bp, Zea mays
tgtggacgcgtgggcggtaggatacagatcgaacggttatactatacccagatgggagtgacccgatagaggactatggtagaatgagtgaggaggtgatagtgacacaaggggctggagtgggagagcatggcaagtctcatgatgatctaaaaatgtgttctgcagacacagacattgatgctattctgcaaaaggaggcccaagtaatctactcaaaattgcaagacatcattggcactcccagtggcaacgctctaaaaaagtatctggatggattacaatgggtttatgtcggagataggttaaatg

SEQ ID NO: 371781 - DNA, 383 bp, Zea mays
cccactcgtccgtccacgcgtacgcccacgcgttctcccacgcgttggctcacgcgtccgtccacgcgtgcgctcctctgccttacctgcccgtccgcgagacaatcgccatctgtccgcctgccccgctctgcttgagatgaccccctccgcctctatcctagggccttcgcgacccacggggtgtggctgtgatccgacctgctactccatctgtgatccaaacagtgctcgcggtaataatgagctaggatctgagtgagataattataaacttgtattggtcggcgtatcgcgccgaggggattgtgaccagcatcgtgagccaggagtggatggccaacctgagctgggtgctcgctgccctttccccccggcagagc

SEQ ID NO: 371782 - DNA, 147 bp, Zea mays
tctcaaatgggggtggagcggcactctgggggccaccattaagctagtggcagttgggtacagcttattagcccagagaaaggtgcggacacgactacttatatcgatttgatgagtagtctgggtgataggcaccgagcggaactg

SEQ ID NO: 371783 - DNA, 279 bp, Zea mays
tcagatgtggcttgtttcatcaaaaatgcgaattcttagtgcagattcctgttccatgtatctgcaaagaaaactaggctggtgcgacccaccaaatgtgagcacattgtcttcccagttagtcgagctctccaagtctcatgatgatctcaaaatgttttctgcagacacagacattgatgctattctgcaaaaggaggtccaagtaatctactcaaaattgcaagacatcattggcactcccagtggcaacgctctaaaaaagtatctggatggatt

SEQ ID NO: 371784 - DNA, 188 bp, Zea mays
tttccctgccgatcatctatcactctctcgtcagatcctctcggctagctagctagctaggacagaggagggaggggacgtaaaagcaacctatagcaatcgcattcaacaatccagtgctaataaacattgctggcggtagcaaattaaacccatgaccagaacctcttatcttcagcatccacttg

SEQ ID NO: 371785 - DNA, 376 bp, Zea mays
ctcttatgccgcgtgccggcgcgccattgcactgcaccaccagcctgcctgtgcagagagacggaggaggagacacacagggcagcgaccagcgaaggaccgagaagctagcaacggcaacgagcagaggcccgagcccgacacttgcgctccgattcccccgtcccctgcacctctcccgtctctccaggccgtcaccaacaccacaccaccacccgttgccacgctgccggccgcccacgcctagcgccagccgatcctttcattccattcttcctaccttcgtccccgtctcccaattttagccgcacggacgccgtcgtcccccggcgtccggagagcatgagcagctaggccgccatgggggcgaagagcg

SEQ ID NO: 371786 - DNA, 237 bp, Zea mays
ggaaacactgtaaaccagattggtggaatctatagaacaaagagcatgttaataagtttttatcccagaggattccttagacaatcaaaggtttccggagggaaaatattcaaatccttaaccagatggctgcgaatatgaaaacactttaaacctttcgtgtgagaataagcttctaatccacgctgaccatttatttttatttattattaccatgcttgtccaagaaggaagggc

SEQ ID NO: 371787 - DNA, 382 bp, Zea mays
caacactataaccaaactaatacaggaggagaaaataacacggggagcccttatggccattagctagaaacaaccaatccttgacacgccagcaccatcaaactcacaaccagcacatcaatgtccctatggaaatgagtcaccagcacgccaacgattggcaaccgaccaatgttaactagtagatataaccaatggaataaaaaaaataggcctactgagaaggacgaagcagctcaaggaaggaggatgtcagactatgaacaaaagaactctgaaccaaacggaggcttatgggaaggcagatgtattggatagctagaaggcggtgttgctttcacctgcagatacagagctgacctctgacttgaccacgacctat

SEQ ID NO: 371788 - DNA, 311 bp, Zea mays
tccacctccttggttcccaatcccagatcccgcactctctttcagaacccaacacgccactgcctagctagtagctagcagagcagctagccaagcaacccaaccgagtagccgaccagagagagcgagagaggcagagaggagcggacctgcccgtcgcaatggcgatgccgccgaagcccggcgacccgccgcagcgctcgcctgcgcggagccccaacctcaacctgccctgcccgctgccgccggtcccgggcgggccgtctgcgccgtcggccgccgggttggcccgtcgtgcgcgagttaccacc

SEQ ID NO: 371789 - DNA, 232 bp, Zea mays
gttacaatcttacccagttcattgattattcgagaattaagtggatagtttccatgttcatcacaaatgttacacacatacttgccatgcaagaaccttaaagtacactccaagcacaacgtatagcacaggcagctgcatgcggccatgcttaaaaaaaaaaaaaaaaaaaaaaaaaaaaaataaataaaaaaaaaaaaaaaaaaaaaaaaaaaaataaaaaaaacccccg

SEQ ID NO: 371790 - DNA, 303 bp, Zea mays
tgtaatttgttgaatgttcttgatttcctcaagaagcccaacgcaagtgagcttgtctccgggactgaggatagagtgaatctgtacaacaagttccatggtgccatcgaggcagctcaccctggcatgatcaagcagcttgagcttgagacagaaagtgttgtttcgggattttgttgtcgatgccaagagtggagaaatcaaattctcaatctgagtttcacaacagctaggtactggactggagtctacccatattgggctctcttgttttatgtgaatgagcttttcgtggcttttttc

SEQ ID NO: 371791 - DNA, 172 bp, Zea mays
tctccgggaggagaaactttccggcgttggagggcgacgagctctcagccttaacaaaaagacccaccaggtgacacacagaacatcctaccaccgaaggacccagaagcttgcaactgcaactagcaaaggcccgagaccgacacttgcgctccttttcccccgtcccttt

SEQ ID NO: 371792 - DNA, 325 bp, Zea mays
tcgaagcatagatagatacacctgtgacaggtgcagggatagggtttacgggcatcattgccggaggctaagctacagtcacgatgattacaagaagcgttggagagacagattgtcacctgagggaagaagcgcttgtcagtggcgtatatctgatgattacaagaggcttggcagagtcagagcattaccagcatgtaagagcgctagtagctgcccacctcgcaagatgttacataatcctgagagatctccggtgagtggctacaatgaccagtcttcacgctctgtgaggccatctatataaacgcaatttacttgcaaa

SEQ ID NO: 371793 - DNA, 348 bp, Zea mays
ttttgtattaagtggtacaaatggagtggtacatgaagttgttctttactgggagcagactgatctacagacagtgaacagcaaaggaagttccataagaggtcgagatgctgcttttttgggcccagatgataatcaatatgctattctggaggaagatagaactggtctgaatctctttagtctcaaagctgtagctacaaaggaagctcttgaaaataatgctgctgtgcttgaagaaaacacttttgctgataatgctgctagtgctacctcaacggaacgtcaaggtcctctacagtttacttttgaatcagaggttgatcgcattttttcttttcctctaga

SEQ ID NO: 371794 - DNA, 219 bp, Zea mays
cttggaggtgctcttgcaatggggaaaaaagggattacataggacttggtacagacctcaagcattataaaccaacacatgccagactccttacaaccaaaggggccaccagtttacaactaaaaagtttgcaaataggcattttccagttggcaaaaaactcggccatttcattccaatctttcttttgggacagccactcaaccaagcagtacagat

SEQ ID NO: 371795 - DNA, 248 bp, Zea mays
tggactcgtggggaagaaaagccagcaaaagcagatgagaatcatgttcttgatggcagacagcttaagcctcctgttctagaagcgtctcctcctgattgcagtgcagttgaagtgcaaaatgtcatgcagcatgaagcttcggctaaaagtcaagtttccctaacttcttttgagggtgaattaacatcagctggggacagtgtccaggctgttggagaacatcatctttgctgcatcagaagagt

SEQ ID NO: 371796 - DNA, 307 bp, Zea mays
gagaacgaaaaaaaaggggcaccccaagcctttttcactggatacatgcataggggatcttttcgttcataaataatatgggtgggagcctttagttacagagatttacagggatcgctttaccaccgggaagcagaaatccaaacaaaaccaaaaaaaacggagtttaagcagacagcaagagctgaaatttacagcaaaagagcgccttttttttttttgtccaagggagagaaaaaaaacagcccgttcgggagggtagacccgctgatccatccatatccactgaatgatcagggtcagggca

SEQ ID NO: 371797 - DNA, 169 bp, Zea mays
ctcggggaactgggaagggtaccattcagtttgcaaaaaatgtgccccttaacataaacacaaactcccaccaaaataagaagactcgggggggtttgccaaagaagcggcaatacgctcttgatacgagcagggtagcaaaaaaccccgccccattgggggtttcaat

SEQ ID NO: 371798 - DNA, 224 bp, Zea mays
tttacctcagtcctcagcccggcgagccgccgcccgcatcgttcaacccccgtgcccggccgtcgtttacctaccgatcgcacgcgcgcgtgggtccttttatcacctctcaagtcccagcaggatcggcccccgcgcagcttcgcccccacatctatcgacccgaattcttcactcaatggacccacccaagccggcgtcctcggtcgcctcgtcgtcggggc

SEQ ID NO: 371799 - DNA, 286 bp, Zea mays
ccacgggggacattcaaactcaaaattcaaatgcattagaaaaacagtggcacggaaaccatacaaggttgctgcaaaactgcatagcttacatgcttatatatatctgggtatatgaatatgatgagtttccgccactaacaaaaaaaagggcactctgtttaaaccattacgtacatgctgggattacagactacggtaccacaggcgtgcataaaaagaagacgacagatcagagcttagtactttttgcgagagaagtggttgtcgtttggattttttttcc

SEQ ID NO: 371800 - DNA, 257 bp, Zea mays
tttccttccacgcgtccgtccacgcgtccgcccacgcgtgctaggaagtgttcattcaagttaacatgcagggcaacaacatgtgaatacagcagaccagttctcaaaaacagaactaactgaaggttcaaaaattgaacagcctgtccaagtagagcaacagagttcccacctacaacaagcatatccagaaattcaactacagcaggctgaaacagatagctttcagttagctgaaaaagaaacagggtattttg

SEQ ID NO: 371801 - DNA, 187 bp, Zea mays
tctggagctcggccgagctgagcacgcacagtgtgattgcgcgtgcgtagcacacgctattctacagtagaatcttcacacattaggtacaccctcctactttctacctcctcccgctgtcacccctactatatttcacttcacctcatctatttaataatttatattcacattaattaattcatat

SEQ ID NO: 371802 - DNA, 252 bp, Zea mays
acgcgttgagacacgcgtacggctgcgggaaagcacatcgaggcgctaggcgtaccggtgaactaactctgcctgaactgtatgataaatgaccgtcacgcccagaagcgagttaggatgggccgccaggtaacacgcatctgtcctcagccttgcgtaagaactttaccaaaagtgttccaaggaaatggatgaatatgctggttgcatgttattactacaccaacgtaattttacttttgtcttatggag

SEQ ID NO: 371803 - DNA, 214 bp, Zea mays
tgtctgcgccgtgttcctcttcccaatggcctcctcctcctccgtcccaccggaaccctagcgccgcgggccaccactaccagctcgctcggctcgtgtccagatcccacgccgcgccacaccacatggcggcggacgcggcgcagcagggcccgggcgtccaccggaggcgcggcggggccgccccgcgcgcctggtgctgcctctttgtcgg

SEQ ID NO: 371804 - DNA, 134 bp, Zea mays
tgcgtgcccaccgtccggtgtcagatctcggcgtcgcgatgggttccaccgtaaccctagtgccccgggccagcactaccagctcgttcgcctcgcgggcagatcccacggcgagccacaccacatggcggcgg

SEQ ID NO: 371805 - DNA, 211 bp, Zea mays
tctgtcatctgcgccctctgcattcgagatcgatctgagctggcaccgacccagatggtcatggcggaggaccggagccccaagcccagccactgcaaagcagcgagaggccgagccgccggctagccactcaccatagaggagagctgcgaagaccctggctatgcgaacgatatccgcaatcggctcgaatgcaaccctactctgccac

SEQ ID NO: 371806 - DNA, 232 bp, Zea mays
tcccacacgtgcgctctttcccaacctgatcggtcagacctgggagtctctgatgccgtcgtccgagcccgcggcgaccagaccgctaaaggccggtgaggagctctgcggcggacaggcgcctagcgactaacaatgaaggtgagggatagtttgaccatctacaggagacgggaaaagggagcacctcgtatggatccaagggtggcccacctaggacacctaatggcaa

SEQ ID NO: 371807 - DNA, 198 bp, Zea mays
taccgttcacgcgtccggccacgcgtacgcgcacgcgtaggaagcgctgcactagtacatgccattctacaggagaaactggacacatttggtatactcggctgcgttctacgggctgccggtgccacccggagtgggctcaatgcttcacatgagggtgtgatggcccctagtaaggaagtgtgggatcttgccact

SEQ ID NO: 371808 - DNA, 240 bp, Zea mays
gccggcaccgacccgtacttacttgctggacccacccacgcgtcctcccacgcgttcgtccactcgtacggcgaggcactcaattcatgcttaggggaaggtagacaaagtcagactctgttcatacaaccccccaaaaacctacctacacaaaccaaagtcaacgcctaaaaccaagaacaggggaatcctttgtctcttttcctacttttctccctttaagattcctttcttgccttc

SEQ ID NO: 371809 - DNA, 322 bp, Zea mays
ttctatctcgtccgagcaaataatggcaccccttacaatctgaacaccatcacacctgttggtgtcaataagaactcaagaacagctgaagcagttgacagcagacatcttcataaagtgggttctggcaatctcaatgggcactcatttgatcgtgccggcgaaggaggcaagtttgtaaattttgacatcctagtctccatttttatgtttgaccctattctctgccatttccattctttaagcatgtgcttctgaataaagctgttaggtttatcaggattgtgaaagctaaactgtgaaaaggtgatcaattaatgca

SEQ ID NO: 371810 - DNA, 183 bp, Zea mays
tccctcgcgtccggacggagagaagggcgagcggcactagcaagcatggcggcggccgtcctagcgcccaagccgcctccttcgctgcctaccatggccttttcttcctcatccccctcgaggaatgaccctgccttgatatgcccgcgtatcctctgagaagatatgctcctccgccccatt

SEQ ID NO: 371811 - DNA, 163 bp, Zea mays
ggcaaccaaatccccaacgatcattattggttgggcccagttcctcaagagacagaacgttttgttttttccaacattatacctggggaagggaaaaaggacccaggcattgactggcctggagggccatccgacgcaaaaggggtccaagccccagtttttt

SEQ ID NO: 371812 - DNA, 220 bp, Zea mays
tccctctcgttcgtccactcgttcgcaggcaggcaggtcggctaggagggcaggaagaccgaagaccgagccgtgcgggggctcggtacgggaacgggacaggaccccaaaatttcagatccttcctgcccgcccgcccgtgcccttcgacgcgtttttcttgtctgccgagctccaccttcttcctgttcttctccagggggatcggatacgccacatg

SEQ ID NO: 371813 - DNA, 163 bp, Zea mays
gggaaaactttacagggggatttaattacattgcttttcggaagactcagaaccttgtgacatttggagaaaacctagaacacgccaagacaagaataagtggaacggggaaaacgaactgaacagaacatgaagctggcatgcctccccccccccaaggaaa

SEQ ID NO: 371814 - DNA, 153 bp, Zea mays
tcgtaaggtaaattcgtcgagcttgcttaaagttggccgttggaacttcctttttaagaactgtaaggtttctttagctggccattaggtgggcatggtttgttgcatgtattgactgctctgtttgtttttgtatacattacaatttctttt

SEQ ID NO: 371815 - DNA, 170 bp, Zea mays
gttcctactttttccaaccccgcaaaaaaaaaattgctgatggatccaactgtatcttttttacaatatctatccagatgtatctggttagactgctaaaattcccagtccaaatttgtatgtaaacccggcagaggaattattctcatctcaaaaggaatcttccccca

SEQ ID NO: 371816 - DNA, 210 bp, Zea mays
tcccgcggcctccggggggtgggttcgctggatggttatcgcctactgatccatccggaccccggatcctctgcaaaggcaccgcctttgtggattgggttctatgcgcccatgcagaagggtatggcgcgcctgcggtgaggcagggctttggctcagttcttgcgttggactagtccggagatgctttcgtggaacggggcacggggg

SEQ ID NO: 371817 - DNA, 347 bp, Zea mays
cgcttatcagttgatagctctatctgctttcgtttgtacaaaatacaataatagctgagagattatatgagctaaaatcatggtaaccattatcctgtttgatattgctcatagatcttttggggtattctgggcacaactccatgtgtgcatgttctaagataaactcatctaatcagtcgtcttgtaagatgtatgtatctgctataaaattagagatggttttaggagtaacacctcatgtgtatgcagtgtctgttattttctgaagcatagttgtcacctggcagagtttattaatctttttcttttgcaaagataatgcgagaccctgaaactggaaattc

SEQ ID NO: 371818 - DNA, 438 bp, Zea mays
agcgcgtgcctgtcgtttcgcgaacacgtctgcgccgtcgtcgcagctgagcgtcgccctgacgaggacgccgcctccggccgacggcggcgccgcgccgccatggaccagctcgacgacgacgtcgtccgcgtcggccgggacggcggcgcagcggtctcggatgtgcgccgcggtggacttaagcttcttcacgtgggttatcacctccgccagcaccgcggccttgtccatcttgtcggagcagggcaccatggtccggagcgtggcgaggtgcgcgttgatcctctccctccggcgccgctccgcctcgctgtggctcttgagcgccatcgccgccttgtcgtcctggaggtggtctcccttgctcctcgtcgcctcctccgcggaggccgcggcgtcgaccagcggcacgctgccgtccaagatggcaggcga

SEQ ID NO: 371819 - DNA, 366 bp, Zea mays
cttaaactgcaaatcgtgtagtttattaaaaaaaaaagatccagtattatgatgcgcattgtcaacaaaacagctcagtacacacgtacaattgcatccgccacatcggccagggcacaagaatacacaacaaggcgtaacacaattgtttcaagatgaaagaatcgattcgtacccaaagaataaaacagagacaatatactgcggctagtgcagtacaacaaaacaacagtactctacagagccatacttgtcacactagaacgcaccttctcttttatccttcggccagaaacgaacatcaaaatggagtgcgggtgtgaacttgttcgcgttttttttttaaaaaaaataaaaactgggtag

SEQ ID NO: 371820 - DNA, 377 bp, Zea mays
ttccacgcgtccgggtaaccagggaggttacaaggcgtttgaacctgccatggataaccagagtggctacaaggcatatgaaccttctatgggtcaccatagtgcttcctgggaacccgtgccttccacgggtcaccagactgatttcaaggggtccggagcttcaactgttcatcaggccggatacaaagaatttgaaacttctacaggttacaatacaagtttaaaggcatttgaaccttcttcgtctcaacatgctggttacatgggttctcaatctaactacatgggatttgacacttctacataccaccatggttatggcgatgcaaatgttgttgcgagcactcaagggttttgtcccaatgcaaaccaca

SEQ ID NO: 371821 - DNA, 344 bp, Zea mays
aggtaaaccaaaccagccttgacttaaaataaaccccgggccaagccaaaagaggaccagacccccgggccgttccttccccccaaacaagttaggaacaaaccacaagaaacggacccgcccaaccggggcagaacaaaacaaaggggggggagggaatactaaactaaacgcaaccctaatcagagcaggtgaagaaaaaaagaacatccactgccctgggctgaccagccttgggggaggaaaccccccgggcgggggggggaaccgcccgggccaggtcaaagcaaagggaaggggacggggacgcaaccaccgcacagaaggttttgctgcgggggggg

SEQ ID NO: 371822 - DNA, 202 bp, Zea mays
gtcagaagtgggaacgggtcggcggcgccacgttgcctgtcgcttttggacgccggcggttccggccgcttgacgggcgccgattcgagcttctgcgccgccgactgcttctgaaccaagtgcgacgcgacggtgaagtcgagtatccccccttggcttcagcaatgccgggatcatcaggagtcttaccgttgtaagaaaa

SEQ ID NO: 371823 - DNA, 254 bp, Zea mays
tcggacgcgtgggtacgcccgtagcttctgctaccttccctgctgcgtctccttgctctacttttcattaattggcatgttgctgctgctgtttcgcatttgattcgacgagttcgtgtccgtaaccggcgccgctgatagcttgttcagtccgattatgaactgaaaacaaacagctatggtcattaagctcgcaacacgtgacctgtgctttcagatcttcacgttttttacccgttgtaccgttcttttag

SEQ ID NO: 371824 - DNA, 302 bp, Zea mays
ttccacgcgtccggagcgatccatcatccccccccgagccgtgccaaccaagaaccatccacccaccaccaccaccccggccgcttccttgtccctgcccctccgttggtctcctttgcccatctcatcctctctctctctctccctctctctctctctggcggtcggcgtggctccgggggcgcgaagcgcgggctcggcggggcgactcgccggcggcgacctgcaggtttgggtatgagaggggtcacccacgcggggcccaccacaagcgccccccgccccccgtgacgcctcatgga

SEQ ID NO: 371825 - DNA, 210 bp, Zea mays
aagccccaccaacgggctctggtgggggggattacccgctattttggcgaactatttgtaaacccgagtcgggttgggcaagaacaactgttacccactacccataccaaacgaaaccccccataaagcacgcatgggcgggtccttttggaacaccacgggatgagcccggtcagtctggggggggcccaaccacccccgggggacccc

SEQ ID NO: 371826 - DNA, 136 bp, Zea mays
ctgacgcgtggggtacactagcagctggatatctggatgcaacgacgctggcgggtaattgtctgacgaggggcgcaccctgagctcgttgacaccggagggcaagatggtactgctcaacactaatatacaagaa

SEQ ID NO: 371827 - DNA, 324 bp, Zea mays
ctcatgtatgaatcagatgacatcataaaatacctagctgacacatatggtgatggaagtgttccaattatgctatcgcttggtctgttgacagcaattacagcagggcttgctactcttggtcgtattggaaagggaaattcctatactgcttcaagaatcccaccgcagcctatagagatatgggcattcgaggtctgaagcacatgagctctcttcttagtatacaggtcatggatgtgatttattgcagcatagtgttagtcctggagtcctgatggctgatgatctattttcttcaggatctttccttctgtagatttg

SEQ ID NO: 371828 - DNA, 130 bp, Zea mays
aaatacagtccctgttaacctacgatacccgaggaatctttcccttaacggggtattacacgtcattatagtgaacataaatacaccccggactgacacaccacacatgctacctagaccgaggcttacc

SEQ ID NO: 371829 - DNA, 212 bp, Zea mays
tttttttttttttttttttttttttttttttttttttttttttttttttttttttttttaaacacattaacatgcacaatcggtggccttatttgatcagtcaagggccaggcaggggggggagttttgaactagggggtcagattgcaagtttgtttccagggcaaactgggctcataccaattaaaacttcactatttgggaggggggcc

SEQ ID NO: 371830 - DNA, 215 bp, Zea mays
tcctcgcgtccggctctgtgcagctggaaggagacgcggacgaccattacgccgcgaggatcgtctacaactacgagacggcgttccacggcttcgcggcgaagctggacgaggacgaggccgagcggatggccgaggcggacggcgtggtggccgtgctccatgtgacggtcttgctgttttataccaccaggagtttagactttttttggcat

SEQ ID NO: 371831 - DNA, 318 bp, Zea mays
tagataagcagctccagtccaaccaagaacaaacaacaaccgcagcaagaggagaggaggatcaccggtcgcgaccaaattctcccagagacggtcggaaatgaggagccaagcgctgttcttcctcacgatcgcccttctcaccgtgctcgcgcgatccagcaacaggcaccaccacctccaccactcccacgttcaaagcagagggcaggaggcagcatcaggaggaggaggaggaggggagctgcctagtctgttgaagtttcttctattttttattttattcttttttttcttatttttctttacatttatttt

SEQ ID NO: 371832 - DNA, 114 bp, Zea mays
tcgagggggagggcatagggtatgccacgcgcgcctgcttcacatacctctgcgccaccatcaccaagctcgccgtgaaggagaactgcaggcggtagggccacggcgaggcgc

SEQ ID NO: 371833 - DNA, 407 bp, Zea mays
ctcattggcatgaccacaaacaacagaaatcataccaaggagaaaaagtatgggcaggcgacttgaatcgctaagcagaggactgggaatcaatattccaatccaaatcactgaagggaacaaaaggccagagccacctattcaagctgctaagtttgcatcagagggtggaatcacattgaggcagcacattccaatatttaaccattggaaggaatacaagaagagagagaatgaacctataataagaaactacattggcatagttactgcttatttcacggcggaccgtgagagcctggacagtgaagattgattgtccatacattgcttttgagtggtccaaccccatatgagtgttagtcctgtatcagatagttcttcctatgggattctcttctttattc

SEQ ID NO: 371834 - DNA, 374 bp, Zea mays
ctcgaacactgagcttgctgttacaggcttacagttacagcgttcagtaaccagcaggtggagaccgtttagccagaaaccccttgtagtgctccaacagccttccggcgtccggcatcacctccttcacggcgtccaccgccaagaagcgctccgcccacgccgtcaaggccgggaacttggcctcgtccagaagctttacgccggtcgtcttgtccacacccttgtccacaccacgaatctcccgagcgcgatgtccacgagccccacggctttttcctccaatatgggtttttcttttggagctctttctgttttccttctttcttttttttattcctcctacatccttattctttttttattatttcttt

SEQ ID NO: 371835 - DNA, 191 bp, Zea mays
tcctcacgcgttcgcccacgcgtccgctggtttttgcaaccataactacctaaaatcctgagtacccatccaaggttttgttggttggaaatgcccaagctgcccagctcaggggcagtatcatactttagtctaagtcaccagagacctgagttccagacaatgcccacttttgtgtctttacgatcttt

SEQ ID NO: 371836 - DNA, 123 bp, Zea mays
tatgaaccaggagcaggcactcagagtgacgcggggggtaaacctcgaatcgggaacgggcccagcggggtgcctcctgtatggacggcagcgcgagcggcagcaacgccgagagggagccgg

SEQ ID NO: 371837 - DNA, 406 bp, Zea mays
ccaacacgcttgagcagcctggagagtagtagtagtatcaattttaatatcagcaaatacaatatagtatgagattctgaatggatatggctgcgacaaatctgttttcatggggcttacaacatatggacatagccccagaaggaacatgtatgggaagcaatcactcccccatcatacatttgtggctacagatcaatacttacaacacccatttgtgcgacccaagattgtcgtaagaaagaactccaaaggcgaaaacagaaaaccatgcacaggaggcctcctttgtctcctccattgggacctcaccacttatatctcctctattggtcacacttcatagttaaattagtttaggtcgcggcccgtgtgatttgcttccaatagaggatgctagtaacca

SEQ ID NO: 371838 - DNA, 450 bp, Zea mays
ccaacagctgaaagaataatggattaatatacaaatccctgagtagagtacataggcggcgggtagaaccgagtggcaattcaccctcccaacagatcttgcgaggcagatcagcagcacacgtcgctaggggttttttacatgatacaacatcaggcatctgacttttaccgaccaaaaaacaagtacctgacagaaagctacagccgcagcacagcacagcacagcactcgccgtgcggatccagatgttgacaccgcaggaattagcacgacgactcggaagttacgcaggggcgcgcccctggctacctatttttcggagacgccgtgctgcttttcctcgacgagcaacgggggaggccccctttcacaggagatggtgggaaaggagatgacgacggcagctgccggtggctcgagatcgaagagaagcagctgaatgggttcc

SEQ ID NO: 371839 - DNA, 417 bp, Zea mays
atagaagttaaagtagttgtatatatatgtgaaattaacagttcattcctgtatgactcctatataagtgaaatgtcaactattactctgttcctgcaggtactgacataatcatgaagcttttcatatttcgatgataggattgttggatctcatatacgtgaaatattttctgtgtgtgctgcggctaacagaggcatccaacctacattattctcatcctcttcccatgcaacaggtgcatccttctctgaaggctggtcctctgtatcctcatgtgcctcacagacactgttggtctcgctcatcaagagatcttgattctcaatatccttcagatgaagtatttgagaattgatatctccaccagcttctgacatctaatccaattcttcccactctgtcatgttatgcatg

SEQ ID NO: 371840 - DNA, 220 bp, Zea mays
tgcctgtcatgtggacgagcagcatggtcgagaggggtggctcaagcagcagcagtgctggcatgcaaagagccagggaggcagcagccatgcgaggtgtgctgcgtgcggtaacgacatcaatttgcttgcttctttactctgcttgatttgggatttcttctacttgctttatttattttttagtttatttgatttggggaaagcaatccgaacttta

SEQ ID NO: 371841 - DNA, 362 bp, Zea mays
ggcccaacaggccaacatgtcacgctattacttatagactaacaggatcaactattcagtttagtcatgtgcccaacagcagagagtagtacgcccaagggcccaacaacataaagtagtatgttggtagcctagtattagtaccactacaacactagtgcactatcaatgttaggaaactagcagtccacaggcaaaaggccaaaagtatatggcaagtccaaaattatccactatccagcaaccaaaattcacaagggccaagtccaaaagggtccactatccagcagccagcaccagaacccaattctacatgtcaaagtagctctgatcatctgcatttagcccatctatatctccat

SEQ ID NO: 371842 - DNA, 189 bp, Zea mays
ttcctcacttgcagtcgaaaacaatggggggggggggggtattagaaaggaaagccgggttttccccactgcataaaaagtgatacaggtgtcaatgatcgaagcatacctgcgagctaacaaaaagtatgcggacaagcatgaacctgagacagaacgagcaaactgttcatatcaggagctggaccc

SEQ ID NO: 371843 - DNA, 374 bp, Zea mays
gacggcacatcgccgtttgagtgctggaccttgctccacaaccccggcccgactcggcgtgctgcggcaccctactcctgggcagcgccgacggggggatatggcatcggaggacgtggcgggcaagagcaggggcgacacgggcgacaccaccatcagtaacctggcggaggaggccaagctggcgcgcgagggggtcaaggcgcccggacaccagatcctcaccatgtgcaagacgctcgacgccggcggctcagcacgcggagtgggaggggcactagcggacagctcggcaacggcgaaatagtcgacaggaacacgcctgtgctgagcgatgccctgagctcagacagatctgcctgcaagaagctgga

SEQ ID NO: 371844 - DNA, 152 bp, Zea mays
cgctcggttcactcctacagttttacgtttaccgggggcaccagtccaccaccgagcattagcttcccgaccagatcaaccaggcccgccccgacccgaagatgcagcggtggctcccggcgctcctccgccgcgccaagcccggctgctgg

SEQ ID NO: 371845 - DNA, 150 bp, Zea mays
ggcgcggtgccgctgatcgcgaggcggacgactgctttcgcggacctctgcggcctgaaggcctacataagaggcaagcatgataacgcagacggtttcaccaacgtcccaggcagaaaaaacagcccaaaaaattgaatcaagataatt

SEQ ID NO: 371846 - DNA, 299 bp, Zea mays
tcccacgcgtccgccctctcgcgcgccgtgcggtcaccgttcgaggccacggcaccgccggcccccgcccccgccccggccgccaagagcaaaggcaaggccgacgcttcctcctcgtcgtcctcctcctccactccaccgaggtcgcgccgcgcgcttgccgtcgtgatggccgcgtcgctgctcgtgctcgccgtggcgttcttggttggctctggctccggggggatcgattggggcgcttttttttcttctctgtgtttttctcctctgtttttccctttttttctctttttttt

SEQ ID NO: 371847 - DNA, 287 bp, Zea mays
tttatcctctgccaaatcctgtacaacaagcatctttgttgctgagcagcagcacacatgatagtttgggttctggaggagcatgtgtgagtggaccaggatccttagctggtaccggagtatctatctttagaagagcctaagcatgcgcggcttccagttcacgccttgcaactgcatgacccgaatacagtggggcgacctgatccagtgattgctattgccttctccattgtaaatagttgtaagtgcgttagattcgtacacgtgactttgattttattttc

SEQ ID NO: 371848 - DNA, 446 bp, Zea mays
tatcgagtacagtcggctaggtaatctggtggtacgacgacatggcggccaccagcagcaagtcgtcgtcgtcctcgagctcggcgcagcgggcagctgccgcactgctcgtggccgccgccgtggcggtgtccgtcctggtggtgggcgcggcggcggtgtgcgacatgtgcaactagcagtttttgttgtgctatcccgttgtggtcaagtcgactgtccctttatgttcttctttttatttctattttttatttgttttcttttattttcttttattttctttttttcttttaatatttctttttctttttttcttttatttattcctttacttcttttttttttttattttattattactttcttcttttctttttcctttcctctttttatcttgtatcctttttattttttttattatttatgtattatttgccttttta

SEQ ID NO: 371849 - DNA, 444 bp, Zea mays
acatcaaagttttgtgcttagaattataaagttacatgtatatacatcacacattatatacatcaaagttttcacctctgctcaataaccttcttgactaagatttagcctactaatctctgttagcactctaaactttggccttgacgctggtagtatcgcgatatttcccttcatatggaatgacttcattcaagatgaatgagcacaggtcctcaactatgttgtataaagcaccttgggttatgtggtccacctttttcagttcaaatttctagaaagaaagtttataaacatcatacatttacacttgataatacatttgcaactctaatgacaaaactacatacatgactataacttatattacttagaaagggttcttgatgtatcgtcggttctctcgcttaaactcgcacatatagaatccaaagaggaccgatc

SEQ ID NO: 371850 - DNA, 225 bp, Zea mays
ttccactcgtccggtttattaattgcaaaatacgaaagatgtttctttttcaccactaagttattaactgaggttacttagtagggttaattttaatctttaacttttttacaggtaatgatggaggggataatgcggagttttcagtagaacataacccataagaatactggtgaggtctgtcatgaaccaatgtgttgttggcctgtatgatttacaggagca

SEQ ID NO: 371851 - DNA, 177 bp, Zea mays
cccccaaagaatggtcggggataatcaactggctggctggaaagctttactggacccaaagttttaaaacccgccccccttttttttgtagacgggaaggcactcacgttccgggccgggggggcctcggggatttattaaaaagggccccccctcggattggcccccggggacctt

SEQ ID NO: 371852 - DNA, 361 bp, Zea mays
atggaatgaccatgtattatgtaatatccatgatcatccgtatcactctatatactagtgagtattattggagcaccactaggctgcagctcagttatagcttagccgccaccagtcaaaagaactgactcaccatcatcaattggtcatcgaattgtgcccaaagtctgtcctctgtaaacgaggctagccgacaggagttcagttatagctgccaccgtaactatctccgcctatcatcgccggcggtaaagagagagggcaaaaactacaccggccggctcacccacagactacagctgacgaagagtagaccacgtcagcgcctgaagtccgcgacgcacgcggggttgccggcgac

SEQ ID NO: 371853 - DNA, 161 bp, Zea mays
tgcttcagcgtgcgcctggacgccgcgtcgccggcgcgcccgctgcggatcaacgtcacgctgtccggcgccatcgtggtccgcaaccccaactacgagtccatgcggttcggcgccagcgccacggagatcttcgtggacggcgcggtggaccctggccc

SEQ ID NO: 371854 - DNA, 294 bp, Zea mays
gggaaggggatttttgcctaaggggcctttgttatccctatccaccaaaaaggccctgggggcgcccaaaaaaaaaaccccccccataaaaaagagaatgcaggggtaagctcaaactaaccaagttcagttttattccgttccaaacaaaggggcaacagttttaaaaattttgactagctttttaaatttatttcagtcccccggggtattggacatggttaatcgggcgcaaccaaaaacattcccttgggggggactggggaggaccacccccccccttgggagggccca

SEQ ID NO: 371855 - DNA, 263 bp, Zea mays
ccagggcaactcgactttgcattgcccgaaaaagaagagcccaggcggggcgcgggttttgacctgggctatatcccaaattcccaacgttgatcctatagcttcaattcaaggaaaattctctactcatgtttctacaaaaggtcttccagccaacaacaaatttccgcacactacatactcaaaaggtcaaaaaaaaaaaaccgaataagaaagggggacgctcagccgctcacggggggtcctcaaagggttggggcggt

SEQ ID NO: 371856 - DNA, 407 bp, Zea mays
tgatctctcgccgccgttctagttccgttttgccttgaggtgcacgtggcggtggaagcttcccgggcggtggcggttgttggttcatgtcgatggcgcaggtgtgctgtgactcggccgtagtggctgcacctgtggcctgtccggaggcggtggcgaggtccaggtttcgctccgagaggctccaacgtatctgtgagttcttcaggttgcagttctagttttaatgtcttttattttttttagctttatcttgtctttttccttgttttatatttttaattcctttatttttttaattattatatttccaattaatttcttatatattatttcattttttatttgtttacttctattttttatttttatctctccttttatttcttttctatcattctttttac

SEQ ID NO: 371857 - DNA, 152 bp, Zea mays
tgaccttccacgcgtccgtgtacgtccagtccaacactccaatccaatccaatccaagcagagtttcagtcgattatcagtccagattccacgggcacaggcggcgcgtgcgtacatggcggcggaggcggtggtgggttcgggtctggctg

SEQ ID NO: 371858 - DNA, 205 bp, Zea mays
aacacaacaaacaacattgccttgctttttccaaaacgggaacatgaccaaaaaaaaaaacagcaactctatgtgcacggggaaaaaaacagcaactccgggcctgtattttctgggaacaacatgtcgggctcatgttgggatcacagatccttgtaccaatcaccgttgtgcaggcaggaaaccgttcttttgggacgtccga

SEQ ID NO: 371859 - DNA, 405 bp, Zea mays
tgtgtcctcccacgcgtccgcccacgcgtacgtccacgcgtccgtccactcgtccgttttaatataattcagcaaaactcttgctggcctttcgggaaaaaatgttctgttttcatatgtattttagcacccaccttagtaaatgcttcagatatttatgatttctgtgtatttaatgttctatatcattcatctaggctcttgtatttagttcttcacattggattagaatctggatttttttctgccttttttggtcctatttttcattcttatttcatattttttttttttttctctataatttctttttttttattttttaatcttttacttttttttttcttaaccttttcctctttttatattttcttttcactctatttattctcattttcttttttt

SEQ ID NO: 371860 - DNA, 269 bp, Zea mays
caattaactctatacactaaataatatagaaaagaaaggatttcccaattaatttacatttgatagttcacgttcacaatgaaccttgtcgagctcacagcatttcaaacccattctaatctaccagccaaaccccatgtgtattaaacaaccaataaatttaactgacccagtgtctccagtaagaacaatatgtattctcctctttcaagaggatggtaataaccccgtgacgttgcccaatcgatcacctccacacttgagggaac

SEQ ID NO: 371861 - DNA, 177 bp, Zea mays
tcagctcccgtactactatccccgctaccgctagccgccgcgctgctcatctggtggcggctcgcctccctccccccatccgccgccgccggctcctcctctagctccctccttaccccgagctttaagctcgtgctacctgcctacctatccgtagggagagagagagagagggga

SEQ ID NO: 371862 - DNA, 230 bp, Zea mays
tcggatgcgtgggttttggctgtcggaatgaccaggggttccttgaagcatccgatggcttagctaaggcaccgtgcattgcatcacgggcaacgttccaactgagaagactagcaccacctggatgtagcctccagatcggaactacaactgttggtggagttagccctcgagctcgacgaagacgtgctctactaacatggcaacacattgcatctttgccacccaac

SEQ ID NO: 371863 - DNA, 258 bp, Zea mays
tcggcgtccctggcgtgtctcgtggttgtgtcctcggggaagttgagcttgacgtggccgccgcggaagcggagcgcggcggcgtcgtaggcgcgcgcggcgtcctcggttcgggttctgcctctccctctcactgcgccgccgcacccctccaccgtgccccttcccccgccgtgaatctcacccgaaggcgccgcggatccaccgtactcccgccctggcgcctcggttcccgccatggacgccctggatccacct

SEQ ID NO: 371864 - DNA, 119 bp, Zea mays
tctgaacctcatggagcctttaggtaggatcaggatactacataataattcatagcatccggatactatgatcctacaataccacatagtagttgatataaattacttattaaatgatt

SEQ ID NO: 371865 - DNA, 196 bp, Zea mays
aaaaaattggggtaatttgcattaccatctgggataggggcgcacatcaatatttcactggccagttagcccctcgggtccaaacaccgacaaaaaggtacggaatatcataaacacaatgagcaagttacatggtagtttgcatacatggacacaattgtatcaaattacttcgattgaattgaattcaagaaga

SEQ ID NO: 371866 - DNA, 184 bp, Zea mays
tcgtctctcatccgaaaatcatctggttggaacttatcaagatgaatctggaaacagggaaacaagtttctctgcaccagggtcccatcggagttctaattctggagatagtactgcggatagaacaaacttctctcctagagacaactctagtggaggactttatgtgggaaggcaggtttct

SEQ ID NO: 371867 - DNA, 113 bp, Zea mays
tcggacgcgtgggatttgacgatccgttctttacccattcgttcgggggtcggatgatgagcgaccatgacatgttaggaggtagttcttttgtgccgatgtgagggtctttt

SEQ ID NO: 371868 - DNA, 129 bp, Zea mays
accgaatcgccagggtcgacccacagcgacctcggatgcgtacgcggacgcgggaacccaaggggtgacaaaattaagactctattgcccttatttgcaacatgtgaatctagatggatgtgatcatcc

SEQ ID NO: 371869 - DNA, 168 bp, Zea mays
acctccgttcttttcttttgaaactaaaggaggagcgcagggtagcttacattacgatgcggttaacaacacagttctcccacgacgtattctacagttaacagtaaccttaatagatcagaaaagctagaacactgagactgttgactatcctctccacccttccat

SEQ ID NO: 371870 - DNA, 169 bp, Zea mays
taatgacttgtaatttgaaacggaaggagtatctaaacatagtgtatatgtaatgtattgtaaaagccatatatccaaaaaaactcaacatcttttgatttgaaaatatagcgagtaacattcatgcacatacctttacgtgagggttaaaaacttttaattctttatt

SEQ ID NO: 371871 - DNA, 243 bp, Zea mays
ttctttggccacgtgctaagtccagggacatgcggacccgctaatgtcgagattccagttcgtctccgcgtgtggctttcccttccacactcgccgatcgctttgatcgatcaggcaggcatgtcctactagactaatcaagaagccttctccccgtctgcctaggtggtcttgactgatgatgagaatgatgtcatcattgacctccatttcttctttatatatatattttacttatttttc

SEQ ID NO: 371872 - DNA, 247 bp, Zea mays
tctcctctcggtcctcacctcgccggccctggctggtggtcgccttcggccgcgagctctccagcgcaggggactccctctatggctggcgcccctgatggccggacctacacctcgccatggccggctgttcctgcactagattatcctcaagcccggtcgcgatatagcagcaacagccataaaaccccatcgagtcacgctctcgacgcgtattacggaatattgaagcatgctctatcctggt

SEQ ID NO: 371873 - DNA, 179 bp, Zea mays
ttctataccacactcgcattgcattgcattgcattccttcagttcagtagtgtgctcttacagcgagatggccagcgtgaaggtttttcgcacaccaactgccgcagcggtcgcccgcgtgctcatgtgcctcttcgtgacggaggtggagtctcactagattcccttcatcaccttct

SEQ ID NO: 371874 - DNA, 175 bp, Zea mays
taccgcactcacacagctcaacaaggacatgggggatgtgtaacctccagctcttgaggatggcgcactacaagcaaccctcgaacatgctgttggcatactggaagtcacacctggcgatggcttggggaatgtcgctctttcttcaggtgatgtcatgtatatcttgctcctt

SEQ ID NO: 371875 - DNA, 157 bp, Zea mays
  unsure (1)..(157): unsure at all n locations
taccgctcctccgttccactagcaacaccggagcggagcggagatccactctccggacttagaccggnttccttctccgtgtggcgagttcaatacctgactcgggtgccccttccccatgtcgcacgtcgagcccgccgccgccggagcggaccaa

SEQ ID NO: 371876 - DNA, 165 bp, Zea mays
taccgcggacgcgttggcgggtgctcactcaccagatcggtgatctgacggcgcgttcccgaagcggcacgaatgacccaaagagacggattgcatgtctgtaccaccgagcggcctcgattttcctttaacacaacacagaggaagcaggctgctgctatctgt

SEQ ID NO: 371877 - DNA, 174 bp, Zea mays
aatgagtcgccgtcgcaccagcttggccgccgcctctggattgccgctggactcgctttcttgacccagaagctacgatgaataacattatctgggcattcaagccgacctgcgacaactaagttacattcgccgaaaagagaacctggaagcaggcccagaacaagaaggaca

SEQ ID NO: 371878 - DNA, 155 bp, Zea mays
actgcccacgcgtccgatggtcgcgcacgccgcagcatccgcatccgcatccgcctcctccctgggagtcgccgagcgacgccgcgcagatgaaggagtcgaccaggaagaaaccgacgccagagcaacagcgggaggagacggaggagcaaggg

SEQ ID NO: 371879 - DNA, 252 bp, Zea mays
acctcccaccacagcgagcgagagcaaggcgcccaagcaaccaccgcgagaacaagtctcagccaaacagccccgtctcccagcgaagcttgagcttgcattattctaccatgtcttccatggagctgctccacgccgtcgtcccggagaagcagagcgaggaggaggtttctcccttttctcctacttcattttttacctttcacctcccttttttctttttccttttttccttcttcatttctacttttt

SEQ ID NO: 371880 - DNA, 132 bp, Zea mays
tctttttttttttttttttttacacgcccaagactggggaatgcttaaattgacattcaaacattacgatgatgtgacacagactaatgaaaccaaacaccggaacttaggcaaaacgacatgtagaacatg

SEQ ID NO: 371881 - DNA, 220 bp, Zea mays
tcttccgccgctttcctcccacggtcccaccacgcgcgcggccggcgggcggccaactgcggggagcagcaccgcgcgatcgtcaccgacgcttccacctacctgtgtcagaacaaggtagcaaaatgaacaaccacctaagcttcgaggagggttggaaagtcctggaacaggttattgtactaagctcaaagatttagcagtgttttatttcttgtcc

SEQ ID NO: 371882 - DNA, 276 bp, Zea mays
  unsure (1)..(276): unsure at all n locations
ttctantaaaaaaaaaaaaaaaaaaaaaaaaaaaaaaaaaaaaaaaaaaaaaaaaaaaaaaaaaaaaaaaaaaaaaaaaaaaaaaaaaaaataaaaaaaaaaaaaaaaaaggggggggcccttttaggggacccaagtttccttccccgggcatgcaacgcaaaagtttttttttggggtcccctaaattaaattcatgggccgtcgtttaacaactctggaactggaaaaacccgggctttccccaatttaatccctttgcagaacatccccctt

SEQ ID NO: 371883 - DNA, 238 bp, Zea mays
accgacgaagaagaaaaaataaatatatgaacagctctacttacaaacaagggaaatttggatccataccattaaaagatcaccactttagatccataccattactatctcacttacatgtgggtccacatgagtcaatgacatatgaggtccatggtatatatctaaagtttggatcttttaatggtatagatccaattgttcctacaaacaacccattaacatgtacagacacagc

SEQ ID NO: 371884 - DNA, 159 bp, Zea mays
taccgagagcgcgtccggacacgaacctgagaccagatgatcgaggggacattgactcacgacagggacccgcagagccttataaacgttacaactgttatgggattgcgatggaaaagatactaaacaactggtgtgaggattgggatggaaaagatt

SEQ ID NO: 371885 - DNA, 159 bp, Zea mays
tgatggtttcacatctcttccctggcttcctctctcctgtaggtgcccgaggaggtggactgtgctcctgcatcgcccaccaagtttttgattaatttcttcagcttcaactgttgctctttgttgcattatgtcattaatgatttgtgctcaaaattt

SEQ ID NO: 371886 - DNA, 126 bp, Zea mays
acctgacaggtagaccacgccgtacgatagccagaggagcatgtacgatgtagcgtgcttttgtactcggccatgctctatctctaccggcgccaacatacagcggttgactaaatttctcgccac

SEQ ID NO: 371887 - DNA, 231 bp, Zea mays
taccggtgacactgatctccaaacccatctgattgccttttaaaagttcaaaaggtcaaatgagtttgatttaggaagactactcagagcactatatattcttatatttgaggatgccggtcaatatctgagacactgcacatattaatgtttacatgttttaaatccacatgataaaaagatattatgtttcctttaatcaccttagagactcttgtccaggagcttgtt

SEQ ID NO: 371888 - DNA, 149 bp, Zea mays
acagtgtgtgaccaccagcgagccggagcgagaggtcaacatgattaagacagaactcgtgtttctactgaccgaccctgatgagcccacgaccgaacaaccggcgtaagcatggcccttcgaggccatagccactctgcggaggagac

SEQ ID NO: 371889 - DNA, 138 bp, Zea mays
actgatcgaacagagcgcgccgtgggagcgagctgccctgccaaaccctcacggccgttttcacaatgccgcgccatctcgcgctgcttctgcccctgctcctgctggcctcgccggcggtcacgcgcctggcgttcc

SEQ ID NO: 371890 - DNA, 127 bp, Zea mays
ttgtacgcccacgcggacaccacacggagcggggtggcttattccggaccatgtcccattttgccggcgggggccatgggcgggaaggacctgacggaggaccagatcgcctcgatgcgggaggttc

SEQ ID NO: 371891 - DNA, 140 bp, Zea mays
taccgcccacgcgtccgcagagaacagaggttcatgagtatgcaaaggttcttggtaattctcagcatatcctcttgccatttcaaccatacaatgctgttatatgcatatatgcttgcggaggttgagaagaagagcac

SEQ ID NO: 371892 - DNA, 270 bp, Zea mays
cagaaagagaaatggtggcaatatcatctgatgaacagagtgaattcatttttacaagactaggttacagtggcgctcttgcttcccggagcatcattgccttgcatgaaccacttatcgtccagttagcttgaccatccatgcgccacccaagtacaaaccaagcaaaggaccagccaacaacatttgtgtcaacggatccgtcgaaggtgtaagcacagcagcagcgacgacagcgccaacaacaacatatctccagatagaaagcat

SEQ ID NO: 371893 - DNA, 218 bp, Zea mays
acaaggcaaaacgggtgaattaattactacagcagggcccttagtagcgaattgaatacacaagccactgaacatatggataccttcagaacgtattggcgccctatatatgaaacataagaaaaattgcgatggcctacttactgcaaaaaaaacactacaggtagattaagcctttacatgtttgatcgactctaaaatttaaaggcagaacggga

SEQ ID NO: 371894 - DNA, 330 bp, Zea mays
ccacgttattatcgggggtgaactccgtttcagcaacggatctaacaaaccgtaaagaaaaacacagtgtgaaagaagaaaacattcacgggcactagtactgtgtaaatgtgcggcaaaatgtacatggaatggaaggcaacaacatttgtcctgccctgtcctgagcatccatccatcaagaacagtggtgactaacaaacacaattgatgattaattagatgaggaacaggaagcaagaaaccgttgggggggcagggctgggcactgggtgggacggacggggaccgcgcgaacggatcggggataacacacataccaatgaatca

SEQ ID NO: 371895 - DNA, 273 bp, Zea mays
agggggttggaatagcccacgttacaatttatcagagaaaaacatgcaaaatactgggttttatgaatttttttagaaagattctaggccacttgttacaacagaaacttttcagagtgcactaaataaattttaagccacacaaaaaggatttgagtggagtcggtttcaatccaacacatttggtattttggaggattttagttttaacttagaagttttaaagaacattccctcaaatattgggaaagaaaaatgatttttgaaagcaaa

SEQ ID NO: 371896 - DNA, 155 bp, Zea mays
taccgcccacacgtccgcccacgcgtacggcatgaaggttcctgtgtcactgagatgattcaatgccacaactcggatcgcacctgttcgtcattttaagaaatccaatttgtacaagcatgttaaggcggtacatgagccgtgacattactctt

SEQ ID NO: 371897 - DNA, 220 bp, Zea mays
  unsure (1)..(220): unsure at all n locations
tttntttttttttttttttttttttttttttttgggtttttttttttttttttttgtttttttttttttttgggacaccatttgtgaaaataacatattagcaaggggtccgacacaacacagttggaaacaaatggtgtttggtttaaccataaaatgaaccggggaatcctgatttcctttttttaaagggttttatttagccgggcaaaatgccttt

SEQ ID NO: 371898 - DNA, 235 bp, Zea mays
tcgtcgcccacgcgtccgatagcagcagcccattgcctgcctttcggcttaccctctctctctctctctcacacacacacacaaccactcacactgccggttggtttcccttccgttgtggttggcgcgtacttagtggcggccggccatggcgcggaggaggggcttctcggcggtggtgtcgttcgttctctttctcgtcttttcctcttctcttcttccctcttcctccttt

SEQ ID NO: 371899 - DNA, 137 bp, Zea mays
caggtaaagaagacaccccggcaggaaccaccccggaagaaccggcgcgacccacgcaataataagcccccggcccacacaaagcaagcaagggacagacgcagcgggcacggccagagcccacccacacaaaaaca

SEQ ID NO: 371900 - DNA, 137 bp, Zea mays
actggccacgcgtccgtctcaactgcgagtggggggggcttctgacctcgattctcgaagtctgcatccgactgccgagccatggcgaagggaagggctcacccattgaatcgactcacccaccaacttatcctagc

SEQ ID NO: 371901 - DNA, 136 bp, Zea mays
ccctcgcgtccggccgccgcaaccgtgtcgcaggatgaggagttggactaccgttgccgtacgttaaccggcggggagagccaggtgaggccgtcagggacctgcccgccggctctcataatgtcctcgttgctat

SEQ ID NO: 371902 - DNA, 261 bp, Zea mays
tgacgcgtgggggtcaggcatccctcctagcttcctcctccttgcaaatactgcaggcaccaccgctcgttttcctgtccgggggacaggagagaaggggagagaccgagagaggatgaggcgcgacttgcatccgatctgctacgcccgccgaagcagtctgtcacgaggttctaaatcatgagaaaccagcgaaaatggctgcctgaggcttgacctccgagacggagcacaagaagatcctgcaagagctctgcgacc

SEQ ID NO: 371903 - DNA, 211 bp, Zea mays
ggaatggacaaatttccagctcaacagcaggaactggtgccgctgccgcctataagtgtgccatgtcgccaccgctctctacctctacacaccgacacgcatgcagatcggttgccggggcacgatgaggaccgcgtggccgctgctcctcgtggcgacggcgctgctttcgacttcggcagagaggggcaggaggacctgcaggttccct

SEQ ID NO: 371904 - DNA, 284 bp, Zea mays
cctacgcgtccgttccgtggccctcgcccccccccccccccctcgatgaagggcatcatccaattcatagccaccgttggtttccatcgcaggaggagcaccagcagccgtcccgtcatctcatctgtgtctctcttctgtcgagctagtgtccatacgtcgaggcggaggaatttacccgttgttacgggcggggccctccgcattccttgagaaggtcgacaccaactgccgtgtcagcacagccacagcacgaagtgctgttgccgtcacaaatgcctcgg

SEQ ID NO: 371905 - DNA, 325 bp, Zea mays
tctttccctccccacctccccgtcgtcgtagtcccctgttcatccatcgcaagaactcctgggatcgcgctgggttcgccgcttgcatgcatgcacgcacaagcccgcgagcccggccggggtgccagcatattcgttcgctagctcgtgggctcttctccgtctccgatcccttccgtccgcgctgaagaacatgcgcgcgcgccgggctgtttagatccgatccgaaccaggccttcttccgttgcaacctgtgccttgaggccttctggcgatcgatcttctgtattaattgctggctcaatggaagtcacagtcacaggct

SEQ ID NO: 371906 - DNA, 223 bp, Zea mays
cctccgcgtccgcccacgcgtccgcggacgcgtgggcttacgcgcgcgcccacgcgcctactatacagaagcagctgtataagtctacattggtctcgagccctctgccggcgacgagcactcacaacaccagttttgtaagaggggatctgtaccagacaggctgagcagcagcagcagaggtgttgtctggcttgtgctgtacctagtggaagccttactc

SEQ ID NO: 371907 - DNA, 234 bp, Zea mays
aagtggagggtttccgattgcttccgcggttcaatcaccgcccacgtagaacccctccgctccttccagctcgctctctacctgcaccagcctcgcccgcccttcgctcgccgccgccatggggaggggaaagctcaagggaaagcccaccgcacgacgagactggtccacacccgaggagattgctgctggcacttcaggccgaccttgcacctttaagaagaaggaggcaga

SEQ ID NO: 371908 - DNA, 145 bp, Zea mays
ccctcgcgtccgcccacgcgtccgcccacgcgtcggggcacttgtgtggacacgcccctgcctcctctcgaccaccaggtgatggaaaagctggagcacccgagaaaatagcaagtgggagataacacaggaagagctagggcga

SEQ ID NO: 371909 - DNA, 152 bp, Zea mays
ctaggagtgctacagctttttgatgtgcttggctgggatctgagggtgccagcgtgccaggtaggggaagcaagcgagctctgtcggtgggggagctgctgatggtctgaagtacacagcctcatcccctctcacttcaacaataatatttt

SEQ ID NO: 371910 - DNA, 213 bp, Zea mays
acaatacgaaggttgcggacttgcggttcaaattcgctaggctacccacagtttgttgttctggttcagatcaattatctgcttgttctgtggcggacctagaaatcttagagagcttgggcaattatagtactcatactataaacatatagcttcgcctaatttttaaccatgtttaaacacgataacatgttcattagcactaatggagga

SEQ ID NO: 371911 - DNA, 99 bp, Zea mays
ggataactatcttcatataccctatcaagtcctgcaggggtcttgccgtgtcacaggcgcccatcacctccactgggttccggagggatcggcagtggg

SEQ ID NO: 371912 - DNA, 123 bp, Zea mays
ctacgcgtgggctgttgatgctgaaggtacaacagagagtgagacacaagacgatggtcagttttcgctccacaactttgtggaatacatcaagaagcagaagtgtgttcccctagaggacct

SEQ ID NO: 371913 - DNA, 349 bp, Zea mays
agatgtagtgagtctatctttattgccaaaacaacaacaaagcgatgaccaaagcaagttcaaaaataccaataacaactatcaaaaatatgttttgatcataagtattctgcaatagcgtagaaagaggaaacaacggtcgtaccccaggcctctttccagtcaattcatctggtagccaaagacactgattaaggtctaaactaccaactactaatctctcttttccatcctccacaaacttgcacatagaacaaagttcctcagctgacattaatgatggggacagtggaacagtcccgtttatgcaagaaactcttcgaaaatttatcatctttccagaaatcct

SEQ ID NO: 371914 - DNA, 210 bp, Zea mays
cctacgcgtccgccggcagctgtggtggagacgcctccgcctcccaaacacccgaatcaaactaacagccaccgatggcgtcgccgtcgcggttgctgccgcccacgcctccttcggccgcccagccccgcggcccgtgggatcgcctcgccttgccgcgcctccggtgcctcgccgccgtctctagtttcctccttctcccctgttggt

SEQ ID NO: 371915 - DNA, 536 bp, Zea mays
ctgtcacgtaggggcatcagcaaagcttctaccgtgaggaaactttatacatagagaaactgagctagccggcggagagttcctaggagatgattgttttttttaattttgtttctattttttttttttttttcttctccttatttttttcctattctttctttttcctttcttttctattttttatttttattatatctaatctctttttttttatatcttctttctctttttatttatttaattttttttttacttctttattcctattttcttcatctttttttttttttatttcaatctttcttattattttctttctattcttatttttattttattcttctttttattccatttatttttcctttttcttatttttttctttcattttctctttcttttcttttttctcttaatttttatattcctttatttatttcttaatttttttttttttttctttatatttcacttttttattttttttcttttattatttatttttatatttttattctttaatcttttttctt

SEQ ID NO: 371916 - DNA, 243 bp, Zea mays
acaggtgcgataaaaaaggtgtcagtgttgatgaacgcttaatcagagttgcggaaatgctcgaaaagatggtagaatcttattcaccgaaagacctgccaaatgctgcagtcagcccagatgttgcaaaagtttcaagttcaagcatcaatgaagaatctgatggtccctcttctaaactctctgattggtctagatgaggctctgctgtcttgcttgactatctccaagagtctgattcca

SEQ ID NO: 371917 - DNA, 501 bp, Zea mays
catttatccaccgccgagcccaaccgcacatgcgcgcgaggctttagagagagcgtgcgagagtttggcggtgcgccatacaatggaggggaatgaggaggtcttccttcttttttttttcttgttcttttctcttccttcttttttttttttcatttttcctcttttcttttttttttttcttctttcctattttctttccttttttttctttcttttcttcttcttttatcctttcttttttttatctttttatcttttcttctttctttcttttctttttctctttcttttttttcttcttctttttttctttttcttcttttcttttttttttctccttctttcttctatttttctttattcttttttttttttttctcttccttctctttttctctttcttttcttttttatccttttttttttcttttacttcttttcttttctttttcccttttttttttttttctttcctttctttttttcttttttttttct

SEQ ID NO: 371918 - DNA, 434 bp, Zea mays
accagagacatggaaacccagaagattaactcatgcagttgcaatacgtgaaaacccattttctcattgacatacagcagatattcgactccctaaatattgccatacaggtagaaatgcatctgcaacatttttcgagtgccttcaggcttcagcatcaacttctgatgcaacttcactctagtccaaacaataaacatttgcattcctcgcttattaattaagaaaatgattgattcttttcgtcagcaacagaacatgtaaaactggtcatccacctctatctgagattgatttgattccaaacttccagaccacgctggctgtattaaacagatgagaaaatgagtggccagaaaattattgtacccttgaaacattcttatgcagatatcatgtcaaaatgttagtccatggaaatcacctctttattt

SEQ ID NO: 371919 - DNA, 181 bp, Zea mays
  unsure (1)..(181): unsure at all n locations
atantcgctgccagcaagttgattagacataactgctatttaagatgacatcttctaatttgaaaactttactcattccctatttcaaatatgctcttttatcattgttgtgttgctgtttcatattgcagacttaaaagaatgtgtacaaattaagggggaaaaccatgattgctgttct

SEQ ID NO: 371920 - DNA, 213 bp, Zea mays
cctacgcgtccgcccacgcgtccgcccaatttaccgctgacaccctccacaaaccgcgaatttcctccccggctcctctccctcctccccagtcaatccccacacagtctcggccgggccctcgcgaggccgccgtggaaggacccccagcgatgggctccggcgaggaggacacaggaggcggaggaggggcggcgccttgctcggatcttc

SEQ ID NO: 371921 - DNA, 448 bp, Zea mays
gaagtaccaagtactgcacaagatcatactgaggatgatactggtaatgaagttccagaagagcacatggtatctcttgagttacaaagtcaaacccctggtgatccacccacagagacagaaaccttacattctgatgctatagtaaaagagttgcctcataatgctccagataatatgcaaactgatatagcggaagatccaaaacagagtcacaatccaggagatgctgtatttgaagcagccactgaagcaccaagtactgcacaagatcatactgaggatgatactgggaatgaagttccagaagagcccatggtatctttctgagttacaaagctaaacctccttttttctcccttcagttgcctgatcctttcttttcttgttctttaatgccagagttctttcagtattgtccagattatttctatgttgctatttcttt

SEQ ID NO: 371922 - DNA, 156 bp, Zea mays
caatggcaccgagtgccaaaggtgtttgtttaggaactaggttttttggtaccgtggaaagcttttcacatcctatttataagcaaaagctaatcgagatgagtcacacagactacacaaatatatttggacgttatagatggcctgacgctccac

SEQ ID NO: 371923 - DNA, 165 bp, Zea mays
  unsure (1)..(165): unsure at all n locations
atcnggtctcggtatctactagacaggcctgtggcgtcgtgtgctggcctggtggtacagcatttgtctctggacgcgcgatggatggcaaagaggtgctcatgctgacgcatgggttcagccgcgggagcgcttgatgcggaagccggcttttctgtaggggct

SEQ ID NO: 371924 - DNA, 339 bp, Zea mays
  unsure (1)..(339): unsure at all n locations
aagagnttcacatagaaatggtttaatatattaacagttccaatgtcaaaatcatagcaattttacagtcttgtactatctccaaccatatcatctatattcctcatctatatatctcatttacagtctcctctaaaaacattccctcatgtcttatttctccccagcgtccttcatattccgtcctctttacgttaaataatattaaaaacatattttgttctagatttatgtatgtatgtatttatcatgcactcaaatatcttataaatagtttagttttgctataaaataagtagatagaagagagaatctatatatagagaggatagagaaaca

SEQ ID NO: 371925 - DNA, 241 bp, Zea mays
ggcccccccccaaaagattttatcacacccctttacataccccggggaccaggttttaacaggttatgctgaaacaacctaaaaattctatttccgaacccattggaaaaaaaaacacagggggggtttttaaaactagggggcagggtggtttcactcactcccccaaaaaaaagttttcggggccaaaaaaaaatattggtttcccaaactggaaaaccctttacaggtccaagggggg

SEQ ID NO: 371926 - DNA, 289 bp, Zea mays
tttttttttttttttttttttttttttgttaacaatttttttgtttggttttttttttttttttacaaaaataggcctaggggcatttttgccattaatcccgggtaaccttaacctttacctttattaggataatataagttgattaaaaccccggggcgccggccaggggaccaccccaacccatacccttttttttttggcacaacaagaaaacacccaacgggacgccactggagccacagccacagggggcgcacgggacgggtataccacgcccgcccacccc

SEQ ID NO: 371927 - DNA, 176 bp, Zea mays
acgcatgtggaggggccgcccttttttttttatttgttttatgaggcaatggcacattatgatggcgcatacatgcatacacaaccattaattgaacgtggcgaggagcaaaagcaaacgacgacggttttgaatccattcatccagagcggagatggagtggtgaataaattagg

SEQ ID NO: 371928 - DNA, 245 bp, Zea mays
aaaaaaaaccccagggggaccccgccccccagcatattattatatatggattttggccccacaaaaaaacatttggaaaatttttttaaaaaattccccgtttgggccggcccatagaaatggggaggaattttgcccacggggtaaaaagggttaaacctcaaataaaaaacccttaaaaaaaaatggtggccccaatgttgttttgttggaagcttaaaattgggcataaaaaaagggggggg

SEQ ID NO: 371929 - DNA, 188 bp, Zea mays
aaaaaaaagggaagcattggagttcttcttttggaccaaattggcactagaagtctcaactccttttccacgaggggtttttggttttgccctttccttaacattaagagaaccaataagctcagccacgctaaactcttggcttttatggtttagagggggagcaaaatccgcccaagaagggggga

SEQ ID NO: 371930 - DNA, 285 bp, Zea mays
aaaaacacccccgggggggaggggagcatcccatcccaaccaacaaaagggggccctgcatgttttacaaaaaaagcttttaacaaaacaaaaacttttttatgcccaaacggacccaaaaaagcccaaaaagggttttgggaaccccccccggcaaaggcccaagaatgaaaaagcaatttgaaacccccgcccctgccggaaaaaaaatttggggaagcctaaaaaacagttataacaaattcccagaaactaaggccttgttcgtttgggtcggattggggg

SEQ ID NO: 371931 - DNA, 344 bp, Zea mays
aaacaacagaccaactgaactgatgttgattttccatatcaaaagtatcgaggtacaaaaaggaactagtatacttctgtgcagtaacatctgatagcttgcgaatcgtatcgacttcgccatggaaacacaactatcaattttcgcaggactcctcatgcccatgcccatataaacaaatttctagaaaacttgagtcatgtagcatgcacactttctggcatgaccaatcatgctcaagcaggcgactcgagcttcacgttgatcttccaacttaagaaataatagtcaaagaaatctgcatacagagtctgtttgcaccaaaccagcaagccaagggatcc

SEQ ID NO: 371932 - DNA, 342 bp, Zea mays
ggcttcttctagcctcttttcatcacaaaagatctattctcatttgatgggcaaccaggggacccatcccatcttcacttggttggggaaatcaaaatgccaacccaaacacaaggtctttttctggctactacttaaggacagactaaatacccgggcacttataagacagcgagctatgctactggattcatacacttgtgacaactgtatcttacaagctgaagagacaaccattcatctttttttcagatgcagctttgctaggagatgttggtccttaattggaatctccccgccatgaacaactggtgcattcaaaaaaaatggagaaacatattg

SEQ ID NO: 371933 - DNA, 178 bp, Zea mays
aaacaacagaccaactgaactgggggggagtgtcccatatcaaaagtatcgaggtacacaaaggaactagtctacttctgagcaatggcatctgttatctttagaattggatcgacttagccacgaaaacacaaatatcaattttcggaggtctccccatgcccatgcccatataaac

SEQ ID NO: 371934 - DNA, 281 bp, Zea mays
gctcctcaacattttcatcttggcgcgggaccaggtggcgtcgggcccgggcgtgctggacgcgctgacggccgcgctgcgctcgggcgacgccgcgcaccacgccgcggccgtggtccacagcctcctctgcggcggggagccgcaccgcgcggcggtgtgcgagcggcgcccgctcctggccgcgctggtggcgctcctccgcgcgccgccgcacaggccgggcgccacgcgcgccaccaaggacgccctcagggcgctgttcggtgccgcgctctacc

SEQ ID NO: 371935 - DNA, 318 bp, Zea mays
aaaaaaaaaccccacatattataaatgggggactcatagcacccaaaaatggccccctaataaaagctgcatggcttggccacttcatgacatgaaggatgtttttttaaacagacccctcaatgggtgaatcatgcatcttggatttttttctaacaaaaagatccgggataacttttttttttttcccgccttttttgagaaacgggagggacccaaacacgcacccctacaaagaatacttttttcaatcgactatgaagcacctttgtttatcaaaattttcataaccaacgtttacgaggcacaggccttttg

SEQ ID NO: 371936 - DNA, 183 bp, Zea mays
gtcggttatccccgaagaaaatatgatcgggataatggactggttcagtctgcccacggactaccaccgggcggttcctggccctggggagggtccagttcccacgggacatgggatgatgcaccgggaggtccgtgatcagtacaggcctcctgggccgagggcgcacctaccaccgatggg

SEQ ID NO: 371937 - DNA, 256 bp, Zea mays
tgttgttatatttaggccaggagtggtgagcgagacacttgcagctatgattgcccgccaagctatgatatctgcaacattctgtggcataaagcaggccatggcttttggctgctctcctgggagaggaccaagcatacgtccaagatagtggtcacagattcgtacatacgggcgagcaagagttcgttcggaacaatgcgcctgagcggcggggcgagcacatggagcgccaatgactgggccagccgacact

SEQ ID NO: 371938 - DNA, 311 bp, Zea mays
attaggtggggggcaattgcagttaccaaactatttcacgtttccaagccctcatgcaacggatccaaggttatgtgtctgacatggagagtaaatacctggataaggaaaagacttgcagggacactcaacatgaggtggagtgcattaagaatatggtgatggaaaaggatcaacaaattgaagctactgccaatgctatacgacaggaacttttagaaaggagtgttgttatgcgaacattgtaagtagacaaggatcaattgagccgcagagttcaactatacgatatggttcttaagaagttttta

SEQ ID NO: 371939 - DNA, 202 bp, Zea mays
tcgtccacgcgtccgctcggacccacgacgagttaagcccggtgggaaaaaggacaaatcacacaaaggcacagggaatcgcgccaccgtgggacgcgtacggcgcaccgcccgcccgccggatctgcgccggcgacgcgcccggacgtcggatctacgccgccgtaggaggggggaggtcttttctaaacccttttatttc

SEQ ID NO: 371940 - DNA, 226 bp, Zea mays
ttcactcgtccgatcaactcattagctagatgctagactcacgggtattttatttgctactgttgcagtcctggttggaattgaggagctatggttgctcttcaggcttcacaactgaaatacatgcaaccatattcatatatgtataataagaggccatgttttatacttagacgtgtacattactaaggagctcagtacagttgccatgatattctaggggatt

SEQ ID NO: 371941 - DNA, 187 bp, Zea mays
ttcacgcgtccggcggcggcggcggtgcaaaagcaggcgatggcgagggtgcgagggaaggtgcaccagccatggtgcacgtcaacttgtaccgcaactatggtatgacgttctagaaaccaaggcgtccttatgagaaggagcgtcttgatgcttaactgaagctggtcggtgagtatggcctgtg

SEQ ID NO: 371942 - DNA, 136 bp, Zea mays
gtaccttctatggtgcaggtggaattcagagaaccctcggtcagggtataaaccgatttcagctgcatggacggtcgaagcgccataggctattggcccctgctttgaagtttttcatgtcatcattagcctggtt

SEQ ID NO: 371943 - DNA, 234 bp, Zea mays
tggtttactgcacactcaactctcgcgccccacggcacgcccctcgctggccgcagccatgaacgcccaccgcgacgaggaggccgtctcgccgctcatcgcagcgcccggcggttggagccacgccgtctacgtgcacgttctttcggcagtctttctcttcgtcttttctcgctacagcgccgcccagaaccttcagacctccgtcaacaccgaggacgacctgggcaccgt

SEQ ID NO: 371944 - DNA, 173 bp, Zea mays
atcaaatctgtttgccaagcacgatgcagccttgcatattcccatgcgctacagaatacagaggtaagtttggtattgttatttagctactatatgttgctaaagttacttagttgtctcttcttaacaccacaataacagattttgtggtgcactattactttgatacttgt

SEQ ID NO: 371945 - DNA, 310 bp, Zea mays
tctccgttcggattgaagtcctgcggaagagccggcgacccatccatcctccattttctcttctccgatgcggggatccttttctgcgctatctgctttacaagatctgccttaaagtcttgctctgcgcgttccctctcactgcaatctgtacctgaattcaatcccactgacatcgccgaactgacgcaggaaaactgagcaggacaaacaccactgggcggcgagacgaggaccggcccgaccgaatccgtcataaactgctcgagcaaatctggatccaatgcagaacttaccgtcttcaggatgc

SEQ ID NO: 371946 - DNA, 264 bp, Zea mays
ttatgttcaagggtctagtccagaatgaaagagtaaccgaggcccttgctgttttgaggcaaatgagattggagaaccagccagatgtcgccactttggtgaccatagtttcaggctgtgctgatcaaggcctactttctgaaggggaaacactccatggatacgtaatcagaaaaggacttcttcgtgaggagccttccatgggaaatagcttactcgatctgtattttgaatgtgacgaaccatctattgcaggcctgttgt

SEQ ID NO: 371947 - DNA, 158 bp, Zea mays
ttcactcgtccgcccacgcgtccgcaaaagaagaggaacatggtaatcacactgtgagtgatgatggctccatcctaccagtcataaatggtgttgttaatggtcgtgaagctgtgaccactccatcttaaataccttcgacatctatagaaccagcg

SEQ ID NO: 371948 - DNA, 99 bp, Zea mays
tcgttctgggcatctaccagggctcgatgtcggagatcagttttattctcgcgctgaaatggtagtgtcgggcatccacagccataggcttaatggcat

SEQ ID NO: 371949 - DNA, 141 bp, Zea mays
tcgtctcacgcgtccgactagcctcgcctaggtgatcacgccgtagatagcgcctgcggcctgccgcggagaagcgagagccctccccggcgccgggctcgggtcgtcgatggacaggaagacagctgggctgttcaaggg

SEQ ID NO: 371950 - DNA, 244 bp, Zea mays
tcgagccttcgagcacgctctctatcggctgggatggtgccgcatgtacctgcgactttcttgagaggagagcaacggacccgcaggaacaggtgatagtagatggctcagttgctagggctaccataggaacaaacaggctcgtaggtgccggcggcagaccatgaattctgttcattcttcgccaagctccttaccattccattactgctattattgaagaagaagaagaaacaaaaatcac

SEQ ID NO: 371951 - DNA, 113 bp, Zea mays
acttgcctctcgaccggaagtaaccaacatcagaagagaggggtctatacagcagccaacgcacaacgacagcatcaggacagaccgttcacgaccacgagagcgctcggaag

SEQ ID NO: 371952 - DNA, 342 bp, Zea mays
tttgactacactctgcactagccctctgctcctgtgaaatggcggtggcgactccctcttccacctacctcgccatcggacggagaaccctaaaccccggcccctgcgtagccacaggcggcacctgcggctgctgccccgggacgcagcacccatgcctcgtcggcgcctccgcggaccgacgccgcgccgtggctgcgaaggtcaggtcgccgctggtaacaatgaccgccatgccggggcttgacttggagagctccggtttcaagaagggaagagtgtccctggccgggcctggggagtcaagagggaggacgtcaacacggccatggagcggctcga

SEQ ID NO: 371953 - DNA, 119 bp, Zea mays
atctgtgtgcgcgtagggagatcctgacggagaggttgtgattaacaacctgacattccggagacaaagctgagctatatttccaggcatgtggctggatcggggctggcccgcctgag

SEQ ID NO: 371954 - DNA, 541 bp, Zea mays
tcccacgcgtacgcacttcaatgccccgcaagcgctaatagaggagactagcagggggtgggcagctcctgtaactcacacattggtgtccctgggaaccgtgctgttctggcctgccgccgccacctagtccaggagcccctttctaccgtcgacctccccagcccctgcggggaaggtcccgaggaggccgtccgccagctggaggtgcctcgcctactacggcgacggcggatttcttaagatctacgactccattttaagcagttccgcgtgtagaactctaaggatggactgacttgattaatttcaagcacgttccttaatttctttttggtttaagatgctgcttagatgtgcacttttattacagtcttataatccttatttttgtaattccagattgtttccaacgttttctttctactttcactttcttctcttatgttttatttttttcctttttcttttctcttagtctttcttttctttcttctccatttccttttcttctttctatccttacattctttactctctt

SEQ ID NO: 371955 - DNA, 159 bp, Zea mays
cgcagcttggggtgattctgacggagagatggttatgacaaagcctgacatccaggagacaaagctgagctatatttccagccatgtggctggatcggcgctggccggtatgaggtcgatgggtgtgcttccgtgccagcgcacgcacccaaggcaccg

SEQ ID NO: 371956 - DNA, 113 bp, Zea mays
tccctcgcgtccgatctgagggttgggctagctggagctagataaggaagggtcattttctttataccttggcagcagataaacataactagataacaatacatacagagcaa

SEQ ID NO: 371957 - DNA, 262 bp, Zea mays
tggtcgtgttaaatctaggacagttaattaatgtaatagtcaacttctgctaacaggtttgcagccaatgcaatttaagaggaagttgtgatcgggcatatgtgaaggctcggaaagaggacgttggacgaactgtggatgttatgcgcatactgttgacttacggtcttgaggttatttccggccttgtagaaaatagagcatgcctgaacaaaactgccatggagattaatacagagcgtctaagctaggtttcctcagg

SEQ ID NO: 371958 - DNA, 214 bp, Zea mays
ttggctttgagagtgcgctcgttgccttcactcagctcatatcagctccctgtcctcccccaaggccccagagacaggcagccggcgaggcccgccgtcgcgaagccatggatttcaagggggtcgggctgggcagattcagggccaagcaggcacccgagccgcaacagactggtccacgccaacggggctcagattcagttcaggacctcca

SEQ ID NO: 371959 - DNA, 199 bp, Zea mays
tctccatgagaacgccctggctgctctccccacgcttgcccacgccgcatgctctccctccccggcgcccctacgtcgcggttcgcggtggctgacaacacgccagcacgggcctaaagtggccaaccaagaaactagccggtctcaaggtgctggagacgaagagacaacaggggaggagatagcagactataattgc

SEQ ID NO: 371960 - DNA, 324 bp, Zea mays
ttcccacgcgtccggagataaatacaagggaggtcttcgtgctgcaaatgttacacctacaagtactatgtcagaaggggatcgtgctcgggaaaggcttgattttgagggtgctgcagaggcaattgaaaagggcaagggaaaaaaagttattgatcctttgtcagtgttctctttgcctggaatgaatgagcaacgctttgtagcggtaacccaaccagagtgatacaagatgagaagcccatttattcacaaaggcagcagtttgaatggcggtcttcttcaatactgtgcaaacgttttgattttgttgacccttttatg

SEQ ID NO: 371961 - DNA, 236 bp, Zea mays
atgccacacacgtacgcccacgcgtccgcccacgcgtacgggggaacagcgaaacctttagtaaggagtctctatcttggggagaaatgctatggaaggtctctgtagcagcatgtggtgttcagctgaaagagaaaatagcatctacaagttgtaacttctttaccggttttagaaagaacaatttctctagcactgatgtcaatgaggggatgcctgagaagtcctcctacacc

SEQ ID NO: 371962 - DNA, 107 bp, Zea mays
gacgcgtggggcacatcaacccggccgagacctttagcctggtcctggctaggaatgcgtcccatctctccttcgctggtctacatcatcgcgcatcgcctttgctc

SEQ ID NO: 371963 - DNA, 404 bp, Zea mays
tcctacgcgtccgcagatacacaggacacccgttgcccaggttgtgaatatatgatcctctcacgagcacgaaggcgctgctcaaaaaaaaaaaaaaaaaaaaaaaaaaaaaaaaaaaaaaaaaaaaaaaaaaaaaaaaaaaaaaaaaaaaaaaaaaaaaaaaaaaaaattataaaaaaaaaaaaaaaaaaaaaaaaattcatacattgggggggcctctcaaaaggatcaaagatatcctacccgtgaatggaacaaaaaaaccttattaaaaggggaaccaaaaaaaaataaaggggccgcgtttaaaaaacgtcgaaatgggaaaaacctggggatacccaaaaaaaaatgattggaaaaaaaaccccctttcccaagtggggaaaaaaacaaaaaggccc

SEQ ID NO: 371964 - DNA, 284 bp, Zea mays
gtgtcaaaagaggtggatgactcagctgaacttctgttctctgaagttatgaacgcactccacaaaatttcaggaggaaggccaattccaggttcttttgatggcatcttgaagatccttgagttgtgaagaaatattgctgaactggaagagatcctgatggccgagaagactgcctttatggagtcattaacgaatctactgaaaacagatatgagaaaggaacagccgttcatggatattgtagatgttaacaaatttaggaggcactttattatttctgt

SEQ ID NO: 371965 - DNA, 192 bp, Zea mays
tggacatgcctgcggactgggcggcccagccgcccgactcgaggttccaaggcttcgatcagaggcactgacaaggacaggagcaccagaccgtgacacggatagaatgttggcttcactgaaggaagacatttactagatctgtaagactttctgacggatggctggactgtttcttcagttcacatggat

SEQ ID NO: 371966 - DNA, 168 bp, Zea mays
atcgcttccgcgtgccagcggggcgcccgccgccgtcggcgaggctcccgcccgtgaccctgctgttcaatggcgcggagatgtcgggggccggggacaggctgctgcacaaggtccccggcgagcgccggggagccgactgcgtgtggagcctaacgttcgggaacg

SEQ ID NO: 371967 - DNA, 156 bp, Zea mays
ggtccgttcaatcttcattcttttattaaagaagctgttggagtggtcagatttctaactggttgcaagggtgtagagtctgagttttatgtgaataattctatttttagttaaaattcatatttttctgatgtgtgtctttaatatttatttttt

SEQ ID NO: 371968 - DNA, 157 bp, Zea mays
ttgaactgcaacccagacgcccaagcgaagggccacgcatgcggagacacggcagcagcagacacccaacggagggagccgacaagccggcagcaccggcaacccgagcagaggcatgaccacaaccaccaccggagggggggggcgaccaacgcca

SEQ ID NO: 371969 - DNA, 203 bp, Zea mays
cactcttgcggcgcagttaagataattacacttcatgacgaactaatgtctctttgcattaatttgctcactaaatttatagcccgtatggtacacagattattattgctaacagaggcgaacggaaaaggttgagcagttcccgtgccagcatataaaagcggttatttaaaaaagggctggtggacaccctcgttttaaaa

SEQ ID NO: 371970 - DNA, 327 bp, Zea mays
gcctgcaggtaccgtatccgaattgcattgtcgactcaaccgtcttttctgtacacaggtaaacaacctttgtggaagctggactcagatcaacattacaacattgggaggcaaggaactttaaaagaagagattggaagatcattcataaagaggtcactatcagatggtaacatactgttggagagcagcttgcctgtaactatctgtaacaatgaaacagacaacacagaattgtttccagtgcaacagctggatgatattagagaagctcctgattctgtgccagagatcttcatatgctaacctaacctgtgttctagtatg

SEQ ID NO: 371971 - DNA, 211 bp, Zea mays
tgggtctttgattttagccgccgccgctgctcatctgacatttttcgagaagacgcctgcttctcgccgatcgatacgatggccagtcttctacgaccttcacaccgtcgacggtctttaagttccttgaggctcacctcgtcggcaaaacctatgtgtctggtgacaccattactaaggatgacatttaggattttctcccttttccccc

SEQ ID NO: 371972 - DNA, 311 bp, Zea mays
tcgtctgatctacatcaattccaagtcaaatgtccggaataccgaagattattccggacaggagaagtttttttggaaattcacctatgtgcggaccgtacaaccccttgcggcggaccgtccgcgacactagggtgagcctcggacaggaacactgcaaaaacacgagttaacactgcgaactgtccgaaggagaagctagcaccgtccgagaccaagcgcggaccgtccggtctcaggcgcggatcgtacaaccgttgaaaaaccagaaaaaaactaaaggtgacgggttcggtaaaatgcatttttag

SEQ ID NO: 371973 - DNA, 193 bp, Zea mays
tccctttcgtccgcacgaaatgggcgtggagcggcggcttgtgctgacgtaagccctttgcgcacatgacgtgccacaagcaggttcagttctgcatccccattttcagaatcaattctggttgcaacatcctgtttacactcagctctttttttacctttccgctcctttttttatcctttctttttctttt

SEQ ID NO: 371974 - DNA, 166 bp, Zea mays
tgtctcgcgtccatgcacgggtgcgagcaagcgggctcccgacgagctgcaaatctgcatggagagcgggaacaaggaggacctgacgaacccagcctcacacatcgtgtacctagaacgcgaaaacggcccaatggacaccgacagagcctgcgtaaaggttgca

SEQ ID NO: 371975 - DNA, 213 bp, Zea mays
tacctgtttgactgatttcaccgtgcagcctgctgaacaaagcctctctctttcaggaagttgcggaggagctaggcgtgtacatggtgggcttcgaccgcgccggctacggcgagagcgacccgaacccttgccgctccgtgcggagcgcggcgctggacatggaggagctggccgacgcgctgggcctgggcgacaggttctacgccgtgg

SEQ ID NO: 371976 - DNA, 178 bp, Zea mays
cttgagccaaccagaccagcttgcagcaactgacagtgcgtgtgagagagaggatctgatgctccccctcggggcggtctgatgctgaccccgggagaggacgccctaaaacgttcccgcccaatacaggcccacctccgcctgcggaaccgcacgagatccacccccagcgcccctc

SEQ ID NO: 371977 - DNA, 127 bp, Zea mays
gctggcttccgagcccgaagagcagagcagaccagggagcggggaggaagaaaaaccgaccgatggaccacaacgaccggggcacaacgggcgaggagggacggaaccacgggccccacaaaccaca

SEQ ID NO: 371978 - DNA, 152 bp, Zea mays
ttgtttcaaaccgagctacagaacgcgcaggagggccacaagagaaaccgagagaaacaccgacaccaagaaagctaggaccaaaaggggggaggacagacacgagagaggggaggacgcgcgacagaacgagagggacaggaggcgacagc

SEQ ID NO: 371979 - DNA, 317 bp, Zea mays
gtctttctccgacccccaagccggggccggccgagccgggggagccggagaacaacgccgccgggaaccgcaaggaggacgagaagaccgagcacgagggcccgaaacacgtggaggagaaccagagcacgggccccgcccacaccggcctgccgcgcgcggccgcggaaacacagagcatccacagccgcccgacctcggaggacggggacgggcccacgaccacgggccacgacgccggcgagcgccacgaggagagattcaggaccgacaacaggaccgccagcacggagagcacccgacggagcgacacgccg

SEQ ID NO: 371980 - DNA, 176 bp, Zea mays
cttttgctgttcgacccgagacttctagcacctggctagagggaggatttttttttaggattttctgtctgttacgtgaacccatgactagcgcgtgccgctatccgaaagccaatcgccagcttgctatgtgacaatgagcttctgtggagaggcggcattagctcatggacata

SEQ ID NO: 371981 - DNA, 130 bp, Zea mays
  unsure (1)..(130): unsure at all n locations
tttcgttcacgcgtgtgcctttgcgtccgnccacgcgggcggctaacggacggttgtcttaacgagattcagagtgctgatctaacgagnagcgctaatcaccaaaggacgaggaaatgcacgatctatg

SEQ ID NO: 371982 - DNA, 430 bp, Zea mays
aatttgttctcgccgccgcctgagacaaggttgccatctgtgccccctccgccgtgctgtctccatgcatcgcctgcagtcgcttgcatcgctgccgtctccgtctcctaccccgccatacagacccatgccttcttcctgcctgcgcgggccgtcgtcacgccatgaatgcgaaggtctcttcgccatcgagacctccgtcttcaagaaggaaaaggtctccttggctggccatgaggaggtttgatttgcaggcctagccacttcctccaccacctacctcgccatcgcccgcaaaaccctaaatcctgttccctccataggcacagccgccacctcgatccccttctcttacacgcaggctccatgccttttcttcgtctctgcgggccgctgtcgcgtcgtgtctgcgaaggtacctcgtcgtcga

SEQ ID NO: 371983 - DNA, 340 bp, Zea mays
actggtcgttccaatccaccggttttgctacccgtcagaccagaacgcacctgctgtgctggttggtgtacacaacgtgacatgcgcaacaatgaagaccgcgagttgctacacgagtaatgctgattgggcctgaagcgggaacactctgatggggtcatgccactcgataggagatgcatctgggggtggaaccttcagcaggtcagagataaaggggccaccactgaacgatacaatgctggatatagagtcatcatcgttgagcttgttgaaccaaatgctccaaagctccatgtttttagacctggcagatgattgcaaccaaaaagcggaaata

SEQ ID NO: 371984 - DNA, 372 bp, Zea mays
ttcacgcgttttgttaaggaaacttgaggcagaacaagctcaacagggtgattcaaaatctggtttccttgaagcttcttagggaggaaaatgaatacttagatctggttagctgaatgcacaaatacgggggtgatctgctccaagctcagtgtgaacaaaaaatatgatcagagctgacagtttggttacctttctagaggaataatcttcgaacactggcccatggcccttgaacagtattgctctaaccttataaaatcaacctggcaacatagactctgccctactaaccaaatttacaaattttgtattggcaatgccatctgaatgttaaaaggaaatcttcttgggtctgtatcaatatttaca

SEQ ID NO: 371985 - DNA, 287 bp, Zea mays
cgtttttgtgggcccctcggagccaaggaggccggcgggggcattttcaagaagaccttccgtttctgccacggcgtctgcgacagcgagcttggttcaaagtcagccctgagcatgtcctggctgaagcgcgcgctgcggacattcgatctgagggattctttgattctgctgatcggtgtgccaatcctgctcttcgccatatacgtgcacggccagaaggtgacctacttactacggccggcctgggagaagtccccgaagcccttcacgattctccgccacta

SEQ ID NO: 371986 - DNA, 358 bp, Zea mays
ggtttctgtagcatgaacaagcagcagcaggcgtgcggggactgtaatgggcaggttgccgacctcccacgctactgctgataccatgcccaggaggtggagccctacaaggtgctctaactggctgaaggattacctcctacttgtactagccgctgccaacaacaatcagaccgacgacgacacccgacgtacaagcatgagcacgagcaggagcatatgcctccccaaggtcctagcgctcggctactccttgctgcagcgcctcgactcccgacaccaccagagacgagggcgggacaacaactgctactcctacaactacgacgacgccgactacggcgcaagccttattgat

SEQ ID NO: 371987 - DNA, 166 bp, Zea mays
ttcctccgatatgatttttcatcgaagccagaaaatgacatttacgggggttgagctggtagtacatcttgcgatcgctgattcagttcaatctaaacaggtttgaggaaaatatccaacgaattgacacagatttaatgctaaattagttattctgtctaaaata

SEQ ID NO: 371988 - DNA, 314 bp, Zea mays
cggcccggaattgactgggtcgttccattcatgcggtttctttttccagcccgcgccaaccagcacagctggccggttctgttagggtgtgccactcagaggataggtgtcccgggtaggcctttctagatggccgccctggaggtgatgtgcatcatgcctgtcagagggcctccattgtgcacatgtgctaacactcagtcccaaaggacctcgtctccttcggcggcggacgcaacaccatacataaacttgatgacgatcaccaactttccggaggattgctatcccgccacgtatcaccagacaccctg

SEQ ID NO: 371989 - DNA, 296 bp, Zea mays
ggttggtgctacgccgccatcggagggaggaaagagaggaagactttccgctagcgtttgcgtttcgacgagatgtgcaggaggcgagtgggcgctctactacgatcttcacgaactactatctcgggctccttggactgacagagaccacgtcaccatgttatcctcagagaggaacccattgctctcaaccgttttggcaggctcttcacgtaccaaggtggaagacatggtagcgatacccaaaagcccttaattgcttttggcttacgagggactcggagtggccaaggaac

SEQ ID NO: 371990 - DNA, 225 bp, Zea mays
ttcgcccgccctttgtattcggccacaggacccacaccacctcgggcggcttctatccgctgcctttccggtgctaatggagcagacacgaatacagagccctaccccactgagcaagatcgaggtgatgagatatgggggatggacatgctatcacatgtggcgcgctatcagctatgacacagacaacaacatcatatctccacacatacgatcaacacatat

SEQ ID NO: 371991 - DNA, 178 bp, Zea mays
ttcacttcgcccggcttccgttccaagcgaaccgaaagcagatggcgcgggcgggttgacataacgttgccgttcctgaactcggcgccgatggacagggagttgtggcgcaaaaagtatacggagcctgcgaaacagccgagtgacgcgcgagttagcttacgaagctgatcttgta

SEQ ID NO: 371992 - DNA, 334 bp, Zea mays
ggctgttttcttgctcttccagccggtatgcgttatcgggaacatttttcacaggaggcgaggagaacgagagctaaaaagatgaccggcatggatcggcttgcggacatccttatcttggggggcgagtactttacatgctcgaagcagcggggcctgcacaggcatcacaaccttaaacagaagcattgaaggctgaggctatagatgttgcggtcgatacagaggcagtctacctcaactacatcgacgacgagaatgtacacctacagcacgcagtatgttgaagactagatagacgtcatgctcacttccaaggccgacgctgacatgc

SEQ ID NO: 371993 - DNA, 286 bp, Zea mays
tcctttcgtccgcctttgcttccggccactcgaccactacactggccgacggtcttattacgcgatctacgggcttggaccgagaggctactctgagatagtgctggagcggcacatgcggttaaacgcacaacacttgcgaccgcacatccagaacaagttcgtgttcaagttgatgaatgacgtgtaggacacatgtaactgacgggactatctcagggtggagatcacgggtgagcacgacatctgctaggggctcatccgggacggtacgtgatactctaac

SEQ ID NO: 371994 - DNA, 262 bp, Zea mays
ttgtttatcatcgcaaaacacagggaatcgattctgcgagctttttgggatgttgtgcaagctgccgcaacccaaccagtgactgaggtgcctgcaccaccagcacagttggccgaacatttctaatgtcgtggcgtgagctggccaactgtccccattttcttgggtcgagaacaaggtacgaagcatgctatagggccgaactggacacacactgacaggtgcaaagtctggtgtagggactatcaaggacagacaggat

SEQ ID NO: 371995 - DNA, 429 bp, Zea mays
tccctcgcgtccggcaccggctttgcttggactgaagggtgctctctctgtccctcctccctccttgtttacctttatcgatccatgcatcagcttcgtcatatctcatggttgtactagcttcatggtctgtctttgcttgagctgcttaacttacatgtttggttggcatctgatgcatacatatatagcagctgccaaaacgacgggcatattttatttagtcccttatcatgtgcgtgcttactgatcttctctgctggttaattgttatatagcagttacgttctgtgtgtatatataatggagatccaaagcttttttttgtactttccttgcgcttttgatatataaactagctctaaatccttgatctgctcggtgaatctacatatatattggtctcttgcaaaaaaagagatcccattt

SEQ ID NO: 371996 - DNA, 120 bp, Zea mays
cgctgtgtaccacaacagcctcaaaacaagcctaggggagggtaccttgcctgtttgcctacctgtccacagagctgcacaagaaccgagacggcgccaactgaacacggccggagaacc

SEQ ID NO: 371997 - DNA, 298 bp, Zea mays
ttccattgcgtccgcttttgtattcgccaatggctagctggcacaaacagtgcgtttgttatgaggcgatgtttcctgttacaacgcttctactgctggttgccattactaccgctgacttacatgtggtctcacctatcttacactgcccgctaagcttttgtcactaactgctctgctcttattcaatcctggcatgctgacatcaaatctgccaggtcacaccgactagaaacccgaggcctgtaattttcacataagcgcaccacaggctcatcatgtaagtcattcacattag

SEQ ID NO: 371998 - DNA, 183 bp, Zea mays
  unsure (1)..(183): unsure at all n locations
ttcattcgcccgcttttggtctcgggccatctgggccacggtgccacggagaggatttttntacgacatcctgtcgaaggatcaccaaccggggtctgccttatttctgaagactgtggactgatccacacaaccgtaggctactctgagggataagtgtggtgctggtgaatggagagcggc

SEQ ID NO: 371999 - DNA, 291 bp, Zea mays
ggctttgtgcgctcaccagggcgaaaagtgcgagagaagggttcatgatagaagcatggtccgccaacctggagcgctgatcacatgcacacagttactaggcgcagcgagcaagggtaggagggcactcctgaatccaatgaaggagcacgggtgacctattgagggtgcagaaccgccagcggactgcacatgacacgctggacctgctgtatgccaccaagggacgatgcgtaccatgagaagatatgtcgacacccgctgtatctccgacgagccagtcaccgactg

SEQ ID NO: 372000 - DNA, 307 bp, Zea mays
tcctctgcgcccgggttcggttgcaaccgcgaccacggcagatggtgcagggggcttgatatggcgagcggcatccggtcactcgggcccgagccctgaggggctcttgccgaggctggaagccggagtatgtcggctaggtttcagggccttcgcatgacgcagcagactaagtaagggaaacttggaaccgcatgcacccacggcaaaacgtccgtcatctataccaacgaaaacgggaacaggcatgatgcttacactgcatatacatgacgaggatgtactacggcaggagctggtgctcaaa

SEQ ID NO: 372001 - DNA, 252 bp, Zea mays
ttgatcaggtagaccacgcctgggtctgggagatcggggcagatagacgccaggcgggctggtaccacacaggtagcggccgtcggttgttgctaagtgacaccgacgcctaccggtactacaaccacgcggtcatgacgagcacgtagttagctaggcgctcgtcggggctatgagaaatctgtagctgaagcaagcggtcgtgctgactggacacatacaataccgtcgcgaagatgagggagatcctgc

SEQ ID NO: 372002 - DNA, 249 bp, Zea mays
ttcctcgcgtacggtggtggacatacaatccgcaagggagctgttcgccaaaaggcaaatgcaaaggcaacggctacacaagctagaggcagagcgcgtcccgtcacgatgaagaaagaggaggttgccttacctgcagaggtgactgttgttctgctgctcctgtctgcagtgttggatgtcgtttttggccagccacagacataggctcgagcctggagtagcaatgcatactgtctgtaacaaccc

SEQ ID NO: 372003 - DNA, 323 bp, Zea mays
acttgataacacgctgccggacggccacgccttgcgccagccgttcctttcattttatgctgcctacctgggcccccgactgcgaattttagccgcacgggcagcgacgccgacgggcggccggtgagcaagagcagctaggccgtcatggaggcgaaaagcgtgggcatgtcggcgctcgggatcgggaacggggtctgcgagggcctgggcctcgagttcgcgccgtgggacgatggcacctcggcctgctacagggccggaagggtgacctgtgaacaggaggagaatgagctccaccgtcttctgggtgaatgagccgg

SEQ ID NO: 372004 - DNA, 225 bp, Zea mays
  unsure (1)..(225): unsure at all n locations
ccttgcttccgaacatgaaaggggnggatggcagggggggttttatttacgttttcgcctccacccccgcccaaaaggccagcgttgtatggctgtgatgcgcccaaaacggacaagcctccattaagggctgggcgcggatgacccaaggggtgcaccaacggggcgccgctcgtgttataggaaacacaaaaagaagacttctcaatccacaacggtgaagaa

SEQ ID NO: 372005 - DNA, 387 bp, Zea mays
tttcctattgaaatataaggcaaagcagataaaatggttatttttttacaagaaggtaaaggccatgacagaaaagtgaggagggtcagaggtgtacagataaggatgagggctgaaaagaggagtaggaagttgaagatacattcctgaggacgatctggtgcagatatggtcttcctgcttgctgccagcggacttttggtgcttttatattgctattaatttgtttgaaatttattatggctatgactgcgaaggtatttttgaggctattactggctatctgcatggaagctctttttagccgtgttggtgggggtatttataccaagggtggtaaatttggtgcccaccttgctgggaaagtagaaagaaacattcctgatg

SEQ ID NO: 372006 - DNA, 325 bp, Zea mays
cggtcgcttccgatcacgcacacatacatgcttctggcggcgttcattcaggctaggcgagcgttaagtgaagacgatgtgggagtcagagagcgattgccatgccggtgagcgcgggctcgtacccgacgccggcggccgcttcttgggccagtactgaggcggcgctcaagaacgacggctttgttcgaagagaccagtcctggtatgtaaacagggatattaccagcgatttgctggtccaaagttgcagatgttagcttccaccttcacaagtacccgatgatctcccggaacaggcggatgagccgtgtgatctactaga

SEQ ID NO: 372007 - DNA, 284 bp, Zea mays
actgcgtcaggggggaggctgttagctagctttggggttgggggcggggcagcggggccctacggacggccatggccgccgaggcgaacacacctaagtgtcaccggccgtggcagctggagcgcccagccagagcgagcgcgagcgcgagccgactgactagcctgacagactcagcagcaggagtgggggctggcggtgcgccgaacgcatggacggggatgccaccgtcacctgcagctcggcggaccgtgagggacaaagccggagcagacgaggcgcgg

SEQ ID NO: 372008 - DNA, 332 bp, Zea mays
tggccgggttgatccacgcgtctttattgtcaaccgtcggctgccttcctctccggtcctggtttttttggagcgactctccctgggagcagccggcaaggggcaacactaccagctcaagcgcgaagcaggcgagcgctcgatggacattaggtagcaaaggtaagaaggccggccggcgaggactaggagctacaccagcaagcactgcgacatcctgggggtgctgaagatccgggtcccaggacaatcatgagactgcctaccggaaggttgctatcaagaaccacaccaacaagagaggcgatcgcaagatgacgcaggagatatca

SEQ ID NO: 372009 - DNA, 252 bp, Zea mays
  unsure (1)..(252): unsure at all n locations
cgctttcttgcgaccgaacgagaaacccggcangggggcggagggggggaagaagacggcgcgcggaccgggggggagcggggccgggggccccggcaaggccaccggcgggaccgggacggcgcaggaccgccacccccgcggcaggaaggcggcgggggggaagagggaccccagcaaaagacgcacagccaagagaggggggcataaacaccgaggaccgcataaaacccagagacggcaggcgggagc

SEQ ID NO: 372010 - DNA, 281 bp, Zea mays
agcaggaccggccggtttccgggtctctcacgcgccggtccttcaagagctactgctgccctgagccagggccttttgcctctcccctcgtggtccgctcaagtgctatgtaaacccttgccctcggcgagactcctctccttttagatcaaccctcctcccggcccgtcgcacctgcccctcctgaccggcatggctaccgctgctgtgtttccggtggctgctggaccggcctcgctcgacggtgtccagagctccgtatcaagcacacaatgtagctc

SEQ ID NO: 372011 - DNA, 277 bp, Zea mays
gccaggctatcaaatttttttaaaaaaaaaaactctcatccaatggaagttacacatatggttagtttcactgctattgtagcaccttccaacccttcaggtcctcagttgctattccagatgcccctaatcgagctatatactacgataatggacctgactgcagcaagaaagcagcatttcccaccaaactttcatgtgtaagtctgcaaccaatctgatcttcagtagacctgtctgatgttgatatttatcctagaattcttgatatactcca

SEQ ID NO: 372012 - DNA, 188 bp, Zea mays
tcgttccaatggcggcctcgtcctccttcaagccgaacccgctgtcgctgagcgtgccggaccccgcgctcgaccgctggctccgggacagcggctacctggacctcctcgactccaccaccaccaccggaaggccgtcgtcgtcagcctcgggcccctccgtcccctcctccagcagctacagcccc

SEQ ID NO: 372013 - DNA, 286 bp, Zea mays
  unsure (1)..(286): unsure at all n locations
tactcgagttcatgtgagagtttttcttcacatttcatggcgctgcgcactccatncgnttgtgtaaaatgctgtttggacgaaagtactagttcctttcctctcatcaacttgatgctctcttgatctattaatgttggggtattctaattctatgcactcagatggacatctgcttttctttatatatttgacagtagtaaactgccaaatctcggctagtggattagcatggatgctggcgcatcctctacatctgtctatgtctaagtcatgtattctattg

SEQ ID NO: 372014 - DNA, 268 bp, Zea mays
aattgcatagaggagcaaatgtggaaatgtttaaatttgtttgccggtatgctccaactacagattttgatgattgagctgctttcataactctcagaggcatttactgatgtcaggaataggccacggatccttcgaatggaaacggaagagagaatccagaagttagcttgtcggctcaatgctacagatgtaaatactccatagtggaaattttccatactgattcatgatgcacaaattaaacttctctgatcactctatccta

SEQ ID NO: 372015 - DNA, 367 bp, Zea mays
ggtccactgcaaactagattgtctttttattaggccttgtttggttaggtacaatcccctcaattattttccaaccaaacaagctttagatgtatgggtattaaagggaattgagaaacatataactagcaagtgattatatgcccctcaatctcttcaatacctatgtattcaaacaggccgtcgagtgtttttttcattagacactagtaatgctagcgaagtgaattgattttgggttcggtgcgttaaaacgaggttggttgcattgcagatcacgctgtcactggaaccgaggttcaagcgcagcattacctttgactacaggaacgatttcacctttcaggacgacttcgccggtcacgcg

SEQ ID NO: 372016 - DNA, 128 bp, Zea mays
ttcgtcactcctagtccaacgcgcacggtgaccaatagcgcatcgagagcctagcactagagctagcaccatcggaaagggcgtatgagcgataagacgaaggaccctacctgggctagtcctcctac

SEQ ID NO: 372017 - DNA, 356 bp, Zea mays
  unsure (1)..(356): unsure at all n locations
tccacgcgtgcgagagacgtttgccaagtgttcgatggaaggtcctaacctttaacctggactttctggcggatctgcgaatcggtgagcgaattggtgagcctattcactactctatatagttaatttgatcagagtattgatcagagatgtggtcgatgattgcgcaggtatgagcgcaagtatatggtatgtccactgtcagacacattggcgaccacatgtgcgatagcaggtgaatgaacatgtcataggagaggcatttctgtaggtatatatgcagactatgattcatacgagtatatatgagatgatatattctgnggaagatacttgggtgaatatgggatatgata

SEQ ID NO: 372018 - DNA, 162 bp, Zea mays
cagttatggaggattatagtcgagctgacagagtagatgtcattgaattaattgtataccgagatgctgtgacaacatgacttgcacaactaagcaaatgagtaggccgtgcaacatattatggtaccaaaaatgcaagtgcatgttacatggcctgaccta

SEQ ID NO: 372019 - DNA, 221 bp, Zea mays
  unsure (1)..(221): unsure at all n locations
accggtccgtattccgtgttcccacgcgtcttcacagccncgaaatggtaatctgatggggattttgtagctggttcccttgcctgctcttgacctctgaaatgcgcacaaaggtttgataactctgttgatttaatccatacatgcaaacagcgaccggttcggtagccgcaagggagaggcgctaggtgacccgtacggacggatgacaccgcgggggt

SEQ ID NO: 372020 - DNA, 156 bp, Zea mays
ttctcgaagcctctccggcgcagccgccgcaatctcgactccaatgcctctccgaccaaaattcatctagggttttcgcttcgtccgtcgcgatgggctccaagaagcggtcgccccagcatcccgcgtccccagccggcggagaggtcggtgctc

SEQ ID NO: 372021 - DNA, 244 bp, Zea mays
ccaccccttccctttggggggggattcaaaagaattttagggtgcatgcaaccaaaataacaaagtcaagacaaaaccaacccctagtaataggggcagctaaaactccaacaaaccaagttaacaaagtcattacactctagatgggggagtattcaagcaaaaactggcagcacttccgaaacatcaaaaacattaacggttcagctggagacgacgccatcattcaatgatagattagcca

SEQ ID NO: 372022 - DNA, 368 bp, Zea mays
agccgtcctctcgtccgtccacgcgttcggaagaagggccccgtgtgtgggcgtgctgatccccaagggcgggtgggagctggacgagtccatggacgaggcggtccggcgcgaggccgcggaggaggccggcgtgctcggcgagacaggccccgcgctgggccgctggtgcttccctcttcccgccgaggtctcgtcggaccgcgggcggacttgcgcgttatttcggccgtcgcgcacagacgcagctcgtgcggtgctagcgtcgcctgctctgctcgctggattggacggaacacgccatcattcagtcagacaaatctggacgtcgtcatgctgtggcatcagacgcggtctgacattgtctt

SEQ ID NO: 372023 - DNA, 254 bp, Zea mays
cctccggcatccccagctgaagcaggagcggcttttgtgagactttctctctttccggctcaccagcgataccgtgaagaatggggaggtacagtcccgcgtacagccgcccgaggagaggacatggcggcaggggaaggagcccacctcccatgagaggatatggcggtggccgcggtgaccatggctctgtcagcctcctggtccagaacattccattgagatgcatgcctgaggaactacgtgtccctttc

SEQ ID NO: 372024 - DNA, 236 bp, Zea mays
ggggactggagcgacctaacgatagctacgttctgatcagtttattagtatattaactaatgcctctgaactatgttcggcatgggagcattagccgaccacctaggacagctctgcgacagtgtgtcttatcaaggatatggatgatgcaaaagactgggaccagactgtccatacacaagctgtggtgatgagtcctcgaaaagattcctcctggcaaggcatggacatgccgt

SEQ ID NO: 372025 - DNA, 307 bp, Zea mays
ctcgaacgcgcgggagagttgcacatttattaagaaggagataaaaggtccaaaatggacgagacaggtacaaaaacaaggcacctcacgggggtcaaaaaacgaaaatacaaaaaacagtccatagtttgagagctgacaacagaacacctacaaccctgggataggggctgttagaagatccaaatttttggccccagccagcacccacaaatccctctcctaagaatggtggaacataaatgggaaggaacaaactaaactttgttagctaccagagcactttactcatatagtttatggggga

SEQ ID NO: 372026 - DNA, 250 bp, Zea mays
ttctcatcctccgcccacgcgtccgcggacgcgtgggctctaatcccaaatcaaatcgactccccagcctgaactgtcctctcctggactcccctcgccatctatcaacgcgacaacgcccgccaccccgccagaggaggatcccggcctcccggtgccgggagccaagccaagccacgcaccggccggccgcggcggatcgggacctcccctgccgcccgccagccgcatttgaggagggcgatgtggc

SEQ ID NO: 372027 - DNA, 352 bp, Zea mays
acatacaacttatatatattactttgagaaattattgaatattacacactttgttcagcaaatattacatcagtactccgaatgtttttacaacaatagctagtcttctttcagaactacttccgcagcttcgtttagcagttgaggtacaactttgtccataatagcttcggccatcttaataatttcatcttcactttttgctttggggtttgtttgtgactcaaagggctccgggggaggagacaattcggcccttggattcctgtaattgatgacgtatgatgtacatctcttggagaactatcagcagatgcatccgtattagtgaatttgtaatcactggttactt

SEQ ID NO: 372028 - DNA, 156 bp, Zea mays
gaaggattccgccccaacccatccatttttttaaattggcttccccaatttacagaaggattcaggttttttttttttaaaaaccccatactcaaccctaattaatccttccctggatgggggttggttaaacatacatccatatccaagaggccg

SEQ ID NO: 372029 - DNA, 246 bp, Zea mays
atattaaagtaaagaaagagaactatacggactgtgtaatatgtatattaaagggactgaagcctgcgtctgatgctgatgctaaaggtactggcgacaccccaccacacgagaaaaaatgaaggcgtggaatactacattgcatttgaggattatgacaacgccggctcaaagctagctacagttaggatcaaaataagagaaacgggtgttacgacaaatcttgcaccgagtgatttcagagct

SEQ ID NO: 372030 - DNA, 240 bp, Zea mays
tctcagccggcgccgacgggaccgtgagcaggacggagtggcgtatgcagccgcctgtcgtgccccctcctgctcgcgttggtcgtcgtggcgctcgcgctcctgtgcgtgctctactgcgtcgtctacggaccctgcatccgacgcgcgcaccctcgcgttcaccttcggctgccgctcggggacctagggacgcactctatgccagaaggcctcgacgtggtcctcatcccggtgtgc

SEQ ID NO: 372031 - DNA, 118 bp, Zea mays
actatgaggagggaatattttagccacggacgaatcaggagctcactgggtctggcatgagcttaaatgaatttgactccaggtaaagttacaacttacaacattaacgaaggcataa

SEQ ID NO: 372032 - DNA, 121 bp, Zea mays
tcttcctctcggtggacaaagagatctctgtgaaggatttcttcagggtggtgttacaattgtcgcaaacccttaggcatatattagcctgctctagtgacattcctatggctggagagct

SEQ ID NO: 372033 - DNA, 199 bp, Zea mays
atcacagtgcgggggtttttaattcctattgggggcaaaaaccccaccatctcaatgcctatatttttcctattcctatatttttcctatcctccattccaatgggggcctaaaatgaggcagccttcctctgcaaatatgaaggaaggccgttttaaacccacaatgttccaaactcctggcacgacctggtgactga

SEQ ID NO: 372034 - DNA, 187 bp, Zea mays
ggggggggaagaaaaaaaactttatagttcatcccccataagcccctgcgccctggtcagcccggcacacataaaggtttcaggggtttttggttcacaacctgcttaactcatcagagattttggaaatccccgatgcgaacggaacgttcagatctcccaaagcccccccgggggggccaacaaa

SEQ ID NO: 372035 - DNA, 377 bp, Zea mays
aatgtttttttacttacggggttttttcataaaataggctgagatacaaaaaattcggaaatttcttgtatcttcagaaaatcatgtcatcagtacttaatttgggagagcgcgcaggtcctgattcttcttcctcgtttcttcagaaaaaagaaaaacagcatgcttggctcttaagcagcaggggacgctaatctgcccccccttgatcccccaggaatatcctggccttccgcagtctgaaatcgcacttgcaaagaccatgacgacgcacgcatgcgtatcgtatcatatattatattgtatacaaccaaccccttttgaaaaccagcagtagctagctcaagtagtgctgctgctcgtcggaggactgcgtc

SEQ ID NO: 372036 - DNA, 182 bp, Zea mays
ggaacgggggggggcatgcaattaaaacttttctttcacagggctctaaatttcccgcgggggccaaaaccatgtaccgaccccaggggggccaccatgggggacccaaaccccttttgggggcaacatatttgatttttgcctatcccgccattgggaccccccacccccagtttttccaa

SEQ ID NO: 372037 - DNA, 423 bp, Zea mays
acaacatgctccattccatgccccagcactctttattccagaactatagcagaaggcaggaagacatatgtacaggcttggacagaaaacgctgggcaagctccaaccacacttacgacgccggcgaggcaggctgaaatcaccgtcactggacggtaggcagctcgttctccctccaggtcgagaatccgccggcgatgtcggtgacagcggtgaagccctgaaaacacggtagcagtgattggattgactggcatcgagtcgcagaacggcaagagcgaatttgtgaggaggaggtgatggagtcgggccggccatcccctagcttacagcggagcagagctcggtcgccgccatgagagacctcttgccgctttggcagccctgaaaaggaggaaggaggggtagcagcaggcggaatta

SEQ ID NO: 372038 - DNA, 251 bp, Zea mays
aaaaaaacaaccattctttatttatggggggcggcccggaagggggtatgtatagaacccctttgccactattgcctactgggccatgaatgcttcacatcaacggggggggggtccctcgcttcctaggtggtacacattcccccacttcctaaaaataaatttaagaatcaacagggaaatacaaaacgctacggggttccaattccatttccatgaccacaggggcagccactcggcttggtaggggg

SEQ ID NO: 372039 - DNA, 431 bp, Zea mays
cctcttagttttgcagtgttcattagggctgggggctaatacatacaggaaacctacaaaatttctctcccatatgtaggagcaaacagcataaacaacgctacttttgttaagcacactggccctgaatgaaacaccaagtcacaccaccgtctacccccagttgatcccactagacatcagcatctactttcctttgatcttgcagtaggcatacaatccagagcccagaaagcctagtccctgtcctataacattaagctgcacacgagaactttgggttcagtattcactgggagattatacaaaggtaagtggcatagaaacaagacccaaaacttacaagatcaaaaggaagtccaccaaatagcacccaaccaattccaacggtgaagaaatcctgcagaaacatcgcgcatgaatatcactgc

SEQ ID NO: 372040 - DNA, 383 bp, Zea mays
ctgtatgcacagaacgcaagatttggtatactgaaaggtacagcaggacgttctctgtacagcactgacttgacgacgggaacaagtgatgcaacatggggaaccgcctctgtacaacgtttctcaagtgtgctgactctggagtgatgcgcggaactacattccttaggattcttatcctgggatcacgattttgcggaatagtgctcccttcccatgcctgaattttacttcttggcgaggaacgtggggatgtaacatggtttccatcaggaaatgacaccatcaagaggcttagcagttggcatcatcctccatttttgttgagtaggctctcacctttctgcagaacttcttaattgctgcatggtctgaaaatgtca

SEQ ID NO: 372041 - DNA, 331 bp, Zea mays
gggggaattggccatcatgataacctgaagttgtttaaaagcatttacctgattaccttagctgggattgggccagggtacccaggtccaagttcgatacatactgaaacgggaaaatacattagctcagtcagttaccctttggggttaacaattacacctaaccatccccccagaattatgtgccgcttctggcaaaacatggacacaagaggcccccttgggtttttctaagggtggtaacttttcgacaagaggggcagggtctaaaacttaaatttgggatatgcaaattgccctttgacggggtacaggagcccaacattaaaac

SEQ ID NO: 372042 - DNA, 264 bp, Zea mays
tcttttttttttttgtatttttttttttttttttttttttcagggtggcctatggctcagggaacctcgtttatgaacttcacgtcaaaagagcatgcctggttgttaattgccatccgatcatcacccggggggaagctccagatctagcttactttcaaccagggctcagacacaaaagggtccaacaatattctctaacacaccaggactgtgatctatccactggaccaaaaaagagacacagggggggggctcatttac

SEQ ID NO: 372043 - DNA, 231 bp, Zea mays
tctttttttttttgtttttttctctttttttttaatttttttttggtgttttttttaagcagacaacgcgtttccttattttttacattagcaacaacgacaagaaaggaagcttcacttccgaaccaaatgacaacgagacgggacgggattatgcataaacatgcatgggagggccacccaaaaacgaaggcaacgaagaaaacctaccgctggccggtctggaccttg

SEQ ID NO: 372044 - DNA, 365 bp, Zea mays
gatgaaacgggcaaaaagaaattacttaccaaaacgcaaaaacaattagaaatacacctgataaacagtaacggttgctaaattgagaaactaaatcaaccttaatgcaccaacccattaccaactattaggtgacaagtctttaataagaaaaaaaaaatggaagacatccagagttcaaagtatttaccatgatgaggagaggagggtccagcgatctccatcccaggaccttaataacataaaagcaaaaccattcaattgatacttcaaatgttggcgcttaagcatataaagtgtacacacagcagaggccctggcagaatcaagcaacagaacatatccaaatgataagtgcatgcaac

SEQ ID NO: 372045 - DNA, 200 bp, Zea mays
ccctttccgtaagcaaacctataatgcgagtgctaatctcctacttccataccagcataacaagcaattgttaacaccactgacatacgagaggattgaatcgcggggtactgacaggtatgcaagataaactcaagatgtacaggtatgcgcaaaaccattgagtgaacatgtgctactagtagccacaagtaactctc

SEQ ID NO: 372046 - DNA, 362 bp, Zea mays
agtacaaggtactatagtacatttggcaaaaaatgcaatgttgaaaaaaaaacacaaagattcaaggataaagaagaaaacacacgtgcatccagatcgcaagtgctcttcttatcctgcagagtcaaaaatcattctcgaatagataacgcatgttccatgcaatagtatgccgcaaactctagcgatatattctctgcccgccaaaggtatacataacagaaacctactctcccttcccagccagatcacatgaagtcgtactcgtcggggtcatcgtagccaccgccccggccggggatgaagtcatcgtctcctttctcgatgtggagttgcttctttttcgctccttggttcttttt

SEQ ID NO: 372047 - DNA, 246 bp, Zea mays
gaaggccatgaagaaggcctgcatgtgcgccgccgtcccggcggccgacgacgcctgctcgtagaagaactccatgaggcccacgatggtgaacagctccgacaggccgaagacgaagaactgcggcacgagccagagcacggacagctgctgctgctgccgccgcccgccgacccggcgcctgcgctcgacggccgcggcggaggccatggacagcgcgacgaggcagaggccgacgccgatgcg

SEQ ID NO: 372048 - DNA, 254 bp, Zea mays
tacttaccctttttgtaccactcgttccccaagcgggtcacctcctggaggctcccactgattgccggaaagcttgccgaccaccttgaggagtgtccgaggaacgaagaggagtcaatgctgctcctggcgggggccatgccggcgccgtgcatgatgcttccgtggccatagtggccggtgccggatccgagcacgtccgggcgggagcgcggcggagggggagcggtcgttgccggtacacggtcgtaagg

SEQ ID NO: 372049 - DNA, 388 bp, Zea mays
ttctttcgtccgctcctccctgagggctgagggggtgcttcaatacatccacctcacgaggaatccgcactcgcgtttgctccgcaatttattgctcagggttcttgctgggtggtggtggcggcgggtggtgcaagcagtactcgttcacaagagcaagctgtttttgtgtgcgtggttttatgcctgcttgcttggcgaggggaagaggaggcggcggagtactgggagttgaagggtgcaggtaccggcattgctgaggcggcgtggggagatccggcgatgtcggaggccgaccggatacgccaccgcacggcggcactggtgctgcacgacgatgaggtaagagacaaaccggacgccaaggcgaacgtcttcgcggatctcg

SEQ ID NO: 372050 - DNA, 278 bp, Zea mays
ggcatggaataaattgcattgaatcagtgcatggcgacgattttgtcatccaagtgatggcagtgcaccatggtagccaacgagaggtagtgtgacacgacagcagttgtatagttcttttaggtgagggggtaacagtggtatagatcaagcttattcacgactcatctaccaaaactcgacggcaagcctatcccaagtccataagctttgcagtgttacaccatggtccgaaacaaaaggacacgcaagctggcagaactcgtcaaggacacctg

SEQ ID NO: 372051 - DNA, 467 bp, Zea mays
tgcttctcctcttccctgccgtctctcaccgcgaccacctccgcgttctgtcccactgcctcgtgtccggcctcgcccgcaacccctttgttgcctcccgccttctcctcgcatcctccagcctctccctccccttctccctcaccctcctcgcctatctcccggcctcctcgctctcatcgttctccttcaactcgctcatccgcgcctccccgccgcgcctcgcgctccgcctgtttgacgaaatgcgcagccgaggagtccccacggacccctacaccttaccgctcctgatcagcgcctgttcctgcagcggttttacactgtgccagtctctgcacgggcagggcttccgtcttggctacaattgccacgtattcacccagacggcgctgatgaacgcgtacctcaagtgcgggtcggtggccaccgcttgcagggtgttcgaggaaatgcccgtgaaggat

SEQ ID NO: 372052 - DNA, 268 bp, Zea mays
  unsure (1)..(268): unsure at all n locations
ttnntttttttttttttttttttttttttttttttttttttttttttttttaacattaatcaatcgcaaagtcacatagaatacaccttttactcaacagaattagacaaggaaaatggtacagtaagaagacagtaagtaacacaatcccgcggttgagaagagagaacaagagctttcacacaaatagtacatggaccccaaaataattaagaaaaaaaaaccgggcgaggatgacccaagtttgcgcaaaaacaagctgaacact

SEQ ID NO: 372053 - DNA, 326 bp, Zea mays
gacagtgaacctctgcgattcattgatcaacatgccggtcctggcgtgttctcaggtctcatacccatctcaaaggggctgtaaattcacgagactatacaggtgtacacttaagcccggcaggtgcagaagtagtatgatacagatatttatttatacatgtttatgagtttatcctaacctgtgattagataaatgggtctatgttgccctaacataagcatgtgggaacatccgttggaaataagtgtgcttcgccttgacgatcaaccaatacaggaagaagcaggggacatgagcgatggccatgccgaggtaccatagag

SEQ ID NO: 372054 - DNA, 248 bp, Zea mays
ggtatatgtattttagccgccgccgctgctcatctgagcatgcctcgagaagacgcctgctcctcgccgatcgatactatggccgtcttcttcgaccttcacaccgccgacggtcttaagttctttgaggcttacctttgccggcaaacctatgtggctggtgactccattactaagggtggctgctacggaggctgcgcgtttccttcttatctcttctgtttactttataatcattaccatatgat

SEQ ID NO: 372055 - DNA, 511 bp, Zea mays
  unsure (1)..(511): unsure at all n locations
cccacgcgtccgcccacgcgtccgcccacgcgtccgcccacgcgtccgcccacgcgtccgcccacgcgtccgcccacgcgtccggctgcgcagctccttctgccatggtcggttgctgctccctgcgctggatctcctcccctgcgcgtctctgatctctggcgcccagcctgcttgttctatggtcttcactgttaatgttttggagtctgccgtgatgccgtaccggcgttctgtgtgcagcgggaaagctttgcgagttagcgttgtcgtcggtgccacatggggtcggctctctgctctgcccagctcgtcgaatcctaggaatatgcgcgcacgtcatagttggcgccaaacttcttcttgccgtcctttgtgtgctgtggtacctccttgctcttgtcgtcgtattgtttggccagccacgtngtgtgtagccttatggctgccacttaggcctgctcgatgaaatctgtagtatagagttgaagccatcgtcgatcccgtcgat

SEQ ID NO: 372056 - DNA, 480 bp, Zea mays
cccggcacccgcaacccgccagctccgcgcgagccgctggcgggatacccgcctcccccgcgcccccgccagctccgcgcgtccgccgcagtgaagccgcgcgccagctccgcgcgtccgccgtagtgatgccgcgcgatgaaggccgcgcgggggagacgctgggaaagccgcacctccgcgcccccatcgatcccgcccaccaccaagctcgccgcctaccaaacccgccagctccgcgcgagatccgccacagttatgccgcgcgagggagatggcgggatagccgctaggcagatccgcttgctcgcgagggggaggaaggaaggccgctccgggctgagcagatgtgcttgtcaagaacaaccggccatgcccggggttgccagggaagcccgtccgcggttgtcgcaccattccccgcctcgaattcggggtctccaagcccggacgccatcagcacactccgtcagcgatttg

SEQ ID NO: 372057 - DNA, 301 bp, Zea mays
atatatatgaacacgtctccgtagttgattatacatgctttggaagagtaacgcaacaatttgctgaatctttacacagaaagggtgaaaaaaaagaagagatcaatctcagattacaattgcatcccacgatgccgtcgctagtagtgtacatgcatgtggacaccagagagaccacgatgctgcccatcatcgtctccggccgtcaaccttcacccttccagaatccttcagtgcgcagcagcccgaggtgaacgatgaaccgcgcaaagagagagagagagagagagagagagagaga

SEQ ID NO: 372058 - DNA, 427 bp, Zea mays
caaggatgaggttgatgaatgaaggtctaagcgtgcaagaagagctagcgccaaagctactagctggctagctaccacatcaccatgcatcttatcatccgtgcgaagcgaagcaagcatgagaggggggttggagagcaaaaacgttagctatagctaggtcagcgcgcgaagtctatgcattgcttcttgaaaatcatgtgcactggagtagacgccgcggcgtccctagctctcttgttcgccatggccatctcctcctgctccgccgccggcctcggcgtcgtgagcaagtccacgccgaaaagcctcaccgccttcaccgcggcgggggccgccggtgcggccgtggtggtcatcgcgttgacgttgacgaaggctgctgccgtggtcgtcgtcttgttaggccggagcttgcagtcgatga

SEQ ID NO: 372059 - DNA, 483 bp, Zea mays
cccacgcgtccgctcctcctccctcctcgatcccctccacgccagccctgccgcgaccacggacgggcccgtgccgccgcttccgccggccgtactcccctgcgcgtgcctgtgggtctggagcgggcggatttgcacggcgcgttcttgggccgccgccttgcgctgcgctgcgctgcgccgtgctttctcctcctccagtcctgtgcaggtgcgcaacaatccggtcccgtgagccgaggatttgaataacccgccactcctgaacccccgacgggccgtttcttccgtccttccttggcggctgcgagtccctgcgcagtttgcttccgagcctttcgagattccgcggagatctgctcagttcgtgccgctcttgtctggttctgatgcgcggacggttgctgcctgtgaggcgttgcgaggagctgaggcccgtctgaggtgactaggtgggagaggagaggagctcgtggctcgacg

SEQ ID NO: 372060 - DNA, 266 bp, Zea mays
tggacgcgtgggtgctgggtgcgaacggtgaggttgtgctgcacgtcaatgtgagcctgggagccgcgggggtggtggtggagcagaattcctggacgccagaggaggggtggggggagtgggagcggttcccgtctgttggtgttgtgggctgtagtttttgcagcttgcagcgaagtccagtggacggtctttgttcattgcaatgagatagtgggtgcatggatcttccaggagagttataatactgtggtaaatattactgg

SEQ ID NO: 372061 - DNA, 237 bp, Zea mays
actgatgaagcttgacgctgtttataggatccaattattgcatgcaatgatacacatgcatggaaacgaacatgcaatccaaacgctacaccgaggcgacgctgccgaggcggacggtgtttgcgccaaccctggggctgtgcgacgcggtgccacgcacgagcaggccggtggcgcgttttagcaaaccgacggtgccctcgcggtagagaaagccctccttggcccacaggaagg

SEQ ID NO: 372062 - DNA, 431 bp, Zea mays
aactggaagcttcgctgtaatctgacctactactccgccgccttcaacaccgcagacgcagctgccgcgggcgggagcttgcacgtgctactctgctctcatctcgtttccgcgcaggaattgttcacaatggcccgcgtgtatgttggcaacttggattcacgggtgacttctggggaactcgaagatgagttccgtgtgtttggagttctgcgaagatggaggtatgcagaatgtttttaaggtgtcgcctaggtgtccaggcgctcggctaaacctagccgtcttgcccgcctaggcgtcgcctaggtgctaaggcgctccgagtgtttgcttgctcgcttaggcgccttaagaacactgccagtcatccgtatcttcatgttggatctagtgagacagataggttttacttggtgcgtactttgcga

SEQ ID NO: 372063 - DNA, 247 bp, Zea mays
  unsure (1)..(247): unsure at all n locations
tttnttttttttttttttttttttttttttttttttttttttttttttacccgaaggggaaacctgacctaacattgggttgagtttgctgctcttttctacaaatatagagaaaaacctaactgtctcctgaggtcagaattcgactttccgagggggcaatttttttttatcacccaaaaatttgcgtggtattttttcccgagggcacaaaacagttcgcgggaaagccctggtacgtaacttt

SEQ ID NO: 372064 - DNA, 352 bp, Zea mays
gcagagaattcattcaacttttgtaagccacatgttggaagaagaacattgcaccagctagctagtcgtctcagatgggacgaagattcaacgccagtaggatggtgtagccgtgctactactacgcactcggctcctcccttcgcatgccgtggatccaattcaattcgccacgcggatgattattatcggccggccgtaagcatgtgatgcgcttatgaagttcaggggaatgtcccttctgcaatgattccataggaggtacttcttctgtagctgtctgatgaaatgcaacaacagattcatgtgctgccaatagaggttttggatgaggaaatcctcatcgatcaca

SEQ ID NO: 372065 - DNA, 288 bp, Zea mays
ctaggggaggaagccgggtatctacaaaccatgttttatttacaggtttttaatcgagtatatacacttgggcaggggaaagttggcatctactatagtttttccaggggaacgactggtggcatttacaaccaatggccttaatgacaacataatatacgccacgcaaccagcagggtgcgctggcttttggaagggcacaaacagaagagctcgcccttgctacaaccagggactggttgctcactgctactggaaatgagtgagagaacagaaatgatttaccct

SEQ ID NO: 372066 - DNA, 551 bp, Zea mays
ctactttggtatgctggcacgcctgcacgtaccgggctttaatggtcggatcgacccacgccgccctttctttcgcccacgcgtccggcgccaggccgacctggcctactaatggaggcccgcgaggcctccgcccaggccccgtcgacgccccacgctggagaccgggtgagccgtccgccgcggactacgctcgccctgcccccgcgctccgtcatcgaatccctcttcgccgccggcgccgccgagacaagccccggcccgctcaccctcgccgccgcgctcttccccgccgcgcccttcccggccttccacggctccttcacccagctcctcgtcggcgccgtaggctccccggccgtacccttgtagccctccccgttcgctgtcccgacgaggctcagccctgccacgctcttgggctccctccgcttcttcttttccacggcaagttttgagatgtcccatcaacaagccttagcacatgtaacagcacaagcaggccattctcagtacaatatgatcaatcatgcagattacactatcccttt

SEQ ID NO: 372067 - DNA, 439 bp, Zea mays
cggacgcgtgggaaaggagagagatctcgatccgcacacctcacgcctctcttcctctcgccccaaggacaacgaaaacatcaaacaagagaaccaaaggaaacagagcaagagcatcgctctcgaagcaaaacgcgcaccacgccgtcgccggccggccacttcgcacgtacgtaggacgcgcacgcaccggtgcatatatggggctcctgaaccagctgtgggacgacacggtggccgggccgcgcccggactccggcctcggcaagctccgcaagtacgcctccttctccccctcgtcgtcgtcgcccgcaagcggcgctccggattcgcccttcggcgcagctgcagcgacgacgcccaggggagagggctggacgaagaagctgcgcgggaaagccaggatgggcggcggcggcggtgacaacgcccccggcac

SEQ ID NO: 372068 - DNA, 516 bp, Zea mays
  unsure (1)..(516): unsure at all n locations
cgccattgcggaccgttcggacgtacgcagaggaggagacgctcctgcgcccaggtcgcggactgtccgaccctgtgtcgcgaaccgtccgcgcctctgcagatagcaccaccaggcggttcgttccagtgtttggcgcccagattgacgataacagttacattcacattagtgaccaaatgatgacttgtgttacaattcaagtcatgcacaacaactatacatctctactagagatcagaaaaaagcaagttcactgttgagacttgcttcagaaccaacggacttggcgaaatagcatggaaaagcaagatgattgggagtagggatggaaacggtcggtaaacactaaaaccatttccgtattcatatttttttatcggaaatgaaattggaaacggtaaacctggaaacaggaacaataccggtatttcggaaacatcggaaaccaaatggggcctaagagttagtcttctctctggacaaccttcaatnttcatgtgcacncttcagttc

SEQ ID NO: 372069 - DNA, 579 bp, Zea mays
gacggacccggggcgacccaccccgccgcggacgcttggggtcaacgagtggagtcatagctgccgctgcgtgcatccccggagagctcgaaaacctagccgccaaatcgatggctcggcgcgacgactacgacgacgacgacgaggtctacgaggaggaagaggaggatgcctatgacctggacgacgacgaggacgaggatgaggaggacgactacgaggaggagacgaggcgcgggaaggcctcccgcggcggcggcggcgccaagagcggtggcgggcggaagcggtcgcgggaagacaactttatcgatgactcggccatcgaggacgaggacgatgaggatgacgacggcgggggccgaccgaggaagaagggtggcggcggtgtgcgaggattcttcgacgaggaggcccaggtcgacgaggatgaggaagaagaggacgaatgagagggcgaggacgattttattaatgatgctggggccgacctccctgatgaggatgttgttaggggttcaagacgtatttctattcctatgagggatgaagaagaggacattgatgagatggagagac

SEQ ID NO: 372070 - DNA, 133 bp, Zea mays
aaaccggcacaagagcattatggggttccattttcccgggaagggaccccaaaaggcattatctttactttatgggaaaaacggtttccgggccggcactgggggggacaaattttttttacaggtacggggg

SEQ ID NO: 372071 - DNA, 294 bp, Zea mays
ttttcatcgagggcaaacgaacccccatgtgcgcgcggattagtgcccacaagagtgaccacactaacggtcgcattcctggaaagacaaactacgccccagccggcactgacgcccacaacaaagcccccgtgcaaggaacttggatttctacatgcgcgcacattccgcaatgaacggagcttccactcatacttactgtgacaatcagcatgacgagataggcacgaactcttgcgacctggccgagctgttgcactctatctctatgtgtaccatgggccgcaacagcca

SEQ ID NO: 372072 - DNA, 348 bp, Zea mays
ttttttttttttttttttttttttttttttttttggctcccaatcactgtatatacatggaggagatacacgtacagctgtgacaattgtacagcgccaatcgacgcggggtgcctagtgcacatttcagcaagacctccaagtatcagagagggacttggctttatgggctgggaattcagccacacagcacccatggaccattttatttcctcgctggcatgacactggaagtagtaagcagcagtctgcccaaacaagaccaatgttgcatcaccatctcattggattctcgttggtccatgcttaagcgagcagttctacccagtatttgctacccatgtgacc

SEQ ID NO: 372073 - DNA, 450 bp, Zea mays
acgcacccagacttttggggttttctatccaccgcagatacaggaggatgctaggtgagccttgaatgacgctaaggatgtggacccgatattcccgatgggaggacctgatgaacccctaaaacaggcagaataaaactacggcgatggcttggggagtttgactgcatctgttgccgctgggctaggctgctgaaagaaggcgactaatggagcaataagggaatgtatgcttgccttcatctgtggacgctgggttagctgctgaaaaaaggcgactaatcaagggacctgcatacatcgctgtggcagttgtgctaattttacttgatcagaatttttcttcgcagcacaggaacgacagtaggagaatgatgctccttaattatgaagcacccccatcatgagaatcaggctatttacgttgtaactttaggattttttttttta

SEQ ID NO: 372074 - DNA, 223 bp, Zea mays
  unsure (1)..(223): unsure at all n locations
tttnttttttttttttttttttttttttttttttttttttttttttttttgggaaaaaaaggggacgacatcaaatattttccaaaattcaaaccaggacaacaaattgggctactaatctcggtacagagggatgactaattactggcgactgatcaaacacaacggttgcactatgctgatggcaacaccgggggccacaatttgttttaaaccttgaatc

SEQ ID NO: 372075 - DNA, 313 bp, Zea mays
atagcaccatcctttcctgtccactccagttagccgcgcgcgttcgactatggctagcgcattagtgagctgtgtgtctggagctctgacgcaaaaatcgtacaggtgtcagagccttagcgctcactctgggcatccacgccctgctgctgcagccccaaccagggtctcatgctgaggagccagaacatgactctaccgggtggagagcgcctctgtattccggctcagcgtccatgaccatctacgaattataccgccctcaacgatgtgcgtctgagggccgtgacgctgatgtcgttcacagccacct

SEQ ID NO: 372076 - DNA, 337 bp, Zea mays
gcctgcggtcccggtccggccttcccggagatctgaccgcacgcgcccacgcgtccgacagtttcctgcgggctcgaaaaatgcattgaccttagtgcagaggctcttccttggcgcaaagtatgccagtttcctgcaggcttgagaaaagctgacccttgtctctagatccagagaacccctggtcattcttcagaatggctgttgagaaagaaaaaccttgaaaattcttggtcagtgtatcctattgctatttgatttctgaagccgatgtataataaataatcagagtcatagaatgctcgatgtaataaagtgtccatgggcttgttgattc

SEQ ID NO: 372077 - DNA, 293 bp, Zea mays
ttacggtggtggatgaactggagcacatgcgctggactatggtgaacttggacaggatggggcgatgtattacactttatgtttggtaccgatattgggagtgactaactccacctcgtgattatctacattgcttctattattcttactactgactagaggtaagggatggggcttaacaatgactcgcgtgatggtgattatggaccatacattctgaagtattaccttaaatatctacatttcttcattccccctcgcagtacaacagagcagatgcaggatcctctcgc

SEQ ID NO: 372078 - DNA, 106 bp, Zea mays
aaggcaggggggcccacattttcaaccattgtagattacaggaagtttgtgattacgtttcatccacagggataaaatcacgggtgggaacaaaatttaaagggac

SEQ ID NO: 372079 - DNA, 241 bp, Zea mays
acccacccatttgatgtttcatctcgacgcagaaccgaccacctttacttttacatctttaggatatggaccgcaggggcgaaggagacgttcatcacgggacctagctagcccacacaatccgactgtgccaatggcgacccctgcctatgcttgcatctccagcgccatggtggggcggcggtagcactaggagctgagcagtactagggagccaggtggttgtagctttgcacgtgac

SEQ ID NO: 372080 - DNA, 358 bp, Zea mays
cccacgcgtccgctcgttgcttgcgaggttgtcgtcgaggtcggctgcaggcggaggtcgagcgagaggtcagcaagactatgagcacgactctggtggcgcacctcgttctgcaggcccttgtggtctccgcaggcgcggccagaggacctgcaaggccgccgacctagaaccactgctgctccagctagtgcaccatctggacctgcgtgtggacctgcaacgacctcgtcaccaagtgcgccaactgctgccagaactgcacccccatgggcaccgtcaagggcgccatccagtactggcgccgcgactacctccgctgaaacagccgctgtaagatccactagagactccatcg

SEQ ID NO: 372081 - DNA, 422 bp, Zea mays
cccattcgtccgtttcttgccttgtctggctgactgcgtaagttggacaccacatccagcgcgtgctactgagatgatgcgtgagcaaaagcgccgtctttcgttggttctctcgctggatcccgcatggtgcgtacttccatgggcatcgcctaccgcatgacgaagcgcgcgctgtccaccttcgtcgcggccgaggtcacggaggaggccatcgccgtcaccgtcgcggtgccgctggcgcccgcgcccgggtcgctcgtgagggcgctgctcccgttccaggacaccgggcggctgctcgcgggggagccgacgccggcgctggtgtgcacgctcgccgtgctgcaggggctgttcgtgggcccgctggttgacgcggtcactgcggcgctgctgtcgccggcggtggccggcagagc

SEQ ID NO: 372082 - DNA, 472 bp, Zea mays
tcgcctcatcttcgtctcggcctcaccccgacgaccccacaccgatccctccacgcgctcgcacgcagcaggggcggagttgggcgagctccgtgctcgttcaacccgtacgctagtacctccagggttcgggtcgggtctgcctttctcttcgtatggcttccgccgccgcggaaaccctcgcctcgttcccaatcgcatccccgtcccgctcgctcctacgccccttccccaggcgaccagccgccgctaggacaggcgcaccgtcgatccggatatccgccgtgccgccgcggggcctcggactcgcgctcgtacaccgccgctgcccgccagcggcgcgcgcgaatgttgagcgcgacggcgacggcgccttcgggaacggcgagccgtcgtcctcgtctggggatggcgaccgcgacgcggctgctgagtccgggggcgatagcaccagcacgagcaccacgagcac

SEQ ID NO: 372083 - DNA, 445 bp, Zea mays
cagcctcttctgctgccgccgtcacctcccaccagcagcagcagcacgtgtaccgccccgtgccgcgcgcgggcggcgtggtcatgctaccggtggcgcctcttgcaccgccgccgccgccgccgccgccacagcctccggcgacctccttatcactgtccctctccctgcccgggctggacggccagaagcccgaaccatccccagcggttctggcgccggcaccggcaccgcctcaacctcctctgcagatacagcagcagcagccagctccacctcagatgccgccgtcacaagcccaaccgagcttgccgttccagctgcaggcggctgggacgaacctcacgtcgcaacaaccggcagcagcgccgttcagctcggagttcctgttgttgatgcaggagatgatccggatcgaggtacgggactacatgtccgggtcggg

SEQ ID NO: 372084 - DNA, 382 bp, Zea mays
gctgaggcccggtccgccgtgtccggaatcgaccccacgcacccacgctttcgttctttatccaatcatgctgctggttttgtgaggtctgaagcgtcaagcggataggaagatgctggaccaggcgggcgacaacgcgcaggccgggcctcgcccggagacgggcctccagacgctccgtgcggccaccaccgcccgtccgctcgttatcaacaaagacgcggacggcggcagtacaagccggcgccgtcgacgccgtcgaccccgacgacgccggtgacgccgtcgacgtcgacgaccccgcgcggggcccgcaacgtgtggcgcaacgtttccacccggggagcaacctggccaccaagggcatgggcgccaacctttt

SEQ ID NO: 372085 - DNA, 278 bp, Zea mays
tcggcttttgccgctccgcctggccggactcacgacagttactggaggaggcgagggctgtcgggcatgatgcactatacccggctggccaacttgatcacacgctgctaccacagaccaaagccatcaaatccctcacaatgaacattccgcccgagatcaagaaggatggtagcttccacggggagacaaagtccatacctagcactattgagcctgacatctggaatgtattcggacatgcttgggtaagctctggaatcgaactgaaggggaaa

SEQ ID NO: 372086 - DNA, 262 bp, Zea mays
accacgcgtccgcctacgcgtccgcagacagacagactccccacacacaccaccaccaccattcccccccccgtttctatttgattatgattctgtggtggcggtggatcgcctgctcgccttgaaccggggagggccggcgtgggggcgtgctgggacgtcagggactgttcgatggcttttgtgagcgcgtcgtacagccaggtccgggactgggacggggtcacctaccctggccacttgtgtttgagggcgctgacca

SEQ ID NO: 372087 - DNA, 462 bp, Zea mays
aacatatacatgtatacatattttttttgcaaaaaataatgagtattcaattgaatacccttacttacatccttacttgcatgtagatgtaggcccgccctacttaaggacatagcatctaacgaccatcgcatttttacatttgttacaacatagtacaagtacaccatgcatcgcaccacgaacatttcatcatcatcatcgttgacagtctaccggccagtagtccgccccaacaaaaaaaatgaagttccatatcggccatcaaacctaattacaatgcatgcatgtgtggtagcactcctcgaactgctaagttcatcagctcctcatttgggggtgaaggcctggatcaagaacacaataacaagaatctcaaatcagtaaccgagagcgtcggtcgcacaaaagctgtgacgaattgattcaggtgacctggaagatggtggcgtggccagggtc

SEQ ID NO: 372088 - DNA, 397 bp, Zea mays
acgtatttcctacccgagagacaacacgcctggctcagctcgctagagtgcactgcactgtcctgccacacatatggtacgtgagcccggccgagagcgcgggagaggcatggctgatccagagctcgcgacgctggcgctggccgcgctcctggcggagaccgctgtggctcccaccgccgcggtgcgcgcggcgatgtcgtgctccaccgtgtacagcacgctgatgccgagcctgccgttcgtccagatgggcggggccatgccgacccagcgcgagctgcggcggcatccgcagcctgctgcagcaggccaacaacacccccgaccgccgcaccatctgcggctgcctcaagaacgtcgccaacggcgccaacgggagcggcacctacatcag

SEQ ID NO: 372089 - DNA, 423 bp, Zea mays
gccctatgccagacacactgtatgtatgatacggaccagagggaaaatagtttgatttaggacaattttaaaacaactaaattatgtgaacggagagagtattcactaattaatgaccgaggccgacacgctgcgtataaataggatattattaccttttgacacgtacgatctgctgactactactagtaatcttacggtactgaggacggtgtgatcgcagtgttttctctacttttctcaacaatacaccgggcatgttttttgtgtgtgcatgcatcatttcacgcgcaaatacattctactctaaactcaaagtaggcagtgttcacaagaatacaccatgtaggatagaacgtatgttgcaatttattaagggccatgtttgttcatcagaatcgacttctagcagtcaaaggtacg

SEQ ID NO: 372090 - DNA, 420 bp, Zea mays
gctccgtttccgcctttgagctcagaaacggcggagacggaggcaagggttgaggcggcggatggggagagccaggtggttgagcggttggtcgagcttgtgagcgagatcgcggccatctcggacttcaggaactcgtaccggcgtcagttctgcaacctgtcgcggcggatccggctcctcgtgcccatgctggaggaggccaaggaagcgcccacgccacttacggtggcatcggaggccgcgctacggcggctcagggaggcgctccacgccgccagggatctgctccagctcggcagcagcggcagcaagatcttcctggtgagacttgcttatgctcggctgcctaaattttcttctgtttaccgactttcgtgacaaattatgatttcgctgtggaggtaagataattttcct

SEQ ID NO: 372091 - DNA, 483 bp, Zea mays
actaatcttcctacccgcaaataaaaatagtctggagtaattacatagtgagtttctcactccatatttcacagaaatgtgcagctaccaagctcctaggtactatctttatatggcatattaagacctaaaaggcacaaactaaacaactttggaatatgatgatactgccagttacaccataattaggtctataataggatccaagtgacataacatggtttgaccaaatctaaaatatattcgtaaacaaaaaaaaggtaacacctatgatatttgacagacttgttcaacggcatcaaacaatgtcaaatgccctgactcggcattgatttgacaacaagatattccaaaagaccaaacctagtgaaaccttcatcaagtagttcacatttcataataacccaaaagggtgggcaggcaaaaacttaaattccgtagtgtgcagtcgggaatgcttaattccgtagtggtaacacagat

SEQ ID NO: 372092 - DNA, 240 bp, Zea mays
aaccaaacacacatttgtttttccacgtacacacaacgaaacgggaccacatgttatccgttgtactactacacaacaaaacgggaccacacgcagtagcgatggggttgttccattggacatgtcacaaccaacacagacccaaacccatacacacgccagaagggaaccagatcatttgagaggggactcatcgcctgatcaggaaaacatggccgcacacggacggaccaaccaccc

SEQ ID NO: 372093 - DNA, 147 bp, Zea mays
ccggccaatcaaaagatgtagcattcaaattgatccctggggacaaacaaattttttgcaaaacaattgccaaataagggggggctacattctacaattggaatgtacagcccccctacctccaattttagggtcactaaaagcagt

SEQ ID NO: 372094 - DNA, 298 bp, Zea mays
  unsure (1)..(298): unsure at all n locations
cggacgtgngggtcgaccacgcatccgctacatcaagcgttttttttagacaatagtggtgctcatgcttatcgaaacgaacaacaaaggtacattttggataataaataaactatataaacataaaaattcaggctgcaacaccaaaaaaggctttcttaccctcatcaacactcgagtcagatccattacctcttgtatggggaaaacaattagatcacccgttaagtgttgaagaatgtacatttttcttatatcgtgaaagtaagaatattgattcaaaggcactgaataaaaa

SEQ ID NO: 372095 - DNA, 247 bp, Zea mays
cccacagggccagcccctatataaactttttatagcccccccagggagaagaccagaccctacccgtccgtcccggcgcttggccatttatttcaccctacaaagctgtttaccgtttacggggccaaaaaggccggaaacttagctgggggtaaaaaacccaaaggggacccctgtttgctacttactagcacagggccgggactgggtccccacatatttttcccccggaggggggggggggcaa

SEQ ID NO: 372096 - DNA, 71 bp, Zea mays
ggaccggatttttgcatgattctctgcaagggccggggggggggggcctttgtttctaaaactagcggccc

SEQ ID NO: 372097 - DNA, 450 bp, Zea mays
catgatcttgagccttgaggtgcgtgcgattgctggctaacctgctggaaatagcatgggcggtagagggattgggaacgggggcaaattcaggagatgataccaccataatccaccaaccgaatcaagaagctaagatttaggatgtgtacagaggggctgtattcttgtgtataggttctctttctatcggtcaactgttgctgattcggacggaatgttggaggatcaatcttgcctgatatcaaggtcgctgccgggttcctgtgagcaggaatccagactagcttacatgacttaccacctacttgagatcacgaggagtaagcgcccgcctgggaccctgtcgattgagcacgacttcgtggcagcattgactaaaaggacaaagtcctctgagcaccaaaacagcgaggcgctggattgtaagggagtaatggtcagggcgac

SEQ ID NO: 372098 - DNA, 404 bp, Zea mays
atcgtcttcttccccagcggagcccctctcctccctggtgctcgcccctgcaaccttgccagcaaccgcgcccagcagagcttcctgcgcgcggatctctcctctccctggtcatttccccgcgcgctcattccgttgcttttcccagcacgccgcgcgcagctccctcgagctccatctgcatagccacgctccctccttcctgtctcccatgggcactacgcagctcctgctccagccgcggtgctgtcctcttcaagctcgcctgctcgcgccctgtctctctcccctgcgcgtgcctccccctgccctctgcttgccgcgcttggattcagctccagccgcgctatccctcgcgcccggatgtagctcgccggatctccccgccccgagctcgccccaat

SEQ ID NO: 372099 - DNA, 79 bp, Zea mays
agggttggggctctggcctctttctcttctctattccacacgaggggtacaggttctatatatagagacgacgcgtggg

SEQ ID NO: 372100 - DNA, 113 bp, Zea mays
cccacttgtccgctctatatatagaacctgtacccctcgtgtggaatagagaacagaaagaggccagagccccaaccctaaaaaagatggttctttaggtagggcggtccttt

SEQ ID NO: 372101 - DNA, 459 bp, Zea mays
catctattcagggtctatcagagatgcattgtgcttcttccaagacgaacagctaggtcaagatattgcttttgttcagtatcctcagaactttgaaaatgtggtgcaaaatgacatctatggcaatcccatcaacaccgtcaatgaggttaataaaaaaataatatagcacctcttaaagtctcaatggaggtcttacctatgccttaaactgaaaacgcaccagtaagcttaataaaccctgttttttttgtttaactgaattggtcttcagttggaccatccttgcttggatggatggggtggaatgtgttactatggcacaggatgcttccatcggagagaggctctatgtgggcgaatatacagtccagactacaaggaagattggactagggtggcgaggaaaactgaagatgtcattgacttggaaggaatggctgagtcacttgtgacttg

SEQ ID NO: 372102 - DNA, 446 bp, Zea mays
gaagtatgaagccaaggggatacagataatggtagaaattagaaagaaccagtagtactggtggagcactaaatttagataaatggattaacacccagtactgcaaggaacagagcatccgtgcatacctgttggcaacaaagccttctgttgcatcattatgcattcacttttgcaatgatttttttgcactgataaagagaagtagtcttttatgttattttgccaccatttgcaatagttctagctttactcgttggccaatttatcagttgcaggtactaacggtgccaggctaccagctttgactatgtgatttcattacttgttgtatttagaaaatctaatattatgaaggtcaactttcttattttactgaaagtctaaaacacactacctattaacatatttgtgcctgctcaagtgcagaaaaatggtcaaaatct

SEQ ID NO: 372103 - DNA, 392 bp, Zea mays
aaaaaaagaacggggggcccccaaaaacattccattccactagggacagacccggccctcgaaagcccattgagtttcaccaagcttttttaccatgccacctccataccatttttacattggggagcaacaagaaggggggggccatgaaagcccccctttttgagctactccttactataaaccccatgaaccccccccccctttttgttttttgccccccccttttgataattactactatacccccctttgccttaaaggaaggtgtttttttttccccctttttgtccaaagaaagtaaaggtgaaaaaccagcttaaaaaaaagagaaatccctgtagtaggggggaaaaagaaaaaaaaaagaagaaaaagggggtggggggggc

SEQ ID NO: 372104 - DNA, 400 bp, Zea mays
cggacttttgggcggtggcaagaagggcggtggcggtgggaacgagatacccgtgcaggtgaaggggaacgcgcacagcggcggcggcaagaaggactcggccgcgaagcagaaccagggaggcgggaagaacggctgcggcagccgcggctcgcaggcgccgcagaacggcaagggcggcggtaacggcaaccagcagggcaagaagggcggcggcggcggtggtgggccgcctgccggatccggcgccccgatgatgggcggcagggcaatgccagcgcctcggccgccggtggcgcagcaggaacagcacggcccgggcatgatgatgaggccgtcgaacatgatgggcggcgccggtttccccggtggtggcctggggcccggcatgggccatatg

SEQ ID NO: 372105 - DNA, 302 bp, Zea mays
gccctcacacgccgcccgcccgcgacgaagcccgcatagccgccgccgagcgccggagttgccacctaccgcgcgcccatctgccgccgatgctgcgcactcatctgttacccgaggcttggcggcggccactgccccaggaggcaggagcgcgacaccaaaggccgcgcatgtacttccacctagccgtaccaagatccgggatccaaggtggccaagttcgctgcggcggccctgaacttataaggacggccttgtcacagaattcgtcctgagatgcacatgacatggactaccatggg

SEQ ID NO: 372106 - DNA, 442 bp, Zea mays
  unsure (1)..(442): unsure at all n locations
cacgtgtgtgccgtgtccgtctccgtccgtccgtccccgaccgacgcgacgcgacagacggcgacgcaccatatcgctatcccttaccctctcggttcccacgccagcgacgcatatccgcctcatccgccacctcggggggtccctccctcctcggcctcgcgcgcgccttcccacacatgctcctccccccaccacgccacgaaacgccaaagggagggagcccgagcctagcaggagcagcgcacggaaacaatggcgcgggaggagcagcaggagcaggagcaggagcaggagcaggccgcattgggcgccgnccacgtncaccaccaccaccagccgccggccggcggatgcggcctctccgccaaccccaccgncgccggcgagtacgcccacgaacagggctacagtgtcgttctgcctgagaagctgcacactg

SEQ ID NO: 372107 - DNA, 278 bp, Zea mays
ccgtctccatcttggcccaaccgagcccaaacctctccccttttctccgtcctctcctagtccacacggcagacgccgccgtcgggggagaggagaggaggggaggggatcggctcctagggaacaggtgagatggcattcctgtacgcgctggtggctcgcggcacggttttgcttggaggtgtcacagttgggcatttacaaaatcgtgctcttttgctcgccaggttcttgagcgcctttctctatggttgcgcctatcgacaagttgtctacat

SEQ ID NO: 372108 - DNA, 279 bp, Zea mays
cccacgtgcgtgcggatctttcaaggaacctgcgacgggtaattttactgggcaaattcttgttggacttgagtacttagaagggaggtaccttggtcactgggacattataggaactatgttgtttagtgggtcctaatggtgaagtcaagctggctgactatgtgatggatcatcatgtatgcattgttcactctgtgattatttagaactgcttgacagtgctacggatggggtgtatcataatatttaatatttgtaggacttctgaaagtgaac

SEQ ID NO: 372109 - DNA, 406 bp, Zea mays
cgggcaccggcgcggaatccggggcgacacacacgcgcgcggctttattcatcacacgcagcccgcccgcgacgaagcacttatagccggaggccagcgccggagtggccacctaccgggcgcccatctgccggggatgctgcacactggtgtgctacccgaggattggcggcggccactgcccgaggaggcaggagcgcgacaccaaagtgcaggcattgcctttcaccgagccgcaccaagagccgggattcaaggtggccaagtacagtgcggcggccctgaactttgaagggtggcctagcaacggaatggagacctcagattcacagccatgtgactacaaagtgcgtgaatgcagactataccactcctgctgattctgacagcaactgggagcaaacag

SEQ ID NO: 372110 - DNA, 268 bp, Zea mays
ggggggccccccaaaaaccccaagggaaaaaatgggtttaaccggcccccccacccttggcaagccccttaagttccccggccccccccctgggccccgggaacccttaagggggggccccccccccccctggaagggcccccccaaaaatccccttttggggcggttccccaagctaattctaaccgttttcacccccccccattttttaaaccccaaggcagggccccaaaaagggaaaccccggaaaaaatcccccccccccccc

SEQ ID NO: 372111 - DNA, 282 bp, Zea mays
  unsure (1)..(282): unsure at all n locations
tttttacancttttcctccttttgtcggcaagggaaacagccaccttgggaggcgttgattagcaaacgctagaaaaaccgcaaatggccatattcatatttagcaaccaatcaacactagctaccaattaagattaacaactacacacggttcgtttcttatctcaaatttggaactaggaagaagaaggaagcatctaatagttatcacgtcctgacctctgggatctggaccgtcagacagacgtccggcggcgagcatgtcggggcatcggacgaggc

SEQ ID NO: 372112 - DNA, 445 bp, Zea mays
atccttttctcttcgtccctctctccgacttccgctcgcacacctcccctcatgtggctgccctgggtgaagacgcggccttcatccgccacctccacctccaactctccctccaccgcgctcgtagctgccgcctccccgcgcctgtccttctcctcgccctccctcaaggacctccaggcactgctcctgtcggacgccgcgacactctccccgccgcccgccgcgccctgttccccctcctcctacgtccgcgtcttccaccgggtccgggtcgccgcctctgccctccgtgcgctccgcaccctccaggcgccgccgtactcctgaggcggagccgcctttcaggcggaccgccgcgtcgtgctctacttcacctcgctccacgtggtccggagcacgttcgaggacttgcgtgccgtgcgcgccattctgcgcgggctcc

SEQ ID NO: 372113 - DNA, 350 bp, Zea mays
tttattttatttatcttctttttttttttttttttttttttttttgggggtttttttttgtgttttttttggggataccaaaccccctccataattatgtaaggcaaatccaatccaacaaaacctttatctcaaaaaaaaggggggaaccttttccgtttttttgtatctttgacccaaaatgccccgggatatgggacattgacttggtctcctccaggctccaggtggggggacccaacggggctcgcccacttgtttgtggacccgttgttcgccttgccggaccacaatttccccaggactttttttaccggggccggggccaccggaccggccttgggcttttt

SEQ ID NO: 372114 - DNA, 484 bp, Zea mays
cggcgctttctggcagccggctgccaggggcgcgtggaggatgtagattggtcctggtggcggctacagcagagggccagcagctgcgagcggtaccgtgctcctgcggtggcttcgtatgcaggggccggaggtctacagtagcgcgcatctagccggctcagcatcgtggatctaaccagaggaggccacggctgttgctcctccctcggcaatggcgagggttcgagacaggacgaagcacttcaaaggggccgcaatgctctcacatggatacatcgagaaaatgagaaccactcgaaaacgtcgctcactctggctgagtaagtattttttcctaagaaacaaatcaaccatgtggcacctgaaccaccatcagagattgcagaggagcacgatggtttagagagtgttttagtgcctatgcaggggattgtgggtaatgggaaaaagacttcagagctattgagtggctctgtatcat

SEQ ID NO: 372115 - DNA, 301 bp, Zea mays
  unsure (1)..(301): unsure at all n locations
tttntattttttttttttttttttttttttttttnggactataaaagaacatggtatacattcctcattaaatcaacatatcgaatgcccccgatcaaattcaaaacatggtcggggaaaaagatagaatagttagctttacctgttagtctaattgtatacttgtatagcagctgtatatcatctcggaaatggatattcagactgccttcaacatttcactaccagtagtctccacatgaacatttaccatccttaaaatggggaaagcgttgaatgtctctcatgattatttcccgtc

SEQ ID NO: 372116 - DNA, 479 bp, Zea mays
cccacgcgtccgcccgactctctggcctgtcctgactctgccccgcctcatcactcccattccaccgacacgcggacgcggcgtgtcgcgcgcctccgctaaaaccgtagcccgaggcccgatggccgccccgccgcaaccgcacccacaggcagcggaggagagggccgcgccggcggttcccctgcccactgccccggcgggtccgcggccgtacgacgtggcggtcgcggcggcggagctccggccggtagactgcaacctcgccgcgctctgtgaccacgtccaggcggaggggttcgggttgggggccttctccgactcgtcgtggaggccgcgggcgccacctaccgcctccatcgcctcatgctctctcgtagcgcctatttcaggaatatgctacatggtccttggagagaggcgggagcacccacagtggttttgcacatagatgatgccgatgttgattcagaagcaat

SEQ ID NO: 372117 - DNA, 168 bp, Zea mays
ctccccccaaggccttggcaggtgatgaattgcaaagttttccaaaagggaaacctcccaggggtgccccccccctaaaaaaaacacaagagggttccattggggggggggcttttacttgcccacaatttcagccttgtcggcacattagggccaaaaaacaaaaag

SEQ ID NO: 372118 - DNA, 549 bp, Zea mays
cccacgcgtccgctctttgtccccccacactgctccagctttcaccacgcctatgcgctgctactctgccacaccgtttcctccattcctactcgagctcccaagcgcttgctcatggtgtttccagctcgtggctgccctggttgtgctctgcatcacagttctcccagccgttgtctacctagcaccagcatgaagccgctcggacgtcaccttcctcaccccgagctcgcacggcctcgtcgggactgcgccgtcgtctcctcttgtggctgaacgtcgcattgtttctgctccttgccgcggcttcccatggcatgctcggactcgtctgggtgccgacctcctccacgctgtgctcgggacttcgtcggtgccgtctggccatgctcgtcgtcgcgctacacgtcttcatgttcctctgcgtcgatctcgcttcgccgaagcaacagcaacaccagcgtcgtctcctagcttgggttcgtgaatttcctcgtcgaaccggcattatgtcgtcatccgatgcaccaatcagagctggaggtcggt

SEQ ID NO: 372119 - DNA, 534 bp, Zea mays
gtgagagagagagagatatagaggggaagacagagagagagatagatgtggtaactcaagaactgttcttatgcatgcggcagccataagcattgctactaggtgccgattcccctcttcttctttgttttttattcccctcttgctcttctttgatgatgatgattggctgggaactacatcttggaattcctttttttctctctctcgctttcgttgtttgattattggccttggtaaggccatggtgggtgattcctcgcctgttttatctgcaaactggattagctgcgagttttgttcttcttctttcaacccgctgcgttatcctacctaagctcggtctactcgttacatcaggccaacaatggcaagtggcttccatgaacatggctgtccatgaaaactcctccgtttgcatgctagctctaatctcctcaagctagcgaaacgaaatttcctaaaagccggtctggtcctcgaaaacagcttgttgccttgagccgctggagtcctatggagtagtagagttct

SEQ ID NO: 372120 - DNA, 420 bp, Zea mays
agcttgtacgaggcatgagacgaacaggccgacatggctagcacacaatctgtcgtagaagcctccgacggccggacgcgacgctggtgatggacacggcctgctaccacgtctgcggccgccatgacgtgcgggccggcgagcactgcaagcgcgaagtgtctctcatacgcgaggggcaaggggaccgcaccgtccgacacctgttgtagaagaggctaggaacctcaagagcgccgccaggacgtgcacccgatcaggcacagcgtctgacactgactcaagaacgaccgacgggcagtcagacacctaagccgccggacagcaagcagcatacctacactgcgacgcggccggagtctcataaccataggcagctgcaacgattgttctagagagagatgactactataccacact

SEQ ID NO: 372121 - DNA, 329 bp, Zea mays
  unsure (1)..(329): unsure at all n locations
cctactgnttccgccacgcacaacaggactcgtgggtggggaattttaggttacaaagggtgatagaaatttgcctactcgaatgctatcaataatcatctatattgcaggtcccggttaccttttgtttataacatggtcccggcggtccaggtggccgaggcgctcaatgtgaagaaggcgcccaaggagaagaaggcgcctaaggagaagaagccgttcgtggcgaataagccggcggcacactatacctacgctgtcatgattgtagaggcgatcgctgccctcaaggagaggaaggggtcgagctcggtggccattagcatgta

SEQ ID NO: 372122 - DNA, 562 bp, Zea mays
  unsure (1)..(562): unsure at all n locations
cagcacttggcaaagtatgcctaaggtcatggctatcgcttcctgccttcccttttttattttttatttttcaatccgtagacccatacaatgatcaattctgatagtatgaagtatgctttccacatcagtaacagatttgctctcacttcattttggaaagaaaagtaatggtttgtttattcacaatatagtataagggacaagtgtgcacttctggagtatttggacacttttggctagttctagttctaatggatcacataactctagtggttcttggttataacaaagctgtgctatcctatttattattgagttattctttccatagataccacttgattaccgttatttgtttaacattatttagtctttaagctctagtttatgtttgtattaaccacctctggtttttttgtgctgctcagagatacaaaaattatcagaacttggcaaagaacttgaggcggaggaatccacttctggtaacaaagaccaagatgtgatcgntttgctgtatgcagaggtcgatatgttgaaaggaatgagaagatgagca

SEQ ID NO: 372123 - DNA, 298 bp, Zea mays
gctacgcgtacacggaaggccacacggaacttgcagcacacagccgaggcgcgcgcgacggggggtcaccgctcaccgatcgccggggggtgggtggggtggggtaccgtgtgatctaaatctcacacagtgtaattggtttctctggccgttgacctgatcatacataaaataaacataaaaaatgtccattcaaggtcaagacagttggtttgagcacaaccgtgctaacatgtcatcacaagtttcttcccttttcttagccaccaatccaatcagtgttcaaaagcacgtttat

SEQ ID NO: 372124 - DNA, 353 bp, Zea mays
tgatgtcgtcatcaacgccctgcaccccctgcggggaggtccctcaacgtggcagcggcagtctacatctccagcccctaaaatgcgatgtccctctcccacaccacacgccgtgcccagtagaatcccgcccgtcagccacaccctgcagatccacgcttcggcgcccctgattccgtcgcttactcgtactgcaaggacacagaccctgtcttccatcgtcgcccccatgccacgctcccttaacatcactcgctcacttgccagccgcccacatccccagttgaaggagtcgcacaggaaccgggaaccccataaccggatcaggagcagctgtgtcgcgagcattggcc

SEQ ID NO: 372125 - DNA, 354 bp, Zea mays
aataaagatgtgacattgatttctatatcataaatcatcatatgtgtaaaacttgatcatagcacacatttaattcacgtccggatttacccttaaatccgggtgtcacacaaaaacaacacctgctatatatttgacaccatacaacagaccaggacacgactcacgaactcatcatctaatgaccagagtataacaatatattacaggccaggttagggttaatcactgtacccggccaattgccaaccatacacttctataagttccagttagattagaagggagaaaaaagcaccacccataagcaagggcagctgaatcaccacggtttatatgagctgatgatgatcg

SEQ ID NO: 372126 - DNA, 214 bp, Zea mays
atgacccgggatcatgtcaatgaacttggattggcccacaacggctttttgacacgagtgtgttttccggtttaacaacactcacctttactcaagacaatgtaacagtttccaaaagtaagactgagcttatgcttttttttacaagacatgtttggcaaatggcaaaaatgctttgacagcacaacccgggcatgcaacaattaataatgcc

SEQ ID NO: 372127 - DNA, 161 bp, Zea mays
ggcaggaacaccatcctttattatctatcaagttttatataacattcaaagcacgcagggtttgcatatccagacataacaaaagcatactctttccttgatcccggtcagccggctggcaaattgcgcgccctcctggacggcaaccttggggtcgggct

SEQ ID NO: 372128 - DNA, 274 bp, Zea mays
gggggctaagaccatattcccgacacatgccaccacttgtaaatatgcaacagccgcataagttatgtaccttcaactttccagtagaccagtaccgtttgtctactaggggaggcggacactggctactggagggggggaaattccgtaaccgtgacacataacccaaaatatgaaacaacttttaggatgataccagtgggcaaaaagctacaccatttgaacctatcacatcctaaaagctgatttgggggacagggaatttgggggaatc

SEQ ID NO: 372129 - DNA, 228 bp, Zea mays
aagaaaagcatctcaatatatgatggtgggttttttataggaaataagtgtaacaatgggctgcggtatttggaggatgggctcatttaatttggttgctgttgggtcgattgggccagctaccagagacagagacagcgagtacgtgatatatagtcatgagaagagcacgtgtccgtagttttgaaagatgtcgttgacgatgatcctgtaggctctctctgttgg

SEQ ID NO: 372130 - DNA, 200 bp, Zea mays
ggctattactgcgccgctcgttctcctcctccccctcgtgctgctgctgttgcaggcgaggtggtcgtcgcagcagcagcagcaggttgtgacggcggtgatcgtgttcggcgactccatacaggatccatggaacagcgttggtttgcacactcttatcaaggacaaccacacgacttactgcatggacatgttgaacc

SEQ ID NO: 372131 - DNA, 366 bp, Zea mays
tttatgcgtgggccaacgccgcaccttcaccgccgggctccccagtccaatccaacccaaccccagtccggcgacggttccgggcagcgcgcgatcggatcgtcgcgggttcggcttctcgtcgaacggcgcggattcctgcccccgatcggagggcgtcggctgcggcgcctcggcgtctgatctgctgcggtcggcttcttcttggtacagggagacagactctctctctctctttcgaaccgatcgacgtttgctcgctctcctctcgtcatctcggatttaattcgcggtagatgtctccgacgtacgcactccctcacatcacagcttctgttcgcttggcagggagaggagtgggatgga

SEQ ID NO: 372132 - DNA, 420 bp, Zea mays
cccactcgttcgcttgctcgcgtcccagctcccaacaccagtacaccacgcgccggctgcgagcgatgcccgcgatcccaacggcccccgccccctgccccgtgcgcttcctcctcgcccgccgccacagcctccacgtctcctacccgtcgccttgctctaaccaccagcggcaaaccccgccgcgcttcacgccgccatgtccccgcgaagcccgcccctgcgcccgcctcatccccacgatttggcagcgccaccggcacgtaccgacgtacgcccccctgccctgcctgtgatgcctgatgccctcccccactccgagagcgccgcccaggaaccaccccaccgccgcggtgacaccagatcaaggaccaggttgtcgcgtgatcccgtggagcccttttgcagaccacgcgccaa

SEQ ID NO: 372133 - DNA, 329 bp, Zea mays
gcagaactgcaaacgctcatatattggggaacacagaaattcccaggcaccttttctctttttatttttcaatggtttgtagtccgaagattgtaggtcacatcgatgattctcctggtgcataggcgcacggctgattttgacagataaaagtaccaacctgcaagtccttaggttgggttcaattgtcactcgcggtacacccatcagcttattcgactccaggagaaacattaccttccccacgagctcacccaccaaagcctacgccctacagaaaccaaaatttgcagttttgcactttgcagaaagctaaacattagggcagc

SEQ ID NO: 372134 - DNA, 372 bp, Zea mays
gtcgtaaaatttagttggaaaatgcataaagtcaggatggtctcagaggacacttgttttgttcacggtctatcaaaatataaagtacaacgatattttgccagatattgaggcagtcatacacgattcttgtgacatgacacttggaaccattagcctttagctaggtcgtggttcgaaatggaagcattgctgctcggctcttgacaaaacaggtctgtgtaagcatgtgcctcctttagatgagcaagctcccctttcatctgctccagagcagctgtaagtcgggcaactttaccattttttcgccagcatattgagatcagtcttgttcagctactcatgagtcactactttccttagtaaagcaca

SEQ ID NO: 372135 - DNA, 97 bp, Zea mays
cacgggcccgtgaaatcgggggctggggacaacatacatcaagtttcttcctcattacatcactcgccgttagtgtatggacaaggggtcacaattt

SEQ ID NO: 372136 - DNA, 233 bp, Zea mays
  unsure (1)..(233): unsure at all n locations
ggtgnagtacgcaacggcaaccggagatggacgggggctttttgatacacgacacaaggacactcttggggatacgctatgatatctgagtcaaagaagccgcgaagagagaagagggccattgattctagcaaacgcgtgcaggaggaacaggttgcgagacgcgagaagggtggtgctcgttcggagcggaccaatcgctagaggctgtgggtgtgctaagagaatctatc

SEQ ID NO: 372137 - DNA, 399 bp, Zea mays
acagggatagcgtaaaatgtattacagtatcagtaaaccttacaagtataatgacaaatgaaaacgacatcagctgacacattgatacattcctgttccgttagaatgaagtatatagcttaagaatgggggctcttgccacagcagctcaaacaaaaatgaagaaagaaaagcagctggagtagagacaatttgccgctctctctcaacagattgagctgctgccatggcgctaattcacggcacagtccacgtctcagcgagcaggggaggagctcagtaagtgaaagggtcaaaaaaaatggaatcagattggagggtatggtatgtatacacggggaagaaaaactgcttgctgtcctcagttttggatcttctgcaccttggccttgatcttct

SEQ ID NO: 372138 - DNA, 322 bp, Zea mays
acccgggggaacaaacaggggtttaatttttaattcagggcgaaaaaaggggttcacccccggcgttttattttttttatcccgaggatttttttttcgggaggctagctagcttgccctaaaaaaaaaaaaacttttggtttcgggggggggccacccccagcatttattggggacaagctaacaggagctggtggcctaaaaagggggggggggccctgggccaacccggaactgctggcaaaactgtttgtaaaaccccaccccccccttaatttggggggggttggtcccgttgcactcgggggccccctttatggcc

SEQ ID NO: 372139 - DNA, 447 bp, Zea mays
  unsure (1)..(447): unsure at all n locations
atcataccccaaggaggccaagacgcggacggcagcaggcaggcaggcagccatgccgcggacgccgtcgctatcgccatcgctgtcgccgtcgccggagaggcaccagcaccagcccgcgcgccggaggggcggcgcagccccgtcgcagctggcactccaccaccaccaccaccaccgcggcggacgctcgccgtcgccgccgccccgccgctcgctccgcccgcgccgcgccgccgcgccctcctcccgcccgctcgtcgacgacttcttccccttcccctcctcgccgtcgtcctcgcccttccgctcccgccagcgggggcncgtcgccggagccgtccagctccgactccggcgctgacgggtggcgccccgggctcctcggtcttcgaccggcgccggcgcaagctcaagctcgtcgtcaagctcttccagttgcccccg

SEQ ID NO: 372140 - DNA, 358 bp, Zea mays
  unsure (1)..(358): unsure at all n locations
cccacgtgnccgcccacgcgtccgcccacgcgtccgcccacgcgttcggcatgccggagccgcgggacagcctgctggggtacctggtgtacaacacggtgatctcgatcgcggcgctggcggngctggtgcgggcggcgctggtgttcctggacctgcaggccgcgctgccgcccggggacgacggcggggaccaactggcggcgtcgggcccgggactggcagagcggttcctcagggccttccggccggcgctgtacgaggtgctggcgtcgacggcgacgacgtgcgaggcggacggcggcggcgacgactgcagcgtgtgcctggccgggttccgggcgagggccgtggtgaa

SEQ ID NO: 372141 - DNA, 296 bp, Zea mays
  unsure (1)..(296): unsure at all n locations
cttctcnctcactcccgcccgtgtccctcggcctttccgcgctgcggtgcgccctccctcgccggcctccctgcgccgctgttaatggaaacggcgcggcgtttccttcccaccgnccccctcccctcctcctcctcctcctcctcctgcacggcctcttcgctacgattcgccgcttctccgctcttcttctccttcccctgcagataaagcggctggttggcctggaaggtggagacggtctcggatccaggggagacacgcggatttgctgccatggtgaggtggggcgagat

SEQ ID NO: 372142 - DNA, 515 bp, Zea mays
ctcatgcgtccgcggacgcgtgggctcgcagcagctccagcagccacaggctacagtcaagttagagaatggaggaagcatgattagcatcaaaccagagcagcagatggcacaacctgaccagatgatgcgaagtgctagtggtgtgaaacttgagccacagcagctgcaagcccagatgatgagaagtttaagttcagtcaagatggagcaacagacttctgattcatcagcattcctgcagcagcagcaacaacaacaacatttgttgcagctgacaaaacagattcgaaattgtccggagcttgtatcaataggtggaccaaatgcaattgcaaaccctcaagctgccacagctgctcaactgaccctcttgcagcagcaacggcttctgcatatgcaacagcagcagcaacaacagattctaaagaacttacctttgcagagaaaccagttgcagcaacagcagcagcatcaacaacagcagcagttacttcgtcacagagtctaacatg

SEQ ID NO: 372143 - DNA, 198 bp, Zea mays
aaacatatccccgttggtttttacagggagaagttaacaaaaagaccagggcggtttttttaaggcatcgacacaagactaggatgtgcaaaatttcttttgtagtttcaagggtgtgcaaaattattgatcagtatctacgctactacactttcctttcctttaattacagggactacaccaagttagtttaccgga

SEQ ID NO: 372144 - DNA, 445 bp, Zea mays
  unsure (1)..(445): unsure at all n locations
cggttttatatggctcacaaatgggaatgggtgtgcaggcccagcctccacctgcttccctcgcgctgagaccaaactgagagcganacacctcgtagggcgtcggcaagaatccaccaggtgggaggcagagaaacacttataacacttccctcggagatccactatggaccctcgacgaggaaggtgcacatcacgatatctcctcctgcgctcaaccacccgcatccatcatcatccagatgtcggcttacaacagaagggcgctgtacctctgaatggtcaccaaccgttgtcttcgtgaagggcggagcaggagcgtgatttgctacggaagcagcaatatcagcacgccctgaagtatgagaaagtgcctctttataggaacaagaagccagagaggatcctnccgacgaggcagcgccactatcatcatcacaccatc

SEQ ID NO: 372145 - DNA, 360 bp, Zea mays
aggaaaaatgtctcatccattactgctaaagagagaatcgtgaactaggttactgagcaaaaccttgactgtatggcttgttcaagatctcagactcaacaggtaagcttaattcagtcttactattctaatgggaactagcacgtattataccaactattctacaatcaagctattttttacatggccggccgcattactggaaaaacctttttccaagtccagacttcacttatggcaattttcagggaaagatgtcgggatttctcggggggaaaccattggcgacacgcacccaaactgaaatgatcaggcaaacagattttaacaaaacacaaaatgtacgttagagcaacaaaa

SEQ ID NO: 372146 - DNA, 359 bp, Zea mays
cccactcgtccgcccacgcgtccgctacctaccctcagtagttgctgctgcctgcttgtttgtagctagattcacaatccacccaaagactcgtccttgggtaaagacaacatggcttttattgccaactgcaccctccctccccgaaaagtaccattctagtaaatatgagtctagataaacgattaaccagattcttagctagaatgggacattattttgggatagagggtgtatctaaggtgtagggttttctgatatcagtgtgtatagttctcttttctgactttattgtttacaattttgcagaacttgacacttgaacaaaacacggggtataaagtctttgatctgcagaa

SEQ ID NO: 372147 - DNA, 317 bp, Zea mays
ttcttatggcatcgaaacatggtagataaataaaggacttgacgatttgtaacgcagtagctggtgcgtgcgtggtgtggtggtaagaaattcttctgctgcctgtgttcttgtagcctcctcgtcctcgcccaccctgttggtacgtgtacggtgtacgtagtctgccgccgcgcgctgttcgtgttcgtcgtgtctcgtgtctgtattatactcgtcctccccatcaaaaaaaaagttgttccatgtttaaaaaaaaaaaataatttaaaataataataaaaaaaaataatatatataaaattaattttttaaag

SEQ ID NO: 372148 - DNA, 104 bp, Zea mays
cgcggcatgccactgcagtaactattgatagtgtgcctagactcttccactggcgcggggtttacaactgtctggactgaagcaaacgcgtagcagtaacgcac

SEQ ID NO: 372149 - DNA, 327 bp, Zea mays
gggaccccaattggggtttagacatgataactgagaacacctgggggggttggaattttgggataaaaaaggatattccttccagggttttgggtggaaagggaaaaaaaaaaacccaccttacaaaggcatacctttatacagttttaaagggggaaacaatttacaagggcttgggccaaaactaaatttacaccattaacattttacaaagacacaaaaactttttttttttttgagaacaaccacttttatggtgggggatgggcctttttagaaaaaaggggggacaactgggttaagaacgacttttttttccttgatttt

SEQ ID NO: 372150 - DNA, 421 bp, Zea mays
ttttgttttggtgtatgaaagccgacaaactgaggtttgctgagccaatcacagaaggtgaagtgatccactcatctatgcaaggtgatgaaccgatcattccaaagccaggcatgagctcatctatagagaacacacctgttgtgaatggccactcagtgcctcatatccacaaccattactgctactataataagcgtgccaacagcaaccatgcctgtcagcaatgacagatgcggcagatacatgtgaaccaacagaatccaagtctaccctctgcacactgatatgggtatcccggaaggcgcagtcgtgcttaccatcagcgataatcagtgggacgctgtcagcctaccttattccatggaacacaggcgagacagacccagggagacaaatccatgcataaatactaaatatg

SEQ ID NO: 372151 - DNA, 396 bp, Zea mays
aaccaatgatctgcactcaactggttccattacagtccaaatccaaccccagactgatctgattcattccttacagtcacagtgcaatcaaattccactaacatttacaccttctagtcatctcagttcgtatgaggttaccggctgaagaggccaccgactgcacccgcacacctccgtcagcacctaaacacgtgtgtggtgcaggcacgatatggccacggcggcgatgctctgaggagcacaagcacgaatgaagacaggtttagctggttctaatgcgtgctgaacacggtcttagttcccaattaccaccaaagaatcttctggcctaaccttctccatcatttgcataagcaactagtattcaccaaaaaaggggcagagtgggttacc

SEQ ID NO: 372152 - DNA, 324 bp, Zea mays
gtgtataattctattttttttttttttttggttttttttttttttttttgggttttttttctaaaaaaaaaaacaagaggcctgccagggacacaccttttgttaggggggggggggcccccccagcttcacaggaaactcgcccaacaaaacatctttttaaacaaccggtgggggccccgaaaacaaacgtaattttttcctttgggggccttgcctgaaggcaaaagtatcgggggggccttggataaatcagcctggacaaatttatgaacattgggcatgaccagattttcagatcaaacctggagttttggacggggg

SEQ ID NO: 372153 - DNA, 329 bp, Zea mays
ggaccaaagcaaaattggacatgcatatatgtcattggggctatagttgaaaagtaacaggcatcattttgcctttggccaaattctaattgccatttttctacaaacattttttccaaaggtaaccgaaattattgtttttttgaaagaacaacagaacatactagtttcagttgggggacgaccagttcagcaccggcgtgggtaaggaatcttgtcacctccaaggattggcctaatagcgcaaatatttgtcagccaaaacaatatcgatgtgtaatagggcccaatgtctatgtttccacagaattcccatttccttgaaactt

SEQ ID NO: 372154 - DNA, 368 bp, Zea mays
cggtctctttggcggacgcgtgggcaggtatgcctgccctcttgtcttccttttttaatatgtgcaactgagcacccaaaccctagatggaaggcacgaacttgggcagcgcaatcgagcttggtcaatggtggctggtgcttcattcgctcctttgggtggttgtggctgaagcccgtgagctcccgcaacagcgacttcattccctgctgtaagataagagagttttggccgcgacgagcagcaccaggtacgcctgccctctagtcttcattttttaatgtgcgcaactgagcacccaaaccctagatggaaggcacaaacttgggcggagcagacgagcttgtcgagcttcgtcgatgttggct

SEQ ID NO: 372155 - DNA, 406 bp, Zea mays
cggtctcgtgggccagcacagagattcgcgcctccttcttgattccttcaccgaggttggggccttcgatcacaagtattacattcatggcgaggaaaggtgtcggacatacgtggatcgaatgattagtgcttcaactataaatttgcatccagtaagggagggtgtttcagcaatagaattcgatagaaagggaatatacattgcatcagtgacactctcagggtgtctgacggtgcatgactttgagactttgtactgctctaaatatggcccaccatgcagtatgccagatgaatcatcaaattatgtgctccatatatctaaccgaattcccctaaatgctgtccgatggaatccaggaaaccaagacgagattgcttgcacatcaagtcaaagtgataac

SEQ ID NO: 372156 - DNA, 505 bp, Zea mays
cgcttctctagtcgctaggctttcctcagcagcacttccgcgcttcgactcctggcagattggattgggtcgctgcttccaccagcaatccaattccggagatgactaccactcagttcgccatggttgaggagctggcctcgctcatcaaggacaacctgcacagcaagcacctgatcctctccaccgaggaagccctcatcgcagccctccagcagctgcactgccgcgacggcgaccgtgaagaggacgacgatgcggcggatacgatagagcttcagcctgctggggcctaccaccgccttctcttgcatcgccttgctgaaatctatgggttcgctcatgaatcggttggtgaaggcgaggatcgacatttagtcctccagtgctgccctgaaacagccatcccatctgtccttgttagtgatatgatatggaagtttgataacagtgacgatttggcgttcggtgggcttaccagaaatgatataggtgagtcactttt

SEQ ID NO: 372157 - DNA, 460 bp, Zea mays
aaacaactcacagattggatcggtttttattgctagcgttgcatagaaaatcctttgaggactcatattttctttttcagacatacgtactactttttattatgcgtggcacgtactacacgtaacgcaaatagaccaaatagagaagctattactactagcagccacccgaaatgaatactccacttgcacagaaagagacgccgtgccccagcaatcatcgcttgacacggcagcaggaccgcgcgccacgagtggcgctctgctacctcgccctgtcgcccagagaccggcggcgtccgcgtccgtccgtcacagcgtccgcgccgcggcaccatgctcggcagaggcgccggccccggccttgacgcagcggtcgaagccgtaccagacgccgtcggggagcgggtcgccgtagtagaaggtggagggcgcgccggacgccggctcgtacaccctg

SEQ ID NO: 372158 - DNA, 335 bp, Zea mays
accttctcaaccacctcctcccctctccgtctcccagtccggcctcgctcgccactcggagtctcggagtcaaccgccagcgcctcgatccggcgaagccagcccagcccatggcctccggcgccgtaccaccgcagcgggtcgccctgctggcgctcgccgccgccctctccgtcgtctcattcccgcacctgtccctcctcgcctcgtcccatccgctcccgcaggaagctgctgctgctgctgccggtgcggcggcgggaggcgaggcgttcgagcctcacggcaccggcgtcgatggtgcccgccgtggcgcggcgcgcgtgcacgtacac

SEQ ID NO: 372159 - DNA, 469 bp, Zea mays
agcatacaaacataattcatttagaatttaagcagatccaaaagcagcatacacacagttcattaggaatctaagaaacacgtaagcaagcactgcttgcaaacaaaagcacatagtctgtttgtcgggcagtgatattagtattcacaagtggcatttttgttgttcactaaagcaccaagttttctcttttctgactaaacgtcatcttcgctagacctggtatcgggtcgcaagagaggctgcacgtctggtcggtaatgaaggcgaggccatcctatctcctttccaccagccgccgtcgccatgtgcctgcgcccttctccatcgctgccccctcctcgcgccaacacgcaggggtcactacttcctctttgtcccgccgccgcccggctacagttgtctctccatctgatagtgtacaacacaaccttgtaaagaaacaaacagatagtttcaaccatgttga

SEQ ID NO: 372160 - DNA, 472 bp, Zea mays
ttttgtttgtcgattgatactgcattaattttttgtgatagtgtgcacttttcttggctgtgctagatccaatgaaaatgcaatgaacaaagcaggttttgtggatgtatatccagcttcatagattccaatgaatatacaacattatttcaagtctgctccccattttaatactagcaaatagatgaacactgagaagcaaaaaggcctaaggattgtaacagaatcaggaagtctgtcatcagcactaagatggatttctgatgaggaagtaagttttctttcacttgcagaacgtctcttatattcatagtaccaaagtttgtatattggataaagatgtctctatagcatcgaacaattcttggatttcttatgtcacttgctactttttgtctggatttatttaatgaggtcggctgtttattattagtccagtgcaagtgtaaatctaacttttttaaaattttta

SEQ ID NO: 372161 - DNA, 321 bp, Zea mays
aacccaagattattgtattttgttggttgttcttgtttggttcccaaaccgccaaccttgtttacaggttgtcagctaaccaaaatttagcatttttgtctatcaatatcttttacataattaacaccccaaacatttgctttataatacaaagacgatgggtcaactttacatttatgggcattaacacatacaacccgggatacattttaacacccatttaatttaaccctgcccccatttatcagttttatgggcgagacactagacttattattcacttaaccactcctcacacaataattattttaaacttgggtt

SEQ ID NO: 372162 - DNA, 262 bp, Zea mays
  unsure (1)..(262): unsure at all n locations
cggactcgtgggcccggctggaggggatccaggcgcggctgccggccatggaggcgtcagtgcgcccgatccgcgcgccgccggaggcgctcgccacggcggtngtngtcgtcgactgaggagaagaaccagcaataacagcaggagcaatgttcataggccgaatgaccgccgtatatatatattttaaacgtcagaaccagatacggagctgataaatcacttttaaagaaatactaaagttcgtgatgagggcggtcaa

SEQ ID NO: 372163 - DNA, 407 bp, Zea mays
gctcttgttttgttcgcgtgccaagaaaaccgacgtgtactgcaaccttcgttgtccacggcgatgacgatgaagacgacgcccgcggtggcaggggcccctccacgcgggcggaggaagacgaggaggaagaccccttcttgctgtcttcgcttttttaacggctccccatggactttggcggtgtctcgttcgtccgattactaggacccttactatttcgaccttttcgattgtttccatttttgcctcgggggcctttaagagcggtgttccggtcttcgcttgatctccgatactgggacttcttgggcttatgcccccgtttcttccttatgacgatccctttcttttacttttttttgttaatttctatacacttttttgggtgaaccttcctttattcc

SEQ ID NO: 372164 - DNA, 230 bp, Zea mays
atctcccaaccggaaccaaaacttggggggaatttaaaacggtggccggggggggcctcatcatttgggacccccgaaaaaaaatcttaatagcttacttggggaaaggattaccttaacaattttttctgggcaaacattttataaaacggaaaaaaaaagcgattcataatttattggaaacccggggggcaggggcaggaacatttgccggggcagggccatggggg

SEQ ID NO: 372165 - DNA, 358 bp, Zea mays
agcagagcagagcttgtcgctccctatctcatcaccgtaaaatcctatatgtacatggcggcaagccatctagatataaaaagcaacagaagaaagaactccaatcaccccgcacgcctaatcactcactaagaagagaaatcttgtcgacagcctcagctccaagtactaccagggatcttaatccgcggcagacgggaacggaagggagggagggtagggggggaaaaaaactgaagacgatggatacgcggtccatccaatcggtaaccgcgctcaccggcacctggagatgtcgatctcgatgaggctgtcctcctccagctcgatctcgatcatgccgtcgtccgcgtcgccg

SEQ ID NO: 372166 - DNA, 445 bp, Zea mays
ttcttcccggcctcgctctcctgcctgctcctgctcctctccctcctgcacctcggctccgcgccgccgcctcccgccctcgccgcccctcctccttcctcgccgccgccgacggaggagaagaaccagcagcaacagcaggagcaggctccagaggccgcgtgcccgccgcctccccctcctccgccgccagagccagagccggagcgcggggccgtgttcccggagctcctagagttcgcgtcgtgggcggccaaagggcgcgcgctggaggtgatccacgaggagttcgaggccgagtgggggctgccggaggagatgggcctgccgtgggactcggactccgactccgaccccgacgccgactcgggcagcgacgacggctacgtccggggcggcggcgacgcggacaacggcatgatcgagatcgagctggaggaggaca

SEQ ID NO: 372167 - DNA, 392 bp, Zea mays
ttcctttcgtccggggtccccctccccttcccttggccttctcgatgtcaactgccatggatgctcttcttcctcccttgggtcgtgtttggggaactcgtcctcacacggcaagcttccatcatcgcgtcggcccgttgaagctggctcagggtaatcatcgagcatagagttcatgttgcctgattaccttagttgctactatgcgatttaaggtgttacacggaggactttaaaaactagctgcctggtgtttctttttctccttcattctagtgaactcactttcagaagcttgtttgcaatatgtcttacacgaactgtttgaagaaacattcctatagaattttctttcgatatggcaactccatcctcagagcttctttagagaa

SEQ ID NO: 372168 - DNA, 484 bp, Zea mays
cgctgtgttaccagctttgaccgccgcctcccttcccctccgctactgctcctccccaccccactcccccgcaggagcggcggcggcggcggcggcggcgaggtcgtaccccacatcggcgagcggcggcggcaccgccggaggcaaaggcaagatgttcgggcgcgcgccgaagaagagcgacaacaccaagtactacgagatcctcggggtgcccaagtcggcgtcccaggacgatctcaagaaggcctaccgcaaggctgctatcaagaaccaccccgacaagggcggtgaccccgagaagttcaaggagctcgcacaagcctatgaggttttgagtgatccagagaaacgtgagatttatgatcagtatggtgaagatgcccttaaggaaggaatgggcggtggaggatcccatgttgatccatttgacatcttctcatcattttttggacccttttttggaggaggtggtggaagcagc

SEQ ID NO: 372169 - DNA, 144 bp, Zea mays
  unsure (1)..(144): unsure at all n locations
cccacgctgatcgnncnantanannnnnnnnannnnaaaatntggaggatatggtatattgtacaggcaaaatcacctccacactacagcaattggcggcgcaaaggggtaggggttgctgtcggcgatgtcggatcggcagcc

SEQ ID NO: 372170 - DNA, 489 bp, Zea mays
ctcactcgtccgcccacgcgtccgcagaaagacagacacatggggtcatggaggtagccgtggtgttcctgttgaaaatggacataggcatgccaaccgtcgtggtaccccatgtgatccaaaggaaaccaaaatatctgctagcgtgcctgatggaaagaattcaaagaggggctctgctagctatggtgctcatgaggtgcgattattttgtaacttcttgtttttccagttggtcaaaggcatgggtgcacactgcacactcagaccaccgttcgagtcctcattgaggagaatttgggttcatatttcttaattgaaaagccacctagttcatcctaggttggttgggtaattttatttcttgtcccattgctgatcgcagggatctttgatttatattcaacatttttggtccaaaattaatgtcatgaatgtcattgcagagacaagtatgggttcagaagtcaagttcaggctcgtgagttt

SEQ ID NO: 372171 - DNA, 419 bp, Zea mays
ttcactcgttcgctcacctgctggcggaggcggaccccaaaagccaaattccacagcccacaccacctccacactgcagttttttccggcgcaaagggttagggtttgctgtcggcgatgtcggatcggcagccgtcggaggaaccggacgagcaggtggacctggagggggacgacgactgcatggacgactcggaggagcccgacgaggatgaccacaatgacgagcgccacggcgaggccgacgacgacgccgggatggagccagagccgggcggaagtaaaggcggggatgacacgggcaaggggcccgacgtcacccgtggcgggcccgatgactaggaggagaggagcaagtgggatgacatgctccgactggcggccgatgctttggggtcttattggtggcttgcccggac

SEQ ID NO: 372172 - DNA, 553 bp, Zea mays
aatgagttttcgagcacgcgacgagcagcatcgcgcagcagcaccttggaattcggcgttgcccgcgctgctgcttgcatccagctgctcctccgcctccatccggcggcccggcctgcatctctgagatccacccgccgacctgcatctccgagctccggcctgcgcttcttcctcccccgtgcgtcttcctctgcccgcccgcctgtaattcttcctcccctcgcgtttgcgcttcttcctcccctgcgcttcttcctttgcttgcctgcctgtgcttcttcctccccctgcagttgcgcttccacctccctccacgccagctatgcgcctctgcctttgttgcatgtggtagtcgcaactcgccagtgctctctgctttacaactacaagtcaggttgaggagttggagcaggaaaagcaggagctggagtttattgcagatatgtacgtgaaagaaagttctgagtctaggacaattgctgatattgaagaatcagaaacccgagctcgcatcaggctgaatttttgaggagccatctagaggagcata

SEQ ID NO: 372173 - DNA, 372 bp, Zea mays
ggaccaaagggtttttatccatagtaacatgaaacccatggcaaaataagctagctttggtggaatcaatcctccagattatccaccgagcagtttaaagacaccccccaaaaccttcatgcacatcagccatgcccatgcatgcattaggcaccttcattctactactgctacaaaatgtggatttctccccctccgcgcagaagcaaatgaggaagaagattccagaaaagaaaagaaagaagaagaagaagagaccggtgcaccagtagtacgcggcggcaggggagaagaatcatggagcttggtggtatctatctatctagtagccaaggcagtcgacggccatggtggcagtgtcgaggaactgat

SEQ ID NO: 372174 - DNA, 415 bp, Zea mays
caagcaaagagagaccttcctgatgcttttctgccattacatatgcattcataatggaccttaagctcttaatatcaggcttgtatccctggagacatgccttttttaatagtttagcaccctgggaaacacacctcgccttaatgagtattgttgatattattcccagattcattcgacaaagtaattccatatcttggataatttcttcaatctcctcacacttatcttcctttgcaagtgcaacaagcaagacctggtacatgtcatcatctggtctataattatcattcatcatttttcgatacagacacaacattttttccgtatcacctgaccttgcaaaaacatccagcataaccaagtacgctaaacgatcaggtttgacacctgatgcaatcatgcaatcaaatgt

SEQ ID NO: 372175 - DNA, 494 bp, Zea mays
  unsure (1)..(494): unsure at all n locations
tgacattgttagccatgtgctcatgaactctgatgacacttctaaaattggtggtcgctgcctgcatggtacacatgatttggggactcagctagattctgatgctcagagctagattctgatgctcagaggttggtgcaagaaaggaaagagttgcatctctcttcatgaaagagagggacttggttctgcaaaggctggtctgctcgcaccagttggttctggaaatcatagaggttctgaagaagggtctcaagtacaacataaatctgacttgaaagtgcctcagttcaagggttcagagggttcatcaaaagatgaaatgtatcggaatcttatttatgcatttggcaaagataatcagacgtcggtaaatcttgctggtaagcacagcttgctcagtactggggtttcacaaaggatgtctgtgagtattggtgattcattggctgaaaagcctactgctcatgcanatgagctggcgcaaaatctag

SEQ ID NO: 372176 - DNA, 561 bp, Zea mays
cggactcgtgggaaaaaatgcaggtcgtctccttctccggttgagctacgctgccccccctccaaaccctaacccgttgtgtgatccgttctgctatggaagcagcagctcaaccccatccgctccagcttttccaagacatggacccgggggtccgccgtttcctcgacgcccgattccgctcggcggccgatctcgccacggcctccgatgtcgaggccgagatccgcgggcactgtgcggagctagaggcatcgatttacgacctttacgtacgcctacaggaaactgccgcagcgtactcgtcttgctgcgaggtcgctggttcggccctccgtggcgtccgcggccggcttggtgccctcaaagcatccgggtcaacaggggctggagaagaggtggaggtgagaacggagcagatgcagttcgagcaactccctgctctggccttcgaggtggcgagagtagagatggtcagagagtatgcagaaatggctctcaaacttgacagtttggtgggtgatatagaagatgcagtttctttttttgttactggaaaac

SEQ ID NO: 372177 - DNA, 474 bp, Zea mays
cccactctttcgcgggagacagcgcagctcgggttcgggttcgggggggcggtagccacctgagcaggatgtttaactggaacgacgagcagcaccaggtaagggatgcaatatgggctgaattcaatgagtgtgatgaccatattgtgccttgtcctaaaggtgcacaagatagcacgatagttagttccagggttcgcaagaacaatgaggaagaggtggctagtattgctgccatcactgaacagtctgcaggtgttcaaaatggacatcaagggatggaaaagcagactgcaagtcacacaagtgcacatatttcagccacacaaattgacatggaatcctggcctgatcttccttccctgaatcctacacttgatagaaattatagtgatgacaacatagcatccacatatctggatttttgtgctgcaaccagtttacaagaagtgacccgaaattctacagagcaac

SEQ ID NO: 372178 - DNA, 462 bp, Zea mays
ggagttcctttgcttcgtcggcgggcttgcctgggccaccagcaacgagtcgctggagaatgccttcgcctcctacggcgagatcctcgactccaaggtcatcaccgaccgggagacggggaggtctcgcggcttcggcttcgttaccttctcctccgagaactccatgctcgacgctatcgagaacatgaacggcaaggagctcgacggccgtaacatcaccgttaaccaggcccagtcccgtggcggtggcggtggcggcggtggctacggcggcggtcgcggcggcggcggctatggtggcgggcgccgtgacggcggttatggcggcggtggcggctactgcggtcggcgcgagggtggtggcggcggctactgaggcggtggcggctactgcggtcggcgcgagggtggtggtggcggctacagctgccgcggccgcggctggagggactgatgtgt

SEQ ID NO: 372179 - DNA, 215 bp, Zea mays
gggcaaaaaaattccatcccttttgccaaaaaaaatacaaacaggggtttagggggggcccttctcagttttttgatactttagcaagggccacaccagtttgaaaacctggaagccctaactttactcaacctaacagggggggcagtttggcaccttccgccctaagggaaaaaatatttatttgcccttattccccaacttggtgggggggg

SEQ ID NO: 372180 - DNA, 324 bp, Zea mays
ccctttcttatcgcacacgcgtccgctcacgcgtccgtccacgcgttctatcctcgtgcgcgcggggccctccgccgccgccgccgccgaggcggtcccgacgcgcatcatggtcgtgcgcgaggcggacgaccgtgtgctcgtggtagcggcgcgcgggcgcacacactggagccgagccattctcgcataccgtcaccgacgccgccgccttcaggccgtgcgccttcgcgccctcgcgttcccagctacgagccacggatctttggctgtgaagggcacggccacgctgacttcggtggtgaagaaagtcatggtgctggg

SEQ ID NO: 372181 - DNA, 113 bp, Zea mays
gaggtccgccgcgatgatgtgtatcgccggagacccccagcgcgcgcatggcggggtacgcggagtaggccctggcgtcgctggcctccgacgggcctgacgacttgaggacc

SEQ ID NO: 372182 - DNA, 424 bp, Zea mays
cggattctttggcggacgcgtgggcaaagcaggactagggagctcgtcaagagggtcgtggatggtgctgttgagatctttgaggaattgcttgttcaggttgagctgcagcgcactataccgccaccagttgacggcggggtgccacgcctagtgagctttgtcgctaagtactgcaatcagcttcttggggagcagtatcgatctgtgctaacacaggtgatcaccatccaccgcagctggcgcaaagaagtgtttaatgacaagatgcttgttgatgcggtgcttaatatcgttaagacacttgagctcaactttgatacatggtcaaaggcttatggagatacaacactgtcgtctctcttcatgatgaacatacactggcactttttcaaacacctaaagggtactaagctgggcgagc

SEQ ID NO: 372183 - DNA, 288 bp, Zea mays
gttgttttctcctccccctccggttcgggttcgggttcgtgaggttctccggggttcggtttcgtgggtgagcggatcgagatggcggcgtcggatgttgagtaccgctgcttcgtcggcggcctcgcctgggccacggacgaccactccctccacaacgccttcagcacctacggcgaggtcctcgagtccaagattatcctcgatcgggagacgcagaggtcccgcggcttcggcttcgtcaccttctccacggaggaggcgatgcggaacgccatcgagggcatg

SEQ ID NO: 372184 - DNA, 449 bp, Zea mays
gccacattctcgtcaaagaacgaggctgcttcgctcggggatagaccgttggctagaccaaacagcttcctcaacatgctggggatcgggtcgacagccttcgagcaagggaatggccgcgagattgaggtttcagagtccaagggcggctcgtctactcggcatctgtgcaacatcagcctgccatttaccggatcacataaggaccaccagtgggcgggcccagcaatcagaatgtcactcccgagtttcaggttaggcgaaccaaaccgtattcccccatgatttccttcaaagaaagaatttacgtagccatgcgcagatttctactgagaaatcgaaagaagggcaagatgaagaagggggaaaaaaaagagtcctcgtcaaaatacgtattgtttctgaaacaggcacgtttcgcttgctttgcgaatttcagcggacgtaca

SEQ ID NO: 372185 - DNA, 180 bp, Zea mays
ttctttttttttttttttattttttttttttttcatataactatcaggtgttacttgtacaagtacaaccaatcaagccaagcaggtttgacaaaacatctgacgaaccaggtgtcacgacagacagcgtgctcgcacatggagccacaacatacaaagagggggtgggcataatttgat

SEQ ID NO: 372186 - DNA, 154 bp, Zea mays
gggttggggaaaaagcccaccgcctttatttttttccggggaacacaaattattcaccaagggccccaagagaccacaaaaaccaagggtaaccgatttggcacaggttttaatttatcttcctaaaccaaaatttccccttttttttcggggg

SEQ ID NO: 372187 - DNA, 326 bp, Zea mays
cggactcgttgtgcggaaagttggctgcaaggacgccactggttgaggttcaacctcagctttgcttgagggaacaggcagatgtgaagcagtataacctcttctactcgagagataatggtatattttcgtttatgtagataaattaaaaactgtgacaaatctgatatccttcgtttctgctgtctcttgctgcacttcgtgaatgatttgtgttctccggagaaaaataaaggctgctggcattttcctaaaaaagaaaaattggcagttccaacatcaaagggagaaagccttaaaaaaaaaaaaagaaaaaataaaaattg

SEQ ID NO: 372188 - DNA, 185 bp, Zea mays
gatgaaaagggaacaacgttcgtccatgaattggggtgtagtttatgagatggatgctctctatacaggaacagagtgccggcagaagccacaactgattgaaaaccaaaaatagaaagaatgaaaaaaaaagtctcggttacatgatgtatgtacaagatacatgatatcacccggcagcctgg

SEQ ID NO: 372189 - DNA, 393 bp, Zea mays
ttttttttttttttttttttttttttggattcttttatgcgggctggttcatactgggctaaagcttcgttacattgcacatctaaagcagagactataagacgcacactacatctgcccaggccaggtgatgcttctaaatattggcaccaccgctggacgaaagcgggtccactatgacacaagataatactgctagcaatcaaggaaaccgagcttcactgccctccttctgttcctgccatacacaacccaatagaattttgaggaaaatggaaaaaaaacctaataacatgatataaataagtactgttcaccacaagctgcataacaacaggcaaagcatcagttacattataaatgcttgactcctatctccattttcagtttcat

SEQ ID NO: 372190 - DNA, 326 bp, Zea mays
ggaaaacaaaggaggcatccagccgtcattcactcatttttatttgtacattcgaatctacaataagttaaactgcctattttcattgaaaaaggacggccagttgtctgttccgttaatatcattttatttgctccatggcattttttttcatcttgctcagcagtaggtaacccaatccaacttggggttacttttggacacttttgattggaacctttagctgatgttgcgctttttcagggctggacttttcatagacgctgcccttatttttttcccaccagggttgagcttccttttcgccaaaatgcttccgactgaat

SEQ ID NO: 372191 - DNA, 363 bp, Zea mays
gggaaaaaagatgtcacatagattgttcgccattttgatgtacattgggtacacttgaattccacttttgggctccaacacttatcagaattgattcacctagcagttcatgggaagaaactaatagtcactgttaaaatagaggctaatcgttatttggggggaactacatgtaagactcgatcttagaattggatggggccatggggggctttttttagcagccaccactggtgtttaacgttgccttcctacgacgcttgaataggctggcgaccttgtaccatatataaaacgtcgtgtaacatcacttttggcctatccaatccatcgggtataggccatatgcacatgctatcacct

SEQ ID NO: 372192 - DNA, 270 bp, Zea mays
gggacaaaaaagctttacaaggctttcacaaccctggaactgaaatctccccccctaaaggggacaactggccattacacacacttgaaccttacattctggaacccacaggttttgcaggggattttaggggttttttatccccccaaagtttggaaaaaagggggggggggaaagtaaggcccaggggaaagggaaagctttagctttaccagcttcccttaagggggcaaacggggggaaaaaagggggcaaaaagaaccgcaaaaa

SEQ ID NO: 372193 - DNA, 257 bp, Zea mays
aaaccaccttgacttccaattttacaggcggatttgttttaacccaaagggaaccatgggaatttgtattcttgactggacaagagtttttccacaggttttacaaccatgcgttggctgaacaaacaccaagggcagttacaaacattggaacctggcctacctttgggaccatttttaaaggtcaccaacccgggggggggaactggcttacaacacaatttggagttacaaaaccattgtatatgtacgggggg

SEQ ID NO: 372194 - DNA, 174 bp, Zea mays
ggggccctcacaaagggttttattgatctttgccaaaggagcctggccctaatcaccattgaaattgtccaaactttacaaacccccaaatacaaagtgggccaccattggcacacgagccatggttacacactttaaaaatacataactgacgccgggggcatcctttttgaa

SEQ ID NO: 372195 - DNA, 435 bp, Zea mays
ggagaaacatgttgccggtgtactgaccgtcaccaccacaaggagcacccagcaggccaaagaaagcctccggcagcaggagcttatagacagcttccgacaaggggagcctctggactattcccttgctggcctctaccatgacattgggctccagtttacaagccatctcatgagtgaagacaagaacgaagactacagcgatccccagatcatccgtgacatcctgggggagtgcgagcagttcgagttctgcatgaagatcttggcgcattctttctacgccagacccaaacggagcaaccaagaactgaccaagctgcgcgacagccttcaggcagtttcccccaagtcgttcgaaggcgttgctgccaagatgctcaagttctcctacaatgacctgcccaaagagtacaagtcctgcttgctgtacct

SEQ ID NO: 372196 - DNA, 512 bp, Zea mays
gacggcaatcacaactctcttataattgatgtttagtttacaaggcatggcataacctatggatacttaaccacatatataggaactgaaaactattgtacatgaagattagaattactcatagctaaccttataagtacaacaccactgtgctcccgcaatcagctgatcagcagaacttgtgctcctgaggtacgtgtttggttacccgtacaaccatatccagactcgcagcgtgctttgatcgtgcgcaaatgcgtgtttggttggctgtctctccatccgcgagctcatatgcaacatttggctcgaccctgggaagcatgttaatattagccatgttgaccttcaggaacacaccattgaagatctacaaaaataaatgctcagttttatgaagaaacaaacacaactaaaagaataaatcaacttcaacaaacaggtcctttgtcgtctctcaaaggaaaataagtacgcatgttgatcattaatccatgcaggaaaaataactt

SEQ ID NO: 372197 - DNA, 293 bp, Zea mays
gcgacttgcgagcacatgaatcactgaatagaaactatttacaagcagtacagggtacatccatgactggacaatgagtgccaattctcaatttttatcactgctaaaccatcgtatggttaccgagccagcggtgagggttttgctttagagttaaggctgtctgaacctttgacaatttatgaataaaagctccatggtacatgctatcttaaatctaagcttggagaaaagaaaattttgaaaatacaccaacagtggaaactgcaaacacccggccttcttgctgaagc

SEQ ID NO: 372198 - DNA, 197 bp, Zea mays
aaacggcaaccccctaattaattagactggatcactgaacaaaagcttggaggggggggccaaagaccgggaaaaatcccgtataacgttggaggggaaaaaaaggggggtttttaaagaaccatcacgggacttgaaccaggcggcccccgatataaaaacattcctagaaaagggggggcttgtttgacttgaaa

SEQ ID NO: 372199 - DNA, 442 bp, Zea mays
ctcgctgttccatcctgagctggttacgccgtatttgtgagggattcgggttatatttgagttgtatgctgagaacaaggatgagactaaagaattctttcaaacaacagctggtgccatttttctctcttaattttcatgagcatccaacacataaaattgaacgtttcatctaagctgagcagaacatattaatgcctgaatgatggtcttctaccaatcgtgagttgatacatgtttatgccttttatggttttcttcaaaagaaatggagcagcaacatttggacgatccacaacctgttgcggccctacctgcaagcctgcacctgtggtctctctagctattgtggtattttctcttgtgcctgtggaagctcgcttcagttccatcgccagttcggcagttcaggtcttagttccagtttcatctccagggatga

SEQ ID NO: 372200 - DNA, 265 bp, Zea mays
  unsure (1)..(265): unsure at all n locations
tcnnccntttttttttttttttttttttttttttttttttccagcgcacccattacatatgtaattttttaaaaagggcaaaaaataccctggcaaagagggagggatccactcttttcaccgaaccaaaaattcctaacaagggctgggagtgcattttatggtgaaaaccatttacatatgatgcggttttttcaggaaacctgtcatatctatgcactgcgggtagttagttggggcatcacaccatgaatctccaggggat

SEQ ID NO: 372201 - DNA, 291 bp, Zea mays
gattctggtttttgttttttttttttttttttttttttttttttttttaacaagcgggcaacctttttaattttttcgccaaggcgcacaaaatacatataccccgccccaaccctggaaaaacttggttaaaggggttttttccatgacaacgggttttacagaaaagactttttcccccctcccccttggggcttggtcggttagctctcaatccatggggatggggcgggattgggggggtttgaatcccaaacaaggaaaactttttcacaattttttccaacccca

SEQ ID NO: 372202 - DNA, 463 bp, Zea mays
cggactcgtgggaaaaattgttggatccccatccaagaaagaggtgtcaagatgtcactgatccattgctgtcctccaagagcctgggccactacttcaattatagcagttataattatccttttctttaaaattctcaccccaacctgcattatttctgtacatgtgggccggcctggcccggcacggcacagactcacaaaagcacggcccacaaaggcacggtacacaaaagtatacatatttaattatggggcgtgccttgctagcacgtgtgccctgtcatcggccacggcacggcccacaattagttatgtgtgccaggccggcctaaatagcccaaaatgccttaatgtgccagaccggtccatatacatacaacagtaataaaaaacaaaaagtatagaatatatatgaccaaaataaaactaaatgttttgtggatgcatattaaaaacttttg

SEQ ID NO: 372203 - DNA, 388 bp, Zea mays
ggactggtcctcttggaccttaatttcctcttcttattaatacaatgatgcgcagctctcctgcgtttttcgaaaaaaaaagtactagaaatgtccttcaactacaacacaaatggatttgaaaatgttagtggcaattagctactacgaaacaagtacacgtacaacacgaatcagacttactgaaccataatagtaagacatgaatatttggctgggaatgcataaggttctccaaacgttcttttggtcagctttggacttcagaaactacccattccaagaatatggagcatatgctcaactattaaatctcttatgtccctggcaacatgtacgtcatcatccatatagatagggtcaaacctgaaacttgataataaataat

SEQ ID NO: 372204 - DNA, 232 bp, Zea mays
ggggccaaaaaattttcacctggatgattgaaggggttaaagttcataataataccttttacaagggatattaaaccctcaacagccccaaaaatttttattaaaaaaaaagactttttttttggaaaggcccttggtggcaagaggcttctaggtttgtacaaagccattttttaataatttgcaaccctttttgggaatcaacaggggggggttacatgaattgccttaa

SEQ ID NO: 372205 - DNA, 471 bp, Zea mays
cttgtctcgtgggcggacgcgtgggcggcctcaagcagaggaagctttccgcccgggaacgccatggggtcgcttcctctccttgctgcctgctgctccctcctgctcacggtcgcagctcctgcccgggacagcactaccagcgtctgcgcttcgcaaatcggcggtacacatatatttctgtcgttattacagcttaatgttgtttgttttgttttaactctctgctcacggttgcgcttgaacttgcatgcttgatgaatcgtagccaataactgagtggagtagaacgaacgaactaggattaagttcctctcggaggatgtatctacacaagttcagacgtacaggagctaacttttggcagtgagagtgataaattttcaataaagctatacataatttgtgaagctcacatcaaacttaaagaaaaacgtgaaatgatggtttgttatttatttttgggggggg

SEQ ID NO: 372206 - DNA, 466 bp, Zea mays
cttattttggctttgcttacattggtgcaaaagcaccaggagggggtgcagttggtatggtccttgtaatttcccccttcctgtatcaattcatatagtaaggcctactgctgtttatttcttcatctgtatattcttttccattgtaatatcataaaacacatactttttagttcttgctgttccccctttggcctttccttatgcattccatgtttattttgtttgagaacaagttggccgcatacttgcgttccatgtatatgtcttgatattttgaccgctttgctttgtttgctctctactatcttagttattgcttatgaattaattagctattcttaatcatcttaatgttattaagccatcatcattattttttcggattggtcgtcctaccaataatacgagtcatgagccgtgacattgttgtggccttccctactattccaagatatttttaaaa

SEQ ID NO: 372207 - DNA, 445 bp, Zea mays
gtgcttaattggtcaaactttgataccggtgtcaacgagaggtatgcaggtggactcatcttgacaccggtatcaaagtttgacctgttcacgtgccgaattggtgccaattacgcgtctggtggatctggcattctcaacaccacgggaaacgggacactcacgctgcaaaaacaaatcacgctgttctcgaaaactaaagcaagaatgtcgtggggccgctgcaagctcagctctatggtatcgaggtccttgatccttatcagcgccggcggcaatgacttcttcgccttcagtgaaatgggcatgggcgaacaagacgccccagcctacatcagtagcatggtctcaacctatgtccagcatatcgacgcgttgtacaagttgggagcacagaagttggggatcctagacgtgccatcgatcggctgtaccccaggctcca

SEQ ID NO: 372208 - DNA, 275 bp, Zea mays
  unsure (1)..(275): unsure at all n locations
ttgncttttttttttttttttttttttttttttttttttttttttgggttttgtttatttttttttgtgttttttttttggggggcaaaattttttattggtccccattggcggtgggggggttcccaaaacccacgggcttttcaaatttttaacctggggcccaaaatttttttcaaacagaaaccttttggcattcaccacttttctgggtttttggccacattttggggtctcattggtgggtaacccttttcattagggtttttttttag

SEQ ID NO: 372209 - DNA, 332 bp, Zea mays
  unsure (1)..(332): unsure at all n locations
ttnnttttttttttttttttttttttttttttttttaaaattaaaggtttgggctttttttaaatggttttttttttcacaagttttttttttttttttttgtggcccaaaacgtacttttttccaacggaattacttttttagccctcagggggggacatgttcaaattgcttcccaattgaaaaaaaaggggttttttatttgggggaataaacccctgggggaatagcattttttatttccccctttttttttgttggggcagggcccaattttgaaaaggtggggggatcccgttttttttgggggccgaaaaaaatggccacccccc

SEQ ID NO: 372210 - DNA, 460 bp, Zea mays
cccactcttccgcggacgcgtgggcggacaccctcccgttcaccacttcccattccactccaacctcctcctcgggagagatccgctccctgcctcccctgcggcctcctctttctccgcgcaaactcgccgtggcagagtaatctcgcgccggcccctcgctcatatcggggggaaagaaaggttcttgggatgcccggggccggtgtgaagccgccggcgccgccagtcgaggccgcgacggggctaccgccgcgcaggttgacaccttcgagagtctccgccaagcggtcctggccgcccgggtgcggtcggttccctgcgcctctgcccgcgccggcctctccggccgcggcaggtcctgaggtgaatggcgttgatggcgccttcaccatcgtcggcggcagggccgacgacgaggccggccccgccgtcatttcgccttcggctcagaacggat

SEQ ID NO: 372211 - DNA, 305 bp, Zea mays
  unsure (1)..(305): unsure at all n locations
ggnacaacggggttccattcaaaattcattcacaattcaaaacacagtagagcggagcagaatgttttttttttctaaatgaaaacagcaagatcaaatgcagcttgctgtaaacatcagaacgccgacaagacaaggcgaactgaaaatagaagggtaccacagagacaagacagaggtgttcaaaacatagagctaacagcagtcaataatgtttcagtagagccttccacagcaatccgaggcgccacagtagcaatgtttaaccttctcctcgccatttatgtagacctcccctatcttat

SEQ ID NO: 372212 - DNA, 335 bp, Zea mays
  unsure (1)..(335): unsure at all n locations
aaattcattcaattaatcccttaggtctctctatcactgttattatcngatagatgcgagtttctgcagtaactgtatttaccaactatggagactagaacgtttcacgtcgacgttcgcgtctcagatatgcacatgcaccttacattgctagctccaaaaaaaaccgcgtgtataatcacaaccaacccaacagtacaggtgtacattgctctcaacaccaagcgtgctacacgtcaaaaaggctacatacaatacaagctgcaacgaatcgaatgtaatgaacgcaaactgaacactatagatacaatatcaggaccgatggaggacgaaag

SEQ ID NO: 372213 - DNA, 430 bp, Zea mays
ccctcgcgtccggacgagcagccggcctacgggaaggtaaggccaggatcgatctgtactgggaggtcgaaatcgctggcgagatcacctatcaaataccgtgggagcaggcgggacggctcctactgtcgccgattggacgctagggggagcgccgttcagaagcaccatgaggatctggccactcacaggaccgtggtgatcgatcgggtagggatgatcaggacaggtatcggacggccgggagaggggagagagatctacctgctgagcatcatccatgtagcgcaaggaggatcagacagcagaggcgaggtacacgggatatgaagccctccaaagatgacgcgaggacacgcaaggaacaaagagaggagagttgcaggccatcatactgaaggacagcacgggctgagcgaagatcaccacg

SEQ ID NO: 372214 - DNA, 165 bp, Zea mays
gacccacgcgtcctctgtctcgtggactcgagtactttgcttagcacactgggtgaataatatatctgttcagcatgacatgatggctttgctggatatgagaaagcttatgatgacaatcatcacccgtctctcttttaaaaaaaaaaggttaaaataatcaat

SEQ ID NO: 372215 - DNA, 508 bp, Zea mays
ccctctcgtccgcccacgcgtccggccgcgtccggcgttggctaccggccgttactgcaatcgcgacagaccggtcaccacggttcctccctgcggctcccctgccgcgtccggcgttggctaccggccgttactgctggtggggagcgccaccgccccaccccaacctctcaagtgattaaggatgtctttgtccaaaccgtgcgccatgccggagcggcgcatcgtgccggttcccgcgacgtccgacatcggcgttctgcccatggacgccctgcgcgagattctactgcgcctccaggccaaggagctctgccgcctccgcctggtctgccgtctgtggcggtccctcctctccgacccgcacttcgccgcgccccactacgcgcggcatcgggcggtgctcatcatcgccgcctacaaggacgacgcggggcgcgacgtgctcgtggacatcatggatctctccgggcaaatcgtgaagaggtgcccgcatggatggcgacag

SEQ ID NO: 372216 - DNA, 515 bp, Zea mays
ccctcgcttccgcccacgcgtccgcccacgtccaccatgagccaccgctggtgccggccggggctatggactcccccccccccacggtacgcacgctgctatgcatcttttcacctcccttgtgttttaataatctgtcaattggctttagaacctcagtggctggtgagagtatagtggccccaaggaattctggaacaatgatgtacaaatttgagaattgcagggaccgaccagagttgactcagaaggccaattgagggaagtttagtgcatgacatgcaattctcaagattcaaaaacacaaggctgtggtatttaaagagaaacactacaatgaccttatggtcatttgctgcttcagtgaaatcggattgttttccaaatcctcaacatatggattttcatttcagattgtattttcattcaccatgtttttgtctgatgcccaaattggatttccccaattttagtgttgacaatcctcgcttgtgggaagtccattttgagatata

SEQ ID NO: 372217 - DNA, 397 bp, Zea mays
ggattgacaaagctggaggaggggaatcacgtccaagcaatgacctttacacgacctctttttttttttctacatttcatgcagccatggaacctgaagagagagccatgaaagccttagcaagttggtcgccctggagagaaacccgtagggaatccaagaccaaccgtcgatgctgctgttgacaccttctcatctgcgtcaagaaatcagctgccggtcttccagccccacttgctccaaatgccgagaacccagctccttgattaccaccaaaggatccgaatccaccaccaccactgccaaagccacctccctgggaggcacctccaaaaccaccaccagatgaagctgcaccaacaaaacctccacttttggaagcaagagcagcaaaacc

SEQ ID NO: 372218 - DNA, 511 bp, Zea mays
  unsure (1)..(511): unsure at all n locations
agatagtggcatatctctaaccatggtaccggtatagttttttgaacagtaatagtacgcttaaaatggaagaattataatgatacagaactaatagccctagtatcaaagaaagatgattttctattgttgataatgttatgttaattaagtagggacacgcacttgcaccaacacatctagcttgtcaatttcaaccgtgtgtgtcattttctgtacgatgcaactgggtttagaacgattgtcactaaactgacacaacatccatgcatggtcatgctatgtctaaaaaattctcttaaaacgatccatatgtgaaattgtaggtatcaacaattaatataaaactggcagcagaataaatgtcaaacccgggcgcgtgttgtcaatcggaaaaaagaaacaaaaatgtcctttctgtgaattgaatggacgcttgtacgtacgcccacaccttcgnctcttaattttcttctttgaaactgtggtacatgctgcaccctgcaaatcg

SEQ ID NO: 372219 - DNA, 518 bp, Zea mays
ccctttcttccgtcttgttctgaggcatatatgaaaacaatcaaacatatattgggctgaccgaaatcccattgttcctaaggaacgaaaattggtattgatgcaatatataaagcatgtgcttgctgaacgtcttttctattcgtcatcacatttcttttctgctttcctaattttctcgaatgcttctttgcaaatacaccatggattaggattacctgtgggtttcaatctttttttgtaggttacgcctaatctttatggcaatttggtggctaacacagctgcaggtattgttggagggacgggcatcatgcctggagatagggattgcagctaattctttattatttgttgttttcccctctgaaaaaaattgttctggcatagcgtttcatttctgtaatttattacaaaaaataatattttgggcatgacttatctccctttgttcctacattgttacatatttgtaaagactttgtggcatatggaacttcttggagctttttgctatg

SEQ ID NO: 372220 - DNA, 170 bp, Zea mays
tttctttcaccggcaatctacccatcatctctcctgagctttttatgaggtagtaacaggcgtctgcgatcaacttactgaacctcatcattatattggggcggacgcccctcccaaggggacatccagtcacagcaccacagtaatgggggatggttgatgccaacact

SEQ ID NO: 372221 - DNA, 521 bp, Zea mays
ccctctcttccgaaacaggtccaatgtttgaatactagtttggatcctagagactaattttttagtcccgtcacatcggatgtttaaatactagttagaagtattaaatataatttaattacaaaactaattatacatataagcactgaatggtaatacgagtttattttaaacctaattagtccatgctttgctcatatgatgctacaataaaaatttgctaatcatgaattaattttgtttaataaattcatcttgttgtttagtctttgtccatctattttttataattagattgtattcaatatttataattatcatccaaacatctgctatattttgtaattaactaccgccaacagtggaaacaggcgggcacaaggcacggcagcagttgctaatcatgcggtccgtgccttgcgttcatgccagtttccactgctggcggctgggcgtctgggtgatcggcgtggcctagttgttgcgtcgatcttggactcttggtcgattctcacagtaag

SEQ ID NO: 372222 - DNA, 466 bp, Zea mays
atgggaacccatagccaggtatttgaaaatcttagcttacatgtcatgctatagcatattagcatacattgagactttcacctttactgaatacatgactttggtgagatgcataaatggaaccaagctgttttaagctgattgcggcaaaacaatgggtgaagcagctcaaaattgggatgcagcaaacgaaactaggatcgactagccagataaaaatcccctgcacttaggaaaacgtgctttcctagcagtaaactgaccggtggataaccttcgatgcagtcaactgtaatcatgccctttccagcttggaactggttcttcaatctggaaagagaccttgacagaagatatactctcaacgcctccacatgattgcttttgcctgaggcatgagaaagaagatctggtgcaagaataggggtggaccttgcaatgcatatgacaaatgacatgtcatgta

SEQ ID NO: 372223 - DNA, 422 bp, Zea mays
  unsure (1)..(422): unsure at all n locations
gaacagaaatccagnatagtgcttaatttgaactgaaatccggtagtacttcagaaccgcaacactacaaagcttccaccgcatgaaattagacaaacagtttgcacacaaccactgacagaaacatgtataaccatcagtactacttgctgagtcgctgtcactgtacataactacagactgaattcctgacgggcagggtcgtaaaacaaccaacagatcgctggcgtcgcctaaaacagccactccagtggcaagcagcaatcactagtcagatcacatcagatgcacctagcagttctcccttgacaccatggcgaatgccagccaattctcatggaagcaagccctaccattggcgaggaattcagaagggcatggaaaccgagcaacggaagcagaattgcctagtcttgctgaca

SEQ ID NO: 372224 - DNA, 433 bp, Zea mays
gtttttatcctgaattcttgaagcacctggtttcccagaatgagatgaggaaggagcttcaagatgctatttcaaagaaagaagacggcgcatcgaccaagggcctgaagctgatgacttgggggctagtagcagcttggagcaaggttcaccggtcctgtttaatgcccaggacccagtcgaattccttgtcgacggaatcccagctgacctcgagagcccagctttcgatggccacggcctgattgggccacatgatattgatattgatattgatattggcagtacctctgagcagcagcaagacatgccccaaggggatctgaatgacaacttctgggagcagttgctgaacgaaagacttggcgaggagaacgatagccctgtaatcgaggatgatatgaatgtgctgtctgagaagatggggtatctc

SEQ ID NO: 372225 - DNA, 323 bp, Zea mays
aataattcaatcacaaacaaaaaaaataaatcttatacggcaaatttaaaaaatataaaaaaaaacaccaaaggggggcggcccttcttgtggatccctcctttcctcctcctttcctgcagtcttattgtcttcttttatggggcctccttattataatcggccggccgtctttctacagctgacctggttagacacccctggctccccccttttttttctccttgcatatcctccctttttcacctgtggggttaataacaaggaggcccccgccggccgccctttccagcagtggggctcctttgttggcgattgggccc

SEQ ID NO: 372226 - DNA, 447 bp, Zea mays
cttttgttttccttgatccattacccaactcgagcgctgcacttgagctcgcaatcactgcctgtgcgcccgacaccaactgcggccacaagcgcagcgcttgactggctgactagccgtcatgactcgcggcaggacccggccgctgggactgcaagagtggggagaggacacgctgctgttgttgccgagtccgaggagacactactagtcactgaagactcagcagcagcaggggcgaccgaagctctgcgtgcgtggggagaaccggagaaggcaccacaggagggagggagggagcgcctggacgggctaggcgcagcagcacggacgccgggatcagggtcctggcggcgctcttggaggcgctcgcggcatccaccgccggcgtgacggcgcacctgcggcaggactactacacggcggtgtgcccggacctggagagca

SEQ ID NO: 372227 - DNA, 518 bp, Zea mays
attgtccacaccgaaaccctagctgcgcacccaaatcgatcgatccagggacggcagcggcacgacgcgccaaaataggttcagaactagcgtcgcgacaaaatcggttcacgaccgccacggttggaccagctgcgccgtggccgtgcggctgcgcggccggcattggcgcgctgcgcgctgctgcaggccggtgtgccgcgcggctgggcgacgtgaaacggatccacatcgtaggagcagaacttgctggtcgaggtggaggcttgctgcgtgcagcaggacagggagtcagggacaacagattttagcaaagtatgagctgtgaactagtgttagaggaaagcacgaaggaaatagtggcataaaacttgatttgtctaaagataaattggcttcttaaaatggctcagcaaatggcttcagttcatttgaatgatacaacaagtgttgatgccaagcccttgcgtacattaaactccatgttccctgcaccactagggctttacacgttcact

SEQ ID NO: 372228 - DNA, 522 bp, Zea mays
cccattcgtccggacattttgtgcaatgaaggagcttcgtttgtacgagaattctgaaaaggctcttcttagttctacatcagccaatggaactgctattcttagagttgtgcaggctttgagatctcttgtcagatctctttaagatagaaaggatccagaacagcctgctgagaaggaccattcagatgcaggttactagatgcttgaaatcaacacagcattggatgctttgtggttggaattgagcaactgcataagcaaaatagaaagctcttcagagtatgcatcaaattcccacactgtatactgccaaggggcgtcgctatatacatcatgctgctgtgaaagggggttcagggactcaaaacatattaccatatatagagtcaatttttgggacatgggagaagttgccgtctgtgcaaccctgatgctgtacaagaggcttcgacttctgatatggaagatgctttaacatctagtggtgggcagagatcatattcctgtaagctagtcttg

SEQ ID NO: 372229 - DNA, 479 bp, Zea mays
ggcagttttgcccgccgctagcaagcccgaacgagcctggtcgttctcctccccgtcctaataatcagggaaaggctcgccgcgaggctccgcccctatcgcgcgccgccagcgacagagaatgcttgcggtcccggtggcgaggatggccggccgcgggggcagggcaggggccggggcaggaacgccatcgatctggggcgcccccggcatcgcagcttctctcgcctcctaggaaatcacggagcttccgaacaggttctgtttaggaaaacccccagattccctctattgtgttttcttaggacctggcaggaaaacacttatgattaacactatgctcttctgattcactggcacagtagtagtttgaataatactcactgtctgttctcccagttgcttcatttcaccccgatgactgatagataggcgtattgatactcatatatacattcaaaagggacgacattttctgc

SEQ ID NO: 372230 - DNA, 383 bp, Zea mays
agagtagagtcgcgtgtttattgctttcatcagtgcatttggatcaagatatgttatcttcattgtcgtctggtcaaaacctaaggtgtttcataaaaataactatgaagaggaagtaagggattgcagtcctctcaagcccctccaatactcttgctcccaaacaagaccttaattataattatacttgtgtgtatcccacgaacaccatcgtccacgacaagacattccggtgcggcatactgtcgaacaactcaataagagttttcatgcagatggcatacgcatgctgccgctgctacctttgaaaagtgatcatttggtctgcacaagcgctcaccccaccaatatggcatatgtagagtcagttattttaaattcac

SEQ ID NO: 372231 - DNA, 425 bp, Zea mays
tggactcgtgggcggacgcgtggggggagagcttgctatcctgcacttgaactgcttctgcatttttataaaatttattttagtgattcattgcatcaagaaaactattacttgtggacagcctggggacatatgagtccttttaagtagatgttgttatctgctcataccatgcaatacttttcctcaacaagtggtgttgttttaaatactagagtagaactacatccatgaaaactatcactgctcatatccacgacaaagcaccagtgaacgtgtgtgcgacaaggagggaccgcctgctgttctgagtccaaccaactagacctacaactgaaaggtatgctatatatataatatggtgctattttgacgtgaaccagattggtattgtaggccacacacaaaacagggaccgataaaat

SEQ ID NO: 372232 - DNA, 296 bp, Zea mays
gttccgccgagctgcatcactttgtggttattaattttttttcatgtacagattcgactgaagtataatgtaacatgcgcaacaacaataatctactctgctgttcacagcatcttctcttgctagagacgaataagccgcttgcaaacaaactgcatttgcatgctagggtagtgttgcttacacagcattttaaaatgtggttatagagactccccttgcttagcagaaatatttctaacctttgctatttttttcatctcgccaaaatgtgccaaactaactgaagcaatatt

SEQ ID NO: 372233 - DNA, 420 bp, Zea mays
aagaaaatgatgatgtctatgcaataaaatatcactattaagatggtaatgctacacctgaaacaggggaaatggtctttttccttggagttgatggtatttagagccgcatctaatggtaacaataccttacaaatgtcaatcaagttttctagcatggccattgagttattgaagaagctgtgtgttgatgtacccataactaaaacatcaatctgctcttttgtagtttagaaatcctagtttctgcatgttgagtcctttttcttcactatcttcacaagtattggaagaaggccattatcaatgacctgcctatggacaggctctccgcaattattcagaagcatctccaatagcagctccattcctcactcgaattaatctaaactgacatgttgctgcttgtaagaacggaaa

SEQ ID NO: 372234 - DNA, 527 bp, Zea mays
cccactcgtccgctcgcaagccagccccgcaaaccccgccgctaccgcgcgcccgccgtgaccggcgagatccgctcgcccgcccaccgcaacccccgcgcgcgacagctcctgtgcatgccgcatccgccgcgatccgcccgccctcctcaatccgcccgcccaccgcaaaaccgccgtgatctggccgcccgcccacccgcctcccctctcgcctcccctctgcacgtggccggcgcatgtcgtcgaggaggagcggcgacatgcagcggaggaggtccgcggcggcggagggctgaccggcgcggaagagcgcggcggtgaggatgcgggacgtggcggtgtcggggccgcgtgtggcgcggcgcggaggagcatggcgggggctgcgcggaggagcgtcggggacgaccgctatgagcagcacaacgcggccaggatggcgttgagggcgtcggtcgtgcggtggaccgtgcagaacagggtcgcggcggcggcgaaaccgccgtggcgcgcagggtggacag

SEQ ID NO: 372235 - DNA, 315 bp, Zea mays
tttttttttttttttttttttttttttttttttttttttttttggtttttttttttttttttttttttttttttttttttttttaaaccaagcaacattcccatttttataaacacgcaggggggcaaccaaggaattatcaaaagatggctgggcatgaccaaaggggcggggatgtttaccccgggccagttttgggggcgggggccaaaagggggaggggggccttgacatccttgaggcccaccgaaatccggacgggggcgttggttaggccaccctccttggggaccgggggagggattggtgcggggg

SEQ ID NO: 372236 - DNA, 412 bp, Zea mays
gccgcggacggaattggcgggaccgacccctccggccgtttttatcatcatcgccctcgagatcccggcgtccctgacacggcctacgccgtccatcgacaacagcagcgccctgttctccggcaagctatggccaagatgagcatgctttcctgatctggtgcacgggaagaggaagaagaagacacgcacgaacaccaatgctatcaaggccatcggcaacgagtgccccaaggtgaagcacggtcgaagtcgaacttatcggcccgacgcttggtgcaggcgctctccaagacgtcgtgcccggctagctctcggtactcgtggaggaccgctacaataaggaagccgttgaccaacgggtgttggtgaaggagagcgatctgagagatttctactttaggtttcacgc

SEQ ID NO: 372237 - DNA, 101 bp, Zea mays
gcttcttctcccggctgtcgggagagcgcaacccagctagccggctccgccttcgcttcttggaggtcgatggccgcgaaggggttgagggaggtggggag

SEQ ID NO: 372238 - DNA, 355 bp, Zea mays
  unsure (1)..(355): unsure at all n locations
cccacgtttccggccgagccagaagcacccggagcagcgcacagcaacagagcacacgccgcacaccgccgcctccgcagcagcagcaatggcgcgcgccggcgctctctgcctggtgctgctctgcctcgtggccgcgcactcagccgcagcgcagaagtccacgacagccccggccgccgcgccggccgccgtcaccaccccggcggcgaccccgaccaagaagtcgcccgcgcccgccgacgtgccgtccaccaccccagccaccctggccccggacgncgcgccgtccaccacgccggccacccccgcgcccgtcgctgcggcgcccactaccccggccaccctggcaccc

SEQ ID NO: 372239 - DNA, 354 bp, Zea mays
  unsure (1)..(354): unsure at all n locations
tttnttttttttttttttttttttttttttttttggctaccaacagaaattcatatattgcatttatcagctgatgagaatctttgaactcatcgtccttttcatgacaaaaaaaaaaaacaagaaccgacaacggactaagtagcaccacaaaagggcgatgaaactactacatacacatgataagcttaatataaaacgaagaaagaacatgtgatagttatactactaagagaggactatattttgagggccctctaacttcagtgttcatcacagaagaatgtttagggtagttcctattggctgaacttgcatccatgaatgtaaggatgctcataattgatgtacttt

SEQ ID NO: 372240 - DNA, 233 bp, Zea mays
ggggggcccccaaaaagggttgccccctttatgggaaattcccctggattattttttccaaggttgtttcaaaaacccgggttttttttaagatttgatagaacaactgggctggcaaaacaaaaatttttttttggtggatgccccattctgggggggggccgggatcaacatgaactttgaaagtttgcccccctttctttttgggttggaccaggttttttttttttttt

SEQ ID NO: 372241 - DNA, 353 bp, Zea mays
cttatgtgtccgctgacacgtgggcggcagtaggagcgaaccctgcatcactagatgagtgaaggaccttgttcactcgccgtccggagttatcaacagagccattatggatggagcacatatatcgacgcctacttctgggcggacgccgagcggtgccaggtgacaaatgtgattgcaagccggatctcgggttgctatcaaagccacacgatgacttatggatccatacgcgcaagaccaagttgctgttcggttcaagatttgctgtagggttactgaggatacagtcgacaaggactgacgaataggagaaggagcaggcggcactgactgatgggactgctatcact

SEQ ID NO: 372242 - DNA, 483 bp, Zea mays
tggtgccgccgcggcgtaactggggggaccaacgcgtccgccgctttttccgaccgggttgcgagaggtttgctggagtgcaccagtggaggggcacatgagctgtagctgacacacgaataattaggaggcgatggactcgaggtcctgaaggtctgccaatgtggcagacctttaggtggaatgacggcaatctgaagagggtgcaacgcgtctaggcgcgtgacgatggctcgccatcgccatctgaagggctgatacgcgccataccctgcgctactaggcccgtggttggagctgacattgcggcattactacgccctagcacctttaaccgcaggaaactacattgactgctgaacgagttcaggcactcgatggcgctattgttggagaaggacaagtattacacaacgaggggtgcacctttcgatggaaacaggtccgactttggtagcataattaatgagaatggaaccaccg

SEQ ID NO: 372243 - DNA, 468 bp, Zea mays
cccactcttccgcccacgcgtgcggcacaatcccgtcccgatctcggggcacgcgagcgacgataaacttcctcgtggcggtgaggggcttggagtcggcgcagagctggacgagttgcaccttgcacgcggcagccacgcactagcctgcagctgcagggcagggcaggggcggagaccatggggagcccgcaccaaggacacggcgttgacggcggcgggcgcagcagcgacgaggagggcgacgccgggtcgtggcggctgcgcatggacagcggcttcagcgtcccggaccggttccaccgccagccgcccttctacgccaggatcttcggcggctcgcacgggaagcagaggaagatcgcgaagtactacaagaaacaagagaatctactcaaggatttcagcgaaatggagaccatgaacgaaatgggtggcctagatcagaatgctcctaccgaggaagag

SEQ ID NO: 372244 - DNA, 503 bp, Zea mays
cccactcttccgattttgctttccttggtggtaggtttagctgcgatttgggttatttgttttgtttccatcaggtattaataataatctaaaatggtgtgcagcttaggttaaaatcaaataatattttgtcggacggataattcaaggcctacaccagaaggaataacctaccccttgtgcggcaggccaacagctctctccatctctctctgcagtgttatttggtttactatatgcaattgcaggggagaaaactaaagaaccgttcactgcagttagaagcagcaactgctgtagccgcagcaggcttcttctacagtattttcggtttggaagttgcatgcggagagagacttttgtgtttacatctagttgacctttaaatctgcagctatgttataggtcaaaaaatcatcagttaacaggggcaaggacttgccttgatgacacaattattttggtctatctttcacttcttctgatatttaacttttttgagt

SEQ ID NO: 372245 - DNA, 525 bp, Zea mays
cgaatggagtagaataaactaattagcacaccaggttggtcttttcttaaacatcttggtagtgttcgtatttgttaagcaatagacaaatactggacttttctttaacaatatgcactttatctgataatgccgacaaattgacccataatgtggccaaagaaagccaaagcgttaggctagataaggtagatgataagctgtggacatatgcaccaactactacttgactagaagctgaaatctaaggtaggcacaagacttattcgatcaatcattagacccgtgagtagtagcacgggggtttgcaaagccacgaagttaactacttagccaattaaatgatcacactttcctgagagtttacgaacagtgggtttgtctgttttttctttagttgtttggtctagtatttttgtttatgcttcacattagcttcactgttcatggcttcatgctgattgattatccaattaggttttatgtatcctcacattagctgggttcgcctcatataaaaaggac

SEQ ID NO: 372246 - DNA, 213 bp, Zea mays
ctgttggacacaaagtaggcatttcataataagcaagatgatcaagaatttgatacagtttacactgttaactggggatgccgtcactcggtcaaaccttccacgtgaagcactgttacaaagaggtctgcacggtgacaatcggccaaccggcacaaattttgcataatgcgaccgtgtcggttgtcgctcatcctaatgcgacaggataca

SEQ ID NO: 372247 - DNA, 284 bp, Zea mays
acgtaccagcggaggttttatttcttaatcattggacggagagacagaacgttgggctgtgccatcaatatgtgttggtagaggagggcaacatttgcaggctacttcttccacatgatctttgcctggatcccgcggggctacggaactttcctcaggcgtatcgatatgaagggccgggcctagccacactgccatccaacgggcctacatatcagccattgaaatcactcagaaatgctaccctcagcggataggcaaggcattaatgatcaacgagcctt

SEQ ID NO: 372248 - DNA, 172 bp, Zea mays
gggcaaaaaggaacatgaaggggttaattccctacaccaatttggggggattacaaccccccagggggggcctatttcccaaactaaggggttttttgaaaaaataaagctttcttactgggaggccccagggcagcccaaacatttaggggtttaatttttgggtttttcc

SEQ ID NO: 372249 - DNA, 261 bp, Zea mays
gaacacattcaattgataggcagcttctactttgctgttttggtacacccgtacaagaatgcatactacgtagttttatttttgtcaaagattttagtactagctcagaatgtacaatcagggcatccgcagcagaatgtcctgacgacggatcgaagtatcgcacttgggacacgtggcgtggtccttctgcggggccccttggcagaagaagaacttgtgtggacacctcggcaggcagttgtccgccaagctcaccac

SEQ ID NO: 372250 - DNA, 363 bp, Zea mays
  unsure (1)..(363): unsure at all n locations
gttgtaataaaaattaagttcataaagcaaatatagtacacgagctctcgatagggaacattttgctacttctccgatgaccactcaatttcaacaaacccacatgtacttgcatgatggtcacaaacttgaatgctacctatagtacatttcagcaggctaagtaaatcattgccctggttgagcaagcctaacttcgaccacttctaaacatctatacatacagctgtgtgcactttacgataatttctacggtacatatcttgcgcaccttgatgtgccatgtgcagcattacaatctanttggggttcctacttttttatgcaccatacctagaaatagaagacatgcaccctattagc

SEQ ID NO: 372251 - DNA, 393 bp, Zea mays
accatcagtatggtcacgggcaactagacggagcgcgcgacggcgccgagtgcgcgccctacagcaacgacatggagagcttgttgtttaatcagacggcgtccggggacgtaataatggaggcagaagaactggcgccgacgagctcaccatgccgccggactgcagcgtcacggactacctacaggggttcatggacatggaccgctctgggctagctcggcacctagacccgccgagcctgctggcggaggacgccccgctcaagcatgagctgtgcgtcgatgtgagctacgacagccagggcaccaacggcgcgcccggagatggggcggcggtgatgcacacgccgaaatcgtcggagtgtctatcgttgagcgaccggcaggggga

SEQ ID NO: 372252 - DNA, 249 bp, Zea mays
aaaagggactgacattgatcaaaacttatacgggcccttcctacagttttttaatgttctgcaaaaagaatatcaagatcctcttggaaggatacattatacattaggcccaagcgcattttcaaacacattggggggtttccatttttggggatgcaaactcaaaaacgggttactggtactgatctcagcagcatataaaagggggggggggtgaatccctttttgaagggggggggggggaatccc

SEQ ID NO: 372253 - DNA, 343 bp, Zea mays
atatcgttcgacttaccaaagcaaatcacatcacttccagatagtaagatgaataagtgcctaagtaataacgtcatgattcttgcagaccacaaggacgataaatataggcaggtaattctaccccgggctatcaaggtggcgtcatactcaagggaaagaacaacgaaacataaacaatgaacacgacagtgcagcgtgcatggccatagcagtaaccagctgtggcgctcttctggattttagtttatatacaggacattgctctaacctcagcgtccacttgtacaaaacctccgatcttcctcgtccacaaggaccagattcaggtaatacttgacgc

SEQ ID NO: 372254 - DNA, 95 bp, Zea mays
  unsure (1)..(95): unsure at all n locations
ccctcgcgtccgcccacgcgtccgtngataaatgattgatctaagcaggaactggttaagttgaccaatatgaactaccatacacatgaacttat

SEQ ID NO: 372255 - DNA, 252 bp, Zea mays
  unsure (1)..(252): unsure at all n locations
tttnttttttttttttttttttttttttttttttttttttttttttgttttttttttttttttttgagacaacaaatgctggtgcaacagttttttggtgccggacaattttgggttttttacaagcccatgttttaaaatttcacgggtaagggtaagggtctaggccgtaaattagcaaaactaaggggaggatgcgcctatttcccctggcatatgacacaaaacggggggggaactttgccgtttttt

SEQ ID NO: 372256 - DNA, 524 bp, Zea mays
ttgtcgcgtgggatttaaatgagggcaacgagaacaacagtagcagaattaagtttttgaggacggatgacaccatttcagagagctcgagctacgcagaggagagggctgccagggagaagcctcctaaggatgactctaatgtaatcaaccccacttccttggtagaggaaccgatagtgctccatacccctgatcagattgaacatggaaattctgtgccgtcaggaactaattcatcacagatggtgggtgcagcatcgcacccgccgccaccgccagctccgcctccaaaatcattgttggggaatagtgggttgtggagaatgggacctggaagttccaacagtgtgcggattggatctccaagaagaccagtagcttggccaccagtggcagctcggacatctgcttcaggttctcgtcctttttcgcctaggtcacttcgtgatggtgaaggttacaatagtgctgatgaacagggtccctgttacgcctcgagttatgatgaatcggaaagagag

SEQ ID NO: 372257 - DNA, 298 bp, Zea mays
cctacgcgtccgcccacgcgttcgcccacgcgttcgcccactcttccgcaggagcaaagtcttcacgtgtaggaaggcttacaagaaaggataagggtatgcatagggtcgtttccatgagtggcatttcaccagagggcactgatgttggatactatgttggcggaaagaggttactggatggatatataagggaactcgggatctactgtcattgctgcagcacagcggttagtccttcacagtttgaaggtcatgctggtcgagctgctcgacgcataccttaccacaacatata

SEQ ID NO: 372258 - DNA, 323 bp, Zea mays
  unsure (1)..(323): unsure at all n locations
cttgttctttcttgctccgctccccacgcgtacgcgctctcgtggcgatcgactgggatgattcgccgnnncgccgcnncgccgncaccaacgcacccancagggcctttcaccgggcgacaaacaccacccacagacacaagtggcttcagtcattatagggccagtcccattctgccggcaggttccttggccccaaaaggatacccttgggatatctcatggcaaaacctgggattttaggccgaagggcccagggaccaaaggggggctggcaatcattttcttaggcggttatggtggtatgccaggggacctggttg

SEQ ID NO: 372259 - DNA, 267 bp, Zea mays
  unsure (1)..(267): unsure at all n locations
cccatgcgtccgcccacacgtnagaggaagaaagagcgggggttttatgaatacttacagagagctgccacgcaattgtatgcgcagacatctccaacctccggagatcttagacgccaaatctgtgccgcgcttacactggggcatatgcagactacgatggggagcgagtcggagcccgccaaggggcttaactacctatctcataaaatgaatccactttgtaagtacgagccctacgtggcgtactactgtcggctctacgcg

SEQ ID NO: 372260 - DNA, 260 bp, Zea mays
  unsure (1)..(260): unsure at all n locations
aagtgatgtttatgagttcttctcaagggctgggaaggttcgtgatgttcgtcttatcatggaccgaaactcaagacgttctaaaggagttgggattacacactgaaattttatagtttgctctacatgctgggattatcggcaatttacaagttctctgggtgnggcgtnctcatgccaagatcaagtgacttaagtggagctccacgtggagcgctcatatgtagtcacttgtgcaaacagctggtatatactcttca

SEQ ID NO: 372261 - DNA, 496 bp, Zea mays
gttggtagccacgcgcacggggacggggttctccctttgctgtcgcccccgcctccgattccgcgatgataacccaccatccctccctgatccgcccatctgtcctcaccctccgtgccgacgtcctccgtcggcgcccaacactgcacgccgtcgcctccgcgccgcctccccgattgtggtctttgcgcgccaccaccggtggaacttcgcccgtcagtggcgatggaggcaaacgcgctgtgccgcttcccacgcgtgggcccgccctgctcggcttcgtgcgtagcaacttcctcccgcttgctctcattggtgggatcatattgggtcttctagatcctactcttggatgccttgcacacaaatactccctgtcaaagtacagcacttttgggatattcgttatctcaggactgaccctgcgcactagggagcttggtgcagcgttagaagcttggcctgctggactatatggactagtatgaccttatgt

SEQ ID NO: 372262 - DNA, 558 bp, Zea mays
ttctctcgtccggacagataagcacccaataactaaaaagatggtgttggttggtgaagtatttcggttcaatctgggtacgctggaatggagtgtgattgggcggttacctttccgaatcaagaccacattggtaggatactgggatggctggctgtatttcacttctgggcaacgagacaaaggaccaaaagacccgtctcctaaaaaggttgttgggtgcatgtggagaactaaattgcacttgtgatttcctttaaaagaactaagccgttctttggttttatggtttacaaaactgtttcaatcccctcatgggcgagttctttcttggttatatatcgtaggtgaaatgggtggcgttggggactgtctgccattgccaccggtgtgttgtatgtttattcttttagttaggatcaccaacttttgcaccattttgtacagagagaatcgatctgtccaggtgctgtcgcaatcttgcaagttgtagcggtaccttttttttattgagctcttacactcatcttttaaaataatcacaacttcacttgggcc

SEQ ID NO: 372263 - DNA, 467 bp, Zea mays
ccctcgcgtccgctaccgtgtgtgcctgtcttctttcctgggagaaaaatcacgctgctccattctctggtttctttcagccgctcaccgccggtgagatcgcagccgtcgttcttatcttcttgcgccgctcctctgttgccgcttaagtattggataaaatcctgcgcgccgaggttcttcctcatggcgctcggcctcttcccagcgctaccggccatccctctgctcgccctcgctccctctgttggctcagaccgcgcccccttctcggccccatctccatggcgtccggccggatcttcagtgccgcgccggcttggagcttccatggtcgcatttctttttccctgtgatttcatgacggccctgcgtcgcatattccccgagcttgtcgccctggttgcacccagaaggttcctgccggcccagtttttggcctttttcctatggggcgttttccggcc

SEQ ID NO: 372264 - DNA, 459 bp, Zea mays
  unsure (1)..(459): unsure at all n locations
aacagtgncctcgtcacagaacacgcgccccacccgtctcgtctcgccgatccagcccggcgctcggccccgcggcgtgtgcaatggccctcgacaccgccgacgccgacgcgccgcgcttgcgcctcgatgccagcgccgccgtgcacccgctcctctccgacgacggctccacggccgcgggggagacagcggagcagctggacgccaggtacgcgccctacgcgcgccgggacgcgtacggaaccatgggccgcggcccgctgcccgcggcgcaggcggtgcggctggcgctggccgccgccgtgctcctcccgctccgcttcgtcgcggggatgctcgtgctcctgctctactacttggtgtgccgcgcgtgcacgctgttcgtggatgcagatggngggcggccgaggttggcggtgtggaggagggaggccgtgctgcgatcggggtgcgcgc

SEQ ID NO: 372265 - DNA, 306 bp, Zea mays
  unsure (1)..(306): unsure at all n locations
tcctttncttttnttttttttctttttttttttttttttaaaggggctgaatttgcttgtatatgggagtagaagacacatgaacatgaaatgaaaacccggaaccaaagtggtacggctgagtgtaacagcagccacttcactcgtcggaatggtgggaatgaacgtaacatcatctcctcaagcctcaagctcctcccttgagcttagcgatgaagtcatgcatgttacggtaactcgtgccgccctccgggacggcctttgcggcctcctcggggggcaacggcacgcccggccttaaatttt

SEQ ID NO: 372266 - DNA, 100 bp, Zea mays
ctatgcgtccggttgctgttatcgtgtgaactgttgagatctgttagcatgtgcacttttatctatttatttggtaccatcttgctatttcaccttttcc

SEQ ID NO: 372267 - DNA, 393 bp, Zea mays
cctatacagagcattgtttattgggatgacccacaagatggttcattacaaggacaacctgacattgatagattggttcaagtgagaggtgatacgtcgacaatgaggctcactataacactgagaaatactttgatcgggtggcactgaaggtatacttgacatacatatccaactcaacgatgctgtttcattctaccatcatcaatctctactgacatgaaacgtgcttactaactaaaaaggatatcctatttgagccattatattacattgaaattgtatatactaaactctctgtatgaaaaagacatagcgaatagaaaagatagagagagggcactggctagtaatatacttcagtgtcatgggaaatacatgcacatctacatg

SEQ ID NO: 372268 - DNA, 334 bp, Zea mays
gcctccagtcacacacaggacgcacatatcgcaagcagggcaagaaaactccgcaggccattttgtgagttggatggcctttttatctggccctcgtgagcatactcgtctttctagtcatccccttctacgttcattacactcgctggcagaaggttaaaggccgtttttgccgccattgtatgttttcatggtggaagctgcctactggcttcatgggctggccttaccttggccagaccctttagctttacttctaggactccaaggtctttattcgctttcaaacaaaatatgttcctgttagatcttcaaagacgcaacctttctgggc

SEQ ID NO: 372269 - DNA, 273 bp, Zea mays
caaaaacccatattttatatccataattttcccggtccactgccctagcactacaaagcaggtaaatggcctgccggtatgtcctagttcatctggattaaaagaaggaatcccaggttcccaccccaccacttatttgatcccacaggaaaacttttttttttaggcgaaaaacccgggcccttccccgggcatgggagccagttggttcctcccaaacctttcctggaaaaagagggtggcctgcaccacacgcccgccaaagaaccgccc

SEQ ID NO: 372270 - DNA, 515 bp, Zea mays
  unsure (1)..(515): unsure at all n locations
gcngtttttctcttattttactaccctgtcccctctgatctagaccaatgatttgacaccatactttttaatgagatccgaatgcgtggctgctatagcatgtgcttatcaattgtgcttattctttattaaactatttttcatatcagctgttgttttgaagccctcctttcactgagagcatttagtgtcagtaagcaatccatgaatgcataatttctgctccagtatttgtgttttaactaagttagattctggtttagatgcctatatgacactacattcttgttaagttgatcatttaattagtttggtacctccagcaaatactgtaaatatgtttatggaatatgttaaatacttctgtatgtttgcttgccttatattttgtattttttctgtatagggctttgtaaacctgtcatcctttggataggagtgcatgaaaatctgcaatccatgtgtctgaatcatgacctgctattacttttactttatcttcctaagcattaacc

SEQ ID NO: 372271 - DNA, 507 bp, Zea mays
  unsure (1)..(507): unsure at all n locations
ccctctcttccggtcgctggcgctgccactgccactggcggtttcagttagtggaggatgaactcctggttccacttccacaggctgcggcgcaagagagccggggcaggggcgatcgcgaacgccgccgccgccgaacccccgccgccaccaccctgctcgccgaacagggcgtcctactacgtgccgagccgggaccgcgccgtcccgcgccgcccggacaacaaccccaagctccgggacacgcagttcccgcgcagcccgcaggcgagcgacaatgtcttcgacgtcgtcgcccgctccagcccggcgccggagctcaagctacggcccatcctcacgaggccgcctcccaggcccgacggcggcggcggcgcggccgtgtctcccacgggcagggtgcgcccaccctcagggttccaccacgccgncacgccggaccgccgtaggcggaacaaggcggaggaggaggcctgcacgcggcgtgccagcgggctcccgcaggcg

SEQ ID NO: 372272 - DNA, 365 bp, Zea mays
gagttatgttgcaaactgaaagaaatgcccaaggtgcgtgggctccatgctgagttactcttggaggccatagacaaggactatggaggtgcacccttcataaatgggcaagctgaaggttatgatcctgaatatcatgaggagagggcgagaaacaattatggttcgaatgacagatgctgagccgtggttcggcccggcaacgtagacaggtgaaggtactttgacaggagaagggaaaacatgggaaactaccaaaacagagatgggtctgctgcacaaggctgcaaaggtgatcgacctccacctggccagtaccagatggcgttccaccatgttcagggcaacatgccttcgaaaccacc

SEQ ID NO: 372273 - DNA, 160 bp, Zea mays
aaacacctgtatattggcgccacctatatataggaatatgcaatatactaatattaacatccctccaacagagacacacatgcttagccgcgcgttacaatacacacattttaaaaatatgacgtacaaattgaacttttcaaacccatgcctggaacac

SEQ ID NO: 372274 - DNA, 230 bp, Zea mays
gtctattacagagcttaaaacgcaatgagatccaatgggtgggtgtaaggatccatgcttgggctagtggaccaaagccatggatgactcgactcctctgaaccgggataaaagaaacagcaacagcgcaaggcgcatgcactgtcttgaagagctctgtgatgttactggcatgaatagctgggatggacactcggtgctaaacaggatatgagtggctacaacacata

SEQ ID NO: 372275 - DNA, 513 bp, Zea mays
gcttaatacagtgctccaaatccatttcggcgtactaggtgtggataaggatccttgcctcgacgagtggagcaaagccatggatgtgcctacgcctcccaaccgtgccggctgcaacagtaacatcggcagccccatgcaatcttttgatgatccctttggtgttgctgccatgacgagctttgatggatactcggagctctgcagcccatcagttgctgatcacatattctccctgctgaatgatccctccgctgcgcaacagatggttgccatgtggtcatccttgggctcatctccgcgtgcttcagctgtgagagaagacatgtcgtttgacacctttcctgggcctgtggacgggacatcatcacttgctcaaaggttcaactcagcagcagcatcgagtccaactggagtcgacagagggctaaaagagtcagatgggcttgttccaagtaatggctcacagcaagggagtagcatcattccgaggtctgttggcaacgcttttgc

SEQ ID NO: 372276 - DNA, 496 bp, Zea mays
  unsure (1)..(496): unsure at all n locations
cattagtgnacaaagtcctctgaaagctatagggaacatgggttctatgggtgcattttggtcaactcaacatgctcaggagctatcttttgctgatgacaaggagccagcttttgataaagagcccattgatcaagtcagatcaaagcaatcacaggctaagaaccagaacacagcagctcgcaattcatctcggaagtctctgtctgcatcagttgatagttcccctggggatttcgaaattaggttttctgcaaatggctcggagtctaggttggaggaaaccaaaacggtaataacagagaataaaacaaagatacaaactactgccttcaactcctgtgcgtcagactttgataatatcaaaatgaactcacgaaacactactgacagtataaacataactagcaaattgaaagagcttcaattggaagcagaagtaactttactcaaggaacaattaaagatagcaaacctggagaaggaagaaatttcg

SEQ ID NO: 372277 - DNA, 361 bp, Zea mays
gccgacaaaggacagaactgatgtgtgcatcttatgaagtgtgaatgtatatacatagttcagggacaccacaacgggtcgcacccctttgaaattagatcacataaaatattttctaacataataaatatgtacgtaccaaaaactatatcgaaatgtataacgttattagagagaaataaaaagaaaatcttttatacaagtgtacagagagatatagagtagaaatatataggatatggtttaagatagttgggaagctgcgaaatctccctcatgcaacgccacagcagcagcggactgcaactaataaatgccaccgaacagtccaactagaagtctagaatacaatggatcaaac

SEQ ID NO: 372278 - DNA, 176 bp, Zea mays
aaaacaacaaacaagacaaggagccagctatcgaaaagagcccattgatcaagtcagatcaaagcaatcacaggctaagaaccagaacacagcattccgcaattcatctcggaaagccctgtctgcaacagatgatagaacaacacaccaaacacacaaacaacaaacaacaaaac

SEQ ID NO: 372279 - DNA, 575 bp, Zea mays
  unsure (1)..(575): unsure at all n locations
gctggcacgcctgcacgtaccgggccttaatggctcgatccacgcatccgattatgtataccttatattggattttatctatagcctaccacaactttcttggaaaaaggtttgttgttgttgttgtagatgtattaaaccatttaaatttgtggttttgggacaaactaaaataattgcacaactgtctcattaagtattagctaataccacatatttccaagcacttacccagttctttcttctttcccatgtcgtttgcacttcactgctatatgttttggctaagcttgtgttgcgagtcttcaaatttaagttcagtttcaacatactaatagtaaatgaacctggcaaagtagctatctgtgttccaaattctgctgccagcaacacatgtggtgatctgtactgctcagtatttttgctcttttgccttgcgtggctaatcaattctagggtctttcctgacaatggatcttttggacttcatgttcctaaaatcaaatcgagcttctgcactttagtttctggttcgaaatcttntggactcttgttttctggtctgtgttcagcgc

SEQ ID NO: 372280 - DNA, 591 bp, Zea mays
agctgcgcctcctgcagcgcgccgcggcactgtaatcggccgcggacccacccactccgatttttttttcagacttgctggaagctcgtggtctatcactttcgtcagttctgatgaagcaactcagaccctctgttgagcaagcattagattccaatttgaggagaattgaagagagtactgctgctttagctgcagctgatgactggatactcacctatcctccaactggtatacgtccactggctagatcatctggtaatctggcactccagccgaagctctcaagcagtgctcaccgtttcaattcaatggttcaggatttctttgaggatgttggaccactggttagcttacagctaggtggttccgcgatggatgggcttctgaaaatattcaactcgtatgtaaacttgctgataagtgctctaccagggtcagtggatgatgaagttaacttggaaggtttggggaataagattgttagaatggcagagacagaggaccagcagttagctttgttagctaatgcatctttactagcttgagagttgctaccaagagcagcgatgaagcttgactctatgaacc

SEQ ID NO: 372281 - DNA, 378 bp, Zea mays
gctgcagcgacgcatacaaggcgggggtttttaagccatttgcccagcctcaaaccgccgaaatcaaagcagcaaaaagcatgactgacgcagagcaggctagccttcccaagacacaggatatctgaccacaggatagtagccactgctgcagacagcgagacggtcaaagcagaccataaatctaacgaaaacccatgaccatgctgactgcgcgggatccgagacagcgggcacaatgttcaaagactagcagctactcttggggaagcattccttcgatgcatagagggttcttctgacacccttgctattatggaaaatgggcaagttatggagattccgcatctgccccaacttatccaccttgttattatt

SEQ ID NO: 372282 - DNA, 182 bp, Zea mays
ccaagataatcctccaggcaaacgacacgaccacaggggggctttaaacacaattccgcgtcctaaaaaccatcatacaacataaaacattcacactatgaaccctcataccaaaccatcaacatctacctacaacaacacaaatattataaaggccagaatacaggaaaggcacaacttac

SEQ ID NO: 372283 - DNA, 259 bp, Zea mays
aaaaatagtaattttacacgttttccgggcattcatccaccataaatatcccgcagtctaatcaccaatctaacaattctgatggaccaccaccaccacagctaggtgcttttttccggggccaacaaacacgatgttttcttacaggtccgaggcaatttatccacatttccaggctacaaaactttttaaactgcaacgggtgctccatttccctagcctgccctccgtgcatttcaaaagtttacgcagagagagc

SEQ ID NO: 372284 - DNA, 365 bp, Zea mays
cttgataaaacgtaccacataccacatctctgaaacctatctgatgagatcgctgcagatggatgaggcaacggctggtctagctatagctggtgactggatctccattattgatcacacaatgtacaagtggttagacatactggtgcatagaaccaagaccatgatgacgttcaaaattcaaacacgacaccgttcacttgattttgctgtataatttgaacctttgcacaagatgtttgccagatatgctgttctgatagactaagtaagatagagcctgttagtctgcatttgtaggtaagccacctacggaagcttaactactggtatattttgcatatttggctatatgtggactgatt

SEQ ID NO: 372285 - DNA, 555 bp, Zea mays
  unsure (1)..(555): unsure at all n locations
actataaatgtttaaagaagttctattgtagttttagagatagcttcttataccctggccctgcaaaactgagattactttggcaccagttagtgctcaagttgatcgtgccatttccttttttttaggttctcctattattataccagaaacatgtgcagcgtggattgttccacttgttacgcacaagatgcatgtgctgtgctaggttccttgatgacacagctttatctgtctctagaatctaagggcgtcagcaatggctgtctgatgtggagcttagagaagaataaaaatagtaatttatctcaccactagtatatggtcctacacttaatacactcagttttttgaaatacgtgaaatctcctatctatttactcgtcactagctattttcgttttctccacattttctatccacgtagtaaagagagtgaatctaactagtgaaatagctagccatngnggacaccctaagactatctctaacatattaggcaaatggctcgtcagcccaaatttagctcctcacagcaaataactctgcacatac

SEQ ID NO: 372286 - DNA, 391 bp, Zea mays
tgctgacgccgtcctcgctgctgcgctcgcccacggtgcgcaactgctcctcgttccaggccgtggttgtcgacgacccggagcccgacgacaagaaggcgcaggcgcaccccaagcccccgccccaccacttgcaccccggtggcggccccgcccacccgcggctcgtcctcgcgctcccgctcgccttcctgctcgcgctgctcctcctccgcggcggcagcgacggccaccacctcgcgctcctcgcggcgtccgcggccgtcgcgctcgccgccgccgcggggggccgcgcgcctgcttccgggacgtctgcgccgctcgccaggctccgggtcggtccaggtggttcattcgggacgacgacgaccagccgcagaaagcgggcgga

SEQ ID NO: 372287 - DNA, 501 bp, Zea mays
ttttctctcgtcgctttctttcctggtcgcgccgcccttcatcaggtctcctccgccttagccggtgaagagcgaccaggcccaataaataatcaccatggctcatcaaaagcgtgaaggcagctacgccgatgatgatagtacatccaagcgcatcaaaggcaccgacactgcttctgaaacgggggacagtgtagagtctagtgtttcacagcaaatggatgctgaagctaggaggacctgccaaaaggaaagcgaagcaccatcggacaaatgcgtttcagatggggaatgcgctgcaaactctaaggtttcgggtgagcagaagatggtattgactgttgtcgaggctgatgcggcggacgacaagggttgcaggcacactatggaggacgcctgggtggtgctccccaatgctggtgcagaatccccaggaagcttgaggtgcgtacattttgcgatttatgacgggcatggtggtcgcttggcggcagattatgc

SEQ ID NO: 372288 - DNA, 428 bp, Zea mays
tgatttgcagaaaaatgcgctgctctgtgtgcagaggctcttccttggcgcaaagtatgccagttttctgcgggcttgagagttttcatgattcatgagcttcatgactcggtccttggccttgaggtctgccaccacgattcggccaggaagaggacgtgctaagaagcctagagagggcattatttattatgaaaaatacatctgaaacaaagggtcttgcatttgttttggatggttgggcacttgaattaattttgaagcattccaaggagtcttttactaggttggcgatgctgtcaaaaacagcaatatgctgtcgaatgacacctttgcagaaagcacagagttcaagtttcttaagagattgatacttattcatgggcgttattcatacaatcgaacagcatttatttcacagtactcct

SEQ ID NO: 372289 - DNA, 499 bp, Zea mays
cgtgtcgcgtgggcggacgcgtgggaagtcctagcgtttctcgtgtttatgctccgctgcctgcacaacaagattgtgtcagatatgcagagcctatttcacatgctcgagcctctagctatcctgccagcctctatccatggagaaattttgataattatttctttggacagcatgatcccgatcctcttctctcttgccgccatgatggcttctatcaccaagctgcctgttcttgcttgcactgttgccaccaagaattcttgcctatacagggaaatcacataggcttccatgatcaaagggcaccatatcttctgaacaattatggggcttatcctgtggacagtcccttacttggtcagcaaagatacagtgcaagagttaccaatactaccttgcagcagaatcacatgagggtcaacgttagcaagaaggctgcacagacttgtgagccagtcgcaggtggtgctccattcaccatatgctgcaattgcta

SEQ ID NO: 372290 - DNA, 299 bp, Zea mays
ttctcacgtcagactccaccacactcgctgtgcaggtagctggaacggggacaagacggaagaaaaactagatggaccactcgatcgacaacacgctcacgatcgaagtgaggagcgaacgataaggtggccttttacaaagcgtcggactgggtgtatcgctaggtagctgaggaggatggagaggcggatggtgggaccaggagtggtgtcggccgtcgtgtgggcggtcgtggaggcggtctcgacggcggagtagctggcgcaggagttgtacgtcacgctgtaccacacgctgt

SEQ ID NO: 372291 - DNA, 236 bp, Zea mays
cccccggcagaacccggggggacccacgcggccgcccactcgtccgcccacgcgtacgacaacccgtgggaaagactcaggccggcaaagaagatctgcgagcgatgactgccaccaagcagctcgcatgggcaatccaccagacgcaagcgagccccgccaatgctctcaaccggtacggggccaggtccgcggcgaaatcggcagacggcatgcctcggggcgaggccgcaagg

SEQ ID NO: 372292 - DNA, 316 bp, Zea mays
gcgcctattcgttcggagcatcacgaccgtggctaccagatgtaacatcctgcgcggatgctgcgtcgacgccatacgcactgaagtccgaccagcgcctcgtcgaggtgttcacccacttcctcgagaagctgatacgcctaccggatctcacagccttcgtatctgacttgatgagtgagtcaaaggggcgcgacggccaggaggggaggaggtggagcacgcggaggaagcaaacgaggagcgggagtggagggaaggacgcaacgaggcgataggtcctgttgagccagagctggagatgaaagcgggtgac

SEQ ID NO: 372293 - DNA, 239 bp, Zea mays
gcgctctcgtccagctcgagccaaccagacaagctgggggatactgttagcgtgtgtgtgcgagaggacccgtgtcagccgcagggctgccctgctgctggccctagggccggcggccccgagcctggcctggacgagactgcccgacaccagacacactgactgcggatcttccatcgctaggccaacacctgaccccctgtgcccgccggccgagaacccactcaccactgggccta

SEQ ID NO: 372294 - DNA, 340 bp, Zea mays
gggtatcccccgctctgacgccgttccaggaggagggccttgcgagatggaaaacaccttcttcctcctatgcgggtgcggggaccagggcagcctgggggaggtggagaatgagcggccagtttcatccgactggagatcacggaccgtcacttgttcaaccacgtctacagggtgtgcgtgagaaggatgctcaccacacgcatacagtgcctggacctccaggtcatgaccaagagcaagtataatggctgttaccaactgatgggcacaatgaagcacagagttgccaaggaaagtgctcatgatgctttctataaattatagaatccccagtaac

SEQ ID NO: 372295 - DNA, 311 bp, Zea mays
acaagctctctcacatcaagagctgagagtgtattgggccctttgaactggatctcttacagcttcatagcgacttgtggcgacttcaggattggtagctatgaaagctgtgctatagtgatcatgtaatctcaccagatgaaatgggataaagggccatgcgtgcttatcaaaagtcatctcacacaaaggtgatacctgggctgccaatcactattgttgctgtgactgagatgaagatgctccacatgatgtgctgcatgcctgcaatgtgtatgacgtactggtcgtctatgatgaatgccatggca

SEQ ID NO: 372296 - DNA, 276 bp, Zea mays
cttatgcttacgcccacgcgttcgcggacgcgtgggtgggtgctgagctcgcagcaggggaaggcgaagagggccaaggccgccgagagcttccaggagctcgagtcccggcgaggaggtgttgtcacgcgctgcgggagacgggcatctccaagcccacggagacccagtgcgttggcctgcccgcggtgctggtcggaaccagcgcaggcttgtctcccacaccggatcccggaagacgctcgcctacgtaccccctgttgtgcagcttacttc

SEQ ID NO: 372297 - DNA, 428 bp, Zea mays
cggacgtgcgggcggacgcgtgggcggacgcgtggggggacgcttggtcggacgcgtgggctgacgcgtgggcggacgcgtggggttttcgaccctctccagtggagggaacggggttagcgagcggcctccgctgcgacggcaacggcgtgggagggccatggcggcccccgcgctcgccttgcccatgttgctggctgcctcactgatctccgtcgccgctcctgcgctggctcgaaggccatcttgccctgatggttggcaaggcggccctgttcagaacagatgcttcatgtacatatcagcctccctttcttgggatagatccgaggctgtctgccataactacagcgggcatctcgctgcagtatcatcaatccaggagctaaacttcgcgaagtctctttgtggatcatcatacacaggat

SEQ ID NO: 372298 - DNA, 322 bp, Zea mays
ccgcctcctcagcaaccggccgcccgggggccgggggatcttttaggccgccaatgggacgccacgcagatacagccttctagacacacgcacaccacaatagaggccggcacatatgacaggaccacacaggccctagtcaaagctagggcagagaaggaaattgcactaggatgcgaaaccaacggtgcaccgcctacggcggtattaagcatgaggcaggaactgaatgacttgcaggaacgacccaaaacccaccacgagaccacacccatgatcaagcaggacgcagaccagtaggagccccaagcctgcgggcacc

SEQ ID NO: 372299 - DNA, 180 bp, Zea mays
ctcgtgctcccgcacccgcctgcgacgcacacagggggatactttcagaccgcgatagctgtacactccgacacaccacgaggaggcgtccaccacaccaaggacaacgtacgctctgctaactcccatactccaactctgcatctccaacaaccgcacgcaggaggagctacaacacat

SEQ ID NO: 372300 - DNA, 339 bp, Zea mays
gtcctctccgccaaaaggccagcccgggggccgggggtatctttactggccgccgaatcggtagcctactcgcgcatacgatccttctagacactcagacacgcccacgataaaggccggcgcattctggccatgaccacacagtccattagctcatttgctagggcatgtaaagaaattgaactaggactcgaagccattggtgtaccagcatatggtggccccaagcatcaggctcgaactgaatgacttggaggagagtcacaaaacccattacgagaccacacccgtggtcatgctgcacgctgaccagctggagccccaagactgctggctccc

SEQ ID NO: 372301 - DNA, 299 bp, Zea mays
tttttattccgtccacgcttgccgggacgcctgagctgatgttgatcaccctgcaccggatggcgaagatgacagaccccatccagagctgcctggacctgctgaccaaccaggaggtgctgaccgtgctccacaagaacgtgatctgcaccatcacggagacccagtcgctgctgctccgcctcgacttggacgacatctgcagcaacctgctgaccgacagcatatccgggtagatcgtcgacctgtccatccttcttgcgcaggacctagggcacaaccaggtaacggtcagcatg

SEQ ID NO: 372302 - DNA, 110 bp, Zea mays
gtttttcgtgcgaaccatccgataacgtagcaagggtcatatttactggaggccatggcgtaaccatactagtacatacggtcctgcttgacgctcagacaggcccacga

SEQ ID NO: 372303 - DNA, 278 bp, Zea mays
gtcatgtgcgcgaaccggcctaccacgtagccggggggatatttattagacgccctagcgttaccctacaagtccatccgttcctactagacactgagacacgccaacgatataggtcccagcattatgaacaagaccacaaagatcaatagatcagatgctggcggacttacagaactcgagctagaactccaagacgtccaagttccatcagtggtggcccaaagcaacgagctcctactaaatgacggggaggagcgaccagagttacgtcacga

SEQ ID NO: 372304 - DNA, 331 bp, Zea mays
gctatgtgcgccaaccggcctaccacggagccggggggaatttttatatacgccttagcgttaccccacaagtccatccgatcctactcgacactcagacacgccaacgacaaagttcccagccttataaccaagaccacaaacatcaataatcagatgctgccggacataacgaacacgagctggaactccaagccggccaaggaccagctattgtgctctaaagcaacgagctcctccttcatgacgaggaggagcgacctgagtatcgtcacgagaccacacccctgaacaagccccacccataccatgaccagcacaaggtcagcgg

SEQ ID NO: 372305 - DNA, 162 bp, Zea mays
gctatgcgtgccaacagtcctaccacgtagctggggtcattcatactggccgccttagcgataccctactactacatccgctgctcctcgacacccagacacgccaacgacataggtcccctcattatggacaggaccacaatgttcattgatcatatgctg

SEQ ID NO: 372306 - DNA, 259 bp, Zea mays
ctaaagaaacacctctcacacgccaggggccaattttatataccgcgatggctggacaccccgacccacacccctaagcagcggacatagatggacgataacgacttaattcacaggcttagactaaagaccaccatctacactactcgtaggatgccctacattcgggaaccggagtagaactccaaagaacgatgcatccagctggtgtaatcggaggcaacgggggcctactatacgttaaagaggagaggccaag

SEQ ID NO: 372307 - DNA, 332 bp, Zea mays
gttatccgtcccaacaaaccgccaacgcagccggggggaaatataagggccgcctaagcgttacacaccaagaacatccgcaaccacgcgccacagagacacgccaacgacagaggcccccgccttaaacacaagaccatgaagatcaaagatccgatgcacccggacacaatgaacaccaactggaacacgaagccggccaagatccagctatggaagcccaagccaacgagctcctaccaaacgacaacgaggagcgaccaaacatgagccacgagaagacaccactgcaccagctccgcacagacaaggagaagcaccaggactgcggg

SEQ ID NO: 372308 - DNA, 210 bp, Zea mays
ccggggggacccacgacgtcgcgcgactctttccaaccaaccaacaccgcagcagagggggggccattgtgaacaccaaagcgtgacacaactcaaacatactcacccgctcgcgcaacagacacactcacgacaaagtgcccccccttataggaaggagcacacacatcacactgcggacgtgccagggcacacggaagactagatggg

SEQ ID NO: 372309 - DNA, 325 bp, Zea mays
cctatgcgtccggccgcgcgcgcagccctgcaagcgcgctggcatcgtggctttcggccgtgcggctggtacaacatgcgctagctattgctagttgatgcaacgttgccgtccttagacgcccgtccgtgagcagggactgctcagatccgtcattatgacagggcacttgcgctggtctcgtgtgtatgtgatgatcggaaacggagtcctagctgacgacagattaaggaacgagaatcctagtacaccgactgccagctgatcgtggatcaggctgaatgagggtataatcattgtccttgtgaagatggagccaactata

SEQ ID NO: 372310 - DNA, 561 bp, Zea mays
cggtcgctcgggaaacgctagagtgtagacggactgagggagagccctcctcgtctcctccgcccctcctccaggtttgcgtgagatcggcgagcgaatcacgcacacagctgtaggatggagtggggatttgctgtctctccctcttgattgcagtttaatcctttccatttcatccgtccgttcctcgtccacccgagtccgttgaccgttgaagtacagtgggacagggagcaaccgccatcatccctgttcgtcatctctcccaccatcaacaccaacatgggcagcaacacggaaagggccaggaaggcgttgggcgccatgaagctgatcggtttctctaagaagcaagccatcccaagactcaaggaactcctcaaaatcttcaacaacaactgggagcccattgaggatgagagctaccgtgccctcgcagatgccatcctcgataggcaagacagcatgcaaacccctccctcccaacagggcacccaagcagcccatgcggaccttggagcctctagatcaacatttgacgatcgggcacaatatctttct

SEQ ID NO: 372311 - DNA, 292 bp, Zea mays
gcggcgtcgtgcaaccaacctcctatgcagctggggtgggccgttgtgaacgccctagcgggacactacgagtacatccggttccgctagccacaagagatacgctcacgacatagttgccctgcttatagagaagctcatcatcttcaaacatgaggtggagtccaacactcaggacaccagctgggtcacgacatgggccatggaccaacaggatgtggactaggcctacgcgcgcctacttcacggtgaggaggagcgaccagggtacctacacgtgaagaaaccattg

SEQ ID NO: 372312 - DNA, 313 bp, Zea mays
gtcatgcgtccgcagcaaccgcggcggcggccggggggatttttatacagggcaggagctacccaccacacgcacagactccatggcgtgcgacgaggacaggaacagggaagagctgggagatcccaagtacagaccgacaacaacatccacgctgagcgcgcggacgtaggagcccctgcctgggccgccccagaggagcaacaacaacggcggcagcagcagccagtggacaggtccggactgtgaggacgaacaggccagggtcgactcacgggtcacaacgaatcaagaaacagcgtgcgcgggtgac

SEQ ID NO: 372313 - DNA, 380 bp, Zea mays
gccgttgtttccaactgttgtcggaacggaccaagcgggcgtgttctagatgacgacgctggccataaggttgagtctgacgatggcaaagatgtaaccagctccatagaacgagattaccagagttggtaacgcgaggtagccacgatgcatatgaaggtacttgacaacaccaacgtagtgggatggcgtgtcttcacgggatcgaagaactccttcaaccggagaagaccatgtgtgagagactcacaccgataaatccacatcgatcatatgctactgtgaggacgtcaacagacgacaacgctgctggccctatatgtgacccataggcaaccctattgcttggtgaaacatcacgcgagggacgacatacattt

SEQ ID NO: 372314 - DNA, 377 bp, Zea mays
ccctcgtgcacggaaaaagtaatccgacggaaacgacaggggctttttgagggcggagacggtaaggccccgggcgcggaggcacccaacacatggcatcagggagggtgatacctgcctcctcgacgacacacacagactcagatctcgcgcgcctagcaaaggccgacagcaggcccggcggcgggggcaagaggccgggctccataaacattgaggagctgctccccggcatctacagcgacatgcccaccccggcgccagccgcgtaggaacacggacgcccaatgaccctggccccggcgccagagagcgccacgcggaacaccgcggaggaagcgcagaaggagatcactggcagaggtggcagtggggaa

SEQ ID NO: 372315 - DNA, 472 bp, Zea mays
gcctcgcttgggaccggccatatttgcccagggggtgcattttgatttcgcgagatcacaaggacaaccacagcggcaggggctggttccccacatgcaacagaagccaggcaaggatgtactccgcccggacttgaacatcgggttcccatctggacgttcaccaccagcccgacaatcgtttggcatcaatttggaagcacagcaaccagaccttgctttgcagttatgagctggggatagacactaccgggatttatgccacatggcatcatcgcagctaatcaactcatcgcgtcgctgtacaaaagatatcatacaatggatggatggacactgcttgaaatgagatcatgtctactgggggcattgtgataggagttcaaatcccagcattcggagaaatgctttgggagtttgggtggcatacatgtaggtaggatactaacaatgcccatgatcagaatacttt

SEQ ID NO: 372316 - DNA, 401 bp, Zea mays
tggtgcttgggctcgattgtattgacgaacaggggggaaatgtttgactggagtgggtgttaaccccgatgaagcggcggcttcgtagcctaaagctagttgatgacaatgacttgagtggggcttcacttcaccttagcaatgtgctaaaactggagaatgaagaatccaaaacagatgcacaggttgatggcccccttcgcgaatcacctgaggatgatagacatggaggatcccacaagttcgataatgagaaccagaaagttctggatatcacagagggacaattgctgactgatgactactctcaagacaatggtacttctgttggcagaccaaatgggggaggtgcttctgattctgcattgcttgacaaaaccaacaaaccccctgaaagaaga

SEQ ID NO: 372317 - DNA, 259 bp, Zea mays
actccttgttctgcagcgccacagggcacgcgagaagccgtggagcgctacagaacggagatttcgtcgccttcgttccctccaccgatctggtcgctcgccggtggctactcttccccgaccgccagcatcggtcctggcgacggccctctacactgcctgtgctgctgctccacgccgaggacagatcacctcgctccctcagctggcagacgagcccgtacgaaggaccgatgatcgggacatagcgggggaactc

SEQ ID NO: 372318 - DNA, 329 bp, Zea mays
cccactctttcggccccgtcgatctcgcatggccaccggcccgcgatctctccacgccctcctcggcggcggcgcaggtacgcgcccccctcctctctccggcaacgccatgtattgttaaaatcgctctccctcccacggaatacccgctgatcgcctgatccctgactgctcctaccctttctcgcgtggggacccgctccagtcgccgacttgctgctgtgtaggcggaggaacgcctcggcggcggccgtggtgggcgccaccgcggtctggttcgtcttcgagcgcgcgggctacagcttcccctccgtcctgtccaacgccct

SEQ ID NO: 372319 - DNA, 348 bp, Zea mays
ggcatcttctccacgcttcttctgctgctgctgggctccgttgttctctcgtccctagcctctgaggctgactacagcgggttcactacctccaaggcatactaccacgacatagcggcggggactagcccgacggccatgctcatcacgcatggggcggtgtccaacacctcgtgcaccagcttgggctcgatggtggccatcgaccacccgatgacgactgggccgacgcgcgcctacttcaccgtggtggggcgagaccagggcacctacacgtgcatggaccattcgaccttcgggctgctcacggtgacgggctcagtgtccacgggcacggagcacaagggc

SEQ ID NO: 372320 - DNA, 335 bp, Zea mays
gcctcgtctgccaagcaaacgccaatggagcagggggccattgtagtgaccgccggggctggacactactacaacatccggttccgctagccaatgagacacgcccacgacagggtgcagaggcttatagacaggccgatgatcatcaataatcatgtggaacaggagatactacactccatctggagctcgacatgggccagggaccaacatgatgaagcctaggccgacgaactcctaccaaacggcggggaggagctgaccagggtgtcttgacgagacgacacccttgcacaagccggactcgtgcggggaggagcccagggactgcggga

SEQ ID NO: 372321 - DNA, 407 bp, Zea mays
atgctgctttccaactggcagacgcagaagacggggggtcatgtttacatccaacgggccgtcctcccggtctgcatgcaatgaaacgaacctgcaggtgaggatgacgcccggtacaatggctgcacgccaacctctgcaagggaagcaagagctgcagccatacgatggccgtgaccctccagcgctcgaaggcagcccagctattgtgccccggccgcaggaaagcgccgatccaccggccgtgccggtagcgccgtcgccggacatagacccagcgccaaagtcagcgaggagcgccacagaagcgaaggccctgaaagcccacagagaggcccagcggcggcgccaggagaggatcaacgctcatgcggctacgcttacgaggatgggtcctgataccaggc

SEQ ID NO: 372322 - DNA, 234 bp, Zea mays
gccactcgtccgcggtggtgttggagcaggccgggggagactcttatagaggccggcggtgaccaacgggcactgtctcaggatgctaactatgaaacatgctccacaaattgcacagacctgcacatggagctgctgacgcgcatcatgtcactagaggacgatgacagcatccacattgtgtgctccggcgcctgcacaggatggagcaacacctcaacacggtgagcagca

SEQ ID NO: 372323 - DNA, 515 bp, Zea mays
ccctcctgctcggtgaatgctaaagctccagcaccttgagcaagatgctttttatccaagcagctatccttcaacagcaccaacaacggaccaaaggtcaaacagttggctgatggggtgtctagcaagttaagacctgcagaacattccccaagagatcctagagataagaaatccatcaaaaagattgtacaatcaggatccttcaaacacgagggttcagattccatagttgctggatcatcaaaaaaaaagcaaacatttcatttgtctcaagatgaaaaaccaggagtactgaaggtaataaaggaaaataatttaacagaaagaagggcttcatttagcttgaaaaaacgaaacattccttcatctccaaggcctgacagctgtatgaagtcaggggaaagaaaaaatgatcaggatatttcaaggtctggaacatgcatacttaaaagtagcaaaaaacctggatatgctgaaaagaagcagaacaatgatttgttcagaagtgataa

SEQ ID NO: 372324 - DNA, 422 bp, Zea mays
cctaataccctaaccgaacgaccaaagacaagagaggcacttaaaaaacaaagggggcgctgcacccaaaccgcaaacgacacagatccagtggccccacgaagaaaagagaactaccaaacccatgaaaaccaacccaagcttatgcaacaacaagaccgcccatcaccagaaaactattctcccctcccgtccgccacaagaagcacgcccaccccaggccatgtaccgagcacaacggggaccacaacccctccctcaaggcgaataaacaaaaatacgggtgaaaaaaaaacaaccggtgccgtacgaggagagggcaagacaagccacacccggagtccaagacctaggagccaccgactacagccgcccactcaaggaccgccaaggcggcgcctaccaaacaagcccacacggcg

SEQ ID NO: 372325 - DNA, 408 bp, Zea mays
cggtctcttgcgtgcgctcggacctttgtacttaaatgataagatagcgcttcaggtgcaagtcaatgttgagatagtttacaaacagactgcaactctagaaacatagacttaccactgtctgatatgaatgaaaatgatcacacctgcatccaacctgaaattgttcctgagagtggcgtcgaaagagaattcatgtgctttaggacacactccaagttcttagaaagccaactccttgttgacgtctatggattccaatcgccgggtgcgagtgctacattcactgtttacacctctcttgcttattacttacagagctatttttgcgccgattaataatggtcaactagctgggatgatgcatggtgaattacaaggagctttgggatctttgccaatgatttt

SEQ ID NO: 372326 - DNA, 242 bp, Zea mays
ctctttctttagacggctcatgcacgcttcagggcttaggactctgccccatggcgagtgagacggtgacagttcccatttcaggctgagaccaaccagttgctctaactcatcactaacagctgctactccagcaaggagatcttcctcgagggcttatctccaactctggaggtgcgctggacatgatcaggttggatagtctcacttacaagatcacgcgtgatgcgcagcactgcgct

SEQ ID NO: 372327 - DNA, 145 bp, Zea mays
ccctctcttccgcccaaccctccgcgccaaggtgggcgccgccatcgcaccactgctatacctgagcgggatcactgctcaaagatatgattgtgcaacctgaggacgcaggcccgcggcttgattatcatctgaccagctgcca

SEQ ID NO: 372328 - DNA, 382 bp, Zea mays
gatgattctgcgatgacacatagcacagccctatagggatcaggccatctatgtttatgacttacagatgaactgctggacgctgaagcagatccttgttataatggcaggcatgcctgacaaacacatagtgatggaggtgacgatgataagctaatggatgctggaggccgcaggtcaagcggcctaacaaaaggacatgcttgtggaaataggtgctaccagcatcctaagcatggagaatggaactcagagacgtgagactataaagagcatatctcgtacgcatcacatgagggggatcagcactcattagcaacaagagatgcgtcgctagacacatgaaagcattgtgcaccacgcacgctggtgaaagggaatg

SEQ ID NO: 372329 - DNA, 402 bp, Zea mays
gattattttgcgatgactcatagcacagctgcatagggatcaggccatctgtgttcatgacttacagatgaaccgcaggacgctgaagcagaccctcattataatggcgagcatgcctggcggacacatgatgctgcatgtgacgatgattaactactgcatgctggagaccgcatgtcgaggaccctaacacaaggtcatgattatggatataggtggtatgcagttcctaagcatggagactggaactcagtgacgttagactagacaaagcatatctcaaatgcatcataggagggtattaagcaacatttagcaaccagagatacgtcgctagacacgagtaagcattctgcaccatgcacgctgttgaaagggaatgttcaaaagagtgaaaattta

SEQ ID NO: 372330 - DNA, 382 bp, Zea mays
gatgattttgcgacgtcacatagcacagccctatagggatcagaccatctatgtttatgacttacagaggaactgctggacgctgaagcagacccttgttatgatggcgggcatgcatgactaacacataatgatggaggtgacgatgattaactaatgcatgccgagagccgcaggtcaagtggcctaacagaaggacatgcttgtggaaataggtgctagaagtatccatagcatggagactggaactgagggacgtgagactatacagagcatatctcgtacgcatcacatgatggtgatcagcatcattttgcaactagagatgcgtcgctagactcgagtaagcattgtgcaccacgcacgctggtgaaagggaatg

SEQ ID NO: 372331 - DNA, 340 bp, Zea mays
acttctcttgccacatgaggaaacatataccctgagcgtccacgccatctatgtttgtgacttaaagaacacccactgggcggtgaaggaggcccatgttatgctgaaagccctacacgaatgacatatactgagggaggaaactgatatgaactggatcatccctgataccaaaggtcgactggacttctacagtgcaaagatggccatacccatatgtgagagctctgcaaagcctcaagcctgacaacgtggacggagagctatgacaaagcataaactggacaccgatcatgggtgtcctcgttcaattatgacaaatgggaataggttgcttgaa

SEQ ID NO: 372332 - DNA, 269 bp, Zea mays
atttttcgcccccccgaaagacggagagaggaagagggtcaagggcaaggcgagacagaggtgccaacgcctgatctgctgccggagtccgaataggaagaggaacgcctgactaagcaagaagttcctggtggacctggtatctatggggagctggcatcgctcgagccgaggcagaaggaggctacaaaccacttcctagacctcaacaacaccagaaagaccaccctccttcacatgctgaaggacagagcggctcctttcagcac

SEQ ID NO: 372333 - DNA, 303 bp, Zea mays
cccactcttgcgcccacgcggccggcttctcatgccgatcttaccaagcccatcctggggggaagcttccttatggtttcaccgtaggcgctacggctggcgcatgatgtggattgccacccgttatctgcttcggagcatcccccggtgcaccagcgagacgagctccctggacacacggctccatcttctagcgcggagatcctcgtgcttgaatgttattagacgagcttgagacctggtgactcgtccacttgaagtccggctccatacacttcgacttcgtcatgctcaaccctatgg

SEQ ID NO: 372334 - DNA, 314 bp, Zea mays
tgttctccatctgcaggaccggcgaaagtacaagacctacattccatagaggacgaagatggtcgttgtaggcttatacatgctacaggattgatgatcagagcagagggtggcgcaagatgttcatgtacgcacgcaaagagagagtgagagagggcactgttacagactgacagtcaggttatgacaccatccccacgcatcacctgattggatgattgtgaggagagcggacaaaagcttcggactcgcggtggcattaggaccagggcgctggccacggttaaaagaaagctgtggccttttgtgatact

SEQ ID NO: 372335 - DNA, 280 bp, Zea mays
tttttttgggttttttttttttttttggggtttgttttttttttttttttttaaacgcaaaaaaacccaaatccctgcctttaaattttaaatccggcccgagacggacattacccggggccctttacacaaatgaacatgaaccccaggggcccccatggttcgataatggggggtgccgttgacaggatcttttttagaccctgctattaattatatttatacccctcggggggggggtccttttaacttttgggccccatcgccgggccgggcgggc

SEQ ID NO: 372336 - DNA, 450 bp, Zea mays
gcgggcatcttttatggagaacccagtattaacatcagcggtgcctgaaattgcaagatcttctgtatccgcttctgatacatgcaaaatggagtttgtgaatcagcgaccaattgaagcagatgcatcgaatgcttcacttaaccagcctcacgttttcgctataccttctgctaataaagatttagagcgtgaatgtcctagcccaaccccaaggtctgaatgcatggaatctcttatggagaactcagtattaacatcagcggcgcctgaaattcttgcaatatcttctgcatccgcttctgatacatgcaaaatggagtttgtgaatcagcaaagaccaattgaagcagatgcatcgaatgcttcacttaaccagcctcacattttcgctatatcttctgataataaagatatagagcgcgaatgtcctagcccaactccaggtct

SEQ ID NO: 372337 - DNA, 352 bp, Zea mays
tacactcctataggaaagctggtccgcctgcactgtaccgacccggaattactggctggatcgacgcatgcgtgcatcttttctgcagctcatagtcttaacatgagcgccgcttgatataagaaatgaatgtactatgacgttgataagatgcataatacggtaattgttcgttattatatatactcagcacgggaaggaggggagacactctgttcaactaacattttagttataagtgtcgctacaggggacaggcccagcagcctcttcggctcttcgttgggggtgcgtggacaccggaaattgcctcggagattgcgttcctgatctaagcccggcatgaagggct

SEQ ID NO: 372338 - DNA, 365 bp, Zea mays
  unsure (1)..(365): unsure at all n locations
ggccaaaaggtagcactgttcttcatagcacgtagtacaattggacgatcgctgctacattccccgaaccactacaacaatgcttcagaaattcactctcgggtatacgaattttcaccttaacacaactgcagcctaccccccaacttctgaggctagcgaggaattataaaaaaaacatcccttcatattgactgtcgctaacaattccaaaagctacctttcatatacacaangcagcaattagactgaatctaggcaattcagtgttgaattctttcttcggagtcatggagtggctactaccttggaccggacagctccacggcacgaaggttgtacgtggaatcgacgatccagtcatt

SEQ ID NO: 372339 - DNA, 141 bp, Zea mays
cataggtgggctgggtgatcctaccggtcataccaagtccatcaagaaatagggttcattagggtatcgggtagtgcatactgcagcacgatgatgtggtgtacctgtgcttactcctgtggcttgcctggcccaccagga

SEQ ID NO: 372340 - DNA, 403 bp, Zea mays
cccacgcgtccgcagtgatgtcatagtcgtatctccgcttctctcagcaaggctaacttgtttacttgtatatgagtggctgtcccttttgaaggtgtgagttgtcttatttgagtgtttagagtatctcatccctagtgttgtaaatatatttctttgctcattttttgttagtggagctagttttggtgaataagtactggtataaagtataaacagtgttgctgagtaatgaggtaatctgaatgaaaatgtttgccccaccaaaaaaaaaaaaaaaaaaaaagaaaaataaaaaaaaaaaaaaaaaataaaaacctgaaaacttggaaaaagacgaactcgagcccaaatacatttactactcataagactattcggggggggcccttttaagggatcc

SEQ ID NO: 372341 - DNA, 403 bp, Zea mays
tctgccttatcactttcctgtcctgccctagtctctggacaagagcaagcaacaaacccaatgagcaaagctgcagctacctctgcacggcgtcgagaccgcagcgcaggccaataattgacagtcttcatccaccatgctgacaggtcgacaacatcacccacttatcatcatgccatgctgctgctcaagacttcaatcagctcgtttttcttcatctttcagtagcctttgattcctcgggactttgcaagctccctcagctctgcaaccttcagagagtttagatatgaactttcgtgcaattcatctgtatctgtaacatcagcgatttccaaagacagttctggatactcgttgtctggttcatcagcatcagattcttcgtcatcgtctgaaatgt

SEQ ID NO: 372342 - DNA, 424 bp, Zea mays
tccacgcgtccgtttttttttttttttttttttttttttttttttttttggaccctacatggtaaaaaaaatacattgacagatacttggacgccaagcttgacaaaaaagaatgcagacaaaaagaatacagggcaatgaagaaagaagagtgaaaacaggaccgtcgccacggtcaggaaacataaaccctggcacggattttacaatttgtaccatatacaggaatacaaacctttggcagcccaaattgcttaaaaagaactaggctaagtaatgtactaaggcagcgactaaactgaccaaatttggattctccaaatctataggttcctagcaacttgtcgctataattgtccattaagtcatcatggttaggttttgctcttgaacttacgctgtgctttcaggtcaactacaacga

SEQ ID NO: 372343 - DNA, 204 bp, Zea mays
attttatctttttttttttttttttttttgggttggtttaatttattttggggtttttaatttttaccaaaagcaaggttttataaaacaaggaaacacaagcattaacagggacaattgacggaatgggccacgagggggggatgctagggaaaaagtggaacatggggacaaccgacaacacggaaatgggacattaccagg

SEQ ID NO: 372344 - DNA, 189 bp, Zea mays
gaggaaagaatgctgccttgcatcactttgttcatttgggaacacaccttatcctcgaatacaaaatcacttgcatgcctttccaaatggtatcatgcatattaactgaatggaacaagagacacctttactagggcgcaacttgggatgggaacaggaaattcctcggggggaattcagggccccatt

SEQ ID NO: 372345 - DNA, 334 bp, Zea mays
gatctccaagcaccacaatgcctagcacaacataaagcacgattgattattcagttttgcgacaggcacccatgcccatatcctgaggcttaaggaaaaatgaaacaagagcatgcagaccaatcatcgatgcaactaccatacgatttccctaagacatagctccacagcaccacttattgctacctgctagtacaaccgagccaaactacgggacgacaggtgggcaggcttcacatgtaaaaaaccttagcctgcactctgctaccatgagaagctacaacctgtacacatcaagaaccatggaactatacagaacggaagcatcggaccg

SEQ ID NO: 372346 - DNA, 191 bp, Zea mays
cgcccacgcgtacgaccactcatccggacaagcggggtagggttgtgtactctgcgcctgagcggacggtggacggcggactgctaaagaaacagatcggcatacttgatgctaatccttttctaccttacgcccttgtcaaagccggcggcctgagacctaagtatctctacagatatataccgtcatgg

SEQ ID NO: 372347 - DNA, 396 bp, Zea mays
cccacgcgtccgtgcaatccaaacgaaagcaagaagccgccgcttacagctagaggagagcagagagaggggagggaagggagggcccgagagggaggctccaggggccctgcattgcgtcggggcgtcgggctcggggctgtcgattgggccgccgggatggatcacggcggcgaggaccgcgtcgtggcggcgagcctcgcggcggcgcggcgcacgctgcgcgccggcttggacaagtcgcgcgcgctgggccacgcgctagcccgcgcggggccccgcctgaaggagatccaagcggcgctgccggtgctggaggccgcggtgcgcccgatccgcgcgccgcgggccgagctcgccgccgccgggccccacatcgaccgcgccgtgggcccc

SEQ ID NO: 372348 - DNA, 514 bp, Zea mays
ttagatcatgcgatatactttatcgttcatttaggttccaaatgatgcgtaccctagattgtggccttttatttaataaatttgtaaattatatccaaccagttcatcagatcgtggccttttatttaaatctaagaacaccaacacgcttaggcatttagttggatataattcctatgttgtacccaagaaagcagcacttaccgatgaactatatcttatcagtcgtgtaaacggaatgaaatataacaaaattgtttttattatctgcacattcccattatattttgtagcatataaccacaaggccacaaccagtttgtatgatttaattggcgtatgaatccgagatgagtgtttcgtatgattttttttacagtctatgtacacaagcatttcatgaagaaattatttacttgactcgataagttccaagttcctgcttgtgacatttattttcttgggcatcaacatgcgaagcttacatgtcttcatgtcagggggtcgcaaattt

SEQ ID NO: 372349 - DNA, 237 bp, Zea mays
aaagggcaaaaaatgccccctaaaaagtttgttgagttttgggggccaaaaccccggggggataaaaaaaaatttttttttgggggggggaaaaattcccggggttccatgatggcccaaaacccgttgcccccaaaaatgtcccccgtgcaaaccacggaaacggaatttgaccctttttgaccctatgctaaattgctaaaaatgggggcctttgtttacccactttgccttttt

SEQ ID NO: 372350 - DNA, 405 bp, Zea mays
ttcttttctgctgcagttcacggtgcatgcaatcagacagcccagagtctgggacacatggctcagtttttcgagtgcaggaaggttcatcaggatatctgatcttggtgaggttgccatcacctgttgaaatcagaaaatcgagtctcaatcaggatgccatgaggatgaagcacatcaaactttgagatcgagtgatggtattatgacatttacatcatgtgtgcttccatcaggcatggcctggacagtaggggacagtggctccaacctgtggcaggtcccaaacactgttgctgcagttaacaaaagaagagaatcctgcattatatcaaagtgagtttaaaggatgaacacatgatgaatttcacgggtagataccaataggttggtgatggaattgga

SEQ ID NO: 372351 - DNA, 226 bp, Zea mays
aggcgtgccgacatgcgcactgtagccctgtttcttggggagatttgaaatacccgcggcctgttacatatactgcaaggcacggaactgcggctgcacgatatattaccgtacagtcccatgattactcgccgcgctctggttgaggccctcatctggatgcctagccaacccggtgattgaactgcgtaaccacctcaggcggctagggctgtgactctaggcc

SEQ ID NO: 372352 - DNA, 342 bp, Zea mays
gcgccaccgactacgtggttagcgaaagtgcaaaacccaaagcccaaggaggaagaaaatggtcgctgcaggctgcagcatgctacaggattcccgatcagagcagaggggggcgcaagaggttgatgtcgcacgcagagagagagagagagagggcagtgtcacagactcacagtcggcatatgacaccatccccacgcagcacctcatcgtatgattctgaggagagcggacaaaagtcgcgggctcgcggcggcatcagcaccagggcgctggccacgggtaaaagaaagctgcggccttttctgctactcctgcctgccagcggcctgcctgcctact

SEQ ID NO: 372353 - DNA, 277 bp, Zea mays
cggacgcgtggggccgccgccgccgccgaagccaccaaatgggcggcgccaggcgagcaccgtggcggcggcgaaggaggcggaggcggaggaagcaggaaggagtggtccggcggtgagctgccgcccataccggggaccctggacatcggattcggcgcggaggagggctgggatgccatgctcggcgacgccgcggcggtggtcgggcaggaccagacattcctcaactggatcatgaccgcgccgggcgacatggaaccgccggcgctggcgc

SEQ ID NO: 372354 - DNA, 107 bp, Zea mays
cacagactcacgcttacccatttacaagtttgagtctgtgtgaggtttcagttagtggaacactctcttcagtgaggtttcacttgctcttcctgatgccaacaggt

SEQ ID NO: 372355 - DNA, 322 bp, Zea mays
agcaagcagaaaagaagataaattataatatgatagtgaacatatggagtctgtaattttgcacaattgaacatgacaagttaacaagatggatccttgatagttggatatgcaattcccattaagaaaaaaagaaggaaatttccaatggaaattggaaacaaaaagaaaagaaaaggagaagggagaagaagcaaaccaaaaccccccaattaccttttacatatacctaacaggtatgcttatgcttaagctctctctgcagtctgcaactttcacaggtatcaagtgtggataaaataaaaaccaggaggttaaaaat

SEQ ID NO: 372356 - DNA, 289 bp, Zea mays
gggaaaaaacacaaaaacccgtggggcaaacaaaaggcccctttgtgggggcgccatttcttttcaaaaaagccgggggggggaaaaaaagggaattgggccaccttgaaaaggggaaaaatagggaaacggcggcgaatcccttccaaaagggtggggggacaaagcaaaggggggcaggggggggaaaagccaaaagggccgccctccccaggcactgaaagaagccgcccggcataaagggaaaaggggcggcgcctggggagggaaactaaaacccgccggtggg

SEQ ID NO: 372357 - DNA, 409 bp, Zea mays
tacagctggaagctttattgtatattttgaaggactgccctatgaacaggtcaacttgattttttctggtgcatcacatgctcaggagagctcttacccttcaaattcaagcttttacaagtttggactatctgaaccagagaataattcatactatcgttatagtcatggttatgaggtaaatcatcatgaaccactggtggatgagtacaggagaccttcagagaactcattgacaatcaatgaactagtcaccagctgcaagcacagaatgggttgaaggtggaaacactgacacacaagacaattctattgaatgtcctcgaagacatcatagtaattcaaatgattatcaggttatttggcaagacaatatgtgatcccgacaacatgacctatgaggaactac

SEQ ID NO: 372358 - DNA, 308 bp, Zea mays
tttttttttttttttttttttttttttttttttttttctttttttttttttttttttttcttttttttttttttttttttgggggaaacaaaaggggggggcgccgccaacaaacaataaacccttcgcccagggccctaaaaaccccaggggttaaaggcaaaccccccccgcgggtatatcggcaccaaaaaccaaataagtctctttccaacggaaaccggggccctgtatgccaacacattccccccatcggtaaaaaaggggaggggcttcaaagccccacccccctaaccccccttggggtt

SEQ ID NO: 372359 - DNA, 423 bp, Zea mays
aacgcaaccccctcttttagtgttcgaacaaaattagggttttctcaaccctagggtttaccttctcttcccctgttcgaaattaggcaaatcaaaacagaaacacgactacaaaaagaagaaaagaagaaaaagaatcaatcattcattgatcgctgaaacgatacgatgacagggaaggcgaagccgaagaagcacacggcgaaggagatcgcggcgaaggtggacgcggcgaccacgaaccgcggcggcgggaaggcgggtatgaaggaccgaaccgggttggagaagggcgggcacgcgaaatacgagtgccctcactgcaaggtgacggcgccggacgtgaaatcgatgcagatccaccacgacgcgcgtcaccccaagatccccttcgaggaggacaaagttgtcaatcttcacgcc

SEQ ID NO: 372360 - DNA, 410 bp, Zea mays
agggcaacaacaccactttaacttgcattatttggaacaatatacatattccatccttaaaaagaagggttcagttaaaaatctcgttctcaattctcaataagagaatataaaaaaaaaaccttttttgccccttcatacacgggatcatcctcataaccccttcccttaaaaaacccacttccaaaatactcaacaacgtcaacttaggcaacaaaataaaaagaaaaagaaaaagaaagaaaaaaagggattgggaacttcgaatgaaggaggggccataacgattccaacgatcgattgagatcactttttgaggcttccgcgaacaccggggcgaggcttggaggactcgggaacgctggtggtggcgtgaagattgacaactttgtcctcctcgaagggatctt

SEQ ID NO: 372361 - DNA, 256 bp, Zea mays
tccttttttttttttctatccggaaacacataccacatacagcttatataacatgacaattggaactgcatgttataacataatgggaaaccaaccccatttttttcataattgtttctttatagggcgaggctttataagcttgagaggatattatctgctgctgatgctacacgctgtactagggatactgagctgagccatactgcactacagctgtaacacatgtcataggctggctctggaaaggaattgc

SEQ ID NO: 372362 - DNA, 449 bp, Zea mays
agaaataatacagcaataaacttcaattgaatgttacatgcccaaaggatcaatgttcaaatattcctaacttaccaactccttggcatcgacaactatttattccatattacaaaagaaataccatatccagcaaccaacctgtgttttcatccccaaaattggaccaaaatggagacacaaggaattactccaatgacccttctgtaactttggatcctaccccaaaatataaagaaataaaatcaaaagatagatcaaacttaggactaagacttcattgcgatacaacatttgctcctcaaggaaggaaaaaatgacaggaatgtggacctaaaatttgaagagatatgcagccaaaaaacccttcagtggcattaattctgtgaacgccacccagtgggtttctgacccttctagttacttttgaacactaaacctgaaatgaa

SEQ ID NO: 372363 - DNA, 184 bp, Zea mays
aattacggccgggtcgacagctttctgtcggcggccgcccttttttttttttttgaccctttttggctaacggtgcccaaaaataaaaaccgctcatgtagacttcatcggggggaagttttttatgtggggcatttctcacccccactgcgccatgcaagataaggctgttagttcagtgtca

SEQ ID NO: 372364 - DNA, 370 bp, Zea mays
aagaaaccattcaaattattgttctctctgtcctgtgttttgtgatttcccccttcaagccaccaccaatggccaacaacgagatgcaagttgagaggggcttggacttggaaaggtacatggggcgctggtatgagatagcctttttcccttcaaggaaccagcccaaggatggcgtgaacaccagagccacatacactcttaggaatgatggcactgtgcaagtgctcaacgagacttggagtaatggcaagagagggcacatagagggaactgcttttaagtataaccgcacaagtgatgaggccaagttcaaggtcaaggtttatgtccctccctttttgcctattattcctgcaacaggggacta

SEQ ID NO: 372365 - DNA, 443 bp, Zea mays
gattaattagacaacctttaattgttaagaacaaaagtaaggagacatcagtgaaccaagcaacagccacaccagtgacaccacacaaaagttcatatacagataaaatagcaaaccaatgtatacatgccttagaggcattctaacttgaaattgcccaactaaaaattcattatctgtctattcattgcatgtaatgaaattgaaatacattttcattataataaattatatatcatcatggaggcctatttccccaaaatggatttgagccaccaaatgccttttgggtcttgggggccttcttctctgggggaggatcgctctgtggggtcttgggggagtttgctcacatcatatcctacatccttagctctctgaacaagcttgttgtagatctcatcatccagatgggggttcctgcttaatatccaaaggcaatt

SEQ ID NO: 372366 - DNA, 442 bp, Zea mays
ggaaaaaatgatacaatcgagctttcataacttttcacatcgattacaatgatatcatatcatctaccgattacacaaattacaggctgttataaacaaaattgaacgaccccttataaactccaagatatatacaaatccccagaaaccaaaatttgtacttgtgtcatttcggcaggagaaacagaactacagatgtaagaacatcgtggttgccacctttggagtcaacttccaaggatatttgccatgatgccaattcaggctataaaacttgaattattaattgcagggtcaaagatcaacctttcatgacctctccaaatcgcattggaagatgcattatgataaatctgcaaagaacaaatatcacatttcctatggctccagttttgctctatctattaatgttaagctaaacatcatcccagattcaaaaatg

SEQ ID NO: 372367 - DNA, 391 bp, Zea mays
  unsure (1)..(391): unsure at all n locations
atatactgaataatgatgagaataaataaaactgcaatatttcaatattctaacatcaaatattcatatctgggcatcaacacaacaacttgggcttaaattattcagacagctaaacttgctggtccatatcctccaaaattaatttaagactacttagaacctattttatctacagttctacacttggtgtaaggcagacgtagaataaactcgaataaccataccaatctttgcttttgctttgctctacaatcttttttctcttctcattattcatatttttccccattccttctttggngttggatttagaaaccttggatgttactgcaggctggaagtacaagattcacacccgacaatagtgggttttattcctcattggatg

SEQ ID NO: 372368 - DNA, 506 bp, Zea mays
aaactacaacctttgtcaatttctttcttgttcgactctgcttctttctccaacttcacacacacacacacacaaaaaaaaaaaaacatggcaaaggatagaacaattggtgtggctctggatttctccaaaagcagcaagaatgctctgaaatgggcacttgagaacttagccgataaaggtgacaccatttatgtcattcacattaactccaactctctagacgagtcccgcaacaagctatgggcagaatctggttctcctcttattcctttggtagagttcagagagcctgagattatgaaaaagtatgatgttcaaattgatattgaggttcttgatttgcttgacactgcttcaagacaaaaagagatccacattgttacaaaaatatactggggggatgcaagagagaaacttttggatgctattgaagatttgaagctggattcgctggttatgggaagcaggggcctcagcacaatccaaaggattatatgggaagt

SEQ ID NO: 372369 - DNA, 228 bp, Zea mays
cgggccctcaaattaaattatggccctcaataaaagggggggaaacctttaaagtccagcaaatcaataaattttttcttaaaccccaaaatttttccttgggaaagggaatttggcccaactagatcaggaccaatgcaaaaaaaaaataattggggaaatttaaaggttctcccccaaatggaacatttttacttgctgctgatagttcccttgttagttcccttg

SEQ ID NO: 372370 - DNA, 378 bp, Zea mays
cgttgaatatttgaatcatatttcatttcaaccaaaacagaaaaatcagcttcatgcagaagcaaaggcagcaacagccacccagagatctctatttattaggagcttgatagccatggaactatgaacaaactgaatggcccttcaagcatatcaaagaatggatatgatgtggactatatatatatatatcgatctcttgctcccatggtcaatctcctcttaaaatgttgaaggtccatggggcaagcattatcatatttctctctcacacactctttttcactcctgcttttcttcgtggaaaaatgacatttttctctacactgcccaaaacttttgaaaaaggaaaagaaaaatgaaaattttgcaggggtg

SEQ ID NO: 372371 - DNA, 404 bp, Zea mays
ccatgcggagaattatgaattatgaacacgttaggttgtacatattgagctttctgagctctgctaatttaatttccttttcctacatatgctgctgtttctctacttagatgtctctctattttgtctcattcaacaataaaacattacattcttcaccttctctttcagagcaggtagtggccgaactgactcatcttttgaccttgcacctcgagatttagcaatttcatggacattaggttccatgtagaatcgagctctgtaagctgccaaatgagcatagtacgcaagaggcactacagaaacctgatcgtgtacatcttgcatagggtgtagcacaagattgttggtcagagattggtatctcatcagcagtgaaatttgtctcgttccacaaaaca

SEQ ID NO: 372372 - DNA, 297 bp, Zea mays
aactcaatgggatggcgcattgattggtatcaattacagttataaacattgaatccaaactcaattaaaaaaaaaaaaaaactcaaaagtatttagacatcccatgaaacaaattcctactataattttagccatcaagatgtcctaagccataaaacattaacataaagccaatttgtctcatgagagaaccaaaaaacaaactagataatattcacccctgcatccagaatcaccaatccacaagaagactcccaaaaagcatcaagccttgttggctatgttgttggaaagcca

SEQ ID NO: 372373 - DNA, 314 bp, Zea mays
tttttttttttttttttcaataaccgttattattttattaggaaactatcaacgaattccctaaaaaactttggaagatggggcccttaaatcaatgggtaaaatttaatatttaggcaaattttttggtccggaacaatctgggtggggctttccctggccatgttttgagaaccccacatatctttagtgctgccccagaaggtgatggaaaactctcgacaacgaggaccaaaataactcgccaatgcaaataaattgtcacaggccaacgggagaaaaaaaagaaggggggtgcctccctctttggaatt

SEQ ID NO: 372374 - DNA, 475 bp, Zea mays
  unsure (1)..(475): unsure at all n locations
atcagattatgtttaaatttgcctgcttgtgacaggcacattggcacacatggggatatagcatccagaagggcacttctccaagaagcaaatggtgaaaagaggggtgatgatgacacagaaactctttcaccatcaccttttccctctacactatcaccattttctgagcctttctcaccatcagagagtccctcagattcaccaatatcatctcctgaagtttccccttcaccatccccatctctctccaatttctttttcactctctcaccctcaccttcacctgaggtagcaccaactccagacttgtcacctccagcaaatccacctatnggttgtgtccacaccaccacagtccaattgggtttcaatgccttctcctgcttcatcttcaaaccaagggaatgcaaacagttcaaatccaaagcaacataccgcgattatttggtccacagttgggggattctccttc

SEQ ID NO: 372375 - DNA, 237 bp, Zea mays
accatgcagcaaactatccatgtcaacatttcttaatgaacaaaacacggccatccaaacactcaaatgctaagagtgaatctgcaggtgaaacaaattttacatgtcgcttacactggcatctatggtggatctgatcaaacattgaatttagccatgtggcagtgcaaaactaatttggcaaatagttgttacaggttcacaaaatcctcggacctactgtgatttttcacttaa

SEQ ID NO: 372376 - DNA, 356 bp, Zea mays
  unsure (1)..(356): unsure at all n locations
tttcttttttttttttttttttttttttttttttttttttttttttctgaatcacatattcagaattgcatgccattaaggctcattnttagaatccacaacttcacaacaacagaaaacaaaacgatggatttgcacacaccccaaccacaaaaaaagggagtaccatatttttcaagagcattatggactccatattggcaaagcaggagagatagcataaacacatgatacagaaatatggaacttgaggaagggaatattcatctgtgataactcaagcatttcatttcatttcatttcatgtctcagctgcaactacttcaccngggattttcttttgctctgcactcttc

SEQ ID NO: 372377 - DNA, 326 bp, Zea mays
ctggtttaaaattactacattgaacaccatatatcatctatatgatatatttgaaataactttttgttgtcttggaatcttactattcgatacaaattaagattcatgattcaaaaataagcttggtgattcacaatttgattcttgatttgataactttgccgggagaaacaaagacagggagaacaactgaatagtgagaatgaggttaggaattgtaattcagagggcagagattagaaattgagaattgttagctttaactattaattttattagaattccattgaattgaacattctagatgaacttaaaaatgtcataat

SEQ ID NO: 372378 - DNA, 496 bp, Zea mays
  unsure (1)..(496): unsure at all n locations
cataaaactgaagcaatcaaggattatttgaatatttgagatcattctggcacgaatccagatatgcgaggtcacaccaacactttgtacattgtgtacaagtcactactttaatacaaatcatcaaacaattaatatcatgtcttaaaatgtatacatttcaaacaaattaagattggaacacagaactgatgtatctactgctaacttgttgcctagactaacataggaaacaagttatctaaaatcattcagcctttctttggcatagccgcgagtcttcgtgtacattcttgccatggaattggtaccctctaacatcccctgaacgcagaagattgcctataacaacaaatgaaattaagtggctgaaaaaggtctcttttcgtacatgcacaatcttttatgttcagtccctacacctagaaactattnngtttagtccttcacattttttaactcactttagtcccccacaaatgcacttaatccttta

SEQ ID NO: 372379 - DNA, 311 bp, Zea mays
ccacaccaaaggatctgattcattaaaagcaatagatttttaacaaccacacaccattcatttgacatatttggaacacatacataatccatatagcattacttagggggggggcattttttacttttatttaatgcacaaacataacaggggcaggagggaaaaccacaaaattaaaacgaagatcatatggctgttaataataacaacaccacatgcaacataaaacccacatgcagttgtggtagtggcatttttttcagattggaaacgcctcaatgatggaagggaaagcgttgatcttgatgatg

SEQ ID NO: 372380 - DNA, 342 bp, Zea mays
  unsure (1)..(342): unsure at all n locations
gttggtcaaaataacgccctattttataaattattgataaatttcctctgtacataatacatagcaagatcaggagaccaagtagaggccaaaaaattagtgattctgacattagcttttctgattcctaaggtatagagattggtgaacaaatgcaaaatacactacatactttgatatgaacactagtgtaggcaaaattggagacatagcacactactactcaatctctgatcacaatctagccttctttgaggataatggtgagagtaatgatgaganggatgatagatggcatggattcgattgggaagagaacactggtgagccatgtttgcagtt

SEQ ID NO: 372381 - DNA, 279 bp, Zea mays
acaaacaaaggagtcaggcgaatttaccaaaaggaaaacgggtagtgatcaccctaccatcccaatggacattagattaccagagtgcaacatgctcgacatcgcacgtgtcataccccatatatttgggccacattggatcatcgtctacatgacatgcaatgagcgttggatgcaatccaagctgaaggcaaactggttgcaaccctcctaagggctaaatgccactacagtgtctaacaggaagcccctaacccactttacttgaactaaaatgaa

SEQ ID NO: 372382 - DNA, 431 bp, Zea mays
gaaaataaagtggccttggccagaaaagatcttaatcattattcacaaattacaatttcaattacatgctaatcaattctgtctgcttatgttcactcgcccctgcgttgaactctcttcaggcgagtccacccagtcgaatttttccccagaaaaaccaaaacaattgttttcaactaaccatcacttatcatgtgcttagtaatagttataattataaacacacaacttaaaattcagttttataagcattccgagttccgtatattgattaaaagcgcctttttattttgctaatttatcataataaaaactttttattgtgtgaattatcaaaataaaactccaattataattgcatatcagaactaaatttacataccaaactggcgtggtgtctagagttttatagaactcagcgaaatataaac

SEQ ID NO: 372383 - DNA, 168 bp, Zea mays
ctccaaagacattccaagaatccaacgtagacaaaagtcatgcataagaacaacaaatattacggaaacatgactcaatataacaacataaaagcaagccaatataagaacaaacagataggtgccgcataacattgttcccaaactccactcccactaacccccttt

SEQ ID NO: 372384 - DNA, 476 bp, Zea mays
gatataatgtttaagatattccccaaatgaatatgttgaaatacacaattttctcgtcaagagaaggaagttctaaaatgaaaaaaaaaataaaaacacatatacacaatcactcgcggaacttgagtgccaaagttcaaagcacagaataagataaacccataatttaaatagccctctagctagttgccaaaggtcagtagtaagtcatcaccaaaacagcccctttattgcgactcttcttaacttaagggttgtgtgatcggatagaacaatggggtatctaggtcattcaactctatgaagtccaagttatcagagttcccaatatcacctgtattctggccagcggagaaaccagccagagcagctccagtagtctttcaagccctcaaaaaattcataagagttaccaacatcacctgtagtagccgcattccgtttgggttgaattcagtattctggccagaggagaa

SEQ ID NO: 372385 - DNA, 383 bp, Zea mays
ggaaattttactgcataattattcctgaagattgtgagatattagtttttatttgctttcatttattgttttgattgattggatcagctataagttattatactggtctcctttttagtttccttaattctgcatacgtagaggtggctacgggaagctggttcagaaagagttagaagtacaaaggcagcttgtagattatggtgctggttctttgggttcttttccaccagttattccaacttcctatggtagacatggtggaggaggtggtcatggtcatggtggttcccatcgacatggtagagattactataggaagagacaccgagatgatgagcgccacacacacgagtcctcaaaaagaacttcagatcatgagt

SEQ ID NO: 372386 - DNA, 328 bp, Zea mays
agataaaagttaacaaaatcttattaatatgttggtagacaaaaagcacaagacaaaaaaattgatacaaaacactaaatagcactgtcatttttatatgcagccgaccagcctagaatttcaagcaaggttaaactaacagtgagatctttgcaatttgcaataatatacatcatacaaacaatcatccaccttcaatcatgtcagtagaaatgtttaaatttaaaacaactagatcaagtataaaattctggttaagcccgtctttttctatcatcttcctcgtcctcatcagaatcaccactctcacaaaccggggatttttttc

SEQ ID NO: 372387 - DNA, 462 bp, Zea mays
cataaaaccacatccattaaaaagaataaactccttaggaataataaacgaataagaattctcattagctatacaacaaactaggggttgagagtaggaaaaagaaaatcactgatgtcagttgtagactcatcacgcttaccaataacacttacaaaatacaaacatcaaccaccatttttttaaatgaggtaagaaaatacttctttaaagaagaatacctaagaggtgtctggagagtgcaactacactggaatgacatcaatctttgatgtatcctcacatctcaaaataataccctcaaggctagctggaaatatacatttagcccattgcatccggtagtcaaaggctcaggaggagggacaatcataagccattgtcgtttctttgaacactcccatacctgactgtctacctttttgatgaccctctttaattgcatatcgacatcactgaaga

SEQ ID NO: 372388 - DNA, 458 bp, Zea mays
  unsure (1)..(458): unsure at all n locations
caccttgaacattacattattacaatcatatcctccaagttcaatgcagtcctatatcacagcttgtatgagaaaccacttaaaacgcgcattagttacacaacaacaacaacgggcccgttaggcccgtcatgaataaaaaaaaaagttgcaacaacaacgtactcattttcaaccccatgatgtgcgaagtggtattgacaacgaatttatgattcaccgtactcatttccaaggtagtgtatattttgtactgtagctgcagtgacaatcaagcataactatttcagcagaaaggcccgggtaactgagcttcagtgcagcatcgcaggctttaatttcacgatccaaaaaccagttcacgtaaagaagcgnaaggtgagctgtaaccatggacaacgctgtctctccagaaagccgttcctataaacgaaatcagaccaacggttgctgataag

SEQ ID NO: 372389 - DNA, 435 bp, Zea mays
tccttttttttttttttttttttggcacaccaaagtactcattcattaatagcaatatatagattcttcacaaccacgcaccactctattggtgtatatggaacacgtatataacccatattacttggtggtggggcgcttcatacttttatttaatacacaaacataacacgggtagggatgaaaaccacatcacacgaagatcacatagctgttaataataataacaacacatgccacataaaaccacgcacatgaagtgtagtggcttcctcttcgttagattggaaacgcctcaatgatggaaggaagagcgtctgatcttgatgagtgctgtaacgggcgaaacctgtttctttgaacagccacttccagttctattcccgcctctctttgccgcccgcgttgtgagcgagaagcatcatgtcaaatgca

SEQ ID NO: 372390 - DNA, 378 bp, Zea mays
  unsure (1)..(378): unsure at all n locations
agagtatacgaaacagattcattgaaaatcgcacaacctggcttcggaacttattgacagcaccgtaacatatcaaaagtaaaaacagctatggtgtctggcacccaaaaaggatggagaggtgatgatgattcttgacaggtaaaatggaagaataccagtcataactcaaaaaggatgcttttaagtattaattgcaaagaccttctttctgaacacaagtttgccaaaagactcggaagataacatccataattccatattatagaccacaaatgatcttacttacaaaatatagccactcgagattattntcaagttcaaactacaaccactacaagaggggaaaagcaacacaacacattcatttctcacaaa

SEQ ID NO: 372391 - DNA, 452 bp, Zea mays
gcggcgtctctttttttttttttttaaacgaacctaggcacatgcacacatacattgaaacttacataataaagcagacgctcgaatggcttctagctgaccataattagagcatcccaagaaaaatataactcatcactatggtaggcggtgggcactttgatgtagacctattagatataagcaccactttggaatgaccgtttcacggaaacataatcctatgaaaaggcgatcctactgaggcgataatgcaaaacactatgcaagactagcctaattatacatgagcccacgatgccagtgtaggcatttacaagatgaaacagtctacaaaaaccaactgccatagatgatgcatctagtttgagaaccatgcaatcttgttcagcactgaggaatcgtctgtcacaccaattggatgtccttcggacgggacagcagaagaactg

SEQ ID NO: 372392 - DNA, 288 bp, Zea mays
ggaaatgattctcgatactgtaaaattccagatcaaggtcctgcggagctgatccaagtttcatggttggaggtatccggcgtggtaaacttaccaggtgtcaagaaatatagggttgaattcgcagtgagagttaaagacgatcggttcggttggagtggcacggacgtgctagtgatggctaacattgggaaaacgggaaaatatacgtataaggtgacgaaactaaaccctggtgaaaccttgaatattccaaaatcaactgacccacttgagattcaagtgaac

SEQ ID NO: 372393 - DNA, 389 bp, Zea mays
ggaaatccattatttagtacatatagtttatgcaaatacagggaactttttaagaccgacatacattggttctctcagcatgcatgcatgaccagaacacactgttattttaacaggacttgcaagttggaataatccaggtctcagctagggcagagcatggacacatattatcatctatatatcaaacaggagtactcaacgcccaatacaaagtaataattattatttaaccacaaacaattaatccacttgtcaaagttggcaaatgaagaaaacgatatatggtatgagtgaggtgcatgcaattaagttaaaggtttgaggagggctctgacaatttcaaggcctgccttccattttgcgctgcacacttgatataatccaaa

SEQ ID NO: 372394 - DNA, 338 bp, Zea mays
tcccaaaccagagatggatggaaattatagggaaggcacatcagaatgctgattgtttgaaggatcaagatgtaatgccgaaatgtgctgaatatattgcagacgaatacgagtgtggcatcatctttaggaacatatttcctgccacaaatcacattgatcttatggacatgttgtatgtgtacagaatgtatagtgagcttatatcaaaaagtatcgtagatgggtgaccttgagcatctagaacatcctatgtgaaacttgtacggtcggttaagagagaaacacttaacctagttgagacattcttggacaaggctgaagatcaaccacaaatt

SEQ ID NO: 372395 - DNA, 358 bp, Zea mays
aaaagcaaacatggaacataaatccccctaaaattaatgggggaaaaaaatccaaaatttcaaacaggggtttttttgcacaaactgccagaggttaggagttctcacacctaagggggcatcaattcttggaattaggcatccattttgggattttatcgaaaactgccttgatgaatccctcacaaattacttttatcatcctaaatcagcaactgaataatttaccccccccaattgacaagggagttttgccaaccacccaaacctttgaaatcagggaacctttgccaaaccagtcccaacatgatttattgggaaaagccggaaaacttaattttaaagaggaaaatgctgc

SEQ ID NO: 372396 - DNA, 315 bp, Zea mays
  unsure (1)..(315): unsure at all n locations
aagcccaacatgaagcaagatcaagtattaggatcagcaagttacatttctctactcactcatgatcaacaccatattattctacagtataaaacatccctaacaactcataaacaacataaaataatcaaaacttacacatacatcatacatctctatatcagatgcaaacttatttacacaaacactcacccttcatatctatataactactatatatatatatgcatcatcgtcgttncgtcgttgcaacatcaaaatcagaacagcttcatgaacttccgaatcttcttcgcgaaccagctctccttgtgg

SEQ ID NO: 372397 - DNA, 178 bp, Zea mays
ggaattacgggcttgtcagaatgtgtatggaccagcccatcagcacaagttcataatatacaaggttcactattggtttaaaccgtgatcttcctgttggatttcataacctattacacaactgattgatagcatgggctaaacaaactgcagtatttaaatatggcaccattttctt

SEQ ID NO: 372398 - DNA, 384 bp, Zea mays
attaatccactttcatttaattgatttatctatttatgaataattaacgggtagagaacctcatttagctatacaccaaactagcacgtcgaaagcaaaaaaaaaaaggtaccccaaaaataaagtgtctcgtcacgcgaaccaacaacacatgggcccctcaaaacccgcaaaaaaaattttaaccgcgggtaaaaaattctttaaaaaaaaggaaaacctaagacgcctaaaaagccttcattaacaaaaaaatgaccttttaaaaaaaaaaaacggaacgtctcatattttttttcccaacgctcccaggggacctacacctatcccattggggggggttgggcaaaggctcaggaggaggggcgggcttaagcacaaaaa

SEQ ID NO: 372399 - DNA, 320 bp, Zea mays
tgaactggaaactgcattcacttcatgaaaacaatctgataatgagctgataaggctgtagaaccaatgcaatgaacttaccaagaggcttgctgaacaagttttgaaatcagaggagtttaagaatttgtctattcatttgaaggaactgaaagacaaagcagaggctgagtgtgctaatgctcatgacagaagaggacctgtaggaccaccggttgctatgcaggagtccttgagaattgcatttatcaaggagcaatatgaatcaaagttgcaagaactaagacaacagctgtctttgtcaaaaaagcatagtgagg

SEQ ID NO: 372400 - DNA, 460 bp, Zea mays
  unsure (1)..(460): unsure at all n locations
atatatactttggattcttaacacaaattattttatttacataaagtattatctgctgcttgactttggaaatgatgtaatatcataccaacccttgcaaaaatataacttctcactatggttgatggggtcccttttatcataatctatctatatataattaacagaagggaatatatgatgaggcctgtgcaagggggtaaaaaatgcttccttactgtggctataaggaatggtcccaaaagaaggttgatgaattaatttgaagccttcttggatgctcttgtattcttaatagtcatcatgaggtttttgcctctcaccttcaacctctgcaaattgaagacttaactgagagtaacggtcatgcatctttttagnttctgtctccacagcagaatgtcttgctttagttctacatgtctttattagctattgatgtccctaaacttctgatact

SEQ ID NO: 372401 - DNA, 409 bp, Zea mays
  unsure (1)..(409): unsure at all n locations
cgctgcttccgattgaaggcatctaaggagagaaaaatgcacgatttctgcttcacgatcccctacggattgatgttagtgggtggtggactgttcgcctacataagcaaagggagcatcgcttctctcgccggaggcgccggctccggtttgcttctcatcgtcgccggctatctcagtctcaatgctttcggcaaacgaaaaaactcttacctcgctctctttctcgagaccgtttgtgcagccatactaacttgggtcatggggcagcgatatttggaaacatccaagattatgcctgctggttcttgttgctggaaatcagtgctctcatgagctctgttttatctctacaaattncaacctggtggcaaccatctccccaccaagctgagtgatgatataatga

SEQ ID NO: 372402 - DNA, 287 bp, Zea mays
  unsure (1)..(287): unsure at all n locations
agaaaataaaaagagctgcttagagagtgatgaaggactggcccaagtctcctacgtgtataaagacaaccacaacaacaacgacaacaactatcttttgttccatactttgaaatcactaaagtacaatgatgtatcttaaccatctaaggcatgcagatcaaccaacatatctgtattatagtaagcaaatatatgatatatcattatatcatcactcagccttggtggggangaatggttgccaccagttgctaatttgtagagataaaacaaagtcatgagag

SEQ ID NO: 372403 - DNA, 300 bp, Zea mays
gtggcctgcagggatctagtttctccattgagaagctcattaaaaaagaagaggaattactggaagatcaccaagataattcatgctcgcctgacacttcaaacaagtctgctaagaatggtgggcagagtttgtcaccttgtaaaaatagccaatccatatgcaatagagaaccacagaatggtgctgaaccacacgaagcaaaatggggatctttggaaaactttgaattatttagcagaggctgcaagtaggagtaagccttttaagtctaatgtgcaagcatctgatgctaaacta

SEQ ID NO: 372404 - DNA, 311 bp, Zea mays
aaaaaaaataagaaaaggctttctaaattgaaatgtcaaatattcaagaaaccatcagtcgcaacaagtatagaaacaaagggcatgctactttacattcaacagtttagcaggagaggagatttcctcataactgcattcctattggcaacaggggcataagaaagccagttgacgaggaagcaattattctgggaagggtttcgatttttcatgctataataaaaaagtgaaaggggaagaactgggaaccacaatcaagaggggtaggaccttcccaccataggttaggatcatgacaaaatttttcc

SEQ ID NO: 372405 - DNA, 290 bp, Zea mays
aagaaaattccagatacatagtttgtcatcactctaaagcgtaaaaacagcctgtttccaaccaagttaccatgtctctaggtatgcaggcatagaactaacaatttctaagccaagtacaagggactgctctttccagcaatcattcaaaaagcaaatgaagcatataaagttagctacattcattgcccatgtcactgggaagtctcttcatcttttgtcgccttaggatgtattcccttcaacttaagaaaattgttacaaagaacagaaacccaatttaagaaaaa

SEQ ID NO: 372406 - DNA, 384 bp, Zea mays
ctcgagccgaatcggctcgaggttcctcaatcaatctaattctctcaatggcttcttctctctccaccaaaccattctcatcaaccgacgctctctccgccttcgcttctctcaatcccgatctccgatccttctccctcggctacctccgtctctcactccgtcctcgtcttcccaagagacttcagatacgggctgctgggagtatctatggaaatcactttcgtgtttcaacatatggagaatcacatggggagcgttgggttgtatagctcgggggaaggtgctcctcaccttcctctctccgaagctgatatgcaattgggatcttgacagaaggagggccggtcagagccggattacaactcctagaaaggagactga

SEQ ID NO: 372407 - DNA, 461 bp, Zea mays
gagaccaaaaactgatacatttcttacaatttttaatatcagttcacttttaagaatgcccctatctctgtgcttttgcaacaaggtttaccggaaacaatgttcaccctcaaaaagaaaataggagagaagaaaataaacatagtttaacttacattaatacaaaacgatagattgcacccgcaaaaatatctgccacaatgcgaccaggagccgaatgctcgcaaggggggaacttggacttgtcatcaaagtgaattaactgccaactaaacactagccagaaggaagattttatccaaggccaattactgggtttatgcacccccttcatcttcagagaagcgcttctttgggccgtaatatgggcaccaggggttcttgcaaatctgagtttacgggaaacagattacactgcgcatattgtgccatcaattggtccacaagaaccaaagctacca

SEQ ID NO: 372408 - DNA, 393 bp, Zea mays
gagtggaattttaatttattaacacaaatttaagtacatgtaacaaatgaaaactagaatagaataattaaagcgcccccaaaacgtatggggtagggaaaatatcacttttccaagagctccactccacacaacataattgagcctcttatatggtacgcaatataaatacataaagtactatatatcccactgcaaacaccttcgggagataatatgagacacatttatggttggttgttccatcaggacttggaggatatatggtgaatcttctgcatattcagtggcattgacatccaatgcagactaggtttccaatctacttctcttagaacctttaatatttccttcaccactaccttgcttccctctgctgatagatgaactcca

SEQ ID NO: 372409 - DNA, 374 bp, Zea mays
acaaattaattgttgtttttttttttggaggcaaatttgaattatatacgggaataaggaatacatgatcgcatttaaacaaactttacaggcttaaaagtttttcaccctgcaaacagacattaattgtttcatgtacaaatgaagcccgtccaaataattactcgttttctagaaagtcaaagcagcaaaggttttatccaattttaaaaagaaattaaagaagaccggtaatatcacagacgcttttaatgaaataccccaaaccaagacttgaaacaaaataataaagcaaatgaagaaaagaagaaccccgtatgaaagaattaagtccctcgccccacccaccaaatgttgtgtggttgtaatgatga

SEQ ID NO: 372410 - DNA, 377 bp, Zea mays
aaagagaccagtgtgcagtgtgaaagaggttggtcacttcttgtgtggctttgttttgttctttgtgttggaatttgttgatgggtgaagagggagaagaggtgtcaagagataaggaacagcaacacatgggagtttatggaaatgagtggttgtttagtagtttctgtgcaaattggcgccgtttaagacaccagaattcctgttctatgcctccttttgagtgaaaaaaaaaaaacatcaaaacaaaaacttgttctctctcagcttttcatcttccgatcttaatatacattgactaaaagaaaaataaagggatcaaatttaagttccttgatctaataagatccttgcttttaattgtactactcatgaag

SEQ ID NO: 372411 - DNA, 432 bp, Zea mays
actcactagatagatttcacttcattacgacctaatcattattattattcataaattactcccctttccccgcacggatgttgatgattattattacccccctttttttttatcgtcatcaacctctcatctccgaccccacgccatgcgtgcttcaaccccatcccctctctctcaagctcttcaatttccctctcttcttcaatccttgaccatttcatttttacaatgtttctctctccatcccattactatacaccctgcaaaatgccttattctttctattccctccctcgctctcaattaattaagcttcttcttcttccctcttaactccattcctctgaacagtaccactgcagagttggtgcttgttcgtccgagaagaaattgcaggcctcgtcggcgctgagaaaattgtgctcctacatc

SEQ ID NO: 372412 - DNA, 484 bp, Zea mays
  unsure (1)..(484): unsure at all n locations
gaatcacaaaataattgatgtctaccttttcattgacacaaaaaagggattacaattttatgaaatttgaatttcctcctgcagtttaatgaatatatggtaggtaaatgaaatgcaccgacttaaagttacagaaaacttattaaacaaatttgatttacactcattactagtttcctagaaattgaaagaaacccaaaatatacgaaatcttaaaaagacatggagcctgtcctttcaaataacagaatccttgcttaatttcttagtctcatgattttcctcgttttgattacccacgtttttcccgccaaaagtggtaagttatttttgtctttgacctagagaggccaggggagatcactagctaactgnttctttttgttctcctcagtgcagaaataagagtataaacccatcccaaaaacggcaattagtattccaagaatgttccttccgtgaaaggntcatgcagtatgtgtag

SEQ ID NO: 372413 - DNA, 279 bp, Zea mays
atatgtatgggatcagaatatgggggggaaatgggttggattttctttagattttgttaccagaggttgagactttgtattaaaaaaaaaaaaaaagggcggccgccctttttttttttttttaagcccaaaagacggggataacttgatattattttattacatacatgcctagatagcccgctctcaaataagtcggcgggaaccaagatagagagattcaacggtcttcaaatttcacatttgcccgaaattttttaccgaaaagagggggttggg

SEQ ID NO: 372414 - DNA, 397 bp, Zea mays
ggagatgcatgggcatggcgttgatgaagtgagcatagaagagttggcggcgaatctttccctctacaaagatcaactgaaccaggttagagaactcttaaacgatgaccctgcaaattctgaatatgttgacatggagagggaactttccgaggtgagggtactactactagtattactgcggcatttggtaatatcattcaaattgctcaacctcaggaggagcattaaaaagggagtgttaggtccaaatgcacatcacgtctatcttggctcttgtgcaggtcattgccttgaccgaggaactccttgcaactgcaaagcaaaatgaaatgtgtgctcctcctaataatgctgctgcatctacaaccttgtccatacataacgagaatcaatt

SEQ ID NO: 372415 - DNA, 294 bp, Zea mays
acggcctttgttttttttttttttttttttttcaaaaacattgtatacatcatatattattctatatgacccacattaattaacaatgcacaacactgttatcagaaaggtaaaaggagcctttttcgttgacgaactattccaaaggctcaaaagaacatgcccagctcaatttgaaatgaaaaactcctgatacaatctactaggaaaaaacatactcatacgacacagaaagaagaaacatcagccgccatacaaagactgacacaagaggcttcatagttgctgcttccc

SEQ ID NO: 372416 - DNA, 241 bp, Zea mays
acaacgcaaatttatatatattaccacgggtacaacgtgcatctccgttaaagcatacacaggacagaggaaacatagtagtggaatctccaagcacaaagctacgtctagctcgtagatcagagaaaaaaaaggtagctatggcaataaacacaagaactgaacacaatatatggtggtgctgagaagctccagacttcaatcaccatgtaaaggcatttgacggggcctgactttatta

SEQ ID NO: 372417 - DNA, 403 bp, Zea mays
tttcacgcgtccgctccaaccatctccgaggatctcgtcagtcgtcacgaaatctccatggctggagcacgcgagagaggccaggatacaccccatgtccccagccgcgcccgcgctatataaagctcccgccccccattcccttccccctcctcccccagctaggtagcttagctagcgtgataatcaccgcgctaaactgatcatcatacacagcaattggcgtgtgacatgacacaggaggagggggcaggctggtaatatatagcaaaagtacaagcgttcctccagtggcgtccagcgttatatagttcgctgtccggccggacgtccttcccccatgtacaaagaggatgacggtgacgcccattattaccgtggggatgggccgcttgtggcgcac

SEQ ID NO: 372418 - DNA, 290 bp, Zea mays
aaaacgaagatggtataatttagagatcgttttttctagtagtacaaaagacaactaaaaaactacataatataaatatagttaagagagagacaactcttcaggaaaagcctatccctaaatacccttaaaagagaccttatattaaatgtacaaccagtaaagagacctagtccaccaaacctgtttgagaatattccggctctactcaatcctaccaggccagcttagttcaggcaaagaaacaggctcatacatcttgagctgaggttgtaaaaatggtacacatg

SEQ ID NO: 372419 - DNA, 481 bp, Zea mays
tgatccgcaccgccgacggcgtcatctgcgccgccacgacatccctccgcctgcccaggaggcccggcaccgttcgattaccgcacggtgacaccacggtacccttcgcgaccacctcgccgctgccatcgccaaatcgtgctccaagacggtacgaagagctcgctaggagagacaagagggatcacggcgcaagagagaagaagaggaatggaagatgtggaagcggcgaagaaaagtagcgccttttaaaaaggaggcccacacggataaggtaaacggattaccggagcgaaaaatcaccgcatctttttcctcccggtaattatctctccaagaactactgaaggtcgttcaatgcacctcacagtcttcctttgctcgccacgtgggcttcaaactctgcaattttctcccctgttggctcaatgtcgagagatgtccttaccagataagcatggcacgatacatgaagactgga

SEQ ID NO: 372420 - DNA, 317 bp, Zea mays
tcgcgatctagaactccctttttcacatcagtaccttctggtagagttggctcttgccatgaagctgtgttcaggtcaaatggagagtttaagaaggtatagctagtaccgactgaattctttagagctttgtgcttcctcctgtgaagtgtcgaattgtacactgcataaacatgcttgcactctagcatcaagcagactcttgaatttttttcttctgttctgtgccaataaagcaaccggccatctgatttcattatgtacttgtagagcagtttggttaaactcaagacgaatgtgtaactcagtatgatgta

SEQ ID NO: 372421 - DNA, 237 bp, Zea mays
ttccaatcgccagaagcgtcaagccttgcctcgcgcagcggtctggttctggtgggtgccctcttcgccggtggccggaaggcgagggggaagccggaggacgctgagggcggaccaattcaccgataaggatgaccacccgctgaggaatactcggattggaacgactttaggaattagctcattcggtatggtctaaattgcggagcataccagcattggacactaggtggcaat

SEQ ID NO: 372422 - DNA, 151 bp, Zea mays
tcttcctttctcctctggatgagtgatcttctggatacgtttctttttgcggaagagaagccaagtcgaccccaagcgcgggttaatccgcaagatgaagctgatggaccaacttgaagatggttcaatcaatcaagtactttatcgaggg

SEQ ID NO: 372423 - DNA, 322 bp, Zea mays
gccttcaaaacataatctcatttggcctgtaagcagcacagcatttaattaaccgctgtaatagctgaaattattaatgtagatagacattatgccagcaaaagcactgatctaattcaccggcagctggccagccgtaaagaattaggagataagttactccacacagtctggttcagaagatcgccgccaggcataacatcttctcatgcctaccatctacatactccagaaaatccaatctactggagattactatttacagctttgtgagcgatttagacattcctctagtgaaacgcaaggaatgcaactgatggaa

SEQ ID NO: 372424 - DNA, 193 bp, Zea mays
gtgtgaagttagcgagaagttactctaatatttccgccacttcacagattacaggtatagcactcctttaatggggagaccacagcttaaaagaacgaaacaaagaaagaaagaaaacgagggttgagatacccatgaatggtcgaaatctcatcagaggacattttggatactaacaccgaaaccactttaa

SEQ ID NO: 372425 - DNA, 331 bp, Zea mays
  unsure (1)..(331): unsure at all n locations
tggacgcgtgggcgcgggtcgcggtcgtcgcctcctctgcctccctggcacttcggctcggctcggcaaacgcaacaacacggagcgggcgtggggagcggagcggagcggtgagcgaggatcgagggcaacgtggcgaggcacgcccgagggggagaggcgactttgcttccagttccaggaaagagtgggctataaaaaggcgctcgagatccagatctgggccgatgcgaccgtcctcgctgctctccctcaccctggacgccgcgctgctccgcatcggcaatatcgncgacctgtaccacctaccagaccacctcctcatcgacct

SEQ ID NO: 372426 - DNA, 167 bp, Zea mays
tttgacttctggcgagacggtgcgtgaatggaccatcatccaatgagatccgactatgccgctagttgcccctgactagttcaagttactgcaaacgatgtcaacatagcgcatgtggaccatttttcatatgcggaggatccgatggcgatatacgatctgcttgc

SEQ ID NO: 372427 - DNA, 370 bp, Zea mays
tcttcctggccccgatgtaagtgacatataacatgctaaactatcaccactatacttcatatgttcatcattgaattgaaacgctgctatccattttgatccgttattttaattagagttaaatgcatgatcagtctctaaagttgttaagaggtatcacttttggatacgtttggttcagctttctgaacaagattcgctataaaaaatctacaatctcaaccaaacaggtacaaaaacctaatagatttccaaaagtgtactgattccggttcaatttagaatcaccttataccctagattttttttcttaaattttcatcatctatgttactaagttatcatgttcttatagaatctatagttgata

SEQ ID NO: 372428 - DNA, 187 bp, Zea mays
tctcgtggacgacacccgagccgttgcggggggaaaccatgatgcatgcagcaccgcccaggctagcgggcgacggcggcgggtcagaccgccgaccagtggcggagccatgtccctatgccgctattgtttgtctggggtggataccatatgtatttctcctcctgctcctccttcctcggtcaaa

SEQ ID NO: 372429 - DNA, 141 bp, Zea mays
ctgaaacatgacttgggcgcatgatcttctgcgtttcaagaatagctagtgaagaaccacagcacccatccgtaagcaaacctatactcccataccaccttaaaaaaacaattctgggcaccaataactgacataagaaat

SEQ ID NO: 372430 - DNA, 328 bp, Zea mays
ttgacgcgtgggcttgaccaaagtgtgacttctgaagatctgatgcaagcctttagtccatatggggagcttgttgatgtcaaggcattaccagggaagggctgtgggtttgtcacgtactctaacagaggaagccattagaatgctgaatggaagtcagctgggaggtaaagccataaaactttcgtggggttacccttctgctgacaagcaggctcaaaggaacagcagcggcgggttcggacgcgactgcttcgtttggtctcctcagtatccctacgcttacgctcagacatgccaaccgggatatggatattaattaccgaca

SEQ ID NO: 372431 - DNA, 164 bp, Zea mays
gactaattggagaaactgggattgaagcaggccttttacatacttttcatgccatacagaagtttgaatgcatcattaactcctaacagcaggaaaataatgtactgagattcacttattttgatcggtcacatgaagcacaatatggcctgacttaagggtat

SEQ ID NO: 372432 - DNA, 248 bp, Zea mays
ccttgcaataaagacaactgtcattctgtctctgtcatttgcacaatctgtcagtctcgataccactacgctctaacaatcagataacatttatggtaccatcagatggagccgtattattatcttcgtcagccacaaccctttgggcattcccggaaacatacctggaggcgaagaagacgtatactaatagcgacaccagctcaagaactgctagcaaccaatagaatcgttcaagtttccccttg

SEQ ID NO: 372433 - DNA, 358 bp, Zea mays
gaggggaaaaaggtgtgaaactgttcaattagcatactattacagcaagtattagcactgaatctggacgaaactcgaacatctgctcgaagcgagaactgaatggtagtactgtgaacagcgaaagatgcataacaacttcgtgcatggaaaatttgaacctaagctatacaaaggtatgcacaatccctcatgacctgaaagggatccaaagcgaccatttcagcgctttgtactacagtaagcgaagccactgctattcaacttaatccaagcacgttaacatgcatgctcagctacgaggagtggctttctccttcgatcaacttcttatctaaaacgccaagagaacacaggc

SEQ ID NO: 372434 - DNA, 200 bp, Zea mays
aagaattcaactctacgttaagaggcacattaccctttactatttaaaaaactacaaaataatcagctttcaaattatgctacaagtctacagcacattagtaagaacaaaggtcttgccaattcaccgcaaccgaaagtagtggaagttgagagatggtataaatcaatgggggcgctacaattccttgtatatacaca

SEQ ID NO: 372435 - DNA, 250 bp, Zea mays
ctccactcgtccgcccacgcgtccggtggccactctgctggccctcaacctcctcttcttcgccttcgccgacgcatgcggctgcaggtgcggcggatcctgccctagtccaggcggcggtggcggcggcggaggaggatctggtggtggcggtggtggaagcggcaggggtaggagtgaaagggtcggatcggcacccttgtgccgacaagggagctcaaaggaacagcagcagcagaacaggacgcta

SEQ ID NO: 372436 - DNA, 340 bp, Zea mays
tcttatcttgaagtcacctccatgactctcgcatgttcaaactctttccaacttcagcttcaagctttgcatcaaaatccttcttctcttgttcgaagctttttgatttcatggagagttcactgtttaatctagcaatcttggcttgagcttctgccagcgaaccctccattgtttgaatcacggaatccttcttctccagagcagctttgtgatctttaattttgcccaagaaaaaaaaagataaacaaaaaaaaacattataaaatcaaaaaagccccactcccatggggcggcccccttataggtaccaaggttccgtccgcctgcatgcgacttc

SEQ ID NO: 372437 - DNA, 428 bp, Zea mays
gaacaataatcatttctgattacaaagccattaattaacaggtgaatggcaaacgatacatacaactttggaccatcttttttggtggcgtgtttgtgtgcgtgtgagaacagaacaatcctattagtcctgcttacatatacattaccagcaaatgtacacactgcatgtagagctttatgatgtgtttggttcggtgtcaacgagagatgggatgggatcaactctgagttgactccatcccttattttttaagggatggccccatccactatttttgaaaaatattccttgaccgtgactctagacctccaaaccaaacatgggtcaacttagaatgatcctatcccatccctcttaatccttcctggtacatccatccaaacactacaagagtgctgatggggctttcctattaatttgagctc

SEQ ID NO: 372438 - DNA, 362 bp, Zea mays
gatacaagggggttttgtccgttgatcaatggcatgttcaaaaacacagggatcactgccgggactgaccagaaggagaagctttcccacaacgtagcaggtcaggacaagcataatttgcagatggggcaactacatttcgatttaagaacctggagaccacattttgccataaaaaagttctcaggcactacaatgttcttacaggtttctcatctcatgttttaaccggacagaatcacccacaaatgtcagaagggggggctcgagacatgcatttttgctaccatcaccttgacttcaatgagcgagcggggatggaaatgtgataccttgagctcctttgcttaccataagaagaa

SEQ ID NO: 372439 - DNA, 551 bp, Zea mays
gccagggaggctccggcctgccagccatgtctcaaatccaaagcttctcgcggaacaactgtgtgctccttgtggtgctgtgtgggaagtatgctgagaagcgagcaccagcagcgaagtctgggctggaggcgaagcggccacggccgtcttacccattcccggagctcagctcagctgggcgattggaggtccacacactgtttaatcctacaccagagcagttcctcgaggcgcagcgggtggtgcagcccaacttcttgtacatccagggtcagcagcttgaggatgagaaggagattggctcacttgtgtggggggacgccgatgtctctgatccgcaggcgtttagcactcttatcagcccaccattcccaacgatagtatatctggaagttcctattggtgaaaaacttgcccaagcagttcactcaaaggggatcccatatgtaatttactggagaaattcattctcgtcttatgccgcatctcattttcgccatgcattgatgtcagtagttcaaagttcggtgagccatacttgggatgct

SEQ ID NO: 372440 - DNA, 350 bp, Zea mays
ggtcacagtatatcaaaatataaagtacaacgatattttgccaatattgttgcaatcatacacgatttttttgacatgacaaaaaaagaggagctagccctgttttcggtacttcagacacttggaaccattagcctttagctaggtcatggtccgaaatggaaacatcgctgcccgactcttgttaaaacaggtctgcgtaagccttgggtgaaggaaaaatgaaaggggatctggcgatgggtcaatcgttggctccttcccgatgcgtcgtcgattatgagaaggacatcttttggcaaggctttcataaaagagtacgtagtcatcatcagtgttaccactgaact

SEQ ID NO: 372441 - DNA, 127 bp, Zea mays
gggccgaaacgttaaaattcactggccacttgtaatgaaaatggttttgaaacccccacccattgttggggtttcaacgggaaaattcaccctcaggggttaacccaaactttatcccccaaacagt

SEQ ID NO: 372442 - DNA, 181 bp, Zea mays
acacaatcaaccaaaggcgctgggatacatttatgatgctgcttcgactttcattagcagtacaacagctttggacgccccctggtgacggaaaactgggaggctcgctgctgatgcaggccactgttacttacatggggatggcacacaacagacatttgccaaggtttttatgctgccc

SEQ ID NO: 372443 - DNA, 131 bp, Zea mays
gttgggggatgatgagggtaaacaaaacaagcccatacggaaccaagaaagcctgacacagaccatgatgtaggcataccacccaaaccccgagcacatgctatggaaaccacccaatgcagggcacaaga

SEQ ID NO: 372444 - DNA, 410 bp, Zea mays
aaacatgggaaaaaactcccggcccgaaactggaatggtagactacacggaaccttatcgaataaggtcattacaatgaatgggtaacaaaagctggcacctcctatggtgatctggcatatttttactacatacctttttaccaattattcaaacacttttcattgggggtggccccacacccgatccattgttttcacggggtggaaattggttctggaaacgttccaagaagaaagaattgcctaccttgtttacaaaaagaaccatgactggatgggcactttgaccccaaaaaggattgcggccttttatttgacaaggattaggggggccaacatcaccagatccggtgcttcaaagtaaaacagggggcccacatttgttaccctcaaaaaaaaaaatttgca

SEQ ID NO: 372445 - DNA, 244 bp, Zea mays
ggggggtctttttttttttttctatttttttttttttaaggaggggcgaacaaacaaaatgccccccatttcccaacccccaaaacctttgatgttcagggagcccaaattaacctggggtataaacaatttttttccccgaccctaaattaagcgcaggccagggaacccttaaaaaaacacttaaaaaatgcttttggaagctcctgtgtgcccccccctgttccggcccccaaacaagggg

SEQ ID NO: 372446 - DNA, 127 bp, Zea mays
caggtataaaccatgtttaaagaaccagccgacttgcaaacactgcagaaacctatacgaccaaaaccctatagactcgacactcgccaactcaggcgaaccatggagcaggcgcaccatggagaga

SEQ ID NO: 372447 - DNA, 328 bp, Zea mays
ggcaacccccggatcataaccatttagcaaactggccaaaagaacagtaacatttggaagttccagacagctagcgttagctatacttgcaaaatgatcttcccgggctcctacatttaatggtcacatagcacatgggaagtcacatcaccatattcctaagtctaaacgggggggttgcctttcatttacaaacaaaaaaaaaagccaacagggcaacggggcgggagtacgttttaaagacggacccagtgatgacgacttccacatgaggggggttctagagaagaaataacaggcagcctttatttttacatttttgcaaaaa

SEQ ID NO: 372448 - DNA, 389 bp, Zea mays
ggtgggggccacagaccacagttacaatgattgaagtgtcttgatggggacagatctgtagcgagttcaggttgtgaataaaaaaaagagataaatcgaggttctgtcctgagagtttccagtgctctaacacaaaaaaataaactactgcaagtctgcaacaaaccaaaaaaaaataacgtgtactgatagatgattagaatataacataagtcatgcaggggtgcaggtaagagtaagaagccaatcaacagattagatcagacaagaaaagcaaaaaagtaaagaaaaacacaaataccgtgatgaagaggaatcaaacaatacacttaactaaacgtatatcttatagatgaagtaatcttctcaacttctgaaaatagatagca

SEQ ID NO: 372449 - DNA, 187 bp, Zea mays
aacccgcacacaagtgaaatactaattgaattgtcaggctgtaatagcgaagggatggaatcaaggtgaaatagctatttcttacacattgaggagaccaccttgtgtccccctttttcccaaggggaagtgaacctgagctgaggaatactactcaccacgcttcttaaggtagccatggcacatg

SEQ ID NO: 372450 - DNA, 308 bp, Zea mays
gcgctcacgcgttcgaccacgcgtgcgtccgtctgacggcagcataacataatcgtagtttcctgcagaacgcattccattggccagtggactgctgatagaactgagatccagcacgccaatgaagtggtttcttggtcggaagcctttattagaatgagctcttgcaccaaccttaagagagagaaggcacttgaccatcacgataaacacgcggagagggaacctgaaacaaaaaaaaccttgaggttttctgtgtaggaggaaagtgaaccaacaaggaccgaactgttcagctttgggttaat

SEQ ID NO: 372451 - DNA, 396 bp, Zea mays
gttgttgtcagccggcggcggacccctgctccccgaggaactctttatctgggagatcctgacgcgtctgccggcgaagcccctcctccggtgccgcgccgtctgcctctactggcgccgccgactcaccttcgacgctaagttcctcctcgcccaccaccgtggccagccgtcgctcccgctcctcacccaaggggacaggagcaccgaggacaggaggatcgacgccctggactaccgcaccggcgagcggctccccgtcgcgcggacgacgggccggaccgccgccaacgccgacgacctgaacgtgctcgcttcctgcgacggccttcttgttctcatcgccaacggcggcccccacatttggaacccgtgaacccgtcagcgcgcgccgtt

SEQ ID NO: 372452 - DNA, 284 bp, Zea mays
ccctctcgtccgcccacgcgtccgcccacgcgtgcgcccactgcgtccgcccacgcgttcgtggacgcgtgggcgcgcaggctcgtcgaggtcgcctcctacgccacgcttgtccgccccgccgacccggcctctgccgtctcggcggcctccgtgcgctgcaacggcatcacacgggacgccgtgtccgcggcgcccgccttccgcgacgtcggcgatgccgtttacgaccttctcaacgggcgggtctgggcagggcacaacattgtgagggttgattctgc

SEQ ID NO: 372453 - DNA, 197 bp, Zea mays
tctatgcttccgcccacgcgtccgcccacgcgtgcggccacgcttccgcctcccggcgcgctggcgttccgcctcccctcgccattgccgcggggcgttccgccgctcgtgggacgcgcatcgagactcgagagctgttcgtgctgattcccgcggagccttgtggctgcgactctgcggcgtcgggtggggtgggg

SEQ ID NO: 372454 - DNA, 160 bp, Zea mays
cgttctcgtgggcgtgcttccgctctcgcaccgcgtcttccttgttcgtgtgctccttcctcagacccaggctcttcccgagtccgaatccgagtctgagatccagatccgcgctcagatccatcgctggggggcgccatgaacccgacgcgccctgcgc

SEQ ID NO: 372455 - DNA, 362 bp, Zea mays
atttaatacatgctatctcctcaaaatgctgcccatcagcttcgtttggtcatcccatcaatttgctaggaacagtagcagtgtagctttactttgtcagcagctaccagtgagagaggtccttgtgggttgaccatggacgttgaatccttgatggatggtcagatcatgtatttttgttctcataaaatattcatgcatcattataattttaatacaaaagcataatcgtacaaacaatgtataagcttagagactagatcaacatattttgttaacctcattccaaacatttagcacatatgtaggggagctaatactacccatctgggacttttgaaacttgtcatactttttttcat

SEQ ID NO: 372456 - DNA, 166 bp, Zea mays
tgtctgcagcagggctcctcgtcgccggcgtgcgacgccaggtcgacaaagtcgtcctcagggtcctatggtttatccaggatcctgaggaggttcgtgggcagcggcttcatgtggcgacttctggggtgcggcagggtcttgtcttacagtgacttgtggttcc

SEQ ID NO: 372457 - DNA, 330 bp, Zea mays
cccttttcttctgtgttgggctgccgtagtaccacgcatgaggggacccgtaagatggggatctctgcctgagcggagctaacactgatacaactctggaaggggctcgaagcgatactgacggacatatcgatcatgtgactagtgtataggggcgatagactcatggatccatttagttgctgagagcctacgaaatttgcctgaggatcactgtagcccacacgagaactatcgcataaagccaatgatcagaggcatcatgggcgcatcaccgtgaacctactctcaagctataattaggtgggacagtgcggatgcttctgcgag

SEQ ID NO: 372458 - DNA, 351 bp, Zea mays
cctatgcttccgcccacgcgtccgggatggaacatggacacttcattattacttgagggggctcttagcacgagctatcgtatcaggtgtctcgccccgcgcgccgacggcggcttgcttcgccactgcccgtgcgccaccgtcctccccgacgcggcatcatctcgactggaggcgatgcagatcggagctgttgttggtgagccaggtggtgaaacacgtgtgaaacctgctagcatatcgacccccggcgacctggcatttgatgaaccttttttttgctgctcctttaaaggtggatttggtcgcaccagtttgccaggcatttctctaggcctctcaccatggaac

SEQ ID NO: 372459 - DNA, 115 bp, Zea mays
gtcccgtatcctcgaccttcccgaaaccccacttcttgtttcgagactagggatagggttttatcactcccgcccctattcgaaccaattcacctaggtcccccgccttgccatt

SEQ ID NO: 372460 - DNA, 194 bp, Zea mays
cacataaccacgcacgcacctgcactgctggtcactgtcgtccctgacgggcgtccccttcccgtgctgctgctttttcttcgtcgaaatccccgtccagcgagctgcagcgcaccacagtccacaaactgctgatcgaccctagctgctaggctggctggagcatgatttgcagcacgcagctagctagctag

SEQ ID NO: 372461 - DNA, 149 bp, Zea mays
  unsure (1)..(149): unsure at all n locations
gtngtcctgcgccctaaacaacatcaggaagacctggatgtttcctcgcgacccgcagaggcttgtgccgtaatttactgagttcaatgccctgagtttgcagcatagcgtactgtttgttttgatgtcatttaattatacaacatttc

SEQ ID NO: 372462 - DNA, 349 bp, Zea mays
tgttcggttcccctcgtctcgctctcgcccgtcggccctccttggacaagaaagcaacggaacatcgcggaaagcgagagccggcctgacctgacctcactcgacctgcgctagccgactgtctgaagttttgcccccctttttctccttcccttttgggccgtgggccggccgcgcgccccggcgcatggcgtcgtcgcgggtgatggcgtcctcgtccccgtcgcagcacgccggcgccggctcgtcctcggacctagcgcgattcaggagcagcggcggcatcggatccatgaacatggacaacattatgcgtgaaatctacggccccgaggccgttacgccaccg

SEQ ID NO: 372463 - DNA, 107 bp, Zea mays
cttattctcacgcaataaaagacctacaacacggaagggcttttacaaaagatggcggggtgtcccacaagctagagagaactatccaacccaaaactaactgtcca

SEQ ID NO: 372464 - DNA, 479 bp, Zea mays
ttcccggcctcctgcactgcgtccctgtcaggcctgctaagctccagccaaaaaatcgttggcctcggtctggtgcctgctcctcctgccgtcctcgctcctccccacctcccgcggcctcccacgcgacatgattgcattgcgggctgccgcggagctcagctctcctgtcctgccaccaccacgccgctgacgatgccttcctctcgcctgcctctgcctgcgcacaaccgaaacggctagcccgcccttcctcccctcccctttgcttccgcaccaagatttgggcgggcgttccttcttccgataaagttgacacccgtcgtctcgtcgtgggcctggcagatactgtagggtggtctggttcgtgacttgttcagtcctcctctccaggtgccgagccagggtgactgttccgaggagcgtggcgtggacccaggggaagaagggcaagtggttcggcgccgtcaagaaggtct

SEQ ID NO: 372465 - DNA, 308 bp, Zea mays
ccatggcgggtctgagttatatatatacaggatttccatggcaaatggccttattacaccccaatgtggcacttcgcattctattactaaataacaccgatttcatacatacaccattggctttcgagctgcaagcaaaatggtactgttagcgcaaaacaccctacaggttcacgccatgcaacgaaatatatttaaaagctagaaagaggccccagttgagtttgcctcaaaacactggattaatctaatgacatgagattaattttaatccaataccagcctgctacttgccatagatgcacatg

SEQ ID NO: 372466 - DNA, 196 bp, Zea mays
gctgtacttccgattggaatgcgggttggggacagaggggagttcatggggcacgagtagttttacaagaacatttgggacacacatgtgtacggacataattaaggaacaaaggaagggacatggcagtgtacgacagcgcgtaggactgctgacggggcgggtcgcgtgctgcaggaccggcaggaggaatgca

SEQ ID NO: 372467 - DNA, 422 bp, Zea mays
gagactattactctgaacgatcaatgtccaacttcgacgtttaccaatcaacgaacatggattataataacaactaacgcaggacactgatcccatcatataaacacctttcatcaaaagcagcactaacaacctatcaactaaacgttcgagacccgaaacctaaactttactagcgaaacaaatacgatgccacaagcgaagagttattttcacaaacatctaacaccaccacaatgcaccagtgctatcaacaagagaaacgatgtaactaacgtgtctaaccaaatccatccgaccaatagcggaagtaacgaatcggcttaccacatcacaattcgtctcgatatcagcgagaacgatgacgacgaactttggtttcaggtgttttgttgaggcacctggcgagcaccaatgttact

SEQ ID NO: 372468 - DNA, 263 bp, Zea mays
gttaaaaagggcggggcttttgcctttttaaaaaacccttggcccgaatacaggggttttcattttctttccccccccttttattaccgggggcgtaacccccccccggagggttttatttcgggaccccttgtttgtttttaaaagccccccccctttggggggcccctgttttattgaaacccctttttggggggttcatttttcacccccccaatgggctaaacggggggaaatttccttgggggggttttttggggggg

SEQ ID NO: 372469 - DNA, 147 bp, Zea mays
ttctttttttttttttttttttttgaacataatggcagggggtctgcctctcaattaagaagaatagaattgatccacatttaaggaaaaccggacccaaaacctacacagggcgcacgttagaaaaaccggtgaaggccctaacaa

SEQ ID NO: 372470 - DNA, 131 bp, Zea mays
ggcaccaaaataagtgattgcaaagaatgtgttctttgtatgtaccatgtacgaaacaccgacacactcgacttgtaaccccgaccgggtgcagacaggttggactcctcctatgctgcctgtatttacag

SEQ ID NO: 372471 - DNA, 226 bp, Zea mays
ccttttatattctcttcaacgatcggaaacaaaagacgggggaacttgcgaatcatggacggtttgagcaaagaggctcacacatacggaacgccatgacatctaaagaccaccacggagcagccatgtacaaagatggagggatgccacttacggtgtagctgcgaagggaagacaggatccaaagagaaaacgcacgagaccgtggaaccatttgcaggtgacg

SEQ ID NO: 372472 - DNA, 311 bp, Zea mays
ggtgaattccgtagagagatgcatgtagtggaagatcagcttggctgtgacctgattcaagtggacaaccagacggtgaaatccttgctaccttacatgagtaagttcatgaagctgctaacctttgctctgaagatcggcgcgcatttcattgttgggatgggagagatgatacctgacctgagcagggaggtgctcgcctgatcgactggccggtcttgttccacacatctggttttgctatgttctcgggtgctctttcatacttcgtacttacccaaatgcttgcttactttaaggaaaatttgttt

SEQ ID NO: 372473 - DNA, 91 bp, Zea mays
cccccatcaaaagggcaattcattcaggaaaaagatgatcggtacaaactattgtacatatttgatacactgtggaaacactacacttgtg

SEQ ID NO: 372474 - DNA, 203 bp, Zea mays
cgccctgaccaccgctgtgaccagcctaccgctaccctcatgccgacgatggctccgctctgtccatcttctccgacccagcgagcgctcgatgcagaccaccgcccggagccgcctccctactcatacgactcacagtcgtttaccgggcatcgcgcccgcgcggtcgccttgtcgacacgttctcgcgtgcctggacgttg

SEQ ID NO: 372475 - DNA, 396 bp, Zea mays
  unsure (1)..(396): unsure at all n locations
cggactcgtgggcggacgcgtgggcggacgcgtgggggccaattcaaatccatgacggaacaactgaaccgggagaaggacatcggcgacgagacaacgccgccagagagacccccgtagctaaagggttacaagggttggcctacagctccacgcacacacgtttatgacttcctaaaccgccacatccgaatgtcccctcccgctggagagccctgtcgacaatctcttccaaagctgacctaaagaacagccattgggggaaaaaccttcatcctcagtagacttttgnancttagggaccaatcaactccaggaagcagggagccccagacggaaaaaattggccgcaaaatgtatggagggaggaacaaataaaagagcaagccaagagga

SEQ ID NO: 372476 - DNA, 419 bp, Zea mays
ctctcatcgcctactcctccccgcgtgtctctctctcgctgtttgcacgcactcgctctcatctccggccagccgagcgctcttcttccagtcgagccccagcgctgcagcccttcgccgcgctctgctcagctcgaagcccatctccttgcttccccgccgagtctatccctgcgctcgccccttcgctcggccgccgtcgagcttccctttgccccatccccgcgcgccccttctccttcatcgggggccgcgcgaagctccctgctcgcccggctccctgtgccgcgcccctgcgctcgctggatctcgcgcgcccggtgcccaggtcccgaccgagctcgcctttagctcgagcccatcctttgtccaggcccggcatcttcccagctcgaatttcctctctggccacgcgccca

SEQ ID NO: 372477 - DNA, 232 bp, Zea mays
ggccggaaaattggacatttcaacaggttttttatttaaaaaaaaaaccctttttttttcattttaactggaccccgccccccacacggtttttttttttgaaaggttaaaacttttcacaggggggttcccggcaaaaacagagcaaaagtttggggccctcctatgcattgggggatcccaccccccgctccaacattttttattttccgaaaacccccggggttttccg

SEQ ID NO: 372478 - DNA, 424 bp, Zea mays
ggtacaaacaatctctggttattatgcttttctaattacttttaccaatcgatctagccgtttggtggggctctagctcgccaaaaagacaaaaacagctggctctagcttgccaaaaaggcaaaaacagctctagttccccagccactcgaagcagcagcagaggccccagcaaaacttcgaaggatagtctcttatgaacacatccctgctgtagccaacgacatagaagctaaatgactgcttgcgacgcgccattgtgacacgggttacaggcacaactgaaatgatgtgtctctcggaaataacccttgcagatggtggaactggcagccggctagcgatgacttctgatgaaaactggttgagtgggtatgaatcagcaaaaaatgcaggagtgcactggtatgcctgtatgttgcat

SEQ ID NO: 372479 - DNA, 189 bp, Zea mays
gcatacaaatatcccccagatttttttttaaaaaaaaatctccaatacagaacagttcctagatgattgatcttctcttgtttcttgcagatcccatattgtaccccctaccacataacatacctaccctaaacactaaatcaaacacgaactcaaaccacactgaacttccccttttcacccccaaat

SEQ ID NO: 372480 - DNA, 344 bp, Zea mays
ccctcgtgatcgcgcagagccaaggaagcggagcagagcaacagcttcaggtcgaggaagaggcgacgagaaggtccaggagacagcacagcacccaggatgagcctgagcatgattctgtgcggtgtctcgttcttgctggtggttttcttttttcttctcttttgaattttatttccatccttttcactcctcttattcttgcttttctttctctttttctctttcttcatttctattctttcctcttttttttctcttttcattttttattttattctttttattatcatttttctaatcacttttctttttctttctattttttactttcttcctttcct

SEQ ID NO: 372481 - DNA, 311 bp, Zea mays
  unsure (1)..(311): unsure at all n locations
aaagatgnaagcatgatacataagctcttgtttcttcttatgtactgctagaggattgaagttatgatggaaaagcttgtatagtagcgctgaatccaattctcttgaagcaagtctcaaccatgcagcgtcttacagcgatagtctttgtggctacttctttcctcgttgcaagtgttccacatgccaaaagtgctgatctgaactctgataagcaggctcttctcgcatttgctgcatcactgcctcatggaaggaagctcaactggagctccaccacacctgtctgcacttcttgggtgggggtgaca

SEQ ID NO: 372482 - DNA, 138 bp, Zea mays
ggatgggatagcatcgtcatcgcaaaatgcaggctgtcctgcttcccgcgcgggccgcgccgccgacgccggcgatgcttcggcagcgtgcggtttctgcctccgcgtgtgcgtcgcaggtctgccgccccctattcg

SEQ ID NO: 372483 - DNA, 161 bp, Zea mays
gacacaaggtatcttatgttattatatgaagcagacggtgcattactacatctaaaatttcattacaaagtagaatatgtatgaacataagtcataagagcatctcgatgtcgctccacacttttaatacacacagatactatacaagtataaatccattg

SEQ ID NO: 372484 - DNA, 76 bp, Zea mays
ggagtattggggttcactggaaagttctgcatatgattttactgacaaaaacgggtgcgcatttatatagatctgc

SEQ ID NO: 372485 - DNA, 451 bp, Zea mays
gattgggagcctctacaaatagtggagataatgacttctgtactgtatacagcactgaatggtctcaccaggtgatgagcaccttatcgccagcgaggagccgccctcattgagccatggctgcatctgttgctgcccgtgaatcatagactggatcagcgcatcagatcgtacaccgccacgtggcccattggaacgaactgtgactggactcggccaccggttgtcaggtacagtcacccaagacaatgctggctcaacctcgcgaccattcacatcttctttggtcggtgcaagcggcaattactggatcgtctcacacgcgaaggatgtccaacgtcgccgcctggctactaagtgggtgaaccaatggttgaactgtgagtcctctcgcagtctcgctctttttatctcttcgttcagttgtcagtagtaggcctaccgatgaata

SEQ ID NO: 372486 - DNA, 259 bp, Zea mays
ggggaaaccctcaaattctggaactgaaactacataggggggatttaacaacacaaaatcgtcacacgcgttttactttttttgaacatttgaactcgccagttttaataccacatatttgttacaacttacaaccccatgcagggggaaggcaacactttgaaaataaccgagcccggtgccactttttgacaaacctggaaatagggggttccactggatcggactagcctagcctagctttttgctgattagcccc

SEQ ID NO: 372487 - DNA, 436 bp, Zea mays
ctttttggatgctttaagaaagggcctggaagcatatagaaccttgaaacgattcacttctttctggcgagatagacctaaggcatgtggggtcagaagcatagatcactgtgtaggtggatagtgcaaaccatgtgcgtggctgcatgcaacagaaagaagtgaatcgtttcaaggtgtctatatactttttggatgctttaagaaagggcctggaagcattgcacgggtaacatatttgtctgacagcgattgattttgggaaccaatttggtaatcagtacaatggagtgcaacagagaagaagccttgaaagccagggaaattgctgttaagaagttggaaagcagagattttgttggtgctaaaaggattgcccttaaagcacagaggattttcccagagatagagaacataccccagctgttaactgtct

SEQ ID NO: 372488 - DNA, 452 bp, Zea mays
gattatcctcactgatcattacaataacagttacgtggaggtttggatggtaattatgatttctctcaggcgatgcagcaataataaaatgggttatatcaaacataacttgtcagaaagcaatgcaaaataatgctacatatgcgtgcataagtgacaacagtctatgcatatatgtcatgcgagggaatatacgtgacgggtaccgctgcaagtgttccgatggcttccaaggaaacccataccttcaaaataactgtacaggttatattcctctctctttatgtaaacttatttccgttaggtttcttgtttctctaagaataatctatttggtgagggtattaataaacatgatgctaaaatttgattttagccatactatatgattcgcattatattctctatcctgatcaagatacatgcatgtctatatatctatgttgatgcat

SEQ ID NO: 372489 - DNA, 432 bp, Zea mays
cccacgcgtccggttgtattggactacatcttaactattacttttacagaaaataccccaattgtacaccagcactgttgacaaatctacgaaaagcttctgtgaacaactgttgctatgcacatgcagctgttaaagcaggcttacacaagcacattcttcattcatcttgagaattcagggcggtcattttcaggcccatcacatggttgggaagctggcattagtctcccggaggtgtgtctttttttaatgttcagcattcttcattatcgttgcacaattatttatttgattcctagccattgctgccgcctcaacccgcgctcgaccaccgccgccgctacttcaagcagttagcttagctgtggggtaaaatgattggttagcgatcttttctacttttatatattgtctgcatagtacacagta

SEQ ID NO: 372490 - DNA, 436 bp, Zea mays
gtctaggagatccacccgtccttctgggagataaagacgtgcggcatgtgattgccaagaagctccgctcctgccatctatcaaggaagaaatgggcgagctgcaaacgctgcgtggtgtaaagcccagcgaagaagaatgggatcaagataactgcccactgctcaagatgtccaaactccggtcgctggagctgcacggactcattggcgccagacacggtgctgcgctgatcactgccctcgggcaaatgcatctccttggccacttgaagctcaaaggcgacaagatctcttgctgcgtcttcaccggagaacgccttcgatatcttcagactgtagagctggatggaactgtgcaatggccgcctgttgctgagtttaatgatcttcgcttcgtccgtccaaaccttgtccagctcagcctgacaaataca

SEQ ID NO: 372491 - DNA, 374 bp, Zea mays
gactatgaacttcccatcatcctaggagatgttttccttattatgaccaaaaaaaagttcctccgaagagcttggagttttaaccactgtgttcctaacttcctatgaaccttgctgaagacgaggtgagaaagttcgagtggacgcagcagacgatttccacagtacttgacaccacacggatcaatggcagagcaagttcccagaacaatcaattgcagttggattttaacccagagacacatgttatgttcaaaaggaagcacttcagatcagaaactagtagctgctagtgccagtgagaccagcggaaagcaatcatgcctgcaacagcccgttgccgccatcatctccagctcggtgcctctgagcaa

SEQ ID NO: 372492 - DNA, 445 bp, Zea mays
cccacgcgtccggtactagtatcctatatgacaggctgataaacacttctgctttttatgggacagtccttgagttcaagtgtaaatgctctctctagagtaaattgtacatgtttataacttgtgaattgtacatgtctataacttgtgaattgtacatttattaggtccatggacttgtacaagtgggagaaaaagctccaacgcttaatagagggttactttgtttaggactaggtgatacatccatgcatgcatgtctaggtacctaaagatccactttggtaggaagcatttgatcttggattctgtggtctgcaagtcagcgcatgccttctgagttttggtgatcctcttttacatagcaattacactatgtattgttgaataatgtttcctatttttactgattgataggtttggagtttcagcaacataaagttaa

SEQ ID NO: 372493 - DNA, 402 bp, Zea mays
cggtcgtgtgggtcgacgcgggatacgcatacgggggggttttttgaagattccatggaatatatatgcctaatacaaggagtggtatgatgtatcttagcacgtaaagggtagaaacaacatctttcttatgtggatttttgggatgtataattttattattttaagttgggaatagttaatttttgctgatttatgaaggttgatgtaaaaaccaaatagcgtgtgtttatgatcgtttgttgtgagcatttttaggattaatggaattaaaacataaacattactaccggttgtgattttgtgtgcactggcttatttcaggataactgatgggggggagatactataaccaactccagtgccatggaaaaaaggttatgtttcataaacaaattaggc

SEQ ID NO: 372494 - DNA, 345 bp, Zea mays
ccctctcgtccgccgccttctcctcatagccagccagcctccgcgtagggtttccgcgcgccaccatcccactccaaccccagcacccacccgtcctaccgccgtcgcatttggacctctgcgtctgcctgcagccctgttcgccaatcgccaccgacaccccctcgtcgtaccggtttggggatttcgttttccctttctctgttgccggttgtatcggggatctgggagggaagtgtttgtcttggtgctgattgtttctgacgatttgggcgtcattatccaggtcgagtggtgttggtgatgtcgggtgattagatttgggggtggatgggagagggggga

SEQ ID NO: 372495 - DNA, 429 bp, Zea mays
gttctagatcgcgagcgcgcccttttttttttttgttttttttttttttttttttttttttttcttttatcagggaagcttgcatttactacaagaggggcagtcgtagaatccaatgaaaaattctgggtttgctataaaatacaaaaggggcaactgtaattacctaatctgcagtaactaagttcaccaaagtgttgtagggctgttttttaccaaacaagaaatacattttggccctttaacttaaacacatagacatatcgacttttttttggcatcgcctcattttttttgtgcaaccatggaattgaatgaacaaatgacttgttgcagtgcacctcatggaatctgacatcaacttgaaacttgctaaaccttttgatcccactaatcatgcataagccagcagagcagccaaggcaaccc

SEQ ID NO: 372496 - DNA, 433 bp, Zea mays
tcggacgcgtgggcggacgcgtgggcagttttggagtgggtccaaccgtgccgcagaagccctcctatgatccgaagggccgacagtggcatgctaacagatcgaaggcaggattgcacattatctgtgctggctcatgtgtggaggttaggtggactgtccaaccaaccactaaaatttttgctggcgcatgtggcttgtctgtaaagacatgcacgctgtgtctcatgatcgcagacgcagcagacaaggctgcttctgtgaatctgattgcaacgtcaaaggcagaggctggctggctgtggacaggctagtacagcatccctgatggtggtgtgatactataaccaaccccagtgccatggaaaaaaggtaggtgatgcaatgatgacatccttgtgatgagcttgtcctgcaacatgacaatgtggga

SEQ ID NO: 372497 - DNA, 437 bp, Zea mays
gattcttttgaaatatggtaagtgcaagcactattggaagaatataggcactggtggtttgtccgtccaagtattgcatcacgaatcaatttgaatggtagcggtgggagtggtagtctgaatgtgcaaggatccagtcgaatgatgaatggattgcttcatcaacaaggtaattgattacatgtacccataaacaagtgaaatgttatattttttaatagatttagctggactccatgtgctatggttggctggcttgtttctggtcagttgtagcatcaactctttaacattttgaatatgttggttgtccacttgcttcatttcttgctctaagattcaagcagaacacccacttttcaacttttttcttggcattaaaatatggcgatgagatataagcagcccactgcttcataatccatatgatgtaatta

SEQ ID NO: 372498 - DNA, 418 bp, Zea mays
ggcatcaaaactcatactatatatagatggaggtgtacatatgtttgataaataaggtaacagtgcctgaagacaagaccggggttgatccaagacgcacatgcgccttgttccggttaacaaaattgagccccctctgcacacaatttaagaggaaccctcgactaaaaaaatgtaaaggcacaagagaaggttccaaaagaaaacgcaggcaagactcttcctctccacacaaccaccactaaaaactgatgaaaatgactccactctcccatcactacaagttactgggacctgctgtacaacatggggttaattcttacagcgaccaaaatctggaggctctccctgcgcttttcacctttctcggccttcaggttaacaagcacatagccagtaccaccctcttgcatatagc

SEQ ID NO: 372499 - DNA, 403 bp, Zea mays
ctgaaacccaaaagtgcccagaactggcacttgttattacacgcagtattgacacttgctaagtgcgatcgcgatccaacatttccagaacctacttcttgagtgattggagattggcttgtggttttgtagctaaatcacagccttacctcttcggtcattcatctatatactacacttggttgcttgctcttgcgctcatgccggatcggtcatattcaggcgcctgctccgcagaggccggcctccggcgcctttaccaaattcctccatggatgagcttgcagcaggaggccagtagctgtatactgtccgaaccgactacaccacgtgcacaacgaagttgccgctgtcctcctcgtcgtcgtcgttccaccgtccggagttagacatgctccgtcgc

SEQ ID NO: 372500 - DNA, 247 bp, Zea mays
ggggaacgacccatccactccacacggttggggggtttaagacagaaccaccaagattctcacggagaacgaggggacccgccacaggggaaaaaccattattaaaaaaaaaaacaggggccctaggggggggggggaaaaacccctggggggggccaccccaggatcccccggggggggaccgaaaccaacccaaatttaacccccccccccaaagaaaaatttgggaaaaaaaaaaagggggacc

SEQ ID NO: 372501 - DNA, 273 bp, Zea mays
gcgtcattggcggctgactaccaagctacagacggttggttgtgaagaatactcgaaggcacaccgtatgtttgatcataatgacaatgcaaatatggctgagaagaaaagcggaagcatactggatgacacccaggagtactagaatatctgtcatgcaccaaaggctgaatcataactgtgcagacgagctagtatatatggaacacagtctcctgaccattacgatgttatgaggcatgagacactgccacggctgatagggtagcaaac

SEQ ID NO: 372502 - DNA, 348 bp, Zea mays
gggatacagagaacatgtgatttttatgcgggataaactgaagcgaacatcatatcatagggcaaaggtcataaaacggtaagcgccttcaaaatggttcagcggaaaagacagaggatagagtaggttactccagcacactgaccagcatttttcagataacatcggccgatatcccagcccgggcccggtgtttaaatgctgttgcccccggagtacttaactatataccgggacgaagaaaaaagaacaccgggcctcttatgcgaaacactttgcacaaacacacacaacccccttccttatgccggaacctcatataacatgccatggatgatcttattctcg

SEQ ID NO: 372503 - DNA, 344 bp, Zea mays
ggggctcgaaaaaaaacgcctgcattccaacaggaccttgggctggaacaattacagggctattttcagtttttaacaactcaaacctggtttttttccttcatctacaggcatgcagggtatatccagtacgaacttgcacactggagggtacttgaagttttttttaaaaactggtaaccccccaaaagaaaaggcaagacgcgtccacacaaaaaaaaatactggtgtcagatgaaaaacatgttgttctccacatccttgggcagcctcgggaagttagggaccccaaaagtcccagcgggggagcccgaggaccccaaaaaagaaaaagccgaccccgt

SEQ ID NO: 372504 - DNA, 496 bp, Zea mays
ctttctcgtccgctctctccccctctgtccagcgcactctatctcctcactagctacccacctcagcgagccaaggccggcgaagcgcatccatcggtccatggagttgtacgtggacgagaagtggaagttctccaagaagagccggaacaacggcagccggcgcgtcccgggatccggcggcggggactctctgctgaagagatcgtccagcatgagggacgtcgcggcgatcggccggcgcggtaccggcggcgccggcgccgcggcggctggcgggtgcgcgccgcagccgtcgttctcgagccggtgcgcgggcctggtgaaggagcagcgggcgcgcttctacatcatgcgccgctgcgtcaccatgctcgtctgctggaaggactgctcgtagccacggctccagggccggccggcaagaagctcgacccctggcagttgcccccgcccgaccgaccgcccgccaggatcagagagagagagagagagt

SEQ ID NO: 372505 - DNA, 398 bp, Zea mays
gctgttctctgatggatcggttacattgagtaattctctgggcaatggacttcaaagctcatttgatggatcgacaaagcttcagtccacaacaggaaggaaagttagggtcagagttgttgagggcagggcacttacagctaatagtaaatctggaaaatgtgacccttatgtgaaactccagtatggaaaggctctataccgaacaaaaacactgacacatacggtccgaccagtttggaatcacaagtttgagtttgatgagatctctggtggtgaatatctgaagatcaaatgctataatgcagatatgtttggtgatgaaagcattggtagtgcgagagttaatctgagggactttagagggtgctacccgtgatgtttgggtccacttgaaa

SEQ ID NO: 372506 - DNA, 524 bp, Zea mays
  unsure (1)..(524): unsure at all n locations
cttacgcgtgggcggcccggtccaccgcggcgggaggagtagagtaggcctctgccgacgagggtgcgctgcttgctgggagcctgggagtgtgcaggagatggccttcgccgtcacgctcacgccgcttcgggcaactgctgtccttgccggatggaggcggcgcccaggggtgactcctccgcggttcgccgtagtcctggcgacgtctaccggagtcggcggcgaacggaccccgccgacgttcaggcgcctaagggaggagctcctccagctccacgccgaagccgacctcacccaatccaaagcaaatagcgagagggtaagacttgtgcggttgactgaggcggctgagaatcttaagaagcgagctgcaaccagtgtccgaatgggcaaagagagcgaggctgtggatatacttgtgcagaagaagaaattgaccaaagccctagagaacattaaagagcgcattgaggtgcttgacatgctntcggcaaagattagtgaggtaatttcgatgaagc

SEQ ID NO: 372507 - DNA, 516 bp, Zea mays
  unsure (1)..(516): unsure at all n locations
gcctttcctccttcggacacgactgaccttccactggcgccgacgaagaagacacataggaagaagctcaccgccaaacctcatccagatccagtcgctaccctccgaaagccgcatacggaacgtctcgtctcttcctttggatccggcagccggtgctcctcctccggatccggtggtcaactccatcacccccagctccacctcccttagtccccctccatccgccctcacccaccgcttctatatcgccacctctctcgttgtagaagacactgaggatctgggaagtgaagccgttccgccgtgaagcagcgccaccccttgccatccgcccgaccgctgggaagcagggcccacgtctccaagcttcctacaggaagagcctgcgcccctcccaaaggacaaagatattaggatggatgaagtcacacaagctgttgaaaatctgaagaaagatggagccaagctgtttcacagcttgaggagagcatngctgcaattgatcatgtggaa

SEQ ID NO: 372508 - DNA, 157 bp, Zea mays
attttttttgtatgtttttttcttctatctacaactgttacatatatatcttcatttctttttttctctttcccatttgcttgatgatataagagttccaaaccctgtcgaccatgtgtggatatatcataaatggaatttacaagattgtactgct

SEQ ID NO: 372509 - DNA, 528 bp, Zea mays
ctgacgcgtgggctgagctctgggcatgtcctctgcctggggccatgaaagacctccctgggcaggtggcgtcctgggccagtccacaaagtgttgcagggaggcggagctctggtgctcactcagactccgtgagctgagcagattttttacactcttcaaggaactatgaggtgaacttgtcagtgaatccgatggaacaaggccaaactctggccttgagctgctcacttcgaaaagatcagtgttttgttttgagaacggaaacacgctgcctgcagtgtttcctgtgttcatggaagtcagcatcgagacattgtcagagtcctgcatgttttcgctctcgttcgacagtttgttcgccagttccctgcatgaatcgttcgacagtgggattagttggcatgtactatcgaagaacgactggaaccttgagcgatttttgaacatgttcgtgtttgcaaatccatggaaacacttgaccgaagactttgagatggaagtatctactatgaaaactacagtgcc

SEQ ID NO: 372510 - DNA, 367 bp, Zea mays
gtcacccgtgccagcacactgacgtatgcaggggccgcatgaagattatatagggagcgaaggcacgataaactgaggaatgctggtgacttaaaggagctgctggatattgcctgacagaagttgcgtgaggagctgcagaggagggatgaagaatcaagccagccaagagcgatggcccaacagatagctaaagcttaacttgctgccactgttgcactagagaacgcgtgccagattgaacagattggttacgcatgccttaacatagatgcgctcagaatggtattctatgcgcgagctgaataaactagccagagttatttacttcataagcttgctctgggcactctaggtttggaacacg

SEQ ID NO: 372511 - DNA, 422 bp, Zea mays
accgcgacttttaccgccaccgcgatggcgggcgcagcaggggtggcagagactttgccaacggctacggtcgccgacgctcgccgccaccccggagccggctggcgggaaggcttggtgaccgtgagcctggcgaggtgctgagcggtagtgcatctgatgactccggtgggaggccgcatagagggagggagaatggcgtgctcagttccggcagggagggtgatgtgatggcagtcactgatgactccggcgggaggtcgcataggaggagggagaatggcgtgctcagatccggcagggatggtgatgtgatggcaggcacagggatatcttcgccgagcaagaagaggaaattctcaccgataatttgggacagggatagcccaaagccaccacattctgatgcagccagggacaag

SEQ ID NO: 372512 - DNA, 400 bp, Zea mays
cgagataagacagatctattaagataagagagaaccctttaagataagatggatctattaaaatggatacactttaatggaggataatctagttttttttatcttatgaattttatttattaatatttatgcatatatgtttatgcagatgtaattgtggacattactccacaactcatcacactcaatcaaagatccaaatcagacatgtatcataagaacaaacactcaggcgtataaacacctataaaaatagttttgtttttgttcctaagagtaggtctcttactcctaaaagtcactttaggcacaggatttcaaagtgtgaaatccacatttgtctttggaaagaaaaggtaagaataatcagagtaaagcggaaatagatgagaaaagatta

SEQ ID NO: 372513 - DNA, 103 bp, Zea mays
atcagaatatacattcatacaaccatacttgtcaagatgcaaagcatgctatatcaggatccaatacaaaatgtgatggtgtgtcatggcggatattaagggg

SEQ ID NO: 372514 - DNA, 195 bp, Zea mays
ggaatactagtacatgtttacagtacgtgtacatgcacacggacaagtgacagacgccgaaagttccgagctacatttatgctatgcatgcactttatgatatctacaccaccaccattcattcatcgccacatgagtaataacattatgacacgatataccccttggcgaaccgtacgtacgtacgcacgcaca

SEQ ID NO: 372515 - DNA, 379 bp, Zea mays
ataaggaagattttattaattttaagaacattatatcgaaaggatacatgtccttgaaacctctttcagcctctactaataaaagcatacaacttttagaagaatgatcacacatacttacatacactttagtgactatcaatccgaagactagaccgccacccatgatcctaggcaaaaaagaccttgaccacttgcatcaaacgttgtgtagcctccaccataaaaaggcaagaatccagcttttgcagtacaacccaagtgcgaaaccaatgagagatagtatggaccgccaccaaggagaaacgctagctgcttttcctcgagaagtacgaaaaagccaagggccatgtttgtttcggcttttggtagtttttgg

SEQ ID NO: 372516 - DNA, 494 bp, Zea mays
cattgatgggttttcttgatgtttatgttgctattgtgttctctggcgtggtccgagatttccagaataggtatgcatattaaggaatgacatatttgttttcttattaaacacaaaagctgggggcttggtattaatgtgaccgctgctgatactgttatttttatgaaattgtttggaatccaacacaagccaagctagcaatggatagaacacacacacacttggtcaaacaaaggaggtaattgaaacttcagtttatgcaaagtttatttccttcagttcacagaccatcatttataatttttaaatgacatctgaacttcatgacaaactcactatgaaaatatgtgtgttgctgcagtttgactagctgttgtttgataatctttatggctaacttgtttcacatttcaaaagttagattgattattaatgaaagctaatgaggcggttaaattttcaactccacttttaatcatcattccttttca

SEQ ID NO: 372517 - DNA, 630 bp, Zea mays
  unsure (1)..(630): unsure at all n locations
cagcactgcaagtaatcttctaaatatttagtttttgttagcgtttttctggcattacatattcacattttttcatcctctgcaaccatttcattttcagaagtttcaccctttgacactattctacatcttttacaggtactttagagttcattaaactgatcttttgatgtaaataggttgtgcatcatctaactgtgttctttgtgcagcatgcctaaagatgccactcagttatatgctgctaatgaactgtaagcatagaaactgcacaatttgtagtatcactatttgtattcttgatgtatagcttgcagtcttgcactaatgcactctaccacagtttttaagtaaattgctgctccatgttttcagatacaataaagggtggttttaccacaaagactaccgtgtctggctaacaagagcgcctaattccgcacctcttgtgaaaactccacttcactcaaaacatctagcactaatgtgaaggccattttttgagggtatataatagaacctaacttgtgttgtcattttngtgcatggctttatggaggatcgacaacaacgccaatagaacccgtcgcaattatattctaggcttagtacattgttataatttataga

SEQ ID NO: 372518 - DNA, 509 bp, Zea mays
cagacatgaaaggaaacaaaatcaagatttgaagggctatttcagtcaaggttctagtgtctagtggaagtggaccaaacactcgtgttactgaagtttgccttgaacacgaaatacaagttcaagttcaagagaataatagcgaagaagttgcacttgttcaagaagagaatgcacctattccaaatgccaatagtgaagatgttaatggtttaaatcagttcaactcggatcacattatttctgatctgagacttcatattcaattgattcttttgctcctaatattagagatgaagttagaatgactttcatagctaaaggtccgactcaaccaaaattggtcataactttcctcggtcacatggtaaaaggagcttccaaaaacattggttcggacaacatagttggttggaatatagtgtggataagaataaggcttattgcttctattattatccttttaagcatgatcgaatgaatgataaattttgccatgatgcatttac

SEQ ID NO: 372519 - DNA, 545 bp, Zea mays
  unsure (1)..(545): unsure at all n locations
ctccctctcgccagtcgcgctcggcagtcggcacaggcgacggcgtcggcgctcgggctctcagcgacggcgtcagcggcttcccctctcgcctcgcgccctcgcctccggtcctccgcacaccggtcggtgaccctgtgtgcgtgcctctctctctcctccccctctagtggatcgtcaacggcttccggccccggaggcttcgccgcgcgcggcctgagggcagcgggagccagcagccgctgctccaccaaggcgatcgcgcctctttgagagcactcatgccccaaagcgaagcgttacccatccttttagcgcttcagcaggctcaagagtgcgcttagtgctgccttttggaattctcgttcctggccaatttgtcatcagatgaccatacatgacaagggtcatccatgactccggagatggcatgcagaaggaggcactcgatttggtctcatctgatgttaactttcccaagggctgtttcccagactataggatnggaccaaacaacccaatcatggatccagaggaaacgcatg

SEQ ID NO: 372520 - DNA, 490 bp, Zea mays
ctctccttcctcggcgtctcgcacaccccagcaccttcgtctcccctcccctcccctcccctcccccaacaatcggaaccggatagaaagttcggcttcctcccggacgactcggcgcaaggtcgcagcttttctctcgatttttcgcgcttccccgttttgacgcttgcttcgcatggggattctggagatctttggggcggttcgctgctgagatggttcgcctcatcacgcgctgctgtgactcccaacagttcttccgacccgaggagcccctgttatgaacggcatgccgatctctgcgtcctctgcggcaagcgtcgacagtggcgcggtggcggccggcacacccatgaagaatgcaacggcggcggacgctctcgccgagatggcgagacatcttaccgtcgacacggaagacaccttcgcgggcctgctggagctcgccgctgacgacgacgcagaggggctgcgcctcgcgctggaacgc

SEQ ID NO: 372521 - DNA, 399 bp, Zea mays
gaaaataagcactaaccgatgtacaggaaatcatgtgcacaatgaacatttcataagcagtataatgggaaaattattgagaaatggtttattgtttaagcaaaacaagtacaagtcagcatgttgtgttgtgcgcactccacgccgtggtccacgtcgcgaagtcggtcgggccgtgccgagaccttcctactcacgaggctcaccctgatggctgatcctcctccgctaccttgggtacgcatcaactccgctgctctcctctacttggacttcggacaattttgcacttttgcttgtgctttgcttgctctcctgttgcacctgtaagacacattgtttcgtatttgcagtcacaacgatgaatagactgttgtgatcttgccatgttgagtcaaa

SEQ ID NO: 372522 - DNA, 171 bp, Zea mays
tcgtccacgcgagcttgttttcacggctcaagctccttcgaccatcaaaagggatctggataacatggatgcccccctttctccgcctctttctgtggctggcggctcataacaaatgacggaccgctaataggctggcaaaagaggtataaccaccaggtcagaagcccc

SEQ ID NO: 372523 - DNA, 559 bp, Zea mays
cgccgacaaagtgctctcttcttcggtaccacggacagagataggggggaaaggagactatttccggttcagcgagagggactctctggcactggaggcatctttcttggagagggaggaagagctgcttgcgtactggtggagggagtacgctgaatgcagtgcaggaccaagaggatccttggttgaaagtgatgattctgcatatctttataaggttgaggaagagcgggttggggtttcctgtgaaaggtggactatatgaggttgatttgatgaggcggcattgcttccctgtgtactggaatggggaaaaccggcgtgtcttgagaggccactggtttgctcgcaaaggtggcgtcgactggattcccgtgcgcgaggatgtctctgaacaacttgagttagcgtataattgtcaggtctggcatcgtcggaaatttcaaccttcaggcctatttgcagcaagggttgaccttcaaggaagtacaccggtcctaagtttggtagcaacacaatcaaattaagacgcggatatttctgttctgaatctgcaagt

SEQ ID NO: 372524 - DNA, 476 bp, Zea mays
tcgcgaagactttgtttgaaggtcgtcatcatttcgtgcgtcatcaaggaatccctagaatcggatgaagacaatgctattagcgtggtattccccaagtgctcgacacaagagcggaaccagaatccttgtcgtgttcgtggataacacgtcaaatctagaatggtacgttaaataatcgtgtgatgcggaagaagacccaagtctaccccaagcgcgggctacctctgcctgatcaagtgctaggacatggatgatcgtcaagtggacgtcgcctaacatacactaacctagtgttactcatatgaatcatcatctccgacatccaccgatcgttttttcgacgttgatgtcttattccattgtggggctgcagctatgattttgttccttgaaccaggaggccgtcctcgcttacgtctagataggttagccaatcgaaccctattatcctccacagttaaacacgtacgact

SEQ ID NO: 372525 - DNA, 145 bp, Zea mays
ataaaaactgagtgaatatttttggtttgtagaaactggaatttcatatggaaggtgtaaacttagcaataccagataaggccaagccttagggaagaacaatcaaaagttgtgagcaacaagtttttaaaattgggtgcgaaag

SEQ ID NO: 372526 - DNA, 273 bp, Zea mays
aaaatgcacgcgaaaccattgggtgttatgttatcaggtctaagaaatacatgactgggcctccacacatatatctcattttcgaaaaaccacatggttttggtagggtaaaacacacacgcacgcacgcaggatgttaaaactctctgtctgaagtatgcctgggacccttcttagcgctgaaggaacaagcttatttaaaaaccgagcaggttactttgtatcgagtaagggcacaagcactcgaaacttggcttgtgacggcgaaagaaa

SEQ ID NO: 372527 - DNA, 270 bp, Zea mays
aaggggcgaagggaaaatttacattttttggcaaaaatcccccccgggggtccccccggcccaaggggcaaaccaaaaaaggggcccgggaaaaccccccacaaaggggaaggggggaaaaaaaaaaaaaaccctttggaactgggccgccctactttggggcccccctccccccattgggaaggccctgggggttcgaccccatagggaaaaaaaaaaccccccttgggggaaagggaaaaaaatttcccccccggggaactttttttt

SEQ ID NO: 372528 - DNA, 263 bp, Zea mays
ggaacaaatttggggaaaaggcccccctccatgcgggtttaagggggggaaaaaccaaaacccccaagttttggagggggcaaaacccgggcattttttaaacccccctgggccccccccccctgcaaaaaaaggggggccccccccggacccccaccgggggaccaaaccggggtttaagggggggcttccccttgaagggccccttttgccaaaatttttgctcccgggggggcccctttacccccctttttaaggaaaaa

SEQ ID NO: 372529 - DNA, 409 bp, Zea mays
  unsure (1)..(409): unsure at all n locations
ttttttttttttttttgaaaactactactagattgctcaacagaaggtattcccgtggggaactatacaatgaccaatctcttctggttcaagtattattacagatgtgacgcacaagaacagtgatcaatttgtacatcacgtttcgagaacgtcgctaatgctgcaaacaggcaaacaaaaacaatgcctccataagatatatggaaggggggattaccgtcacgcggtgtacaacctctaccctcacaagcacacaaatagactcctaaacaaggcaacgactgttgtgcaagcagctttggcnaaaagagcgtgcaagcaaaccatctnatccgntagatcntgatccaaccgtacgtcatatttaacacttaaacttttccaccaccggcttaataatctatat

SEQ ID NO: 372530 - DNA, 310 bp, Zea mays
aaaacagacacccatgtttagaatgttatcaaagaaaccaaggcaggggggccatactaaagagtatattttgggaaggaaatcaaaaaattaaaatcagaaaactaaacatcctatgggcttaagaattctgggtaagtgggccctataggctgggccacatgagaacatgacctgaatgggctgaatctcatgaagacaccttaatgctccacaaaccattttttacttgcctccacatccagagcataaatccgcacagggattatgttgatcagctttaccctttaattcctgcacccagggacaa

SEQ ID NO: 372531 - DNA, 496 bp, Zea mays
cccacgcgtccgttcacgcgtccgcggacgcgtgggcggacgcgggggtgtatccacaaggccacaaccagtttgtatgatttaattggcgtatgaatccgagatgagtgtttcgtatgattttttttacagtctatgtacacaagcatttcatgaagaaattatttacttgactcgataagttccaagttcctgcttttgacattaatttttttggtcatcaacatgcgaagctttacatgtcttcatgttagtggtcgtcaaattttctccagtattgcattgagtagctgcagtggtgaccacacaagtgaacgagatgcatagaatgcaggtaagctactgcaaatttatacaataatttattgtcaagaaacggacgctagattactgggccagatagatcttagctggcaaacaatatgagaactgatgtatatgagaagacatagttcttcccgtgaggtaaaaatggtgtccattttttttcttaaaa

SEQ ID NO: 372532 - DNA, 650 bp, Zea mays
  unsure (1)..(650): unsure at all n locations
agcgagggtaccattgaaaacatgaaaaaagctgatgattctacgtactctgcattgaatgaagatgatttccagagagtggtttttgagaataaattaggatgtgatgtttatcttaaaaaaaaaatggaagatagtgaaatcactattgagcttttacagcatgagagcaaagtttcgttgttgcttccgcctcccaggttttcagataaactaaatgtgttatccaattcaacagaatcaagatactatgttgttgtacagatctttgagtctaagggcttgcctatcatagatgacggcaatggtcacagctacttctgtgctttacgcttacttattggaagccatgcttctgatcagcacaaagtttcccacagagtgccaggacgagatgtgtaaaacctgtggaaactactgagttactgacccactgtgccaagtggaatgaacattttatatttgaagttccagaacaggcatcagctaatttagagatnngagtaacaaatcttgcatcacaagctgggaaaggtgcagtaattggttctctgtctatgcctattggacgagggagcaccatgtngtatcgagctccttctatgaggatgattcagcatgtttctgatgtcaaacggggtgctacatgt

SEQ ID NO: 372533 - DNA, 522 bp, Zea mays
  unsure (1)..(522): unsure at all n locations
cccacgcgtccgcttctatagaattcgcaaaagctgactgttagtgtttgcgattatggcctaagatatcaaagtggttatgctgaaggtgaattgttcttcaggacctttcacgggttattgctggtgttgacattaaaaattggccgaagggggctgaatttgaattttctggtaaagtggtaatacacggcagtcggggttttaaagtangctaggctgggtttggtgacttattcaaaactcaaaatagacttcaccattacgtttctctcgttgtgacgataatgtagtctctatctggctcaaattcaccaccagcttcatgagctgtttgaagctatttttgttttgccagacagatcttttgtaaacagaatcacacatgaagcttcttaaatcctgctctcacatgggtgggataaagttgaaaatagtaggttttcccagcttcattccgacatgtgggccacaacatgtcattatgtcagcttttgtcccgtgaggctcgtgtgtgggtgc

SEQ ID NO: 372534 - DNA, 212 bp, Zea mays
ttgcttcccttttcttttttcttagtaaaggcaaacgagcgcgggaggttaataatggaatatttgataatctcataatacaaagacaacaacttgagaatggaagcacacaacttctgcttccatgccaaactgacaaagaaaacatggttgtttgtcggtaacattttcaaacagaaataatggaatcacagtcagtttgacgggaccag

SEQ ID NO: 372535 - DNA, 468 bp, Zea mays
tttccatgcgtccgtttttttttagttcatattgcacttgaatacaccttataccacttcaatccatctcaattcaagattacccaaacaagccctagagggaccaaagcggttcccaatccggcagtgacagcgccgcagcagcactcttcggcttcggttataccaatccagaagaggatttaattcccttctagtcgaggggcaacaacgggacgacgacgatgcagcctccaaacaatcattgccaacagaacaggactatagacgcacgcacgcacgcacacttgacgaacaaggctcattcatccggatccagcagagaaaccgtcctaaagctaggactatacatgattacaccgcgtacaaaggcgtgtcaaagcgattacacaagcatacatacgtatgtacgctagtgtggtggcacatgcagcgggatttgagagaaagcaaagcagcgtgagatga

SEQ ID NO: 372536 - DNA, 331 bp, Zea mays
gccgtagtcatcgtttccagagacccaaatcgaggggggcgatttagaggccgtgacccgtaccacgcgcagagcgtggtagccggattctatcggcgccgactgcccttggtcgagattgcccagaagactggtgcaggccgagtggatctcgaggcataaagcgatgcgggcgcccggcgaggatactatgcctgcggtgctcgccgcatacgctacccatcgagccgccggtgccatagacttcggagacggccccttgaactgttaccatagactcaagcatcgtgatagtagtatgaatactagtagaagaaaagtgagattaacc

SEQ ID NO: 372537 - DNA, 445 bp, Zea mays
cccacgtgatcgctcgtcgtctcttccttggcacagtcatagtttggcaagatggtgagtttttagactgcttactggtggccagcttattggtctttggaacaggcagcagtccagttggtcttgtactgatcttgctgaagaaagcatcctttgttgactcattttgtgaggatagttccacttgggtgttcaggtgttgaatgggcacttcttcctcagtctccaggtggtctggaaacagaatggcatcaacagacacaggcggaacagccaaggctgctactacgtctcgtgtatgttcaggtgttggataggcacttcgttatcagtcccctggtgtcctgaaatcagagaagcatcaataggcttcggcggtacagtcaaggctgctacaacgccagagcccaagatggggggggggaaggagctgaattatgttggt

SEQ ID NO: 372538 - DNA, 331 bp, Zea mays
ggcttggggtagagcagaggtcgtgttgaaatctcacacgggaaataaaatccccagatgcactggctttacaaagaacaaaccggtgtacaatcacacttttcacacaccctgtacgagcaaaggttagcgcgtccaagatgggtgcgtgtgcatagcgggcgattcatcacagtagccaaagccacaagcaagcagatcaggggtcccttcgcccttgggccttcgtcgcgccgggccgatagcatcgggccgcccatcggcgcagtgctcaggcaggagacaacagtgacggagaaatcgaagtcctcctgccggctccatcgacgtt

SEQ ID NO: 372539 - DNA, 465 bp, Zea mays
  unsure (1)..(465): unsure at all n locations
cgcgtcgttttgtccgtaatctcctcctccagccacgccggtgctctcgcgctccgctgctctcgcggaatcactcgcggaatcactgctccgctgctctatccgccatcagatttctggagtagtcatggaaggtgccgctcttgatttctaaacagtgcgccaccaatggcgcctgagcccccgccaccatttcatccccttcccgcccagtgtacacaccctacctcgccccgcgtctagatgcacgcgtgcccgcggatgtctctggtgcccccgctcccatcctcctcgcgtcccatccccgtcggcacgggcgcacgacccccatcctcgatgtcgtcctagctgctgcgtgtgcatctncacgcgaacccctaccattctcgacgtcgtcccagttgcggctgtcgcatcttcgtgtgcattttcacccaaacatgcaaggtcaccgggggcccaaac

SEQ ID NO: 372540 - DNA, 338 bp, Zea mays
actcccatgcgttcggagcagaaacacgcaagcggaaggggttgaatggaacggcggggcgggcacccaaagagccagagcggggggaccgtgagcccaggctgcgtacacatgccagcgcgctccgaccaccgctggggacagcagaagccgaagatcagcgagcgcagccaccccgacagccggcagccccagctccaatacggaagcccgcacggacaaggtgactggcgcgcgccctaggaacagaccgagggccacaggcgctgagataaaaaggtgggacaccaggaacagtgctaaagacgctgctatagtcggaccgggcctgggaacca

SEQ ID NO: 372541 - DNA, 330 bp, Zea mays
gacatgtggtgtttgggcgggagcagcaggaccacggccatgttcacgttcaccaccgagacgaccacaaaggccaccgtacaggggcgtatggcggggactgcgggggatacggacaggcaccgtaacgcgacgcgtacggccgcgcgcacgtggaccgcgaaccttacggtcaacctgcgtaccagggcgcctgcggcggggacggggacggctaccgacgctgcgggcaagggtacgcgtaccgggccggctacggggacgggggcgggtaccgcaacgtgcaccacgtcgggcacgaggggcgtgactagaggccttactacggcg

SEQ ID NO: 372542 - DNA, 307 bp, Zea mays
  unsure (1)..(307): unsure at all n locations
gggtacgcagcagtggtcaaganaagaaggaggggaaagtttaaaaactnaagggcctaaacacgcaccacaacggcaaccagcaccagccacccgcatctaccatcgagaacgctcatgcgcaaagcacacccgagcacaggaactacctgctcactcgcacgacatccacgacgccgtcgagcccgaaccaggcactcagcaacaccaggcaggttatcgacaaggacacgcaggacaaccaaaagtcgctcgagggaccacttgccaccgaaaacctccagacgatggaacaaaccatggacaa

SEQ ID NO: 372543 - DNA, 194 bp, Zea mays
aacgacaaagcttgccacagcactgcttgcctccgattaatcacaagtctcagctcaactctgtacaatgatgaaacagttgtccagtacaacgtatgcctttcctcgagttcctggctctgccgagttttagcgccctggaagggttgtcgtatacgtatactttagaaacattctttcctaggatgtaatgg

SEQ ID NO: 372544 - DNA, 277 bp, Zea mays
ggcaaattcaaatggtctgattcatatattcagtccccagctttttttctgggtatatatatacagggggggggccttaaacaacattttttacatatcacattctactgattccagaagggtgataagcccttctttctggtcactatgaccggtggcaacaatacatttgggtcctgggggggaatcaatcaaatgtccaatcgggtctcttaccaaaatagatcatttttccccacagacgtcaatggggggggcacttcctcctcctcctcca

SEQ ID NO: 372545 - DNA, 378 bp, Zea mays
  unsure (1)..(378): unsure at all n locations
agggccgaccaatctcataactggtcatttcgttatagtaataaccaagttgcaggtaccaattcagccataaaaaagaacaggtataccgagatcttaaaatacggtataccacaaaggagatgatacaattgcttagagaagcttcactcgctctgagttctattgtatatctctcactacgcctgaatcagctaagaacagggaatatgcgtgttaggtgctcaaatggaacggtatcagctgtgttcttcttgagctggggngtgattgaactcattgcgtggaagaacaatcacttgagactgcccaccctttctcaattacccaacctgagttcgcagcatggtacttaagaaacttgtccaaagcgagacc

SEQ ID NO: 372546 - DNA, 491 bp, Zea mays
gcccgtccttgccggttcgttctacgcgcccgccggttccttctttttacctcgccggcgacgacctctttgtctgcatcggcgaattcggccgcggcgggcccggattcagcgtcagtggtggcagcttcctcgtcgccctcgttggatccttcgtctccgaacatggaccggggtgtaattaaatctccatggtctcgaagaaaaaggaaacgagcgctcacttgtcaacactggattcgtctattttcagcgaacgggaagtttcgtgatgggggaagaaagtttctaaagaaggttcgcagtgggggaattgagccaggcataagggctgaagtttggccatttctgcttggagtgaaagaatatgaaaaattgaggcgacagtgccaccatgttctgcattgcaatagaggaaatggtctgaatgttataaatgagttccttgatgaggacttctctgatggggctgaaggttcagagtcaccata

SEQ ID NO: 372547 - DNA, 448 bp, Zea mays
gccatcattgttcacttcgtcttcctcccttccccagttcagatctactccactgtcaccttcctctcccgagccggttatcatgatgtctccgagcgaaaaccctaaccctaatcctaatacacaatttgagatcgggaagcttttcaggccaacgaatcccatgcccaacgccacccccaaccccatcttccccagcgtcactggaggcccggtgccatctagcccctactgctaccctgcggtgaccccgcccttccaccacgaaccctacattcactatccgcaggacctacacgccatgacccgcccagttgtctccttacacatgccaaacccaaacctgaaccccaacccgaacgctaaccccaatgccgatcgcccgggccccaacccctgcgcgcgcctgatgcagctgctcgggaactccgggccgacacagttcgag

SEQ ID NO: 372548 - DNA, 188 bp, Zea mays
aaaaccccaaattccccttttattggacccgagggggtttttaagattttttttaaagcaaaaaggccggcctcaaaacataattcatgatcccgggggttgaaaaacttggtcattgggatttgcaaaccctggccggaaaaaaatttcaacggcgggcaggaattcctcaggcctttcctgggggg

SEQ ID NO: 372549 - DNA, 274 bp, Zea mays
ttttatttttttttttttttttatcgcattcagagggattacacatttacaataatcaataatgaaaaactcaaccagagcactacaaaaacacagggggggcttaccgacaagacatgcaaaagaatatatcacctgaaatacaaaagggagcaaaatttctaaatcgcaaaaaccaggtaaagctacacaaacaccgtcatggaaacaggttgagaaccatttggtagccaaagcccacataagggataaccagccaaaaatagcaccattg

SEQ ID NO: 372550 - DNA, 478 bp, Zea mays
gcccggaattacttgttcgttccacgcgtccgcttgttgatattaaggccacagcagtcctcacatattgagaaatcgctatcctgacaagctcacagaccacagtcattaagtaacaggtgtaaggctgtacaaggacaaaggcctctttcttgacagggtcaatatccggagcaaagaagagtacatgcaagtgacagagtcaaacaagctgaaaggcagattcggcctccttccaagtccatgccatcacggtcagtctcttccaatggaattcgtgatgatcatgcaaaaaggaagcaagtggcaaaaagaagatttgatgaagatgatgaagaccccttagcaatgatcagaaatatgtttgggtatgatcctagtagatatgcaggcagagatgaagatgtcagtgacatggaagccgattttgctactatagaaatggaagagaaaaggagcgcgaggattgctaggcagg

SEQ ID NO: 372551 - DNA, 286 bp, Zea mays
ggcaccaacaaactataataataaatcactgacccatgcatcactgccggaatccaaactccagagctaaaagctgtatgcacaggccctctatagcatgggggaatctaccgggccgggccgaccgatcggccggggtcgttgctcccgctccaccagggggcaacaacacacaccccgcccggccctttgggccactcccccggggggctcctaggggggggccacggtctccccgccgtttccggactggtcggagccgctggccccggacacaggacggggc

SEQ ID NO: 372552 - DNA, 307 bp, Zea mays
tcgatcgaaagcgcgcctaaggagacaataaaacgggaactttaaccaaacagcacgggaaccacgcccaaacgaagagaaaagagaagaacctcaatccggaagcgaaaaggaccagaagaaaccagaggcgactccagggacgtgggcgatgctgcgcgcgggagctaggcagctccttgccccggggctccggcggctcggtctgggcaccggcgccgccggtcaggtgggcccggccgccgcggcggcggggatgagggcgtaccacgagcgggtggtggaccactacaacaacccgcggaac

SEQ ID NO: 372553 - DNA, 455 bp, Zea mays
ttcatgctttcgcccacgcgtccgaagaaagtggggggaatgcagggaagtaagctaatgagtactgttttttatttataatatttgagcaagtcattttaaagtattgtcctaaatactgatgtgttctcttccggtattgatgttatctgtcttcttggcctatatttgacgcaaacttcagttctcacagaaacaaatggtagtgtgctctatttgatcttgtcaatttgttagttacttgttgcgcaggtcagtgtgaggttttctcaattctttttttagttctcatttttaattgtaattccacctaaatgattatgtttctgggctggttttatttattctgactgttttctttactactgtctaatttagttctcaatttcttgtgcagtgtccatgtactatcttgtgcggatttcgcgcaccatatcaccttctaccggatcttt

SEQ ID NO: 372554 - DNA, 212 bp, Zea mays
  unsure (1)..(212): unsure at all n locations
gacatcaatagttccgtcccgttcgtgacgacccccggtgcttggagggggagggggagggggtaacacacgcnaaaacatggccatcggcaccgggtcccgccagccggaacccgaaacaactaacgctgacccgggagcccaaacaacaagctcctgttcgagacggacatgcaaccgcagacccggagggaggaatacataaagaacgc

SEQ ID NO: 372555 - DNA, 241 bp, Zea mays
atattatataccggccggaggatatgactaaaaaaccacgcaatgctcacataacataggcgaggagacgcactgtcactctgtttgttcagtcacaaaactagaactcagaaaagcaaggcgtgacgctcgacggcggcgcggcgccgtacgtaccgtcccttctgctaaccttgacggcaagcccattcttcatgtgaagcatgatggacagcttcggctccaccacgtgtcccggcac

SEQ ID NO: 372556 - DNA, 500 bp, Zea mays
  unsure (1)..(500): unsure at all n locations
gccattcatttgttcatgaaacaaagcactatcttgttctagtgctggtcacccaatcttcctcgcttccacagtcacagaggccagaactcctttttttttctggtggaatgtaggggcaacgcggaaaacacgctgcaaaccttgcgtgcaaagtaggcttttaccaccaaaacctagcaacaatccatgttcttgcgagaatggcaggcaccagcactccagcagagtccactacatgtattgcatcagtcagttccggcgcaaaaagtgcaacggcgatcaaaagcgagtgtatactcggactggactgtagggatacacatcctgtgcatcgatcgagatttctgcggagggcggacgtccaaagtcgcttgctttgcttcacccggtggagaaaccagagcacagcgcatgacttttataaatatatatatcgntcgatctatctatctatctatatatactcctggtgcgtagaatcggcacaagggtgcacg

SEQ ID NO: 372557 - DNA, 310 bp, Zea mays
gttgtaagccggggcaacgcacggtcaaccgactagtatacaacaatgtatcggtttccacagaccccctcggtgaatatcgacccaccggtgtctgcaaacaacattccagacattccagtttctcgtacaaaatggggaaaagaaaaaaaaaggcaaagtgggcaagccatacatgacatctgccaaaaaaaaacacccaagcagccccactgtaaaaaggactactcttttcttgtatttccgcccttggaaagacttttgaccctatcagcgtatctcaatgtatttagtgtgtgttcacatgaac

SEQ ID NO: 372558 - DNA, 333 bp, Zea mays
tgtttattttagtaagttcgactaagtttatataaaatagtatcaacatatgcctgcaaataggttcgctatggaaatgtattttataagtagtctaatgatacttatttggcatcataagtatttgtaactttttttgtacaaatattggtcaaactttaaaaattggactccttgaaaaagcaaggattgcactctttttgggacggaggaagtattatctaaatggaattacattaatggcgttctgatattcatattatgttgtataaaaatgaagcttaaaagaatacatagttaggatgactttatcttttgcctaataaagagaga

SEQ ID NO: 372559 - DNA, 414 bp, Zea mays
  unsure (1)..(414): unsure at all n locations
tttctagactcgacgccaagggtttgggccggccgagacagcttccaatggcgaaggtttcggaaagggatgcttagggtttcgtgaccaccgacggcgctcttctcatcgacctacggtgacatttgcgaccgcatcaggtccgttcttcgcttagtctgcgatttctccatccttttctcctcctttgtgctctccgatggcgtggccactgtttcttatggccatcagcatcgctggcctctgctccatgcggatatgcctttgcgaacgtgcatctggncgcgtgtgtatccttctgcaatagctccatccgtacgccgccaaataccacagtcacgtccctatgtacagcaccgaatagcgccaccgcgaaggtgtatacaggcatacagcggatgatggcggcatggg

SEQ ID NO: 372560 - DNA, 262 bp, Zea mays
ttatgcaacaggttttgtttcacaatttcaagaatataaggcattatccttttccttgaactctcaagagagctgcatttcatcatattaaagaagaaaaagtggtaagatcccttacaagacacccgcacacagagaaagttctaagattacagttgcacccttggctactgtattaataactttgacctatgcatacccttcctctggtgcaaaagcaagcaggtaggagataccttgagccacattcatacctcatatt

SEQ ID NO: 372561 - DNA, 393 bp, Zea mays
ttcccccgagccgtttctcttctatttcgggttccgcctcggtcccttctctcctgtcgttcccccctcccctggcgattagctcccgcccgcctcccgccccgctccccaccgcgctcgctgcgctgcctgtcctggcgctacgtcctgcggcgccgcgagagttggagggtgctcgtggcgggcagatccggcgtcggcgtcggcgtcggcagacaggctcggaggtgagatcggcgtcggtggcggcggcggagcgcgcgaggtggtcgagggaggaatcggtggcgcgcggaggcgaggacgaggctgaggaggacgtcgagctcggctggtgctgcagggggtatgaagcgcggcgccagagacgacgcactcgtggggtcacagctc

SEQ ID NO: 372562 - DNA, 235 bp, Zea mays
ttgagctccgcctgggcctgcccttgagaaggaggaggaggccgggaagatgaagcggtccccgagccagagcagcgtcgccgccgccgccgccgccgtgctggctgaccccgccgagaagccgcgcgccgccaaggctcaggtggtgggatggccaccggtccggtcgttccggaagaacatcatgtccgtgcagtccgacaagggcgccgccgccgtcaacggcgacaagtcc

SEQ ID NO: 372563 - DNA, 110 bp, Zea mays
tttacaagtttattctagttaaagatgcaagagtcaaaaattggcaatcgaccttcagaagatggctaaacaatgaaaatgagattcgatggatatcaatttgcggtgat

SEQ ID NO: 372564 - DNA, 394 bp, Zea mays
tattgtttcaatttttttaaatgatgatacatgcaatcctctttttcctaaagcgggttacaggacatcctattgtcttcaatatttttaaaataaaagtattgttcatactactcatgcacaacttcaatacaaaacaaattaaggtacacaccctccccttttttgattgaactcttaggataccatgttctttttaaaaaaccaaaaaatatttagatgttaagccaatcgttcacatcacactgtttacgccaaaatagaaaatataagagggactttaacaaaaaaatactaaaactaattaagtcttatctgatcatggttgtgacatcacttgaaggttgcaaaacaatgacctccaactaatacaacccacaacagctgaagaaga

SEQ ID NO: 372565 - DNA, 337 bp, Zea mays
ttcacgcgtccgcccacgcgtccggtttttgtgcagagtaacagaaattggatcaattcaagtaggtgagtgtaattgatccttttgaagattctgatcccagattaattcacgactagagttgtgaactctataggttttcttgtgtaaatttaacactaatttggctgctctttgggtctgggggcacaaatttgaaatattgggagtgctggtgtgatatagaggtctaggaggagatatgaggtactacttgcgtcaggtccagcgtttggttggagatatggaaggaggagctctcttgtttatagacgacctcaactccaagtgacaaagc

SEQ ID NO: 372566 - DNA, 402 bp, Zea mays
ttacgacatacatactgttcataatagtttgaagtgctttaggtcaacaggcatgtgtgtacagtagggttggcgtcctagggttagtttggtgaacataaaaatggagggaatctataaaggagagatccgttgttattcaaaattaaataacaagaggatccctcttccatagattccctctccattttcttgtccaccaaaccaaccctgagtttctattgccacggtgttttgagccgtccagattgatcaatcatgccacatatgacagtgttagtatatggagtaaatacacgggtaaacctagttagactctttgttccatatgtgcatttttgtgtcaccgctttgtatcaattatttatagacgtaataaagttgtaatgatgttctcactcg

SEQ ID NO: 372567 - DNA, 437 bp, Zea mays
tttattttcttgcatttctgtcgaatcccagggctcaccaagtcaattctgtagggttcttggcccccatttccgcaattgttgccacctgcttttagttcccatttcctcaattggagccacctgcttttagttcctcttcttcactcgcggcgttatcaaagcttcagatttcttgcttctccgcggcagtttgctaggggtcggagtggcggagccagagccacgcgggagtttgagctggattggttcttcaattgagcgtggcggccggcgtcaggtagaagtttccatggttcttggtttgttgttggagtgtcaggagataacacggcgaaggagattgcgggagggtaaccgatgtcggtgagctgacggcgggccacggtatgatggagccccaagcggtggacctcgaggatgacagcatcaacttc

SEQ ID NO: 372568 - DNA, 269 bp, Zea mays
ggaccaggcaccacagatggaagcaaattaaataagtatgagcaaggcaaacacccatagcctcaaagggattacatgaatgatcaacaccaatataccacataactcgatagtcttacaccttgcatatgagtagaaagaccttttgatcaagctcgaagttagcagcagtggaagggtcactcctggcagtatcaggagcccatcgaacaatgcataaatcttcttggaaggaaaaggggaagcatcgcgtgacaaaaaacaacacc

SEQ ID NO: 372569 - DNA, 328 bp, Zea mays
gcttcacaatcaatgtgattgatcaattctatctcttcaatgtacatataccatatcgacatggtacctacgatgtttcaggttacaaaaccgtgcgcatcatctcagctccacaatcgcattctgaagatacctgaatgacttctcgtagctgacaaagcccatgaaccaaaaatcgaagccgtcaacagtaactacatcaatgtacttctcgtctggattgtatagatttccccgcaccgacgcactctttatcctcttcgtggggatcaacaccttgtaaggcacccttgtcctgcctcctttgggagacaagagattcaaaggc

SEQ ID NO: 372570 - DNA, 239 bp, Zea mays
aaacattgaggaccagatttcttgatatatgacatctggaaaagactatatatacaacaattgcccggtgatagctcgtatacctccacgggagaagaggagccatgtacgagactagctagacggctgtagccacacacctaaacgtggataatctcgaaccagctaacaaaaaaaaaagcgctatgcccatattaaagagggcttgaattgattatatagctctaaacacatttgga

SEQ ID NO: 372571 - DNA, 246 bp, Zea mays
atccatgacatatacattttaaaatttaggacaaggatttaatattgaaagatgccagcaaattatttaatgggaactaagaccaggtggcattttaacttgaccacatagaaccagttatgaaatgaaatgacctgccccaaaaactaattttaaacaaaatttgctccttttatatagggggctgaatttaactatcaacctatatcgccctccatttgggggcaacaaggagctttcactttt

SEQ ID NO: 372572 - DNA, 131 bp, Zea mays
ctaatacaaacacaacttacgcgaggttagaatgaagcattcctcaaatattatgggccataatgacaagactccgaagtaccaaagtttgaaggattctatcaacccagcagctaaaagcgataacatgg

SEQ ID NO: 372573 - DNA, 203 bp, Zea mays
gtgaagtagcatattttgactgaattcacgagtaagaactggctttgctacacaacaacgggtacttcaattggacttcatactagcatacagttcaatttacatgaggtacaaagacaccgcaaaagacatctgccaaattggcatattgcccaaaaaccatgcgatggattttggcaagcaggtctgcaacatatgcgaat

SEQ ID NO: 372574 - DNA, 127 bp, Zea mays
ggcagcgaatggatccacgggtgtccttttgtcaggcaaaaagctttccggcaattacatggggcaaaagttatgtttggacctggagcaaagagtgaagatgacatgtgcgagaccaaaagctgaa

SEQ ID NO: 372575 - DNA, 234 bp, Zea mays
acttcaaaaaataactgtggcctgaactttattgcattgtgtcaaagcattacaacataagcagcaaaaccagaaacagccctaataagcaccacttattagggcagcacaacacaaactataagcgcggtgcagatcaagaaagaaccacaacatgtagaagccatataaaagcatgattaagcacagcaaaccaccaaacgcttcttactgaaaaaaaaaggccggcttagg

SEQ ID NO: 372576 - DNA, 186 bp, Zea mays
gtacaacatgagaattcacgtatgctttgactcatcttattaaatacacttacacttacacatcatgcacagattggtacccggggctgttgctacaaagggatacacaggtttccaagcacgggggctatgagcaggttgaattttttttttgacatatctggggttatcttcttcttcaggatt

SEQ ID NO: 372577 - DNA, 449 bp, Zea mays
gtcctgtgtagtcaaaatttgaagaaaaagggacgaactcacaagtatcgtgctacatttatcacctcacaaaatagtccatggatgatgcgctgtctcaagtatgttttagcaattagcagtacacattttcgggtgccaaaaaaagtacacataggcaccgtttatatgagctagtctcaacttcatcccgctagatagtttatcgaatagacagatctgaatatctatacgaccatacagctcattgttccaattggatacataaaggcactcaacaggattccaaatatttgtatcttaggttagctttagtaagagaatagtctccctcatataacctcattcgtgtagtagcatcttcacacaattatatgcaattgtataacaaggagtttaatggtctagccattcctgcccccagtcccaggccttctgcgtggatcatg

SEQ ID NO: 372578 - DNA, 443 bp, Zea mays
accttctgtgctcgctcggctccctggcgtgcacgttcctacccagctcgaaggtcggagctccctcctccccaaagccttccccatggcgctcggctgcccggccgcctagccttgttcccagacgcgcgcagcttcttcccaatccgcgccccatctccctcgccgtgctccttctacgggttttccatggtcgccgcgcgcccagctctgccatggccgcgccctccctttctcttctagctcgctctccagcctccagctcgccgagctctgtccgctccccatggtcgagctccatccctgcctctctccccctcagctcgccttcttcagctcggatttggtcttgctgcgcccctacgcttgctctgctcggagtcactcccatggcgagctcgccgggcgtcatcccctgcgtctcctcgccgtggaattttcca

SEQ ID NO: 372579 - DNA, 171 bp, Zea mays
gatgcacatgcccgggaggaatttttaggggataccacccgttcacaacgagaggcacgggcagctataaatctagcacccaatgggggaagacacactctcaaactatcaaaagaggatgtccctctttaaacagctaatgctatcccctggaaatgagacaccattcat

SEQ ID NO: 372580 - DNA, 445 bp, Zea mays
gtgttatatatgatcaaagataggcatctgaaacacagcaggaatgatcagttatacatattcactcgggaccaatattgtactaggctcaccattatccatttatctacagatactcgtgcttggaaagcgaacactcaagagagctgaagcattgatacttacaaggatactatcctttgatcacctttcgcttgcaaagaaggatctgaagcatgtccaaaggccactagtatgtacagggcctaatgcatttacaaagcttagaacatgtgctgcagatggatgaaagaatctaaggttaggctgccgagtgttgactgactttggaggaggtgccgtatatacttcatatgataaggggagcagtagcactccttggcttaggaatctatccgccattgatgattcatggcgtagcagatcaaagaacaccaaagaaata

SEQ ID NO: 372581 - DNA, 383 bp, Zea mays
cagttacttcgcttgcagattgaagcaaaggaactggaactcacaaagcaacgtcacaagtgggagcggttcaggaagaagaaggacagggagatagaaagaatggcactggagaatgaacatatggtgattgagaacaaacgcttggaacttgagctgagacataaggagttagagctagagcttaagctgaaaggcaaggggaaccatccataacttaattcttgatcaacactacaatatttaagatggtaaacaagtcacggttgagcttctggaagataaagtggtagattagagcagaacctgacaaccatttctgtgcgtatgacttttgttctgtgtttttctgccctgtgtcaagtactggttgggccttctgc

SEQ ID NO: 372582 - DNA, 448 bp, Zea mays
cccacgtgatcgggcgaggggagcactcggcggcgatgggcggcggcggcgcacatggcggcaccacctacaagggctacaccatcccgcacaacaagcgctggcacaccgtcgccggcaagggcctctgcgccgtgatgtggtacgcatgcgcacccccttgctcccctaccctcccccatcctatcccaccaccccgatccgtccagttcgtccgaatccggtagcttctctccgattcaaggttgcctggctggacgcctccctgcttttgtcaaacacgccgcggctcgtgtgtttcgccctccgccggcgggcttccgcatggtagatcaggaaatgctgggaacaagtttttttttcaaggattattattcatcataaattgtgcgatttggttggagcaaggcgccggccgtctgttttctgcggactgttgaaaactaca

SEQ ID NO: 372583 - DNA, 144 bp, Zea mays
cccatgtttccgcccacgcgtccgttaccatccacactaatataatgtaacaagggcattcattcctccatccaactgcatgatctacgagaaaggaaagcaaccagcaagtaaataaacaatcataattagacttttctggcc

SEQ ID NO: 372584 - DNA, 117 bp, Zea mays
tgctataccccgcccaacccgccgagtggcgcggggggctgcttacggaacatccggcgccatccaacaaagcagggtgcgccggagcgagaacatgtgggacgctttacagctaca

SEQ ID NO: 372585 - DNA, 502 bp, Zea mays
ccctccttaccttccgccctctctctctctctctctcatcaggtcagcaggtctcgtgcgcgcccggctttcctctcctcgccgcacgacgcgagcgcggtcgccgatggccaaggcgcgcaggtcgccgttcgccgccgccgagcggttcctcggcttcccccgaggcgggccgtcgcggccgggggccgtggcgccggcgcccgccgccttcgacgacctgccggacctcgccgaggccgacgtctggtactcggccgccgccgccgccgccaacgacccggggagcccacgcgccacggcgtccaggcaagtggaggcggcggagggcaggcgcggcccgcggcagggcggcctgagccgggcgttcggcgacgggcccgggcggcaggcggcggcgtcggctcccgtcgaggtgcccgcgtggcccgcccgcttcgcgttcccggacgcggacccgtcgctgctgttcgagatggagatggggggcgacgaccactac

SEQ ID NO: 372586 - DNA, 494 bp, Zea mays
  unsure (1)..(494): unsure at all n locations
caatttctagaccaagttcagtaggtaggcttatatggagaagtgtaaagtagtggaggatatcgccaacggttcacccgtcgaggccgaaagaattttgtcaaagatctcatcttcttgaaagtgggcatcaattcgcaaagttagagggcccctattaaaacactagaaatgctgggatgtggccgccagttagggcttgttcgttttgatgccaatccacttcaatccacatggaattaaaataaccgaacaaggcctcaggtggaaacgatttaggctggagatggaaccacccatgttcggatccttggtacatctggccaagctgcanagctaaatgtgcaatgtcttgaaatcaagatgcacgtgcagctattcattcgacgatttgctgaggtcaaggcgtgtgaaaaaaaaatcagctgcattcactaactgcaggtgccctctgccactatataatatataagactagggggagaagttttcct

SEQ ID NO: 372587 - DNA, 193 bp, Zea mays
  unsure (1)..(193): unsure at all n locations
nttaatagctcccagaccggcaaacaaaagcgggggtgttttttagaagggtttcagctattacgccaaacaatccttgtacaaaggtaacattgataataatattgaggcaaacaaatttatggaaccaacctactatcataaactaaagcacatggctctcgataagagacaatgctttaactagtgcaaa

SEQ ID NO: 372588 - DNA, 267 bp, Zea mays
gggaatgacatctccggcaaggaggcgcgccgaggcgggaggcttttgaggccttttcctccttgcaaccagccatgggcggcggggacagagatcgggagcaggcgccaaagcggcacaagggctggacgccggcgaaagcggtcctgggggacaagagcgacaagttcgactacgatgatgacttccgtgacaacgcccactatgctgatacgaaggtgaagaagagggattttacgaagcctaagttgaacgcggaccacgcag

SEQ ID NO: 372589 - DNA, 437 bp, Zea mays
cccatgctttcgcccacgcgtccgcgccctccgaaggagacccaccaagtacaagactaaaatccagagtgaggaggatgtggtggctgcagaagatgtcatggatgatgatgacgacgaggatggtgcactggaagcacttttcaagcagctggaagaagatcttgacaatgatgatttatctgtcgatgatgatgatatatcagaagaagatatggcaaggtttgaaaaggagttggcagaagcgattgaagatgtcagtggtgttgatgactcagcgggggattcgttgctgagctctggggactattgtattgatgagcaactagatggaagcgaacgggtagagctgaaaacctggcaacttccggaggatggctcgtgcactgaaaataggccggcgtaaaactagtattaagaatcttgcacgggagcta

SEQ ID NO: 372590 - DNA, 238 bp, Zea mays
cgctgccgccgccagaggaccaggcgacagtcagggggggattatggacatgggtggctatggtcgcccggcagtcatgacggttcgaacgcggaagccacggcacggacatgctcacgtgccggtgcggaaccgcagggtgcggaggaccccggactcaacggctcggaggcgcgactccctgcgacgcgcggactgtaggccccggcggtaagggcgtgggtgcccacggcgcgcg

SEQ ID NO: 372591 - DNA, 205 bp, Zea mays
tgctttttttacctaggtggccctgaacctgatccgtggggtgccatcgagcaccagggtgcgactgcatactgagacacagctctctagcaagtacaatactgcgatgcatgatgggaccaacctcataaactccacggccacctatatcccgatagtgcccactaagcggctcgcccacatgttcaggtaccccgatgctgac

SEQ ID NO: 372592 - DNA, 218 bp, Zea mays
tgtgttcagacccagaaggagagggagacagaggagaggagcagcgtggcgacgcccaaatcgagagacttgatcgagtcccctcgtcgcaactcgctgaatcacaatccgagcccgtcaattgggcgccccgcccacgccaaggacagagggaagaaaactgttggcgcgctgacaagtccaactgtgtttcttcttggactacagatgaaagcgag

SEQ ID NO: 372593 - DNA, 491 bp, Zea mays
gggggaccctattatgcctctggtgtggggtcttctgaagaaaaaattgagcaagcgcagcaacttttatacaagcaaggatgttcggccatcaggatctgtacatttcgatagtgctcttcttccaactcgatcaattaatgctaatagagttggtaggccttcatcaaacaaaagctggaagcactctgaggaagaagaatatgtttgggatgatgtaccctctaaaacaacagaatatagtggtacccataatataataaaaggagaatggatgtctgatgatggcaatgctaagtttgcaagcctccaaagtgctaaatgggcagatgcaggacctgtggaatgtatagatcccaagacacataaagttgataatgtgtcaagatttggatttgcagcaggtcaagaaagaagaatttcagcatacatggtatgtgtctcaatcattgaaagaaaattatattaagtttcgagtaaatattgatatg

SEQ ID NO: 372594 - DNA, 403 bp, Zea mays
ccttgccggcggcggcggttggggagggcagaattcccggcctgggttggcccccaattccggcacccggttgaagttggaaaaaagggtaaccacagagatggatgggcattctggatatatacaagagagagcacattttttttaaaaaaggactctcactcttatagtgaaataaggggcgcctcaccctgggaaaggggggaactctgtatgtaatatgacacactacacatctccaggtgaacaaaagggcctaacagggtggggaaaatctcaaatctgatattcaacaagtagagacaacatcttccgacaatgaagagggcgcaacaggcgtcaacacttttgcttctgagggtggatcacaacaagaaaagccggggagcgggtttagggattt

SEQ ID NO: 372595 - DNA, 459 bp, Zea mays
tcctcgcgtccggtggaggtccgaacctctcattcaggaagtctttgaatcgaccccatgacggggcaccatcatcttcttcaagctggctgtaccacagctgcgcgacgtcgtccagatggtatgatgccatccgaacacgttcctcccccaaggtgcggtgatgccggaagtatgactcacatttgttgatgaacagcatcggatcgacggagccgtcgaagcgggggaagtcccacttgcggtgctggctgtacggatcatggtcgcgctgcccctcgggtcgccgaccgtggcccccgttgtccgaggccgacgcggacttgtccttcatggtcgccatgtcgaactgcagcgtgttgacgtccgtgcggagtgcccgcaactcagcgaggacgtcagcaatggtgggctcggccatggctgtggtggaggctggggaaggtggtggcgttggcg

SEQ ID NO: 372596 - DNA, 408 bp, Zea mays
ccctcttttccgcccacgcgtccgcccacgcgtgcggggactcttgggtggtatagggggtacaaaagctgaagtgaaatctgttgcaccagatgcaagcagcaaggcatcatcggaactttttatttcacctgtgtcatcaagtattgcaagcttttcaagttcccccgccacatctacgcctactttcaccgcagttgcaccttcaagtgatgctgctggaatatctgtggctgcaccatctagtacttccactgcaccaggtttacagtctgcttcaaccccttcatttacatttccgagctctggaaacaacctttttgggttcagctccccagcccaatctactggccttagtacatcggcacttgctggtagtacctttcaaccaccagctgctagcacact

SEQ ID NO: 372597 - DNA, 137 bp, Zea mays
  unsure (1)..(137): unsure at all n locations
tcctccttctttgcttcncaacaggctagagaccaactngggcgattttttgaatgcttgggggcacacaagctgaagtcaaatctggtgcaccagatccaagcagcaaggcatcatcggaactttttatttcacct

SEQ ID NO: 372598 - DNA, 436 bp, Zea mays
ccctcgctaccgcccacgcgtccgcccacgcgtccggcgttctcggtcatctccatgacgcgctgctcacccagcggcgacgagctcggcctctgctcctcccctgctcctatggtggcgccggtcggatctccctggcgcctcaccctactctctgtctgcccatggagtcgcccagcccaaccgtgcctgctccctccctgtgctcgccatggtcgtcgcctccaagcttctccctgctgcgcgcgcggccgtgcccctctgctcgccacggcgcgtcgagctcccgccccaagtccttttactgttcgcccgtgacgcccggcgtcctgcctgctctgctcgccgtccgtccatgtgccatcctgggagcaacggaggaaaatcagcagcctaagccttggtcaatgtctgcgtggatttgggaaagaagact

SEQ ID NO: 372599 - DNA, 456 bp, Zea mays
cagttttgttactcacgaagctgggcctattgacagggggtgcccatgaagcacaggggggcttcaaggaactgatgatgtcgttgacctagtgaacatgcatagtgatagtggcatcagctcttcagctaagcatgcagtggccatccactccgaaatgagatcgactttacattctgtagagggccttcacacagacaaaggcaaaggtgctggtactgatttgtcctgggtggaagaatgttcacaccatgctctggataacacaccaatgaaaaatggaaattctggtgccccggctttcttggctaaagatagtgggatcaaggacaatgttcgcatctcaaacataactgctgctttcaccgttagtcctgcattcacttcaagttatcagcattctgtacctggagatatgtccctgtcaaaaccaaaaccacttggtaccccgcttac

SEQ ID NO: 372600 - DNA, 391 bp, Zea mays
cctactcttactcggacacttgggcctccccaccgggggtgctttttgattctcggggggggcattcatccaccagacgactgcaacagagaaccggtgacgactatggaggcggcactgggggcgctgcacctccccggaagctggacaacactgccgtctggcgcttccacccacaagaccctcgattgatcacattggaggactgctactgcgaagatgaagcaaaagcaatggttcatgatatgctaaatattgaccaaggtgttggagaaggcatcctatgacacgctctagtaagcggagagtgttaattgatttacgacgatacttgccacgcgttgaatcagacaagccatgctgataactgagacttacatctgggttatac

SEQ ID NO: 372601 - DNA, 489 bp, Zea mays
ttcttccgctcccacgcacgcggtccaaccaagctaccaaaatctagctagatgtagagaaaaagaaaaactgtccccaacccgaaccgccgagcccggcggccggtgccgtgagatggctgagtacggcgagcgctaccagggcaacggcgacccggccacgcccgagggtggctacgcgcagaccgagtacgccgccgccgggggctcgccgcccgccgatagcaagccctccgtgttctccgaccacgccgacggtcgctcctgccagccccagcatgagactcaatcacatggcagtggttcctccaaatctcgagaaagggacagagaacgtgataagggcaaggacagggagcgaggcagagaccgtgtccgcgaaaaggagagggaccgagacagggacaaggatcgtgaaagaggtgacagagacagggatcatgatcgccaccacagggatcgtcgcgagcgcagcgagataagggaaca

SEQ ID NO: 372602 - DNA, 506 bp, Zea mays
cgcttgtgtttggcggcgctcttcgaggtctcggcggacgtgggggctctgtaggatgagacagttgacttatacccgtgggcagctcagtggctggtaggcgctggcacgatacgcggtcgggccgtccctgtttttacactggtcggtccgaaccccggagcacgctcggggagaatgggtcggcattcccggagggccattccggcctctggtggcactggttccgggaggggaccgcaccgggggcgcaggaccgccatggtcagcctttacggtctgttccagtgcgcgagcaaccacggcagggccgtcggggctggcgccgtgtcggttctcgcaggccttctgtccggcgaccgggacgacctcgccagcgacgccgtgacgctgctggcgaggctcgcggagcagccggcgggcgcgcaggccgtgctggcgcggccgggcctggtcgtccgcgttgtcgaggcgcttgccatttcggcgtcccggtcggggaagga

SEQ ID NO: 372603 - DNA, 386 bp, Zea mays
gcaacccctatttttccgacgccagagagagtggccactggcgacgcggtccggtccccccaattcccaacggccgggggatccacaccctctagccggatcccattgactgcctggaaccccaaggggggcggcggggacgacgattggaccgcgccggtacccaggcatagaggcaaggaggggatgagcttccaggacctggaggcgggccacgttcgtggggcgccgcccggcggcggtcggaggagcggccggggggacctcgccggcgccggcgccggcgccggtgcgtcgcaggccgtggcgttcggcgtcttccagaacaacaccgtcgtcgccacgtttcacggccttgaggaaacgctcggtacgcccaaggacac

SEQ ID NO: 372604 - DNA, 500 bp, Zea mays
  unsure (1)..(500): unsure at all n locations
cccatgcgttcggtgtcgtctcaacgacatccacatccacccgagtccgaccaccccaacagttcaccccctaatccccgcgccaccgcccgctactgcctcgccgccgatggactgcccgcagctgaattctcctttgccggtgaactgggacgcgcttgacgcccttgtcctcgacttcgcgagatccgaccgccttgtggcccctcccactgcatccgcctccccctcgccgccgtcttcaccctcctctactaccaccgtcacctcctcggcgccatcctcgtcttcgttgtcctcttcctcgtcctaccggtcgcgtctcctcatccgctgcgcgcgccgcgcgatcgagctgggagacgtcgacgcggccctcgcgctcctccgggcccgcgcgcccgcggtgctcgccgaccaccgtcttctnttccacctccacaagcagaggttcgtggagctggtgaggaggggcacggaggcggacagggacgcggcgc

SEQ ID NO: 372605 - DNA, 375 bp, Zea mays
cccacgcgttcgttccacgcgtgcgtggacaccacacacacacagctgccctatcttccatgcttccattagccatccagtcaacaagtcgtgcgcagcgcagtggcatgagctagctaggagattgatccggcctagttctgttcagcatgaggaaggtgtgcgccaacccagacagagaggtgggcctagacacagtgctcgaggtgcccgttccggaccagctccaccacgatccgtcgtcgtcgtcgtcgggccacggccggcgccggcgacgcacgctcaaggcgtgggtgcggtcgcgcatggaccagcgccaccggcggcacagctcgccgtctttcaggcggacgtgcagctcatgctcggtgtggt

SEQ ID NO: 372606 - DNA, 113 bp, Zea mays
tcgggagacactctgtagctggccgcgcgtcaccagcttgacaaaaaggaatccaaagggtatttggtcaaaaatagaaactgtgtgcctcgctcgccgcaagtacgatgaca

SEQ ID NO: 372607 - DNA, 349 bp, Zea mays
ccgtacgggccgggactgactggctggaccgacccatgcgtccgcccttgttttgtcggttgggacgtggcccagctgttacgcctgttccaagaagagcacatccgatggctactgaccctgagagaccatcgttataagaaaactcgagttctcaacgcggtaccattagaggaatgcctgcacatacgcgcgagtcacaggacactgcgacatcacgaggggcaccagaattgacaatagaactgttctacttcagggggtagacaaagatgaagccatcactctagggccacaaggtggccttgctagggatatgcctatcaacaaggtgtcaccggtctcaaat

SEQ ID NO: 372608 - DNA, 141 bp, Zea mays
tcgccgggatttgctttcctacccggctcgtgcgttcacacagatggaggctctactgtggatgctgccggctgaccccgatcagatcacgcccgtgcaactgggttatgcatggtccttcggggacagtgattctctgtg

SEQ ID NO: 372609 - DNA, 390 bp, Zea mays
tccacgcttttgttatgttgtgcggtcccgcaggtttgtagtgatgatgtcactgttccttgttctcaactgttgtattaagcaagtactaccatggggatgtggggtgggactggtccacatgtatgagtatactagttactagagctagcaagcagaggaattggtaatggtgatgcgtactcaactttatatgtgtgcttgtcgttgaagcgctcatcagttgatagacccacaaaacatatcaccttattgacgtacattgctgcgagtacagtccagggggcggtcggttccaagtttacacacagtagggccttctagggagtgggtgacattggcaggacaaacggttaaacctgtatcgaagcaccatagagagcaggggcg

SEQ ID NO: 372610 - DNA, 367 bp, Zea mays
cccacgcgttcttccacgcgttcggcttaaggacgtgtttggcacgactctagagcaaatttctaagttcatagttacaaactctttgaagtttttagagttgcaatataaatgtttggagtattttttgctgttccgaaatctctaaaaagttaactagacatgaaatttagagttatttatctgtcattgctactggttatgagaaagcaatctaaactttagaatatacttgctccatagagccgtcatgccaaatacaccctaagtatcatttagatacggccgagcttgttttttttttctctctccaaaaaaatacgttagttttgtcatgatcctagttagactagagttggattataaa

SEQ ID NO: 372611 - DNA, 335 bp, Zea mays
cggacgcttgggcggacgcgtgggccgtctctctcctccgagcctctcttgccctagggagagggagagggagaggaagagagagatatccgcgccgtccgcccagggagagaagcaaagatcggcaaccactgaaccgcgctacgcgtggacgtcgtccggagccacgcgtggcgccgcggcgatgggcaactgctgcgtgacccggccgatctctggcaagcggcgaggcggctcctgcggtggcgctggcgggaaccgatgcgggcgcctcggcggcgccaacgtgcggctctgctccacgctgcactccatttccgacgcggagcgcaccg

SEQ ID NO: 372612 - DNA, 458 bp, Zea mays
ggattggtgagcaggtgggtgttctaaatatactagatcaagcggcgccccttcgggcgccctatccggcaccgggaaatatgaatacataattatacacgctataatcaaactaaaaggaggatgtactaaatctcaaaccaaaattgtttagttcagtgagaaagaaaacagatactcaacagaacatagaacacagatagctcgaaaataattcacattaaagttgtagcaccgcacttaaacatgcaccatagcatgacgttgaggcttgtttcagctggaaactggtccaaaataagattacatggtccaaaccagaggtatttacaaggtacctagagccaactcttggccggtacaatccagacagctagacacatacattacgcaactacaagtgcagagccatttcatctactaaagccagctgaacaatccatccacaaaagatccac

SEQ ID NO: 372613 - DNA, 344 bp, Zea mays
gcaagctttctatattctactgtccttgcttcattcaaaggaccatcgagctgcataggaatcctgcatcctgtcagctactgaaccatgtttcttcgggcggaagcccaacacagaacagcaaaaccaaaacaaaaattcaatgttctgcagtcaactgtttgtatacatgatgcatatgcatacacatggaacatggatctttttatatttgtctatgcatgtgcagacttccctggagccaatgtggtgagcgaggcggaggacaaatccggcacctggcccctgctttcggcgatcaccttcatcttggacaaggtcgcaccgtttatcccaaaggagga

SEQ ID NO: 372614 - DNA, 512 bp, Zea mays
gcctgttggtccagcccgcggagcgcatccccatggcgcagcccctcgtccccggcctccagcaccaccagttcggcgtctccccggtgccggactggttcgcctgctcccaggccggctccggcgccgtccctaccgcgggcaccggcgggttcgcctgcccccacagcgtggagagcgagcagttcaacacagtcctagtgccgagctccgacggcggccacgagatgaactaccacggcatattccacgtcggcggcgagggctcctccgacgggacgtccccttcgctcccgttctcgtggcagtagcttaccgttgaagcgggcagtagttatgatcggtcagctgtagcggtggtcatcacaccagttccctcttctttccgtgtttatttattctctgctccctcacgcactcccccgtgtcacttgctagtttcttagttctgcctgcctgatgcatgtagcctaaaaaaactcgtatcaaattagtgccagatttccttaagg

SEQ ID NO: 372615 - DNA, 443 bp, Zea mays
cccactcgttcgctttcagcgtgcgcgctctatctccctagctccctcccctcccgagatctcctctctccttccctccctccctcccttctctcttggcgacgtttacgctcaccagcgccaggtacgcgggtctttttcggccgaggtcgctgccgccccacgccaggtggtcaggtcttctccggtcccttcgccggcgacgagcaccaccaggctgagctccacagtggttcttggagaggtttcaggtttgtaacacactgctagggtgaatacacctactcaaaaaaaaaaaaaagagagaaaatgggaaagagagaaagttctcgatgaattgaagtccatatgtcaaaaacaagagcaaggagctgttgtacatggggcttgtggaaggagcatatcatatatctgtaggagataactttgcacttgactcatgg

SEQ ID NO: 372616 - DNA, 371 bp, Zea mays
tactatagggaagctgggcgggtcgcggtcccggttcggggttccgacgccacgcctcacgcggacgcccacgcggacgcgtgggcggacgcgtgggctcctgggcaccagagtaccagacaccactgcgcatcagtgcaaagagggagctaccctatctgccatggctcaagagctccacgaaacgtcctcttgctctgccaccaccacctcgtcgtgcaccacatcctgctgctcgtccactgtcacagactcgtcctcttcgcccccgtcaccggcggcggacaatgccgcgcccgcgacacggaagcggcaggcgttggaggccgaggccgaggccgaggcgggcggtgaggaggaggaggaggagg

SEQ ID NO: 372617 - DNA, 447 bp, Zea mays
cgccgtcgctgtaagactgtcgatggccgcagccacgggcaccgtcaccttctcgccaggggccccatccttcctcaactcccatatccctcgtggccaccgacctgcctccaccacgacgatagcttttgcacgccgttttcgcggtgtaaaacctagtcccgatcgctcccgaggcaaggtcgaccaggtcgcccaccccgacgatggatacggcgcactcgaagcggagctctggcgcctgcgccgcctcgtggagctaaagatccaccgcctcggcaccgaggccgacgccgcctaccgcgacctacgctcggcggtgcgcgaggtcagcggagaccgcgtcgtcctaaccttccgccgctcgtcgctgcgctacctcaccggagcactccttttcttgctcgcctgcgccatcgcggcgcgattgctgcctgggatggtctt

SEQ ID NO: 372618 - DNA, 497 bp, Zea mays
cgtccccctcgcgtgcgctctgtggcgacgactgctcggccggggccgccctacgcgcaggcgcgcaggtttccaccttcgccggcgacgagcgcccacaaggggcgcacacccctcctcctccgctcctgccgtgcgaaaccgagcactcaaacccaagctctttgtatccggatctgaaatctggtccaattacaagtgtagtagacatttattacgcctagaaacttcgaatttctttgcaaaaaattgtcggggcgggtccgcccctgctgcacctgtcttcgattaaatgtactgcctcgggcgaagttggtcgggttacgccgcagtggccaattcgagtttggaaaccgccaaggtcattggatgggagtcactggagtagtggagtgtacggtgcttcctcagttctgagatctgaatgtagtttgctcactcaagttggattcctgactcttcaggtggcggcaacagattttatctttggcattcat

SEQ ID NO: 372619 - DNA, 566 bp, Zea mays
ccgttttcctctccatttccttgtgggtgcttgccctgagaccggagcccttaccggtgggcagcgtggctcaccctcgcctcaccaaacacccacggcgcattggcgcttccacctcttatcgtacgaaggcgagcggatctcacggcgactctctgtggtatgcaatggcaccgctgtttgaggggcgcccaacatctgactggccacggaatgctcatgggcgctggggtcccttgccgctgtccctgaagtctagcctgggttgttgatcttgccgcatatgcgggactccattacttctccgcccgcgccatcatttcggccacacctcagtctgttggtcggtcgcagatcccttgccccgtcgagcttaatatgcaatccgttgcttgtgaagattgtcgtgttttggacaatgccaacctttgtttccgctgtgcctgccaaggttgtggcttccttgggtgatgcttatctgagaacatagctgttgtgctctgagcatgtcctgtgtgcctgtcatgggcggcttcttttggcgacatcataccaacatattcaat

SEQ ID NO: 372620 - DNA, 363 bp, Zea mays
ctacgctcataactttttggatgcacgtaccaccagtaatggccattgggacatggctactgaaaatccaggggcgattgataactctcacacaagtgatcatacctctaaatgggttgacctatttgtcaacaacatgatcagctcctatgacataaatcatgcgcgagctggcgcatccacagctcaggaggtgttagaataagccatcatacatctaggggcacctgcaccattgcatactacgcataggggaaagggagtgctctaggagcagctcgcaataatactgcaagagaatgctgctctgaagcagcgctgtgcgatacaacactaacgctaaaaagagtgtgatgtgacgac

SEQ ID NO: 372621 - DNA, 185 bp, Zea mays
gtggcacggatgctattaacaccctgccagcctgaacacctaggggacacgcttggaataccacatgggggggcgcctccatgaccaggtaggagccgatgcaaacgcactccaggaacatgccgcggagcggaagcgccgccgggcgggtggagttgaacgccgttcccgcgacgatcaggcac

SEQ ID NO: 372622 - DNA, 558 bp, Zea mays
  unsure (1)..(558): unsure at all n locations
cccacgcgttttgggagctctgagaaaaagtacatggatgaagcacggaacttcggatgagatggctatctgcagaccttgttgcatgcacttatcatttggatatattctgttgcttgattctgccagggcctctgctgtgtgcacattttatatgcttaagggccaacataagaaggtcctgggatggaggtcgctggaccctctactcacttgccatgtattcaagtgcaggagagatgcgtatcatttcattgagtaaagaggctacagggaaagaaatccaacatagcccgccccttctccctctaagcacacaagacctgaaaggttctcagcctgttagcaccatggaatgctcttatttgtgattgcctgcagcaccgccatcataacacttgcaatgatgccattaaaaagacatcatactgatgttttcagatctctcaagccaccaagatagtgagttcaggcctttcttgctatatcatttggcacttgtcagcctagcttaaaccggctngataacttattgatgataggttgaggcgcaatgga

SEQ ID NO: 372623 - DNA, 180 bp, Zea mays
cacgacaccttcggtaggccatatagccatccttcatatgatgatccgagtccccggctatatccaaactctgaggcacgggaacacgacgacggacctggactggcggaacctgaggctctctcatgattcaaatccatcatcggatccccaccaccacccttatctacccatcatggg

SEQ ID NO: 372624 - DNA, 411 bp, Zea mays
agagtaaccgcagggccgccgccgccttccctgatcgaccgggggcgtgtgcggattcaggcgccgggctttccagccatggttcagtgagccgggaggaatccttgcgctgccggagaaggatcatattcgtcggtggttcgtcacctctctctatttctctgcgaggtccctgcgtgcatcgatcgtctcccgggtttccgagagcacccttcgcctccggattcactgcttcgattgattcgtcaagcaagcacagggatatcttcacgagaagtgtcatcatcaagattgacagccttcttcgtggatggcgaaatggaacaatgaagtgatgggtatatctcatcgcaaattttgccccaagggtcacagctcaatgtgtagtgaggtgacaatgatgttggataa

SEQ ID NO: 372625 - DNA, 445 bp, Zea mays
tccacgcgttcggatttttattcagaaattaatatgaaaatgggtaatggctcaaaagcaattggaggtattggtaattgtgcaatcaatacacaaggatagagggctacctctacgtttatgtcttgggtggacggatacaccaatatgtatgggtgaacaaacatgttctccttaatctctatgagtatatgactatatacaagactcatttgtgggagtgttcaatatctctactactctaacaggttctgccctctcacccctcccgggctcctcgcccctctcctcttctgccttgcaccatgggccacgcaagctcactgaatgtgcgaatccacgcccgccaactcctcacttgctctagttaacctcccctccctcagatccacctcgggccatcccccgactcctcgctgttgtggcaccatcccttgctggggcc

SEQ ID NO: 372626 - DNA, 463 bp, Zea mays
cacgcgtcacgcgtttcggacgcgtgggccactcatccggggagggcgtcggacttctggcggttataccaccggacgacctcgcccctccggcgctccggccgcttcctgaactcgtatccctcacggacggtctcctgcctccgctcgccgcgccgcaacccggagaggagaccgccgctcggtctagcaccacctggggcccagcgttctcgggaccagctctagcgcggcgtccgccctctgcagccctggtgtccccgcgactggcttagggcgggacacaactccacaggtagggctccgtctgcacagcgcggcgatcttctctctccttcccgccctctgcagagcctctcagtccctctgcgtctgattgagtctgctccaacctgagactaccctcgctctgaaaatgtcattacgcacccaatgcgctagtagctgtatgctgcaaccctac

SEQ ID NO: 372627 - DNA, 397 bp, Zea mays
cacacacgttttgactctacgtcttgtacaacatgttctactcgggggccatctaccacaccatggggggcaccaacatgatcagggacttcttccactactactaccactctgaccccaccgctacctgcaaggagacctgggacgaggtctacgagtgcatctacgtccagcccggggacctctagggcatcttgtggtactacacgaagtcgttggcagcgctgataggacagttccatagacactaccataggaaccagaacaagaaccaggaactggagacagagcttgcctctacctatctaattacctatctaatcgctagtagacaggcttatagaccatatgagagctcatacgagcgcttactctaaggctatctgtagagccatca

SEQ ID NO: 372628 - DNA, 528 bp, Zea mays
  unsure (1)..(528): unsure at all n locations
cccacgcgttcgcggacgcgtgggcccgtctccaagggtccggtctcgaatccctcccttccagaacaagacacctgacgccgccgcccccccgccagccgcacccgtccataccataccatacctccggccgctcgtctcctatctcgtcaccttcgcccggcgctcagatctccgccgcgcctctgcctgatccccccacccccattggagggagacacatcccgcgtgggcgcacgaggacctggtttttttatcaaatgcttgacaaaatgcttgcttggtgatgtctggctatgatttgggtcctgtttatcatgcagttggcttctcatggcactcaaacagaagagacgatgcagtttgtgccccattgtgatcatgcagaagtgtcagattcacagtcaacaagttcacaactaaacctgatagagagatcaacagagcatctagcctcatgtgaaatcaacccagtgagcgttgatgatgacaancgacatgaacatatcgatgccaatgaagaaactc

SEQ ID NO: 372629 - DNA, 456 bp, Zea mays
  unsure (1)..(456): unsure at all n locations
gtcgtggtgttgctcttcttagagccacgcccaccaggggcatctgaagaacaacagttgggcaagaaggtcctctcttccgaagtcgaaatatttactcccctttgtgtgaacaataagcgtagatttaaagaatgtcagactcagacgctgactatatatacttgacctgcatagtcatgttccgtcgagaggtgctgtgggagaaaagttgtattgctctcgagcatagaagaaggctgtgtgtatcagaccccagcaaagctgcttgctattaaccgtggcagggtagtctctgtgattttgcagctataattttgttgggggttagttactatgactgcggagggtgtcgtggcttgtggcaacttgattcccgacgtattatagaatcctctttgctaaaaaaaaaaaaaataacacaaanaaaaaacacaaaacaaacaacaaacaaaa

SEQ ID NO: 372630 - DNA, 543 bp, Zea mays
  unsure (1)..(543): unsure at all n locations
ccttccaccgcacgcaacgcagcctcgacctcgaccgggccgtctccatggtgagcaagcagacccgccgcctcctcgtccttgccgccgtcgccgtatgcctccacctccccgccgcctctgtcgccaccgacgtcgattactgcagtaaaaaggagtacccggtgaaggtgagcggggtgcagatcgtgcccgatccggtcgagcccggcaagcccgccactttcaagatctccgcttctactggtatagtacttgacttattggttgcagcctccgtgtttgctggtgttacttaccgctggtaggagtcctgactcctgagtagttggttattttattccgcgatgaatttggcatacgtacgctacgaagagttagtagttaccaaccaaacgagctttgcgcaggactgaatttagctggacttttcctagattatttaagttttgaggggtactagtacctttgggtgctgttgccggatgtaattccttgtgctacnggggattgggattttttcctgtttcatcgncttactga

SEQ ID NO: 372631 - DNA, 259 bp, Zea mays
gggcccaattttcatccaaaaataccagccaaattctccccccctacttttgggtgggccagggggggcctttcaagattcaaaacccaccgggggggtcccataaaagccgggggggaaacacccctttgggggggggcttttgccaaaatctttattcccaacccccttacccaacagaatttttagttcccccccctcaggatcaaaagggcgggaaaaactttttgggggttaatgggggggggtaaaacccccc

SEQ ID NO: 372632 - DNA, 327 bp, Zea mays
cattagaactgcaactttactaggagcaacaggggcacttagatatccagatacatataatagttcaaccagtccatagatatgctaccctgcccaacctcacttggttgccacatgtatcttaggctgcatcccgaaggagcaaaacatattggctgagatcgaaactagtatctccagcagtgcgttaaggcgacatatatcaacatataatatgaggctgagccacatagtgttagaggattcttaacgtgagataaagcacatggatgcagcagcagctcatgggttctgttctccggagcggccaacgttcgccagggaatc

SEQ ID NO: 372633 - DNA, 200 bp, Zea mays
gggtgggtggcaaaaaaaacaggggttctggtagatagattcatacatgctacccgactgagttcagtcctttctccttgagatttgtttcaaggttctttttacacagattttaccataaagccttggcaatttttcaactgaacaaagtcaatggtaagcaggaatcttagttgcagtttccttggggcaacgtattt

SEQ ID NO: 372634 - DNA, 256 bp, Zea mays
gagaaagggtgtgattatagaactattacaatatgaagcaagaactgtggatactaccagtgtaaagcattaaacaagactcgacctattacaattgagcaaaattagccacctatcaacccagggaaggtagcttacgtttttattcccagaacacgagactgcaaactaaaggtttttatttgacaatactggtcctgaaacccaagtcaggtactattgcctaactactcccaaaacactgagccaaaatatt

SEQ ID NO: 372635 - DNA, 227 bp, Zea mays
tttctttttttttttttttttttttttttttttttttttttttttttttttttttttaacaccacaagaacaggcgcaaagtaaatccagacattcggttcggcatcaacaggcgtggacgggggttcatcacaacgatttgaacatttgataataaacagcacactcacggctcggctgtaacaatgcaaaggcaacgtcgcaacggtggtccagtgtccagaagg

SEQ ID NO: 372636 - DNA, 376 bp, Zea mays
ggcggcgcggcgcaggcgcgacgcgccgcgcacctggagccggaacacgccgccgcagtcccacgcgctggccacggcccacgacgccggcgggcacgccaggaagcggtcgacgccgccccactcgtagccgcccacggtggccaggaacgtgccgcgggagagcgcgttgcccaggacggcgccgatgtcggcggggaagaactcgacgtgcgcgagccggctgcggtacagccgctcggcgtcgcgggcgccgaggcggaccaccgtggcgcggcgcggcgccctgaggcggtgcgagtgcaccgggtgcaccagcagcgacggcgtccggaacttggagtagccgcagcggccggtgaagagccgcagcgac

SEQ ID NO: 372637 - DNA, 97 bp, Zea mays
gtctacagtaaaagtggaagcctttttcccttgcatatttgcccacatttattatggttttacacccaatataattgcaataccattacatacccga

SEQ ID NO: 372638 - DNA, 123 bp, Zea mays
ggcgctggttaaggtgctggtggggtcgccgtatgcgtagctgtactagttggggcaggcggacttgtacagctgcgagtaggcggcggggcggcaggtgttgtcgctggcgtaggcgccgct

SEQ ID NO: 372639 - DNA, 302 bp, Zea mays
aagaaccaaactgcagttctctatagtttatacatacatcatgtactaaattacgagatccatggtcacacaataaaaaaaatgaacaagtaattacatacctatacacaccaaaacacgagagcgagacagagaagaagaagaatctgggcaggcaaacaattcggctgggcacaacacagagaatttccgacggtcaaacacggtgtgtacgcctgaatgttcacggcgttcagaagaggtagccgaagacaagcgcggtgaaggacgcaacggcaacggccggcgcggccatggacgcg

SEQ ID NO: 372640 - DNA, 384 bp, Zea mays
ggaaacttaaaaggacttccttctgaagttgcaaagagaatgacattcgaagagcagttttgccctaataataacaatcatcaccctttttcctatcagtctcacccttcgcttcaccccgggaggactctggcctgaatctcgggacgagattcctttaaggggggaaggctgtgacaccccagtgtcacctagggtttctcttaaaaagccacaccaagagccattacttcctgtgaaccaaagtaagcatgagcatcaaaataacttaagtgacaaagaatttaccaagtttatgtttaaaagggtcatgatcaaaacaattgagtccttgaaaagataagaatgtgcaaccctaattaagaactttaagggaaccccatg

SEQ ID NO: 372641 - DNA, 371 bp, Zea mays
agagtagattacacatttttgagatgcagtgatgtttcaccagcaatgcgtacgtatggttcaaaaagaaagtgagcacatattataaggtcaatgttttcttttcacatgggcagggtttttctgctcgaacgcaacgtcccgttttcaccttcaccaccctgcaattcggcatggcttgcttgtataacggttgtagatccccagttcaagctgctactacaggtccatcattctaacatagagatgaaggcaccacaagtcttggcactggatgggggcatggagatccacacctgcacggctgccaactgatatcacttctttagtaacagatttcggaactcctcatttgatttcaactcccctgc

SEQ ID NO: 372642 - DNA, 326 bp, Zea mays
aaaaaaaaacaacagcttttatttaacaataacacaagggggtttttacatggttcctattcccacaaaaaccattacaggggccacttcggggcccataaaaactacaagtttaagttttttgggcccaacaacaaaaaaccttgggggccaatacagttagtttcaacatacttttggaccccgggatttaatttaggggctttcggtgctcctttttctcaaaattttgatgggttcaccctcatgctgaaaagggggaacatttttttccttccattggaattttttttttccgacagcccaaacaaaaacatgggcccccc

SEQ ID NO: 372643 - DNA, 286 bp, Zea mays
gggcctgggcggggcacaaacccaagggacaaacggtatttcacttgggaaaaacccggtacacaacatgacccccgcggccgccggaaggggacagggacccccctggtttttttcaagttcagggaaagggcccggcaccactacccaagctggttattttatcgcaacgggaccccacccacacttgggatgccaagaggggccctgcaggttggaactatgggaagggcgcccaaaaaaggggggaaaaaaaacccctggaaagggattgggaaaccagggg

SEQ ID NO: 372644 - DNA, 144 bp, Zea mays
aaagaacggtgttggagacagccttagaacaaaagccaaaaaacaaataccccttagagcatctccagtttagcaacagccctcgaaaaatagctctttatttttcttttgagagcccctcctatttttaagcccacgcgtccg

SEQ ID NO: 372645 - DNA, 339 bp, Zea mays
atcaaatgatatttgctcgcatttcatctaaacgatcgaccaggcaccaaattggccggttacatcccccctcatcaggagttagcagacataaaaattctaggctctaggtttttgttacaatagctacatcaataggtttacacgacacacacacaaaaaaaacacacaacgcacaccggggcgagccataaataatacatggctgcagtggggggcgactctacatggccccccagcgggctgtgaacacgcactggttgatgagggtgctcgcggttagataggaaacaccttatctcatctctgtcactttctcattcacctgtctctcaccta

SEQ ID NO: 372646 - DNA, 345 bp, Zea mays
ttctttttttttttttttttacatcctttattacttttttggtttttttttatttttttttttttttttttttcttttacttttgggaaactaaacacatggtttcccctttctttaaaaaaaattgatttcttttggacgcccggaaactggggaacaaaaggttagcccaagatacccccactttgttccggggaaaccccattcaaaagcaggggccttgttaaattaaacaaagtttgcccggttgtcccccaaaaaggggggggggcatgcccaaaaaaaaaagacggcccccaaaaaaaaaaatgctaaaagagggacccttaaaaaaatcatcccccg

SEQ ID NO: 372647 - DNA, 309 bp, Zea mays
aacaatggaattatttatttctataattaattattaaatgaaaacattgtcaaatataagtttaacaggtcctcgcgcggagaacgggaatgaaaatgcttccccatcctcatttacccatcgggagaggatttttcccatttacatcccctgtagaggaagaaacttcctcatcccctaaaagaaaaattccaaacgaagaatcgggtatcaggtcccattaccatctctacattctagccaattataggactgagattagccttgtcgggccagcgtgcacaaaaaattattcatgcatatacggat

SEQ ID NO: 372648 - DNA, 284 bp, Zea mays
gcagcaggcattcttggcctggcagatggggaggatcatgctcaagttccgcccgattgcgcctaagccggcggccatggcgcccgcgccggcaccggcatcggcaccggtgaccggatcagccgccggcgccgggagagggaagcgaaaggccgcgtgcggaggcggcggcaggaggggccggaagcccaagaaggcggccaaagatgcgatggtgactgcagcgcctgcggcgacggcggcggcacaagatgtgggcgactgccgggagcactgcgacaagg

SEQ ID NO: 372649 - DNA, 449 bp, Zea mays
gcgtctaattttttgattattattcaaatggattgggagctgcgagctgccacagagacgagacgaatcatacgacgagctagagaataagggaggggctgaaggagcgagaaccattcgaagatgagcgtatctacacagctactagcagcatcagacctcgatctatcgtccgcgtgagctttgacatgcatggatcgatcgaacaacgtggcgttgatgagactatgagagcatggactccctttttttatctagcagatgcagagattctaatgctagcttagctagtagacgacaattcccctgcctgcgtgcctgcctcaggtacatgcgagctctgtctgatcaattagtcgccggcggctacgagcacgacctgatgagccctaagttgtagaggaacttctcggagcgggaccggatcatgttcccggccgagcgccgcc

SEQ ID NO: 372650 - DNA, 325 bp, Zea mays
cctcattactaggactacgatgtggccctggatttcagcagcttccattcattccaattcccaaattttctctctttccttcacgtccacccaagcgccaccacctgcttcatgtcatgaccaactactctgcttccactcccactcaccaacgctgccggtcatccatgatgttgctcgcctcgcgctgctgctacactcgtgtcatgctcaccaatgccactactcgtccccagcattactcaccagcgctacaacctacaaggggaggggtgaaagggacagcacatgtgtcatgttactgcactgaatgtctcgtatgcat

SEQ ID NO: 372651 - DNA, 402 bp, Zea mays
tgttcacgcgtccggcgacaatgcatgacaaaatgggaggctagattgcttgggtgtcttgtcaagcacgtcctgttcgtggacgtgacaggggtatttatagggtgaccaaggtcctaggaactaaagtacgcttatgcccttggttaactgctacattccttgaatatactgtacaatggagcaattaccgaacagtaacgcccctgacctaactatatagagcttcgtgcttgttgtggaggttgacaggtgggccctcctcggtagagggggaggggccatcggtcgtcgggggtcaattgcgcctgaccctcgggctctggttccttagggactttgcctcaaggtcttcgccgcattcccatttccccgggacaaagccggaggggaacaatcacc

SEQ ID NO: 372652 - DNA, 444 bp, Zea mays
cggacgcgtgggcagaccgtccccatataaggcagggttctccgcggccccgagcgatccatttcccactcgatcgccaataatggagtttccgcaccaccaccaccaccacggacatcgccgtgacgacgacgaagacgaccgcagaggcccgcctcccccggtctacggcggctacggccagccaccgtcacccgacccgtacggccgcgcgcccgtcgaccccgatccgtacggtcgacctccgccccagtccgcgtacggcggggccggggacgcctacggccacagcggccaaggtgacgcgccccctgcggcctacggcgcctggggcgggtacggcaacgtcgtccacgtcgcgcacgaagtcggcgacgagaggccttactacggcggcggctgcggcggtcttggtggcgcctacggagggcggtggctccgagt

SEQ ID NO: 372653 - DNA, 433 bp, Zea mays
cccacgcgtccgcccgtcgccgccgctacccctcaatcgcgagcaacttcttccggattcgcaccaagctctccacaattctatcgctatgctgcggaaggccgtcgtcgccttcatcgcctgcaccgccttcttcctcgccttctctgcctactcccgtcgccagggcgttgcagaggttcaattaccagcagttactcacagggtctacctagatgtagaaattgatggccaacacataggtagaattgttattggtctctatgaggaggtcgttccaaaaacagttggtattcttattatacttctctttttccagcatgttcttttattgattctgattttcgaagtttgtgtactcctttgcacgcctggtgcttcctgcgcttctgttctagactcttgacatgtggcatagtcatgaactcacaca

SEQ ID NO: 372654 - DNA, 476 bp, Zea mays
  unsure (1)..(476): unsure at all n locations
cttacctttccactgatccatctacctctcagggggggttatacaacctgcgatgggggctttactcgcgctcggaacgcaggtgacgacggaggcggccacgctcgggctctaagcgacggtgtaagcgactgcccctgcgacctctcggcagacgtctcgggcgctggcctgcggtcctgcacgcaccagtcgactactctgcgctgtgctgagtgctccattgaatgaacaatgcgatgggcatagataccggaagcaacactgagcccatcacggtgggaattctatctggtgttggaacagctgacaccactatcatggccaaccttgcggattatcttgttgcggatcttgtagaactgccagacaaagtaggctacactgaaggagacactgctgaagcancggctaaggatgacgacgaagatgacgacatgcctgaccttgagcctgttaatgatgatgaccatgat

SEQ ID NO: 372655 - DNA, 321 bp, Zea mays
gcggccgtccttttttttttttcttatttaggaccaggagccattgtcacattttattcagctataggtccagataaatctcgcaaccctcttcacccaaaattatgataggaaacgatctgccaattacaaaggagtgaactgaaacagcaggaaacatggttgatatgaaaagcaaaattgctaagagaaacaatgtgatcatgaaataattaaactgagactcctgacaagctaataagcaaaggatggttcactgggccggaaactccggtaaatggaggctgcaaccggtacgagacccataagtgcaatctggac

SEQ ID NO: 372656 - DNA, 415 bp, Zea mays
gcctcttctttgggggtccggaggccgagaacgtccaggggaatggtgtcagcggaagtggtgatcgcctctatgtataagccgcggatgccgctgatcaaggtgctgatgtgggaccaaccgatggcgcggccgagaccgacaacggcgaggaggaaccggcgtccgcggacggggacacacccgctcctttggtaccgcccatgcctgcggtggaatccaagccggagaacgccgactcgggggacgtagagccttatgtggcatcacttgaccgcgctggacagcgatgagatggccgaattacgggaggagctggacgaggacacaggcgcttcagcggacgtaaaggatgcggataaggtggcggatgctgcgccgccaccggtgactgaagaggacaaactggtgccag

SEQ ID NO: 372657 - DNA, 319 bp, Zea mays
cccactcgtccgcccacgcgtgctggcacaaggaggggaaaaggcaagcagaccggggcgccatactctagaaccttacacggtccacctccctcgttcctccggcggtacgagcccgtgccgttcggctcacccgcaaccctgccttcacgcctgtgctcgtagacgagcggacccggtacacacgcgcaccctcttgccataccaataccagatcccggccaggcctgcgattcagccgcaaccggagtgggttcaggcccccttccatcggggcagcaaccatggatcaaaacccacggacggtggagtcttactg

SEQ ID NO: 372658 - DNA, 249 bp, Zea mays
caaacagggcaacgattttttacggggtaattaagcattttccagggaaaacccaaagggacttttgggttaaccaagcgaatgggcccgccctctgggggggaacttggaacacggaacggaacggaactgtcagatcggagaaactaaaccttccagccggttttttttggaacagctccaacggggcctaatgacctaaatggcccgcccgcccgcctgcccttaaaactggaattcctttttttt

SEQ ID NO: 372659 - DNA, 537 bp, Zea mays
  unsure (1)..(537): unsure at all n locations
gcacaggcaggattgcaggaaggcacaagaagggcaaaaggcaggcagacccgcgcgccattctctagaaccttccacggtccacctccctcgttcctccggcggcacgtgcccgtgccgctcggctcacccgcaaccctccctccacgcctctcctcgtcgacgagcggacccggtccacgcccccacccccttcccatcccaatcccagatcccggccagccctccgattcggccgcgaccgtggtgggttcggtccccctccgatcggggcagcagccatggatcagagccggcgtgcggtgggagtcgtactggcgctcgcggatggtggacggcgtcacggcggacgacgacaaggtcgcgcccgtctcaagctcgaggagatctgcgagctcctgcgtgcctccgacgccagcatcgtcaggaggtcgccgacttcgtcctcaagcgcctcgacaacaagagctcccttggtaagcaaaaggctttacggntgatcaaatacgcaattggaaaatctggtactgatttcaa

SEQ ID NO: 372660 - DNA, 219 bp, Zea mays
tgtacgcctgcggtaccgtcctgactccctggtcgcccacgcgtgtctttactgacggccttgagtatggagccaggggggtaaactgtatgaacctgggggattcaatgactagagccaaggtgctaaacattcacatggacatgcagtggacgacctccataaagtgcataataccacttagggcactctatgatgtggactcaatgggcggtaacc

SEQ ID NO: 372661 - DNA, 258 bp, Zea mays
tttctttttttttttttttttttttttttttttttttttttttttttttttttttttttttttttttttttaaaacaaacgggccacaccttttatttaggcagggggcaagccaaggcacccttttacaatatatattggttcccttctccccgcataaaaaatggggggggccccaaacagacagacagaccagaggggaagacgttaaactccagttcagtccgtcctttaacaaaatttcaatcctagagaaaa

SEQ ID NO: 372662 - DNA, 289 bp, Zea mays
tttcatactggcgcgatgttgaggatagcaacactgacatgtaggctactgtaaaccctggacactggatccaaaccaggaatggctaccaagtaccgagagttgcacgagctctgggcaccatgcgtgctgctaaagacgagttgaaggactcagccaacacggtcccctggcaattgacaagcgcgacctaatgtaacacggggcctgaagactctgcatactttatgttacgagaggcagacaaaccgtgcgaacctagtctgggagactacttaacgagcggtga

SEQ ID NO: 372663 - DNA, 252 bp, Zea mays
aaaaaaggaaaccgcttaatttgaaaaatctgtaaacccaaaaatgggaggctgaattaatctttgcgaccttgataaaacctttgcatcgctttaaccagaactttacattcctgaaacgagtgccgcttgtaccataagcgcgacaggctgtctcgttcatatatctattatattccaaggttcgctggaacctaacaataattgctgcccgactttactcaaactgttagccggaatcagttggggggc

SEQ ID NO: 372664 - DNA, 229 bp, Zea mays
gaggcactgcattggattttttcttcttttttgattcacgccactatgctaacactagaacttgggctgaaactgatccagatgccacaacttcgatagaaaggctggatgacagaaaattcacctgtgaccatcgacattgttcaacaaacacaaggaaggagacctggaaatagaaatgataaaaacgcgatcatttgcgcccttgttcaccaaaatggcttttata

SEQ ID NO: 372665 - DNA, 426 bp, Zea mays
tgtcacgcgtgcgccaaaaccggatttgcgaaccacacctagcagccgaggttagcacgcggcgcgtcctgcggtcatggaggacgaggagcacgaggtgtacggtcaggagattcccgttgacggcgaggacgtcgacatggctgccggcgacgatgccaccaagctgcaggaacttgacgatatgaagcgccggctcaaggaaatggaagaggaggccgccgcgctccgagagatgcaggccaaggctgccaaggagatgcaaggtgtagatcccaatgcaaccacatctgtaaacaaagaggagatggattctcggtcagtattcattggcaatgtaagttttatctcttgtctttatgcgcaaattaagaggacttcgttacagatcaatggctatatcatattatctgggggatataatat

SEQ ID NO: 372666 - DNA, 324 bp, Zea mays
gggacaagaaaatttcaggatggattatacataataactatcatggagatgttgctactgtcttgggttgctactgtttttttaagtcaaactaaaaaaaagaaacatacgttgaaccaaaacgatacacggagctagcactccggcctacaacgaacacctgagggaactaatcaatgacaaacatgtacagaaacctcatagcgcttgaaacccaactccatctcagaggttaatatccacattccccagaggttagcgttttacagcaaacgttggcaggcatttgccataatacacatttacaatgaacttaataaaact

SEQ ID NO: 372667 - DNA, 454 bp, Zea mays
ggtgattcaaaatgacattcgtagtttcttttgaggtggctaaacaaatggatggaggcaactatagtggtatttggcaatagaacattgttattcagatttgcattctgttggtgggttggttccagttatcaagtacctcagaaattctaatgctcgtatccgagcgaaggcagctgatgtggtaacaacagtggttcagaacaatgcgaccagccagcagatggtcatggaagctagtgggtttgaacctctcttatccaatttcagatcagatcctgaccttactgctcggataaaagctcttggtgcactatcttctctgattcgaaacaacaaaccaagagtttctgcatttcgtttagccaacggatatagtggactaagagatgcattgaattcacaaagtgcaaggtttcagaggaaagcattgagtctgactcactatgtgctc

SEQ ID NO: 372668 - DNA, 221 bp, Zea mays
gcgaggggcaatgccaaagccatgagatgatgtccaaacaacaattatgatgcacgtttccaaggacttgccgtagtacaacttcattttacctccccctcaaaaatggggaggaagcattcggctttgtacaccgccagcaaaagctagggactggtcccaggcaagccaggataactcctaaacaaaaccctattgttagttagggaaaaaaaagaaac

SEQ ID NO: 372669 - DNA, 531 bp, Zea mays
gtaattggacagaacaaagaaagatcttcaaatcaaagctaaagaagcggagattcaaaatctgaaaaaagctaatgtcagctccatgaaagatgtttgcagtgcagggatgaacattgatcagtcctttcacgcccctgcaaatgaggcttgcatactggggtttcttctaggcgaacagacaagatgagtggcaaagataaggatgcccattcattgcgagacgatctctatctaaagcaagggcatcaaactgatttacttgaggctttagaactgaggcgtcgcaccatgattgataacggaatgagtacatctggagtagtgtctctggaggaggacacccattttgaaccaagaaacgctacatgcaaggaaattaaggcgataggagtccagacagataacacatctgacaatgaacatcttgactgcaagaaattattgggtgagcgtatatcctgtaacctacgtgcaatgtggggcatgtcacctaacagtttatcaagcaggaatttgatatcaaagatc

SEQ ID NO: 372670 - DNA, 519 bp, Zea mays
tcctcacgcgtccgcccacgcgtccgcttcgcttctcactcgatctgctttgctcttctctcggtctcggctgcttgcctgcttcgagtcgtcgccggcgggagcagagaatccacccgcacggtgcgatgtcgttgaccgcggcccccgtggccttcatcggcctggacgagctcagcgttgagctagcggcctccttcctccgctccggcgcttgcgtccgctccttcacccccgaggcagaacggtcgccatctgcggcgctcgcggagttgaatggcctcctccagtgcgcgagcccagtggaagccgcgcgagatgctgcgctggtcgtcgtgcaaagcgatgctggtggggttgacgagctgttcttcggggttgaggggatcgcaaaagggttatgcgcgggttctattgtattgattcattcgacattgctgcctagccagttggagaagctggagcaggagcttacaaatcagaagaaggatatcttccttctggatggatacatttcac

SEQ ID NO: 372671 - DNA, 512 bp, Zea mays
  unsure (1)..(512): unsure at all n locations
ttcttttcaattcatgcctgtgttcttatacaacacacaaatgactacttatgttttatagctccgtctagtttagaatcgtagaatttcctgcccgtgcaagcattagattgttttttggattggttaactaacagttatcgataattatttgttgtagtcactgttgttttcttttttcctttttttacttgattcaaggactgctagtggccgaagggcactgcctcctccttttgcttttacgtgctgcaagaccattgttatgtatttcatgtttattattacttcgaatacggctagaatacaatgttttaacaaggtatggtgatggattactctcggntgttgattaatcttgtagcacgtcctttactaaatattgtgtttaaatggcgaaggatgatggagatacaatgaacacgaaagtcattattatttttagccttggcgctatattgttgttagcagaggttacatgattcttctttccgaataggcggaaaaatgag

SEQ ID NO: 372672 - DNA, 264 bp, Zea mays
gaggcgggaaaaatagttcttcgttattgatttggtcttatctgtttggaacatcatagcatttacatgcttgttgggaggttgtagaggtttgcatgcttttgttgacttcctagagtttgcttctctgtagtggacatcattgcttgagaggtgggatctctttagctagttctctttgcccaaatatttttttgtcccaagcaatgtttttttgctgaaatggggtaaggtgttaacccttgctggcaatattctacccct

SEQ ID NO: 372673 - DNA, 388 bp, Zea mays
caccaggttcgtgagccggtgcttgggccgaggctggaaggacctcgcctcgtcgtgcttccccaggagcgccagctcccgcgcgggcaccacgtcgccccaccagaagtcgcgcagcgcctcgtgcacgagctcccagtacgcgcggtcccgcggcacgcggaacaggctgctcccgctgggcgtccagcagtagagctccgcccagtccctgcccatgatctccatcaggccctgcacctgcggcatgtagtagtagggcatggcgcgccagggcagcgcgagctcgggcttgcccttgttgaaggggcacttgacttccaggatcccgccgtccagcccgcacccgaggactccgtcgggcgaggctcccagccatccggagctg

SEQ ID NO: 372674 - DNA, 352 bp, Zea mays
atcttggtagccgcagtcccaccgaccccgccggcgggggctctctatatactcgccgctgcctctcgactctctattcaataatcaagatgagccgcggcggtagtgccggcggaggacaaagttcaagggctaatctcttaggaagcggagagccccccaaaccagcagtggcaccagctgcaagtgctccacctgttgagaaaccatctgccgcaaagactgatgcgggcaagccggatgctgctggcgttaccagccaatccaataatcttccacagggctgatggacagaacactggcaacttccttacggaccggccttcaacccaaggccacgctgctcctggcg

SEQ ID NO: 372675 - DNA, 276 bp, Zea mays
acaaagtcacatatatttattaggatggtaaaccttacatatactccggtgatggaacgcccaaaacgtatgctacaggctacgtctacatgcatatatagcagtatatacctcatcttccaccagaaacaacagatgttgtaccaatgcttgctggggatcccgtgacgacgtagtcatcgaatccttcattctgcattatcgccatcatgtgaaggctcatatccgttggcgccatctccggtagcggcacctcaccgtcaaggtactgcatga

SEQ ID NO: 372676 - DNA, 249 bp, Zea mays
  unsure (1)..(249): unsure at all n locations
ccctcgtgaccgcccacgcgtccgcggacgcgnggggggtgattttttcacctcatttgcgtttcgcgggcggcggcaatggcgatggcctccacctacgcgccgggcggaggcgcgcgggcgctcgcgcagggtagatgcagggtccgcggtcccgcggggctgggcttcctcggccccttcaaggccgacggcctctcccgcccccttgcccttgccaggcggatgagcagccctgtaaaggtggga

SEQ ID NO: 372677 - DNA, 199 bp, Zea mays
aaatgactcacctcggccctctcctcttgtgcttctgcttcctcaccgagtctcctcaaccccaggcactcgccctctgtcccctcccttcctcgcctccgatgccgccgccgccgccgctcctcgagccgcgcgactacctcggcgccggcgccacctcgtcgtgctgctcgtcgtgctgctcctccggccgcgaggg

SEQ ID NO: 372678 - DNA, 180 bp, Zea mays
  unsure (1)..(180): unsure at all n locations
aaaaacatgctgnnnaacacattttgcaacaccaactgcttcccatgcatgcatatgcagctgattatatactaaccctgggggctcttggcctcattttatttccagcttttatatagggggactggtggtgcacacaacggacattattccaactgaattacctatatagcactcagg

SEQ ID NO: 372679 - DNA, 126 bp, Zea mays
  unsure (1)..(126): unsure at all n locations
gtngatacacatgatatgggaatctttagggatcgttaaggagtatcagaagcttcacaaaggaaatgttgagattgaaggtgacttctctactcttgccgacaagagtatctttcctggggatgt

SEQ ID NO: 372680 - DNA, 199 bp, Zea mays
aaccaaaccatcaaataggcccatttattcagggggtggggttaattataaaaactcgaacagtagtatgcaggggcaaaaaaaagaaaaatggggtgacccacccgtacccgaacaaatttttgggggaaggagaaaaatttgggggccccaaaccaagggcccggaacttggggagaaggcttcccttttttttttt

SEQ ID NO: 372681 - DNA, 151 bp, Zea mays
cccactgaccgcccacgcgtccgctacgatggcctcataggcatttacaagcagcatcacacggtaaggtttgaatgtacctgtgtgtgcactctcagggaaaaagatgtttaccaaataattgatgtgccatcctgtcgcgataggattt

SEQ ID NO: 372682 - DNA, 224 bp, Zea mays
gaggcattaaaaacaaaacggcccattacagggtttgaaaagcaaatctgttaaaagaggtaggactttacccgtacaagaaagcccctttgcaacccccctcacttttaaggaaaaaccccccccgcccaatttagttcccaaaccccccgctggggaaaaaaaagaagggaaggaaacccccccccttcattgctggggggctcaactaggctgctcccttg

SEQ ID NO: 372683 - DNA, 148 bp, Zea mays
ccctcgcgtccgcaagggaggcctgctggcaaggctatgtttgtaggagacacaggcatgatgctgcccaaaccacaactatatctagctctataaaccagaactcaaaacataatggctagcacaagtcctaccaactcctatttga

SEQ ID NO: 372684 - DNA, 223 bp, Zea mays
tttttttttttttttttttttttttttttttttttttttttttttttttttttttttttttttttttttttaacagggcaaaaaatatgcccccaatgggaacattagaggactaaaccccgttgacaagcaaacagcaatccgaaacaaaattggggaaaggggtggctctatattctatattcaagaaactaaaaggggcaacattgttttgacaatggtc

SEQ ID NO: 372685 - DNA, 216 bp, Zea mays
actaataaacccaaaccgtactacgtcctggatggggactgttgaacgggatggccagtacgagaccgggaagactgctggggagaatctccctaggattcatgtgatgcactgcaacaacgtaatgcaacctgaggacgggtgttaccagacaggcatttgcaactgactggacttacgtaatctcactgtgaacaatgacttgaggctcatggt

SEQ ID NO: 372686 - DNA, 148 bp, Zea mays
actacccagcaaccccagagaggcatcccgtcaactcttacgagaggcagtttgtgtatggcgctgaggctcatcttccttcaaagatgagtacagcagtattaccctatgcaacctgaccatggaccttattactgtaaaggctacc

SEQ ID NO: 372687 - DNA, 100 bp, Zea mays
ccacttttcgcaccacacctcatcactacctcaccgacccagttctcccaagaactacccattaaccatggcgccgccgacggagtccgtcatacacctt

SEQ ID NO: 372688 - DNA, 428 bp, Zea mays
ataattaaacgaagtttgttccaacagtatctaaaacatttgaaggataaacaatttattatttatccctgtacaaacgataatatctgtttcatgaaaggaatagaacaaacagctccaagtacaaatcatcaacactcacgccacgctggggcactggccaccaaatgcgaaacctgttccacgtactggagtgcagaaacggacccagatctcacaaagacgcaaactgcacgggcgacagccgacaccctgacgatctatactgctgaagtactgcacatgtttcttcatgtagtaccatcaatcgactttaccaccttgcacaatgctccatggccaacagctcttcaatatccagaaagaacgaagaatgctagcgagaccacgggacaaacttgcatcccaactaactgaaaatgcaagca

SEQ ID NO: 372689 - DNA, 192 bp, Zea mays
ccctcgtgaccgggcggctccggacgggcgtagcggggggactttatgctacatccagtgtctaccgcccccagcgcagctgcaccctagtccgggggcaccataagggagatcgtgcgcttacaggttggttatgcgcgttgtcaggccaaaaactttttcttttggcttgaataaaagggggaagaaaaa

SEQ ID NO: 372690 - DNA, 357 bp, Zea mays
aagattagacatgatgtgcagatatccaccatcataatctcattgagatataagatcccatttcagaaccttgaacctaagatgtcttccattattcagtaaaatttccaacagaactaaaggtcctacaacacatacattttttttaaaggaccaattcaaaatcctggacctcaaactgccaacgcattacaagaaacagggtgtaagatcatctaatgtttgtcgtccttgggcacagacgtctttcttggcagcttgggactccaactccttcactgaagactgtttcagtagatctattttgaatcatgaaaatgcatgagaccgtacagaactattaaagcaaatgtgatg

SEQ ID NO: 372691 - DNA, 190 bp, Zea mays
aaaaacttccaccattcacttttaccattatctaaaaaaaacattttatgttacaggtcccccggtgggccagcaagggggtaaaagttaactacacagggctttgcctacaactttttgttcgaaagggctaatgcaaactggaaaagagaaacaagtttcggctgtaggggggaagattgggggcctt

SEQ ID NO: 372692 - DNA, 312 bp, Zea mays
gggggcccaccaattcacccatgagaaggcaaaaacataattccaatattacatctttcacactgcaagcaaactaagaataaacaatttgaacaagttttatccttgtcgcccaataaacaatacagttattaatgacaacatcaaagctccaaggccttgctttatatccctgttccctttcgattctatttagtattttaatggggacaaaaaccaaaactgaagcacacgttttttgctagtctcaaaacagagaaccaaatctattttttttgctattatgaaaacaaataactgaagcacatattt

SEQ ID NO: 372693 - DNA, 133 bp, Zea mays
  unsure (1)..(133): unsure at all n locations
cnctaccaccatccccacgttctcctccctccgcctttcgctctgcgcacatccccatgcccatgccgagtgcttgcgcctcaccgaccccgtcgcagccgcggtcgtggtggctgctactacttttcctgac

SEQ ID NO: 372694 - DNA, 194 bp, Zea mays
acaccgccgcccagttacgggacacggggcttctcagacccgggctttcatcttagcctgcgtgctgactgcacggcgtccctgaagacaaccatggctgagaccagagccgattgcaggtacgattaaaaatgggggaccagggagaggaaggacacgcgctcttacccggggctatctgggccataatgcct

SEQ ID NO: 372695 - DNA, 205 bp, Zea mays
ccctcgtgatcggccgacatctacgtggaggtcgaccgtgtccttttcatcggcgagaccgtggcggcccgcgcgggacgcagcctcgcgggcgggaggggcgccaaccaggccgcctgcggtggtcgtctcgtgctgggccctacctacctcgaggcgcgcgtgggggatgacgccaacggccgacttcatacagggtgcccta

SEQ ID NO: 372696 - DNA, 462 bp, Zea mays
ggtttatgcgcgttttgcagcaccccctccctggttttgctctttgctctgcatcagtttcctgaccagcacagccttggattggatcgatcggagctctcatcagctgttaggtggccacttgtcctatcagcagaaccacagccaaagccagatagatagtcctcatcttcgtcttcggcctcctcaccccttgaggaaaccatcatcggggagaaaccaccaagagcaagagcaagagcagaagctcaacttcttcctccctcagcgtttctcaagaacaataaggtgttgaagtaactacaagatccggtggcaggccacggcaccatgagcaatcttaagcttggtgttgaagttaccagcgctcatgatctccttccgaaagagcaggacacggccaatccttttgttgaggtcgacttcgacggccagaaatttccgacagccgtcaaagatagg

SEQ ID NO: 372697 - DNA, 276 bp, Zea mays
tgccttcgagatcccacccgcccgtcccctcgcggcgcgcgcccgacggcccgaggcatggcgacgcggaaccgcacgccgctctaccgcaagtaccgcgacgcgctgcggcacgtccgcgcaccggccggggcgacgtcgtcgtcctgcgggggagggggagggccgatgttctggggcaaaaacagagatggtttgactatcttaatcatatattgcattgtttttgagaaagcttggggcaagcttggatgattttctaaagagaaatagata

SEQ ID NO: 372698 - DNA, 397 bp, Zea mays
  unsure (1)..(397): unsure at all n locations
cgtannggggatttcttactgtctgcgatctattcgtatcggcgctgaagggctcagctcgagattaaaacaatttgggttttggggtcttttcttcttctactactggccaagctcacagaaatcgctggctccgtggtccaattccaatggacgagtccggggaagcgagcgtcggctccttcaggatcgggccgtcgacgctgctgggccgcggggtggcgttccgcgtgctcctcttcagctcgctgtggcgcctgcgggcgcgcgcgtacgcggccatctcgcgcgtgcgcagcgcggcgctgccggtggcggcgtcctggctgcacctcaggaacagccacggcgtcctcctcatggccgtgctcctcgcccttttcctgaggaaactctc

SEQ ID NO: 372699 - DNA, 290 bp, Zea mays
atactaatagatatattgtacttaataataatataataattattatataacaaagcatacacaaatatatctcatttttattttagaagaagaaaaaaaagagagagagagagaggaggaggattggattcgtagctagcgcgcgagtaagtactactcagctcgatcaacctgcttttaggggtcgtagtagtcggagtcccagagcggcctgaaccacatggagtggacagactgctggaacgtcatcatgagcagcagtatggccaccgccgccaacacgccccacg

SEQ ID NO: 372700 - DNA, 397 bp, Zea mays
tttgactgggactgggactccgagctgctcctgctggtcagtggcgagaagaaagcggcgtagccagttattagcatgtcgtcgtggctgcactactccgacggccagcggcggtcctggaagcgcagctgggcggcgcgcgccctgtcgtcgtgctcgctgccgccgcccggcctgctggccttcttcgccatcgtcgttttcttccttgccgtctccgggtacgtggactacaaggccatcgagcgccgcgccgagatcggcgcccgcgtcttcgccgcgccgctcgccctggccaccgccttcctcctcttcgtcgcgctcagctggcgccgtaggtactgggccaccaggaggaggagggcggcgcaccactacccatggtcgtcgtcgtcgt

SEQ ID NO: 372701 - DNA, 188 bp, Zea mays
cggacgtgggggcgcaggccgtacccaccagaaaccgcagacgatcggcagcggcgatggccgctgccctcacagaagagcggcgaggaggtagggctcacatgcctctggcacgccagaacaaccgagaccgaggaggtcacgggcccgcaccccggcgacaacgagcgacccaagcagggcggcac

SEQ ID NO: 372702 - DNA, 577 bp, Zea mays
  unsure (1)..(577): unsure at all n locations
ggttatgttaacgaattataaggacctgcgccgacctatttccaaacttttaagtatactgtccaaatcttccacaggcaagttcagagacaatatgttactttcgtacaaaaaaataaatgtatgctactgttacagcagctgtcaatgttgctattttaattatcgtggcgcaggtaactgttttattcatatacatccagttcatccaaagtgcaggtaactgttttattcagacatatatgattaatcatcattcattaatatgtgaactccattgagcaagtatattgtaaagtcagaactaaaaagaggaaacatttggttccaccatttcaccttatattgtactaaggggaagtatttagagattgaattgatggcaattacttcagtctttaaacctgttattagtgttgataatgttgattctattctgtcgcacattgttgtgaacagctnggaaataccttgcgagggttccttaagttgtacttatttatattataatgttattcaatatatgtgtatgtatatttctctttcaaatattataacatgatatctgaaaaataat

SEQ ID NO: 372703 - DNA, 181 bp, Zea mays
cgttcgctttggccaaagaattccctctcctagccgccgccgccgctcgtctccctgagaggtgccgggaccgaggaactggccgagttctaggtagagaatcggttttgcttgtctcagcacggggtctgctgcgtctggtggtggtgaaggggagaaattcttgagatcagttccggat

SEQ ID NO: 372704 - DNA, 457 bp, Zea mays
tttattttctaaaaattgatccatatagatctatccctacatgtaaacaaaacctagtcatgcatacctatgatttattccaacaaggcgcccacaaaaataaatgatcaaatattttatcagaatttacatatcatttcttttttctagtcattgtaatctgtactattcaatagacacatgtttgtgaaaattatagagatgcaaggcaggttatccgtaaacccgtaaatagactaaatttttacgagttacccacaaatttgcaaaagattagcctatttgtgggtttatggacaacccgacttgcatccctcaaatattacataaaaaaactgagggtggttgaaaacatacagggagtgcttgaagatggctttggtgcgtcaagaagttatactcgtatattgaattgaagacgaaccattttatcgtgaggttgattgtctaatgaata

SEQ ID NO: 372705 - DNA, 152 bp, Zea mays
cgctgcatatgctgacgtccctgcacatggcggttttcagcgaaaggtaaagatccatggtactgtgtgggagcttgaacaagggatgtttgctagcatattcctatatagtcagttttgattccaaaacatggtatgtttttctctgacac

SEQ ID NO: 372706 - DNA, 158 bp, Zea mays
gtctcgattgccgctgccgccctacgccaggtgtgcaggttatcttcggcccattcgtcggcgacgagcaccccactagatcgaccgagatatggacggcctgtggcatctgggggacgagctccccgggcagtccaaggtggtggaggcccgccagc

SEQ ID NO: 372707 - DNA, 127 bp, Zea mays
cctacgactactgcagaatgctgttagtcagctggatgtgcaaacctaattgtgcattagagatggctcataccgactggcaccgaagcgcgcatctcatgcatgttcttccatttttgtcgagcac

SEQ ID NO: 372708 - DNA, 113 bp, Zea mays
tcgggtgaatcgatgaaggacctgatgaggaaaataaaccacaaattactgggaagattgaaatcgccatccagattgtaggctaggttgatgcttactatccatggatttgt

SEQ ID NO: 372709 - DNA, 264 bp, Zea mays
tcggctatacttccgcatacgcatgctgctactactcagtagtgagcacagtacagaggtgccgaccacatgacaaagaggtcccgctcgttgctcggcattccagcactgctaagagcgctgatactgctcagaccttacctcacagcatacgactcgctgacccccatatagggtgtcaggtgcaaaacgttgctatccccgcgcatactgctaagcccgggctaccagggcgacaagttctactacgacataccctttccc

SEQ ID NO: 372710 - DNA, 488 bp, Zea mays
tttccttcgcgtccgcccacgcgtccgcttcccttcccgcggcccccgacgccctccgtccctcgtcgtcatccggtcatcccctacacccgataaaaggtacgatggaagaagcagcttgcaccgctgctccgagcctgccttatcactctccgaggatcaggaccgctcccgttagagtagtggcgaagatttgcccgggcggagaccccactggatccatacaggtctccgcccgtgttcccgatccggctaactcctcctccgattccgtctcattcgtccccataatcaaggagtctgctctttctagtatgacccaccgcaaacattgcgagcacaaactcgattggtgctatctcaacgacgattcgtacacagacattttttacaacgaggttaaacagcttgtggataaaatcttctactctgatggccacaaccacgcatgtgtggtcacttgcggatcccctagcaaaacccacctt

SEQ ID NO: 372711 - DNA, 479 bp, Zea mays
gagggcgcctggcggtgaccggtccccccccccctgggtcgactccactgtcgtccgctattttattatcccagacgacccctatcccacctcccagcgaccggtgtatcagttccatgcatatcttctccatcaccaatccttatccccttctcccatcgatatcaggcatacaaacagattaaccccttcatacttgattatgcacataaccactcccccaatttattcaaacttccggctacacaagcaccagttttccctaccaatgaggtccacaaaccaccttccaattatttcccacctccttacacaaggacagatcgtcctttcaatgacggttacaatccttacagcaattggtaaccagatgttccggcttaccctcaggcatattaacccccaccctacacatttgaccctcagcacaactttcaaaactactacctcacggaagccccagctgctccattcaacta

SEQ ID NO: 372712 - DNA, 291 bp, Zea mays
tctgtttgccctagcagcacggaattccgatgggggagaccacctgctcttctgtcctctcctctactgaaagcaatctcaaaagttcagcgggtagcctatcaagatggccgaggaaactgccaacgacactcaggtggcacaagataacgagattgctctcagcaatgaggcagtccaaggtgatgagttggtccatgttgaagagcatgctccaaggcgatgatttggtgctaggaaatgagccagctgctcctgaggggacaacttctactattggaaccagaccta

SEQ ID NO: 372713 - DNA, 350 bp, Zea mays
  unsure (1)..(350): unsure at all n locations
aacagntgcatcaatatctgggggaacaaaacattcacatccactctagttacatttcattgagccctagttgcggttatagtggctctgcgctacaaaattcttcaacagctgttctgatgaaaccagccacaaagaagtagatgacctatctcaaaaggtacagccaaatacaaaaggaaacttctatttcctcgtattggatacaccttctatctctttgtattggatacaccaactctaccatagcagtttacgtctgtgcaaagggatttctcaacagagacgataggtttggcatcaaagggtacagaatgagttagccttgtgaggtgagggttgctggactg

SEQ ID NO: 372714 - DNA, 409 bp, Zea mays
tttctttttttttttttttttttttttttttttttttttggagggctctaatccatatagtctcattagattgtaacagtataaatacatcagctgtaccacactgatacactgcagctaagccttgctcaacctggccagaagacatattacttacatcttactaaagagcatcgacctaggggcctatgatcaaactggaacttcaactaatcctaacgacctgtttggaaggcaggaaaaatgtttgttcctgggtatttcgggtgaaatacagcctatacgaaattcatgcgttcaaaaatgggcctaaacattttctacaaaacttagcaattactcgggccagtctagcaactgcagacttcgacatcatgagcatcgtgggaaagtcgcagtacactgagca

SEQ ID NO: 372715 - DNA, 264 bp, Zea mays
gggggccaacttccaacataccataattgggtgcagctatccagcagaactcgctagctcttatggcaagggccagcatactaaaattttcgcaaacattgcaggggggaattggcagaacacccgaagctacacctaaaattttcgggtgaaaattattatttcctcaggaaacaaggcaaaacgggttccagttcagagcccgatgccgcagcaacaacaaaaagttcaggggtgggttattgactgcagggcaacaagaat

SEQ ID NO: 372716 - DNA, 429 bp, Zea mays
ctcaagatgcaacctgtactgggtaataggactctcaaggtggtccattagtgagcgcaaacaatgcatccagcctgtggttggcatgaaacacggcagcagtcgtttagcgcgagagtcaaggaataccatggaaagggcgtcctcacggccgattttcatcttttctttgcttccaaacaggacaatgtcattgagaaagcagacactgccatggagatgctcaacgagcctgacaattcgagatgcaacttccaatacagcggtgttggtaggggcacaggtaagtgtccttaagcccttcatgagcattgcccagaggatagtgcagatggttttcgttttgcctgtcccaggggggccccatattagttttagggaaggcaaccggttgtctattgctgacaagacacagtcagctactgcatg

SEQ ID NO: 372717 - DNA, 273 bp, Zea mays
cggcccaagggaagggtttggttgggaaaattaaaaaaagctttggccccacttggggttaaaacccccccaaacccttcaaaggtattggggtggggaaaaaaaaaaacaagcctgattttccgggccctttaaaaaaaaaaaaaaccggggaagatttgttggaccccggtcccaaatttaaagacaacctaagcagacggggaaaaaaaactgcccaaaaaaattctaaggggtttttttttttaaaaaagtccatttcggggggccaaa

SEQ ID NO: 372718 - DNA, 213 bp, Zea mays
agtggaggggggggcctgacaccttatatacctagctgaaagcagggtagcaaactactggtgtttataaaatacagtttttttatgtacacatacaccagggtacaggattctttacgaggaataccaggctaaattaaattgcatttgggatgcctaatctgggttgattataagccgagggaaaacacatattttctttgacctttatag

SEQ ID NO: 372719 - DNA, 232 bp, Zea mays
ggggggcagcaactcatcccgttcttaaaccaagggcttgtttgcaaaaaaaattgcccccctgacaaacgaagggcggcccttttgaccaaaaatgttttgggggacccgggcccccccccaaggggatagttcccgggggtgggggaattaagtttccatccaaaaaaaatggggggaaaaaacccccccctacaagaaatattaaatccttcggaaggaaagggaaaaa

SEQ ID NO: 372720 - DNA, 282 bp, Zea mays
cactaaactaaacacagacgggggaaaacgtttgctggggatccaaagctcccaagtccgggggccatcaaagggaaaacatcctaaattccacaggcttctactttatggccctggaaaaaatcccactccgatcaccaatcccatcccatttttccatttgggggaaacaagagtcctttgggggaagttttttgagacctaaagacctgttctatttgtaaaaagggaagcccaaattttcctatcgggcacaagggggaagttttgattaatgggggc

SEQ ID NO: 372721 - DNA, 283 bp, Zea mays
aaaacaagctttttgggtcgttttcctttaaatataaaccagagggttcttttttgggggggaactaacatttattagacccctaacttgagaacgaattttttttttttgagttcaagggttcgggaaaattttaaattggatgaacaaagccccatgcccacatagatttgagcagaaagcacctgccccttgcactttaacccatgcaaaatgcaagggcctggggcccgagggaaactgcaatttgttgggagttgggttaccagggcaaaaaccgttt

SEQ ID NO: 372722 - DNA, 339 bp, Zea mays
ggggtaaaactacccttcagaggttatgaaacaaagtagttcagtgcatgttacctgtaaaaacaatgcatttctgtctatttggggtctgtctttcaagggagcacattttaaacatgccgaatacagaatttggaagaagtgcatggccagctttataacatggctcgacccaagattattgggggggaaaagtaaacataaaccaccagtgtcatggaacagtaccccgatcaacgatccagcactgtccaacagaaaatgattaaggcgccaaagagaaaacagaaaccgaggttcattgggctggatttggggacgtgagctttggtggtgccc

SEQ ID NO: 372723 - DNA, 281 bp, Zea mays
atcgggattggatctatacaagctggttgagatggagctgtttctgatgtatgacttcctgcacactaaggcagcagggatccacacatggtatggcttctgcatccatttcatctcgctgtttggcacagccaccacattccttttgtttcagctcagtatcagcaacagtggaaatcggcacagcagagtggatgtggctatcagttatgttttactggttggggcttcggacttggaaatcatatcagcgcgcagagctcgactatcccacctggaca

SEQ ID NO: 372724 - DNA, 495 bp, Zea mays
atctttcccgttcccagcaatccggccgcggccaggcagccaccagcgaccaagaaatcgagaatcctcgtttcccattttgtggctggcgcgagcgtgcagcgtcagaggtttccggacggacgctttctatcgcaatcctatctatatatttatcccaaggcttcgtggtttttgttgttgttgctgctgctaggtgctagctcccgagtcacggtcgccttccactcccacagaattgagctagctttcttactcccgccgtcgcccccgatccgagagcgagcatggcgcactctctcgccgcttccttctcgccagccgccgcccggcgccaggtcacaaatgtgattccaagctggacctcggtttcctttcagagccacaggatgacttttgtatccatccgctcaagacaaaggtctcttgggtttaagaatttgctgttcggctaagaaagagacagtggacaaggtttgcagtatagtgaaagag

SEQ ID NO: 372725 - DNA, 238 bp, Zea mays
ccgctcccgctgtccttccctaacctcgccgcggaagacgtcttgccgtgcgtagctagcagttccccggcgcacgcgcgtcggataagaattggttttggctcttcgtctccccccatccttgggtcctttccctcccactccctcttcgcctcgttcgcggcagtaggctcaagcttaggaactcgctaccgagggatttggcatattcgcgagtgagcaggattagttggaggct

SEQ ID NO: 372726 - DNA, 207 bp, Zea mays
cccatgcgtcctatcttttcttgttggccttctccttgccttgcttttgcttgctcgttgcttcttgagctcgagcccgccccttctgcgccttgcccaagtctctgtgtgttttttataggctcgagagcttggaatagcggggggtggaggacgcgaacgaggcgcttcagcttacacccccgagacagagcttcccccacccaa

SEQ ID NO: 372727 - DNA, 252 bp, Zea mays
cccatgcgtcctcccacgcgtccgccgaccctgccctttgttcttccgtttccaccctctctctcgcggttctcccgtgctctgtgtccctagcggcgacgactgggcgatcgccgccgccttaagccaggtgctcaggtctgccacttggcactttgccggcgacgagcacctaacaggtgcgcccagaccttttccgttcctgctgtgcgaaaccgagcacccagatcctagcttaagagagatggctgg

SEQ ID NO: 372728 - DNA, 183 bp, Zea mays
gccgtccgcacttcccttggcgcgcaccgcgcagggcctcctttatttgttgatattttcctctccgcccccaccacgctgaccacgacgtcccttctcctccttctctccagctagctcccctgattactactagtagtagtagtaggtagaagcaggctagcaacacacacagtcggagaa

SEQ ID NO: 372729 - DNA, 107 bp, Zea mays
gggatacggttgtgagcaaagcaaaaccgcagcgtacctgttcaagatgaaaacccctgaaaacccctcacgcccgaatggtactgcacaaaccaacgcaagagcac

SEQ ID NO: 372730 - DNA, 169 bp, Zea mays
atcgccatgcttccgcttctttgtctctgccaaggcacttttagcttttagaaggctacaaaaattaccatttcctttgacgtcccgtttggatccttggaattgcattccattctaatattgtaatttaggctcatatcatttaatctatttccgttttatgcaaatt

SEQ ID NO: 372731 - DNA, 349 bp, Zea mays
agcgtccaaatctgggcacctcgtctagctcgccttccatttcgtcccttcctattcatactaccttctacgagtttgagcagccatggcggcaacaacaccactgcttgctgtggctggacatggagtatcctacaaaccagcaaatgctaaagacagctactactgcttcaaatttgcatcatcggcaagaacaagagtcaccctcccacagatcatccactggaggtgcaggagcagtcatagcagcacggggaccacgaccatggccgcccctgtcctcaagcggcgggagaagcaggacgaagagcaggaatggatggggtacctggccccggagatgctggag

SEQ ID NO: 372732 - DNA, 329 bp, Zea mays
tcgacttctcaactacgccggcggcgtcggcatcattatctattccaaaccacggtcgagaaacatacagcgaacacagcagccatgcacatccatcgtcctctacacaccaacgaccatattcaccacagtccgcagcagagaacagagacacgtccctacgaactcgtgctagctctagctgtgctagctagcaccggtcgtcttcggccagctgcctgaagatcattggcgcggcgaagtggagcgagtccgttgtatcatggtttgatgcacattaatctgtcggtttttctcctttttcattacttcatttcttctaccttttt

SEQ ID NO: 372733 - DNA, 193 bp, Zea mays
  unsure (1)..(193): unsure at all n locations
ccactgntgcttatcgaaggcttcctcacctgccatctgcactgtctttctgccccactcgagatgaccccacctgcatgctgatcgataagctgtggcaaatggaatttggcattctgaagagcatatgtgttactcacgccctgagcttgccggtgtgagtccaccagtgaccggtgttgaagatgaggtc

SEQ ID NO: 372734 - DNA, 132 bp, Zea mays
ctcggtggtaacccggccaattcaactatgctgcaggtcctggtctctattcaagctttggccccgaatgcacagcctaaatccaaagagccaggctacgctacgcatgccaacaccagcccatggagagaa

SEQ ID NO: 372735 - DNA, 208 bp, Zea mays
ttctgcagtagctgcggatggacctgccatgaaatacacaatttatattgtaacagagcctgttatgccactttctgaaaagctcaaggaactgaatcttggtggtacacagagagatgagtactctgcatgggggcttcatcagatatccaaagctgtgagctttctcaataatgactgcaaacttgttcatggtcatgtatgcttg

SEQ ID NO: 372736 - DNA, 319 bp, Zea mays
  unsure (1)..(319): unsure at all n locations
ggtccggtccgattcccgttcgacccacgcgtttcgtctctccgaaggcaaggacgtgtgcgcggcggttgaccttgnggcaagcacccaacggtaccagaaatccacggcggctagttcactccatccggcgcgcgcgcctccctccgcctcgaccaaaaccgagggcgtttcgtgtccccttgtggccatttctaaacttccgtgcctaccttcttctcctatttccactcacctgcaccacctctaccctgtttcccaataccctaggcccttctatctaatgcttgtacctctcgaatttctcttctccccaccc

SEQ ID NO: 372737 - DNA, 385 bp, Zea mays
cagccgaaaagtgaaggtaacaacaatgaccgaatgccaaaggtaatattactaaagaattatggtaagaaatagaagacagtagtattattctgttgtatctccttgttaggatttgcaacacgtattctgcatttgcaacttttatttgttcttcgtgtggtcattctagcatgcttggattactctctgcatacatagatatgggaaaatagctccgatccattttttggtagccaacgatagctggcagaaaatttattctgtcagacaggcacttctggtctctagatctagattaattaacacactgcacataaatgaggtttccattcgggactatagcttatttctgcactagcgcatcgccacatgtatatgtatc

SEQ ID NO: 372738 - DNA, 387 bp, Zea mays
cccatgcgtccgcccacgcgtccgctggatttgagttaaaacaaagcgaccttcctcctctccctccagctccagttcgtctctctcctctcctcgcctaaggtttcgcctcctgtgatcccgtctcgccgtcgtcgccatgggggacaactacgacgacgaaggcgagccaatcgtggacctcgacgaacgggagccctctcctgagccacagccctacgaagatctcgatgacgacctcggcgacggcggcgattggacccgcagccgctccccgacccccgtccactgcgacgacggtgaggcggggtcctccgccaagccccggaagcgcctactcaagaagggcggcggtggcagcatgcccggcgacgaccggctcgatga

SEQ ID NO: 372739 - DNA, 122 bp, Zea mays
gcgtgagcgtcttctgtagaagagcctggtggatgtgatttgagaacgagaacctcactgacagggtacgaactggagtcaccagggtacactgcgcagtgcactaatgtctgatggctgat

SEQ ID NO: 372740 - DNA, 314 bp, Zea mays
gctgtattggtatcatgacaaactgaatcatcaagaagccaactgccaaataagatgccatgtgatccagctcctgtatttgctgtgggcattactcctccatctgtgactccttcagtatcgacagaagaaccttccattcctgtgtcagcagccttgccttctctggtgaacagcaagccagtagccctacctgactacaccatgccatcccaattcactgccctataaggtcccacgcgcataggggcgctttcgttcagcaatattaccacaatttacacgaacaaccagatcaagtgcacaagttttac

SEQ ID NO: 372741 - DNA, 521 bp, Zea mays
ggcgtatgagtctattgtttaacagagcccaggcgatttactctgcaaggcagcaaggatagtggtttacagaacatctttgcatcatttgtcatgcagtaatagttcaagggttcctgagcagctgtggctgttgcagatcatcctgattacacattactgattctttcaatgaaccattatgacatcatttttcgctacacattcttagtcaactcttgaggtaggaaggtgcatgacctctcccgcaacgagccatttgtcttgtgtggacaatggtcaaggttttaggggcttactcaaaccactccctttgtttgcattggcactgatacaagaaacatgacactgacattcttgtcatgttcattgcacatactgtctgataaggacaaatatgtaaccgatgtgtccctgcatgtagctactaccataacctggttaatggttatattgctagcttgattatggggttatgagctggaggaccttgcacctgccatgaccttactgtgctcatt

SEQ ID NO: 372742 - DNA, 176 bp, Zea mays
ttggggtcgagcgcacacgggactaccgagggggtgtatatttaacaacaaaaccgcaccacgaccacatagacagagggctcatccacaaaagaactgaataatcgattgcaaccgaataacagactgatgaagtccaaccctgtctgatcagtaacgtcaccaagagccacaga

SEQ ID NO: 372743 - DNA, 380 bp, Zea mays
cccacgcgtattgtttgcgcctcgccgttgattgatgcgctcactcatctcacatctctagacaccaactccagcgcccccgtatggaacaacaactccaccctcactgtctggacagcaagattcattcacctgtcatatagtttcatcgatgaatctgaaacttttattgttcctgtgttgcccctatccaaaggtcatgttccttggatcaactgtaaggtgaaccttttatcctgatattatgatgtggttatgtattctattttctcaacagtaggagtacattctaaagatcataggttagaaatcttgcgccataagatagctgctaaagaaaatgaactaaaaggtcaaaagagacctttgttcgctggtgc

SEQ ID NO: 372744 - DNA, 279 bp, Zea mays
cgttgaagtttattgccccttctttattctgcattcagggatataaaaccaaccagtagggttggagcctacagctgcaaaatactctggctaacagtaatggcagggaaaacaaaatatctgatattcaacgacccatgacataatataacaaattttcccatgaccgagccatttatgaataacaagcgctcaccaaccgaaaagaattggacctgcctacaaaggaatacaggaaaacggccccgaggccaatctgttcaatctattaaaagctgg

SEQ ID NO: 372745 - DNA, 195 bp, Zea mays
gcctttcccttttttaaagccgcgggctgccggactcgaaacccgcgaggtgaagcgaccctcctccgggccctggcgccgctagttattgaaagggagcgatggacgtgctgttgattgacacggtggaggatgacgtgaaggagaacatctggaggatggtggtgctgctatacttgggcccagtggtcccag

SEQ ID NO: 372746 - DNA, 334 bp, Zea mays
tgccgtttgttcatggatgcctgcaagcaccgcgaggttcgtgtctttgtcggggagtgaccaaacaatgtgcctgttctcgtcgaccccaccctggtctttgtgcgggatgagacttcagagtcagggtgctcaaaagccgccggcgcgcgggcactcgtcttgcaagtcccaagacttctacacatggacgattaaacatggagacggtgattcatcgccacgcacgacgagtacatcatgcgccgccggaggaacactgagcccgatgatcacagtggcgagtaagggggtgaagtagaacggaaaaatgggctggggctcgcaggggacc

SEQ ID NO: 372747 - DNA, 244 bp, Zea mays
accgattaaccggtgtatcatatatatattaatataacttcccatttttagcacctacaatcccgtaaacactgagacctattgagatcttttttatcctacgacattgaccaaattactaaaacgactcaggcaatctaataaatattaaacctagtcaaaccatccaccaatccactaacacgagtaacaaatttacttaccctgactaattcgacgcgttagtcgcaagcacgactatggg

SEQ ID NO: 372748 - DNA, 367 bp, Zea mays
tcgattttctattcgtcatggtacaacactgttattaaatccggtctccaacccgccatggcgtttgtcatcctctagtcccagttcgacccatccgtgtgtttgctcttcatccctcgggcttcacgcgtgctcgcatttgtcatcgagctgttgaacccgtccttccttgctcgtgacttcatcgccgccagagccctcactaaatttgtgtcctcgctagctcgctccatattcaatctcgtcgtcgttccgtgcgtcagcaagaaatctcaagaatcgggtgaagaccaggctagcagcatggtgttcaccaagtgagcgacaaaaagctgggacattcctgcgcaacttaagattgggttcg

SEQ ID NO: 372749 - DNA, 249 bp, Zea mays
tgctaatcgtttacgcgtccgtctgcctcgagggagagccgaggcacccatggatccatgacgcggtagaaaggctggtgggccggtcctgctccatgcaatacattgtgactgacctgttgcacccgtcggacacccgcagtatcaacctgtgggcgtggacgcgcaacccatgcaagatttctaagagaattgggctcatttttcactaaccgtgctgtgggagatgcttctttttggcaggtcatg

SEQ ID NO: 372750 - DNA, 238 bp, Zea mays
gaaacaagaagagatttgaagtaattgtagcgtaaaatgcaagctaaccatctacaagacaactgtctaagattttacattaagatataaaagataattatttatgtcgtgtttacagtttagttgtgggtacatacacgcaagactttgtttgaccataacaccactgttataataaaactgagtagaaaggactattccagctgtcctaacgtggagaaaaccaccgaggtccata

SEQ ID NO: 372751 - DNA, 323 bp, Zea mays
tttatcgttttgtcctagcacacgtacgcgcagatccgtccgttccaatccgccccggtcacccaacccacgtttttccccacgcccccatcctttcgagtcaccattgccctaccacacgtacgcgcagatccgttcgctccaatccctcttccccatcgttttgcgactccctagccgtcgtctcgcccctaacgatccactcgcccccacaacgattcgttttgtggtgaagaagccacccgtgccttgccggaaacggaagcatcaacctctagtcacgctgaccctccacggcgcctgtgatggggctgaagcggcct

SEQ ID NO: 372752 - DNA, 343 bp, Zea mays
tgttcggttaaacccacccttcccgtggtgacggcctatgctctagctccagattggctggcgggtgccatacctcctcctcctcttgtagctcgaggttccaaggcggttccgtgcagctctggtgggacatcggctttgcacacacttttccttcggctggcttgctatagcaggggccaaattcagctgcatttactcgggctgagattttttgtgccagaaatctacggaggagtcttgccgtcgagctttaaacgaagaggtagagctgcagcatatattttgggcagtaattcctgctttttgtttcgatcccattctaatgctggcgttaagatgc

SEQ ID NO: 372753 - DNA, 163 bp, Zea mays
cttgatgaaatggaacattaccggagttgatcggtttatacaaccaccacacggcttttaaaagattaaacgcccacaacgcttgttgattttatcggtaaaaaatttttttatttctagcaacccggggggggaggcttcacaagtaaaaaatttggaaggt

SEQ ID NO: 372754 - DNA, 410 bp, Zea mays
tgcttttcatattggtggcatggtcttggtagcttttctttctcagatttgattatacttgggtagattcaaaaggcacatttctcagattcaaaaggcacatttcaggttgatttcagcaatgataattccattatctggacatctgattaagaagttcagggatgcacttgcaaagcacaaagcagataaatgtagccttggcccaacttggggactagaatcagaactgttggccctggctgcaaacaaggatgtccaaggagacactactggttttaagcatggaagacttcgcggaggttaggaccgctgacaagccaaggcttctgacatcactgaagctataggcaatatagggatctggtgacatgccagagatgaaatgtggtgatcgccactttctttat

SEQ ID NO: 372755 - DNA, 338 bp, Zea mays
ctacgcgtttagattttagctcgttccaagagcacgcgaggaaaccgcatccgtggccaacagccgcgtcttcgacgagtacaaccccgccatcgaatggtgccgatccgatgaggcctatgccgtcaggagctctttccgagggctcaagagggaggacattcacgtgctggtggacagccacggccacgtgctgacgctcggtgagtggcacattgccggcaacaggtggagccgtttccagacggacgtagacctccccgccaactggaacgctgacggcatccctgccaagttcgaaaacaacaggcttacccatacgctccccaagagcaact

SEQ ID NO: 372756 - DNA, 280 bp, Zea mays
cctttgcgtttgatcttgcctccccgagactaccttgctgccccctcttagtgtccaagcgagaacactacgccgccgagatgtgggtatcatattccgcctttgagtagccctcatcttcctccccatccgcatatggcttcccgacggcgagcccggcaccagcacggtttatccgacgactcaaccgatgacgacggcaggacaggcgcaaacagggcagtgccagcgccgtttacaggtttttcaacccgaggcggatgaacgtttggcttggacc

SEQ ID NO: 372757 - DNA, 170 bp, Zea mays
cccacgcttttcgttttaaggaccggtataacacttgcgcccggaggatggacttactctacagctcataagagacttacaaaagtcagtgtgtgggcctgattcccttcggggaagggcacccgtggttcatgctggtccggatgaccgacggaggggcggccatgaac

SEQ ID NO: 372758 - DNA, 266 bp, Zea mays
gttttaaagttcatcgtctaggcgtccgggcgccgaaaatttttgggtgtcggtgacgccatgacctggacgcttagggcgtccggcttggcattctaggcattgcctaggcgcattaggtgtcaaaggcgtagactttgatcgcctagtgggtgccataagccccaaaaatctggggttggggctggccctttttcacgcctatttcctctgatgtgcgagaagagtaaggaagggaaagattagcaaagaggagagaggggcac

SEQ ID NO: 372759 - DNA, 403 bp, Zea mays
ccctcgcgtttgtaacttctgattctaaggctgcagatgagtgcagccttttagaagattgtcttttgctatcaggtaaggttcttctgaacttggcatatgacaacccatttggttgcgaacaaattgcgtcatgtggtggaattcatgcaatggactccttgaacattaaacatttaccctcatttgattgctccagtggacagttacaatcaaatgagcgaaagagtatcctgtggtgatctgttgtcttcccagaacagcatgtcactccaaatcaaaacatagcaattgcgaccctatgaactcgatttgttggtaggcatattgggaatgtttgggagctctagttagaaggataactcttatagggtcccaaccggcgaatgcccgtgtttctgta

SEQ ID NO: 372760 - DNA, 310 bp, Zea mays
acgcgctcaatttcatcgtctaggcgagcgggcgccgaaaacttttgggtgctggtgacgccatgacttgtacgcttaggtcgtgcgacttggcatgttaggcatggcctacacgcatcaggtgtcaaaggcgaagtatatgatcgcctagcgggtgccctaagaactatatatctggggttggggctgtgcctgaacaaactgctatttgctttgatgtgccagaagactaaggaagggatagattatcaaagaggagagagggacaattaacttctctagatcttggcggagcgggattgttcacaag

SEQ ID NO: 372761 - DNA, 284 bp, Zea mays
gtcttgtttaggagaggggagggacaagggaagaggagaggtggcacatacccatcgcagattttggcagctgcgagctgagtgctggtggcggcagtcagaagagcgctggcggctcgggagggaagagggaaaagtggctggaggcgtgggactgtgggctatgtggctgaagggtaacctaattttgataggctgttgggctgcctggggtcacctaatttggatgggctttctgctactataatagctttaggggactatattcctatacatatctatat

SEQ ID NO: 372762 - DNA, 131 bp, Zea mays
tcgattttggagtggaaatgccccaaaagcaggtgcacagaccattgatctatgcaacattccaatgacaaaggagccaaaactttgagggagctagaagaatcagatcggattggactgatcttgatagt

SEQ ID NO: 372763 - DNA, 207 bp, Zea mays
ataaaggaaaaccaaacacaccattatcgaacaaaactgtgaactttatgtttgccttcccaaagcaactgtattacatcatatacattttcacgcggcattgggctgcgactttttgcagacaccgtgattttttttcacttttctttccatcttttgtaaggcaaggggaaaaaacttcaagatcctatctttgtggtgaattta

SEQ ID NO: 372764 - DNA, 322 bp, Zea mays
ccttaacacacgcagctcacgtacacgatgaccacaccgcgttgcgacgggcagcaccacggatacaagcgcaccgtgacacgagcagcctaccgaaacagcgacggatacggcgcaggcgacttgagcttcgggtccacgggggggcctaggttcgacgtcgccccggcgtgccattgggcgccggcgcctgagcacgcggacgtctacgtgcaggcaccagacgatccgtcgacgttgatcatgctgtggggaccgcccgatgaggtgcccgttgccggcgttgctggggaaccggaagggctaccggaggcgttcgctg

SEQ ID NO: 372765 - DNA, 289 bp, Zea mays
cgcgatttctttactccatgcgccgccggccgccgccgcgggggtcccctctaggatctcttccctcctccgcctcatcccctaaggatatttttctgaggaaagcgggggcggggaagaccggcgcagttgatattaaaccctgcccctcagccaacggtataactcataagggaggacctaaagccagagtcttcccaatgagtgaggtctaggaaaggggcacagccgaggcaagccctccccgcaaatgtggagagactgcttcaaacccgcgacatagtgactc

SEQ ID NO: 372766 - DNA, 251 bp, Zea mays
agcgcgtttcttctgcgtacgcgtaagggggcgtcagggcggagattactagacggatctctgtgatcctgcactacaaccctttgcaccacgggccacaatccccgaatgtagcccatccaggtgcgatggagatacccagcttgccggagcctcgggacagactgctggaggacctggtgtacaacacggtgttcccgatcgcggagctggcggagctggtgcggccggcgctggtgttcctggacctg

SEQ ID NO: 372767 - DNA, 293 bp, Zea mays
gcgccttctttttccgcggacgcgtgggttaatacgcgaggagacctgggcagcacgcccggtgactggctacgtcgcgctcacgcaggtcctccagaaggcgctcgccggtggaccactacccgggttctagaggtcggcgccactttaggagtgccttctcaacttcggcgtgctaaacaatggcatactcagcctttttctcaacctctttagaagcaagctggtgatcccactgtaccgggaggcgcccaaagtccggctcatgaccggcatgctcgacgggaggaccg

SEQ ID NO: 372768 - DNA, 212 bp, Zea mays
tcctcgcgtccgcaggggtgggttgaatgggaaagatggtcaaacagcaagatcgttttatgacttacaatgctgtaaagaataaaaggtactaacaatgagaccagatgaacaacttcacattgatatcaaaccataccattgtgagtatgccataacacataaggttggactcaacgccaaagtatcacaaatgagtcaacttaaggaac

SEQ ID NO: 372769 - DNA, 389 bp, Zea mays
tcccatcgcgtccggctaaggcgggttaatgccaatgattaagaaacatcaaattgtttctctgtcttacaattttctaatgaaaatctgctgctaataatgggaagttttgaaccagctcagtatgatattaaaccataccagtaagttaatgttataactcataagggtggactcaaagccagagtcttccaaatgagtgaggtctaggaaagggataagccgaggcaagccctccccgcaaatgtggagagactgcttcaaacccgcgacatagtgactcagtgagacaactgtcaccactgtaccctaaaccctttgatgatctgtggcctctcaaactttttaatcttccatatgatattgagtatcatagaaacataagtaca

SEQ ID NO: 372770 - DNA, 474 bp, Zea mays
tgtttacgcgtgggctctcccagaccttccctccggccagcctcaatctcccgcgtgagctcctcgaacgcacctctctcgatccgactgacatggccggcgcccagtcctggaggacctacctgtgctgcgtgggcggcagcgcggcggtcgaggacgacggctcgacgctgcggcggcggcggaggcgcggctgcggcggcggcagcagcaaggacagcccgaggtcgtcgtcgccgcggatgtcgctcacgagcctcggctcgtcgtcggagacgctctcccccgaggacctgtcgctgacgctgtccgggtccaacctgcacgccttcacgtacgccgagctgcgctccgccacggccagcttctcccgcgccaacttcctcggctgcggcgggttcggccccgtgacaggggcgccgtcggcgaggccctccgcccgggcctgcgcgcgcaggacgtcgccgtcaagta

SEQ ID NO: 372771 - DNA, 495 bp, Zea mays
ttttcgcgtgcgctggggagggcaagagctggagcaatctcaagtgaagatgatgaatgaacctgacgcttgaatgacctgatcaagttccaggatcggttgtgagatgctccctaagcggacgtcttattacaacactgacttagtgctatcccaggtacgttaattaatcacgcgctggggagggcaagagttggatcaatctcaagtgaagatgatgaatgaacctgacgcttgaatgacctgatcaagttccaagatcgtatgtgagatgctgcctaagcggacctcttattacaacactgacttagtgatatcccagggcataggttggtgctgctgatgacggtgttaattgcccttggtctctgacttttcatataagtataccccgtatttatgttgttatcgaggacgggcacttgagctagcatttttttcaaatctttacagatcatataacagttcaatgaatctttgtttgaatcactgcag

SEQ ID NO: 372772 - DNA, 398 bp, Zea mays
ttctttaagaaggcgaaggccgtcgcgctctcggcggcggcggcggcggcggcggcggcggcggcggcggcggcggcagcggcggcggcggcggcagcggcgatgcttgcgttcgagcagcaggtgttggcggatctggtggaagatccgaacggaggtctggtggtgctctcctcgggtctccctctcgcttccctagccgttaccctcctcctccatctccaccagacccccggcaacgcggctggaggtggatgttttctcgtcctctccgccaccgttacccttaaggcccgtatccggctccgccttcaagacatgctgcaggttcacgacttgccccctgacctttccgtgcattatcgctccaccctttacgcctctggcgctgctttttt

SEQ ID NO: 372773 - DNA, 310 bp, Zea mays
ggtctagcttaactgaccagcaacgagtcgactacaaattgaacttcgcctcctacagagagatctatacagcacaatgttatgacggcgccttggacctgtgaggccccgctgggttcggtttggtctcctactactgcgagaactacatgctcaacgctatcgataacatgaacggtttgggagtcgacggccgttacatacacattaactaggccccacaccgcgtaagaggcccctggtggtagtggctgcggggggggcagcggctgtagccgctgtggtggagggcaccgggacggatgttatg

SEQ ID NO: 372774 - DNA, 526 bp, Zea mays
atctggataaatcttaactgatatgtgttggtaatacacacatttaattggaattttgcagcatgatatatacagcagctattaggtaggcgttttgggtttttaggtcccgtttggttccattagtcctaagactaaagtttagtccagaaactaaacttaagttctatcctgtttggttttagagactaaatagattctaaacacattaaatgaagtacacaaagcctaaaatgcccctctccttattgcttgcgtgcggtgcagattctctatgcaagggtaattagtgtaaatgatgtcatttagtcccttttagcagccatgtgaaggactagagacttaagccaattagtcaatactttagtcctcccgtttggtaaaaaaaagactaaacgggactaaaaactatactaaagattagtgacattagtccatgtaaccaaacggccttttagatagattgattttactatacattagacatagatatccaaaagctgtctaaataagccaaaacgtgtta

SEQ ID NO: 372775 - DNA, 441 bp, Zea mays
ctgtttcttccccacaccgccccccggtaggctcaccgccggcgacgcgcacgcgtcccaccacacccaaacccaccgccaccggtgctcgctccgcccaggaccagcggtggagcctccagatctcggcgcgccgcgcaggccagcatggcgtcgtcctccgacgagcagtccaagccgccggagccgcccgccgccgccgccgtggtcaccgccgcagcaccgccgcagacgcacgccgagtgggtcgcttcgctccaggcctactacgctgccgtggggcacccctacgcctggccggcgcagcacctcatggcggcggctgcggcgggggcgcacttgggcacgccggtgccgttgcccgtctaccacccaggcgccgtcgcggcgtactacgcgcacgcgtacatggccgagggcgtcccttacccgacgtgcgaa

SEQ ID NO: 372776 - DNA, 375 bp, Zea mays
ccctctcgtccgcccacgcgtccgaaaaaaaaaaagaaaattttttaaaaataaaaatgataaaccaaaaaaattttatatgtccacaggtatccactttttctcggggcggcctttttaaaggttcccgggcttccgcccccgtggttcccccgttatggttgtttgtttgggtcccctatatcctttccagtgggccgcctttattcagtttctggcctgggatatccctggggtgccccatgtttaaatccgttgggtttaccatccctttttggcctgttggaattctccgctttggggcccggaccgattgccctttagacccgttgcgttacccttttggctaatgggccccccccttttggggaattt

SEQ ID NO: 372777 - DNA, 354 bp, Zea mays
gcgaccctgggaggacaggcgtaaacgcctacctcagggcgagcttgctggcgccactaaggtatctgacctcctgtggcaagtagctggctaggatatcggcttaccagatcaggacattgcaggcctatgtggggcacacaccttggataggtgccacaatgacgcgggctgtcattggaggggtcctgtactagaaaccctaaggtgtttgacacctgtcacttcaacgaacccaggacgggcaccgtgtagagtggtgttcaggcctccagctacaaagacgtgctgaggaagactgttataccgactgttgtcgagaaacatgctacgcttgagatggactagtttgac

SEQ ID NO: 372778 - DNA, 517 bp, Zea mays
tgttgatcccataattgcacgcgacactacaccgcccccttccgcaagtcagagggacattgcattggggaactacagaaaagggtccgaatcgaatccgtggcgcactgccccttcctcccccacaagccgccgccgccgccgtgaggactccggccaatggcgtcccgcgtagcctcgggcctcctccgccgccgcgccggcgccacactaggcctgctaaggagttatgcacatgccagaagctacatcagtcaactttcatgctgctactttgactagccctgtttctagtatcctatttcaactattgactataatacatgtgttcttctcagctctggcttctgctacatctgaatgctcaaatctgccgagaagatgctattacttacctaatccctctccataccaagtttggagtaggtcatttgctcagacaacggacacaagtttgaggctgttgtgcctccatgggtgaatgctgaactgatggaacttttgctacttcttaaag

SEQ ID NO: 372779 - DNA, 287 bp, Zea mays
gccaccttcttctcttctcccctacctgagtagcgcggaccgcctgcaaagaacatgcaagagatcggctactctggattccactcaggcgaacagaacctagaacaggagacgaggcaactaggcttacgttgttggactccgtcgaaccactccgaccaaccagaccccggtcgggctcttgtttctagccatgagagagagagggagagagacacagggcaggcaggtacctgcgggcgacggcagacaggcccagagggagggcactcccgggatccgggcgg

SEQ ID NO: 372780 - DNA, 190 bp, Zea mays
tctatctgttcttttgcttttggtattgttatcttgggatctgattttgtccccatattgggagggaggaggtaaggctatactatactagatttgccatgaaggccgcaaacgttcattgtacaatcatcttaacagagcaaccggtttactaacaacaagactgccaagaactatggaactcgggaca

SEQ ID NO: 372781 - DNA, 153 bp, Zea mays
tatagtaatgctggaacccccgaggaccggtccgaatttccggggggatcacgcacgcgctttcttttctgtggaggaagaagtgtggagggggagcgtgtgaccatgagcgcgaccgggaggaattaccggagcctttcgaacgtgaatgct

SEQ ID NO: 372782 - DNA, 362 bp, Zea mays
cctacttgtccgatggcctgcagcgacagcacagggcgtatcttatactgtgctgggtggcgcccaacccgtgtgagcaaacttcgagctgctgactcccatggtgccattaccgacaatcggtctgggtccgagatagactttagaaggacgtggttacataggatggtctgtggcagtggacgcttccatggttgatgagtactgcttgccaaaaacgccaattaggaagtcggtcaaatccgcactattgtcccgagtgggatcttgaattgcacggataactacatgtaccaagcagagggctccatttgcacataagatcttttggcctatatgaggagacaattccttcacgatcc

SEQ ID NO: 372783 - DNA, 315 bp, Zea mays
cttacttttgctctcaccttaagagcctgaacggtgggggccatatagtcagcacgcgtgggtcctgccaggtcatacactctgctcgtttggatggaaacatgaccccgtcccagaactatcttttacctctccaagtgctacacatgcacctagggatgcatctatgccctcatcggttgccaaggccatatccgacgaatggaagaccaaaaagcctttgcagtactacctacccttccactaacttgtcttgctctcgggcaacgatcccgtccagattgtccatccagttccaagagcccacatgggtgt

SEQ ID NO: 372784 - DNA, 145 bp, Zea mays
cacgcgatccgcttttctctaaaccggccgccagaactccctcgcggtggggccctattaaaagaaggtgggctcccaaaaagcattcaagatcgcccacatccaacaccgctttttcgagcttcacaccactaaggtctccaca

SEQ ID NO: 372785 - DNA, 328 bp, Zea mays
tctttccacacttccgctctccctctctctgtgtgctctcattaatggctgtgtgggcggccccacgacggaggagagagaggggagctagctagggttttgctttgccgccttctgttacccttaggctctgaacccctccgttccggtgcggcggcctattaggctcccatggggaagcctccggccaagtggatcaagcccgtgctcttcgggaaaaggtgatcgacgaggtccggctccaccactgccaaggatttatcgaagggtacgactaacaaagcagcagctgctgctgctgctgctgccgggaaggagcccgctttct

SEQ ID NO: 372786 - DNA, 248 bp, Zea mays
ttgcttactggtacttttagaagaggtctcagggtgggtttaattaaaatagagggtggtaaaatccaggagatcgagatatagataggacgatgggtgggttcgcgctcctcacaaatcttggattaaagtatggactttcagattaactcatatgtactccaggttgactagtgcaattacactaactttgacggtagaataaagtactatcaataactgataaataccacaatatacttgtaaaa

SEQ ID NO: 372787 - DNA, 408 bp, Zea mays
tctctttcgcgtgggcatcccaagagggaagggctttcttgggttattactgtgtaggttaaatccaagaaacatcaatggtgggcctgcaatgccttttcagcttgaggttgttgaagctgcacttctttctagaatacaaagattggagcacagactaatgaaaattgagcctcatgtggctacattgctagaagttctgccaaatcgcttgacagctgatgtgttggagcagcttcgtctaagtaaacaagcattggttgagctgggatcacgagcaggtgacctcaagcagatgcttatcgatcttctagatgatcctcatgaaatcagacgaatatgcattaaggggagaaaatgcccacttgatagattgagtgatattgtggagtgcactgttctttagag

SEQ ID NO: 372788 - DNA, 301 bp, Zea mays
cctacgttgtccgcccacgcgtccgcggacgcgggggtgcagattgagatcgccatggccgccatgggatggtccgacctcccctccgagctcctcaccgacatcgccggtaggatcaacgagctcgccgacatcgcccggtttcgctccgtctgctcgtcatggcgatcggcggcgcgggacgccgtggccgccccgtcgtcggagccgacgtggcttctactcccgtagagcccgactaggctcttcttctgcccccgggaggaccgaatctacccaaacctccgcctggcccaccacg

SEQ ID NO: 372789 - DNA, 543 bp, Zea mays
tttggtccacttgatcatctccatggtttgggggcattgttaagaacttctgtgcaggggctgatatcaagaaggacctgcgccgacctatttccaaacttttaagtatactgtccaaatcttccacaggtaactgttttactcatatacatccagttcatccaaagtgcaggtaactgttttattcagacatatatgattaatcatcattcattaatatgtgaactccattgagcaagtatattgtaaagtcagaactaaaaagaggaaacatttggttccaccatttcaccttattttgtactaaggggaagtatttagagattgaattgatggcaattacttcagtctttaaacctgttattagtgttgataatgttgattctattctgtcgcacattgttgtgaacagcttggaaataccttgcgaggtttccttaagttgttcctagtttggcatcaagtttgcttgtgttctttgctcctcctccccttctgttaagactgcagcttagttttccgattgaaattggtcgtctcatt

SEQ ID NO: 372790 - DNA, 518 bp, Zea mays
ctttttgtccgatttttacaaataaatcaattttatgatcccatttatagtatttgggtaaaaatgtttttgttttatttattataacacttaattatttttaatcctattttagtttctatttgtcgcatctttggataagcatcaaaagcaggatccaagctgcttttaaatttgtactacaaaaagttgcttttagtagttgcagaaaagttgaacccctttggttcaacttctgtatttttgaagcagaagcaggtttaaaaagttgaactaaacgcaccttgctaagaaaaaggaggcacctgttatataaggggccaccctagtttgtactagagaatcatcgaagaagaaccttttccctatcagggtgagctgcttcggtcgccctggcccacctaggagcgacagtagtctcattcctagctgatccccttattcactcagacccctcccacaaccccaagtattgctgcactcttctttgcgcagtcctaggcgcccacaccataaca

SEQ ID NO: 372791 - DNA, 474 bp, Zea mays
cttcctcgacccacccgtccggttcattcagggcccaacgatgctggtggagagaaggcgctgctcactgatagactggagaggcgtggaaggaatggcttcgcacgacatctaccttaacagtggccttgaagaggctccgatgggctcatcggcttgtcagatgccagtgcccttgggtctccgcgcacgaactttgctcctgccttgcacgaaaatattacgccgtcctgctgttatagccggtcatctttcacgttctaatagccgtaatgttcttgagggcccaactacgatcaggtcatgtgattcacgcaagccacaactgcagaataggtcagaatccatgaatggcctgcgatctggatccacttcaccgagtctggtcagggtccaacgacttgggtcttcgatgactcataccttcgcttctgctgctggttcatctatcttaagaagcaccacccctgaccc

SEQ ID NO: 372792 - DNA, 391 bp, Zea mays
cttgcttttagcgtgttctgagggaacggcagcatctgagttaattaaatttgacaaggggatattccaatcactctaatgaatatgccgccgcgccatcacaggatcaatctactgaaaatgagtacccgagcccctattggcgcacgtagacacctaagcaaacggtcgctatggtgcacacggacatgctgaaccacaacaagaagaacttagacttcaggcccagcatgatgctgtgaaaaaaaaacctcaagaaacggcagaactggtcgctacctcaagacggctgactacgggctcaagcaaacttatgagccctacaaaaacctggcaggtggtgagaccccttaaggcggagaaaccatcttctgcatgaggcgcctcctct

SEQ ID NO: 372793 - DNA, 169 bp, Zea mays
gaaactggtgcccgggcgcgcttctggttagtggctaaggctcgacaagatcaaacatggaagatcttcatgtacaaagactcgatgagtgagtattgggtttaacatttggaagacagacattctactacgcatttgttgagccttaagatggtgtttttgaggtgct

SEQ ID NO: 372794 - DNA, 157 bp, Zea mays
ccaagccggcgctggcgaacggggcggggttaatttaaacgaagggcgggttacacacaagaacgacagacttcgtggagtacatctactcgcggcacaagcagggggacatgcagctgttggtgccacaaggcgcgcacgcggcgcgtctgggcaa

SEQ ID NO: 372795 - DNA, 533 bp, Zea mays
tcgtttacacttatgctaaaatgcctatctggttaggtctctgtacatgtgcagaggggatcaccttggctattcagtataaagggacaatgcagttcttaccctttcgttgtgttactcaggtggagcatcttcaaacaagaacgaccaggtacggttcctcaaatcctctaaacagattattcaaatctgacaagttctagcgctcatctgtaatatgggattttttatttccaaaagcagcatgactgcatcagattgatttgagtcttttttctgtgtagtctataatttttcaactttgctcttgcttttgcgtataattcattcataccactgatgacttgaatttaatcacctatatctttttcttccttcatgccattccagggatgcttctagctctggtactcttttttgataacaaggaagttcaaggatgtgaattttccaccagctatgtctcccccaaaacggtgggatcatgtgtatataacacctaccccaagcgacatatgcgacgagcagacgga

SEQ ID NO: 372796 - DNA, 535 bp, Zea mays
gtgttttatgaacagtgggtttccggtgacgaacacgcctgtgtattcatcagcctgagtgcctgactgcctgagcacaaattcctgctatgtgtagacagtagaccacgtaccatgtcctcgcctactccgtgctcgactgagccgtccccgttcaccgcgcaagcaacccccggcaacgacgccgatcagcgccgctcccaccgccccctccgcgctcggcctacggcgccaccgcctctatccgtctcccgcactcgagccgtaacggccgacaccgcgccccgccggccctccttcccgagactgccgccgcgtccccctcatcgagtcatcggcagcaactcacggcctacggcggcgcatctggggctaggagcggcagtcgcgtggatgaccctgcccctcgaggcagcgcagtccgtcccggatgcaaccggcgctcagccatcgccgctacgttccccactttctcgcgcatcaagagtcttattcccagccatttggagacctcctccgctccgccattggagaa

SEQ ID NO: 372797 - DNA, 107 bp, Zea mays
gatcaatcgatttgttaattctttaaaagaaattttggtaaatataattgaatgtgccaatttgaactaactatacctaatacggatgttagatacacaagttacag

SEQ ID NO: 372798 - DNA, 496 bp, Zea mays
  unsure (1)..(496): unsure at all n locations
cctttgtttccgttgagaggagaaaagctataagatggtaaatttctgcattggatacggaaaaacgtaggaaggtacaaacttgtcaaaaaaacatagctctaaattaagcaacaatcaaccttagtgttcattacacttaaatatgagctttggcctttggattggtttgtgctggtcagtcagaaacctgaaaacaacaaacttgttgagtagctatgtttacaaggaatgtagccttcatgggctcttgtaaccctatctctcttgtcagatttttgttaaggaagcaaaagatacaccaaaactctggtatagaaatataaagaatgtactggctcggcgagtgaatcagagacagctggcacatgagaagtgtgaatactatactttgctgtggccatcacgccgtgatctaaatatggctcatgcgacacgccgngttctaaatatggctcatgcgacttgtggccaaagaggtcacatcaagcatgct

SEQ ID NO: 372799 - DNA, 142 bp, Zea mays
aatcaaaacggcccgaggttccattacttctcaaaaaagctgtggcctgcagcttctttcatcgtttcaaagcattacagcataagcagcaaaaccggaaacagtccttatacgcaccacttattagggctgttcaacacaa

SEQ ID NO: 372800 - DNA, 209 bp, Zea mays
aaaacataaaacatttttaaatcccctttaacttaaaaccaaaagcagggtgaataaacttaacagccaaatgcggggcccaatttttccaacagaaatttaattggaccccctgaacaatatgtttaaggaataaaaaggggccaaggttgtgggatggaacttaaaagtttccattttttgcctaagaccatttttttttgcctttt

SEQ ID NO: 372801 - DNA, 544 bp, Zea mays
tttttatctttggaatcttgtgatggagaatgcatggagaagagtcagaagactacttatcaatctcaaaggtagttagaagtagttctactgcgagtgctaattgcatgcatactcagtgatcggttggtgaggctgaagtagcgcttggagcacaagggactgctgaggccatgacactcacgaaggagctatagcagccatgggcgagaatctccgttttagatagatttgttgaacaagtggtctaccccagagaacaagtccatatactggggtcatgtgggttgttgcctgtagagctgtcggtatcttgcctcttgcagagaggtacagtcaaaggaattagcattaccttcgtagtttacattaactgcaagcagttatgtgaagaatgttttctttttgtgagatcatttgtagtcatacctaaaaatgctaatcaccatttacaactactaaagctcacatacaacgcaaccaaaatcaaggaaatagggttactttctctattctaaatataaaatgtttagtttctttagca

SEQ ID NO: 372802 - DNA, 343 bp, Zea mays
caactcccaacctcataatttatttcagatattcacttcacagaattttcagttcacagaattagcagagtatcacttctattcggcagaggtctccaatagagaatcgcctactttaggagcattggcaagggaggcctaactgaactactataagccagaactactaatgaagattttttcaaaaaagataggtccaattgaaggaacaataatgtgatgctagctaaaagaatattcagtctgcttgaatgaagagatgcctagcgtcagtagtcgagtctatttacaccgtgagggtgatcatatatacaaacataacttgaaaaagcaactgagaatt

SEQ ID NO: 372803 - DNA, 453 bp, Zea mays
cagttttctaacatgtatggtgtgtcacatggtgactttggttccgcaaggtctgcttcattcgtgccagcacctgctgaacctacagctggatcattttcaagatcttatgccgagcagacttccaccgctgcacaacgagcggataggtcctctggctgtaaggggagaggaagcccttgcctgttgcgtttcggaatcaatgatgcctttgagttgaacaggctttcgcgtctttgcgtgattcccttaaaaaattcgcagccatgggagatgcagcagtgttcggagcataggcctggttatggatccaacttccaggtgaatgatgatggatcatactctgatgcccatgacagctatgctccttcctattaccagaatggaaaggcccctgattctccatcagatgaacctacgtctctgacctacaacactgggattgaggagaga

SEQ ID NO: 372804 - DNA, 305 bp, Zea mays
cttacgcgtgggcagaccgcgtatggagacatgtaccttggatatggctatgctccatacggcccaaatacatgactttctacacaaccgacggctgggcatgatggccggtcagatgggtccaagcattatcaatacccgactgaataggatcagcaggaatggtctgcatagcctgagcatgtcgatgaaagacgctggctgtcaaccaaaaaagaacattgcttgcaagtcaacaggctccagttttggtagatgcaacaaaggactactccaaacgtgagggcatatttactgaggtgaga

SEQ ID NO: 372805 - DNA, 332 bp, Zea mays
gcattttcacctgctgcctgctggtgtgcatacatgtacttcgcatagggcgactggatatacggctcatattcgtaccttcggcctgccccatcagttgggtgtgactgacaacgtctgcgtcaccgcgaggactgggccagcgctaccttcattagtactcactacgactttattgatgacggggactactgggcgagctctgtcaccgttatgcgctaggtgcccacgtcttcctggggcactttaccggcgacgagcacccatcaggagcgaaatggacgaggctgttcctgctttggctactggccaagctttaaccgacggcgtga

SEQ ID NO: 372806 - DNA, 349 bp, Zea mays
ggagcaaagaaccacttattacaatcttattgacccaggcggatcaggccatttccatttataccagcaaagaaccacttattgaaatgtgcacacagaaatcgaatgaaattggagcacaagtactggagtaataacaagttgcaaaagcaggcaggggcgtcgccatcagcaatgcgccttcagttaagcgcgcgtcagaatcatccaggtggtgaagaactcgcagagcacggcgttgtccatgagcctcgccgcgttcttggcctcgccgaggctgcgccaggcgtcttccacgagctgccgcgccgccgaccaccaccctttcccgcgcggggactcggggaac

SEQ ID NO: 372807 - DNA, 519 bp, Zea mays
  unsure (1)..(519): unsure at all n locations
tcctcgcgtccgcccacgcgtccggcacgcgctcaatggcaacggaggagcggcgattaatggatctggcacggactgtgccggcgatcctcctgctcgtcggcacctcgggaaaggccgtcgcgagcatcaagtgcgcccgcgagctgttcgccgggaagcagtggggcttcgatgactccgacgaccccgagtctccgccctccaacaccgaccgaggcggaaactgcagcgtcggcgaacctatggagacgtccaccggaggagacggcgatcacaacggcagcggcgtaccctggaagaccacccgcggcagccagtcccagacgaggcttccatcttgggccgtggtgcaccacggcggctactgggccaacatcctcgccttagcgctggcccccgtagagggccacctccccgcccgctaccgtgagatcacgcgcctcgtctcgctccacgccgaggccggccacgtcttcgtcaactgcgccgagggcctcggnctcaagccccaccccg

SEQ ID NO: 372808 - DNA, 459 bp, Zea mays
atatgtaataacattataattaatataatatagacaagtatcattcaatatctcataaacaagcaattatcaaataacttatacataagtgtactctaaatccaaactaaaatactaattgaaaattttggtcatcaactgtttgtgctaacgttgagcctaactaagtatatatatgaattcaagtcttcacacttgtgcggccaccaaaatttgaattccatttcatctttccctatacaacaaataggaaaaggcaataattagtagttagacacatttgaacacctcacattgtgacatatcacaaaggtcatatcgatgtgtaggaaggatggaataatgctggattttgcatgtgtcaaaaataaaatataattcaaatgttaactgaaatctattgtcagatggaaaaaatcatgtgtcaaaaataaaatataattcaaataaaataactac

SEQ ID NO: 372809 - DNA, 536 bp, Zea mays
ccttctcgtccgcccacgcgtccggtgctctccttctatttcctgtcacttgatgacctgtttcacaaagctcaattcatattaaaaaggatactctgcattctcctcatctttaagtacggtgatccatatttttataaacattgtcttggaaagctggaaggtgctatacattatccatgtgttaggtgggcaagtcatcttacgccaatgagaaggtaaacaatccgatcatatttaactgtttctttctacacattgtacatttacatttcttccctacttacatggtgaagctatctataactttatttcaacaacgtaagcttctcataactcatctcacctgctgaaactattgataactttatttaggcaaattagcagcttctacgtaattgaactgtgtgatgaacctgtctacaatcagactgtagtgtgtgcatcatataccatgaagcgttataggacccttatttacttaagcatcttgggaacaatggaacgatctctaagctatatgggggtcacatttt

SEQ ID NO: 372810 - DNA, 492 bp, Zea mays
  unsure (1)..(492): unsure at all n locations
ttttgcaagaaaggcccactaaagggcaattgacgctgggcctagcagctagcgcgtggcggcgacggcgacggcgacggcgggggaagactgagcggccgaggagccggtgcggcatcggtgcatcgcagcggcctgaggtcgctagcagcacagcagggtgcgccaggcgccgacgcggcacggggcaccgagcgacgcgtgagcgcgtggccggtctcagcaccaagacgcatcaaagccggcgctaggcagggcactatcgcgctgctgcgcagctgtgcctgcgctggtccctggaggattagtgacatcactcaccaatttgtgttttgcagaattgggagaaatcaagtaagtactaactaggtgtataaatgcagttacatttcactgattcactttgcccctatgcaagttgtccgtggatagtgctgcattggtttaaggaagaacctctggctgaatctaccatntcctaggtttagcctt

SEQ ID NO: 372811 - DNA, 482 bp, Zea mays
tttgtatacggtacagagttatccgaaaaggcttctttctataaaggagtattctacaactaccttagcattggtatttcgttgattactttttttatataaaggaaggttttattatattttcaagcacatcatatcgagttgatacaaagtcttgaaaataattcttcttccggcctctgcttgacaagaagcacatatccagttaaaagaggaaaattatttccctttgttaagggttttcttttctattatcattgaaaatgatgactgtaattcaaaggtttcatttactgaggtgataatgctcaaatatgaatccttcagaagtttgaagctagtgcagtagatagagttaaattagaccgtttaactttttaagctatatacagagttagaacatatgttctatttgcttaggtttcattaagagtttgaaatttgattaattgtttgagttttatagtttaatttcaatgatg

SEQ ID NO: 372812 - DNA, 544 bp, Zea mays
  unsure (1)..(544): unsure at all n locations
cccactctttggaggangnattgaccccaatggggctgaacattttgagaaacccgacctctaccccttatggggacacctgtcgcatggaaataactctctgtttggggtagtgactatcccacacgcccaatatggctgtcgccccctatcagggcgtttcattggggttactgccagcgtcactgggcttgggggccaatatgggacgcaccaaacttgcatgcatatgcgaacataccatcacaagcaatacaggtcctccaaccagcgaatctgaaaataacgtcgggatgctgatcctgctacttctctagctttcttgacatcggttaggatgtgttcagcagatcgtgtaaatgggcgtgtaaattatttacactgtagacaacactgtttacagagtggagtttaaaataggggatatgataggagataagataggagagctgatggagatagccttttacgaattgacaattttctggcagcgctatatgtcaactaatgaaataaccaggagcaggttgtaggaattgacaat

SEQ ID NO: 372813 - DNA, 447 bp, Zea mays
gccatgctaccgctaactcgtccgggcagtttagggctagtttggtaactagatcacccgaatgacaaaacttaatccatatgaaaaaggaatctctgtattatgataaaatttaaatacttggatccatatagtcataaacataggtgcggaatgctggatggacctattcattatccatgtgggaggcaagcaagtcatcttaagccaatgagaaggctaacaaccctgacctatttaactgaatctttgtacacatctgcatacggaccaggagactagtgtttcatccgagcaacaacgtccacggccgcatctctccatcgacatcccggcagcatcaagcctgccggcagatcacctgctcccgatggctacggcgacgcaggccggcaaccagcatcaccccgccttccaccaggagggggcaacagacaagcagcaaca

SEQ ID NO: 372814 - DNA, 567 bp, Zea mays
tgttatattgaagggcggaagcagatggtaggggttaaatgggatgatgatgccaaaccttgttgcaatggagcacatgtgtatggaataacttcttcgtctcccagattgcatcaggccttatatagagcggtccagtacatttgcatttcattaaagctactaacaacctagtaaacttaatccaaatctcctaacaaaccaatcttccatgtaatatgatctcttaactaccaaactaatccaatcctcaaacaaactaatttgaaaataactcgtgatgctgatcctgctacttctctagctttcttgacatcggttaggatgtgttcagcagatcgtgtaaatgggcgtgtaaattatttacactgtagacaacactgtttacagagtggagtttaaaataggggatatgataggagataagataggagagctgatggagatagccttttacgaattgacaattttctggcagcgctatatgtcactaaatgaaataaccaggagcaggttgtaggaattgacaattcagtgccagcattaaacttgacattttgtttatgt

SEQ ID NO: 372815 - DNA, 150 bp, Zea mays
aaaacatcggtatgtgccaagatcttcttcaacacaagccgataatatccatattatctgattcacgagtgaaagtatgaaatcaaatatgggagagtcatattcgcgtagattcgatcgacaccctggttccctagctgttaccggtgc

SEQ ID NO: 372816 - DNA, 445 bp, Zea mays
cggtttcgtggggtggctggcggccttccacatgaccggggcggcgcacatctggtactggttgctcaagcacaaccgaggcgttcctacctggccgcaggtcgccatgtcggtgcgtgcccggttcggcgccccgacggagcggggacgcgctacgtgagctcctccgactgcggcacactggctccgggacggagtaccgggacgagttcctgaggctgcaggacggatgcgacggctggacggagccgctgtagggggccttctgtaccgccggtatccgcgatcacgatgtaaccgacgtggagcgtggggatccggcgaccctggatgaccccgtgaggctggcctgtgcgctcggggcctcgagcaccggtaagaactagggaaccagagtgtcgatcgaagctccgcaaatattactcgaccatatttgatttcatac

SEQ ID NO: 372817 - DNA, 343 bp, Zea mays
acactgaaaaaatagatcagatatggatcctaccctatcacatgtacacaaaccatttccaaaattcaaataagaaaaggcacattcaactgttgacaaaatggtattttgattctacgtaactctcagcttcccaaaggaaggaaccgaaagcaactgcctccaagaccagatgattgagctctgtaaatgtgattgttatcattctgccatcctttgcattgaccgaaccatcgtccaatactttgatgtctggccgtccaaacaacgcctgagtttgcttctcgatcagtgagacggcttccttcgatctgatagtagcatatctttgcaatgtgtcagc

SEQ ID NO: 372818 - DNA, 360 bp, Zea mays
gggaccacagcagtacgccgacaagtccatgatgacacaacgaggggaacgcggcaacacatagctcaacgggtaaagatggcacgacggctggcgagctgggctagctcggataggaacaaccgacgggatggccatgacgaataggaaatcgacaaccggcgaaaccgatagccgaacaagaattgcacagatcgacgacccgaggcctgatctggtgagcacgacacaaaggagggtgttgctgccgctgctctgacatgaaatacctgctgtcgaggtagatgagcacgacagaggctggggtctgggtattgagccagcgcatcacgcggtttgggaaccacaccacccacacga

SEQ ID NO: 372819 - DNA, 382 bp, Zea mays
gtagtcattgcccccaatttctccgaccatgaagagggactcgatcattatgtttgagcaacatgtgccataaacagagttctgaattaccatgtaaaattacaacaaaaaatgtttgaagtgacagaactataacatttctagtgattaggcactgttagtcccatcaagttactgttatattgattttagcatgtgtcgtcccatgtgatcagtacaacgcagtttggtttaaccttgtagagtttgtgtagcgccatctttgttgaatgtctacagctctcaagctcgcctgtttccttcaatccccaactaagtggtgtcgcattgccgtcaacaaaactttatctgatagctgaactcaatatggtacaagatacac

SEQ ID NO: 372820 - DNA, 328 bp, Zea mays
aatattgtcgagacgagccgacgagcaacgaccacgagggagacgatggccgtttgatccagccacgggcaacttcttcggcatatactcatggccgtaggatgcttctgtcgctgactacgccgagcgcatcaagccggatctggaaagggatacacgaacgctgtaacgtgagagagacctaggcacgagcgtgaagggcttgggtcttgcaacaaagacatcaagcacaaaagggatgcttaatggcggacagaggattacatttgccatgccagacagctactgtgcattccacaacgtgccagctggaactcatatgattgag

SEQ ID NO: 372821 - DNA, 329 bp, Zea mays
aacgcagaaaccttgaatatttattgttgggtcacaagccaaaaaaaaaaaatgtttgccgccttcacttcacaaccagcaggcagctgttcagatgtacatttacaatttatcagcttgcagggagcatacaaattactatttaccgatcaatcagatggttatatactgttagcatgttacatcacatccattggccaatggagatacgtataaaaactacaacaccatatgtatagaagaatccgtagttgtacgggttagatttggcgtaaaaggtcactgatcttcctgagttcttttagagctgctactgccttagcttgctc

SEQ ID NO: 372822 - DNA, 288 bp, Zea mays
acgcgctctcgttgttttgtgactgactcggacgcgccccgagttcgaaggtgcctattatgggctcaggtgcgtgccgactgacttgtgatcaagtctcgcgtagctcgatagacaagaagaatatctggcgtatatgcatgagcaacgatcctgccgtatacagccatcatctagggcgcgagactcacatgagggaggaccgtgtacatgactaccccgtcaccgagaagaggcagtcgtgagctcgttgcttgcttcatgcagaccctagcaaggaccagaaca

SEQ ID NO: 372823 - DNA, 420 bp, Zea mays
gagcgcggtcttagttccgattcaacccttaagtcttatagtgtaaaatttagagcacattgtcaccctaagcatggcagcatgtgtcagtattaccgacagcacagggtatggctgctttatggtgcgcttttactgttttacatcaaaagcgacggtgagagttgaaggctgtcgatacaaaaaaaaaatgcgattcaaccaacacactaagataacataactcaaacaaaccatcgtgtattgagatgctcatcgtccatgctggtcaagcccaagaccaagctgttactgaaatgcgtactgagatccaatggaatagttacccatggttttggttactgaatccaactagatcctgaatggtatttcatggtactaatcacctgaaagaggactagtataccataaagatgactg

SEQ ID NO: 372824 - DNA, 577 bp, Zea mays
  unsure (1)..(577): unsure at all n locations
gtttcttccctctgctgcgggacgagctcgagaggttcgccggcgctcctgcttggccgacggccgtcgccgcgcgataataggccaggagacgcggagagatgctgtcgtccgccgccttcttctcctcaccgctgctgcgcggagccccgctgcggaccaggcacctgctcctggcccctcccgcgcgcgcgcacggcggcgcggcgagccgcgcccgcggtggccttccgaggttccacgccccgtctctcccttcgtccaagggtgaggtgattcgcatccaaggagacgagttctggcacatgacacgggttttgcgccttggcgttaacgacaaggttgaactattcaatggggcgggtggtttagctgaaggattcatacataaagttgacaaaggtggctcagatgttgagttattagaggatgctaggatcatagctcctcaaggcatccaatggcatgtctctgctgcgtttgggacactgaaaggcggacgtgcggatnggcttatagagaaatgaacttggagcttctagtggtacccctcttctgacagaacgatgtcacacaa

SEQ ID NO: 372825 - DNA, 486 bp, Zea mays
ctggtactctcgctcgctcgcgccgcgccgccgcgtgggggtgccgatgagctgcgcggggcaggccggcgggtggctgctcgactacgcgctggtggaggaggagatccagggctccgagttcatctacatggtcgacgacccggccgtctccagcgtgatactggggtttgatgctcccaggaaggaggacggcgtccaggacaaccccggcgccaagaagaggcaatctttctcttcttccttcctttcagttgaccctcaacataaagttaagcttggcgaatttcgcatgcctagtaggagcttgcagagatataatcacgaatgggttgggatgtttcttgtttgtcgctagtattactattaccttaattgttgtgctggagtaatctggcatacaaattacttgattaccagtactccgctctgattgacacgagaggtagaactagtggggttcaggaattggcaaacatgtcaatc

SEQ ID NO: 372826 - DNA, 354 bp, Zea mays
gccgcttttcttttcgctgtgaagaacaaggtacaaatggtggacgccaggcttgatggcgtgctggacagcggtgaccacaggaacgctgttattgaccgtctaacctaataccctaccttgatgtgtccgtccttatggctgccatcatgcaatatgaatggcaaggataatgaatagcctcctcaagtgtcacttgaggggtctaatgaatgggctcctgtgagtgggaatgggatagggcatgtgcagcatcatgggcaggataatcagaaggggtaaccattccagtggccgccagcttgattggctgcacgatatgatgcggctaaccatatggctgacgctatgaat

SEQ ID NO: 372827 - DNA, 339 bp, Zea mays
ggagatcgcgagcaccgctcccggtgctctccacctttcacgaagtattcactcgatacagagttggggtttacaggagttcaggccagtaccggccggcacaaccgccgttcactcctaacacttccgtcctctcctcctccctctcttgcatacggttcagtctcccttattaacacgacagaaaacgaccaacaggccaacagaaacaatacaaggctggaagcctactgggtccaatctggcccaaagacaccgctgttgggccgaacgactcgcttctccttcatctgttggttgcttgacaccatggtcctgacattctcccctccttgaagc

SEQ ID NO: 372828 - DNA, 511 bp, Zea mays
gcatcttcagcgtcggcatccacgacgccggggaccagcggccatgcgtccactttcctgttgcgctctcgtccgtctccacaatttgtgcaggttcgttgaacacatcatggccttttcttccccaatagcgcgtattcttagctagggtttcaatctctccatcttcgattgagcgtaagtccgtccaaggttcttgtcgtcctctcccatcggtccgtcaccggagccgcgcttcacccgccgccgccgcctcatgcctccacccatctcagcagtcgaatccatagtgtcggcgacgttgcctgctagccgcacaacgattttggcgtcgtcatccgcgtacgcctcaatgtctctggcaccctgctctattttgacatcgtacatgctgtccgggggatgcggtcatgacgccgagtacacccgtggtagcaagttgctgagttccagaccatattaaagttggcgttgtgagggtcttatttatttctaaaatccttcaaaaata

SEQ ID NO: 372829 - DNA, 358 bp, Zea mays
tttttttttttttttttttttttttttttttttttttttttttttttttttttttttttttttttttttttttttttttttttttttttttttttttttttttttggggggaaaaaaaaaaaaggccctttttttacaggtgggtggattggttaaaaccaaggttttaaaaagggggggcccaaagggggggggcccccttttgttttttgccaccttttttttccgcccccccccctaaaaaatgtttgggggttccaaaactttttgggcattaaatttggaaaaggaaccctaaaagggccccctggctcaatttaaaaacccccggaacaggaatttttgccttttcccgggc

SEQ ID NO: 372830 - DNA, 96 bp, Zea mays
agaattatgaaactattgaggagtccacaaaagtgataaattcaatacataggagccatcaaattcaaaagtagtttttcccttgattagcagaac

SEQ ID NO: 372831 - DNA, 289 bp, Zea mays
aacccccccggtttaccatcaaattacatccatggcccaggagactgggacaataacaggggatccttggggcacacacaacacgagctaagcaggggactggtccctgaaccttacaaggcacaacacggggggtcgggcagtttagtccatacgcgcctgggaattacgttttcactggcggggtccgggtacatacaactggggggggtccagattatttatgcaataaacagttttcgaaatttagggtcttttggaaaaggggtataaacttataatggggggg

SEQ ID NO: 372832 - DNA, 452 bp, Zea mays
tccactcgtccgcgtttccactgacagtttctcagaaccacagcctcgatccatcgggggagaggatgggagagcctacgcggcaggagctggcggaggcggcgctcgccggggagtcggcggagcagcgcaaccgcttcctggtgctgcggctgtacgaggcgctcggctcctgcgacgcacgccgggcgcggaagctgctggcgcccgacctcgagtggtggttccacgggccccccacgcgccagcacatgatgcgcctcctcaccggcgcggaccaccagcgccacatgagcggcggcggcggcggcggcggcgggttcgccttctccccacgctccgtcgacgccttcgggtccaccgtcgtcgcggagggcggcgctgacgacgcgcgccagctctactgggtgcacgcctggaccgtggggcccgacggggtcattacccagctc

SEQ ID NO: 372833 - DNA, 548 bp, Zea mays
gaaaccaagtcgataattagcacgtatattcaatgtcagcacaagcagtaaaacttcatacaagtcagcgcaccactgtacctagatcataataagtagacagcgtaagattctaacagcaagatcagcgtaaaacatcagttctctagtactactgtgcatggcataatgtaccgaccaaaaggtagaaacgctgaacaactgctgacttctctgcatggaatctggcttcattagcttatgatccatccatcttcacaacgacaggagcaaactcgtcatcttcatcaataaggttcactgcgttgtcctcaagatcccacccaaacgtagtctccagaagcgattttagtttcctagcccatgacagaaggtctccatccacgactggggcttcaaatacaactgtaaagaaatcctttgaaagacggtacaggaatatgtctcttgaaaaccatgtttcatccaaacacagagaattgcccatatccccacttttggaatcttgggtatgttgaaaaccatgcttgagttgatagtataatgtc

SEQ ID NO: 372834 - DNA, 177 bp, Zea mays
ggggggggggaaattttccccttaccaggcccccccaaggcgaaaaccaggtttccagggttcaaaaaaaaaggttaaacctgttgaaaacccaaagccataatgcgggggattaaaaaatgccaaatcccaaacccaaaccctaaaagtggccccggggcggggactttgggggaa

SEQ ID NO: 372835 - DNA, 490 bp, Zea mays
ttgacgtgtgggggcgttggtcggctcccatctcttcgccgttttcttttcctcccagatccggcggtgaccgtgctcctgttcgttcttctggtcttgattcgattgggaggggaaggggttccttcggtcttgggaaattcgaagacatgcctgcgctctacgcttacggaggatccgtttatgactcctcccttggcagctaagctcgacacctcgccctgtcctcaggtgcttgtgtgcagtgcgcccgtgcaggtcgcagatgggtgcaccaacaaattctccagccttacagtagattttggtggccatttggtacaggcgtcggactcccaggaggatgaccggtggcaagaggttcggcggcgggcgggtgccgacggggaccccgtccctcgcgtggtcgtccgtcgtcatcgtcgccttccttctcgctggcgcctccattcgccacaccatcttacagcctgacatgaccattccacct

SEQ ID NO: 372836 - DNA, 432 bp, Zea mays
  unsure (1)..(432): unsure at all n locations
tgaagttattatatttcagtctatgccagacatctacatgtaattccaccaccttggtcttcctttgttttgtgttattgtatttgcatgatttttccttctcatttagtcacttcctatcagcacataaactcctgaaaagcttcttttcaggtagatggtgctcatataagtggggtatggatatctctgcactctgccacatacattggcatgtgaaggaattcaattctagtggctaacttgaaatattataaatttcattttttttatattttcctttttgcagggttgatatatttgctgtgttcagcttacatctggtgcggccctagttagctatttgtctcttgtgtactatctgaggcangagattgatcagctaggacttggcgaacactngcctgtgttggctgttcatctgaaggggaa

SEQ ID NO: 372837 - DNA, 544 bp, Zea mays
cccacgcgtcctaacgccggcgcttcacacatcgcccgacccgaaccaaacccttcaaaccccagcgaaaagcgaaggcaatcggaggaacgaatccgcgcgaccaacacgttggcagcagcattaggatccggatccgaagaccgccagaccggagccggaggcgatgaagagaaaggaaaactccgagcactcggcgccgcctctcaacaggccgcgcgggaagcgcaaggccctggccgagctgcccaagtccaacggactgaacatgaaccacgactcggcgccgcggccgtcgaagccgagaacgcggtcggcggcgcgagctgaggccgaggcggaggcggcgatgaaacggcggaaggccggagacgccgcgcgctggccgatggacacgaggcagcctgacgttgaagcggcggttgcgccgtacgtcggggacatcgaccggtacctccggtccctggaggtggtcaagatggaggctgacttactgaaatctcttagctttcagattgggggtcccacagtgacaacatttcta

SEQ ID NO: 372838 - DNA, 106 bp, Zea mays
acctttcattgtccggagaggcaggcgaacacgagggcgaggggacaattgacgataaccggcggaccccgaacgaagatgatgacccagaaatcaaggaagaggc

SEQ ID NO: 372839 - DNA, 448 bp, Zea mays
cccacgtttccggccttggtatttccgatttgtttttactcttctttaggtgggaatttcggtttgtcttgcggcctagaggagggaaactgaagttgcagctttgttatgttcttttaaaatcccacttttcctccaaattctctacttttctaaatgggctctttcaattcgtcttcagctttcttgggtttttttttcacttttgttgcttgctcaaaggctcttctcatcttttctctgctctccctgatttgtttttttttatattttgtacataacattttggtttcgcattaccttgttcaaactctgcaactttcgtcccaaaaatcgccaaatttctttgttttgtacagcatctcctgatctacctcttcgttccgtggttgtaaagattattgagcccaggtgtgttgtgcagagctcaggtggtgggatggccacc

SEQ ID NO: 372840 - DNA, 59 bp, Zea mays
aatccaacagtcaatgtttaccagtactttaaagagaagaacacagcactaccaaatgc

SEQ ID NO: 372841 - DNA, 308 bp, Zea mays
caataagttcacttggaaatttgtacatgttacataccattttggtcaaacaaacttgcataacgtgtaaaaaacaaaccatttgctggattattcaatataacacaagttatttgagatagatttgcactaccattgccactgtctctggcatgcatactttatttgtcttgcaatgtttttaggcctgttacaacctatcattttaggctgctttgagttgcagacttcaaggacaatgagaacaaaggcaatgtcctgcatgtcttcattgatttaattgcaaccctaatttaggagccacaggt

SEQ ID NO: 372842 - DNA, 262 bp, Zea mays
acagttccagactagttcacgatattagggggccaccaaatttgaaaaccttttatctacaatctttgcaaagttattccagccattttgacggaatttgtggggtttaaaccatttttactggatatgccgcaacatatggcttacaaactccaaaatgtttgctgcagtgtgcaaacagacggtaaaacttcctatccaaaaacacaatcaggtgggcctggacaaagccttgctcccttagaacaaacccttatccggg

SEQ ID NO: 372843 - DNA, 146 bp, Zea mays
acatgatctgccagggctctagagcacaggaaagactgcagtggattaataaaaactacatgcaggagcatccataggcggttatcttgcactgaccagaaataaggggagccttaggcaacatgaatggttcattagaaaatgga

SEQ ID NO: 372844 - DNA, 65 bp, Zea mays
gagggagatgacttcaaaactcaataaaacgctagagcaaccactgacatgcttctcaaatccag

SEQ ID NO: 372845 - DNA, 434 bp, Zea mays
gaacaaacgcaggagagctgcgtgtcattaaattaagaagaaaaaaagaacataggagagacaagacttgtcaacccctaattacaaaggcccctaggccgagacccctccggcaataacacaacgcaccacacacacacaaggtaacaacccgaccaaaaaacgactaccagcaggaaaactgctaaggtcccctagggagctggcgcagcaggaggtcctgcagagctgatgcaccagccaaacaccagacgttgccctcctcaatcacagcactctgaactcgctgggtgcagggcacaaccccctcaaaaacacaagcattacggtgcttccaaatctcccaagcaaccaaaatgatcaaggaattaagaccttttcttagactcttctccactttcttgatactttggcaccaccaatttgagaaacga

SEQ ID NO: 372846 - DNA, 180 bp, Zea mays
ccatagctcaaaaataactggatgtttgataatatagaactgccacttcgaacggttcaaaccaaaccatggaatgcggacgacagaaaacaacggggctagctcttatactaaaaaggctcttgaatagcatcaattttaaaaccagaacaggggcgccgattcaactagaacgcccta

SEQ ID NO: 372847 - DNA, 364 bp, Zea mays
aagaggaaaatctctatgattatgaaattgatgttgcccgtataacagatcctaggaacaacccgtgtgtgtgtatatatacacaatcgcaatcaggggcaattacaaatccaacacgtcaaaccctggcaagaaacagcagaaggccatcgttgccagccaccaaaccttgcgatatctcatggctcaagcttcttgtcttccttaccattagaggttgcgtcatcagcgtcttgtttgctccccttacagttacagcagcacgcaaagaattctcctaatggacgtttaggaataggaataagctttcccactaacgccagtggccagctgaagaaagcaagacctatcgataccaaccaca

SEQ ID NO: 372848 - DNA, 182 bp, Zea mays
ggaaaaaaggaatgtttttgtagagaacccgttcgactaaattggtccatagatgggggatgtcccttccccacattgaattccttcccttttaacctttattcaggggggcactggctcttaaagccctaggcagggatggaaaggtcaaacctgatccatcacccctagttttttccaaa

SEQ ID NO: 372849 - DNA, 219 bp, Zea mays
gataaaacgtggtttcaacctctaattagagttttgaacatcgtttaaacgtagttttaataacactttacgcattgcagcagaaattctacgagtaggataacacaagctgattgctgcgagtctgcaggcatcgcacattcgcactagcactgtatttgcttcgaagaagatcctcggctgatggatgaattccgtgtcatttccccgatgttcact

SEQ ID NO: 372850 - DNA, 402 bp, Zea mays
gttagtacttcacatttcttcagctactaatcataggaatcatgtaagatactgggttgtgatggttcaatgctgcttgatggcaccccacccttcacaggggagaagaatgctccatccaaacaattccttgcgcagggtttgatgtgaccaacagcgtcaatgtacaacttgaacagatctgcctacagatgtagtgtcatgcgctgacatcctcacttgtggcagcacatgagtctgttgtagcaacaagaaaaaaaaacttgaacattagaggtagcaaattgacggcagaagtgtctatgtagcaaaagtacgagaacctctttatgtttaagagattatgatatttataatactggacctaaacaaacctcaggaagtactaaataaagtcaaaac

SEQ ID NO: 372851 - DNA, 340 bp, Zea mays
  unsure (1)..(340): unsure at all n locations
aatgcaatgatataatacattttttattgaagaaagttggaaaacctggcctcatcggtttagaaaccgacgagactaattttgactaggtcaagctccgaaaggttgattccttcatttcggcttgatcgtcttgactcttgacgatagaaacatgatgacggactttattgtacactttgaccactttgaattatcaacaaacttcaactccatcgggagaatttcacatagacatgtatgcgttttatatttaagaaaaaaaggaacttcgngagttcttatctttctgtgaaacagaagcagaattacgtggaaacgaacgcgcggccacaaacca

SEQ ID NO: 372852 - DNA, 341 bp, Zea mays
cagcacaggcactggtttttctttttttttttttttttagggaaaagactgcattagacttggataactgacaaggggggcctcgaggaaaagccgttggcctaacccggaatggattttttgcttttagaaacaacaaagcttttttgggggaaatttccacttttattggccgacagcttccagggcttgaaacaacaatttttccccccaaagaaaatttgccttaaaataagcatgggtaagccccttgggctccctaaaaaaaaatgccttggccaacaagaacctgggggctgtttgggtttaaagcttacttggggcttattgtttggggaaaa

SEQ ID NO: 372853 - DNA, 382 bp, Zea mays
aacaacataaatcagtttttttataaaccagtttctaaaaactagagataaaaattgaattcttaaactaagctagattggttttaaacatgacctataaaaataagtcaaaactcattttttttctaatctcatctaatttatatggaatcggaataactaaaccaaaccaggctgttaactcccgggccgacttgtaagggccttctaaccggagacggacaccttggggatacataaatacgggcacggccggggcggcaaacctttaaacttcgactggcgccacccgccagccagccacccaggacaaccacgatcattggcccgtgggggggtacgtgaaaattaccccgtggggcccgaccattacaacggggcc

SEQ ID NO: 372854 - DNA, 292 bp, Zea mays
aaagcatagtccacgcataccagatgttcagatcaacaatgacaatcgatcactgcaaacctcagctactgaaatatccaacaggcagggtaatagcccagagcatgactcatctcatgcaaaaactgtcagctggataaacttatcaaggcaaaccagtgccccagtactggttgaaataaagagcagacatttaagtgccgaagagggataaattaagcatcttccatagcccattaagcattccggcatgcaaaactgcaaacattaaactaccaagacaaggagcttg

SEQ ID NO: 372855 - DNA, 278 bp, Zea mays
ctccaacgtttaatttgttttattactgttgcccatagtccatacatacatgaaagaacaagatacaacaagagatcaaccgcataaaaaaacacatgcatatcatcagataataatcaaacaaacatacagcaacaaaatgaaagaagatcgaaacaaatcggcgtgaagacccatctggtatattcccggcctcagtggcggttgacccagcggcacgttttcctgatctcgcccttgctgtgcggaggcatgggcagccggctgagcttgaggag

SEQ ID NO: 372856 - DNA, 346 bp, Zea mays
atacaaatccaccctctgcatatatcttattaagctgtataataaatgaaacaacacagcatcatatacatagaccggatgcatattcgctacccttattgcaacagcagctagccttcatttctcccatagcactgagccaccggctgagatttcaccgcttctgaaagcatcaacctttgcacggcattgtttctgactcacaactgcgttgctgccttggatgctcatttgttcaggctcaggcaggacccttgaactgcatgtttataggtcattagatgaaattacagagttacaagatttcaatccagttggtagttacagatcattagaaaataatgct

SEQ ID NO: 372857 - DNA, 528 bp, Zea mays
acgcctcacgcgtatgtccacgctggcgtcaaaatttaaacagtgctctaaactgcactggtagcagcgaaaactatgcccaccatttacattaatgggaagagaccccatatttggctaccctattaaggaacagggactgtaacctctgaggtgttgatcggttcacatattagtcacctgaacggtcaccgataacgctaaactatgtctgactaagtccaaccgtaatcagatatcacactagaaactttgtaccacctgtaatcgagtgtaaatcattaccattaccatttatgttacgttctttagttgctctttttccccttttattttcttctgtaagcagtcagaacaaacttcgctggtgctaatcataaatacacgcaggaaatgaacaatactataaccacaataggacgtatatgaatttgggatacagatgtgaattgacaacgcgagatagtggttctatctactttgtctatcagaccactgtacacatggctcaaaactagtgaacagaca

SEQ ID NO: 372858 - DNA, 262 bp, Zea mays
cccacagtcaaacacagctgcgatctttttattcgggcttattctcctattacaatgtacatactgtcctcatacactctaaagggcacttagacccagatttagacatgcctatgtatagcgttctcagcatccacaccaaccacggaaggaagcagaatcgcttgggcctccagggatggtgtgcgacagcggctgcttgtgtctgatcactggcatgtggggtctagcgattatggataccccaggatcctgctggcgg

SEQ ID NO: 372859 - DNA, 314 bp, Zea mays
aaggcaacagtgcataaacttatttgcccacaagaaacaaaaaaaatggccaaaatcaaaatacagagttgcctgatttcgaaatacttttttttgcacttgccctggtgcccacttttaagcataagctttggacctcactgaagacctaatttaagttaataaaaatattcagcttttttttggggatatacaactggaaaacttttccgccccaaatgggctcctttagcttacacaatgggggggggacgaacacagaaaccagggtggggccttccaaagagatccaggttagttctttaactaaaaac

SEQ ID NO: 372860 - DNA, 329 bp, Zea mays
gtaggctgggatgaccagtatatagaccaatcaatttacatacaagatacaaaaacaaatcggtacaactacaaaaaaaaagagagagagaaactgtaataaggagaaaacgaattatacctatatggcacattgaccgcgattatgtacaccgcagcgtcatccctttattggatagtggttttcaccactaaagtaatttcatggcttcatctctgtgtcttggcaataaaaccttggcctggaaagctttgccaccaagcctgttctctgcagcatgcacttactaaccaatctaatggcaccttcccgtgttttcgtccaagctt

SEQ ID NO: 372861 - DNA, 333 bp, Zea mays
ctttggctttcgcctaggggggcaggtacctgaacgaggaggagagcaaccactctaccaacgactatcaggctccatatgaggcacatgaagccacagtgagcaccgtagtggacaccgatctaacggggggtataaggctaggcaactgtccacacaagtggagacaccaggagtgcttactgaagacatcgctggcgatgactcaaggtggcactacttggggcgtatgtactgctctctgatatccgcagtcaattcataagaccatgcagagagacatggagatgaacacccacacacgccatggaacgtgctaaggatggatgcaga

SEQ ID NO: 372862 - DNA, 369 bp, Zea mays
ggctgaactatgtgtttattttggtcacaacaacgtcctgtatacaatacattcgatcaggtagaaaatagacgcagaagggtgcgcaaaacctagcctcactggggcagcccctcctggctcctgcattgccagtctctcatgcttgcatcatcgttccttggttacctaacctgggtgtctgtctacgatctgtctgaacttgctaccgatcaagcgtatctacagtcgtgaagcaccgttggaatcgttgacctccatgaacctcgcgatctcgtgccagtagtacccgtccttgcagcactcgctcgcagcggcagcggtggcgacctctggtcgtcgttctgatggaacgcgatggccatcgcg

SEQ ID NO: 372863 - DNA, 457 bp, Zea mays
cccacgcttccgtctgtgcatcgtctctcctgtccccgccatttggttcggaactctcgcggcctcatctcctcctcgtcatcgtaacacccacgcttagagttcgtgagggtcgcccccaggggatctcgagacgtccgtttccaagagtggaccggctcggaggcgctgctgttaccttgggtggagctcggacctgcggatcagttggattctcaagggagacggagtcgggagcaactggttttgggcgtcgcggagcacatggcttaagaataatttcttccagcccggcgacaaattcgcagttggattcagcatatgcattttttatgctgacataggatgtgctcaaccatccgtggactccctctagttgcacaaaccacctcagtgctctctctttcttcgaatcgggctaataatgggcagtgcttgccaagctggcacagacggg

SEQ ID NO: 372864 - DNA, 243 bp, Zea mays
gacacgttttgtgtttttggtgctgaggctctcagcacgcggtggagtgagactgttgctggggagcacccgcgcccttctatgtacgttggcctcgcactggacgggatcgatgaggtgaggactggccccttccgtcatccattacaccctgagcagctcctaggccgcagggaggaagcagatcaacagactcgacggcggtcactacaccattggcaagaagaatgatgacctttgcct

SEQ ID NO: 372865 - DNA, 156 bp, Zea mays
gtcactttttcgcttacgcgaggagatctacgagggtggaaaaggagaaagggtttacatatgcattacgagagatgataaatttatgctcacctgaatatataatgtagcatcagatgacagagggtgcactcgcacggtcccaggacatgtatt

SEQ ID NO: 372866 - DNA, 343 bp, Zea mays
gttaaaacaagccggtcaaacttgatctcagaaaagtcaaatacatttttctggggtacagggagtcaatgaaagatttaatcagtcagaccacctagttagtatatgagcactaagcaacactgttatgtacagccggccaagtagcgaccatgatgctgttcctctccatagtttgtcgtattgtagcgctaaggctacaaaaggaagacaaaaacctatcacattgccacactaacccgcattgatgttgaaaccggacacattctgcgtcacaaatctcgaaatggatttaacagtatctaccttaccagaaaagccttacacaaataaaaaaatgatg

SEQ ID NO: 372867 - DNA, 312 bp, Zea mays
ggttctaagttcatatatatgggaataaagaaggaactgattgcatactgtaatgcttacaacattcctggtgtcaaaagcaaggttcctcctgaagaacttgatgtatagaaaggtattaggacccatggatttctgctggaacgtgtcatgcaccttcatcttgctctagatctaggcatcgcttgttggactgcggaatgttgccagcctgcaccaccgtggaggtgggcagccagctctgatccatccagcagtggaggatgtccgatgtgtggtgcgacacgtgcagtgcccactggtcatacacct

SEQ ID NO: 372868 - DNA, 401 bp, Zea mays
gacacttttgcttttgtacttggacagctacattggcatctggttgctattgctcgtgtagctgattagctgtcgccactatcttgcacgcatagacatcagggaggtattatgtccagccaagttttgcgatggctatgtccagcgcatcaagattgtttacactgggatggatcagaacacatgtactgtggcgactgagctgtctccatatatcagggccaaataccatgtgtgtgctatatagaccagggaacccacttaaaagcagaaaattttctgtgtgcgcgccaaatcttctgtgtgagctaacatattgcaggcaaccttcttaacaacaaaagaggctcgtacaatatcagaaatgatgctcaaccacttgggcatgcgaagtatcaaaa

SEQ ID NO: 372869 - DNA, 183 bp, Zea mays
ttcacattctgtgcggacgaaggtactgctctttgctgtgggtaacttgaggctcttacgatccattaatggtggggacttttaaatactcgcactcatacggaaagcatcttttctgtacaaagttgacatgagcaaaatgccaaactttcgttcgcggaacgcatggatactgaggcacac

SEQ ID NO: 372870 - DNA, 132 bp, Zea mays
gccacattttcttttttgcttggagatattcttggcaatagaaggggtaatgatctacaaaagcttcaccacccttgactgttccacgctcgcttgcatcaacgaggtattgtacgaggtcaaagagcccaa

SEQ ID NO: 372871 - DNA, 344 bp, Zea mays
ctcactttctcgaccacgcgtcctgccactcgctggaagcgaagtagttgaggctggaaagctggtgaacctgtggaatgaatgggggctacagatcctggtcattgcaagcttcgggttacaagtattcctcctcgatttccgaggagtccgtcgtcatagcagctgcactgtcctgacgtttttactctgggcgacatacctactgtgccgttacacagagatatacaccctgggccacctatctgttgacagtatgtcagaccagcaccaactttgggcattctgggcgccgttcctattgttgcaccttggtggcccagacaacattacagggtatgcac

SEQ ID NO: 372872 - DNA, 280 bp, Zea mays
tgttcacttagagatgcctcttgttgacggtggcggggatggaaagggggacgatgccaccagcctcggccccgccgcgcgccgtgccagtgatgaaggggggacggaagcagcccaggacatttggagccgtcacgctcgagaaggccaagctcgatctctaccagcgtctcaagaagatcatgcccgatctagcaaccggtggtggcggcggagatgttggaaaaaggatcagtcccggcgggggtgatggctgcaactcaagcctgaaccccccatg

SEQ ID NO: 372873 - DNA, 295 bp, Zea mays
aaccaggcaaagatctttttttacaaaaggaaagggcccaaaaggggacttaggggaaaaaacacccccccccatctagtttttttttaaacctaaaacatgggagaagcattttaaccccaaacaagtaaacttagggaagcccggtgcaggttaattcatacccaagagtcagctgctaaacaagttaaaaaaaaaccaaaacttaaggggcatgcccatctagaggggcccaacaagacatgacatttgaccctggccttccacaaaaactttttcgccgttttttttttgc

SEQ ID NO: 372874 - DNA, 209 bp, Zea mays
gccacactttgggtttctctaggagagaatcttgggaatagaagaagtaaggatctattaaacgattaccagtgacgactgttccacgctcccatgcataagagaggaatcgtaccaggcaaaagaaaccacgaggcttgtccaggacatgctgtgtcacaacactggcgttgtgagcaagacgagaactctagtgacggagcttgctc

SEQ ID NO: 372875 - DNA, 150 bp, Zea mays
gccacactttgggtttcgggaggagagactcttgggaataagtgtggtgagcatcttgtaaaccattaccacctaccactgttatcacgctcacctgcaaaaataagggaccgtacccggcaaaagaatccactaggaatatccaggaca

SEQ ID NO: 372876 - DNA, 234 bp, Zea mays
ttcactcgttggacggcgcgtggtgagcctcgtgggatttcctgccgctaggatcggcataacgattacgtcccacgacaattgcacgctcacctgcatcaatgaggtaccgtgcgaggcaaaagtatccaacagcgacgtccaggacatgatttgtaacaacaatggcattgtgaccaacatgagaatccaagcgacggtgcttacacaaccttacgcagaaatgaacatcat

SEQ ID NO: 372877 - DNA, 179 bp, Zea mays
ttttaagttgtcgcccacgcgtccgtcctactgcagctgtggtgggggtacgatacacgtctgggtaaaacaacctggtggaagaattccatacagcgcctaggtttgactaaatcgggatccaattcggctaccgattcgaggatcaccggacagatgaccaggccttagtcaacctg

SEQ ID NO: 372878 - DNA, 156 bp, Zea mays
gtccgactttgtcaacaacctcggacttggtgacagggccgggaccaattagttaatggaagccgttgctgttgccgatgatctgcttatgattgggaaggtatgtgtccttttgtactctgcatacttggttgtccacagggctgtcgtgaccac

SEQ ID NO: 372879 - DNA, 393 bp, Zea mays
  unsure (1)..(393): unsure at all n locations
aagaccagaggatactactccttcgtattcagggtacagatgtttgcccactgaatgagatgacaagtcttcaatttcatcacttgttttttcccctcaatggtacttcacttgcaggactacaattgctcggttgatttcataagatcaatattcctcgtcagggagacggtccgtgagggcagaaacggcactgaagacgcgaagctgaaactggatgagctagacgcgacgagcccagcataccagaccgcggacatgcgtcgtcttcaacaccggccactggtggactcactacaaaacatcaagagggtacattgtactttctggagcgagtatcatctattcatctcgtancttagtttccataatccaaacatcttgaagtgcttg

SEQ ID NO: 372880 - DNA, 303 bp, Zea mays
ttggagttttcatctgcctcaagacctgctccaagacaaccatcttctcagggtactcagtaaggtacgtctggttgaatattggctcggtctccccgtggcatctccctcctgagttccactgccctcctctgttgccaaaaaaatttcattgtcaagtgaagatatatggcaccaacaatcacctaggaaggaatccagccagcgtagcggcggcggcgatgtcttacctgaaatgcgagagtgagtatcctctgaacacgacctgagtcctcctcggatcgatgttcttgtccacccatg

SEQ ID NO: 372881 - DNA, 257 bp, Zea mays
aaaaccaactaggcagagatgccggtttttttaaaaagaaaaagagccccagactagggaaaacgaacaaacaacagggggtggggggacacgtgccacacaacactcgaaccaactggaaacaacaaaggggggctcagatgaccacacaacactttggctgtactgcactcacctgggcaggaggcctaaagcctggctcaagtcatcggtgtcgagcttagcaccggggcttagcaactccgacttgatgcccc

SEQ ID NO: 372882 - DNA, 138 bp, Zea mays
acaggcaaaacgcgagtttgctgctggctgctgactcgtaccaggtccaggttacagagcaagagaaaacagagaggaacaggaacaaacagacaacagagtgagtgagtgagtgagtggcagaaaccaccatgcacc

SEQ ID NO: 372883 - DNA, 247 bp, Zea mays
ggggaaaagcccaaacagcagatcccaccatggaagggtgggctcactttattttgcctacaaaacttttaatgaactgcacaattcccatgttttaatttaccaaaggtttatacaaactttggaatacaagaagcaaaccccgttggaaagaaaaccaggggggaatggataccgggggaaaccaccggtgtagttgcaaaacaagggcttacacaaacccgtttttccggggaaagttttacca

SEQ ID NO: 372884 - DNA, 548 bp, Zea mays
ggagctgttgacagtgggtcaccctgacaaaggccctcctggtggcagatcaattcactctgttcaccattaacaagcactctagtggaagaggtgcacaacaacttgcagagtaaattgtaccaaacaggtccaaagcccaaatatcttagaacctccaacaaaaacggccattagactgggtcgaaagccttgctaatatctagcttaagcaacacactcaattgctgcaggagctctggattgttcggcaagcatgtcagggtccttggtatgcattgcaactgtttgtgaccaacatcacttgcattatttcttaaagaggtgcgcatctgaattttaaaaattgtagcttgttggaaataaagatcattgggcagtgacagtgagttgttccaacttggacatggaagtttgagtgcacttattgctaatcttggtgtaacaaattcaaggaacactcatcatccaatcacaaaaattctatggttcagattttgccgattatatgttctctttacagctaccattcagcttccagtttttta

SEQ ID NO: 372885 - DNA, 283 bp, Zea mays
acacacacatggattttattcaaccaacggataggatactcgtgactgtaactacatgcattttgttcgagtctagtgctgaaggacagcactaaatatgcaaggaataccatctcgcacacggaaaagttagtaaaatggacagcatgagtgggaatagattcagcattcaccggagaatggggggagtaccggagctgccagcttttatagaatgcgctatgagcagggagaaagtattccacaagtgcaggaaacaaccaaaaggaaggcacttcggcca

SEQ ID NO: 372886 - DNA, 318 bp, Zea mays
aacacatcaggtatgtggtgagttattgaatccaaaggtctaagcgtttttagattacagcagcaaccaacacaagagcatcgtggtttacagaacttgtacaacatacaacctgggggttggttgcacagcctaatacgtacacgtaagtgagtaacttcagcctttaggcggagcatcaccttgaagccctacacaaattatagtttagaacttttacatcaaaaactcaccagctgttcctgaaagaaaagaagaacaaaaccacggggagccgataagatacccacatgaaagcacgctgacaacacccaacat

SEQ ID NO: 372887 - DNA, 300 bp, Zea mays
ggctaaagttccaaatctgaatttatatatcctcaaccaagtcaatagacatgtttgttagccacacctcgtaatcactgcactgctctgggctggttggcaaggactaaggccactcgcaaaactgcccaccgccacaccaggtcaacagccaccatctttctcgcgttcagaggagcagccttccttgacccagcatcgggggactcatcgcctgatatactcgaccgtgcagttctccttgagccattcaagcaccttcgccgcctctaggacatcctggacctgctgcctgatgct

SEQ ID NO: 372888 - DNA, 313 bp, Zea mays
aggcccgcaattcttggctatatgaaggtatagaggggttaatgcacaaacaaaacaggttttctaacaaacagggacaataatcatgggttggggagtattactacaaaaggacaaaacagcaaaaatttgcatgtagggcagcgcctggaaagggaccattagacattgggcccggggggcgacacatgggtagaaaaaagtcctgcaacataggaacagttcccggaacgggttcagggtgatgaaaaggaccttgagttagaggaaaatcttgatccaccccagcgatcaatattttggggggaagggg

SEQ ID NO: 372889 - DNA, 349 bp, Zea mays
ggatcacaatctcataaattatacaaatcaatttataatcaaacgtgaatatacattaaaattcataacaaaaggacgggaataacaagtgagcaaaaattataaatctttgtttcttatcctaaacttgagtatttgcaaataaaatcacatatatctaaagccaactaaacactgatgcacttaataatcttttgttttcttctggaatattgtcattacattcattctcctgggacttcattaactctaccaagaatttggtcttcagtacacttgaagtagtgaaaatgcagggtaaccttttaccattccacgagtgcataaagttgataacaagaaagcctga

SEQ ID NO: 372890 - DNA, 133 bp, Zea mays
gaggcaaatacgattttccatctttataaaggccgaaaacatacttttaatacataaagccgatcggttccatacccaatacacacagactgtacatttcacactttagcaaacagtacatgtacacagggct

SEQ ID NO: 372891 - DNA, 374 bp, Zea mays
ccaaaaagaaactggtattttacttgtagttatataatttatcagtgattagctgcttgtgctgatcacgagaaaaatcatgctcgatttctgtagctagtccaaagaagtctgggcttgatttatgcttttatcaaggaaatctcaccgacgggctcccactcattcgtgtccaaccttttgttttggacataccatgacactcctgtttggcatatctgaagaaacttaactggcatcaaacaaactgtagctaacactgacagcccagcaccccaaggccccaaccctgccaactcagtccccgctttggttccttctcacagccccactctgacaagcagacagcagcattatccaatccgcccgtgccc

SEQ ID NO: 372892 - DNA, 145 bp, Zea mays
cttatgggatcaggcattccacatacactcataatgggctaagggaattagcactatttaaaaaataaatacaaacataaagaacaaaagggatttgaacattatacaaaactctgcaccgaagctgggcatacagcctaaaccg

SEQ ID NO: 372893 - DNA, 165 bp, Zea mays
actgaacaagcacgtcgcgagaactccttatttttatagtgccatagtgaggaaaaatgtacatccctactcatatcatagctagatgacgtcaggagccatatacatagtagactgtgcacatctcatcatcatgagcttgcttacgttatcagaaactgctgg

SEQ ID NO: 372894 - DNA, 299 bp, Zea mays
atggtaaaaatttctgactatatggcactcaaaagtacaaactttctcatgcactacatgtcgcagagacacagactgcacgcattggcagctcacataccccacattttggaattcatcaagcaggatggaactttacttcttttgtagtgtcatgactagccacatgccaaaagatagagttaagcattaatactccctccaaattgacgttgtgcaattttcgtggaaagtatttaaggtgtctatcacaatgtgtctgcttagggcctaaaatgtattgtatgcatcaacagcat

SEQ ID NO: 372895 - DNA, 191 bp, Zea mays
ctcaccatccaaagttcagaggcggcgtagagctgtgtgccttatgtctttaaacagacaccgtcaccagtccaccctaaatgggccagaactgtaaccaaaatacagctaaattacagtccaaattcctgacccaaaaaggaaaaaaaatgtttgcctatgtgctgtgggaagcaagctagcctgcctgt

SEQ ID NO: 372896 - DNA, 376 bp, Zea mays
aaaaataacttgggaaaatggaatttccaaactagcccttagtattaggcatattacataaagatgcaataacatgcactaaacaagcgagacttaattatctacatctttaaacagtcaagtggaaaccaagtcgataattagcacgtatattcaatgtcagcacaagcagtaaaacttcatacaagtcagcgcaccactgtaccaaaaggtagaaacgctgaacaactgctgacttctctgcatggaatctggcttcattagcttatgatccatccatcttcacaacgacaggagcaaactcgtcatcttcatcaataaggttcactgcgttgtcctcaagatcccacccaaacgtagtctccagaagcgattt

SEQ ID NO: 372897 - DNA, 242 bp, Zea mays
gggcccccgggggatgatttttttaacaaaaaaggcctatggaacattttaggggcccctggcgcaaaaaaaaaaaattttttttaagggcttatgggtaaaaaacaagccttggcctaaaactggggggggacccccaaggggagggatgttggggctttttgcaccggggaaaaaacggggacgggccctggacccaaaactggaatgctgccggggtttccaagttccaagggggcccc

SEQ ID NO: 372898 - DNA, 311 bp, Zea mays
ggggggaaaacctgtccattgtaaacgtttcaagtgaatttacaagtacattgcgagtcagctgcccttcccctgtgtttatatataaggactccggcggttcgacagggggctacaagagaaacctcaatgaacctgcatagctctggagcctgcggcggacgcgtttgctttacaccggcagacagacagacagacagacgacgacgcctcacgacgtcgtacctttgctgcccgacgacatgaaagattggtcggagccacactcccccttggagttcgggtttacgaacacgaactcggactttaac

SEQ ID NO: 372899 - DNA, 339 bp, Zea mays
actgtccaggtgcattcattgtcaaaccaaactaatgagaaagaacagtgttatttatacgcaagcatggagatgagcatgcttaaacaactaacagcagatggtctctggctagtgcctagcactcatttgggaaagcaaaggacacggtaacatactccctccatgaggaaacatgtaatccggggcaaaaaactacccaatgggaggcctaagcaacatagagtttcgcctatttatttttcctacgtcaatgataaaacagagtacaccactgatgtaacttcgctcgatgtgtgcctatgcaggctatgtgaacttcactgcagaaacatgaac

SEQ ID NO: 372900 - DNA, 362 bp, Zea mays
  unsure (1)..(362): unsure at all n locations
catgacaataacaattgtactgcattcatacataaagttcacaagtttgcttttgttgtaataaagatcaaaataagcagcaacaacactaagtttggcttgtgaaagctcagagatacgagctagtacaaccacatgttggtttcacaatttaaagttcacttgcaaatttctcttttggagaaaatacaaaacaaaatatctagctgcatccatccaaaagaacttttgatctttcttgttgnagcatccataggcaccaccgcgatctgcttgctattgtcatcatggagtaaacaagtgacttactacctctaggacctccctcctgtagcactctgagatgattttgatgtcttgct

SEQ ID NO: 372901 - DNA, 274 bp, Zea mays
gggcccaaaaaacacaggggggggaagcttttcccaccattactatttggaggaaaaaggtttacccggcgttttaccctggtggtatatgtcatcagcatgtcagcgatgcaggaaaccttgttttgcaaaaaaaaacaaaacagggttcgactacccttccgtttttaagggggcggactatggatgcctgggacttgaccggctggacatggcttgagtcccagggcatcggaactggggagagacggggttcgttcagtatttgcaagct

SEQ ID NO: 372902 - DNA, 285 bp, Zea mays
acatcacgtttgggaccaggccgacctccgacgacgagccgctgtggcccagcgacgccgccgtgtaggagctgtaggacggctgcttggcggcgacggcgacgccgccaccaaagtcgaagtccacagcggcgccgcagttggatccatcgttcggcacgacgctgtcggcgtgcgggaacctggcgaagtcttgggcgaggaacgggtctaccacgtcgtccgcgaacaggaggtccagcttactggcgtcgacgacgaccttggccgcgtcgccgccgtcct

SEQ ID NO: 372903 - DNA, 373 bp, Zea mays
attatagtgcttctacatctcaacgtatcttatcattacatgttgactccgtagcaacgcacgggcatccacctagttaagaaaataaacaccaattctccgtcgtccaattcctcctattctcagttcttcttcctctcgccaatcaaggcatcatcctgtgtcaagatcaacattaagtaattgatgaatccatctaccagtgtttacaaaagttctatatatacacggtgcccaattgaaacacttacctagagtgacaaatggcatctaactgaatcaatctctatgtagaacacaacacaacacaacgcagtgcacaacgataataagagaatctagtgctacatgtactacactagtacaggatccc

SEQ ID NO: 372904 - DNA, 289 bp, Zea mays
tcttttttttttttttttttttttttttttttttttttttttcagacagggagagggcatattattccatgcatggccatgaatatggcattcattcatcttataaatagtacgtagaactataacactaatatcacaagtaagctaagtattacggtgcacgtacaggaacagagacgcgcgcatgcatgcaggaggagtacgtatatcgtcatcgccggttatggccggtggacctagctagctagctagctaggggttttgggggtaatcttgatgcacctgaggg

SEQ ID NO: 372905 - DNA, 289 bp, Zea mays
acgccatgatttttttttttctcaaaatagctggggcctggagcttctttcattgcttcaaagcattacaacataagcagcaaaaccagaaacagtcctgataagcaccacttattagggcagtacaacacaaaggataagcgcggggcaaatcaagaaagaaccacaacatgtagaagccctataaaagcatgattaagcccagtataccaccaaaggcttcttactgaaaaaaaaggccgccttaggcagaaggtttttccgccttgaggggcttcaccacctccca

SEQ ID NO: 372906 - DNA, 354 bp, Zea mays
acagtgaaaaaaacaaattatcgagctacaacaaagacaacaaaaacgaattcaacagaatttccaactggtggtgaacctgcctacacgctgaactgtaatgtaaacttgcatcataaaatgcctagggcaaatcgaggcatttgaagtcgaagagacacgaagatctcaaaagtcaaaatcctagatcatctgaagctttgactgcggtggtaggaggcactgatgaaagcacgttgagttggatcaaaatgctagcgtctcctgcagtagtgtacagtcaacttattccttgaacggtgcctataacttccatcccatatattattctcttgagacaacaccaagctgaac

SEQ ID NO: 372907 - DNA, 308 bp, Zea mays
ggacggaattttgcttttcctctttaacagttgcaatgtacgggggcgcttttacatcagtaaggtaatccacagtttgaaaaacaaaaaaaaggctaaaagaaagtctacatgtcgtatctagctgatgaggaaaaaaatgaagagcacaaaaggaatacactgcaacttgttcaggatgacattgcattactgaagacagatcttggcacgaaatctttggcgcaacttgttcaggatggcataaaccagtaggtttacccgggcacctggtaaggacagggagttgaaatttggaactaacatgc

SEQ ID NO: 372908 - DNA, 377 bp, Zea mays
acccccagcctaaaatttggggccacggagagtcaaactcagcacttaagaggtgctacttagaccacctaactaacttgactagatgctcgtcggctagatgctctttcgccggttacgccgactaaacagatgtattcacaagctatagaacatcagctaattgttctaggctatgttttaacttctcgaacacaacgtgaatagtctatccacaacctccacagacgacaggagaccacgcgaagtaccacccgagtttgaatagttttcagcctacataagcaaaatctttctacaagtcttttatctaggacgatgttaaaacttcctgctttagttgtcaaatagctgagagatgtataagtgcctacaac

SEQ ID NO: 372909 - DNA, 127 bp, Zea mays
ggccaaccggcaagttttggaatttcaaaacccattaaaattgcccgtacataagggtcacacaggacaggaccggaccggggtacttccattttgggaggacagggtacgtatgcctcccttaacc

SEQ ID NO: 372910 - DNA, 238 bp, Zea mays
agagagggggatcatacgtttgttaattacttgtgacacgtacagacgtggtattatctgcagtacggggcggtgctctgtttactgccgctgcgttgcgtgctgccctgccggctcatcatcagcaggcggcggagtgggtgaaggggttgaagaagtggtgggtggctgtcttgggcctgggctcggccttggcgggggcgccgggcccggcgaggcggtcgcaggacgggcacag

SEQ ID NO: 372911 - DNA, 368 bp, Zea mays
gcaactctagagttacgagtgtttagtagactcttgctagctcctccttagaattctgctctggagctatatcaaacacaccctagatggtaggtgcagacgaattctgcgcaagctcaaacaatgatgattatgcttatctactgtgggtttctattcctccgctttcttcgggagtgggcaaacggatcaacccatgttctgtcttcccttgcagcccgggcccagcgcttctggaaatcacgaagctccgatcgtgattttctccggatctttgttcgcatatcaaggccaggatccctccctctcgatttttggacttgagctgctttctggcggagtgactgggcatttttgccacgaatacc

SEQ ID NO: 372912 - DNA, 67 bp, Zea mays
accaaatagcgtttattcaaacatgttctgataaagaagcaagccatcgatgttcgatggagcctcg

SEQ ID NO: 372913 - DNA, 222 bp, Zea mays
atatcttggtggtagtagcaaatattcggaaaccaacacaggattaaaatgcgggggaggaaatagcagctacggaggagcacaaaggtaagaaggaacataaccgccgattaaaatatgccactaccaaaacaggtggggacaaaagccctagaatatattacaaaagaggcgagagggggcggcccggcccacggcgacgttaggaaggccggagacacc

SEQ ID NO: 372914 - DNA, 459 bp, Zea mays
gatggttaccaaaatatagatttcacagcagtgtccaaggcaccacaattggataaacaattcacagtttaggcagaagtagccatataaggtgatgaatgagctcggaacccatagtgaagattgaaaaaaaaggatacacggaagtttcagacacggttcatcctatgttttctgaaacatgtccataaaaagtggcacaaaagaagggtttatggtgtggatgcaaagttataccagctttcttttcttcttatgcctccttttgcgccgtggtttatgaacatcagaatttgagctcagattactgttattatccgcggggcgatttggtactcttctatttttaaatgattcgccgcttgtgctgtttgaagtactgctcgagctggatatcgcacgtttatctgcatgtctgcctctatttggggctaatgagcgtggtggcggcataagaac

SEQ ID NO: 372915 - DNA, 170 bp, Zea mays
gcagtggaaatgcagcggaaaaaattggttacaaaatggaaccttgtcacgacatttccaggttacaacatgattccaaagagtgttaacagagggatgtcaaaaaaaagggattacaaaaaaaaatgaattaaaaatgtataggattttaaaaggatgttaaataaagg

SEQ ID NO: 372916 - DNA, 307 bp, Zea mays
  unsure (1)..(307): unsure at all n locations
gggccccccaaaaagggggtattttgtatttgcaagccaaacttagtaccacattagggactaaactatgcacgcatttgtttataagggccagggcggatacaacattgggggcttgggtgggcgggaacctgtgtaggcttggctgggcccgagcttttattcctacacaggtagattttttgggacaacttgctcaggggcgcggggcacgtgggggaaaccataaggggtnggatgaaaattggggggaataggaaacaacgggggggggggacacgagaatcgataatggccggacatggga

SEQ ID NO: 372917 - DNA, 363 bp, Zea mays
ggaacaactttttttttgatggggaggacaagcataatacagacacaagacacgataaacacgaacagcgcgcggtggcagactacgaacacctgtcacgaaccaacagggggggcgaggaccaggaggctacaagaacacaggctgcagaagaattttttaccaccacaccacgcacgcaccagctactgcgttacaaatacgccaagtcctttattaatctaccatggttggatgcctttcgttttgccttgaaccggtgatcaacacccatcgtcgattcgggagcagtaaagcggaccacatgcacacacacgcgcgcgcgctcaattggtggacgggcgaggaataaccgggcgctac

SEQ ID NO: 372918 - DNA, 391 bp, Zea mays
  unsure (1)..(391): unsure at all n locations
ttnnnaaccaaaagatggcactctggaattaacaaaaacaagcagcctccagaagaagcatttgggatacctaacgcaggccacggcggtataaccacacacgaccaaaaaaaaaaactacatatatggtttataccaatgtttaagtttccaccaaacctcaagcatcgtaatgcctcacaatgttttttttttatcaataagcctcatgatggttgtaaaacccatataaacctggaaccaggagttgtagttttttttttccaacataaatcgtctcgaacttgtctgtgtagtggcattccaattgaagacaggatttactggctaacatcagcaattatgcggttatgcctttcctgagccttgcaggcaaggttgtccatgatat

SEQ ID NO: 372919 - DNA, 224 bp, Zea mays
ggggggaaaacattgctctgggacctttgatttggatgccccttattacaaagggaagccgggcccctcgccctcgagcatgcttgctccttcgattaacccttgcaaaggtccccagccagaaacagttgcagttgcagttgcaggggggccatcggggggggggacacggggcccattaattgccctttgttatggcccccctgcctgagccccacgggggg

SEQ ID NO: 372920 - DNA, 388 bp, Zea mays
ggatcatatcattcatacatattaaacaatcaagaacaaattattagtttacagacaaatgagaatagtatccaacgcatgacccaactacaaacccaaattactacaccacacacacaggttgcttcctagttcctatgcaggcatagaaacacttgaatgctttcatcctatcctaatgatgatcaagcgtcatatacaactcaagttgagattcactcaacttagcactgaatggaatgttacaagagacagatgttgtttgaactttggacctaagatgcgactaaactacaatattctacatatttgctgccacttcaaaatgtggaacactgatgttatcctacccttgctaatcaaatcacacacgaaatcactgagcaat

SEQ ID NO: 372921 - DNA, 180 bp, Zea mays
gggaagttggaaacattgggggttaacatgccccagccccgaaaagaataagggggcatccctggaccaacccaggggcccctcccctgggccccgggtaaacaccatttaaggggggctaaggatgctagctagaaaaataatagtctaaggacaaaaaaggaaaccttttttttaaat

SEQ ID NO: 372922 - DNA, 384 bp, Zea mays
acagaaattgctaatttctcgttgtattcccaaatccagttctggaaatcgaccaaattaggtcacagatctcaacaaagactggagaaataccacccaagtcataaacagagcatcacgacgcaataaaatagggcgaccactcaccgtcctctccctcgccttcgtcctcttcttcctcatcctcgtcgacctgggcctcctcgtcgaagaaccctcgcaccccgccgccgcccttcttcctcggccggcccccgccgtcgtcgtcgtcgtcctcgtcctcgtcctcgatggccgagtcgtcgatgacagttgtcttcgcgtgaccgcttccgcccgccgacacccttgccaccgccgcgggaggcgacggtgaagacggcg

SEQ ID NO: 372923 - DNA, 331 bp, Zea mays
accaaagcattttttaaaagcctattatgcaagggaaaagcaagctacccgggcagccatggggtggttggtcaccagcaagagcccaaacggggacaaaacgtacccaaacccacttgggatataggggaaggctaaataacaaggactttttattgggggggattttaaccaatttggtttttttacactacgcttttttggctttaggtggttcaggaaccgggggccatgggcaaaccaatcgccgggaccaaaaagggcgacgggacccccaatcgggggggggtccaaaaggggagaggtgtaacccaaaaactgggcccccctg

SEQ ID NO: 372924 - DNA, 406 bp, Zea mays
  unsure (1)..(406): unsure at all n locations
aaagaccaactatggttgtatcttttatgcttacttggccaatacaaaaaaaacacccagacaaattacgaatgaactaagcttagtgtgtggtcttactgcagtcacaagagtaagaaaaaaatagcatctctagctgcaaccgattcacacaaaagcataatagcggtgttgtgttagtggttagcagtgcaactcaagaagcaaagcaacatcagctgtagtagattgatgctaaacaaattaacaagtctgtgaggagaaggccaattgcatcgaatacgtactttggagcaaacaaaccccaaaccattaagtgacgcctttgaatagcaacgcatatgattgttagcgtagcagtgatnggttgttataagaccatacatcaaaagcaccttattatatt

SEQ ID NO: 372925 - DNA, 414 bp, Zea mays
cgaaaacagataacgtaatgaacttagataaaaattctgaaacacttttcggcaccaatactacggcatgtgacacaacactacattgactgaaagctaaatatgaactgctgcaagcgtttttttgttccttcatcataatcccaacttctagatcaacttcttcttcacttgttgactggagcatctgcaatcgtttattggccgattcgagttcttcaagtttcatttccctttgtcgaatgcttaacttttgtgcttccaattccaacctctttttctctagttctctgtcttcttctgtgcacttttctttcttttcacccttttctatggagcgctgaatttgattttcagttatttcttgcaaacagcttaagtattccggagatgaggacgatgcacctttctttc

SEQ ID NO: 372926 - DNA, 280 bp, Zea mays
caagccaaatacagacgggcccttttaaacatagttgggctcacaccaaatggcaaacagctgcacaggattgggaatatccgggtttcacaaaaggacctaaggaagggaagtttgtaaacacttgttgggattccttggcccatttcaggtttttaaaccagccagcattaaataagccctacgtttgtccagtttttaggggggggggaactggaatttaggggggggaagggcaacaacctaaaacccatgaaccttcattggaaaacccagtaaa

SEQ ID NO: 372927 - DNA, 218 bp, Zea mays
aaaaaaaaagacacttattgatcttcaccgtgggataccacccaggtattcttttgttacaggtggccgctgacaggtttttcagaactccttatacagttacggaagtccgaagcaggagtttcttcctcgcatgtgctcaccataaaagatttcccggcacaacatcatgtgggggggccactggtactgactggcaaggtggccttccttgacga

SEQ ID NO: 372928 - DNA, 324 bp, Zea mays
ggagcacaaaataaaccaatgttggaactaatcaacccttggatcagtacccaaaaggccaaaactcagaattcgattcagtacattattacaagagtgcgacaattatagctcgtattgatcattacgaggaaacagataaaagaaccagcaggttatgcatttggaaacgctgtactatgcgggccacccaccttgaggaatggcaaggttttcgaacccttttctagaagctcagaccatgggtctcaaattctgaatctaggtttgaaaccgttccgtatcatggttcctcgctcttcccaagttttttgtagaagcaga

SEQ ID NO: 372929 - DNA, 159 bp, Zea mays
ggagatagtctgagagcccccaccaaaggaggggctattgccgtcgctgcgctgctccagagtccaggctaaagatctcaaaagacatgacaacagattgtcagatccagtccatgtttttacagacgattaacacaaaacaagccccttacataaaca

SEQ ID NO: 372930 - DNA, 291 bp, Zea mays
ttctttttttttttttttttttttaccaaatagcgtttagggagcaccgaaccacttcttttatccagcagcacgcggtagagagctaaatggaacacagggtcatcatcatggtccgtaaccatcgtcccatgacgcatctagtacaacgccggtaccataccataccaccatttttaactggcccccggattcacgcttccttattttcagctcaacctggaaggtgatccaaatccgatgccaccaccggcaaagacgagctagagggaccgggcacacacacacaca

SEQ ID NO: 372931 - DNA, 252 bp, Zea mays
aaaaaaaaatcaagagtctgcaagggccccccctcttgttaattagggggggggggggccctcccatttgtcccagcagtccaataccctaacccggaaaaacagcttcccggtaaacaccaccggcctcgaagggaaccccttccccttggggggaaaaaaggtttcctaggggtttctgcaccgggcaaccgggccaaatttttgaaccctgggcccggccccaccaaacctgtaccttggggcgggggg

SEQ ID NO: 372932 - DNA, 365 bp, Zea mays
aaatcaactgtcaattctatatgcaacatgttagccactgaaaatcctccagtttcgaggcacatgatgacagcttctttctttttgcgacacacatggtagctgatgttactgttggttttctgaagcaactagacctcactagtacctctctttgtacgaactaaactaccaagggaaccaatttacaacctgtacatggtaacaacaggcaatgggtgtttgattcaaaaaaaaaaaaacacaggcaatgggtgttatgggctatgctcttggatgacaatgaacttgtatgcgtcgagctgctgctgaccctcttctcgtggcagcatcctaaatcctgcttttgaatgtaagtttaaccg

SEQ ID NO: 372933 - DNA, 348 bp, Zea mays
tttttttttttttttttttttttttttttttttttttttgttttttttttttttttttttttttttttttttttttttttttttttttggaaaaaaaaatccaattaaatttatcacccaaacaacagtttgtggggggaaaaagctttgggaacaaaacaaaggcccgacgggggaattttgaccttgaccttgatttatacaaaaaccctaaaaggggtttttgcccccaggttcattaaagttttacaaacaaagggggagggaaatcccctttttttatccgattccgggggacactgacatttttgccacttaaacatcaagggggggggcaacatcaccccc

SEQ ID NO: 372934 - DNA, 412 bp, Zea mays
  unsure (1)..(412): unsure at all n locations
aaagaacttgtaaatacggcccctcaaagaaaaacttgtaaatatgtttgcatttacaagcaagagatatatccaggatacccaaggcatcaaaaagatgcaggcgtctctctgtatgcatccatgtctcgacactggtataaaccatgtaataacataggttctttctacctgaactagacaatgtaataaaccatgtataacaagaacagtaaaaaggaagaggctcgccggaacaggacggcgctcggccggccagaaggatggccgatcaggaggacagtaggcgcttgagctgnagcagatgctcctcgtggcagatgttgagtgacaggcgcagngttcgtcagcagcgcctcctgcgcccacgtcagcggtcccgacgcgtacagcgctcgcatcgtcgaccggt

SEQ ID NO: 372935 - DNA, 429 bp, Zea mays
cgatcgaatatagctagtaaaacaacttcaagaaacatgtacatgcggttggatggatcctttctcatcgatgatttgtctgcattgattcatccaaatcaagatacaagaggcagcatgagatgatctgtctgtgtctgcattgatccaaatcaagacacaatagagggacagcatgaggacgaacagagacaaatccatcgccccgtgcttgagtttctccacgagctagtaagagatcagcaagatcctctctagctaactacctgagggaaacgaacagcaggggaggaccaagaagtgatgagtgggggaactccatgcgagccctctggcctctcctcccacaggctacatcttgaggacgaagaagaatgtcatgatcaaacaacctctttggaggcaacaaaggaatgtcatgatcaaaca

SEQ ID NO: 372936 - DNA, 496 bp, Zea mays
ggatcaggaaggaattcttattccatcttgtatacataaagaccagttttggttctacgataatacttagctgttacccttctacctaacatctgtagaggagaaagaaagaggaacataatgaggttatactgttgcgttaattctatctagttacaatggttccaagcattaaaaagactcaagtgggcacgtgacagttaaagctacagtctgtcttcgaatctcttctactaccagccaacttttttcaaaagacgtttagcctgtttgggaagggagcattgctccaggagtttttatcctaaaacccctcattccaagcaggccctgacctgcagcatcaatattaacacttcggtaatgtccaccaaggtacttgaggcaacagaaccatagagcttgagagagtgattcattatttactatacagcatcaaagtttagacagagtctcttgtagattcatataatgataaatcactggaaaactagag

SEQ ID NO: 372937 - DNA, 244 bp, Zea mays
cccagcgaaagatgacctgcttttgacataatgttcggttacaacttacaccagtttttgaacgaaaagaagggggaaaacttcggggcaccccccaatgtaagggaaaaacttcaaccgggcaaagattttaaacccaaaatagtcggttttttttttaacagaagtacctttcccacgggcatttgtttatcctggacatgttttttccggccattttttataacacacggggggttcaaaa

SEQ ID NO: 372938 - DNA, 308 bp, Zea mays
ccacagcaggcaaaatcattcattcgttaaaaaagggccgtatttaatctacccaagcacactgggttataatacacactttaaaaccagcactttcctttgaatataactacgggtacctttttttttttttggtctggggggcccttaaaaaatccccttttgggttttgctgggggggcgccagcaaaatcagttttttacccgggcggggggggaacaaacccgggggcgcggccacaaaacgagggggcccttggtgagccccaccgcctccatgaaggaggggatgacaggggggccgacaa

SEQ ID NO: 372939 - DNA, 432 bp, Zea mays
caaaacaacaaccaatgcttttttctaggcttgtatttgctagggagatctgcacaacaacaggtacttccttttcttaaaagatggttatacatagcaaaatttcacattaacgtatttcagacttgccacaaacaagttacattaagtatatgtgtttctgacctcgagcattgtacagtgagttatagtgaacttgagaccagaaactcagccaaatctgtctctgtggagcttgatattgtggaacaatttcaacaaaacaggtatctctgaatgatgttagaagacatatgtttgcagcaaacttgtcagcagctgcttgtagcgtgacatggtcaccccattcaccatacttcttaattatcttgcaataatgtttatatttcattggaacgtaaccttcatataaggagcacattccttgagctg

SEQ ID NO: 372940 - DNA, 303 bp, Zea mays
aaccaaagcattttttataagccttttatgcaagggaaatgcaagctccccggtcagccatgggctgtttgctcaccagcaagagcccagacggggacctaacgtcccgatacacacttgagttttagggcaagcctaatttacatggactttttatgggaggggtttttatccattttggtttttttacactacgcttttttgccttaaggtgtttcaggaactggggacgatgggcaaaccaatcgccgtgaccattatggtcgacgggccccccaattggggggggctccaaaagggggg

SEQ ID NO: 372941 - DNA, 322 bp, Zea mays
gggaaaaaagggccaaggccgggaacccttcaagggaaaaatcagtttcggggaaaaaaggcccgcccccggatcctaacacaagacccggggttccagggccccaaaagggggcaaaggcgatgtaagaacaaaaggccctgtaattttttttttaacctgggggagctggggggggcagcacccaggcccagcacacaaggggaagcttgccctggggggggcggctggagatttttctccaagaccggggggcccaaaccaggggataagggccagggggaaaaggatgaacccggccccggggaaaaccccagggggc

SEQ ID NO: 372942 - DNA, 290 bp, Zea mays
gggccccttaaaaagggacgggacgataaaaaaaaaccaaaaaagaactctaccgggggggaaagcaaattagtttggaccacaggggggacaggtttcagggggctgaccccgccgggggttgcagcatcccatcaaaggcaaaggccgtcctgtagggtgaccagaacttcccaactttagaaccttgcccccggcagactatgggtagaacaagggaccgctttactggagatgggggaagcacccgaccatttatttgctcaagggtagccgaaaccgcccggggg

SEQ ID NO: 372943 - DNA, 358 bp, Zea mays
  unsure (1)..(358): unsure at all n locations
acgacgcagtaatccatccactacgctgcgatgcaagaaaaatacacagagctactcagtccatgtagcccaaactcgcacgctcccagaaccagcaaaaaattgcatcgcatctcggctcacagggtcaataacaccagaaacaacaacacgacgacgtgacgatgcaccaaaccatccagtgtcccggcagcctcgtagccccgacaggcaccgctcctgggcctggccctcgtcacagccacgccgccagaccggtacgcgacgccggcgttccaccccgcaggtatggcgttgctggcgacgagcgccctgccagagctgaaggtgggcngatgttgaaggggccctggaggac

SEQ ID NO: 372944 - DNA, 511 bp, Zea mays
  unsure (1)..(511): unsure at all n locations
attgcaaaatccggcagcacctccctttaaagtagcataacaagtgaagcatagagtttatacaggatataaaagaaagataattgacatagtataatcgaattgcaacggtagaaatgaacattcatgactagacaaaagatagacaactcagcccaccaaactaaacagttcaactaccatgaaagattagaatgtaataatcccctaaacttgaccctccctgtttaacatcatntattaagtggtggttcctttatttaaaagtgtggtggtcgtgctgctacatcccttctttcccaaagcaaagatcaagtgcctgcatcagacaatgcaagagtgagatgacacatctcagcaagtaaaaaaacaaacaacatttggataatgtaaaccaaccgtgcataagcaaccacatggttcccaactttnttcttaaatattaatttgcagcaagtaagcaagtaatcaattactcaatgccaagatgaattacaaagtaaagatccac

SEQ ID NO: 372945 - DNA, 263 bp, Zea mays
gtcctttttttttttttttttttttttttatttttcgcaggcgggcgatgatcattgtaattttgagctgaatgaaaagcaaacaatgtaggatcggggaagcctatacatcgcactacccgagccaacgtagatgaagtaggctgattattagagatggcgagagatagggcgatggtcgaccgcgagcgcgcggggaaagtctcctggacgcgcgcggaagccaccgatgcaggaccggctaggcgcttccaactcgaagg

SEQ ID NO: 372946 - DNA, 204 bp, Zea mays
ggggaggggaatataaaccctttttgcaccgggctttgttttaactcccaaaaaaaaatgggggattttcgacagaagaaaaccttaccccaacaccgggtgggcccaaaacattaacaacccaggcaccgggtttcagcgaattcaccaaaccctaacaaaaagaaacggtttccaaacaaaacggtttaaaacttagctggg

SEQ ID NO: 372947 - DNA, 473 bp, Zea mays
tcgcgatctagagcagggcaaaagatctggtcgccgtctttatcgtcaccagcgtgcccagccgagcggctcccacgcgctcctctccctccctcatctccctcctctgccggcgtcttctccctaccctcggccatggcgcttgtcgtcgcgccctgctctctgtcccacgcgcgtccctgcttcagcgccctctcctccctgccctggagctcgccccatctcccatggccgcccctccctgctgcagcttgacgccccccctacagcaggccagccatggcgccctcacctccagtcgcctctcattgctccaccccttcccatggccgcctgcagcttcaccatggtgagctcgccctccctcaaaccctagccgagtttttccatggtgccctagacaccagctcccactcttgctgtctcccatggctaagcacctccctggtggctgagcatggcccctacactcg

SEQ ID NO: 372948 - DNA, 331 bp, Zea mays
atatcatgcattcattcattttttcttctactttcccctctccagctacctagatagatacattttttttttaatttcgagacaaaaactacatatgatacataataacctatagcacgtctcaatggcccttgtggagggaatcacaaagcccaaatgcaacgaatacccggcctcacatcaaatcaaatgaaacaaaccctgccaagaaccgaccggcttcatccaggatctagctaatgtggtagcagtaatacagcaagcttttgctatctcctccggtgctgatcgtacgatcttcggctatggctcgggctgtagtaaggatcct

SEQ ID NO: 372949 - DNA, 157 bp, Zea mays
cgacccacaaacgaaagggcctcttattaactcacttattccagagaacaaagttccatctgggacctaggactaacacaaaaatgaaaggcgcccgcttttgttcaatgcttgtaagccagtttcttgagaacattgccgaggaaagcctaggcct

SEQ ID NO: 372950 - DNA, 261 bp, Zea mays
gaggaaagccctggccatttttaaaggcccccaacggggggccccttaaaaaaggtaaagggaaaccccaaaaggggttttgaaccgggggtgaaccaaactgggattatggaacaacaaacaaaaagggggacagggccccgggggaaccaaaaacgagggggggatccattaatttttaccggttggggggccaaaaccgaaagacccttaagggggaaaggaaaaggggtcctaagaagaggcaaaaccagggggggg

SEQ ID NO: 372951 - DNA, 218 bp, Zea mays
gggggaggaacaaaaaaaaacagggcttggagggaccaaacctatccatagggggagggtttatcaatttttatgatgatgattccatctattagggtagcctgccctccaaggggttgtggcagccaagacaaacctatccggggggattattttcctgggaaacagggcttggaggaggagccctaacttggtctgatttgctggggggcttggaa

SEQ ID NO: 372952 - DNA, 236 bp, Zea mays
gtagcatctttacctttaagcatgcacagtgtccatgtcaaacatcatactacccaaccaacaaaaacagctaggctgactgaaacgagggaggatctgactgaggtttctgattacagggaggatacgacaccttacgcacgcctgacctctgcctgggaacacctgaatccacacttccgaaagccggggcgctgcatcacggggaaggagttgtgctgaccatggtctaccac

SEQ ID NO: 372953 - DNA, 239 bp, Zea mays
accttctagtattcacaatgtccatgtcaaacatcatactacccaaccaacgaaagcaactaggctgactgtaacgtgggcggatctgactgagtttcctgattacagggaggataaaacacattccgaaagcctgtcctctgcctgtgaaaaccagagtccacacttccgaaagcaggggggctgaatcaaggggaaggatttgtgcttaccatgatcgaccactgggctctgaacct

SEQ ID NO: 372954 - DNA, 454 bp, Zea mays
ggtaaaattgacagatcaagtaagttctgacaatcagagttttacatctttatctatgtgtgcaaactgaatcgaacttccatgcagtgtgaaaagttacagactaaagcctcgatagggagccagtaagggcgccacatgttctagttaatatataaaggagagactataaaatagctcttccttttttcaatctggtgcaagacaccccgtgaagaacacaggggcagtccgacgcagagcccaccacagattcttgtcgtgcaacagtttgctgaaccaatgtcatcccactctctgctagtgacaaccaagattcagtaccattttcgcaagtcctaggcttcaatcttccaaacctgtcaacaggatagggatcaattctgaacacatgtttgtttacttcaccaggacaagaatttctgtttagactagcttttaccctacatagatg

SEQ ID NO: 372955 - DNA, 383 bp, Zea mays
gctaagaataccatgccatgtctatgcattagcatctacgtacattattctaaacttcatgcatcttagtaaaaagcaacccacatgtactgcaactgacttcaatcgtggtggaagactgtatctgtatgggctctttcatgggaaagacgagtaggaaattaggaacgtctatacaaatgactcccgtattgagaatcttgctgccttggccaaaaaagtaatgaactcatccttgcagcagaaaacaatggctgccatagcttaaattcgatatgcaagagggcgcgcagtgtcactctgcttttaggcataggtcgaacatcaaattgggaatttcttgaatgtagcttcccttccatggcctcctttttcaattgaca

SEQ ID NO: 372956 - DNA, 68 bp, Zea mays
aactatattctggacagcttatatttacgtcctttagtttacacgttatatgtacacggacccgtggg

SEQ ID NO: 372957 - DNA, 258 bp, Zea mays
ttccttttttttttttttttttttttttttttttactttgggacgatttcttttaggtccaatctaacccactttgattcagcttcatttaaaggaacgccaaacacaggggggtattcttggatcccagatacgcaacacacccacaggggcagaccctgggattgcaacactacgggagaaaaggggcttcggggctataagaaaactgaaacggggaacacaagggggagagaaactagggaaaccgctaacaac

SEQ ID NO: 372958 - DNA, 250 bp, Zea mays
  unsure (1)..(250): unsure at all n locations
tttctttttttttttttttttttttttttnnttaactcaaggacgacaacagtatttgaccttagaaaacgctgtccgccaccatggcatgcacgtcggccggtggcagggcagctacacaaaagaagaaagaggtacgccacacacgcacgcacacatacgggtgggtcaatacaaccaaaaattaacaacgaagaacgatcgacggtacgcgatctggacatacacgtgtacaggttttatttttttt

SEQ ID NO: 372959 - DNA, 270 bp, Zea mays
ttcttttttttttattttcttttttttctcaatccctaagggaggggttcatttaaattactcccatgtcgtccgaaaacacacaaaattgaccaacaatggagccacagaagctttcactggccaaaccagtagaattatgttcctcattaggcccatatgaacaagggttgcttccagaattgattcagcggcggcgccatttgagatcagaccgacgggaagaacttgttcagattgaacggcagcgagtagaactcttggctcctc

SEQ ID NO: 372960 - DNA, 138 bp, Zea mays
aaggctaaaagttacaagtcgaacactgcactaccagaaaaggagtaacaaaccactaccgccttccatgccacgctacatccggctaaaaggaggaatggcttgccaaactaaacaaagggaccgactccaaccccg

SEQ ID NO: 372961 - DNA, 333 bp, Zea mays
gacagctaaacttggcggattgtatttaacttattcccacagctacagctgaccattacaaccagtgaacaccactggggctctcctctctgctacgctccaggtagattcacttattattcgggaagatcattgaggttaaccctggacattcgaattcccgcgcgtagactcgcacgcctgcctgaccgcgtcccaaaatgcaggcaccgcctccgagttgggaacctctttgaacgacggcaggtagttcaggtccactctgacatggcctccggtgccttcttggacgacgacatcgaatccaaatactgtaagcccaagcagcccctt

SEQ ID NO: 372962 - DNA, 273 bp, Zea mays
ctaaaaaaacttgtcaccactatatctttacagcaaaattactccatctacgaaccatctcaacaaaaatgtaaattccatgtacttgccaataaaccaaaaatattgtcaccttcacttttgcagcataacgaatacatataagaatcacctcctaattgacttatgataccttccagtcgaaagaagaatacaacaaaaccaacggatccatattagtagcagacagctgctggcccgcctgctgcaaacaccagttgccaagacacaagg

SEQ ID NO: 372963 - DNA, 159 bp, Zea mays
gggaacccacacggggggcaacaggggaaaaaaaacaaggggcaaaattaatttgggcggccccctgggcaagggatctgaaaagaaaacccgcccctcaaaaaacattggaaaaagccccccggttatggacatttccccaccaacccgggccggggc

SEQ ID NO: 372964 - DNA, 226 bp, Zea mays
ttcggaaaaggaaccttgattccatatggattacgaaaacctcctgatgaacgaggtgtaacacatataaatatgataccgcgatcacgcaaagcaaaatccgtttgttgcacacccattgcaaatactcaacagtaaaaggcagaaagaacctgctaagcaaaagctaaaacggaaatcctcgaagcatacaaatgtgttgaatatgaaggtatttttcacttta

SEQ ID NO: 372965 - DNA, 432 bp, Zea mays
ctttcgtttccgcccacgcgtccgcccacgcgtccgcccacgcgttcggaattccacaacatgagtctccaacactggatcatggacttttggttgatccagctggtgcaattccgtatttatctacagattctccgcccttcatgaatgatcaaatcacctgcaatgttataaaatctgcttcagctagtccagaatcttgtacaaaacaacctcaagaacctcttaatatagaatctgatgtacagaatgacgcagctgaacaaaatgttcacaatagtaactctgaagaacagatcacttctctgggctgtgatgtacagcagaacacagaagtaattgatgaactgttgccttcaaagcttcctgaaagcagcggtaatgatatatcaaactttcaaccggacactatatattctgatgcctaccatg

SEQ ID NO: 372966 - DNA, 380 bp, Zea mays
tttgtttagcagagctccacacctccacctaggacacccgcttgccagagtggaggacgagctcctcccgtgccttcgccagctatgtgctccgagctccgccgcctgtctccctaggccacagggaggttgtgtgggggttgcatctgacaacgccaaggcaccgtcgagaccgagcagagctctgtgccttcaccaggtcgcccacccgtccaagtggaggacgagctcctcctcaacagccagtaggccgagctcctccccgcggacccaccctcagccaagatccatagcccgctccgagccagcgcgccgcgagctccaccgaggcaccgatcctatctctgccccatgtcttcagggggaggggcctgaacctg

SEQ ID NO: 372967 - DNA, 408 bp, Zea mays
cctatcgtgtccggtgctccctccgcgcccgcccacggatctacaacagcgagcgccgccgccgccgcctcgcctcggcaaacccggctccagggcgacagctcccgccagtgggacctcgtgttcagcgtcgtgaagccgtccgtgatccagctgcgggggcccaccaaggtcagcgtcttcatcgccagcaacgacaccgagcaggcctgcgacttcaggatcaccggcatctaccacgacggcgcctgcgccgtctccctcggtgactccgacatcgtcatcaccaaggtactctgcatgtgtgtgaagccgtctccgcctccaccaccctcggtatggacaatcgattcctcttcatctccctctcgttgcgtcgtcttctggtgcgatgtgggatcgtcgatg

SEQ ID NO: 372968 - DNA, 319 bp, Zea mays
attgtttagggtatggctatggaggcaatgctggctttgggtctagttttggtggtggttatggtggatccatacggaaaataagcgacgagtttaaactatttttctgggtctcaggtgttcctcttctagaagttcagatttcatggcatgtccatctaaacagtgggcattggaacgtagttgggtctaattaagtcaccgtgagaactgtgtaattgctgcagctgagcctccctgcctgccttgtttgcagtacaagctacacataaaacctgtgttgtattctttagtttggtatatgcagagtttagaaccc

SEQ ID NO: 372969 - DNA, 328 bp, Zea mays
ccatcaaaacaaggtgcaatgacttatgagcacatgcatttctaccaggggtacaactaaaattgttcacattacaacacagaaacctgaatccaagcaattgcatttaaaagctagacgagaacgatgacagccagataaaaggtacgtaaaagggtaaattacaaagtatggtatggcactatttatcttccttgtgacaatgtaaccccgtcacgatccgcagaaagctgatttttgtgacgctgaaacctaaccaccctcaggtctgttgatactgatcgtgcgatcctctggctttgaatcagattcagcaagcctttgcttg

SEQ ID NO: 372970 - DNA, 405 bp, Zea mays
tttcttacgcgtccggtggctagaaggtaatcattgttcgtgaataagattatcactacaagattgcggacacaatgttgatatttttgcccttgtctttcaatttttgtgatgagtgactatctacggagtagcgacttatgcttgaattgggtggactaactggagcagatatcgtacgacgcatccatatctcttgttttatggtgtgcagatatggagtgtagagatactacttgacgatgaacgtgaaagtcatgcgatttttatgcgggtggagtggaagcgctgaagaacgagtgttgagacttgaccgaggggctacataagtcaagtcactagttgcagtgggtaacacctaaggacacctataggcgtggaaatatgacggagttgtttgtgtta

SEQ ID NO: 372971 - DNA, 466 bp, Zea mays
  unsure (1)..(466): unsure at all n locations
cctatcttgtccgaaactcctcgccgccggttttctcaaattgtcaatttgagaaaacctctagacccggatccgccgcttcctcgaactcctcgccgccggctctcctcagctccgccgactcgcttcgctatcctcctcgccccaggccccagcctcctcctgatcccagattcgcctcgtcggccccaggcgcccgccacgagcgccgtcaagcgaagccgttcttccctggcgtgcgccgctggcgtagctgccaggctccttccgccggagcacgtcgcggccagctggtcccgcgctcgtcctccaccgtcgtcgcggcggactttgtccccctcccggaagcacagatccgcacggtctcggctgcatttctccacttgctggtaaggaagctcgctccgatggattactccgaggggttagtccgcctgggtcttcgttctacgctgncagcaatcaa

SEQ ID NO: 372972 - DNA, 455 bp, Zea mays
  unsure (1)..(455): unsure at all n locations
cctacgtgtccggttttgtggtggttcatttattacatcaagtattaatccctcttatttataaatgtgttaatagcttggataattagttgtcaagttgtacatttggctgctaattctgcacaaatctatatctgttatgaacttgcattactaatttatatatggtagttgctatagttttaatgtgatcgatttgtaatggtatgtggtcgtatagttaggaaagtttaattacatattttccatggcggtttacatttgtagatataattggcatcctgaatctctgagttgttcgacactttaccttcttggtttcttagatcgtattatctacccaaaccccttagattgcattattattacttgatttgctttcttggttccttatactatactatcttgctctgcacttttggttggtattgcatactgataatattngatatatc

SEQ ID NO: 372973 - DNA, 393 bp, Zea mays
cgaatcggaatcggttttcaccgtatactgaaccgaaataccaaaaaaccgaatatcaaactttatgaattcaaaattttaactatttgattatgtaaactaaatgtgtgatgcaatcaaatttttattcacttatttgtatgggatgtatgatatatcttgaaatgtttatacctatataatttttacttttaaaattatgtgtaatgggttgtcttgtagccttcttaagtataagtttggtattcggtttttaccaaaaaaccggagtaaaaaactgaaaccgaacttatcggtttttcattttctagaaaaccgatcggtttctaatatttaaaaaactgaagttttttaaaaccgaaaaatcgaaaaatcgaaccgaaattccaaaaa

SEQ ID NO: 372974 - DNA, 466 bp, Zea mays
ttattcaccaccgtctgtcttgacccgcgtcgtcgtcggagtagctcgctggaagtccgacgagcagcgaggtcggatcgacgggctggctagccggatctgggaggccggtcgccgtccaccgctcctccctgctgctggcatgggcgggtgaccttgcggctgttgcggccgtggtggcagcgacggtgcccccgcgctcgcgtggccgtggctggccagcggcgtcggcgcccacacgcgcggctggcctgctgcggcggcggcgtggcttgcctgtgcttgtagcggggtgcctgggtcagggtgttggctgtcggcggatctgcagctgtcagcggcgccttctgcaggtggtgagtcgtggggctgggggtcggatcttgagcctttccggctagattcatctctccgtctctcgtttcggtctgtgatgtgggtaggggcggctggcttcatgggttgg

SEQ ID NO: 372975 - DNA, 230 bp, Zea mays
gggcaactcgactttgcattgcacgaaaaagaagagcacaggcggagcgcgggttttgacctgggctatatcccagattcccaacgttgatcctatagcttcaattcaagtaaaattctctactcatgtttctacaaaaggtcttccagccaacaacaaatttccgtacactacatactcaaaaagtcaaaaaaaaaaaaaaacgaatatgaaaaggtgacgctcagtcg

SEQ ID NO: 372976 - DNA, 277 bp, Zea mays
tttatttttttttttttttttttttttttgggttaatttgtttatggttctcaccgttagccaaagcctcggcgtgtatgaacttgttcggttgttcctccctgtgttacctgcccatcaacatggtcgtccatacttcgtttcacagtttccctcaaaaaaaaacagagcacaagaacagaatgcgaggcagcatccgcctgaacttctcagtttgaacttgatatgtttgttgccattcatctagtcagaagagtcagggtggagggtgctgagc

SEQ ID NO: 372977 - DNA, 476 bp, Zea mays
tcctacgcgtccggcaaaatggtgaactagattttccaggcgaaaacacatgaaatcaataggtgctgtgtggtcttctcttcttcatcagaaggggcaagcagctgggtgggaagtcctcttttagtgatccggtccgcatttcaagaacggttctttactgcaagccaaatggagagcttgcagcaaagaggagcccaggacttccaaattcgtttccatggagcaaagcggatggaactaaggaaaaaggtattgtaggccgactttgctagagtaagaatcgttcctagtaagcctccaaacaagctgatcagcatcattctgcttcagcgagaaaccttccatcaagtctcataagcggagatattatgtaagaacctggacagagagctcctcttatgtcagctacccaacgatgggggtacatcacttgatgatcctcttgaattccctagttgatcatttttcagttt

SEQ ID NO: 372978 - DNA, 249 bp, Zea mays
aattcgttacccacttcccgccatctgccgtccctgcactgcgcttataccctgcaggcaacagcagcgatggcggtgagggtaccggcggtcgatctcaaccagcacctctgctcggcgatcatggcacggcgctgccacggcccaggtgaagccgccctggaggcgcctctcagcgtacgcatcaaatgcagaacgccgtggcgacgcgcggaatccacgaccactaggatcctcatgaggtgctga

SEQ ID NO: 372979 - DNA, 345 bp, Zea mays
acacgtgatattcctctatgcaaggccaaaactcgaattggtttcttgctgtcaggtccttaaagttcaaaccacatgccgatggcattgcaaacaccagtagcagccttctgaaggctgattggcttacatgactcttgtcagctgccagagagtctatccgtcatgtgagccaaatgctgatgccatccaattcttatctaacctttgattgttccaagaaaggcacggacgtcaacaagctcttgcacaatatcaagcactggaggcttcaagctttgtgcgaggcactagaggtcaaagggatgatacctctcaacaactccatagcgatattcatggcca

SEQ ID NO: 372980 - DNA, 241 bp, Zea mays
gcttcatcatgctctgcgggggaaggagagagagagagcgcgaactacaccgctgatatcgcgtctggtactcgacctcgaacgaagctgcggccaggccttacgctcggtccccagctcgagccggcagatcagatccatgcaaccacgaaccggaaggaaagccggaagcctgaggggctgaacgaggaccatgagtgccaccacgggtgccctgacggttaacccgaacgcgccgccc

SEQ ID NO: 372981 - DNA, 488 bp, Zea mays
ggaatcgatgaacatcaagttgcaaatgaaaatggggagcttacccatccagcatctaagccactagtcttatctaagaaagacataacaatgaaatctaccagtaccagcaaaagtcctccaaatattgtatcaagtctagcaatatctaaatcagatgtaaatactagtgatggagaccactcacttaccaatattagccttacttcaaatgctgtagtctgccaatctaatcatgctgctggggcgaaaatattggaggatattagatccagggacactgacatggagaagctatctgttcagatatcttcagtaaaattaggtggcaatgatgagattcagattatggcaggaaatcagcgaccagatgtaatgccatgcacatctgttgatgcgcccatgaatcagaatttcgaccgagaccaatctcatctcaattttaatgagcctcttgtacctttagaaaataaggatactgttctttc

SEQ ID NO: 372982 - DNA, 121 bp, Zea mays
gcagcctgaaatgcaactaaagctcgattcaatccctgggaatgttgcaggagggcactactatggggactgcacaggctagtagtagaatgtaccttccattctgaatactactccggta

SEQ ID NO: 372983 - DNA, 199 bp, Zea mays
gggcaaatgccatgttcgttcaattgatgccgagattggatggtcttcacttttatttaaacgttatcgacgcattactcccgccaactaattggggatactcctgggatgcaacgacctcacacttgttttacacaccacgaaaaaaaaatacgaatggctggcgagctgctaggggtacaggtggattttggatgac

SEQ ID NO: 372984 - DNA, 258 bp, Zea mays
ccatgctgccgcctgcccggacggagagagccgccctcggattgcgccggtggtgctcatgagggctgatggtgctgcacgcgtagtgtctcacgccagcctctgggctgtgaggaccactgccctgcagccacatgcactatgcacacatggtctggccacactgagataccaccaaaagacatgctgaaggtgcacaacatgctggcgctaccaactgaggacaagacaccgccaacaagtgacctctgatgggac

SEQ ID NO: 372985 - DNA, 339 bp, Zea mays
cgttcgtgagctgcgtgctggaccagcgggccgcgtgcagggcgtttaacaaggatgtggcggcgaggaccgagccaataatggcggcagccggcgcgggcgagctcgagcgcgtcggctcgctgggcttactcagcgagctcctagactccgccgagctgccagccctcatcggcgccgacatcgacgaggtgatcgacttcaacggccccacgtgcacctactgcgcgccgggcacgagccacaaccacctcccggtcaagatggaggagcacgcgctgctgcacatgcagtaccagccgtcggcggccccgacgtactactactcgagccagtact

SEQ ID NO: 372986 - DNA, 462 bp, Zea mays
  unsure (1)..(462): unsure at all n locations
atttnctcgagtttctaatcggtcatctgatgctactgtttccaaatcatttcctgaagaatttgaggattcggaatctgtgaggaatcagagaataaagccagaatctctggaaggtgatctggcagttactggagaaatgaacaaagatgatgacaacgggcatttagtttcacagcaggaacatcgcttcttgagcaactcccctggttttgatattgcacaatcgtgggctaagcagcgtgtgatggcaagtggaagcagtaaaaatgatgagcttgatgctgtcgctcttcctgttggtgtaaaacttagcaaagttcagtctgatcattctccagatatgcagactgaaactcttggtgctgacacaactgttgctagtggacatgccgcctttggattatctttttctgaagttcgcttggagaaagtaatggacgcatgtagttctgcgatcac

SEQ ID NO: 372987 - DNA, 553 bp, Zea mays
gtcatgttattattgactcggtctctaaccagttgaacaagctgttcatgaaatttctgaagagaaatcctggttacagtggaaaggtttcattgtatggccactcattaggaagtgttctgtcgtatgatatactttgtcatcaagaatcccttttggccccatttccaacagagtatctgaacatggaaacatctgatcgaagtcaaggagcaaagtcagccaatgaagttgctctgcatgattcagcattgtcccatcatgtgtgctcgaggattcattaaataacccagaaactggtgtgccacgtggggcagttgttgctgagcaaaatgaaaaagaaaataggattgagaatcatcagacggtgtatactgaggaaggaacaacttcaggtgtaagcacaaaagatgctgaagcatcacacatttcaagatctgctgaggatgtccatgaagaggtccttgacaaagaaaaatgatcatttcactagaagagaggtgaaacgtttaaagctaactagatcagcttgacagcataagctttagtgact

SEQ ID NO: 372988 - DNA, 519 bp, Zea mays
  unsure (1)..(519): unsure at all n locations
cttcttacacctgaagtttacctttcggccattctgttcaagatgtttactggaaacaaacatggaagagtaaccgcacggtatacatgcctccagacttttggcctgtgacctggacagctagtgatgtttcaacagagatctggcacaacaactcgatagctgcatactgactgctgagctgtacagattacaaggagtgcaggatagacttgtttattgtacaacaaagtataacaagctcgaactgaaagttggttttgttgaaggccagagcaatgttgtcgtcgttattccagaaggcagtggtgatatttagcctagcaagccaacattttttgggttttgcaagtcattgcagaaaatttcggcttcaaacatgcagcagaatacatgggaaatgtcaatgggtaatggcataaaatctgctccttgtgctagctctaaagaagagcanngaactaaattaagatctgatagagagtagagacgcagcagctttcaagccccctagtgatc

SEQ ID NO: 372989 - DNA, 252 bp, Zea mays
gttccaagcagcattgtactcatcaatataagtacgtttctagcaagtctatttattagtagcctaagatatcgatctatcacctatagtcctatacatacatgcaaaagggtctgttgtagcaacatgtcctaggggcatgattaatatcataaaaatacattagctatgtactgcataaaggtgttcacgacatcagggttcacaaggttttccaagaatatgtttagcaatattgtcaaagcaaaatat

SEQ ID NO: 372990 - DNA, 469 bp, Zea mays
cccactcgtccgcaataaagacctcgtgtagaagaggtcagggttttatcaaaaaaaaaaaaaaaaaaaaaaaaaaaaaaaaaaaaaaaaaaaaaaaaaaaaaaaaaaaaaaaaaaaaaaaaaaaaaaaaaaaaaaaaaaaaaaaaaaaaaaaaaaaaaaaaaaaaaaaaaaggggggggcccccccaaggggaccaaagttaaccccccggggcggggaaaccaaaaccctttaaaaggggcccccaaaaaaaaaaaacggggccggggtaaaacaaccgggggcggggaaaaacccgggggtcccccaaaaaaaagcccgggaaaaaaacccccctttcacaaggggggaaaaaaaaaaaagaggcccacccaacccccccccccaacaggggccccccctgaagggaaaagggaccccccccttaaacggccacaaaaccggggggggggggggggatccccccag

SEQ ID NO: 372991 - DNA, 469 bp, Zea mays
  unsure (1)..(469): unsure at all n locations
ctgtcttgtctttgttttcctgtaaaactatgtatgatgaaaccatggtgtgattgtattggctggccttaccctgttttgtttcaatgcattcattgttgcacaagtaatatgttgaaacacaattcattgcatatggcaattctgatttttctttctagaatattgacagattgtttgatcattattttctgagcaataatcatggctattcttatagtattgcacaatacctttttcttttcgaaccctagcgcattgattctttagtgaagttattatagtgattccagcgggagagtagggtggggagcagagggttgattctggactgatttcggtggagattgaatggggagcagtgaggagcatgttttttagatcccaccagaatatgtgtgccattttgctgtttggctgaggagtgatggctcanggagaatccggtctcaggagctgtgccaaatgt

SEQ ID NO: 372992 - DNA, 233 bp, Zea mays
aaaaaacaaaagattttgggcctttggggccccccaaatttacaaaagccctgttttggggggggtttgatccattttttcagggaaacagaaaggcttttgatcctttgcgggggaaaggggggggtttcactaggataaaacctggggcccccccccttggttaaagcctagagcttttttttatctttaaaggtttccgggggtttttttttttaatgggggtaccctgg

SEQ ID NO: 372993 - DNA, 460 bp, Zea mays
gtcaaaacagatgtaattgtgtacttcttatgcaaaaaatacttgtacttctctgaaatttgcttaaacctgctgctacattctgtcctacctggtaggatttgcttaggggtctgttcggttccagggaacggcctcgatcgattccagaccagattgcttgcctaattaatataagcattgatgaactagaatgaatcctggttgaattccggaacaacccaacaggtcaaacgatgacattcagcttaggtttttgggtattccagctttattctgacgactcaatcatccagccttgcaagttaactgtcgagacgattaaaccttcattccgatccagcaccagagccctgctgagcggctgcaccacggtaggctgcagactcttctgcatagcgttgcttgtcgacctgagactgctccacatatggctgcctctcctccgctgtcatctttt

SEQ ID NO: 372994 - DNA, 329 bp, Zea mays
gttattcaggtgaaagttcactatttttctcaaactgtcagcaagtatagtttaacaaatacaatgaacaaatctgtaggaattctctttacaagctttcaatgccccattcatcctcccccatacgtaaacaacagcctctttcccaattctacactccccctccccccaaataaaaaaaacagaacttatttgtacgagagctctgtaccatgccatgaccgcgcacctactgatgactgacggcgtcgccacggtcaatggcggactgggcaccagatccacgccacgccggtcccgtcccgtgctgcgcgccagggagaacgcca

SEQ ID NO: 372995 - DNA, 203 bp, Zea mays
ggattgggagataggtatttctagctctataaatttgggtagctggggatacaccttttttttcgaaagcgcaggagaactgcgcatcattttaattagagaagaaaaaaggtccaaaatggaccaaggtacaaagccctaagcaggcttactcaaaaaacgaaaaaacccaaaacacacaccactccctagaccctgggaag

SEQ ID NO: 372996 - DNA, 289 bp, Zea mays
  unsure (1)..(289): unsure at all n locations
aggctggattattcggcatttgcaacaacgtaagctacacgagggtagattacattggccaagaagcgaaaagcagcatgaggaaactttcttatacttattttggacgggaatacagggataggaacacgagatgctcaaaaccaaacaagctatatctttaataatctccatataccttggcgncagttttggccgggttgggagcctgggagctcgccagctagtagcacacatgccgccatgtgagccgacccaaagcccgggccccggccagccggaaagggcc

SEQ ID NO: 372997 - DNA, 262 bp, Zea mays
aaaccaggttaaacacataacttgaaaaaacagttttggggaaaatatacttttggcatacaaggcactggtgttggggattaaaaaaaaagacttgaaactactggttggttgcccccaacaaagtatgggcatttaagatgtttatccacaggatctcgcattggactggccttagatcaagggggcgtttccataaaccttgaaaaacgccttataaacaggggaattcctttttttgatcaaggggcaaacattgggg

SEQ ID NO: 372998 - DNA, 327 bp, Zea mays
gggggaaaccaacaccattacttttttaaggggaagatatcatgcttacaaatcaactttttatgaggggatacttccctattactactactacattacattacattactggtactactactacactacactattctactttacactaggaattactactacattattctaactatactatactaatatctaaaagggcaggggcatttaaccactggccctgttgctgccccccctggggctgcctttgttggtgccgccaccgccgttgccgcccctgttgccgccgccgtaaccacccttgttgccgttgccgccgcccctacc

SEQ ID NO: 372999 - DNA, 246 bp, Zea mays
ttctttttttttttttttttttttttttttttttttttttttttttttttttttttttttttttttttttttttttttttttacccacccgggcatattggggttaaaaaaatcaaatacaagcctgccctgtccgggatttgtggacataattgaaacccaaccttccaccttaaacataaaactaggggggaaggccccaggttggtttttttaaaaacaaggaccaaagaaagcgggcaaaaa

SEQ ID NO: 373000 - DNA, 394 bp, Zea mays
cggacgcgtgtgcttacgcgtgggtgctcccacactgggtacaccgtgcccccgccccggctctcctcgtcgatggaaactcacccgcatcccgccattatcgcatacctcgccccctcgcggcccctccaccgtgatgctcgcccaagctcgatggaaagcgcccgcaatcacccagatcgccctcgctcccgcaatcgccctcgcgcccgcaatccccctctgcgcgcgcatggaagatggaacgaggctcaccctgtcgtgcccccgcggcctctccctcccctaccacccacgcgtgatgcccttatggccccacacccgcggcacagtgatgaccactgtatccccgccaccgacgcagagccttctccggggctgttggatctccgcg

SEQ ID NO: 373001 - DNA, 454 bp, Zea mays
cggacgcttttggcaataatcagtattaagcaataaagttcagtattgctacaattaactcttaaatgtagttttgttttacatattatatctcaagttaattctcctatccatgttgtcttgtatttttgcgttgaagagatggaatgttggtagagagaacatgcagagaggtacaaattgaggttcatcgagatagatttgaaggatttttatttcagtgaaaattgatgctgaccagtcacttttttgttttggacaggactgcaattcattggtaggaatttctctgttgctgtgtacgaacaagtcaattctcctataggtttcaacatcacctttactggtttgcttagcctcgccaccgatatatgtttagaatttcatataataaaaactaatttctgtgggattcgtcacggctattccattattcagttagtaaggtatatac

SEQ ID NO: 373002 - DNA, 536 bp, Zea mays
cccacgtgtttgctggcctttgcaaaagcgcccttcagctcccggaccgcttcccctgagctgctgcccaagaacttcgacaccacttgcccaccctccctggattcttgcggctcttcctcgagctcatcgaatccttcatggagagcgccgagggaccgtccccgtactccggtgatcgagcggcaccggttcaggatggcaatggccaaactacacctgggcataattcgcgaaggccaaacctttctttgcaaataccagctaggaccttggataccaatataccttcatcgacaagagttactatatcctgcagccccagttcaacgagagtgggtttgccaccgagacctaattcgacgagaacaaaatcatctatcaagaacatgaatcctcagcacagtttcagagcaaggagttcagcccaagaaggtgatcgagtggtccttctaaatcctgggacgtcatctgaagggcagcaggataatccaagcacagcaagatcattttcttttagaaggtcattaactcat

SEQ ID NO: 373003 - DNA, 370 bp, Zea mays
  unsure (1)..(370): unsure at all n locations
ttctgaacatttttgttcaaataactcttttaggctatctccaacagatcctctatctcatctcctatttcaaactattttgcgtcccctattttacactacactggagacagtcttcagtgatgtaattcaaatctgaggagcatgacttgtttgggtttggacaccagggttggcgctaactcaaaaggtggtcaatttgtgagtaatgtactgttcttgacagtttctgacctcgatttgtctattgtaactgaataggctgaattgatgctgatagatacattttgcctgctacaacactgacattctgatttttaagttcctcgtttgagaaaataataatattgatgcaaattttggctcnnna

SEQ ID NO: 373004 - DNA, 465 bp, Zea mays
gcgaccacctccactcttacgtctcccaccaccgccgagcgcgagccctagcccgatctagccggcggtaggcaccagatcccgccgcccgcggcgtcccgggacgcgccccgccgaatccgccgctcctcgcactgcaacacgcccggaccacggtaagtttgccgcgctggttgagctcgaccaggccctcctgctaccttcctcgcattgggctggggggtgctccggagacggttttgccctgcataggcttcacctgcataagtttgtttcggtttttgcgtgaattatcgaggtggttttggcttgtgcgtttggtttcgttcgtttgggggttggccgtgcctgggtttggattcggaacgcggtgcgtgttgatgctgggggccgaatctacatgctacatgacctattaaacggctgtcactagtcccgatccccgatcccatcggctcctagcag

SEQ ID NO: 373005 - DNA, 232 bp, Zea mays
attgcaaacgacaaaccagctgaaatgcattcaggtgagcaaatgcccatcataccatatcgtaactttcagttgctacaattctagaggagatttggatcctcacgactcacaggtcccaatagagttccataaccaacccgaatgagccatagcaaagcatggactcgctctcttacaggaactaatgtatcgctgttcctagaatttctacagctgagacacgaacaat

SEQ ID NO: 373006 - DNA, 492 bp, Zea mays
cccacgcgtttttctacattctcctccactactcgaccaaacacaccataaatgtacgggaacttgagatcacacaacagcattcccattattcttcttgtaggaaaaaagatcttcacttttcggtaaccactgaggcccttttccagattcaatgggctgtggtcttgtactcttgtctgaaaaatctaagaagatctgaacactttagaactggaccctttgtgacaatcaacctccttgttgtgcatgatcaacaacttggttatgggattgaactgacaaaatgtttttaagttctgttggagtgagtcaattttttagcggtattaagctgatagataattactgatcaagaagatcaaagataagcttacaaataaatatattctagttgaaagaccctacttgatggaatttcaacagaaatagaaaaccggcacaacaatcaagctgatgccacttgcccaaatattcataccaatttaacac

SEQ ID NO: 373007 - DNA, 344 bp, Zea mays
gaacaatggtttctgggctaggatgtggggcttcaccaatgtcgggatgcttgttgtgtacttgaaatcagcggggtgctcagagactgtggcggggctcatgcgtaagggtcaccggaacatccattacatgctgctcagctatgagggtgtatctggagacagatcgagcatgtagtgatcaagtactatctacttgaggacgcttgcactagagggcagatgttgaagggatcgaacacttgccgttgcaagagtacatatgccttacctgacgcccgtatcggctgaaggatactaagcgaggggaagggttcgatacctcatgcttgtggtaaggagca

SEQ ID NO: 373008 - DNA, 473 bp, Zea mays
cccacgcgttttttcacgcgtccgcctacttgccttgcgaatttatcaggctaatgaatgaggaagagaaggaatctgactcacgaattcaagatgcttttttttctccttttccttttacacttttgctttctaagtctagttaggcaatttatatcctgtataagaccaacccaccttgtgaacttatcaggcaaatgaggaacagagattccgcgatgaaatccagggagaggaagaagtcgtacataaaggacttggagacaaagagcaagcacttggaggcagagtgccgtcgcctcagctacgcacttcagtgctacgcagctgagaacatggcactgcgccagagcttgctgaaggataggcctcttggtgctcccacagccacgcaagagtctgccgtactcacggaaaccctgccgctggtttccctgctttggctggtgagcatcgtctgcctgttcctgatg

SEQ ID NO: 373009 - DNA, 366 bp, Zea mays
cgggcgcgttttttgacgcgtgggctaccgctccggcgaggcgcacaactgtctgacgatcacgaacgcccgcgggccgggccatcacccgactccgtcgacgctgttgcaacaacaacaggatcagtcacacaaggactagatgctgaaggagctggccttgaacacattcatgctgaacgagatcggcaaccgcatcaggctccacctgaagggcatgagcgtgcccccagtcaacaagtaggcccagctgatctactcgatcctgagagggattgactactgggcctcacatggcgatattcctatgacagactgtgacatacccgagattctgagaaaggtatatgagctgaaggaagaaac

SEQ ID NO: 373010 - DNA, 419 bp, Zea mays
gaagccagtttggttgctgcggcccacagtacctgccacgacccataagccggtgacttcgccccgtgcagatgatcacggcaggggtgcttcatcaacaaaccgttcatcgggacgagatcgcgatcggagctcccaactgtcctcgtctcggaggggttcaagctctagtggttcaaggaggaatgatcgcgatggtacagggaaatcaagaggctatggtaattttggaaagcacagccaggataggatacaagaaaaggacttggattttcgtgaacgggagagtaggtttggttcacccagatgatccctttacgtgacggcttttgagtcctttagctcatgcagatctgaaaaggacaggcctaacccgtactcgttcaaaggtggccataccaaatcgggcaggagtaagt

SEQ ID NO: 373011 - DNA, 434 bp, Zea mays
  unsure (1)..(434): unsure at all n locations
acataattgtttcaaacatattccatacatatagtccatatatagtccatacataaacaaagtcattccctccagaaccataaacaaagtctatacatatccatacatagtccataaacaaagtcactactcactccggcgggctatgtgagttttggccactccctcctccgccaccaggaaggtggccactccctccagaaccatggacgaggaagtcttggacgttgacagcaccctccgatccctgagcatgtgacgctgaaccctgtgatccatggtgaggggagngttgtgcatgcatccacgggtactgttgtgctggccacccctgagggggtggcacccaccccgtcggtggcggtgccatccacgcttgaaatggttgagagcccgccggtggctggaagaccggtggcacccatcccgggact

SEQ ID NO: 373012 - DNA, 390 bp, Zea mays
cccacgcgtcctttctgctgttccaatcacccggccaagattccctagccttcggatctcgctagtctccttccccttgttccgctcgcgcgccgtggtgggccccggagcgtcaggaccttctgccacccggtaacaaaactgtgcgggtggagcgtgcgggatcttgccaacggaccgtgcgaattgccgaaatcttcgatccaagcctttcggactcgcccatccatgggactatataatccagagccccctagctatcttcatcacgggtatacaccaggaaccgagagctcgcgcaaggagaaaaaaaaaacagtgaggtgcccgacctccaccaccgccgtagctgcctctggtctgggcgcgagtcggatgctggtaaagtag

SEQ ID NO: 373013 - DNA, 252 bp, Zea mays
gggaaccaactgatgcaccacttccgtttgctgagagggttgggggaatttttcccggaggggggggcacaaatttgctcattttgcttggtaaacccgcagggttggcagggtcgcgcttattttgctagctagatgggcataaataaaaatttacttactactagctccaaggccggatttatttgaatagcctcagtttatttattaccatgcgctaattttaccgcaattatttgcaggaggggatca

SEQ ID NO: 373014 - DNA, 495 bp, Zea mays
  unsure (1)..(495): unsure at all n locations
cttcaatgagttgctcgtctgagcccgagctaacgagctcaccggcgggcaggatgctggcggcgtccaccaaggtcggctctaggctggcctctccgcacgcctacttgtccgccggtgctgcggcggcggcgctggctagctcccccgtgctgggctctgggatgctcccaggcgccgggttcggcgagacggggagtcaccacgcggnggacgcgccgccaccgctgccttgcagttcctcgggcgattcaagggaatattatcagtggaagagactggtgaatcaaaggcagtcaatgctagatggaggcaaagtgcctgctgcattgggccaccatgtttttggtgcgggctgttcctcacggaaccaacatatctacagatatttttcatcttctcatcaagggagcaaggttctacatgacctgccaggatatgtaaaaattgtggaagtagggccacgagatggtctacagaatgagaaggacatcg

SEQ ID NO: 373015 - DNA, 272 bp, Zea mays
ttcttttttttttttttttttttttttttttttttttttttttttttttttttttttttaaaaaaaaagggaccaacgatgtcattcagacagcaatgcaacagacattgcacccaaatgggcgttataccggagcattccagacattcaagtccccctatatttggaaaccattactttagcaaatcccacaaacagaagttaaaggggccccagctttgcctggggaggattttttatgttgcagcaaaaaaaggatacattccccgttt

SEQ ID NO: 373016 - DNA, 346 bp, Zea mays
ttccttttttttttttttttttgcacctatccattatagaagacattaaaagtgatactatatatagaagaagatgtacactaaggccatagatacggtggcagaagacgacgccaacacacatgcgccttgttttggggtaacaaaatggagcccctatgcacacaatttaagaggagccctccactcacaaggtaccacaggtgaaggcacaaaagaaagctcaaaagggaaaagcaggcaagactttttcttttcacacaccaccactaaaaactgatcaaatgacttcttcactctccccttagcacaaattactgggaccagctgtacaacatggggttaa

SEQ ID NO: 373017 - DNA, 329 bp, Zea mays
ctcaggttctcgtgctgtgtgcatattatcagcttcgatctggcacttaaccaacaagggaaaatgcgatgccaactatgttcaggaacacagtgtggaatcctgaggctccaaacaagatgaaggagtttgtttctacgcctaatctagtgtagtgtggatcctgtgtcgaagtattattgggtacagcacatggaagcaacaaaagcaacgatctctcacacggtaaccaaacgtcgcctgttccaaatgatatgcgagctgcaaacaaaactctggatataagaatgcgatctgctctgggaatggactaggacaggtactttaca

SEQ ID NO: 373018 - DNA, 401 bp, Zea mays
  unsure (1)..(401): unsure at all n locations
tctatttctactctactccctcccgtgagtgagtgagctggagccaagctagccgagcgagtgatggcatggggagcttgcactgctgcggcagctgatctccttctgctcctcctactcgccgccgccgcatcaggtggtaacggcggcgtgcattgacttgaccttgaccttgaggaggggaggcggcaccacctgagcaggagagccttgcaagggaggcagaggcggcaccacctgaggtcaaaggcggtgggtggcgccacggtgctcgagctgaggcaccacagtttcagccctgcgccggccaacagcaaggaggaggaggcggacgctctactgttcgacgacgccgngcgcgtctagtcgctgcatgggcacatagagcactaccggctgac

SEQ ID NO: 373019 - DNA, 101 bp, Zea mays
gccaggttctcgggacctcgggatatcacaagcatcgagcagcacctcacacaacacgggacaacacgcagccacctatgcttaggaacacaatctggcat

SEQ ID NO: 373020 - DNA, 191 bp, Zea mays
ctcactttctggggacctgagcacttcacaagaatgaagcatcacctcggacaacgcgggtcgacacgctaccgctcttgcttaggaacactatcgggcataaccagaggtgtatagcgacggcggtgcttctggagcattgcacagactgcagcttgaccactgtataggatcaatatctgatagcatac

SEQ ID NO: 373021 - DNA, 485 bp, Zea mays
cccacttgttcgcccacgcgtccgaaaattgtgattggtaagtgttgtgctgattagtgtacagctggcgggtcaatcaaaggattgttagtgataaatactatgttaatggtttgtgagaatgttaacattgaaaaatatttgtgagtgttaggtcgaatattagcatatcagatttacaagacatgatttagctaactattctattcatcctcactcctaccaaaaaatattgactaccataaaactcaactaaacatacaacttggatgatcatatccccagaaagatgatcccattcccatccaacctcgccttctaactaagcacactcttttatggctcttcagtttggctttggatttactgactcgagcaatgttcatttgcttttcttggggtagccgttttatatgtctctctaaagaatacatttggttgatgcagctcttggaacgggtgacgccagtcattctgaggaaaaa

SEQ ID NO: 373022 - DNA, 504 bp, Zea mays
aaccattttcgctctagaagaaacgaccggatccatctgcttcgactgcgttgtgtcgcgccggagctatccaatccaacaccgatgttgtgccgtgccgccgccattgggagtcaggaccacgtccgccgagtggctatggcaaggcgacgacccagcgcatgacgagcagaggagcagccgccgaccgccgtccgccgaggcaatcgccgccatcgggagtcgggaccgtgtccgccgagtggctgtggcaacgacccagcgcaggacgagcagaggagcagccgccgaccggcgttcaccgaggtaacgacacaaccatgcagtaagccttcttgtgtctggacagtaaacgcttggagggaagacttggatccatgttccatgcgtgcaaaggaaattcttaattattggttacggaaatgttgactcaattactagaaattaaaaataattggttaacgcattggttttacagtcatccgttaaaataaaataatgaaa

SEQ ID NO: 373023 - DNA, 478 bp, Zea mays
aagcttcacttctcgctgttcttctgttggggcgcacagatactcgctgaggctggcgatgcaagagcagcatggctactgtcttgggcgctctgactgtgggggacaactcgtcgctctccgagtgctgattggccacgcctcctagtgtgcatgaggggctccttaccgacgacgcgcacccaccaccccatgtacttgctgaacgtgcgtaccagacacaaaccctagctgtatcgggtgggctgtgaaatggaccaagctgcagatacctctgaactgattagtcgcatcgaggagctccagcgcgaaaaggatgaagaacaggagttctttggaactattgttaagacggattgaagggctacaatatgaaatggatgaaaaagtagatcttgttgaagtgttaactcgtcaagttgaaaatctgcagccagagcgtgatgagctcagaaaagatattgagcaattatgtatg

SEQ ID NO: 373024 - DNA, 382 bp, Zea mays
aaagggcatggaatttttattgagaatggcctaatagcacacacaagacggagtgctcgtaaaagaccaaataatttatgcaatcaacaagatcccagcgaaatccaatacaatcaaatttgtgcgctatttttttatacaaattatgttttctggtaatacatgcttgacgaagctcttgccagctgcttcctgaaaaatctgtgcgctcgcgtctgacactctgatttcactcggttatgctaaaacagatctttttttagagccagcgcaaaatcttttgaaatgcccgctttcgaaacccttgagacctctacacttttttttttcttttcaaaatgctcgtctctacgcacgtctaagtaatactgtatgtcgaagc

SEQ ID NO: 373025 - DNA, 421 bp, Zea mays
ctggttctgcattgcaagaattgttatggttatgaccacaagttccttataaccacgaaagtgaaatttagagagaaaaaatcaatctctcaaaataatcagtagctggtgcttacatcagcagcatgttctcagtgcacatggatttggaattttttatactgtatgttactataatttggtttgcatatcttcaagactgcaactagcacagtgtataaaactgctttacttggtcataatggtaacttccacaagtttggtgtatttagagagagtgcccagaatttcatcttgaccttgaaaaatgtgcaaaatatcatatagcttgtagactattatctagagctcaattaaaagatttcatgccaggttttgatttactgattctgttcattagcttttatatttcttcgacaga

SEQ ID NO: 373026 - DNA, 432 bp, Zea mays
attttatttcaaagaggcggctttgtctgttttcttatgctgaacacattgtcttgtggctttatattttattacacattgccttgtggcattctgttttattatgcatagggcactgctgctgctccagaaaggaattgcatttcatgctagcatagtgtaccattgcaatatgcccttcccattaattctgtttttgggaatgtccttgttggattacttgcatagtcacaatatatatagggaataaaaatgatgtgacatctgtaattttgtttcagtgctattttttgtgtacaacttgatatatatctgaaattaatttcttttttgaagtgatttccaaacttgaccactgtcaacgtgaatcattcttattctttcagtagtcactgcaaatagcttgaaccatggaggccttgcgtttttttc

SEQ ID NO: 373027 - DNA, 160 bp, Zea mays
cgcggttcagtacgcgagcggcgcccccatggttctcctacggtggcgttttggtgactgttttcgtgtatacaaccgcgcggagctccagcagccgcacaagcagcccaagtcggaacatcaacccgtcaaggcggggctggcgcacatgcactcgggc

SEQ ID NO: 373028 - DNA, 105 bp, Zea mays
actgaatagtccacaaatatttcatcccaacaaatcgtctttgccatcaaacaaccattgttttgtttggcaagatgtttttgattggtaggtgaggtgatggtg

SEQ ID NO: 373029 - DNA, 406 bp, Zea mays
cccactcgtccgcccacgcgtgcgcccgagaccaggggcaggctcgcaccaggaaccaccgacggcggccaccgcccccgcccacccgggcgatcggtccgccccctgcgcattgcggcagacctacctacctcggtgagccgtgggggaaccacccctcccaatgccaccaccttccgaccggaccggcgatttggcggtgtcctagccgccccgttcgtccaccccgcgctgttggatcgggccaccgccgccgagaaaaagaaaggtcactttttatctccttcggcccggcgggcgcgccgagctgagaaccggggccgcacacatgggctctggtggacacggctcacactgcgacagggggggcggcttccgaagcagggcgccacgggcgccacgtgac

SEQ ID NO: 373030 - DNA, 426 bp, Zea mays
cgagagttgagcgctgcaacaacatcccattctcctccctccccgaatcccaggaccgcggctccccgtcgactgcgtcgctgctccggctcccaggagcgacccgagagagaagcgtcgccggcattgcatctcacctgcctccttcccaacgatagcgccgctccttcggttccccgtcgaggctccgggatttgtcggccccgttgctccgcggccttctctctagcaccggccggtggatctagcctcgggaggctggcaggagctagcggccacgacgcgtcgtggccccgtgctctcccaacgacggcgccgctgctccagctccccatcgacgcttcgggatttgtccgccctgctgttccgcggccttcggcgcacccctgctaccccgattgtccctgccctgttctcgctctctat

SEQ ID NO: 373031 - DNA, 99 bp, Zea mays
aggggaacgagtttaacagaaaaaaaagagaggggggggtgttcccgggaaacttaactgagtgctttatatatgctttttacaaacccacgcgttcgg

SEQ ID NO: 373032 - DNA, 125 bp, Zea mays
cgctcttgtacagctacgcgcgccagcgtcagacatgctgacccggtaggcccagaggaagcacatcggtgatcgtgctccaggagcatggctcagtagtagatcagcaacctgaatccctggtt

SEQ ID NO: 373033 - DNA, 301 bp, Zea mays
cccacgtgttcgctcatacgtgatagagaccaggacttgttggggatcaggatcacgtgcatgcgtaattcctcttctcctaccatactatctcggcggccggcaacccacacattgttgttgccgctgatatgttcacacactgctgctatctatctagactacttgcaccgagacttgtatctgaggacaacggaaatagacgaaggctatgatgatctctgtttagaggcgtacacaaagaattgcgactcggcaaaactctttgatctatccaccatcgtgggaggacaacttgtat

SEQ ID NO: 373034 - DNA, 296 bp, Zea mays
gccacgctatcgccgatacaggaacaacatgttgtctctggggggctcaacgagccggatgtgtatgaaccattggatcttaccatgcagagatccttggcctcgcacctggacacgtctgcttccttatgttgacaggtgactgcagattgagagacatgcttctcgctcatagactgccaccggaggccaaccgcacgggccgtcaggaaaacctataccgagactacggacggcacgactattgacgacaaggccactgccatcgcgtggtgctacgaggacgccggtccaca

SEQ ID NO: 373035 - DNA, 341 bp, Zea mays
tcttgtccgcgagcggcctcccttcatctttttttgtgaagaattttgacttgtttaggatttaaattcacccaatatcattcgatccacatggattaagaaaaagcaaacaagccctaaatgtttactgctcaatacacatgtgaacctcacaagtaatcatcctcttcctcatggacactactgcaaaacatgttatccccggtcaattcaactccaaatatgccatctgcaatgtcctcgtcagcaaacgcagacattgtcgtagctccaagcaaactggttctagttccaacaatatcgtcaacaacatgatcaaagtcacctgcatcccaatcccc

SEQ ID NO: 373036 - DNA, 376 bp, Zea mays
atagttttttaactggattgacgtgggatcgctccatgcacatattcaatgcaaatgatgaggagggccatcactggaatacaagcaaactacgctggtggtctaggggacttgtatgtgatacatcttcctacatgggggatacttatatgacagacattactccaagatacatactaacgaaggctacctacaggttaaagcagcattgcaaaaaggaaggaccaggtagactatatatacctgctgctatatagcaagatcacatagggtccgaggggacctggacgacatatgctgccacattgcttcacctaaatccatcgtctgtgcaagatccatcaaactgactgatggcgtataagacgactaaatg

SEQ ID NO: 373037 - DNA, 221 bp, Zea mays
ctttctcgtgggaaaaaggagaggcccgcgactgtggtgtgatagtgggaagatgcctcgtgttggctcacaggcggcgccctcaccggagcgcggcgagatggacgaggtggtagaggcggaccctgatacggaggcggaggatcaggaagagagggggcagaggctgctgccagagctgctctccaacctggtgcggcgcgtacaggcgtcctgaggca

SEQ ID NO: 373038 - DNA, 250 bp, Zea mays
gcacttagagagtagttcattcctcctcagaagctgctcgagtacatgctgcttcagtacccaaaaacaatggcgaattcctcgcgagagctaccaaaaagagaacccctcgcaaatcgaccgcagcagtctcgttctcaggctctccagtgcgctaagcaggggggaaactaaacctctcaagcacgaatgttctgcaatggtttcatcactacctcatggactctagggggttccaaaattattcacg

SEQ ID NO: 373039 - DNA, 447 bp, Zea mays
gcgccatccaatgttatcgccagctcactttgcatagaaatttctcaaatacacgcaccacggcagagtcttccaagctacaatatacagttgcgaacgaactacagcaaatgacaaggtctcaagagaagccgagttgcatttccagccattcctgtttgaagtacagtagtaatcagtggtaattacaaatccaacacgtcaaaacccggtaagaaacagcacaaggtcattgttggcaaccatcaatcttgctgacatctcaaggctcgggcttgttgtcttccttatcattagaggttgcgtcgtcaggggcttgtttgctccccttgcagatacagcagcatgcaaagaattctcccaatggacgtttaggaacaggaataagcttccccacgaatgccagcggccagccgaagaaagcaagacctatagataccaaccaca

SEQ ID NO: 373040 - DNA, 279 bp, Zea mays
ccctcctgtgggccggtgccccgtctatgccttggggtataaatgccgacgctttcctcttgcctcatgaaatcaatcctcttctagtctggatccgagcccccgagtggcttacatatcagatgcttggtccgaacaacgacggcgagtcttgcttgcgagttgattgttcgaatatgcatggttttgttttcgtgatgacgtgcaggttccgaacagttctcgttgattgatgagttgacgcatcgggtctaggcgaggcgaggcaaaacggccttt

SEQ ID NO: 373041 - DNA, 272 bp, Zea mays
cgcgtgggctggctgcggcggcggcgtggacatgggcgccgcggcgcggtcggctttggcgtccaacggccgtgcggcgaacgaggccttgagcttcgtggtgttactgctgctggacgcgctggaggcgctgctgtgcgtggcgttcaggtggcggactacgtggcggagggcgcgtggcggccctgctactgcgcgcgcccgttcccggcgtcgtcgttggggcccgcaggtgggaagatcgtcatgttggagcggggaggctccaaggt

SEQ ID NO: 373042 - DNA, 427 bp, Zea mays
  unsure (1)..(427): unsure at all n locations
gacgagcaaaatataagaaatattttgatacatctctggtatttttaaaaacacattatcgcacatttaacctcataattctttatacatccaaacaaacaaaggacaccagatgcagtttctgcagtagagtctcttctttgccccaccagcacaaggttcatttcatatgaaaaactgaaagtggcaacaaataactttcaggcgtgattatagaaaaagttgacggcaacatagatttcaggcatgtaagcttcaaatacccatcccgcccagacatccaagtgctcagcaactttactttggccattccatcaagaaaggtactgtttgcttgatgcttgtcatcgttaattcataagttgtttgactggaggtggagggggtgnttagttattcattgatcattgggagtaacagggatgag

SEQ ID NO: 373043 - DNA, 334 bp, Zea mays
tcaagccgttgtgtcctctccctctcctctttgccttgtcatcgtcggagctagccgacgggatgctcgcacaactcacggtgatggtggcggcggggcgatttggccgaccgccatgtcacctctgctccttccgcgttggcgagggagagtgcctgacggcggctatacctgctcgcgtggttggcccgcggcgtcgattgcacgctcgcgtggctaagttgcgacagcggcggtgcacgtgtgacgagggccgcgagggccatggcttgcggtggctttgctgctggcttcgacaggtttgggtaggcagggctggagatgaggggggggg

SEQ ID NO: 373044 - DNA, 360 bp, Zea mays
ccgcacaaaaaacaaaaatgggggcgtttgggtcaatttttttcagggggccaacccatcaacgaaagggcaggttacatgttccagactccgggggactgaaataacataacatggttgtagatggatccaatcaacctgccataaacaatttggaaggatggggggggacaagccatgtcacctgcccacataagggcctaagaattattttttatcacgcggggccagggtttttaagcttttccggtaaaggcagcccgccccccctaagaccaattttcacagaaacgcaggccatcgcccctgtttaggttagggcctcaacaagacaacttttttatgagcattgaaaaattt

SEQ ID NO: 373045 - DNA, 442 bp, Zea mays
attacaaagctcaaccaaacaaagcatgtaatggtattcattgatttaaaatccaccgctttttaccttccattgcgatactattacacatggtaaaccaaacaccaccttggttgtgagtccttcaaaaaagtagagttccaaggactcacttgtcagatactgagaatggacccaaggaggcaaggacgttcaagcaggtgacatcatgaaagcatcagcaaagcagaagtgaaacgtacaagtaggagaactggagcagtagccaaaattctcgcaggggaaacttgagcaagcctctccggctctcccacaagtccagagcccagctgcccacgatgaagccagaacagagtatagtacggaacaatggaaggagtatcagtgaaatctctgtcacgacttcgaatgcgtagccatgttcccgaagcacatcaatgca

SEQ ID NO: 373046 - DNA, 359 bp, Zea mays
gctttttcgggcgagtgaaggggaaacaggcgggcgacggcgtgatccagttcagcggcgacgcggcgcggtcgtggctggccgtcgacgagctgcacgttcaggtcgcactgtagccgcagcgtgctgctagagtgcaactcgcccgagccacagtcgtcccggcccacggcaacggagcgttcctggcttgataacaccgggatcgatccgtgcaccgttcatggtggttcgtgattgactgacgagtgacgactgactgatcctgctacgggatcgggagcccgtgcatggggcatggctgcattgagagtcatgtggagccagatgcaaaaagtgatggggagcacaaactgtgc

SEQ ID NO: 373047 - DNA, 100 bp, Zea mays
ccaacagtgaaatattctggcgattctcataggccaatacgccatcacaatgtcaaactgccatgccaacagcactgaaatgccaggaggagcactcccc

SEQ ID NO: 373048 - DNA, 381 bp, Zea mays
cagctcactcatcatagtaataaactaataatatggagagaaaaaactgcttcactagcctcgccacaatcaaataagcagttgctgctgatagaagagaaaaaaaccaacataatagagacatccacagaccacagctgtgcaattactaggcaatacaaaaaaaataagtttctaacataaaaggaagcgcatcacgctagataatctaatctaccaactaataattcaacataaattaactccggtaccaagtagacagcctaaaatttgctcactcaacacagggacttgatgtgacctggtcagggagccatcctaactctaaagtcagtgacaccagcttatgcttcgttgctccaagcttcatggggcatttcc

SEQ ID NO: 373049 - DNA, 296 bp, Zea mays
ctctttttttgaatgtctgaagtgtaattttgcagccttgcaactataaaacaaacagtgtatggtttaattattgcagttgcacagtgtgaagatttaaaattgaagtgccatgaagagatggataagaggaagaaactttataatattgttcaaagacaaaaggaaattatcagggtttttttgtcgatgccgacccttaagcaaaaatgaggtgttatcaggcctgaatgcaaatggcggaacaactaaaaagacatttaagtttgatagagtattcacgccgaaagatgatc

SEQ ID NO: 373050 - DNA, 143 bp, Zea mays
aaatgcccagacccaacaagtggaccaagaaagagactccctggaaaggggggagacctaagatagatataggtcaccaacaggcgaggaaattaagaacaagaggcaatgaaggcagaacctaaaggcacaccctggaggcc

SEQ ID NO: 373051 - DNA, 388 bp, Zea mays
aggaactaggaagagagtagcatttgttgcagttggaaatccgaaagtcacaggtgcagcctcagaaacaaaatcatcagagacgaacaagaagcaaagactagacatgatttctccttccaacatacaatctggagtgtacaacagatcgctggattgtgagactccagggaattccatactttagtatgttcaaaagttagtactgaaatactttgccccccctgcgcttgcggcgaatgcatctcaagacactgttctgaagctgagaccctttatcatttctgacaagattgttctgaagctcagaccctttatcacttcacatgttctgctggtacccatcagggcaagctgggggagtgtaacttcatcaaaggagagaaag

SEQ ID NO: 373052 - DNA, 374 bp, Zea mays
ctgcattacaccaattagaccagcttgatcgaccattcttcaaggatgatgtgatgcttgatgatgatgatactgactttggctcaagccttggacctattgtcttatgggacaggatggcagcagagtgcgaggataggaagatgctcatggtgatagcccaaagtgtgacaagtggatgcttaaggatgatgtgggtgattttgatgcaaagagtattctttactgtggggatgatgatggcgtggaggattccaaggtcattcaaagccgtgatgcattgacgattccatgggtacttgcccaaaatttgggagggtttcatgttgaagggatttacactggaacaaaatggtactgatcacccaggttaa

SEQ ID NO: 373053 - DNA, 340 bp, Zea mays
gggaatcctcgaatatatgatctgaggacagcaccaggaagtgataagaaacaataaaacttcccaggtccccttctacaaagagtgcagaaatcatgacaaggggagtgaattaagcagcgtcagtgaagagtgaataaagcacctaaaacccaatcattctctccattctaccattctatacaaaggtttggacaaggactatagctacataatgagcagaatgcttaaatacacaagaaattatcatgcatttcataagcacgctaactctcagctttgccctaattgcctctcatgaaacatttccccaagttgttcatataggtatttttgctcc

SEQ ID NO: 373054 - DNA, 275 bp, Zea mays
gctcttagtcccgcacacagacacacaaccagtgctcccgttaatacacccgtttgaagatgcacttctagatgcaaaccctggcggaaacgactactagcctgactgtgaccctggaggtcgccattgacgacaccatggacaacatccaggacaaatggacgtcaaggaaggccagccgcgagtcctgtatggtgtcatacaggttgaggaccagctcgcggtcggtggctccctcattgactacgacagccagatggagagcgcgctccacc

SEQ ID NO: 373055 - DNA, 220 bp, Zea mays
ctcttctcgtacatccacgcttgcggccaccgggccatcttttgagagtcacctcaggatgccaggctcccgctcgcggagccagacgcccgtcagtccgttagctgttaccaacagcgacgggagcagggctcgcgacttggaagacgcgagtcccccacccccctggccgattacttgatgcctacatggatccggttgttggacccctttgacgttg

SEQ ID NO: 373056 - DNA, 284 bp, Zea mays
ttttaagcgaagccccttgctgctattcgcagttgcgtatacaccgtttcacagagtgcatgcacgctcccgtgcgcggacggtaagcgggagccaaggaaaccgaagcccggttggaaagctttttccgagacgcgcgcctgcagcatcagcacgtgggggagggcgtcccactctcgaaggcgctggcgccgtgcacccgctcgtgcagaggtctagcaaagtgcactggggggggggcgatcacagaggaggtccgggatggagcggttactacgaaacgc

SEQ ID NO: 373057 - DNA, 331 bp, Zea mays
ccctcccttgggccggtgcctcgactatgccttggtgtatatatgacaacaggttcctcttgcctcatgaaatcaatccttttctagtctagatccgagcccccgagtggctttacagatcagatgcttggtcctgtcaacgacggcgagtcttgcttgggaggcacccagcccgaaatgcaatggtggcggatcgacgacgatgagcacgttccgatcagttctcgctgattgatgagttgactcatcgggtcgaagcgagacgaggcctgcatggtttttgggcctgagggtttctggtcagcgggcccaaggaaactggatgctacaa

SEQ ID NO: 373058 - DNA, 458 bp, Zea mays
aaacatggcatgaaaactacgtagtacacatcctcttgagttttgaactgggaatccagcacacttctcacctctactcctaccagactagcatgattcccagacaggcgaccagggaggctccttcctgcccacctacacctgttcaagcacgccaagattgctggctttatgtggcttcagttttcttctgttgccataaatccaaagtatagaccaacacgaagcttttcttcttcttcttcttctaaatttgattaaacttcagcatctgcatgactcttctacgtggtattagaattatttaacgtattgcgaacaataatctgctgcatctagtgataatgatagcacagccgcgcgggggtcgttccaagtggacgtaaacataacaaattcctcggttatcttgctgtgcctgccaactttcactttcttctttttttttctctacacct

SEQ ID NO: 373059 - DNA, 401 bp, Zea mays
tctttttgcgtccggtactctgcaaatgcggtattgaagctaagtatggattagttccttcggagcttggtgttggatatttttgtggacatatggtcgattacgatgaggagacgaggaaatgcagttgggagagttacgacgacaaaggagagggatgcggacaatagagtccaagagaataatgggacagaagatgcgttgtggatctcagctcgttgattcgtacattaacgatcgcatacgcgacatgcgtagggaagcaaaatctgccttttatgatagcccgaagcgtgcagagtatagggaagttcaaggcggcagatgagaagagagcacaggatgcaagggaatgggaagcgggtcaagccgagaacaagatgtggataatcttgctgatc

SEQ ID NO: 373060 - DNA, 363 bp, Zea mays
  unsure (1)..(363): unsure at all n locations
acgcggcctgcttatcctacgtctcttaccaagaacaccctgggcgagggatggttcaggttccgcggacgggcgaagccggcggatgatatggagcaccgttactaggcgggcggtctgtgccgtgtccagccgcactgagttcgatcaggaatggcgttcccacatccggcgacatgagattggtncaaggtgatcaccgaccaggggacagggatgcctctggcgctcaaggtcatctacctcgtccttggacaactagactctgaagattatgctgaacatcaacaaccaggagcttgacggagagaacatcaccgactgccatgcgcactccccttgcggtagcagtggcggcagtgg

SEQ ID NO: 373061 - DNA, 312 bp, Zea mays
ggggcatgggaatgctgcccatttatttgacatgttcaccaagggtgcaatggttaatatacccattacggtaacccaagtagctaggcaggtggcatcctctgctctggaattatttcttcgggggcgagatgggggcctacaaaaatgaagttatttccgttgggggggttaatttatccgtacaagtcccggccgaatttgtaacaaactggcttttttgcctaaaaatctggcttttttatttgcttttgcagctgcagctggggcaagtcatgctccagcacgttactaagcgccttggatgctttt

SEQ ID NO: 373062 - DNA, 430 bp, Zea mays
tttgctacctgagctcgcggacgatctcctgaagctcgacggtgacagtgccgaagaggcaggacatgacgatgctgttgtgcctgtaccgggacaaggtgttggagaagacctctgtcgagggcgtagcgacgaagcgtcaataacatgaggtcgcaccagtgcgtgtagtaggtggagagggatccagaacaactgtgacgatggagcgggtgttctagacagcagctgcctgctcgtggagattggccacctcagcggcctcgtaggtgccaatgacgtctgggatggagtggtcgctgtcctcctcagcgtccttcaattgccgctctagggtggcgagggtggccttctcctcccatgcaagctcagcagtacgctcatgggcacgagtggtggagacggccttggagagggcatcgagtagggc

SEQ ID NO: 373063 - DNA, 428 bp, Zea mays
ttccgtcgccggcaccaccctcagtccccacatggccgccgcctgccttcgccgcctccaccgcatccctcatcctgtccttaagctcgccgcagccactcactggcccttgccattccccggtgccaagttggctccggtcacacagtcgtgcccatccgccgaccgcgtcgaagtacagctgagcgcccgctgccccggttttgcaagtaatggtaacttcaaacatcgatggcatcacaagctgggttcatcagttggtgctgtactgattggacatgcagccttttttcttggtttgagcaatggctctgcatttgcccaggaagattcagttagcccagctgcagctagtgagcatgctgagggaaatgctcctggtttacaacccgattgaagatggatcagtggtctcaaacgaacacacg

SEQ ID NO: 373064 - DNA, 597 bp, Zea mays
ttctctcgtccggttctagatcgcgagcgctcaaaccctaacacgccacgcgatcccgatgcgcaggggtctgggcagcgaggcgtcgttgcgccggcggcgcgggccggcgcggctttgggtggcagtggcggcgctggtggtcggcaccgtgtgcctcttctcctcctcttcggtcggcctgttgggcgcctcttacagggtccaggatgttgatgtaaataagttgtggagaactgcagattcaaatggttggagagcatcttctgcaccacgcacctactggcctcccccaccaactgaatctgagagcaatggctacttgcgcgtccggtgcaatggtggcttgaaccaacaacgtagtgcagtatgattaagacaagaaacttatctctaaggcggcatgattcatcgtgcaatttttatattcatggtaacattgctaaggcatttgagatcactgctgttttgattctgtagatatgtaatgcttgtggtgctgcacggatcatgaatgctacactggtgctgccagaattagacacatattcattctggcatgatgaaagtggctttgtaggtttttatgatgttccc

SEQ ID NO: 373065 - DNA, 212 bp, Zea mays
ttcttctcgtccggtgaaacttctcccgctcctacccctatcccaaacagtaggcccgatagtgcgtatggtcgaggctgtcgcctcggcagttctgtctgcgactgggagccgcaccacgagccgcaccaccgtcagcaacacggtgaaccacccgctgtagttcgagctcttcttcaagagctacggcaggatctacggggtctacgact

SEQ ID NO: 373066 - DNA, 332 bp, Zea mays
gcaaacattacatgaacgtacaagggagaatgagataagaaagtgcctgtgagttttgtctctcgcaaccagcgatggggcggccaatatatgaaagggcttgaaactggatactcaaaccaggctctaagcatgacattgaaaaaaccaaagtactcaaacaggggcatgttataaacaaacactggaatatgggcagggaaacactctagttcggtttaacaaagtctcttccacttgccccaggacgctgtaggggtgtaaatatacagggagacgacatgaactcccgtttaatggcaatctttgcgtttgccacgccttcagacaat

SEQ ID NO: 373067 - DNA, 288 bp, Zea mays
ggctgtcacagaggcaccactgatacttggatttcatatgtaaataaatatacagcacaaaaaaaatttgacataaaggatatactacaagcgttgtatcgttgctgcctattaataatggcatcagtaatggacagttcgggcgcaattatgttgacatcttgttaacagaagggggcagcctcacaatctgcttgatgccacaagatacttggtgtgacgggcctgcgccatcagttttcctgtctttttcttcctgaaatcgacagagacgacaccgactgactt

SEQ ID NO: 373068 - DNA, 274 bp, Zea mays
ccgttgcttcgacatcacaaagcgctaggaaggagagagggttaattgagagggctggggctttacactccctaacacaacgaatccaagcctaatcgcgtggtgctcaaagtcaccgacagcccggctaacactaaggtcagatacaatggcaaggaccactgcaactgaggaccacagctaacaccgatggtttgacatctgctgcagccactgtcgagggtgtcattcatgacgcatgtaataatacatgcagcatgagcctagacgccat

SEQ ID NO: 373069 - DNA, 313 bp, Zea mays
tcttttcctgctcgctctgggggggaaggagagagagagagcgcgagagagatctatgttagaggctagctaggcggtcctcgaacgaagatgttggcggagttcagcggccacgtggtggatgtgtccaccgagctagtggcggcggacatcctgacaccgtcgcacatgacgaatgcgtcactagctggtggtgcgcttcctggccgcataccgagccagccgagtccgtgcagatgggagaccacgatcagctagtctactcacacaccaaccaggcgcttcttcgtcataggacgttcgaggtcataga

SEQ ID NO: 373070 - DNA, 194 bp, Zea mays
ggcttgttttctcactctcgccgggagccatgctgttggttgtttaagcaagatacgagtggttccacgagctcgaggcgagcaaggctgtgtttagcacactgaatcacatgtacagacaggtcaaggagtacagagagaatctcaacacttgtgagatcatctggcaaaggataaaaaccttgaagaacatg

SEQ ID NO: 373071 - DNA, 362 bp, Zea mays
gctaattgtacacactctcgttgggacaaaggatcctgattgactaagaatgctacaagcggatccacgagctcaatgcgagcaatgctgagcttatgacactgaatcgcatgtacacagagctcaaggagtacagagagtctttcaaccttcttgtgctcaactagcacaggatgaaaaccctgaagatcatgcagtgctgcatgcctgatctgaacagcaggtgccgcactatgcaagcagtacaagacttggctggcacggccttgtaagatgagcttgacaatctgttagacaagtgccatgagaactactatgacttctctttactggaggtctagagcatgctctacatggcaaca

SEQ ID NO: 373072 - DNA, 237 bp, Zea mays
agttcaacagaagcatatacaacttggcacttgacagcaatcgacatgggtaggacccaacatattttccaacttcaaccagtacccatgccccaggggcacactatacaggttactcattgcagtgacagcagcacaaccaaccacctaacaaccactaacacaggaaaaaaaaatgccatccatgacacatgactgtgccatcagatcatggtgggaacagcagcagccaggaat

SEQ ID NO: 373073 - DNA, 312 bp, Zea mays
tcattgccacgcgctctccgctgccttgctgtcgctcttgcaaccctgaagaagccagccacacaaggccgaaaacgcaccgcgcaccgaacggatcaaagtagcgacacaaggccgactgattgcagcatcgctgctatggacgacgatggcgacatcgggctacacctcattggcgctgccactgacacgctcatcgtggctgtccttgttgaggacgtgctggggcgcctccatcgggcccaggcccggggccaggcgcctccggtggaagggaaacccagccccgaggcaggctgcgcggacggtgac

SEQ ID NO: 373074 - DNA, 358 bp, Zea mays
cccacgcttcttttgacgcgtgggcgcacgcccgcgcgcgtgggcttaccaccgcgcccgccagccatactgagctccgccctggttccattccacccagagaggctccaagattgacgccgcgaccacgatgggcttacctgtgggggactcggactcggagacgctgctcccgcgcgtgctgctgcaggcgctcctcctcctgggccacctccaccgcttgctcctctgggccttccacgccgtggggctcggcgacctgatcgacctcggcggtggcggcgcatgaaggccgcgacgtggctgccccgctgcagcaccggcggtcggagttcaagcccgtcccggcggtgcgcat

SEQ ID NO: 373075 - DNA, 400 bp, Zea mays
acaacgcaaatttatatatattaccacgggtacaacgtgcatctccgttaaagcatacacaggacagaggaaacatagtagtggaatctccaagcacaaagctacgtctagctcgtagatcagagaaaaaaaaggtcgctatggcaataaacacaagaactgaacacaatatatgggggtgctgagaagctccagacttcaatcaccatgtaaagcatttgacggggcctgactttattagtagtacctacgccggtattcgatcacaggatcgagatggatcgtgcatcggttgatatctagggtcaccgaagcatttcggggacaggtgtgttgctgtcgagatcagctgcaaaactacactgggaagacctcacctgttacttgacagtgcggagca

SEQ ID NO: 373076 - DNA, 187 bp, Zea mays
actataattattttgtgctttttttcttacaaatgaaaaacaaacaaggggaggcaacaagacaaaaccgaatctggcaacgcacatggcctgaccccgaccgactacaccattagtcaacaggcaaaagcaaacagcttcttccctaccccctcagatcaagcgataaccataaggaaacctgcta

SEQ ID NO: 373077 - DNA, 104 bp, Zea mays
acatggaacaactttttttttgatggggaggacgagtataatacagacacgagacacgacgaacacgaacagcgcgcggcggcagactacgtacaccgtacacg

SEQ ID NO: 373078 - DNA, 378 bp, Zea mays
ggttacttgcaagaccaccagagcagagacgggcgtcttgtcttaatgttgaatggcggtacgcggccacctggcaagaaccagatgccagacgaccatggtcagggcaacaggcaaccggagccaccacacgctggtggcggtcaaccaaactatcaggcctaaatgcaaaacccacagacgggctacaaccctggcggcgctactgactaccaacaaggcgctgctcctggataccaaggtggacctccggggtaataacaccggaaccaggggaacccaggcccagcctaccaccgtggtcacaccgggcatcaaggtggaaacccaccacctggctaccaaggacagcaaccaccacctggctaccagggaagc

SEQ ID NO: 373079 - DNA, 285 bp, Zea mays
aggattgcatttgcaaaaccacaatatattttttgggaactacctttcaggggaggtgttcagaaccaaaatacactttgtaaaaacatttttttataatagaaccatatatttagcatgcgccaagcactgtcttcgtttggggaaaaaaacgactattgacttcggagcatgggatgatccggtatttcccggatcaggaaaaagattttacttcttatttcgggggggggaaaaaacaattggagaatccaatcttctggacgggtgtattgaagacctttt

SEQ ID NO: 373080 - DNA, 146 bp, Zea mays
gagccgttggcagtatcagtctcacattttgagctaaaacaactcattgcaagttagacatggggatcatgtatatccatacactaaatcataaagcattggcactggggaactttcctccatgccccggggagggggggttgggg

SEQ ID NO: 373081 - DNA, 287 bp, Zea mays
gatcaagaaaaaaacaaggatcataatttgcaaccccgtagtagtagatgaggcacctcttatatcactcaataaggtagcaattcttacagaattgggtatggtcacaagaatgaaaagaatgggcacaagggcaacggaagaagcaagccttaaaactgctttatcccgttaaaacaaaatcatgccaaacaattggttagtacaacattctgtatttacgctggtcagtgccattgcttcgcaatctcctcatcaaggatttggcaagcctgctgcctagaatt

SEQ ID NO: 373082 - DNA, 394 bp, Zea mays
  unsure (1)..(394): unsure at all n locations
ggcatggcttccataggcatacatctcctcgcggagcctggggtggggcggtcaccaccatgcctaatcctatcgcaccaaggagtctgtctcgtgctcctcgtagtcttcctacccacccctncaccccnncacccctttgnccccaatccctagccctgcccctctcctccagcaccgcgcgccagctctatgcgcccgccgcccccggagatgcatatcacactccggcattaccgctgggtgaaggagtgggtcccacaagatctggtcgctaccggaggcccttgcacgctctacaagttggtgctagaggatagactggcagttcttaatgctaaggatcaggaacaaggggcagcatctgcaatgcctgaaccaaactctgaagttc

SEQ ID NO: 373083 - DNA, 133 bp, Zea mays
gccacgctgttggccacccttgagccatagccagggtgtgaaggttgtaaattaaaggagtgctctgttgctgccatagttaaaggaggctaccgcgctcagagcactgtaatagtttattgggctatgcaca

SEQ ID NO: 373084 - DNA, 454 bp, Zea mays
gttttcttgttgaccgccctgcaacctaagtcagggggtgaacgtcatgaatgaaagtgatggtgtgtcgctgcgatggtgaaattagaccaatgcacacagctcctagtaatagttaatctggctttaaaatattgctagtaaggactcactatagtaagcgatatgtgcaaaagtatctaagtggataatagctaaagcctcttcttgattcctaaatgcatcatacagcttgagagtctttattttaatccgagaagtcttgctgagtaattccatactcagggttttattacctggagctactcacgttatagtttagagctgctgcagatggtgctgagtgccaggggactgggacttcttattaatctaagtacttatcctatactaattattgaagatggtgactcgagttagcatatatttcaaacttatacttttgcaaacactc

SEQ ID NO: 373085 - DNA, 513 bp, Zea mays
attagatgctcacccacccacccgcgagtcccccacgttatggctcctgcaatggggctgaagcggcccgcggcgggagcgggggcggcagcagctcataccgtcacactgtccgcgcctgacgtgcgggactcggtgcgcaccgcacgtaaggaaggccgaggccacggccaaggctaccgccccggacgacagggtcccggcaacggcggtagtgccggtggagatcgctagggatggggagctgtgcctggaggaggtcgacgggaggcggtggagctatgtgagtcgactccgcttgcgccgcggtcaaggccaagggtagggcgtccgtcggcagcgccttcaaagccgttccgctacagtccccgatgccgtcccgtcgaggaaatcatgtgctttataagaccatatgatgtgcccgaaaggcttccaaatagtgtcacaccatcatatgttccattcatgacatggatagcattgaaacatttctttggggggagcatgggtgtg

SEQ ID NO: 373086 - DNA, 509 bp, Zea mays
atttcgtttactactggagagagtggccatggcgtcatgcgccggcgccgcttcctcggcttgggcgctgttccgcctcccggagtcgggccacctgcgtgcaccgccacgaagcgggtggcgagaccacaggctgtgccgtcacgcgaccgtgcggtgctcgatcacacaggtggagacggcccggataaaggtggtgggcgttggcggaggcagcaacaacgccgagaaccgcatgatcgggagcagcctccatgtagtggcgggctaactgcgctctttggccgtctcattttgggaatcgggattgacctagggcccaagctggatgcgtagatctgcttgtgtaaatatgaaatgattcatccactgcagtcttttcggtgtccatgctccgggcaccgatcataaactctagctgagcctgagagccgttccaatgttatgcgtgttcaatgtccgggcaccgtacaatataatgctttagttgagcctgatagttgagcatg

SEQ ID NO: 373087 - DNA, 440 bp, Zea mays
  unsure (1)..(440): unsure at all n locations
ggttgttttagttctcgttcatcctggtggttgtgtgaggcggagagcgagttgcgaattattagatgctggacaggctgggggacgacgggatggcacagtgctccgcacgagacaggcctcgagaagctacgtatggccatgatcgcacgcctgatcgtgatcaacacagacgcggactggggcagctacaagcgggcgcagattatcgcagnggaccctgacgactcgcattgacgccgttcgtaacgactatcgcctgtggagccggcaaagtgttgtgcagctccttcacactcatggagaaacctgtcgcaccagggcatgggcgccaagctattctatcaggacgcagtctaagtgacggaccgtctacgactgtctctacagcgactagaccaggagcaaccaccgttagatcgggccatatggttggacag

SEQ ID NO: 373088 - DNA, 353 bp, Zea mays
gaagagctggtcgcccgctgtgccgtccaccaaggccagggctggaggcttctaagcctccaccgagggcagtatctgcgactgcaacaccagcaactacaggaccagctacaggtgctaccgctgcatctgaaactgagccggtccgcccatgcaggcgatggcgcacgagagtccagaggacaacgacgactaggcgaataaatataattaatagcagtgcctaaataagatcctgttaactgcacgcgccattatcgacccatagacgctgatgagggtcatagatatctgcgtaacgtgctcgctgacacgtacgcctcgaacccgatttaataactatatgcatgtat

SEQ ID NO: 373089 - DNA, 163 bp, Zea mays
acggctgctccactaaataatcaaaccgctacgcccaaggggagaactctattacgggatagggcgggggcacacacaccgccactaggaaagaaagcaagggaacaggctgagaccagggaccaggaacacgacaacacgacttatcaagcccaagctcaaa

SEQ ID NO: 373090 - DNA, 122 bp, Zea mays
ccctcgccagggaaatggcatgggttatgctcctcaataatctgtccgtggtaatatgggacgcatagctagccaaattttgctaaacctatccttaacaccccatgacatttatgtcccag

SEQ ID NO: 373091 - DNA, 400 bp, Zea mays
gaaatctctccaataatttagattgtcaggtttgcttgtcttttgtcgcccatggaatgaataaaaacttctcgaagttggtttctatctaccttggcgatttggatagtcttcaagaacattaacacgagaaaatgtgaagtttctataaaaatcttcccaaatagatttctctgataaggcagtaatagttacaaagcctgttcaggaaagggtctccgctcctttggtttgcgctcaaaaacctcaatattcccctggtcgagcatagaaccttgctcaatttccccccaacttaccggcgatcgccagccaaaaaaagcaatcggaacttccggaaactcattgtggcgattctgcccacagaccacttctgctgaaggggaatcgaaacctaatg

SEQ ID NO: 373092 - DNA, 208 bp, Zea mays
ttgggtcttaccggccccggaaccgccaatgatgcacccatggggattggcctctgttgcggggttccaataaatctgctcaccgattaacactccctcccggttgactactggaaaattactaggggtttgggtatgggctaaacggttaactaggggtctaggttttggattggagggaaacataatcaggaatcaggtctcaggg

SEQ ID NO: 373093 - DNA, 478 bp, Zea mays
ggtggcgatcgccccaaagccccagaacccgttagtgatagcttcccaatggattacgaaggcgaaggcttaccagagcaaccagaaccatggtccactggcggcctaggggatagggatgaatgggagctggccccaccggccggggaagcttgttatcggcaaccggagctggaagggctactccattccctttattccgctcggtcagtgttggtgacatcgggggaaggcatgggcaaaacctatctggtgcggcaggtgtgggaacgactgttatccgatggggtgacgtgccaatactttgaaccagctacccccaaaaccctcctgatggcgatggcttagtattagcaacggaaaaaatttggtcgttaaggctgaaagctttatccagtaatgcttccagacatcaaattttataatttatctgaatcattactgtcccattcatgactataagtaggacaacttcacc

SEQ ID NO: 373094 - DNA, 481 bp, Zea mays
cttattatttagatatttatcggggtagtaatccctatttagtggctttctgccataatcgtcaggcgtttatggagttccgtttagaccgtattcgagagtatcgcatcctagatgaatattttgagcctaaccctaactttgattggaaaaagtacagtaaaaactgccttttcagatagaaaaaaggcaattgcctccacgaagtagtgattgactttacttgtaaggtggctccctatattcgggagtggaaatggcatcattcccaggtaattgatgaacaccatgatggttctctgactttacacctagaggtcggagggcttcaggaggtgaagcgttgggtattgggtttatggcaaggatgcttttggtcaagtcaccaccggagttggtcaaattacttcaagaagagactgaggtgatagcccgacaaaacgaaacaggagattttgaatgatgactaattttattgatc

SEQ ID NO: 373095 - DNA, 440 bp, Zea mays
  unsure (1)..(440): unsure at all n locations
ctcctacaatacaaataacccccccctttttttgcctagggttatttgtaccctcacggtacaacgaaaagcaaaaactgaattacaaggaagagcgaaaaagtgcgattttcccacactttcaagttatgagtgatatagtctgagaccatagccaaaggctaaatctgagaatcaaacataacctaaaaaacaaattaagatgtaggcttagcgcacattttgcaggcaagcaaaaaatacaagtcaatcaccgcaaggattctagcccttagatcgtcgtcgctcaaaaagagactaataacaccagaaagagaaaataagccgattataaaaacaatcttttaggggacaatccaaagtgtattatctcttgacaaagggatagcgacagccgtgagcattgctcacatatttaatttaaataaactnttatgacg

SEQ ID NO: 373096 - DNA, 474 bp, Zea mays
atacctatgaggaaatcaccgaggggagtcgtaaaggactgattttttctaaatttccgcttccaaaccagaaatacgatgtttctgaagtggatttactcatccttctgcccaatggctaccctgacattgtgcctgacatgttttatctcgaacctgcggtcaagttggttcagggaaatcgtcccccacgggctaccgaagcacggcaacaatttaatggacggtcatggcaacggtggtcgcggcatgagcgagagtggcgacggggggttgatggtatttggacaatgctgaaacgtgttgaacatgctttggaggtggcggcatgaacaatcaaattagtttgactcttcgggagtctcatcttcaagagctaaggaaaagtttatggcacagtgatgggaaggaaaaggcagcgtatttaatctgtggtgaggtttccattcaggcagatccatggactagtatgcc

SEQ ID NO: 373097 - DNA, 442 bp, Zea mays
agactacgtgcatcgactctgagatccagaaatactatggagttatcgtcaaagactgtgcagagatggaattgcagcattattaatgactagttttttatattttcaagggagctatgctagcgccctgagtgatttatcgattttagataatcccctttatggtcgttatcttgaaaatgactccatgccggttattcaatgttttttacaaaattatgttgtatcatttcaattgaatcgaagttcaagtattaagcaaggcgattggctattaataattaaacaacaaaaaatcaattccttggaagttaaaacgttgcaaataccgatctggatattttggtatcgtccaagtctcaaatcgattaataaaaataacttcaaacgagccttatatttttatctttgtgaacgccctgagactaataattatagccaa

SEQ ID NO: 373098 - DNA, 370 bp, Zea mays
ctggactaccttgaggacaatcgactaataagttttacgtaaatgtaaacttaagaaatcatttatgaacttttaccaagatagttacattgcttggctctaggatgttaatagtagatgtaccaagcagaaatacataagtaaaagataattattttttgatgcttgatcgaccatggtggggataagttaaaaggactgcaacacttcgttctatgcgacccttgcgttaagtcaaaattttatgtttctagttctaattgagactggcggaaatgagcattatattttttagactaataaactaagggaaaatattggtgcatcagagttgacctatcttgctacaacggaaatattgttccagggg

SEQ ID NO: 373099 - DNA, 202 bp, Zea mays
aaaagcggggcaaaggctatgcgttggattatggggtgcagtacctagcccaacacagggaaccggacattgttattcttatggatgcagattgttacgttcatccaaactgtattgaacaactaaccaccatggcggcgcaacgacagcgaccgattcaaagctgttatgtcatggctacacccgcagaacccagcattaa

SEQ ID NO: 373100 - DNA, 501 bp, Zea mays
ggtcgactctagtggatcatcatttcgttgatttccgtccaggtgatggatttctacctctcctttacttgcgtagtaacctctaccataaagctcatagcccgtggccaagaatttactaacttgatgttgataaacactatcctgacttatattggtttcgtgaaactcgaaaaatccactattttcaagcagtttaaataattctgacctcttcccacgagttaggaagagatagccatctttattgattttccaagaagtaaaatcaaggtatccgaatgattttaccttagcaacactttcacgcaaagcttgcattgaaccatgtctagttctttttcttctgttggtagcttgggttttaaacacaggtggcagagtccttgtcatttcagtggcctcagtaaaaataagttaaacaaattcttcagctcgcttttgtatacctcttagaaatcagaaataagttgtgaaggttctcccccagggggcgcactc

SEQ ID NO: 373101 - DNA, 442 bp, Zea mays
  unsure (1)..(442): unsure at all n locations
cgtcgctttgtggatcggccgccccagggccatatctctggttgctggggtgccggaccgccacagttctgttagggcagctatggggttacgggaaggcggctccaccctatgtttgactaccttaaccctaaccggctcgacattgtgcatgcgtgcttcatccagacgaccggaccctaagatttcgggctagtacccaatgagaccgagcgttggtggactggccctggctgcacaccccgggtaccgggataaccctgactggacccaacttaacagccttgcgactgatacacctttggccagctggaactatatcgaataggaccgcaccgatctgtcttccgaacaggtgatcaggctgagtggcgaacggctcgtgatgccgaacatttntccttacccgtatgggcagtgtctcacaccgcatattgtgcac

SEQ ID NO: 373102 - DNA, 175 bp, Zea mays
atgcaaagacaagaagttttatcgatacgtttaaggacttatgtaaataactataataagcgcccccataacctggctcaccatttttccatcctctcctgacatacctcaggcataaatctcactgttgatatcctctcacggggcactaggcgacccccgggtgccgagctcg

SEQ ID NO: 373103 - DNA, 99 bp, Zea mays
agtgcggaggcaatggcatagcgcaaactatattgaccatgtagtttctaacgtgtagctctaaaacataggaccgcctggggatattacctcggcccc

SEQ ID NO: 373104 - DNA, 432 bp, Zea mays
ccccgggcctatggtacgggatttttgggatgcttgggccaaggtttccttttataccaaaaaggagagccacaatgcgccagctggattagcagcctgggttaccctcaccctcaacgaccagctgcgtacttggccttactacaatggagccatggccaccataaagccagccgtccaccttgcggagatgcccaagacccgggctcgatgcattctacttcacatccgccgtccatgggctcaggccctgtggccatgatccaacgtggttacacaagactatgcatgaccaccatccgaacccctggctaccgagctccaattcagtggtcggccgcttacaccgtcacagactgagaaatagctggtttgtcccagcatcaccgcccttaagcagataatgcgtttcagacatgtggcgacactgcc

SEQ ID NO: 373105 - DNA, 353 bp, Zea mays
ccccaccgatttgtcgtggccctggccccaatcggccacatctactatggtaaccctgggactctatagcttttagggtttttgtataaaatcccatcaccgaagaattcttttccatccctgcatcagggattaagcagaacctaaatggactagagaatttcctcgagtgcgacgggggtaaggtatccgacagctccgtcggggtaggctcttttgttccaaagctcgacggcgtactccactcctttaatagtttcttgctttccgtgaagatagtcccaatcttttgcccattcatggtgggaaacaaacagacaccaagaatcttgaaagcaaactgggctgatatt

SEQ ID NO: 373106 - DNA, 383 bp, Zea mays
ttataggcaggcctatggatcgtgtttccgccgggaattgtaatgggttatctgggttgtcacaaaaatgggtacaatgaatcaacaaatggatcttctgtacgaaagacttttcaaagcgtcaccaagcaaaattctggcgctccaacccgacagatttgagatcattgccgtcacggatgaatacctgaaggcgaccgctacaaaagaaagtgatattgtcggtaagactctgtttgaggtatttcccgatgaccccaatgaccccaatgcggatggggtaaacagcgtgtccgccttcctgcagagagttatgtcgctgaaaacagccgatatcatgggtatacaacgttatcccatacgcctatccaatagtacttttg

SEQ ID NO: 373107 - DNA, 435 bp, Zea mays
gttaaaagcaattcggggggcattttcttccataaaggtctgttaaacggcaatggacgcttctcgatcatctggatgtaccatggcgaaatattcctccacatccagtgctttttgagtagggggtataccgtagatatcaaacacatgcctggaccaattcaacgtgccggtctgtggattatattcccaagtaccaagacttagcatccgctctgcagtgcgaatgcgagcctcatgttcctgcaatttcgacagagtctgctttagttctcttgaccgcaggataatatcctgaagagcaatgcggttttcagttttggtgatttctgtgaggacggcaaaactattttcatgaactatcgccgtcacatcctctaccctgtgcataataaactcgactgctccgaattcatctaacacgggactatttac

SEQ ID NO: 373108 - DNA, 329 bp, Zea mays
tcccctacctttctgagaaataaggattaatggatgggctagtgtggagtctaatatcatataaaacattactatttttcagcaatatctttaataatttaatattatagcttaaaattaaaattttcattgacaaaaaccaccctatcagtatcagcgacgaggatttagcatcctagaccggcggttccttcatgcatggccctcaaagttgtttttctccctctcgattaatctgctcattttcattactatctcgctattagagatcgtagtatataccttgagtcgctaaccattgttttgagtcttggtaatcaggcaatata

SEQ ID NO: 373109 - DNA, 375 bp, Zea mays
gcgattgcctgggcaccaccaccaagggattatcctaagcttttgctcatacagcgccgctgaccacaggaggtcgggactgatgtcaaccagacaatttacccacacgactggtgactcagggctggaccacgatgccagcgcagcgtgtggaaccgctggcaatgagtggatccctcctacgagcggagaccttaccatggtgaagcccctgaaataaaagtagctgagagtttccaatcaattaatttctcctacgagtggagacgctcgtgagtccgtagaagccaataagcttttggttgaaaggttccaatcacataatttctcctacgagtggagactcccgattatccttttgtaccctagaaaaag

SEQ ID NO: 373110 - DNA, 476 bp, Zea mays
gttaagttccgaaccaattcaacattaattgaggcggacatccttgggcacctgttggaaaagtttctcgactcccgtgtcaacctcagccctaagccggtgcaagacatagatggtaacgaggtgctttcagccctggacaaccattccatgggcactatctttgaggaactaatccgccgcttcaacgaagagaacaacgatgaggcaggggagcacttcaccccccgggatgtggtcaagctcatggctgacctaatctttctgtccattggtgacttaattgaatccggtacctatctcgtctatgacggtgcctgtggcactggggggatgttaacggtagcggaggagaggctagctgaactggctcaaaatcaaggtaaggaggtctctattcacctctttggacaggaggtacagccagaaacctacgccatttccaaggcggatttactgctgaagggggaaggggc

SEQ ID NO: 373111 - DNA, 369 bp, Zea mays
attatgatggcttgctccagctccgtcaggcgctgaaactgctcgtcgagcaggcggccaatgctgttgaagatgaccgcatcttcggtcagaaatgcgctaatgtcaccatcaaataaatcttgaatggtggtggagacgattttcagcgctaggggattatagctatagcgatcgcacaacacctgttgttgctcctctgtcccctgcaagcccttttgctgaatgatagcgatcgctgtcgccacggaaccactcagttgcagcgtgcgggtattaccgtccagtccttccaggacagcaatttcggcaggcttttctcgactggtgagtagcacgcaactttgatgaggcgtctcccccaatagc

SEQ ID NO: 373112 - DNA, 522 bp, Zea mays
agacgttttgctttaccagctttacgttatcaacaaaaattgccgggaggatgatgttttttgggacaacaaacctagaattgaagaattgagagatattcgaccccaatggtggcaaggggcatggacacaggaagaactctgccgccgggactataccctgcaagttttgcaatattttcagcaaaatccgccggctccccctactccaagttggggcaccagcatcatcattgatgaagcccaggactacttggtggaggaaatcgagattatcaagcacctttgtcaccattggcaaacggaagcaaaacatccagtaaacctctggctgttgggggacattaaccaacgcattgccccggttgactttacctggggaggactccagcttaataaaaccagggagctgcaatgggataactaccgcaccactgagtctatcctgaccctagctaaccgttttcaagcaagggcagatgcatccaagccagcggatgccaaatggctgccaaaaccaac

SEQ ID NO: 373113 - DNA, 412 bp, Zea mays
atggctacggtgccttggagtttgtcttcggtggttttgccgttgccgatgtcactcattattgtggttgcaatgctgtcaggcgctttattcataaacaacgcttctagcgctaaccttgcttgatttctgtctgtaatggtgttatctctgtcccgggtccttaagcttgagtctcgactagactaaaaataaatttttccggttaagcgtgttttttttgagagcgtaactatacttgctttggatgagattttccaatgtttgccatggttagttttgccctgatagccagatataaattgcaggtatgcaaaggctcatcaatcatactgacaatgcaagctaaatactacagattctacttaaagagttacccccccctacccttttgttcaactttatggggagc

SEQ ID NO: 373114 - DNA, 255 bp, Zea mays
ggtcgactttagaggatctttttaccggccgcggctagcacttgatgtccagaagcagtcttaagattgtttttagtgaccgtcatgacatttaccagggaagtgtacttttattctcacagaggggcttagtcctgtttatgaggtagctcatggagagaacgctgacctgttcctgatgtcccctatggtctaatggaggttcatgagcctccccgacaatgtcaccatgcagatccccgggtaccgagctcg

SEQ ID NO: 373115 - DNA, 387 bp, Zea mays
gacttgaggatcgtataacggacctgatggtggagggacagattcgctaggtatcaactcgtatttgtttaaggctaggtgaaaaacatccggccaggtgcatacatcggctggagactaccggcttcaggctcaaaatgttgatccgtagcgcgtactttgaaagccaccatgatcacaagccaggaagcatgtacgacaggctacaatcagggtacgagtatagaccatatcagcgctgagcaagggggtgtggtggcacacggcaattttgccagctggcttaagctgggaaaagtccggaccgatcttccatacgctgacctgcgcagacccaaatgaatgaatgggcatgctgcggtgtatacgccttacacatcagtgcgg

SEQ ID NO: 373116 - DNA, 191 bp, Zea mays
gatcgccgggattagtagaaggaaagtaaaccaagtagaaacgaggcagaatcattatttagtttcagtcccgatcgccgggattagtagaaggaaagagagcaaagttagcatcgaaggaagcacgataatcgtttcagtcccgatcgccgggattagtagaaggaaaggatccccgggtaccgagctcg

SEQ ID NO: 373117 - DNA, 520 bp, Zea mays
gccgagcatagttaattgcttcctcccgtagggccgggtcatagagccattgattgagacgttccagttcggactggggcttggggcaaacctcccgcttactaccaaaacccttgaataaaccctgcatcatttgccggaatgcttgggcttgctctggggccaccggctccggttcgggctgacgcttaaacaccttcaagcgagtaccatcgggtagggtcgtatattccgggcagttatcagtagcggccagctcggctccctcaagatttttattaggggataagtttgcaactggttccacactttccaaacccctagtaactgcttccaattcctcggtgggactttcgctttcccaaggggagggttcacattcagtgaccagggaacaggtttcagtagtggccagctcggctctctcaagatttttactagcggataagtccggcaccggctccacaccttccaaacccctagtaaccttctccacaccaggcaaaagcactggcgactg

SEQ ID NO: 373118 - DNA, 577 bp, Zea mays
ggtcgactctagaggatcggtcaataaatacaaatggacaaggtaatggaattaagccaaaaatcccagaaaaaccagctacggcagaaattagtcaaaactcatctgtcatagcgacaagtcagggagaggaaaaatattccgccgccggtcgtactaaaaagcgcaccaagaagaaccagagctttgattggctccccgatggcccctggagcattgagggcaagctagaccccaacttccgggattggttggcgaagaactggcagaagcgttacggcggagacttccacgacaagcaggcggatgtgttggcccatttcaggaaagacccagctaatttgcccattcggtgggagcagtatcagaaagaattcattcatcgggtggaaaatacccaaatgcgcctagctaatggctgtcaaatccctgaagaccagcaacagaacctaatcacccatcaacgggcagtgacgacggctatacctccagaaattaaccctgtggcggtggctgctactcagtcgccagtgcttttgccttgagtggaggaggttactaggggttttggaggtgt

SEQ ID NO: 373119 - DNA, 478 bp, Zea mays
acttgacatagttccgagaactccaaggaaaacatggggctttctcaaatttgttacggccatgggcataactgaattagctctggccggttggttgcaaagccaccggtaattttcctaaatcaccagctttttctatctactcaacaaaaaggtagaacaaacgcttttccacctgctgttgttcaagcaatagctccaactccgaaggtccaggggttggcaatggtaatgtttcttgcgaagcatcgactttttgaatctgagatggtggttcattgccatcttctgagtcatgaacgccattgacaatgatgatgccctcattgatggtggtattgattactgggcttgaagttggggatgcttctggaagagccggtgtatcctggggaatatttgccggggggtgtgaagatgcttgttcgttaggggggctaggactagccactgaatcaggtactggcgctggatttgc

SEQ ID NO: 373120 - DNA, 514 bp, Zea mays
ggtcgactttagaggatcaatcgggcgtgagactattttttgttggcatttctgctatcaccagggccgatattgtagctatgggcatatcattccccctggggaaagacacccaacgctcctacgacgaaagccataaggagaacgtcaatcgctatttccaacgggcccgcatgaccctgacccaaatgcacgatgagcaacagcaggagatgctggaacccggcgctgatgatgataatatgctggaggatgactatgagtttggccgatataactgcttttagagaagccttaactctgtcagggctatatgagcggtaggcgatgaccactggcgttatggagtatgtggatacgcccaaggcgccagcataaccagcgccagtacctgattcagaggttagtactagcccccctaacgaacaagcatctttacacctcccggcaaatatctctcaggatacaccggctctttcagaaacaacccccactttaagccgagtgaacaata

SEQ ID NO: 373121 - DNA, 214 bp, Zea mays
gcttaggatttgcattaatggctttctgccaaatgtgctgagctcccggcgttaaatccacttctccctggtggttatcctcatcaagaagtattcgatttttcatcgtaaagatttagcagaacttcccgctcttcagtcggctcaaaaaatgcttcatcagtacccactacttcctgattttccttcaggcgatccccgggtaccgagctcg

SEQ ID NO: 373122 - DNA, 340 bp, Zea mays
ggggcggcatctcagcgacatcgaaactctcatttttgaaggttcgtggctgagcaaaacctatcctaaaatcgccggtggggccggctacttcatcaactacctgaccaccgacgtcgggcccaaattgtggagagtcctaagccaagctttgggagaacctgtcaacaagaaaaacttcaaggccggaattcgaaggtattgtgtagtccaatcgggaggcgagtgggagagtgagggttttcagacccagttacgcagctaccgcagatattctctcctggggcgaagcaccggatggcagacagttttacggacgggaagaggaacaaggtctact

SEQ ID NO: 373123 - DNA, 311 bp, Zea mays
tgtactgcttcattttgacgaaaataattaatacttcgaccttttgttctgcttctcgatttttactatactcttgacattcgaggtgtaataattcgcaaaacccttttaaaaatctattttctggtgtattaaaattttgaaagcgtttaatccctagcaattcctgtcttgccccagctttttctattgcatttctgcccggacgacgaacatagtcacggagacaataggcatccatttcgtgaatacgggccaggggtatcatctcaacggttcgatttaattgagatccccgggtaccgagctcg

SEQ ID NO: 373124 - DNA, 308 bp, Zea mays
ggaagaggctagaatccaactattatttaattctgaatataaagagaattatagttcttcaatcttaactaggtgagtgcccgtgcgttgcaacggagcctttacattgtaaccttcaaatacaaggatttttcacttgcaacggggtgagaagttccaatgtctaggaacaattcagaagatgcagaaatcaaaaagcgaatcgagtccttcagaagggcaacaaattattggttaggttgcttcgtgcttgtgaaattaatcgaaatgcaaaggacattgacttgagagatgagacaataggaaag

SEQ ID NO: 373125 - DNA, 274 bp, Zea mays
tctttgcggcggtctgcttccacctggaaatattccgcttggtaatctgatactccgcttccttaccctccaatgccgtcctgacctggcgtaacttttccgtttcgtgggtcaacatctccggcggcaaacccttcaaaccattgaccgcatctagtttgcgttgctgtaactcaaaagcccggtgggccgcttccacatcagctagggaacgttctaccttggccttggcagaaatgaaggggtcagcctcgatccccgggtaccgagctcg

SEQ ID NO: 373126 - DNA, 353 bp, Zea mays
tctaacaaatcgtgatagtcaacaaaacgtctattaattggtttttcagcgagtgaaatccaacttgggacattcaaaaacgtcaataaatactgaaggcggcaacagggacaaaacttcctgggctaaaccataggctttcctttgggccttcacttccagctccatggacgaaaaagagtcaatctctaacttgtagtcccggcgataaatccaaatccagtcatcgcactgtgaaccccattccagacgggggaagtggtcagataggattgaaacaatcaactcacagtctgaacgctgtaattctgcaaatatgacccactcgttttgatccccgggtaccgagctcg

SEQ ID NO: 373127 - DNA, 388 bp, Zea mays
tgtcctgggaaaattgcggggattcacggccggaaactcttatattagtcttgccatcgccagcaagggaggttgcgtcaagctctgaggtgctgatccaacttacccgacatggaggtccatcgcacaacgagagcatggcgcttgggatccgccggcaccgggcttggattgactgacagtggcttacaactgaactgactgggaaaaccatcacctaaccaaatttaatcacgttgatccacatgcaccttgctcagatgcactgatcgtcgataagcaccgaccgactggcaaaacaacagttgcacacaactgaatggcgattggagcacagatgcggtatcgtctgcttacgcatatgcgcagagttccacaccgaatatcg

SEQ ID NO: 373128 - DNA, 262 bp, Zea mays
ggggggcgcattcatcaagcaggattcgcataggcagttattttttttttagctagttcgagaatggcgatcgcctgttgacgctgaacgctaggaaaatgatctagaaactcatccagaggatcccctgctttcaggtaatcaagcaatgttttaatgggcactctggttccgacgaagaccgggactcctcccagaatatcagggtcactgtgcattactctggctgtggtcaccataaccaatgtcctcctttaacctt

SEQ ID NO: 373129 - DNA, 415 bp, Zea mays
acatattttttatcatttatattaagaactttttaatagtgatgaaaaagccgatatacaactgcagtagtgaattctatcaaagctcccaatgggccaaagaaaaatattgaggtcattgctaattccaagggcttgtcctgaacattagtggagaaattattgacaataaagattccagccataacaccaaaagcataacctaccaatgcagcaagtaatgcaatacctataaatttgagcatatttctagtttcatttaacccaaagaaaaaagaataaactctaatatcaagaaggcaagaataaagatgtggttcccggcactttatggtcgtcgtccctccctttttttactgcctccccatccccccgtcggacaaaagctaactatcaaggcctagagccactgacc

SEQ ID NO: 373130 - DNA, 379 bp, Zea mays
tcaaattcagcccgtcgtgtcaatagaatcagacaacggcgataatcgtgggcaatgtgatgccgttgcccaaaggaacgcgagggcgtttggcgaatttcctcaaagcccatacgctgccagaaggcacgaccagaagtgttagaggcgatcgcgcatagctcaatccctgttactccctgcgccgccaaccatcgctcaaacgcttgataaaaggctgatccgactccctggctgcgatataccggatcgattagcatcgtgcctatccaccaagtcgcagcttccggataatcttgcacggcaatgatcgtaccgatgagtcctttctggggatggtggagcccaaaaacgtggagatccccgggtaccgagctcg

SEQ ID NO: 373131 - DNA, 247 bp, Zea mays
attcttcatctgcaaattagtcagtgctggcagtttcttactgtcacagttacagttcactcctaggcgattgtttctttttctcatgtaaaaaggaaaaaaaaaggaggacatgtcacatgttgcgtctgaatggagatcttgtttgtctgtctgtccgtctctcccgttgacttgaggggaccggtcaccgtcggggaggaccactgaaacgttgtccttgaccatgatgtaaaaaaacttttgc

SEQ ID NO: 373132 - DNA, 335 bp, Zea mays
ctagcattcgccctccttgcccttcttatggtggttctcttcgcggttctccttgacaagctgctgctgctgcgaggctagctgggcgtcggggcgcacggtcttctcatatcgcgggggccgaacacgggaagcaccgagacatggcacggccgcctcgggcctgggatcacccaccccgacctcctcctcctcctacttgacgactgctcctctcaggcctcagcctcagccacaggtcctgttcctagtcctcccgccgccggttcactcgtcccgcgccaggggccaccaccacaggcatgccctacggcctttaatgcccggcgccggcg

SEQ ID NO: 373133 - DNA, 408 bp, Zea mays
ggccacataatcaatctggtttcccttgaggaatatttgactgataaattggaaagcaataggttgctgtaggttttccagaattacggtcaggagtaaggtgcagcttacccttgcccggaaaaagcatccaacaatattaatacaagggtcgggctataagcgtggtaaagaatttaattacaaataattttatatgattgttgaacggcgctattttcctctaccaaaatactgtatctgcgatggtccatcttatgtcatcacttcctgtagtttcggcggcagtttattaaccccagaaaccttaccagagcttctacataatggggatgaaaaagttattaatcagcttttagaagaaggaatttgtttaccattattctttcctggggactgtgccttaca

SEQ ID NO: 373134 - DNA, 141 bp, Zea mays
ttcgattccttaaatcaaaaacacaaacatcgaatccgctcatctttcttgctttccgaaaaaaggcctggttactaatcaacccgtgaccgctgactttgaccggactacaaaaagggggaagggttagggaagggggtg

SEQ ID NO: 373135 - DNA, 218 bp, Zea mays
aatcagccagggaaatacacatgggtgctaaaacttgaaaatttacagaacaatgggggaacataacgagcagtttaaccaacagcaggggttagtttctgaaatctgagctcgggggggcaaccaaaaaacaaaaaaaaaagggggcagaagcactgtaggctgtagcaagcagtaaactttctgaaatgcacagacttaggagtcagcaccaccaa

SEQ ID NO: 373136 - DNA, 363 bp, Zea mays
ccggattgtccacaactgctccgggaacagggaacccagttttagtaacacctccttcggcgtattgggattactgaccagagctttaagcaggggcttgtcgctggtgtggctcagctcctccaacaaattcggtggggccatataattagccgctactagcttggccagattggggtcttgggccagttcccttagacggtctagactggtggactcagattgggcttcggccttgggagtaagctttttaagtttaggcataggaatataacaataaacctaatctaattgtgccagtgactgctgttttagagtcaaaaaatataagcagtaatttcgtttgataaaaagcaaaatata

SEQ ID NO: 373137 - DNA, 381 bp, Zea mays
gaaaaagaccagctaatgggagaaattctagaaacttggttatccactggtaaagaatttgatgctaaagcctgtaatgttgccgcttatatcaagcacctggaagcaatcacagaagctcgtaaaaatgaataccgacgcttgcgagatttagcagaacaatcagaaaatcaatcccagcgactacgcaattaccttgttagcaatatgcagaagatgggcaaaaagaaagttaatggagtatcggtaaatttatcactacggaagaaaccggcaaaagtcgatcttaattgccccttggaagatttaccagccgcatttatgaaagttgaaattacacctcgcctatcggaacttaaaaagcaccttcagagcaacgct

SEQ ID NO: 373138 - DNA, 394 bp, Zea mays
ttatcctaaaaagtagcagggaggagtccgtgacgttgcaagtccttcaatcaatcccaaaggagtttaacccatcatgccaacagttgaaactgacttggcccaaatcctggaaaggatagacggcaagctagaccgaattgaaaaagacatcagtgacattaaagtttcccaagcagaagttaaaggggaaatcaggacccttgacgaaagactctctggacagataaaagctaccgatgaaaaactatccggacagataaaaaccaccgatgaaaaactctctggacaaataaaaacccttgacgaaagactctctggcgagataagcacccttgatgaaaaggtcactggcattggcaagcgtctggaaaatcaggaatttaccagcaga

SEQ ID NO: 373139 - DNA, 318 bp, Zea mays
ttgaagaacgagaaaaactttcctgaactaaaacgagtttattccgaactaaaaagtttatgtggaggtgtacaaaaagataaaatcttggttaatggacagcagaaagagagaaaagttttaccctctccaatatgggttcgtagcttgggtcctttcgatgtagttaccatctttggagcaacagcttccccccgttcagattatttacgttctctccagggggcaattcagatttttcctttgagctaaactaatgaaaaatatttttattgctcttacaagaattgatgtattctgctgggtcgataaaggctc

SEQ ID NO: 373140 - DNA, 340 bp, Zea mays
cacatacaatacagatttcaaacatatggatatatgtccatatcacaaattcacacaagtccaaatacataagttcacaaatttaacatatttccaaatacaaaagttcacaaattcacacaagttcacatcgatagttcacatttttagttcacaacttcaaacacacaagttcaaacattagctccatcgctctcgatcaggacatcggattgttgttcgtagctccaccactagaattgagacatctgtccgcaaagtcaacgtgagggggaggagtcacttgatgagagccgaaatcctacaaaataaaccaaaattctcataaatacacaactgg

SEQ ID NO: 373141 - DNA, 360 bp, Zea mays
gcacctattaataattcatagcaaaatacacaatatcacaattcacatatacagattcacaagcctaatacataatttacaaaacactttcacatattcataaatagtccatagtccattcaaataagtccagagtccataagtccataagtccattgtccattcaaatacacaattcacaaaacacactcactagctactcactactcactactcattcctcactccggcgggctgtgggaattttggccacttcctcctccgccaccaggaaggtggccactccctccagcaccatggacgaggaagtcttggacgttgacaccaccctccgatccatgagcatgtgacgctgaaccc

SEQ ID NO: 373142 - DNA, 357 bp, Zea mays
ttccttttttttttttttttttttgaaaaaattttttttttttttactactgaatagatcgacttaataattatcgtcaggaggacattgactgatcgacgtctccgtactgacagacttttccagagaccctgattgctactactgctacgcgagccctgcaaatcggtccatccatccattaacacgaaaatagtccctagttgataggccagtcaatccttccttccttggtcttgtaaattcctcctcctcctcctgcatgctcgtggatcagttgaagtggtcgtagccgtaaaccactccctcaaatttgccgggcgcgaggcccatcatgttcatgtagctgttgtaggc

SEQ ID NO: 373143 - DNA, 374 bp, Zea mays
atcaaataagctgcttttttaacaagcagcagctgtgccaaacagggcctgagtcatccaaggatatcggtggaaacctgagcttccgtgtacatttaacatccaagatcattttttcatacaaagttaatagctccaagccagattctggaactaccaaaaggccaaatgacagtggttagtcatttgttacttccagctgggacggccgcctgcttattctgcctgattgacctgggaacaaacgttaggccacgagagcgacggtggccaaaggtgacgcttgcgggcgtagaatccgctgtgctcaacctcgatacagcagaggtgagctcatcaatcttctgctcgacctccatttcgtcctcctgggc

SEQ ID NO: 373144 - DNA, 416 bp, Zea mays
gggagcacaaaataatttgagaatatgatctcggactatgcacaaagtgcaataaaaaacaagcacttgacaagaacctcagtagatggaatgaatagtagctgcgaatctgaataggacaagttgcgatggctgaacactaagggagacccgatctatgatcagaagcgagaagcgtaggcgctggtgcacacatatctaaagtggagcaccttgatccatcgctaacctaggagtacgatcaaggcattctcataatcaattctttcctttaccaaaggcttcaaggtttgagaaagcctaagcaagacttctgtggaaacaattaaacagttattgcacacaagacatagctcaatcggggaccgaggaacataaatgaaacagaattataataatatcaacatctttcactt

SEQ ID NO: 373145 - DNA, 394 bp, Zea mays
gcggcctgtccttttttttttttttttctttttttttttttacagcctcaaaacccatgatccatcattgcaaaacccagtttatcatccttctattcctaaaatacctgacacgccagaacacagaccatgactaccaccaaacacaagcaactagctaagcctctagctcctatgaactataggaaacaagctcaatgggacatcagaatttcctcaaacagcccaccacagccttaggttccaccccgacaccactgtcaacggcttgagctaacgaaaaatattaacagccatttagacccgccaacttctcagtttgggttttcggatcctgtggggcgacatcatttcctttctcgccatttttttctcctgctttgcctaataaacg

SEQ ID NO: 373146 - DNA, 137 bp, Zea mays
gaaaaaaaaaacttacattttagaatagaggcacaagaaacgtagtacaagcctttgtacaatataatttgcaaaattatttttcagcccttgcaaaaaaaagatgacgtggtttccattcccagtcgggtatttag

SEQ ID NO: 373147 - DNA, 331 bp, Zea mays
ggcggacaatgactatcctgttaaagaactctttggtcagaaggtaaaaatataactcttgttaaagaaccaaacaataaaagacaagacaaacaccactaagacgaccatcaccatcaatttgtggctggcataccaacaccatcagtttgttgagtagacactaagtgatcaccaggaagaggcttctttgttcgaggaactatcgaagctgatgactcgttatcagcaggaggaaccaatattgtccgaggctctgttctgctctgctttctcaagtctacccgagttgggtcggtggaggttctaggagcctcttcctgctgctgct

SEQ ID NO: 373148 - DNA, 177 bp, Zea mays
aagggccaaaatttccatatatgtgtgatgaaacaacacagcaagataattacttcgtcgctcgttcacctcaactcacctcattttttcccaacccccctctcggcaggggaaggaatcaaagtagccggaccagaaacacatcatggggaaacaaaatcgcgaagagaaaacaac

SEQ ID NO: 373149 - DNA, 405 bp, Zea mays
aaaatccaaagcaaatcctataacttcatctcaaagtattaaacattaagaataattgaaaatgatagtataacttcacatctagaactactacagctgcaggtcctatagcggttaagcagacttaagatggagacacttgaccacgattgaagcttaatagttgatgaaggaggttgttattttcttccatcgacctcttcatactataaatggtctcctgagatgcctgtgtcgctacattagaggatctccagcttgacgaggccaagtgacacgagccccattgtaagcccaaacatgatccctgagaagagtacgaggaagaaggagatgaccacacaatcactatcagtcaaacgaaacaatgagcaaatagtaaattttgtacatcaaatgaatacc

SEQ ID NO: 373150 - DNA, 243 bp, Zea mays
aaaaaaaaaccttctcagggaaattcccaaaaagggggagacccaaaaaccacccgggggaaaacccccccccctttttttttttttccaatcccctaaggggcccctccaccaccaagcgaaattttcttttattcccccccccacgttttacaagggggtcttccccgcgttttgtaattttggggtccccccggggttgttattaaaaccgctaacccttaaaagggggggggggacccc

SEQ ID NO: 373151 - DNA, 221 bp, Zea mays
acgggaagctcattatttatcgaaaatagcccccaaattaaccatttgggggggtacatttgggggccctaatttactagtagaacaaataaatgtaaacaatgggcaaaaaaaggtggtggggaatggcccccttcctgtagaacaaaagggtttataaataaatagcgggacaaagttttccagcaaaggaggggcatatttcctaaaccataaaaact

SEQ ID NO: 373152 - DNA, 274 bp, Zea mays
ccactcattaaatggaaaattttccatcgatacccaggtaagggtttccgaaaaacatgttagggacagagtttacacgttaaatctgtattacctgtggcaacaaagttcgggccgtcggccaacactaccaggggactgggcactactaaatctactcggaaggttttaaatcggttttcgactttttggggcccatggtaaagataaccggcccagaaaatttacactcacgggggctccttttgatgcaaacatgcattttagggtttgc

SEQ ID NO: 373153 - DNA, 391 bp, Zea mays
cctacgcgtccggttctagatcgcgagcggccccccctgtcttccagcaatgctccacaccctcacatatgggacgtcctcactgatcgctcatatctggctcatgcaccatatcacccaaacgcaaatagccgcacgcccagatcaagctatgcacaaccagggccacgaaaccctcctgcgtggaacggataaccagcgcagaactgcccacgcctaaccatcatcccgcagacccgccgtgcagatacactgcgggggcctccatgtccagaacatgggaagaaccacgacgcgctactacacgactctggccggggatcacgccaacatgacatcgccctgcccgcgtcggaagtgcaaagcccagctgaaaccggtacacggggag

SEQ ID NO: 373154 - DNA, 541 bp, Zea mays
ctaggccgtgggtttccatcgacgaacgacgacgactctgtcgcgcgcgtttaggcgcgtcgccgctggccggccgggcggccacttccctgccgacgcggctgtggtggtttaaaattctccgtttcgccgcccaccgtctcgctgcacgtagttgcagttgttacatgcagggagggatacatgctttactgcttcattcagttatggtcgtgtacttcttcagaaaaccagacatgttcaggcaagaccagtgggtatccaaaaacaacagcaaagtggctcggcatgtcgacagccagctgctactgctacttgtacatataaaccacgcgctggcatgaactcctctccagcatggatagacgacatcgtcgcacaaatcacataccaggtcatggcaccacgtttcacatacctagtgaacaccaagaactattatgcaataccatcattttgctcgctagattttcctagctcagttgtttcatctgagcaagtgtctgtaggaactaaaacacaatagtatactgtatttact

SEQ ID NO: 373155 - DNA, 349 bp, Zea mays
gtcttacctccggagcgaccccactcccgaggagcagcttttcgcgcacttttgcagcttgcccatccaacagctgctctagctctagccctagctagtagctagccactcgggcgtgcagtcatcagccttctgatcgtcacccatggccactgccgaggtccagaccccgaccgttgtggcgaccgaggaagcgccggtggtggagaccccggctccgcccgccgacgtgcccgaggaggctgaccccgccgtcgaggccaaggtggacgagccagctgcccctgcggtgaccgagccagttgtcatcgctgagcccgaggcggcccccccggcggcggaggaagag

SEQ ID NO: 373156 - DNA, 449 bp, Zea mays
ggtacgcacgggcacggaggcggcaccggcgggggccctggtgccaggggcgacggtggaccccacgcgccgagcgccgaggtggcggtcccagacggagtgcgaccgagcggagccggagctggaggctgagccggagccggacgagctcaacaccgacaacagatcgggactcttcaccgaaggatctacggacaagcggaccgggaaatacctcggcagccatcaccacggccacgacgacggtgtcgggcaggccgaccgccccgctcccacgcgccgggccgtgcaccactacgagatggccgtcaggaacgcgggacacaaggggcagacatacatagggcgcacgagcgagagcttcaagaggaggcgacaaccgggaagggagtcaaacagaagaggaaacaacggagacaacggacacctttaccggggtccaaggaaag

SEQ ID NO: 373157 - DNA, 463 bp, Zea mays
gtcgggactgcagcaatgagggcatccagcgcccgccgttcctcgtggtagtcgacgtcgtcgtaacgaactgcttcccacatgtggcgaacctggagccgtaccctcatcaccgcggcccactcgacgtagttggtcttggtgagggtaggccacccaccgccgggaccgatgtccctgacaatggcctgggccatgcggcgaccatggtaccgatccagggagggagaaccgcgccgtctgtagaggccgcgatctccgtcgactcggtcgccgccgccgggagcaccgtcggcgcgtctacgcccgtctgggctgccgccgcgtgcgcccccgcctggagcgccgttagcgtgtcggtgcctatccgggctgccgtcacgcgcgcccccatggggatgcgcggttgccactgtgccggctgctcttgcgctgtttccctcgccagcctgagctcgttgtc

SEQ ID NO: 373158 - DNA, 304 bp, Zea mays
ccttattaccagtgcttgctaaaccaaggttctgcgcgatcttaatacgatgttagccacggatcgtaagaacgctgtacgtgtacgctactggaaacccttgaacaacgaagctattgtccaggctattgcggacacaatgacacagctggatcccaacgtcctgcaggaataccacgcatgtcctcctgaggtcaaaggtgtcttcaatgataagaagccaggcaactgtctagaagaagaaatccggtgtagtcaccaagtgcttgagaaggctggctaacatagacatgcctggatccaa

SEQ ID NO: 373159 - DNA, 455 bp, Zea mays
gtttacgacaactacgactccaagctgcgcacgccctccttcgacgtctccgccgccgccacgctcgtgctctccttccgctcgccctggcccgagcccgccgcgcgctacggggcctactccgacctcatcttcccctccgccaccgagcccgcctccgacctctgcttctactcgctctccaccgacgcgcccgccgtcgcctccatcgaggtctcccccgtccacccgctcgcctacgacggcgccaccaccggcgccgacctcgtcctcgtcaactacggccgcgtcacctgcgggaacagcctcttcggccccggattcaccagggacgccgacgccttctgcgggtgtggcaagcggacgtcgatttccggaacaacgacctcagctacgacgccatcactgcgggcgggaggaaagtctttggcaagaaaccagccgccactactttc

SEQ ID NO: 373160 - DNA, 322 bp, Zea mays
tcttgacgtgcggacgcgtccggaggggactatgtagattgtatgcgttcacctaagctcccaccatacacacacacgttgttagcagcagccgcttgcgctcgagaaacgggttgatggacatggtatgccatgggcaggctcatgcttagcggcactccaggtctggccatgcaccgggaggcagaccacgcggaactcgtcctgactgtcacttgcatgtggagctactccgacaccgagcgccaccaagtctctgatagagaggggggcgccgatgatgtggaatttgtgatcacgcaggtgtctgtgacgaaagggg

SEQ ID NO: 373161 - DNA, 466 bp, Zea mays
  unsure (1)..(466): unsure at all n locations
cggcccggtatccctggcgcttccaccacgcgcggcgtantaatgtactgatactgccatcaaatcacatcctgattcgctggaggaaggattttaggtccttaatccatccgcaaacaccaatcgcatggaagcagatagggacctgctcattcatgatgacttgtatatttgtggccacgaatattttgaagatgtcattgacatcggagcaagagaacctgagctgaaggagtttgtgttgtcagccttgaaggaagcaaaggacagactaattaggcctgatcacagcaagcaaggtgatcaacaggttgatgtaaatatgactgtgactggtcaggtgcctgcagatacaatagttgatatgaacatggcgttacacaccttagggttgattcagggggatagaagggttgatgcggacatagcgccaaatgtgccagccctagtccatggtgatgccatg

SEQ ID NO: 373162 - DNA, 341 bp, Zea mays
gcaaaactagatgctacaaccttgtccttaacttggaaaaacacagaccaaaaaggtttgaggttacctggtagtaaatagtggttatgccactgccactaagcccagatagaactatggtgtttggtctagacgatttcagacaagatgctgcagaaaaaaacacaaaaaggaattggttatcatttaccactttaatataacgaattgtgtcatagagcatacatgatttaccatgagcgtgcgctccacctccacgcccttaggtaggcaaggcacgaggcatttgattcagagtttagtgctgcttagccttattgctttgaacaaaaaatccttat

SEQ ID NO: 373163 - DNA, 260 bp, Zea mays
aattggggtggtttttttggggcctaataatccctaactcctctttcttttgcacaggacactttggaaaccagcgaggcatggatcatgccgcttaaatacaatcatggcataaacaatcccccctaatccttaaaacaggccgcagggggagaatacaaagcaatggaacattaggacaggcggaaaagctgtcaacaaacaaccagaaaaatttacacatggtttccatctggaattcacaacttgcctatgggggg

SEQ ID NO: 373164 - DNA, 296 bp, Zea mays
ccccggtggattactcgcgaagcacaaggtaccaaagagggtgtatgtattgaacactctagcgatgctgaaaaccctggcaacaacctgtatgtgactggtcaagcgactactgtaaccgatcgtgatctggagaagcacctcatcactcacggagaggagattgatacaagccttgagaatgatccttggacaagggaatcacgtggcaacagattcgaaccatggctgcttgtaaagatgcagacacttgcattaaccaactggaccgacctacgatgtaaggaccgggcata

SEQ ID NO: 373165 - DNA, 162 bp, Zea mays
cccattcgtttgcaaacgggagagatcataggaagggaggtgggactattaacgcgggccgccgccgataaccccagacaaagcagagaagatgctggcttggagaatgaaaggtggcggtagcgtgaaacgtagcaagacagggaaaactctggaaagatt

SEQ ID NO: 373166 - DNA, 127 bp, Zea mays
ccgacgcgttggctggccggctgcatctttctcctcccacggggagcttcttcacctcctcctgggtatacaactgccagggcgcacgaggagaacggcggcatttgaaatcgcgaggcccaggctt

SEQ ID NO: 373167 - DNA, 216 bp, Zea mays
cccacgcgttcgttcaccgccgcggagaaacgagggggacagggggggaaaacgggagcaggggcaccgggcaggaccgacgggggacgaggaccaaaacggcatgacgaacaagggcgagaaggggaaggccacgaaaaacgccacgcagagggacgacgaggagtacgggctggaagagcaagagcacaaagcacacgagcaggaaaccgaggc

SEQ ID NO: 373168 - DNA, 150 bp, Zea mays
ttcgtccgcccacgtttttttccccgctgcgggaaaacagggacaccgggggatttatgacagcgactgccccggttagcccgaagggacaagttaggcaagaaagcttcataagaaatggtctgaaaaggtagaaagacaatatagtga

SEQ ID NO: 373169 - DNA, 427 bp, Zea mays
gaaatctgaacgataagccccacaagcaggacccttggttagttgcgccttattcaagttcagatgagtccaagctccaaactgtggcgtttgggtagctagttcagcatctcacagctttggcacaccttcagtttggttcatgacaaccaaatacaatagggagtgcagaataccaaatttctttggatgctgctagttttttgttatttcctttggatgttgctagcttctacctttgcgctctgcgtaaaattgctactttgcctgtttattttctgaataagctttcagtgataactttttctatgaacgagacagcatttggactatgcagtatgctgcttcactggattagttctgacagcgggctatccgtgagccttgtgatcaggtctctgtagcctgcagcctgaagtgatcactg

SEQ ID NO: 373170 - DNA, 214 bp, Zea mays
cccacgcgtactttccccgccctagggagatccagcaccacggggggctttataacagcaagggtgccaaggtgcaccgagaggacgcgtgggatctgctcaccgatcaagcgagcatctcaggccggacacgagatgcccagttccgagcctcatggggtgtgacgaccttgtgcaagaactacaagtctgaggagctggcgctgacccaccc

SEQ ID NO: 373171 - DNA, 119 bp, Zea mays
accggtgcgaataaccgggtcgaccaaccattcgccgacctttcttaacaccagaccaggccagggaaaccgggggcgctttttagagaaaggcgccagacaaacgacacggagacaaa

SEQ ID NO: 373172 - DNA, 264 bp, Zea mays
accagttgtatccctccctgtctgctcaacacaagcccggccgtctttgtttgaagagagccaccctgacagacacgcggctccgaccaacagtggcactgccctgactgcagcggacgcgcaacggcctagaccggacactcagcagttgcactgatcggagttgtagagaacaccacggaggacgaaggcattacgcgtggcaaacctacgaacagctcttgccacatcctgaacaatgctaaaaagcgcgtgatgaacagc

SEQ ID NO: 373173 - DNA, 172 bp, Zea mays
cccacgctgacggacgcccgagaggaccaagcagaagggggggaaccggaaagaggaggcccaccggggaacaccggacaagggggagaaggaggacgggggagagaccaacgagaaccggacccagcaacaggaggcaaacgcaaagaccaacaggaactagaggccaacg

SEQ ID NO: 373174 - DNA, 445 bp, Zea mays
aacgcctcactccaaagcccgcgtgctgcctgcgcggcagacctggagtaactgagcctgcaccgcggcaggcggtacgacgcctacatgcgccggcgcgacgccaggcgcgtggccgtgtcggccgagcagcggcagcaccaaccggcgaatggtaaggttcaccaacctcgaggcgtgcgcgccacgccgatgagcccgcgcgcgctcaggtgcgcgggtcgggacacgcacacgcaacaagacgcggccgtgtcgaccccgagcaccccgagaagcgacggcgcgacgctgtcgaggagcaggacggtgggcggcggtgcggaggggagcccggcgaggccgtcgcactcgcaccaccagaggcggaacagcctcggcgtcgtgcccgccgagttcggcgagtgcgccacgccgaggccgtttctgaagcgcggtacgggca

SEQ ID NO: 373175 - DNA, 379 bp, Zea mays
tcgcccacgcgttctgtcacggaacccacgaagtcctctgcacgcggggccttgttcgtaggggaggccgccactgaagccgagtccccgttgagcagattgatgtaccgcgcatgcgcccgcggtaaatgggaaagatcaggagtcgaacggcatcactagaaagaggtagagcgggagcacacaagcggacgcgatagggaaagcaaaggaggcgcagacaatctttcaaaagttataccggatacgcagaggactgtagggactcactggagaacgatccgtaatgtcttgggtcatctgtgcattatggcggtcgagattatttctacggcagctagacaactcgagaaagtgacggaagactccactgactaca

SEQ ID NO: 373176 - DNA, 280 bp, Zea mays
caacacggccaaccagggcgccaactggaagccattcacaaggcgtttccttggaacacggcttccagatgtcaaggtgctgatggtaggagccatggttaccgtggtggtaggcatgcacagaatgacagtgcttgtggtggcttctctagaggttggaacaagaagactaccgtccgtaagaaggtctgggcagggttgaggaggcgttctcttggtggtggtgcggagagtggcattgatttttcaatgctagggcaggacggctgggctggggatg

SEQ ID NO: 373177 - DNA, 162 bp, Zea mays
cccatttgtactaagacacgggggacataaaacggagggtgggtgttttataagggtggggcccaagacaccctggaaaaggaggagttgtgtgcgcacagacaagtagccgggcgggagctatggaacaaaagagggatatgaggtaccaagtaggaccga

SEQ ID NO: 373178 - DNA, 165 bp, Zea mays
cccattgttaacaacccgcggccgagccaaacaaaccgggggggcttgtcaaagaggggcgccgcggagaccgccaaccaaacggcgagcgaccggcacggcagggacgacaaaaacggagagctggaaacggagcaggcgctcgaggacacaaagaagccgcac

SEQ ID NO: 373179 - DNA, 469 bp, Zea mays
acttgctgggtcgacttattcgtccgccctttcgtacgctaccacaagcaggacgtgttcgcgcggttgtttttttctggagactgcgcgccggcggcgtccacgcaggtggtcaacggtgggggccgcaacccggtgttcgaccagtcgctgcgccttggcgtgcgcgcgggggacgtagacgccgcgcttcgttgcgaggtgtggatgctcagccgggtcaagaactacctgcaggaccagctgctgggcttcgcgctcgtgccgttcccggaggtcgtcgccgtcgacggcggtacgctcgcccgcgacttcccgctcaccaccagcgacctcttccagaccccctcgggcttcctgcagctcgagctctcctacatcggggtcgtgccggtggtcgtgcccatctcgccgacgcccaagcctgcgctggccgacccggaggaggaggaggagtcggggaacaacg

SEQ ID NO: 373180 - DNA, 218 bp, Zea mays
ggctagaaacagaataaagctgttttttaacatatcacaagaaacccccgtttttgttttagaatgttttatcgccacatattacataaaatggacaacgtattcagaatgggatactgaaattcactgaaggcacacttggctggtttcattccagatgaagcaaccgggaccgggaatcaggatgagcggctgttcggccattattgttttccagg

SEQ ID NO: 373181 - DNA, 380 bp, Zea mays
accgtattccctgcgattcctctcccctcgcctcctcggctccccctatgggatcgtcggagaggaatcgcaaagagggccgtctcatccgagcgcggcgaccatgaacatgtgctccaagtgccacaaggagatgataacgaagcaggaacatgccaacgctggctgactcctctattgacagcattttgaacggcagatacaccgacatggagtcggttgcagctggtagtaacgcggcagtagctgttgcccaagttgagttgcaaacaatgaacgtgcagcagcccgatgatgttgccggacccagctagggggtggcagtcatctccaaaggggggaaggtagggccgaaccggtgcatcttctgcacgaagagg

SEQ ID NO: 373182 - DNA, 430 bp, Zea mays
acagatgaaaaagaagaatcatctttgtctgaaacacaaatgcttcagtggtcaaagcgagtctgaaattaccattgtgcagcatccaggtaggtactcctgtgatgtagtaagaaacacacaagacccccacaacagtaaacagacccttggacaacggccccattattttcttcatcagaaggctaatagttatacttcaacattaatttctcagtaggcaccgcaccaccaccaaccaaatatacagcatggatatccatatcccactatccatgaccgtcgaaccaaacgcatgccactgtcagagggggggaaaagcttcagatcataggaaggcttctacagtacagttgggaggtcttcagatcataggaagggcttctacagttcagatcatacgaagggcttctactaacattgccgagag

SEQ ID NO: 373183 - DNA, 174 bp, Zea mays
cccacgcgtttttaaacgcccgcggagcaagcgagcaaccaggggggagataagaaggggaacgggccgacgcacacaaaggagcaagcagcacaaaacaagaggggaaacaggaggagcaaggccaacacgcaggaacacacgcggccagagaacaacgagcaagcagacctg

SEQ ID NO: 373184 - DNA, 134 bp, Zea mays
cccacacgttcttaaacggaccgcgacagaacagggaaaccgggggaaggtaaaaaacaacaggcgccggaacgcaccaaagggagacccaaaaaaacggagcaatcagcaaagagagaacgagggcaagcaca

SEQ ID NO: 373185 - DNA, 244 bp, Zea mays
ccctttcgtatgggaggccccagcactagcgtccgccggccggcgtattatacatggtgctggccgctcgcctcgcctcgcgctcccgtcagctatagccggttcaagccacttgggggaacggaggagtcactcaagttcgcttcctcaggcaaggatgcatctccaggtgaccgttctactgtcagcggggatgagtcatctgaagggcatattatgtgaggttaagaagaagtttgagaca

SEQ ID NO: 373186 - DNA, 327 bp, Zea mays
gggcaaaatcacattatctacaactgataccatcctgacagggcaaaacatccgggggagccatcttctatacttgaccactctactttgagctatatatataatatattgcagtttccctatataaataaactactgaatgacccagaaaaaaaagagaggcagcaaatggtctcttggtaatcctgatggcaaagagcttcttctaccgcacagacccagctcggcggcagaccacatcaagagcttcgaccactgtccccgagaacccagctatggcttggaatatgcccggcaggccggtctgtatgttgttcagcgtcatgg

SEQ ID NO: 373187 - DNA, 150 bp, Zea mays
cccattctgtcggaccccgacccgaggcagaccggcgggcgggggataacaaaaagggcggcggccaacaccccccaaaaggggcacggaggcgagagcaacagggacgacgagaacaggacggacgacaccgaaacaggagcggaggaa

SEQ ID NO: 373188 - DNA, 138 bp, Zea mays
ccaatgtggtataccatgacgagcgggaaagcgagctagctgggatttgtaacaatggatgcgcccactacccccacgacagggagcagagcattgtgcaagatgggcaactagaaccgaactgtgtagaccgttagg

SEQ ID NO: 373189 - DNA, 179 bp, Zea mays
accgggaattaatggctgggtctacgcgttcgtcccacgttcttgagcggccgctcacgatcaccagacctgcgcgttctttcttattatgccaagtgcgggcgtgtctgtcaccgtttaagcccaacccatgtatccgctggcaacccgtcctgcctcatggacggcggctgcgggat

SEQ ID NO: 373190 - DNA, 427 bp, Zea mays
gaaaaagaatatagtaatcattccttcatatgtcgtaacatttttcttttcgtcatcatcataaaaaatacccaacatcgctcatatacctccaccccaaatgcatgctaacaaatctattacgtacacagatgctaatgctctgcctacactattgtttcaacttttgaatggcagctattatctggggaaaaaaacaattctctcttttacaagagccatctggcacagtaaacaacattgctgttgctggatggttactggggtcctaatctgccgcatggatagggtacaaatgttgtatggtcaatgctttagaggttggatgtgaggttcaggttcagcagggaatagatcaagaagggacctatggatcatctcgaagctagtgaaagttatcactgcagcaggggtcgtccgcaacaga

SEQ ID NO: 373191 - DNA, 59 bp, Zea mays
caaactgacatgggcataatcctatacaaacataggttgatgttggccgtctccaactg

SEQ ID NO: 373192 - DNA, 489 bp, Zea mays
  unsure (1)..(489): unsure at all n locations
ggagttatcngttctatcttgctctaagcttgtcttcaaaccatctgtgcctaagtgtgcgaaatatgtaataaaagagagtaacatggttctgtcatgttggcagcctctggggccattctcatctccaccaatagaaaaagtagagataagtgggtgtgtgatgccttctggttggttgcaatggcttagatccatacagactcttgagaaagtagtgatagatggtgaagctttttcatcttttgagctccagaagatatatgcatttcaagaagcatctggtagtaagatttcaaaggaaactgtaagttcatctaggacaaatatgtcacgtgagttgaccactgaggatggtgcccttaaagctattggtatcgacaactcaacaatcaaacatattccaaggtttaacaccacttctgaactctcagtggatactatttcatcctctaaagtaagcacaccatccaaggagatcccatcaac

SEQ ID NO: 373193 - DNA, 425 bp, Zea mays
  unsure (1)..(425): unsure at all n locations
ttcacgcgtccgcccacgcgtccgattatgaggtggtataacatgatccatatttaaatctataatgacctaaggaactcatacaaagaaacgtggatgttgtagaagtgaagtatgttttccatgtttcttcatattattttgaatcgtacatctgaggttacagcactcaaatatttgtttgctctatatacctgtcctggaaataaatctgtcatgcatgaatgagaaaaacaaacggttcttcatctctggaggttaaacttgtttttttttgctttgctcaatgttttgtttgcctttgttgcttgctatttacattgtcagttgaactatgacaacacacattgttgcacctctgcatctccaggacacattgacaaaacttntaactatngcatacataactgagagcacctagaggg

SEQ ID NO: 373194 - DNA, 145 bp, Zea mays
gaagggaaacaaacttttcatgatgttccattatttacattattttcaagccagcgcatttaccgagacagccggattaatacatttacaagggtagcgattcaatagaaggcctcaccttgtcaggggaggataactttttttt

SEQ ID NO: 373195 - DNA, 232 bp, Zea mays
acctctctttacgtgacgcgtgggctaacacatcctgcgacctgtaccatcgatgggtcatcttttacaatggtggaaggaacagtacatcatacgtcgaacgtgaacaagaccaacagcatccagtgaggactaaacaggcgtcgcaaatgtctgatacaagaagtaaagcacctactgatactggtttactcacattaacatggtaaggtcctaggtacaacatgcctac

SEQ ID NO: 373196 - DNA, 381 bp, Zea mays
ataatactaacgataatattcgtgcttcttttatttatctggtgctagctcaaacatcacggaacaataatctataaacatacaagaagtacaatactcacgtccttcctatttcaccgaatttaactcatatatcaggcaacaacaccctaagtataagttctatatttttcctaagctatagtctataccaaacaattaacgaaaactaggttcacgtttctaagataattaagctcaagactactgatagaaatcatttataactttctaactcactatgctaattagaatgtctactagcaaaggattaatttatttaagcaactaaatcggcacggcaacgtcatctgaacttactagctagccagataaaatact

SEQ ID NO: 373197 - DNA, 482 bp, Zea mays
  unsure (1)..(482): unsure at all n locations
ctctctgtctttgcctgcggctgctgctgctctgggacaggtgggagaggaggcgccacacccagacgagaggcttcccgagtccaccgccagcacgagtccaccgccggcactttgactcggagccggagattcttgcgaggaactggcagggatctgctgcccatccgcatatcatgctgcaacagtagttcactcgtcggaggaaggcgcatcacacgaactaggtggaaggaaccggacggagcttggagagggcaagcgggcaaggggagtgagtacgtggttctcgggtgtcttctttaaccactctgtccgatccgcttgntgtgtctgcgcgatcctgttgacgaatcaatcgccgggacggttaattaagcattccaatcctcagccatggccgtggacactactcaaccggagtactggctcaactggaggttcttgctgtgcgcgctctgggtctactcctgcatggcctt

SEQ ID NO: 373198 - DNA, 142 bp, Zea mays
aaggcagaattaagtggatagtttccatgttaagaacaaatgttacacacatactagacatgcaagaaccttaaagaacactccctgcacaacgtgtcgcacaggcagctgtatgcggacatgcttattgattctgaattgc

SEQ ID NO: 373199 - DNA, 396 bp, Zea mays
tgttctttgtcagctgacttgctgaaagtgcttcagccttacaggctaccgctagggatgtttccccagctcgcgatggaagatgaatgcaaaaggagatagctcatccggagctaagcatacggaaggccagatgaggcatgggccttcggaagcatctggtccacaagggacgcacatatgccctgtcatggctacctcaaacctatccgctggcatgaactctaaaggaacattctaagacactcctgaaattgttctgtggatataggacacaaacactgtactacctaccaccgggggtgtgtataacaaccacaagcgcagctccgagacattatatcttgtcaagatgagcatgtgccctaagatgacactgcttatgacccaaatatt

SEQ ID NO: 373200 - DNA, 238 bp, Zea mays
cctcttagcctggagcacctcgtccaacaatccgggaccgcacgagaagagagagagggggtggtttgacacaagtcaggcacccgtcaagattcggctcgatctgctgcgggacatggagctggacagcatcgagtgcgtgtcctactccgacggcatggaggacgacgacgacacggccgtcgtcacctcgtcccatctccctcgccccttcctcaaatcctcctctaccgtcggt

SEQ ID NO: 373201 - DNA, 251 bp, Zea mays
aaaacggaacgggggcccttttgttttgccccttaaaacagggattaacacacggggccttttttctggtaaagccaagttaaaaaaacccgtccggggggccaaattttttacatttcgggggggttttaccttattttacaaaaaccctttttccccaacttggtggggggggggggccccacttagggggccccccccaaacacatttttgagcagcatttgaagatttccaggcccccaaggggggg

SEQ ID NO: 373202 - DNA, 387 bp, Zea mays
aaaggaaatcggagaagatcctccgtttatctttgtttcatggagaaaggttttcttcataggttaaagtaatcaatttattcgacaactggagacatttacactgagggctagtctggcaatcatattttcccaagtgatttccattttcctaagaaaaattaattaatatttccttagaaaaataagaatctcttgtaaaatagagttgccaaactagcgctgaaggtacaaactatagtcgctttattccgtcctctccaccttcacacatcaagttgatcgatctctcgatgggcatgggcatgcatctcatgaacgaagtagtacgagcaagcctgcagagtcaactgctctcctgcttcgtccctgtgctaatgagaaccc

SEQ ID NO: 373203 - DNA, 495 bp, Zea mays
agaagaatcgtaacagctcagaaggagctatttaggtgcaaccaaatattgcaaagagaggagtttgttgagctttcaatcagttgactggtgcctttgtcatattgagctagttctcaattctcacctacctgagctcttctgtcaatgattgagtattacagaaacactactgagtaatacaattgagttgatccttgttctatcaaaaatttgaaatcaaactacagattcagtgtgtgtcaatacagacatggggcagcaattaactcttaagtcactttctagtaatatattggctccattctggggggtaactgaacgcaagacaaagttgcagatgatggtcagtttcctgcctaagcatggcttacagctcctttggaataaacaaaatttcctgaatcatgtgtttttcctatgtttttgaactaattcctgtgaaattcctgtgttccaaagccgggcagtcttggcagcagtcacgaagaagca

SEQ ID NO: 373204 - DNA, 457 bp, Zea mays
ctgttctattctacataatgccagtcgagcttgtggcccacctgtaattaatgaccctaagctggtcagaggtgccaccacttctggccatgcagttgttcctcctgtctgggacaatggtggtgccttgaacctaaatgccaaagagaaaaaaccattaatcagaagggaaaatgtactaacccaaaagtcatcactgaatcattgtgagactattatgctggagaatggtgttcatcatttgagtgatctgaagagatgtacacaatttcaaaaaaaagaccatgtagagctgctcatcaagcgaccgcgtgtggagaaggaaccagtcagtttacataattctctacacagcaataggttttctaaggcttcaagagataacctgggtcaagaaattatacaccaattccatggtccagttcaagcaccactttgcattcagttacgtcatggc

SEQ ID NO: 373205 - DNA, 411 bp, Zea mays
accggcgcgtacagcggcgatcccggtgccgttgctgccgctgaatctggagcaacttcttgcggatctgcaccaagctctgcacaatgctatcgatattgctttgaatgtcgtggtgaaggccatcgcctgcaccatcttctgtatcgccttctgtgtctacttctgtggccagtgcgttgcacagggtcaattaccagctgaaactcacagggtgtacctaaatgtcgaaatagatggccaacacataggccgacacgttagtggactctatagggaggtctatgcaaagacagttggaataacaattatacttctctttatacagcatgttctgcaacaggttctgatattggaagtgagtgtactactttgcacacttggtgctacctgcgctgctgccttagactc

SEQ ID NO: 373206 - DNA, 498 bp, Zea mays
tgaattccttgtgtgccatcatcgctcataaccttgtttgtcagttgtcacagtattggttcacagaaaatgtttgcaataattatttgtttgtatttttgtgcttgctgtttcttacaactagtatttatgtatcacctacccaatttgtgattttcatatctgtgggcttctttttctggcatatcaagtatgtaggtctgcaaaacctgattcaacgaaatgagcaatcatatggttcaggaaacacgccttctggtggagtggctttgccatttatcctagttcagacccgacctcatgctaccgtggaagttgagatatcagaagatatgcagctggtgcattttgacttcaatagcaccccattcgagctgcacgacgactcatacgtcctaaaagaaatgcgattctgtggaagagaacaacatgacagcactcaagagtcgatatcaaatggaggtgagagctcaagcgtgtcaaatatttattggcaca

SEQ ID NO: 373207 - DNA, 219 bp, Zea mays
acaggagaccagctccaccagtgtgtagcctactttgacccatttcagttgttacattacagtgcccgtagtctaagcacatgcgcaaccccagcggtagcttaaccaattaccaatccatgactcaagccacgtgaagcattgaaaagaaaacatacaatctcattcacagagacacaacctgtcggatgcggtggccctgaaaaagggcaccggagg

SEQ ID NO: 373208 - DNA, 339 bp, Zea mays
aaatctgaagatccattgccataatgcagaacacgaacatacgtggtgataaataatactcaagtgttgcatgtaaataccatacagtgatgtgctagatacagagatacaaagaatgtgacgggcgacgcatggtggcaatcaacgaagtacgcgcactcgcacgaccgtgtcacgagctaatacgttgaacggcagggagaagcgctggactccgagcacgtgtcatgcgtggttctgtacgaagagcacgaggacgaacttggtggcgctatagccgtaccagagcgtaaactggaccgtggccgacacggccttcttcggtgaggcgacctccgg

SEQ ID NO: 373209 - DNA, 319 bp, Zea mays
ggccgacaaaaaatcggagctttgatatactttacataaggacaacattttttttttacagcattgccaccggtggactacttgatcatcaggattatcctcacccaaaacacaagaagaagggtgagaaggaacagaggggaaaatccactggaacatcacatagcttgccagctatccaaccaaagggtttataagagatggccaaacaaaaacaaaaccgaagggctttttttggggggcctccatagcattttggtgaacagacacttaacaaaacgtttttttttttggttagccgcaaagcaaagaaaatggg

SEQ ID NO: 373210 - DNA, 340 bp, Zea mays
gaaagcaacttattatatgattattgtgtattcataaattggaggataaaattacaattatattgcacacttgcatggtttgcaagcacaaaaacaatcaaaattgaagtactataggtaatggcctccctttcgtgtctgtttactcctacctcgcagccaacaaaaactcgtgaaccccatgacgtcagtgtgtccttgttggcggctggcgcctgccgatcagcaagccccagccttgaacccgacagcgccaccgccgacgtcttacagcacctcgaacgtccgctgttgcacgttgccgatgatgcctagggagctgtcgtccccgttgggcgtg

SEQ ID NO: 373211 - DNA, 118 bp, Zea mays
agcaagagcacagaccgagacataacgaaccgatacacacttgagatatagggcaagcctaatgtacatgtacttgttatgggaaggatttgtattcattctgcttctgttacactac

SEQ ID NO: 373212 - DNA, 217 bp, Zea mays
agacacgtaaaatgagggtatccagcagttcccaagacgtgaagcacagagtacctgttgaggcgcacaagtcgcccagtccataatttcgtctcgctttctttcctttcgagactgacagtgacagtaatagtaatacttggcgaatcaagataaccaccacacatacacacacaccttggccgggattctcggtaaatcccggaggggggggggg

SEQ ID NO: 373213 - DNA, 363 bp, Zea mays
cccaaactatatgttcgccggttattcttgtgcataagatgtaagaatatacaactcaaaaaccacttattataggtgtaaacgataaccaatgtaatcaccatccgaacagggcctaactgatgcttaacgtttcctgtgcagcctgctccaacagtggcttttgtggtgaggaagcgagataagctttggcttgcttgccgaaagccgtcttgagacttcccactaaccactgcagattgcctacctgaaaaggacatgtgcccaactatctgtcataggatagagctccttagacaacgagagaaattcccccccacagcagctaaacgcagcaggaaactaacaaaccttgcggacgaa

SEQ ID NO: 373214 - DNA, 486 bp, Zea mays
ctcgcccgcctgcacggacccggacctgactggccggagctcacgcacgcgtgctgtcttttctttcagtggccctgcgaatgcgtctgcggctgcgactgcactgcttcgcgtctgcctccccccgcgtgcgcccccgccccggcaaaaaagcaaaacacggccatggaaggctacgaccgcgagttctaccagttcagcgaccagctgcgcctgcagacggccgccttctcgggcctctccctcggcgactccatctggtcccccgccggccggcgcaacaacagcaacgacgtcctcttcgccgcctccgcgtcgcccgccgacgccgccgccaagagcaacgccgtcgtcgggctcaagctcaacgacggagggcccggcctcatcggctccgggaagctggccttcggcggcggcgcctgaggcggcggcaccaacaagggcgaccgctacaacaacaacaactctccccacaccgacaac

SEQ ID NO: 373215 - DNA, 193 bp, Zea mays
attggggggaaaaaaaaattataaaaaccctgaagagacacatttaggcttaacctaacatttatttgatttaattccataaaggatgggccatttccaaattaaatttaaccagcgcatgcagcttttggttgttggttagaaaaccagacaatggctgacatgcgtttttgtctccccatgatcccctctt

SEQ ID NO: 373216 - DNA, 213 bp, Zea mays
ggggggcactataccccaaggttagcaaaaaaagggcatttttatgtacttgagctgattggtgactaaagttagtttccctgacccacatagggctggactccaattgtatgggaaagaactcatcatctccatcatgaaaaaaaataaaaaaggcttggatcattggggggctactccacacaattttgctcgtcctgggttgagaaggga

SEQ ID NO: 373217 - DNA, 301 bp, Zea mays
tccctcgggcgcgcggacgggcgcgcggacgggtgggctgaattggacccacccggcctctcgccccccgacaaagcatggggccggcgatggggctcaaacggcctgcggctgccgccgcagcggcgggagcgggggcaataccagcaaagacggtgacgctgttcccgccggccgtgcggaacgcagcagcgcgccgccgggagggatgccgcggggaccgtgccagccgccagggtcccggagactgcggcagacacggcagagatcggtggggaccgggcgcagtgcctggaggagg

SEQ ID NO: 373218 - DNA, 478 bp, Zea mays
ctctagtgtactgtaaaataaagctgatgaagttatttcacatttcattttttgctcttaataaggtgtgaaaaatttgaggtataactaacttcttatatctttttttgtggataatttggttttttaaattatgtaacttggagggataggttttttactgaataaagaatggaaaaaagaccttttttagggtatgggtattaattggttacgagttcctcagcctgtcagctggtacaagagaacaagggtagacccggaggccaccacatgagtggggtatgggaaatggataaactgaggcaagtcttctttccgcaatgcgaagaggctgcttcaaacttgtgacctggtgactcagcgagacagctctcaccagtcaccacttcaccatgcttgctgttcttggtacaagagaacgaaatctggataataccaattcctatttgctgtaaaatgattcaaactactaagc

SEQ ID NO: 373219 - DNA, 345 bp, Zea mays
aaagggggaataaaataatgataggggggcaactcttcccaacagtaagcctgcgtttgaaagcagccagtacttttttgggtacaaagccctacgggtttaagagtagacctggataagctagtaaatgaaaaccataatacaaacacgctgaatcttcaagcccagcaatcctcgacaaatttccatagataactaaatcctagtataatgaacaagccttaacatgacatgagcgacaaatcaaacactccatactttcccaaaagcacatcactcacaaagaaactcgttgcaaactgagcaatccggacccgtgggcggacacctgggcggacccctggg

SEQ ID NO: 373220 - DNA, 386 bp, Zea mays
  unsure (1)..(386): unsure at all n locations
gcctcgcgtccggccacgcgtccacgcgacccgtgggctcaaatgagcaacgcgttcaatgggtctgtgaaggctcttggggaagactgtgtctccgtgacgctcctgcctgcacatgtgaatgaccaggacagctcattgtactcggatccaccgcatgtatggaaatttgtcgaggattgctgggctcgaagattcagcgtgtttggcttatgggtctcatttactagcttatccaggtctactcttaaacccggagggcttcgtacccagaaaagtactggctgctttcagacgcatgcttactgttggggagagttggcagcgtatcatcatcttattagcattctaaagcaaaatatcgnacaaaatagtagccaaacaaa

SEQ ID NO: 373221 - DNA, 413 bp, Zea mays
tccttttttttttttttttttttttaggaaaaaaagcggggggcaattcacaacgggcgcatggaaaagaaactcctacagaaaaggcgaacatctcaacttgggcatgtccaatcccaagacacccacgggcccgcatgatctctcaccccatatcgctcagactttaggctaaacctcaagaccccacagctcacaactagggcagagctaaaaaacctccaacacgaagaacacccaggaaaaaaacaaaggttgcatttgcaaacagtaaaaatctattgttacatccagcttcgatttcctcactcctggattttctcctcagatgtgtgcttggggggggttacccaatgtacgtaccatcagccggcgccacttgagtccagctcccctgttcgatgggcttcatg

SEQ ID NO: 373222 - DNA, 508 bp, Zea mays
tttgctttctgtaatttgacaaagttattacatagactgtataccgggcttgtttggatacaggggctcattgttttcagatcggctgactaatcgcgattagtcgggctgattgtttctctgtgctcgattagggtgttggactcgattagtgtaactgatcgtccatatcatccgatttctcgaagacctcttgtacttttctttgcttatatgactcttcagtcatcatacttgagagcttattgtgttctgaaaatgaaaagtgatgtgactaggatatatccaaatgtcactctctcccttaccagagatttaggactctggtaattattttatgaaaccatacgcaatatgccttactgccatgatgactttctttatccttttgggtttctctctgaaattatgtcctggttgtgaaacaagaaaatgcagacataccgtttcttgtactactaacaccagctggtatgttctttcaaaaaaaagtggtacatagttttac

SEQ ID NO: 373223 - DNA, 300 bp, Zea mays
ggggggggggggactatgccttattcatatatagcaatcagaaactatccgagaaaggaacagatagatgagccacaaacatttatttcacacagtcattttaaagcaaagatcggtttccagagaaccatttttcacgcgacaaggcaaaacctccctgaaacctaaacaccggataagttttcggggcaccggggcaccgagcaggtttacttccgggacatgcaaattacagcgacattgggaaatcattttaagagctggccatcaggttctccattgaaggggggtttaccctgc

SEQ ID NO: 373224 - DNA, 218 bp, Zea mays
gggaaaagggcgcaagcaacaagacccccggtttacaaaagcccctaccaaaacagggggggacataagccctaatttttttttccagggaggggaaaggggggggccccccccccccgccaggggagaaggcatgtgccaaggtaaccgtctacaaaacccaaagagccggcaacaagccatgggtcctaccaaacacgggaaacaaaaccccccca

SEQ ID NO: 373225 - DNA, 272 bp, Zea mays
aaacccccggacacaaaaaaaaattgcctgctttacaggaccctgaacccccaagacggggtttatgacaacaggggccacgacaaactaaaaggatttttttttataacccccgcctcctaattccccaaagggaaaaatctaggggggacaacccgttcctttcccacaaaatttttttgtttaccggttcctaaaacaaaagctccagggggggggggggtctggggaaaaaacaaaatccaccttaatggggggacaaccatttttgg

SEQ ID NO: 373226 - DNA, 511 bp, Zea mays
ccctcgcttccggccggcatccgtgcagccgccagcaccagcaggccatgacatggcaccatgtttgagctgacagctgactagctgagcgtgccgccttgccgtgtcggggagctgagctgagcctagagacgccaaacggaatggcgaaagcgaccggccgcgcggcgggcagcaggagctgcatcgagaggctgcctgcgccccgcgcccaatcctcttcctaaatcctaatcccctccgcctcatccccttcaaccccacgtctctctcgccgaaggctccggcctcgtcgggatccggtgctggattgacgcaatggcgccgctccacgccgcgctgccgccgccctcctccgccgccgctcaccaccacgcggcagccccgcctgtcttcctcgcccgctcgccgtaccacccccgcagggcggcggcctcctgcccgctcgccgtcgctgccgctccctcgtcgagaaaagcgttcttgtcgtgcccgctgctgggccactgga

SEQ ID NO: 373227 - DNA, 312 bp, Zea mays
ttcttttttttttttttttttttttttttttttttcgggttttttaattttttgggggttccccccgcccataaaaaaagactggaaactttttttttttaaaaaggaggttgaaagctgccttaaaagggaaacaaatatatcgagcaacttgtaaaaacaagggtgctaattgctttgattccccccaccccccgggggctttttgttttttttccggctttaaaatggtccacaaaattgcacccgaaaggggcagggttccttaaaactggggtttctaaacccggggatctagggggggggggcccc

SEQ ID NO: 373228 - DNA, 123 bp, Zea mays
agcccaaggggctcatatgctatatgacggggaggatcccagttgcaaacacacacgtttgtacatgtgttagttctggccaatccccaaagtgagcacatgcacaccagccaacaaccttgg

SEQ ID NO: 373229 - DNA, 521 bp, Zea mays
ccctcgcttccggagggaaggaggtagaagcaagtgcaggcagagcagagagggtccgcagctttccggtcgcgccggcccacgccaagcggagcggccaacaaaaagggcgaggcgggccacgtcgcacggctagcaccgcatcgcagtccgcggcggcagcagcagcagcagctcctcctgctcctgctcgacgctgtagtcgcctcgcatttaccactcactcactcgctctgcccttcaccccctcgccttcctcctccttccatctcgatctcgtactctccttcgctcgcatcgcatcgcatcgcaccgacggacgcagagcagggtcgcccgccgccccaccacccgcgcgcggctcttggcgccgcatgccgctctcgccctcccgcgccgccggcggcttgcttcgccgctgcccgcgcgctgccgtcctccccgccgacgccgccgacgcggcaacggctcgactcgaggcgatgcagatcggaggatatagcgggaaggagatgagaggt

SEQ ID NO: 373230 - DNA, 385 bp, Zea mays
ggataaaaagctgaaatgcattgggcttttttattacaaacaggggcatgatttgtaagtgtttcctcttgcgagcgaaactaggtgatggcttacatgactgaacattctagcttataaatactctccttcggtatgaggaggtcaagtattgtttaattagattcaatcacggtgggttcagatccttcttattgtccacttggatctcagacctccaacaaatgagctttctcgttcagaatcgtcccagacccttcccatagctcccatagctcattccgtaaccatgacaagtactccctccggtgcatcaataatcgacgttctagctttgagtccaaagtgcacgataaattgacgtttcacgtggagcgaggagaac

SEQ ID NO: 373231 - DNA, 302 bp, Zea mays
tctcgcgtccgcctatgcagagcggtacatgggggacgacttgagtcccacaatcgacgccggcagcctgccgaggcttgctggcaacccggccggtcgtgccagggccagcacgcggacggtgcgagaactgccctagacataaatcgcgccgagctcacaacggagcaggatgtcaagcgagatattccatgggagcattacaggtcaactaaaattatctccataacgagccatgagcttttacagcgatatgaccacacaccgcttagccattgagagtcaaaacaagaggaggatgg

SEQ ID NO: 373232 - DNA, 407 bp, Zea mays
accaaaagagggggaggtgttattcgccttggggtcaaaaagaacaagtttcgttcacatcgaagcacttcacacattgatggaaaggcaaaaaatatattacaaggtatggacaaaatgtacagagtagaatctaattcttaagttacaatatttttacaaaggttaatacaagaattcttagagtttcttccatagctagctattcaagcttcatctttatctattgagcttcagatcgtctgctaagcttcaacttcggcatccggcttaagatgacttcgagcttcgtcaccagctaagcttggtccacccttcgtccatactagctttataaatctgtttcctatgcttcgggcaagactcggaatatcaatcagatctgctggtgataagctaaagttggg

SEQ ID NO: 373233 - DNA, 564 bp, Zea mays
ctataagtaaagctggcacgcctgacgtaccggtcctgacttgtcgacccacgcgatcccatattttttagatgaaaagcgtgaatctataatggagggtttagaaagcaaaataaaagatcaagcaactgctcttgaaaagaaggatttcaagctccagacaacagagggtttattggcagaaggtgaagctaaaatttcaaagttgaatacagagcttctctctaagtcagaaagcttcgaacaggaaaagcagaagtttgatgcaaaatttgaggctgcggtcgaaaaaagttcgaatttgcaaaaatcattgatagagcttcaaaacaaatgtctggagttcagtagccgatgtgtgcaacggctaaagcagatcttcaattcggttggagccggctatgaaaaatttagtccttcgattgaagatctgccaggggccttcgaacatatcgagggtgaagttgatgcccttgatgaaattatagccagacatggtgatttctgtgccctggtagcttctcggggcacaactgttgcctttctgaaatctgttgcacacat

SEQ ID NO: 373234 - DNA, 309 bp, Zea mays
ttactttggacaccgccggcgcctaccctctgactggtggcgacgagccgccgccgccgacctaagcgaggtctctgtgggactctatgctggtgacgagcaaccatcaggtccgaccctgatgagcaggcccaacactcgcaacaagagcaagaggccacgatctgatgaatccattaatacgtctgcggatgttttcaagaagatacactccgccggtgatatctcgaaagacgatatctgccagctttacatggtgtggaaaccgccttgccatggctgccatggcaatactaaggattccccaaa

SEQ ID NO: 373235 - DNA, 313 bp, Zea mays
gaccaaaacgatctcatgggggccctttaaaagaagcgggggctaacataacagataaaacaagactaaggacacatactattgactgacagcctccgtcgcgactggcgactaggcaacccaagcactaaacagaccacgtaagacaccagagatgaatatgcaaaggagttgcagagcgcatgcgataagtgcattagacaatattcaatactgtgaggaaaacggtgctaacatgaggccgacatcattatgagcccatctatctcttcatgacatatcccagaagcattcccaggagagcaatggccac

SEQ ID NO: 373236 - DNA, 318 bp, Zea mays
cgcctccgttcctgcagtcgcccgtgctccgcccgctccaccagggcgcctcgccctaggggatggtctccgaccacctcccttcaccgccgccacgtgctcagtgacgcctaggtcatcggcgctgaagtttggaggccctgtacgtgcttcacagagatcgccgaccatgggctacgcagagatcgccatccgcccctctgggagcggcaagaaaatacagaggcagggtggcctatctcgaagattttcaaatgtgtcctattacggtctcacaaccccgccatataaactgggtgctctggaaccttatatgag

SEQ ID NO: 373237 - DNA, 227 bp, Zea mays
cggactcgtttgcggacgcgtgggcggacgcgtgggtgtggagaagtcacttatggatatagaacctactgttggtacagagagtgctgtgcagttgctggaacatgaggtgaataaggtgacagagcaggaagaggagtatgcaacaatgaggaacatatcgacttcaagatgggctggtgctaatgatgatgatgatgatggggcagcttcagtgaagaagaaaa

SEQ ID NO: 373238 - DNA, 233 bp, Zea mays
cgcactcgtttgttgaggcatgcttctaatgcatatggagatgaacttgctggaacaatatcaagctatgcatcattgtgcgaacaagtaattgaaccagcccttgtgatgtttgaggcgcatgtgccgaccgcttgcatgcttgatggagctcactctcaacattcttttggaacaagggttataatatatcattctgaacacctgggtctggctgcaggtgataggaatac

SEQ ID NO: 373239 - DNA, 154 bp, Zea mays
caggaacaaataaatgttccccatccacatttgccaagtgagcagttccctgaatgtacaacacgcggagtgccaattattttatttgggacaattaatccaccatcaggtaaaaaacattctctacaagacaggattggacacgtggttaact

SEQ ID NO: 373240 - DNA, 304 bp, Zea mays
cccactcgttcgcccacgcgtccgatgaacgatctgctggccacaaccttatagatagttcccacatgacaaatgatgggcatagtcgatagtacctgtgtccccaaaagcttggcattctaacagaacatgtcactgtagcacttagatagccagtgaggcccatgtacattaaatagggcataggggcatcagcggtcatttcactctcttaacctgtctaaaatatcaaacactgtttagttcaacattggttgtagctgaatctaatctgagcagcgaggttgccaagatgctgagtggc

SEQ ID NO: 373241 - DNA, 289 bp, Zea mays
tttttaatactttttttttaaggagccgagattcttgacattgacattaggtcaccttgaaatccaattccaagagttgcaaattacacatttcggaaatcttttcacctgggttacagtatacactaacaagttgtcattgcgtggcaaatcgaacacaaaagaacacgatcatggtgctatgatacatcgacgtgacagagaacgtaccccggcatcagatgacccagaaccaagccacaatggaaccaatgacaaggccaacaacgaggaacagcacgatgacaat

SEQ ID NO: 373242 - DNA, 111 bp, Zea mays
ttcttgcactagaagaggcaacttgcattacagctggagatattcttagaaaaagtgctagactaccacatatacacagctttgcccaggaagaacactggccttcaactg

SEQ ID NO: 373243 - DNA, 90 bp, Zea mays
acgttctgttattgtatcagtactagtaccctatatatatgggcgcactacagttctgtgatgtaatggattctgctagtatttgactct

SEQ ID NO: 373244 - DNA, 145 bp, Zea mays
gcagtcagacgagcacgagccgggttcttttgatgtgagacctgacgcgactgcatcgatgcggtcgctcttgtacttgtacctgagaacaccgggcggggcgaggcacacgcacacctcatctctctctctctctctctctctc

SEQ ID NO: 373245 - DNA, 472 bp, Zea mays
ctttttccccctttagtcttacaatttcattctaatagcagctgctgattcacagagactgcagtcagttcaatttctgcatgttaggaagttagcaaagttgcaggaaaagaaattcactaatcatttgagctcactggttagcattttttgcgatgatgggttcagtaaagatcaattggaggcatatacactgttagattcagttttgctaggtgtgatctgttttgtggacagaaccagatacctgtttttgccttgttagcacttaagataactgcttccagctttagaacacaaaagaatcatcaccggcatggttaatgaactccaatcaagtaaacatggttgccagcactggactgaacttgtggcaaaatttggttgtgtcattctggatcagtttgataagaaaggcagagaaaccatttgtcctttcagtagcgaggcagcaatggtgatgctgaagaat

SEQ ID NO: 373246 - DNA, 205 bp, Zea mays
aaagagaaaaaaccttatgccggggggcaagaattcaagaaccaataccgccggcagggactacctactaaaaccaaaggaggggggcctcgccgcccacaagaaccaaaagggcaaaggttgaagggattaaaccctctggggggcttcctgccaaggacaggcgccaagggcccttgcattgcatcataaattcataagaaaa

SEQ ID NO: 373247 - DNA, 308 bp, Zea mays
cgcaaggaacaaggggggccttttattacatgaccgtggttggcacatgggaaaaatgctcaggtcaagacacacggtcaagacacaccggcactacaaagatgatacgtacatgctacagcctaacaacagatcatcgacagatgatatcatcggcggatttacattagccatgcgaccaatatcgcaagcagatgatgttcaaggacagggatgagagattcctatacgaacaagtgaggcatcaaatcaaaataggcaactactactggtggacagattcagagaacaagggggagctgctaaag

SEQ ID NO: 373248 - DNA, 295 bp, Zea mays
tttgagtcccacggcacgatggcctccagcgaggtgggcttcggtgccagagccgaagcggacgcgctggacaagcgtctcgcgtggagcccctacaaggaggagatgctgcaggcgctgcgcgtcgccgtgcgatgcacctgcagcatgccgagactccgccccaccatgggcgacatcgtgcagatgctcagcgaggccgggccgtccgccggccggacgaccaaggacgactccaaagtactcgtagcagatcatcatgatgatgctcctgctacttagaattgattgaact

SEQ ID NO: 373249 - DNA, 181 bp, Zea mays
ttcacttcgtacgggccgcgcccggactccgggctggggaagctccgcaagtacgcctggttctccccctcgccgtcgtcgtcggcggcggtggccgcggcggcggcggcggactccgcgccgcctccgggcgccgtgacgcggagcttgaccatgctgcggcggacgacggcgctgtccg

SEQ ID NO: 373250 - DNA, 166 bp, Zea mays
ctttttccttgttcatgttttgctttcgtgttggcatctgctagattgttactgttatgtcagttttttaacctgatttgggtataaataacattctgagctgaacatgccaaatgccctaagcctgttaaatctgctgccacataaaaaaaagcaataacaacag

SEQ ID NO: 373251 - DNA, 381 bp, Zea mays
ctcggacttctaccttgtcaatctcaagaatgtgatgataacatgaccattcaaattggtgaagtacttcagatgcaaattgaggttcagagatagttcaatgaacaacttgagaaatggtcatttgttaaatctgagcataaacgatcggaaatccaagggcttatggaattggtattgcaaagatctccatgtgattcggatccttataaggaaagataattgatatacatgagggagccacctattgattcttttgatgtctctacatgtggccttgatttgctggatgacatcttgttgggttataaagttgaatggccaatgaatatcggcattactgaagacgcactgaacatacatgctaaaatattatgaatg

SEQ ID NO: 373252 - DNA, 281 bp, Zea mays
aattttctctgagaacctagccgggccaccacaaccgccacccatggacggcggcgacgctccggcggcgggaggagggaaggtggcgtgcgcggcgtggatccggcgccgggaggacaagtcggcggcggcgccggcgcgggtgttcgcggcgtacggccgggcggtggcggccgactccccggccgctctcgaggtgcttggcttccacgccaaggagtgctgcctttacccctgtaccctggcgagggccgcgatcgatgaccgcggttctgatcacg

SEQ ID NO: 373253 - DNA, 337 bp, Zea mays
ccctcgcgttcgcggacgcgtgggggcgtgctgccggcggcggactcaagacttcaacatcgatatggaccaagagcccgacagggtggtgacatataatggcctcaagacctgcattatcaacagctccgcctatgacgatgacagaggcatcagcgcaacaacaggcggagatggctgtatcaccactgattccctcgatgatgaagactctagttgctctagtaaagatgcttctggttcttacttcacttcacactgccttagcaagcaagaggagcattcactagatgagttgggtacacccatggcaattcatctactccctttcaaaggg

SEQ ID NO: 373254 - DNA, 459 bp, Zea mays
  unsure (1)..(459): unsure at all n locations
ctaatggtttttatttttctccttttctcgattaatcttgagatttcagtaccctctccgcgcacgtggatgcttcttttgactatgttgtattaatataaatatatacattcctcgtttgccattaatgacttcatcctgtgcattctctcgatgataaacgcatgtctctgaaagccaggaagttcgattccaacaagacaatgcaaatgtggtcagagatgttgaaagccaagaagttcgactattttttggcattgacctgattctccaagggaagaagcaatttgacatggatcctcccgccggcccctttcggtactaaagtgaggtgccctgtaatttagctctgactctagggatcataccaagtatttggtcaggaggacccgactatgattgaatgctacaataacaagagaacatctngctgatctggtggtgaaaggagtacatcta

SEQ ID NO: 373255 - DNA, 341 bp, Zea mays
cccacgcgttctgtttccttgggcggacgcgtgggccgaagagagcctattgatgtgatggactcagaagattaaccatgccctacggagggcatgctctggagattgagattcaaacagatattagcggaagcttttcctcatacgaatgacctgtggaggatcacccccaagtcctagaccctggtggacaacaatgcgcaatgacaaaaccacgtgcgtaaacccgacccttgatacactacgaacccctacgcgccgcattgatcctgctgggcataaacctcggactagcaaaattgccaatgagccaccaggcggacggctgcccaccgagcccg

SEQ ID NO: 373256 - DNA, 555 bp, Zea mays
ctttcactgttaagtatggagtagaaataactctgcagaaattattaaaaacagtggataagtagagcggaaactgggcacgatgcttctagttgagaacttagccaaatgtgtcaaagtcgaacagtaaaaattctaagctaaacagctaaaatctagaatttatctgttgtcagtatgcctcttatttgtagaggattttcactaagatgtatgtcctaagatttttatggctttcataccttcatacatttgcctggtaaaatatatgaactgaacatataaacgcgacatatatatagctaacaactgtgcctggcaattcatgcatgacaaacaactttgcatacgctataacccaaacaactactgatgtgcactaatttattgtattggacttctataaaggatgaaatcatgtctgcaatcgagaaacacataactgcttggacattttttctaggaggtaatttgcattgggtctttgcctcatgtagctagatggatatcctctgtctgcaagtatagatatgaaagtgtgtatatgaaattttc

SEQ ID NO: 373257 - DNA, 523 bp, Zea mays
  unsure (1)..(523): unsure at all n locations
cccacgcgttcgaaagagagaagctgagaatctgcagttctcatgcaccgacgatgagtgcccacgcagtcctcttcctccgcaggccatcctcccgctctgcgctctcccgccggactcgccactgctcttccccatcgtcgtccctgtgtcgttccacccncatgtcctcgaccctggtgggaccggcccggccatgccccgaccacgacctcaaacccgacccttcatccactacgaacccctccgcgccgcattgatcctcttcgacgcgaccaccgagtgacaaaatagcaaatggcccaccaggcggacggctgcccaccgagcccgaggtcgacgcctacatcgacgtgcaccaccccgagctcccctccctcccccgctcccagctacaccagcacctcctcgctctccgcttgtctccttgcccgcggtgggtactcgggttgtgtacttctctcatggccacaacgagcaggtagcagcatcaacatacaaggaaatgngatctcagatcccc

SEQ ID NO: 373258 - DNA, 571 bp, Zea mays
ccctcgcgttcggttagatttaaaatattgatactgtctaagtgattgtcaagctaggttgtcatatccatatggttcctcattacacatttaattgtgggatctgtatggtttcacagacgcatttataaccctggtctactatagaccttttttcctcttcttaatatattttaaggcgcagttcccctgcgctttcgagaaaaaaaaaacattcattgtgcgtttcatggatcattatttaattgttgttgtatattaatgctccatttcttagggcatttctgcattcatgtgggcaagctggatgattcaaagttgttgatatgtggcggtagccatttattgtgcttatatgccctatggttgaatggtgtgcttcatttatctgacttgtctctttcactaggttcagtaggttggtgagtctagataccagatgatggacttgtccacgacttcagtgctggcagctaaagcttacaaatacaaagcagaatcacttgttaggagtaccttcttgcagattcgtatgtttcatacactgctgtacttggtgggatcctgatgt

SEQ ID NO: 373259 - DNA, 475 bp, Zea mays
cggacgcgttggcgttcgcgtgggcagcgaggtgcgagcttccagtgcgcgcagtgtttgatcagcaaacacctgcgtggccgaggctgagccttgcaagggcaggcgtccatgttctcgtcagcaaggcaggtaagcatgctgtccctcaaggattgattctttttttttaatgagcaacgctgcatgctgtttgtccagcgtcttcttcacatgtctgaggtctgagcaattgcgggtggacatcgatggatgagcattgccgctgcaagggaagatcgtccggctcacacttgagttgggataccatgcactactcttgttgtagttagattagataccatgcgcttgaaccgtgcaatagcatagcgaggaagaggaacccagagaggactcagaaagagatgttgtctatttcatccagtgctcatctagtcatctagtctgcctgcgggtgtctgcaatgaacgctgac

SEQ ID NO: 373260 - DNA, 486 bp, Zea mays
gatctaagctatctcatgcacctgctgttgctcgcaaggttcttctatccataacgaattggcacccacacaattacttggatgatgtacttcatccatcacaagtacaagatcaaaggctcgaacgtttaggccaagatgccccatcatttcatactggcaatgaacttccaaatcctcatctccgtcaagtacctgctgctttgccatctcttccagttcaaccatatgcgcctcatcctaaaatttctgctgacaatccaaccgctgcaccttcttttcaaaagataccctggttgtcattgacttcaccgcctttgcctgcaattgggcgacgaatgcaaagtccagcagcttctccagaaacagcagttcatccagctaaacatggcaaggatcatggaactccagtttcagcaccttcaaatgttagtcatcaccatgcgatgcctgcgaataatacacatggaaaaactcatggaactc

SEQ ID NO: 373261 - DNA, 126 bp, Zea mays
cccacgcgttcgatttcttacagcaaaggttccgttgccgaaggcctatacctctctcactcgaagcctcctgtaagatgtaaagttcagagcttgtaaagatttacatccaaaagtcacccaatt

SEQ ID NO: 373262 - DNA, 333 bp, Zea mays
  unsure (1)..(333): unsure at all n locations
gggcaaagaccattctgataaccactttcctgacgtcaagcagaactaacacaacaaaaaaaaaaagacaacaaaaacgaggaaacctctaaaacattgccataatacagggggtaactcacatagggaaaaaacaaactgaaaacataacaacaatatatagcgatcatgccaaataggccggggggggggggnnggggagcacaaatggatcccgtgggcataactgatatctgaaccttcaagtcactgcagcagtgcatgtgtggccgtgtgggtggcagctcccgtccattaatgtcaaaatctcaaattttcttatttgcatgtttc

SEQ ID NO: 373263 - DNA, 305 bp, Zea mays
gcaccggagatgacacaaacgtggcatatttgtataagcatttacaccggaaagactagcataaacactagggatgcctgggagtgaccagcataacactagagaattagcacataaaagaatctacaactgacgctcaaagctgcatgtagttgcacgaagccctgcaatcctagacatgactgattacatacagcaacttgcctggatcaactaaaagttgccagcaaatacggggaaaattttgtatgatgaatggtatggagaacaggtctgctgacatttttgcttccactgtcagatga

SEQ ID NO: 373264 - DNA, 95 bp, Zea mays
ctatccatatttattaaaataataatgaatgaatatagacatatgttcatatgttacttaatcgggccttgactgactgagctctaaatattcaa

SEQ ID NO: 373265 - DNA, 344 bp, Zea mays
gacataaacttacttatttatataggccgggatcgattcggtaccaagagaatcacaggagaattggatgggtcaatccccttcaatccagcctcggcctgaccggagagcaccataaggaactagctaggcctgctgttgccttttgaagtgcacatccagcctattggcaaccaaccgaatgccagcgctttggtagtggtcgaatgtttccaccgagacgaacgcatccaccaccttgttcccttgaagcatcgaggccagttccgatggatcgaccctttcggaaacaagccttggaacgacaccgtcgcactccttttcgtatacatgggtccggcagg

SEQ ID NO: 373266 - DNA, 282 bp, Zea mays
aggggtgattttcgtacaatgggggggacaaaatagcgttttacagaactatgtatacggtctggtgatcagagacttagaaaaaggaatgattcaccaaacaggactaaacatgttttgattagcaaatctggatttttttcatgacaacctgacatgcggcttaaggcactgtcgcaggcacttgaagttccttgtgttcgctcaacaaaattaggggcaaatataggaggtaaatctctcaaatgccctttaaaataacgaatcgttgctatcggcttg

SEQ ID NO: 373267 - DNA, 278 bp, Zea mays
cgccccctttttttattttttttttttctttttttttttgggggtataataaaaacatagggggtaaaaagagcacctttaccactggccagccagtcagtgcctcagtggccactgctacacagcacagcacacaagcaccacagaaccggcaccggaacggacagacagacaaaaactatgatgatccaagtagacagcccacagcgcggcgctaaagacaaacctttcttccggtccaaaccttactaggactaatattttatctttattaacgg

SEQ ID NO: 373268 - DNA, 229 bp, Zea mays
aaaaacaacctgctccctaattttacaagggggggggcccttcaccttccaacattgaggtgacaaaattctgggggcccaattcctggggggatccccctgccgaatttttgccgaaaaagttatcaggctctaatttatgctccccattacaatttacaagcggcccggggggaaaaagccccccctttttacactagggggggacttgggtcctatcccccttaaa

SEQ ID NO: 373269 - DNA, 232 bp, Zea mays
aggggtgggacttttatgaactacgacattcctttcccccttttttacatgtttgcagggagatacatattacagggtacattacactatttatttttttacagactacagcccaaaccctggaacataaataaaatggttgggggggcctgtccctagatgggcttttcaataaaacaccccccctgggttggccaggggcatggtcgctcctatttaactggctatactg

SEQ ID NO: 373270 - DNA, 176 bp, Zea mays
  unsure (1)..(176): unsure at all n locations
ttctttttttttttttttttataaaaagccaaatgctgttatagtaagaatgtctggggttttgtgattgaagaccaaacggcnatccattttcgtacaacaaccacgatgctgctaaaaacatttaaagaataaaaaacaaatactgctacactacgcataatacaagctcatac

SEQ ID NO: 373271 - DNA, 259 bp, Zea mays
gctgtcttcaccgcctcgggatccgaggtccatctggtcggcgaaggaggcgggcgccatcattcccattccggggccggcggcgaccatgcggtggtgcatcccgggcggcccggcgggtggcccgacgcggctcaggaagccgtggtcgaaaccgcccacagcggcgccgccgtagtgggcgagcgggcgcgtggcggggtggtaggaagtggccgatctggtgctgctggtgggtggtggatgcgcgccgcccatg

SEQ ID NO: 373272 - DNA, 271 bp, Zea mays
aacacccaaaacaagaggtgatgtttataacatatgaggtgtgtaacaaccccataacaatgtgttgtataacagtttcacagcaacctaaacaagttcacattagttatatactactgttacatggcatacattaacaaaacagtggtccaacacctagagtgctaattgctaaacaaaacagctacaccaccatgcatctgcatcagccgtcaatgtaccagtgtagaagacgtgcaaaagaatgaaccatcacagacgccatccattt

SEQ ID NO: 373273 - DNA, 370 bp, Zea mays
aaaacacaaggaagggggaaatgcaccggggcttggctttttacaggaggaaatctgatatcttctattacaataagcagttagatggaatccaccactagatcagtagaactggaacatgctccttcttcacaaatcacttcttcttggtactatacatgaaatgccatgattatgaatgcttgtgtatatgctactagcaaggaaggtattacgaagcattacaagattaaattagaagctatcaccacaagccataactgccagagagctacttatccttagaactcatctaaccattcaaaacttgctaagcaacttcattttcattttttactaagtcattaggtgctttaatcacccagggata

SEQ ID NO: 373274 - DNA, 280 bp, Zea mays
ggcgcggactttcatgccatttagggggtgaaaatattgctaaacagtataggggacatttttttctcatctcatcaacccagcaacatattaaatctgattacagattgaagtagtcatttagacctcaatatcctaagaacacagatcatgtgacgctaaacattttcaccaaatataaatggggttactgtcattactcaaaaggaagtgctagcacttctggctattttgacgagtaactgccgatcttgtaaacagaaacttgagtggcactatt

SEQ ID NO: 373275 - DNA, 379 bp, Zea mays
  unsure (1)..(379): unsure at all n locations
tttttcagnagttttttatattatggttgagacccttaaaaaaggctggatttaaactttattcactaatttaccatatgtcacataattaacatctcaaacctaacaatagcaccccaacgcgactattccaaagttatgaaaacaatcacattgtattcatcgaactaattcaataatactagacgcattcattcatcaatccaataattaagctaacagaaatatgaattggcttacccacgactaaatttgacgactaaatttgacgcgctatccgcgaacacggcaaggattctagttcgacctttgcgtagagcacttggtgaacatcacgctgctagctttgtcttcacccaacttttggaatttcctgaaa

SEQ ID NO: 373276 - DNA, 307 bp, Zea mays
tttttttttttttttttttttttttttttttttttgtttttttgatttaaaggggggattttcaactggataccccaccaaaaattaaaaatctaggcaaacggaaaatgggttccgattcaaccatatacaaagtaccaagaacagataaatttattacaaaaaaaacactaaacaatttgatggttcaccctgaatcgcacgagtccatacaggcagcagtttgtgtccccctccaagatatggacatttaaacatcaacataccccaatttggaaagcttgaggggggcctctttgtagtcatc

SEQ ID NO: 373277 - DNA, 263 bp, Zea mays
tttttctctttttttttttttttttttttttttttggttgtggggctgaccaaggcgggggattatgattcaacatataaggcctaatcagggggcaaagcttcgtttctaggaagcatggagaaaggaaaagcttgggattaacagaagaagaagaagacgaccacggctggttaagatgcatagatcatcccttcgccaggaagaaggacccttgctagtgctagatacccacggggttggcgttgcccccccctgttgct

SEQ ID NO: 373278 - DNA, 299 bp, Zea mays
cccccgaccaaaaagggcccaaccccatttcaatgggaagggcaaaacaagggaagcctcagggccaacccgggggggggaacaaacaaacagggtgaaacgtccattaattagcagcccccatttggttattttaaggcccccttttggccccctccgaatttaacctgccccccaagggaaacaaccgttgatgggcagttgatgcccccccccccccccgggggaccccccggcagaatgcaggagggcttgccgggggattccttttaaaaaatctgttttgaatgggggggggg

SEQ ID NO: 373279 - DNA, 305 bp, Zea mays
ggacaaacatgaataggtgggtacttggaagcaggacggggagctcgttacatcgccacaaaatgttgggccgacaagcagtactaaactacgcagtagtatatatgtcaacgggggtgttttggacttggtttggggtgtgtgtgccagtcttgcatactcttcttcttcacggatagacaaaatgtaataaatccaaaaaaaaaaaaaaacaaaaagaaattttaaaacgtggactaatctggatttggtgcatggaatggaaggacgaaaatggtgaaggtggaagcaatcatcaccggaag

SEQ ID NO: 373280 - DNA, 205 bp, Zea mays
ggggggcaccccctccaatttgaaaggtgggccagtttctaaaacaaagggattggaaatgggtgctaaacatgatttggagataaaaaagaccgcaaaataaataagataacttctcactattatttccctcataattctattaagccctaatgactttccaatctggcaggcccgtccttaacttaatttcttctatttttta

SEQ ID NO: 373281 - DNA, 199 bp, Zea mays
aaataccttcattccaaggttaatggccatcagtctgagagagccatgtttgttgcacggattgagggcatttctcataccatggagaagctatcagagaagaatgtcttcttggaaaaatatgttatctgataacaataccgagctggagttgcttagaaggaagcttgatgattcataggaatctaactatacattc

SEQ ID NO: 373282 - DNA, 226 bp, Zea mays
gtgatgttagcgcatgttgaacgcacagtatgtattttactgtaaattgattgatgacattgttgtcccaactcaggtattatccttgtatgttgagttcaggagtacatgtaaagcggcaatttttacaatgttcgctgaggccacaagtaatttgtaacccagaattgtagcctctgctatacaattattggattctgttggtcctaaatattcattatatatt

SEQ ID NO: 373283 - DNA, 362 bp, Zea mays
gctacaggggggtgaggcattttctcacggggatatcatcaatgctacaggggccgtctggtagcggtagcgctcatcgagcagctccaggagcagttttgcgtcttcaccaaccaaacggctccgcttggtgtacatggaaaccattacagtgggatactgggatgctcaaggtgcacataaatatggcatgatcagcacagaacaatattttttctcgggttcggtcatagcagacgaggaccgttgcggggaaaatgaaatgaagcatggaaagggcaaacaaaaagcaaacacttctatttcttcttcccagcttttccttccttccttctgacaacttcatccatgtatctgatacc

SEQ ID NO: 373284 - DNA, 320 bp, Zea mays
ggtggggtgcaaaactccagggaggggatattaaaacagccctgattgtcaccttcaactgtggccaaaggggaaaacccaaggggtacctgacaacaaccctaatgggctctaccaccggcatatggaactatccatttcctaataaaagatgtacaagatgaacaaaatcaaaccttcaaccaagcaaaaaccgattgcccccatcagaaccagtcttggagaaataaaaactccagtcagagcctatatgccacgtcaaacatagggtaaaataccaccctgacccaggaacactgcagctgtatccaaccaaagaa

SEQ ID NO: 373285 - DNA, 200 bp, Zea mays
cctacgcgtccgcccacgcgtccgttcttgtggcccggcggttccagccccacggctgccgagcggataacgaacgactggcggcggctcgcgtcggcctttctcctctccttcttctctctcctcgcattggagatgcaggaggcaacataccaaatcgcttaccgcccccgaagcgtctcggttcgcatagcagagct

SEQ ID NO: 373286 - DNA, 389 bp, Zea mays
ttccttttttttttttttttttttttttcctccaagaggggtcttattttttgggggggacagcgttgtgtcaaagaaagttggccaacaaccgtagcaaccgcaccgcattcactgattatggttcgacgaacgctagagcaaatagaaattccgactattcaagttacaacagaatctaacaggatacacaggcgaccaaaaaaattaatttacttgtccataaccttccttttttccccttcatataaagaggaaacagcccaaatctccaatggatgctggaccctacaagcttctgtagtcaaggacagtaacttcctcatcaggggcatcaaggtcgttataacttctcagccggcgagggtcatggcggaaattcggaggca

SEQ ID NO: 373287 - DNA, 308 bp, Zea mays
tttttccttttttttttttttttttttttttttttgttgttttgcatgaggggggggtaagtttcaatgactttcaaaaactttcatgacatgcatccttcatgttcttagggcatgcttctttaagaaaagaagaaatgaacctaaattggtcagcaggcatctggggcccacgagacaataaaaacagggcccttcacttgttagaggaaacattttattcaaaagggcagattaaaattgcagacccaggaaaaccttcaacaggacagcctctgcattccgatgatgcttcttttatccaaaag

SEQ ID NO: 373288 - DNA, 166 bp, Zea mays
cccatgcgtccgcccacgcgtccgcccaaggctgctgccgccgtctgccgctaggggatcgtttgctttcctcggaccactctgccgaccacatttacaccgcatcaacggtcctttcaagtgagctccaatccccttgctgtagatggagagggtgctaaaggat

SEQ ID NO: 373289 - DNA, 265 bp, Zea mays
aattataaaaaaaaaaaaaaaaaaaaaaaaggaaaaggaaaaattataaaaaaaaaaaagaaaaaaaaaaaaaaaaaaaaaaaaaaaaaaaaggggcggccgttttttggggatccaggtttccgttccccgtgctggctactttctagctcttttatggggtcccctaaacccaatacactggccgcgggtctccaactttcagcctgggaaatccttgggtttcccctattctattcgttttgccgcttatccccctttcccc

SEQ ID NO: 373290 - DNA, 148 bp, Zea mays
cccactcgtacggggggcgcgagggatggacgcgaacgggtgcggggagaatgacgacgcgctggacgctatacctggacgggcctgggctggggactaggccctaggcacaggacacttgttgtgtcttcgacgcggccgcgggcat

SEQ ID NO: 373291 - DNA, 350 bp, Zea mays
tctttctctttttttttttttttttttttgggggagtcttaatacaattctagggggattcaaatcgagcagtacaatgcagcactggtacaagctcccttgagcactacaagtcaaagcaaggcagaatctgatcaagaaaagaagaccaaagcaaaaaaaaccgccttctctcccttagtcccgatccctccgtggatccggtcgcctattcaaagccccaggtccgagcaaagctcgaggtcatgaccatcgtcgacgtcaagcggcccggggagattgaggtcgagcgccgggcgcgaccggaccgtggaggcgtcgtcgccgtcgtccacaacggaggccgacca

SEQ ID NO: 373292 - DNA, 357 bp, Zea mays
tgtaaagtcagagagtcgggtgtgccaacaaacgcaccacacaggtctctagccataggaggctggcatccgcacatagccgattggagctggaatgctcaaaggcgactccaccagctattcaagcgcgccaaatcggtcaaccaggcaacggggctgttcaacgcagtgctctgctgggcgcagctatagtcacagtaaggggatggagagggcttaccgaaggacgtcaccgattacttacaggggcgagcttacgcggccattcagacataatggaccgccgactactgaccaggcgcgccgggattgttatcgaacgaagacggtcgtgcatcgggcgttcgtacccggtgg

SEQ ID NO: 373293 - DNA, 446 bp, Zea mays
tcctcgcgtccggtgtcccaaagtccaaaacccaacccacaatggccgccacctcgccggccccggcgccgccgcgcatcctcctcgccggggatgcccacggccgactccaccagctcttcaagcgcgtcaaatcggtgaaccagtcaacggggccgttccacgcgctgctctgcgtggggcagtttttctcccccgagggtgctgcagagggctcaccggaggacgtcaccgactacctcgaggggcgcgcttccgtgcccatcccgacctacttcaccggcgactacggcccagccgcgccgcgattgctttcgaaggccgccgctggtgctcgcgggttcgcacccggtggcatcgagatatgccccaacgtcttctggttaggggaagcaaccgcttcacctccacggttgtcggtggtttatttgtagggaggaaggtta

SEQ ID NO: 373294 - DNA, 162 bp, Zea mays
ggggggaaagaaacacccttgaaaaaatggggttccaaaactcgccctaaaacaaaaattgggggattggaaaaccgtaccccatttttggggtttatatttgtccctttccaatgggcccccaaaaatgggccccaagttggaaaacaaaaaccccggggc

SEQ ID NO: 373295 - DNA, 212 bp, Zea mays
gacactagtgcggccttgtctaagctggagcttcggggcgtttctttacagctgttggggtgtccttacactccgggtcaaatagtttgggtattgctggaatgcggatcgactacggacataggccgtgagggcctttcaagaagaggcggcggcggtttacctgaggggaattgctgccgtcttcttgcttgctgcgcgcttgggggttg

SEQ ID NO: 373296 - DNA, 176 bp, Zea mays
gaaatgagtgaggcctcggctaagcttgagcttgcgcgtgccttctttccagcgctccaggttccctccatcctcggccaaaaattctgcggcgagctccgatccggtccgactactaacccacgccgcaaaagccgtgcgacctgatcgcgcgggggtcgaggagaggggaagcg

SEQ ID NO: 373297 - DNA, 139 bp, Zea mays
  unsure (1)..(139): unsure at all n locations
cacatgaacacattccgtagatgaatacaacntacggggcatttataagacaaacccgtttgacaacactaaactgagaaaacagcagcaccacgtgactacacatttcagctgataacgcacaaacgtaacaaccaag

SEQ ID NO: 373298 - DNA, 350 bp, Zea mays
  unsure (1)..(350): unsure at all n locations
atctggcgttcatgtgaaagcgcgcgagccgggcgagagctatccggaccgacctgtgggtagaccccgctaccaggtcgtgagatggacggtctccgcgccttaggatgatcatggaggagcgaaacctggttgctggcccacaggcgttgacttctatcccacccctgcgatgatgacctctgcaaggtcgncctccgcgcccaagtcctcgacaccgtgaaatccgatgatatggcgacgctgtttgagtcgctggttgccgcgggtgtgctggaggggggacaccgcgctgcttggccagaagcgtgggaggatttgacagggaagaccccaagcttgatgagaaa

SEQ ID NO: 373299 - DNA, 296 bp, Zea mays
gtacgcgtgggcggacgcgtgggtatttttggattcttgtgcattttactgtcacaaagcaaccttagctctagcttttaagtaaatgaaaagcatgcataatcaaaagacgaagcaggttcgaatcttgtttttgctggaagttctctctggagtctgaatgacttataattgggttcgcacctgttgaaaaagatctttcaaatgatctaggcatatctttgctattgattacgctaaatcctagtaaaaatctccgaccttatgtctgtataactgtttttgtagtttcttgg

SEQ ID NO: 373300 - DNA, 469 bp, Zea mays
cctacgcgtccgcggacgcgtgggagcgcgagtgtagcatgctgcacacacaaggaaggggacaaccacaagcgcctaagatcccgtactccgcgtcgagatctttgccgaggcggtgaccgtcgagggatcgccatggcgttgagggcgtcccccgtgtcgcatggcaccgcggcagcgccgctgccgactttcgcgcggaggaggatggcccgcgggttggtgagtgccaagttcccagcgagaaacgcatgagctcttacttacaccttttggcgaaccttcaaggaaactttactcccaaacctgcttgcgcacagggagcatctttgcttcggcggttgctcgaccgacttcctgtttacttccccgtttttacttttaacagtcctttagtgcccttttctttacagaggtccttgattcttttttgaagctattcccaggaacttttcaggaacccttgcct

SEQ ID NO: 373301 - DNA, 263 bp, Zea mays
cgtcataaatggtacgaaactacgaatctcttgatcttccttgaactgattggtggtgataatatgtgtgttggatgagatttggttgttcagttgattggttagttcttgactcaatagttgcagatgtcacgtttctctggtcgtgaatcccttcttcttgaataaagcaatacgattctctgagctagaaactcgacagtatgaatgactcacttattccttattgtgtttgatctgaaaccgtcatacgacgaggtttc

SEQ ID NO: 373302 - DNA, 358 bp, Zea mays
gctctcgtccgcccacgcgtccgcgtaattgcataccccattccaaattataagacgtttggcttatttagatacatagcctttatgcacttaggtatatatcactgttcatgtacatggccgtttagcccgtgtacaaaccgtgtaaacgctacacaatggcttaccgtgttcgtttaatcagccatttgccccgtttaatcaccatttagtctgtatggccgtttgccctgaataaatagacaaacggtacatgatcatttaaacgtttaggctaacattggtctatattatcatagtaaaaacaacatatatagaaaatccaaagcgtcttataatatggaacggagggagtatt

SEQ ID NO: 373303 - DNA, 243 bp, Zea mays
tgatacaggacgattctcctcctttctattcaaatttgcatgaccaagttgttcaagatacttctcttacactcttcaccaatagatggatgcggttgacacatgaagcaaaatcaggacagagtggaaaactagaatgtttgtctgagaaggcgacaattaaaaaaatgccttgtgatttgctgtcacgttgaaagccctgcttccatggaagactacccattatggaacttttgtgaacca

SEQ ID NO: 373304 - DNA, 177 bp, Zea mays
  unsure (1)..(177): unsure at all n locations
ngtttctatgttgatattgttacttttaagtttttaacatgttaatataagtaatctttacctgtggttgtgtcgcaattagtagtttatttgcatcctgctagtgcatttagttagcaacctttttgtatacatgaagactatttgggtgaaaggagccaaacttgacacctactt

SEQ ID NO: 373305 - DNA, 243 bp, Zea mays
  unsure (1)..(243): unsure at all n locations
tgatanaagaaggcagatgcaacgaaaatcattcagatcaaaatggctgagggcgagatacagcaggggagacccagacccccactataaggattttattaaaaacaaaaggaacttcaccaatacaaagagggaggggggacaagaggagtcagggagctatgactaggagaactgcacaggctacggtgaaacaacaccaacaaagttaagctagttcaattagaaagtcgagcggtgagg

SEQ ID NO: 373306 - DNA, 333 bp, Zea mays
gggttagttcggatctcgcccatggtgtcgatcgggtattggtttcgccggttgtcgattttcctattcgctatggtcatcacgtcagccgtccctatccgaacttgcgagctcgccgactgaccgtcgtgttccttgaaatccctcgtcggtcgacctcgcgacttagttcgtccgtcgtgctggtcgctgtcccatactgtacatattagctcggatcctgcccagttcgatgatgtattgtttaccgtcgagtcgttgaacccttcattctctgctcaaaccccatcctaccagcttgcttaaaacacgatcttgtcgacaagctttgtc

SEQ ID NO: 373307 - DNA, 325 bp, Zea mays
cccatcgtccgcccacgcgtccggtcaaaggctttctcgaagcacgtatattatgtatattagtagcacagaatgaaggtaaacctaagaagtaagtgggagaaaagattcgatctttccacctgaaagatggtggagaagctcctctggcgaccaagatcgatcccgggcaggccgacagtcccctcggcagccgacgcctgctgctgctgcctcctgccgtccccgatcccgccgaagcccgcggagcggaagcggtggtgccaggaccgccagtccttcttggacaggagcggccgtgggaggcgcgggttgaggtgcgcac

SEQ ID NO: 373308 - DNA, 450 bp, Zea mays
cggactcgtgcgcggacgcgtgggcggacgcgtggggaaggtacaccagcacccaaaagagctcagtctgcatatagaagaaggccgacaccttcaacccctccctctaaggtgtcaacaccctcaacccctgtgtcaaggtccatcacaccagttcgtgataccactagagacttacacaagagttccaagcgtttagaaagcacaaaggctcctgatggcttgtggccagcaatgcgtaacttgtcttcatgtttccagtcggaatctgaggctgcacctactactagaaatgataaggcagtcacggctttggattgtagcaaggggcaagcgagtgttctaacggagaggaagagatgttcttttagaaggaaaaacagttgtgaacatttggagaatgctcaacctcagaggagccccctagaggttaattgagcaacacagatt

SEQ ID NO: 373309 - DNA, 375 bp, Zea mays
ccaaatgctgcctccaagccactagaatgcccccaggtgccccaacagaaggaagcttaattccatgatggatcttggaagcgatgttcaagttcgtgctgctggaggtctcctagcaatattagacaatgagagacttcttgacaccattgagcagatggaaggtggagcatccattgcgatcgattctgtggtacagatctcattagacaagttccttaaacttgatgcaactgcttatgaagcactacagatttttcaagtagataaacacccagttacatgggaattggaagggctaaagaagggttctcaattttttggcatgctcaacaagttgtgtcacgccaatgggaagacgcctcttgagggcat

SEQ ID NO: 373310 - DNA, 270 bp, Zea mays
cctcgcgtccgcccacgcgtccggccaattgttcacgtggtttaatgatatctggagatctttttgctccaagaacaaggagtctctctcctatcccaaaaggccatgcattcgctgtgagcaatggaaattctagagaatttggtttcagcccgaggtcaccagtaagaaagatggatggtttgaggagcccaccacatcccttgcctcttcctccagcttctggtgcatgctcgcctcttcatccagcttctggtgcatgcttcgcct

SEQ ID NO: 373311 - DNA, 208 bp, Zea mays
cctgctgctgccacagagacatcagagagcggtcctccttgtgagtctgagctgaagaggaggaggaggaggaggagaagcaccagctctgctctcggagggagagcgaatatgcgcctagtcgcgctgttgctcgtcaccgccgtgtgcgcgctggctgcgccgtctgccatattcgtcactgaccgtcttctcccgatccgcttct

SEQ ID NO: 373312 - DNA, 201 bp, Zea mays
gggggacccccaaaaacccatttgacattgttttataaggtgggccaatacttatgcaacatgttttacagcacaggaaccgctttgacaaaaaacgacacgttccctattttttaagggtttttttaccaacagggaaaacaatttaattcatttatgctggataggggggaaaacccaatttccgacaacacccgggaa

SEQ ID NO: 373313 - DNA, 354 bp, Zea mays
gataaaatatcatggtaatattaatattatttggatgatataaatatgtaatattatatcatctctacttattcaatttgcactttcttatagttcatgtaattgaaattacatatatcatcaaagaactcatcagcacctttatggcaattcttcatctttgagattctgatgaccatcctctgcaacttcacagtgtacttcaagagtgttcaacattgagccgggagcgtacaatgatcataacctcttccaaacaagggaagaggaaccttaaattcaactggagtacaactgttatagctatgatgccaataaacagatggttctctgaaatgcccttgaatacattca

SEQ ID NO: 373314 - DNA, 288 bp, Zea mays
  unsure (1)..(288): unsure at all n locations
gatgggagaagggttataacaaaggggggggggcatctctcttttttggtgcgaaataaaccaacccaagaatttccattctgaataacagtgccaaaaaaatccgctaatatacgaccaaacagcgctaactaacaaacaaactaagatcatacaaacaaaacactgcctaacaatcactcttgggcgttgttttccttcttccatttctgcgacctggtctcatgaagngatgtcacatttgcacggattaaagatgtctcaggaaaagcaggcgatgcactggca

SEQ ID NO: 373315 - DNA, 260 bp, Zea mays
ggaggaaaaattcgggatataagttaaagccaggtgaaacagacaaacatccccttagaagcaattttgcgtcaaagaaatctagagtgatctcgaatgttgtctgaatcaaggtctagttaaacggctgaagcattactacaattggttagtctttagtcggtacagacaggtagcggtgtcaacattgtatttatgcttcagccgcttaactggagtgatctacaatggtgtctgaataaacgtctagcggacccttg

SEQ ID NO: 373316 - DNA, 347 bp, Zea mays
gggggtgaaaatggcatctttttggaggccaacatgtaaacagggggacttttacacttattgggaggatgacactacgggttggagcaattttttgtttatttttcacacgcttctcaaatgacataaccattgaagggttggggacacatatttattggcccaggggctggactacacactacactacacactacacaaaaggtgttgtcctttagtctgcagcactagagatgttgttgccctgttgtcctttagatgctaaaagaggacagtcaaaaggctcctgctgtcctttagatgctaaaggagatgttggtgtccctgttgtcctttaaatgttaaag

SEQ ID NO: 373317 - DNA, 271 bp, Zea mays
tcgcgatctagttgcaaccgagcaggatgctgtcattgcccagaacggcggcggcggtgactgtgtatgcgctggtcgctcttatcgccggcgccggcgccgtcgccgccgcggcgggaggtggcgagcagccgctgtcgaggatcgccatccaccgcgccaccgttgcgccccagccgggtgccttcgtcgacgcttcgcctgcccttctcggccgggaggggggggacagagaatggggtggaccgtcacatatagtaaccccaggccc

SEQ ID NO: 373318 - DNA, 255 bp, Zea mays
aagccatgtgttggttcactgtacaatcaggataacaccaatgtaataataataatacacgctcacatcgcacatgaccattgatcgggagataagatcccaatatttcagctcctcttcacaggtagggggggatctccgtgcggcacggcatcaacacgcggacaactggtgtcccgcgggacgggaacggtcagagctatatatagttcatgctttggcctatgcatgagactgcatgtcctggccgtgacc

SEQ ID NO: 373319 - DNA, 229 bp, Zea mays
ggataatcatttaataagatgccaatgcataaattccattcaggattacatctttatcggccatgacttatttgatcgatgggtcaaaaggcatagaatcgttatgcctccagtccaaataaccaaagggattatgtatataatatgggttcatcgtcatactaatccatatttcatcaggacaatatacaggcggtgggtaggctagaggctgtatctgctggagtcc

SEQ ID NO: 373320 - DNA, 363 bp, Zea mays
cttattcgtgcgcggacgcgtgggctgggagctatgtatcaataggcatgggcagagctagaatgtagatctcgacacgtggtgcaactccatatggaaaaagattgttcctagatactacatgatgtggcaggaggccactggctattccagacagactaagactactgctgttcatgtgtattcctataacaatttgatgccggcatccgagattgctctgaatgctggttagggtactgtaggtccaaactccaagtctatctcagacgccagatggtgcaaggcacgcttgatcgagtcttgctagcatccttagggtgcacaagtttgcgactcctcttatacagggagtacaactga

SEQ ID NO: 373321 - DNA, 355 bp, Zea mays
cttactcgtgcgttgtcgtctgggactagagcaatgtggcaatatggatctgctaagtgggcatgcagacaccgacaggttgttcaacaccctatgcctatagatacttcttagttgcttcatggcttggagggatgctttgaacggttccagacttgcttaggtacatgttatgagtgtacattcatatagcaacttcatggctggctcggagattgttcgtaaagctgttaagggtaccagaaccacaaatactaagggtattgtattcacttgatggttttagaactcgctgacctatgcatcatagcatccatagggtggacaatatggtgactctatttattcgctcatg

SEQ ID NO: 373322 - DNA, 384 bp, Zea mays
cttactcgtgcgtggtcgtgtatgctttgtgcacgatcaaaaagggtacctgcagcgccagcatgagatctccaataggcgggccaaaaccctcggccagcttaacctgcttaggtcggttagcatttattggacggtttattttggtaccagataaggttagaggcatgttagctaggtactttcaaagatggagtccttttctggctcgaattttcttcagcaaccttctccgggtcaggggacgttgtctacaaggcatggtacacgcccctgatggttgcagacctcgctgtcgttggcctcttcggatccagatggctgacatgacatgcacgatcctgattcaatcatgagggcagggcatgcttcccacactgagag

SEQ ID NO: 373323 - DNA, 108 bp, Zea mays
ctactcttgcgtggttaccaatatctggtggcggggggtaaaggttaccaacctcgcgattgccaccaaacctataggatggccgaaaccctcgccgaggctcaacgc

SEQ ID NO: 373324 - DNA, 284 bp, Zea mays
gtcaggtgggtggttactagtctatggtcgcggcggaaaaagttgaccctgctggcgatattctatcatatcttaggaccgccagacgtcctcggtatcgacaacagcattagggagggcgccatttctctacactgctcaagactgagtacaggagggaaacacgcgctgggagatgcactgtctcgagcggggacttcaggtggagggaaagatgcccggagacaatgacattgcgggaggagatgatgcttaaagcatcgattacaccgatactggctgta

SEQ ID NO: 373325 - DNA, 204 bp, Zea mays
gcaagggaagctacaacttgacttagctatatatgtcacataggcaccaaaatcctagtttatgaaaccattcagaacttcattgggaaaacccggaggtttcacttcaacaggggactgaaccacaggaacacaaccatagctggggatttctaacggaaaaacagacccgccaagggggaaacacagttgctttatttacac

SEQ ID NO: 373326 - DNA, 243 bp, Zea mays
gttattggtcgggggcggccgctctctagcggccgctcaagccgacgcctctgctcgcattctactatgatggctgagagacccacgccgctcccggtgtgcgacaatagcttgagagagcgcgctgtgctctgcatggcgcgagaccgtgtccagatcgaagacccgtgctgggagatgtactccctcgagcggggccttcaggcggagggctacatgcccggtgacaagaaccctgccgga

SEQ ID NO: 373327 - DNA, 368 bp, Zea mays
tgtgacaggaccggccacacctccagggatgcgcgggtgctgcccacggggatgccggccaagtaccatgataccgcaagacctacctcagagccgtgcccagagcaagaaacaaatcatgcacacccatctcctcctagacgctcactgttaagggctgaacgatcttccgctgggactcagaatgtatcaagtctccaacaggatcgaagcatgcaaagagaatgaccgcatccatggttgagatcttgaacagggacatctctgcggcaccatggatgcgcttaacgtccccttagcagagtacacttgaagtgacacactggcagggtgcgatagagtatgctaaaaattacacctatttcact

SEQ ID NO: 373328 - DNA, 337 bp, Zea mays
cttatatgtccgtccacatgttctcggacgcgggggcactgctgtcggtgatgccggctaagaagcaatgatatcggacacgcctatcctagcatagtatgcccagagccagagacatatactgcacacccatgttctcctagatgctcactcttaagcgctggaagatcttaccatggaactcagaatgattcaagtatgcagaaggatgaatcatagcaagtgaatgttcggtccatggttgcgatcttgaacaggaccatctatgaggaactacggtagcgctctacgtaacattagcagatacacgtgtattgacactcttcgagggggagat

SEQ ID NO: 373329 - DNA, 141 bp, Zea mays
tcttatctgtacatccacatcatctcggttgcggtgacaccgccttcactgatgccgcatcagaagcagcgtctgtatcagcagttctcccatatcaccaccgagacagaaaagaatgctgaagatccatgttttcctaaa

SEQ ID NO: 373330 - DNA, 340 bp, Zea mays
tgttttctgtgcgtcctgatcttatggttagcggtcactcagcgttcactggtggggcttcatgcagaagagtctgtacactcattgttctgatctcaccagcgagactgaacataatcatgaagatccttggcttcaacattcccatgcctatagtgaagggtcctcctgccatggacacaacagctaatgaagaatgtgagctgggcattggaaacactgtatattctggacgcactgttgtgaccttctccttgcgagttaattccaccgtacaacaggtcacttcattacggccggggattcagtctgtatggacactcttcaagcgaggacaaga

SEQ ID NO: 373331 - DNA, 410 bp, Zea mays
  unsure (1)..(410): unsure at all n locations
cttccagctccgccaattccggaaggaaatcctccacaacccccatcccggaaccgttccgccgcaccgcgggccgcttccatctccaggggcaggggatcttggagggggtctgctggtgggtccgagcagggcagcggcggcgttggatggagactggggcggcggcggcaccggcatcgagggcggacggcgtgcggaggtgcaaaatactcgtgccctggcgtttccagcccggcttcgtcaggcagccgctcaagcaggccgccaatgacgcagcggtcaacggcgacggaggtaataccgccggcgcgcctgatgctaaaagttgccgagcggatggggcggcgagcgacngcggtgagaccaacgttttccgagacgcaaaaaattcggatcgggtagggcta

SEQ ID NO: 373332 - DNA, 305 bp, Zea mays
gaaaataaattgatagggccatttattataaagtccttgaacagcgtatctacaactcaggagtgcagaggctcaaatgatgtttcaaaaagagtcaaggagcctacattcaaagcagaaaccttttggtgtaaggactacataccctttagatgccggaatcatgcttgcagttcatatcctcagagcaacaatttaaccttttaattcctggcccagcttccgctcttccctccagacttatgttggagacagacatctgttatacaaatgtcctttgaagcagctttgcacatgtcataaac

SEQ ID NO: 373333 - DNA, 336 bp, Zea mays
tcggtctttacagcaactccgctagcgaggtggaccgtgatccagcgagaggcggttgtcctgcagggtgtccctgctgagggtgaacacggacaacttgtataccgatgagaggtacaggcccatggttgtcatacgaggcgtctgtgagaactgaggatcttattggctgctgaaccatggtatgtgaaccgcgctgctggactatgtggctggcttgaccaagggacgctacgccgctttgcgggggggcaatgtacaagagtttcggttgcgctcggtgtccgctggcggctaccagggcgtctacatctgcgaggctgactgagagagcac

SEQ ID NO: 373334 - DNA, 486 bp, Zea mays
attttattcctttttctgaaatgtctgttgtgttctggtttgcagggaatactttaccggtctactttgatacacattgctcttgacacattcagaatatctttttcgaaaggaaacagagctgatggggcttcttccaggagcattttctcgacggtttccaattgcactgaggttgttggcgatgcattattgggaaacatcgtatttatattcatgttaatcctgggagtgcgatttattctcaaattatctttcgatattataaggtatagggatattctgttcgctgtcatcatttcaagctacttcaagttgtttcttttcacaatgatggttcggggagtttccatcatctgttatattcattgttgagatgtttgttctctcatcaaacgttgtagccctgagagttgtctcgcagtttccgagagcccactgcttcgcggtctgcttactagcgcacgcagcaaaatacttgaccca

SEQ ID NO: 373335 - DNA, 369 bp, Zea mays
cacaaatggccatcccttgttcgcatcattagtgcgaagtaggccatatacagcacgttcgttaacgtcttttccacacaaaaatatagagtaggatacgtagttcacagctacctgtcgtcccaccatgaaggtcaaaggggattgagagggagcaggagagatttttgagttgctaggaatttaaacatcctcaatccactctagtccacatggatggattttgagattaaaaccagcagagcgtaacaaagctcacgtgcgggatgaaccctggaccgctgaaccttatgcattatacacaagcacagaactcctggtaaatcagttcccgcttcagatctttactccacgcctatgatcgatttc

SEQ ID NO: 373336 - DNA, 370 bp, Zea mays
ggaacatgtgtgtccggttggagacgtgtgagcatataacagtatattactggagctcacactgagcattcccatgtttgccttctcggggctatatagatataggcagatgctaaggtgcagacgcatattaagagctggtcggtcgttgtagcggatccaaggttacttgctactggatgctacctcatagggactgtatagagtcacctctgaacagaagagagtgcacagggaacatctgactgatggtgaaaagccaggagggacagacaccatcgaatggctgcggatgctgaccaggatagcagggcctcaactgatgagatacgccctgagggcacttaccagcacacgcacaacttgggag

SEQ ID NO: 373337 - DNA, 374 bp, Zea mays
tcggtcactcctgcggattcggcccgtgcgtgcaccatgatccactcaaggccgttggtgctgctggctggccctgctgagtgcgaacacgtacaacttgcttactgatggccgttctaggccactggtggtctcacgagaagtccatgacaacagaggaactaatgggctgcctcccctggatgggtgaacagctgtaccggactctctggctgacgtggcctaaagacgctctgccgcttcaggtgggggccatgtacaaggatcacgtttacactcggtctacgctggctgcagcccgagcctttacaacagcgaggctgagagagcacggatcttaccaaactgacaccacttgctgtacaacctactat

SEQ ID NO: 373338 - DNA, 201 bp, Zea mays
aaaaaaaaaacccatgcttgtaaaattcgggcccctacccctttgggggaaattcatggttccccccatggtgatgccctgaattttccatgatcccggaaaacaagggagaagagacccttcctaccttctacccaggtttaaaaacagcatatgggatttacatttttacaaagcattcatttcctttgagaccgggaa

SEQ ID NO: 373339 - DNA, 454 bp, Zea mays
ccctctcgtccgccgacgcgtgggcggacgcgtgggcggacattctactgtggacgtgtggataaccatgccaaaatgggcagcacaggttgtgagacatcttgcgccagaaatctcctacagaagcttggttgcacttggaatctattgcgtaaatggtacaccagtgttctcatttgattggcaggatgtacaccggtttcttttcttgtgctctaataagtgtggagatcaagctattctaaatggctcatttgctcatggatccaactgggcagtgccttctactaaggatagtttcatgcttgccctatatgaagcatgtactgggcatgagatgagatcggaatgcaataatgtgtttctctttgataggaggcaaaacacaggcagtgttcgacatgtgatatctgaactgacacaatggtggttcaatgcttttagcctaggaaac

SEQ ID NO: 373340 - DNA, 318 bp, Zea mays
aacaggaagtaacagccttgttttttccattcctcgaaaccaaagcacagatcgactgcaaatcatgaagcgtgggagtgcggggggcatgtaagagcaatcagaatttcgatcagccaaatgaaggaaacaacattggagaacatacaaggtacacttatttacatgccatccaaagttttttttttgtttttcagtttttgtttaattgcaatttctgcaataaacattgtattgatgagctggactggcttcttccaactcagactagggatcaggattgccaagtatagcttcataccggagtcgtcttcctcc

SEQ ID NO: 373341 - DNA, 357 bp, Zea mays
cttactcgtgcggattcgccccgttcgtgtgttagggtcgacgaaaggaggtcggccttgccggaatggcctcctaattgggcagattttatctgttattggtgacggccgatctcgccgacaagtggtctccatttatggcaaagctatcggggcagccaatgaactccagctctgggagcggggggtcgccgacggcgccactctggtcggcgtggcataatggagccttaccgccggagaatggggccatgaacaagcctcacgtgtaccctaggtctaccgcggctggtgccagagccgtaacaccagcgaggttcatggaggacgcctctctccagaaagataacatttgct

SEQ ID NO: 373342 - DNA, 99 bp, Zea mays
cttacgcgtacggactgggcgagctgcagcttcagcgcgataggtacatgttgagcaccgcgggagtgggcgcggtaccggacccatcctacctccatc

SEQ ID NO: 373343 - DNA, 302 bp, Zea mays
ctcacgcgaccggcttaagctggacattatcaacgcgcggtagatgccactgcacgctcgcagggacagcctatatatgagtcgcttctatgcctcgttaccagacaggagaggctggaccctcgtagtatccactgcatggtcacatctcaacgcctggtcacgccgaataaccctgagggcggtgtcaaccacggagggaagctcgactaggccgacactaagaggggcctcatcagcagtgatggaaattacaccatatctatctggaacactattgatgcattgctgaattgcaacga

SEQ ID NO: 373344 - DNA, 192 bp, Zea mays
gcgcgctgcggtcaacgggccaagccttagccacccccgtccattcatggtgggcgggccgcgagatctctagggcggctcgttgggttcctcggactgcaggggaggagatggaggccacgaacagctctgccgccacgccagtgctgttcaacgtgtacaaccttactgtcgttaacgattacctctact

SEQ ID NO: 373345 - DNA, 336 bp, Zea mays
gtaaacatcaagcacacattaatcaatgtttgctaagacggctgtcgagttgctgcaatggaggattgaacacgggcctttccttgagactgctcttgcgtctattgttcctgtacacagcgatcctaactgtggcgccatatctgcactgcaagcggatctcaggaccttcacctacaggcacacatttatactgtctggctcagagaaatcacaggtctcgccaacaatagaaaattgacttgaggacaaccacaatcacgttgggcagcatgctgatagtgctctagccagcttcatgcagggtatagatgaagatctatgccaggatttcct

SEQ ID NO: 373346 - DNA, 417 bp, Zea mays
agaatgattaacagtttatatgattgggtcccttaagtacttacacagaccaaatatacacaatgacacctgggcagcaatttgaggtaattacaggtaaaaatgaagactgattttctatttggcgtcgtcctgatagaaaccagataagattgcattgcagctaccacatgacgtcctcaaatgaaggggggggggtgtagtataagttggcaacaccaccatctactaagtacacttcgaacgcttttccttttgcagaaccagtattcttggatgactagcacttaattggcctgaatgtggcatccttatggtttgcttctttgtcaaaatcatcacctagatacaggcaaaccacagttgacaacttataatctgcaatatcaatctatcccaggccaggttgatgtaaaa

SEQ ID NO: 373347 - DNA, 120 bp, Zea mays
aagcccaacaacgcatgcgaaacaaacaagcgtgcgacacgcacacagatttttttcaagcggggcgctaacttttggaaggcccgggcccatcgtaaagtgacccggaaccgacccttc

SEQ ID NO: 373348 - DNA, 119 bp, Zea mays
ccaagaaagcgacctgttaaactttaaccagttcacaggatccccacaaagtacatccgaccacaggcctatcagttgcatgtgaggagggatacaatctggggatgctaatacgcctg

SEQ ID NO: 373349 - DNA, 281 bp, Zea mays
ggcggcaaacggataaaaacttaaattctccacgagggaaagaaaaaaacatgcccaggtggggacaggaatacccagagtttttgtttgggtaaacaaaacggggcagcagggggccccagccctgaagagaccacaaatgggaatcgacggagaaacttggcgggggcagacaagaagacatcccggggggacccccgtttttgggactggcatgtttgggcacggccacggaagtttaagacctgcttttgaacgggatggctttggggacccggggg

SEQ ID NO: 373350 - DNA, 175 bp, Zea mays
ggggcttaatccatatttaaagggctattcatatttaaaaattgggatcttccacgagatgatttaaaaaccttcagataaaaatcagttttacacccagcccgccgggcacttttccccggaaattcctttgggttttatttttgggaacgtcctccccaggcgggatacttaa

SEQ ID NO: 373351 - DNA, 257 bp, Zea mays
ccccgggggataagcaaaaacaaaaaaggggccccaacgggaggggccaaacagtttaatagctgaaaaaggggggcaaacgggagttgcattttggggctgaatcaaaaacggggaggaaaaacttgattttttccaacggggcaaaaagttgccattaaaaaaggccaccctaaagtttttaaaaggggaaaattttttgggggccaaaagggctgaagtgtttttagcagccccatataacctctggggggggg

SEQ ID NO: 373352 - DNA, 463 bp, Zea mays
  unsure (1)..(463): unsure at all n locations
gatgtaaataagcgttttggtgacatacaaaatatgttaacatgtttggccatacatgagttcgggtctcgtggtagcatcatgtttgcaaaagcactgtcttgtctattttacatggtggtgtttctaaatctaggtgcaggagcttaaacactcccatatgtgaacaaaagtccgaacaccgttgcactgttgttgctgagtggtctactccgtgatgtgaagacgtctcctagtcctttagtgaagcaacatattaacgtcagcaaaaatcaaaggtaaatgcttgtacggtataccatcaatttcagcagcaagacgcttttgacccccaccacaccaacatgacgagcaagatggttgtcttgcattagtgtttgcatacataactagttagaatgtgatatactctncggagttatttccataacatagtatatgcatgtatagcatatggctgata

SEQ ID NO: 373353 - DNA, 289 bp, Zea mays
agggcgaacgagcaaaataatggcccggacatatttttattgaattgaccaataatgcaaaaggagttgatgattacgtcaccatacaatacccagaaaagacactgtttgtttatgcagcgaaaggaagacacgagagacaccgtaggcaggcgcaggctttacgttattttagcccacaggacgtacgatacgatactatacgacgaacttgacaaccacacaccacggtgtgaagcctgaccaccacgaagccggctacgacgaggaacacgccgggacgggcgca

SEQ ID NO: 373354 - DNA, 185 bp, Zea mays
ggcaccccaagcccccaggatttataagggcaatgcatgtataagtcaatataatcgcccccagtttcaagacgactagatcctagggtatcatttttctggtctacaaaagctggggcctatcattttgacccatcggggaagcgttcaagggcattctgtttcccgttaacaaaaaattcaat

SEQ ID NO: 373355 - DNA, 369 bp, Zea mays
gtctcaaccaaaactccatcagactaggatactgatacagggcattaccacattacaaagaccaagtgaggttttctgcataggctggcaaaatcaaaccatgctgacaaacatctagttcacctctagggaacctacggcactgtgccactgctggcatgtcaagctataccaaaagggtatggagctgcttcctatgtccgtccaagaatccacgtcgctgcccataatcttagaaccgggaccatactgagccttgagagcagcagccatggggtccgagacgttgccgcttacaaggatgccagcacccccgaaacgggcgactctgccgggctgctggaaacccgagatgagttccagcacgtt

SEQ ID NO: 373356 - DNA, 425 bp, Zea mays
aacttaaaagggacatctaccatcattcataaatcctaaagagttttctaacggttacaacagtgcttaaaagactcaactcttcctagcctagtaccccaaaggtgcaaaagctaagctagatttgaggagttctactgctgcacacttctatccaaatttctgaaacctaatggacaaacaaggcaacactggacttgggggaaggtggtcttcctgagccagcagtgtccaagctggatgcaggctccggctcctctcctccctcgatgtcaacatcctcgtcggccccttcggcctccatgtcctggatctcctgatggtgcatatccaggtgctggttggcttcctcaagttgctgctgagtgttcagaagttgatcctcgagaacctcgatggggttctccctggctcctactagctac

SEQ ID NO: 373357 - DNA, 176 bp, Zea mays
  unsure (1)..(176): unsure at all n locations
tttnttttttttttttttttttttttttttttgggtttttttttttttttttcgggtttttttttaggcaagggttcttccaaaagattgggcattgcacatacagttgccccgaaggactcaagtggttcaaaatattcacctttggccccgccccggacccccttttcccgaaa

SEQ ID NO: 373358 - DNA, 361 bp, Zea mays
  unsure (1)..(361): unsure at all n locations
ttnataattttttttttttttttagtaccaagtgggcattttattgcgcaggacaggacaagagtagaacagggttatcactcacaggctacaattcaaggaccgaaacattctttgcgcgttaggaacacaatcgccatatagctcgcgcgaacctcaaaaggttatgggggacattcagcagtaggacattacacggcgtgcctaaatgtgcccacagtctacatcactcgcatagataaattgcagccatcgttaccatagagcttataacaggcttggctagcacacggtcaccacaagcctaataaacataggggtaaatatctggaacacttgcataaaccatattttgaactaa

SEQ ID NO: 373359 - DNA, 113 bp, Zea mays
aggcaagggttcttccaaatgattgggcattgcacatacagttgccccaaaggactcaaatgcttcaaaatattcacctttgggcccgccccggacccccttttcccgaaagc

SEQ ID NO: 373360 - DNA, 194 bp, Zea mays
aaattacaaaaataaactaaagggagcgcagatattggtttagctccaaacatacattgacacccacctaactacactccattccacggacatcgtcaaccaaccagctctagatcccacacatggtcggcagcagcaggtgctctaccaaaacacgagcagcaacacgagatttgctgctagcaaacatcaca

SEQ ID NO: 373361 - DNA, 242 bp, Zea mays
aaccggaaaggttatttaaatgggaattttttttgccacttcagttgggccacaaatgatactagattggcgaaattccagggcgcgctggtacagaacatcccataaactccgggggacgacgccccacgccataaactccattaaaatataccttccaaaccaggttgttaaagggctaattgggcactgaaatgcccataacagggaaattaagttggaataggggggaacctttacta

SEQ ID NO: 373362 - DNA, 158 bp, Zea mays
aaaacaaaaaatcccctttttttttttgcccaaaaattaaaattcaacaatttgggttcccatatggttttggatatatcccagaaaatggagggccggggtttgccccaaaaattagtcccacccgggcctttactggtttaataatgaacaaattt

SEQ ID NO: 373363 - DNA, 345 bp, Zea mays
cagattaatttttttgaattttatagcccataattaaattttagaagagagccaaagcaacgcagaagcattacacagcacgaattcaataaatcttccttcatcagggcctctgttacttatttgcttgagacagctgcttgtccttgtccatgtccttgctggacaccggtttgaggggactagtatcatccggcaagggctcgaggtcggcgaagcccctagccgcctcgatgatggccaccggcaggccgaggcacttgcccacgatctccttcttcatctcctccaactgcttgaggagcaggtcctcctcgtcccccttgctgccttctttgccgccgc

SEQ ID NO: 373364 - DNA, 239 bp, Zea mays
ggggggggtgtaatctactcatattattgaatcaataatcacatgaatttaaaccattccattgtcgttttataaatacggacacagcctttgaatagagtaccgtgtttcaagggtcaattcctaaccaatcatagaatgaacagccacaacacatgcgggtttttttccttttttggtaagttcacactaccaattttgtcaaatttctaacaaatttacaacaaaactgagctggg

SEQ ID NO: 373365 - DNA, 233 bp, Zea mays
gggggggacttttttcatattgtgcactgtaattgtaacacaaatcactatgaattatgaaactttctagacacaaacacaacatgtttttgtgggtgtcaaacgacaacaacagtcaacaaacctgattggtgcttggtgcttgctgcgctgctctgcttgcctgcttgctgctcctgcttgcctgcttcctgcgctgtgtcgctgcccggtgcccgctgcttgccttgccc

SEQ ID NO: 373366 - DNA, 482 bp, Zea mays
accgctcggaagccagcatctttagcctgctgttttccatctgtcgcgaagtagccccaatgcccgtatatgccgccgggggcattatcgacggccgggggctggtggcggccctagccctgggagctgaggcggtgtggtgcggcacccgatttctcgccagtgaagaagcttacgcccacccggagtacaaggcgcgggtggtgacggcaaccgtcggcgataccactcgaaccaccctgtttggtccggaaatgccggggcagttaatgcgggtactacgcaaccttgccgtcaaccagtggggcagtcgcgtggcagacgcaactaagcatggccccactcaaccggcgatcggctccaccatcctgagcggtcaggccctgcccatgcctaagttctcagccattctgcccacccccgacacctgcggtgattttgagaaatgtgcctgacggcaggggaaagcagcggcaatatca

SEQ ID NO: 373367 - DNA, 298 bp, Zea mays
gcaggctatggcctgggcgaccctaaagactacgacagggaacatgccgttgacctggtgaagctgttggaatttctagagacaacccagcccgatacctatggggtacttggcatcaacagagaaggccccaagcgtacccagttcttgcaccggctacagggggagattgccaaacggggtgtagtggacgcattgcagactggtatcaggcatggccctgcccacgtagagcttttctatggcacccctacccctggtaacgttaaagcagtggaacggttcagtaacaacattt

SEQ ID NO: 373368 - DNA, 80 bp, Zea mays
ccagccattttgcggtcatgggtttaataggcggttatcggcggatttcactctaagggcttgtttacttaaaaatgaag

SEQ ID NO: 373369 - DNA, 319 bp, Zea mays
taactggacatttcaaaattactaaatggctcgatcagcgtcttaatttttcccttttttctacccatagtcatcttgctagctgtcaacttatgctattagaccgactccaattaaaaggacatatccaaccagaattgagtcgttgtttgggtcgtaggaaatatcttgcctatcttgttccaatcaatcgcaataatccttctagccattgggatattagtcgcaaattacgccttagccctctttttgggttatatcgtctgacggatagcggcgggaatgcttacggttgtgcgtttaaccatgatgctttatt

SEQ ID NO: 373370 - DNA, 325 bp, Zea mays
ggctaaggcttgagaatgggggagataatgactataatggtgcattgcggcctcgggctcaagagttgaccgcttttcttttgggaatttttagagctacagtagagacaatatttttgaagtattttgttggctttttgggccgggttattgtctgtaggtaagttttttagcgtcaactaaacttcttacgttttttactgcagcaatcttaattccctcctgaaaagcttttttttgttggaaatcttggactattgccagaattgtaacggattagatcggtcgctgtcacgcttgtttatcgtcataaaagtttatttta

SEQ ID NO: 373371 - DNA, 437 bp, Zea mays
acgggagacattgcacaaaatttaggtcatttatttcgttcatatacacaaactctaaatgaaaatggtgtaaaggttagccgagaatttcctgtaggaacaattgcagtaacaattgcagcaaatattgctgatacagccatcttggggatacctatgtttttccctgatagtattgttggtgttactgtgtttccacaatttaatcatcggctagttgaactctgtattagatttgcaaaacataagttagatgctaaagcaactcaaagtgcacaaaaaaatataaatcttgaagatttaagacctttacttattccatttcctaggaatccgaaagagcaggacagaatgtcatctgtatatgaaaaatttgatgaacgattaaaaaaagaaagaagcatatctcgaaaaactcaagctacataaaaaaggac

SEQ ID NO: 373372 - DNA, 302 bp, Zea mays
agaagatgttgcgccaagtttggcctgggccgcgacctgttttggaaagacaaaccccaacccctcaagatggaacaacggcaacagcaggaaaaacaacccgttctaacccctggcactatctcacgggaagaatggctcaagagaaaggcgggaaaggctagataacttacaaatttttttgatattgggtcgccttgaggcgagaattacgacaaaatccaaacgaatttaagcaacttccatgataggggcctttaacttagcctgagccaccctatcaccaactacctttagcaaca

SEQ ID NO: 373373 - DNA, 504 bp, Zea mays
tgaaacagaaatcgaaaaattttatccccatttttatcccactagttggtacgttttagcggctggggatggggatggcatgagcgaatggctcaagggcaccaaaatgagaacctacggcgattattttccccaggttttaactgtgccggaagacctacagccaacttttcaaccctttagcgaacagcctaaacggatgggccctgctacccataacgccctgagtcgagccctgctggatttctccaaccaattggtgccctacctcaccgaacaaagatatgcaggcagattaatttatagcggcggagacgatgtactggcctacaccaacctgtgggaatgggatcaatggttgtgggacattcgccaagccttttcgggcgatcgcgatgaacacagggaatttgacagcacggggcattattggcactcaaaaactgcccacaaaaacttgccccaacggcccttgtttaccatgggggatggggccaccattag

SEQ ID NO: 373374 - DNA, 391 bp, Zea mays
tttctataaaaataaaaaattatcgtgtctttgaagacttcaaaatcaccaacattcctagcttgtgtgtcattattggagccaatggtaccgggaagtctactctgtttgatgtttttggttttctccgtgatgcattgaaaaataacattcgccaagccctgcatatcaggggtggattcaaggaagtggttactagaggaaaagagtccgaagatatagaaattgaactcaaatttcggatggaaatacttgcaacagaacgattagtaacctatattttgattattgggcaggagggtaaaaagccagtcattaaacgagaaattttacgctataaacgtggtgaatatggctctccttttcattttttagacttccataatggtca

SEQ ID NO: 373375 - DNA, 353 bp, Zea mays
tgggtcgggagctaccccaccccggcaacacaatttgcacaaccttgagattctggaaaggtttttccgttttgggtttgattactttcacctcgtccttggccaggttgagcaaacaggcaaaatccgccccattgttggtggcatccagggcaatcacataatcagcatcccgaatgggggccaactcgtgacggcgatcgatggtgagcagcagattttggggaaacaattggatttggacagaggcctggccatggaggcaacggagtagatgaattaggccattgctgggtaattcctggagtttttcctccgttattttcgtcgcttcccccacagcgtattgatta

SEQ ID NO: 373376 - DNA, 217 bp, Zea mays
ggtcgactctagaggatcatctgggggcagggttggccaggacctgccccaaccctggccgtgtgggttttaggcgatcgcaatggtaatcactaccggggtcggttgagctattctggacttttcctgcctcgaagactgcatgtggccacggtattgctattgtcggtagaccgactccttttttcgagagcttgactcccgcgggacgtacgtt

SEQ ID NO: 373377 - DNA, 457 bp, Zea mays
ggggttgggactgggtaatcatcgacacccaacaaattggcgatcgcctaatctttaccggctccctcacgatccatgggggggaccgctgtttgaccaggcgggccaccggcactgaagacattgattgcaatagctacggtgatccaagctccaatgcggaggccatggccctgagaagatgttgcgccaagtttggcctgggccgcgacctatggcggaaaaacaaaccccagcccctcaaaatgggacaacgacaagaaccagagaaacagacagttttggcccctggcactatctcacgggaagaatggctcaagagaaaacaagccaaatcctaaataaagttcaaccctcaataacaatgggggattcttgcaccaactaagctctaaccattgcggaagaatgctttagggcagaaatagcccggagatttaacaataaccaagattga

SEQ ID NO: 373378 - DNA, 228 bp, Zea mays
aggatccacatttggcgtaaccacaaatccaccacgcttattgagatcttcaagtaattcaaccatggagtagttatggatcgttgtgttgagaagcgtgatggaattcattgcttagccccggtgtttttttgatgacactttcatcttcgagcaggactgtttaagctcatgtctatgttttgtttacgcaccgtataactttatgatccccgggtaccgagctcg

SEQ ID NO: 373379 - DNA, 295 bp, Zea mays
aagcgggcacctcaatccatgggggaggggttactttagaggggggggggggtccctattcgacgctttagcctcgcttacaaacaagaggcgaaaacccagtagagatggctaacgaaccagggccgttcccccctcccccagaatagcaagcttccgatgcgtatgtggctgccaacccaagttctcagtggggacaataagctacctacttgatggctcttactactactggcacactacatatgaggcccccgacggctcaattctaaccaaactcttcccctgcaacagt

SEQ ID NO: 373380 - DNA, 167 bp, Zea mays
ccccaccacacttgagtgcgataccgccaatgcgcagcactccacatacacaatcagtatacaaggctatatggtcggtagtcacgtcagctagcggacggactctcccgcaacagtagtcatatggcctggcaactaccgcttcagatcccgctttaccgagctcg

SEQ ID NO: 373381 - DNA, 207 bp, Zea mays
caacgtgaggggaacgcggacatatgtgcaaaggcccacattggccttcgtactaactggaacggctagcgagggtgaatgcggggaaccgacaatgcatgatcggggttcatgcaaatggtggtccctgccggattacgcagagagaacggcggttaccgcgccttgatggactggacgaggatcaacaacatgtctactgtccat

SEQ ID NO: 373382 - DNA, 444 bp, Zea mays
agaggatccctttggggttccattttttggtgctgccgctgctaggacaggctgattatttaatcacaggcgacagagacttattggacctggaataggaagattctcttacgcgttccaatgaaccgtgggaacagatctctgtgtacgtctcttactattaacaccggaaaaaggatggtctttaaggttgaccgctttatctaccaacagcttccaggcatcaaatcttatgactcatctgagtcttcaacagaccatgtctgactatcaatgagccagtttcaccgcctaattaccctaaaaccttgatttactcgctaggcacatctcggaagccaaccatgcaccattggacagtttacataagctagcaacatttttacacttctaaaaccacgcccacgaagacttgcgacgactgctgtaaatggaaccgccctg

SEQ ID NO: 373383 - DNA, 367 bp, Zea mays
gcttgttttttaattcaactttggcagactactattcttaagaattgggaaaaggaagcaaaaaattggctcaaagtcgccgcatttatgaagcggaaccgttacattaaatttcccaattaactaggcacatctttggaggtaataaaaatgcagttgctaacccgtaaattcgctgtggatcgatattaccaaaaagtatttctccccaagtatttccggaattgaagctagatttagatcgtatttttacttaatttttagtcaatttctgcctcgatacttttaaccaactttaagtcaaatgtattggtatagcctcactcccctcgatattctcctactccgggatgccaaacccttcacc

SEQ ID NO: 373384 - DNA, 519 bp, Zea mays
ggctcgccacacgaccaattttcctttaagcgaatgccattttccacaaagttaccatcactttccttaacctgacgggtgccagcttcaatggaattgtgggggcgactttccatggtccagggttgactatcttcgtcctccggtcgggcccaatcctccggtttaatggccccagtttgcaagtaacccatcatcacatccaagggcaaccaggtacgggcctgtttttcgtcccgttttatatccgtttgggaaacagtttccaggggtgctaagggggccggctgggttttatcccacaacatctgacttcgtaagggactggtggcatcgtgccaaggcaaaggtaacaggggggttttgccgacaaagcccaacggccgaggaaaataaagggtttccttgtgatataacaatggccctattaggctgatggtttgattttggggcaacaaactccggactgctcccgctaaggtatgaccattggggggaaaaatactgccagcccaggcc

SEQ ID NO: 373385 - DNA, 379 bp, Zea mays
ggctaaggcccgcttagctcgtttgctgtaggtgcgggctgttttataaggtaactgtaaatccagggcgatttcttgcaatgattccccctgttctcggcggacaaaaatagtggctagcgtatggcaaatttcctgggctctctgccctcctgtccgttgacgctgggctaggaggagagaggcgcattgatctatccgttgcgttaacacctgagtctgtaaatcttcttggaggcacgcaaaagtttttaggtccggggtagcccagcccgccattgtttgccccaaaccaaaggtgggtttatgcccagcgccacagtagggtccatatcgacagagggcatggaacaagcggccataatcatccccatcatta

SEQ ID NO: 373386 - DNA, 372 bp, Zea mays
aagaatgtccaccaaatggctcgacgagaaatatacaaagttttacgaactattcgctctgatttttctttatccatttgctgggcatagttttggtattgattagggttttccataattagtagtttaaaaccgctttgacaaaatactatagttgttaaacttcttttttctctttatattacaaggtaatagaaaaatatttattaacttttatttctaaatagaactttagcaaaaatgtttaatgactagtatttacctgacagaacccggaaccaaggtcagttatcacaatcagcaactacagatcaaacaaaaatcccggcaggtcattacccgcttagcggagatcgacttgctagtgctctt

SEQ ID NO: 373387 - DNA, 526 bp, Zea mays
cctgggttttagcgtctcctggatgctcgcgtaggcttccttgtcttttgtactatctgtgtacaggtcaagctccgcttgggttagcagctgggcgtagtgcgcttccagcctggtcgtgtcctgcatccccgttgctaccgtcacacggttcaaccccgggtccatttgagtttgtaggtacttattaagttggccaaaggagtaaagattatacagactaagctttaactgctcgcgcatctgctcgtactctgtacctgaggcttgctctagctcctctgcggtgggtaggataatgtttgctgccctacccgcttctttatatctgagagccacatcctcattctctaagtacaagtctatagtcgaagtcagcatgttggtgttagctccaagctgtcctaactgctcctttgcagtgctcaacataccttctagcgagtgagggctaactgcgccgctcttaacttgtgtgtagccctgtttaagctcgtccataatggtccaaactgctagagagtct

SEQ ID NO: 373388 - DNA, 450 bp, Zea mays
tttaatcagaatatggagaaagggctggctgggtgggggagaatcagttatctgctgaagattcagaaaagctgaaatatctacccttgatatttaccctccttgccgtgaccaacctgggatctgataaggatgaagtgctggcaggggtattcagactggtgcatccctgaaatatcacctgtgcaaatatcctgtacagtgcacttcatccttaccccccctcttttcttttggataatcttcaccctgcctagctaggctctatgtgttggcgtggatttgctggaggcagccacgactgcatctagagctcatggttatccttgctgcaagttcaagcatccaacccctgtgatcttttccctgcctatataaagaacagcagggaggggaacagaagacagaaaccagattcagtgatctgtgttccatcatcacctggatgag

SEQ ID NO: 373389 - DNA, 353 bp, Zea mays
ttaattttgtcgataaaagcatagcacctaccggcggtgttcactccatcgaagagttgctgaccatccaggctaattcttcacgcggcccatgcccagcagctgctgagtttgccaagcgcatctcagtttctaactcaaaggaagagaaggctgacacagagaaggatcggaataggagatccagtgaaggtcgtcctagcgatgagcgaagagagaagctacatgatcgtgagaaggataagtccaagtcggacaacaagaagagtctggatgcaaagcaattaattgatatgatcccaaagacaaagggaagaactttttgcctttgatataaactgggtgatatatga

SEQ ID NO: 373390 - DNA, 456 bp, Zea mays
tttgtgttcgtgttcgcggcgccggaggaggtggggggcgtcctgtagagatggtgccgaaggagagatcgggagccccgggaggagttcgtctggttccggccgatgagcgccgactaggacagagcgttggacgctgccttcccaggctccacgtaccgtgcgttcagggagaaggtggacaccttggcgtccaaaatggaggatatagcaaaagctgtcatcagggttctacacgataacgtcaaaaaccctaaagcctttgccgagcccagagaagccgccccgtctatcctgcgcctggcactgtacatcagtgacacgttgagtacatgctggaaccagcttgacagcaccactgctcctaacttgcacgctttgagcgtccacctttgctgacaagaccgggggttctgtctggggggtatctgggggggttgaccgttttcactttac

SEQ ID NO: 373391 - DNA, 452 bp, Zea mays
tttacgcgtgggtccgcgatgcaggcatccgggcgcctctcctactccgtggcctccaggaaagtgatcgcgggtgtctctatcgcgtccccacggtcgtgctatcggacctcccgggggaaggcgcatgcggcgccgctgcctgcgcaggagccgccaccgaaggggcagaagaggattacaaagcaggagcggagggttcgaatagtggaatttgttgagaagtaggttacttttttttcactgtattttctggttgtagagtttatctttttgggtcataggtagcaattgtgtagctgtcggcttattagcacttctgtttggctctcgagcttagtaatagacacttagtgtgcgtttggttgggctgtgaactatgaaaacatagctgtgagttgtctgctgggaaaaactgttgtgagcaaataaagctgaaactcggttggttc

SEQ ID NO: 373392 - DNA, 297 bp, Zea mays
acgttttctttgctctcccgatctcgctctgccgtcgggggtctgacatacaacgaagcggtgtttctctatcgagagggtgctttgtctgactgctaacagcggaaacaaaaatgcttatcaaaaacctgattgggtgtaacaacatcggtgtcaaggttgagcatggtgaaagactttcacttggcttgtcttcccagaacttcaaagttcctcaagatgaaccctactgggaagacacctgtgctggagactcctgtggtcctgtttttgagagcaatgcacctgcaagatatg

SEQ ID NO: 373393 - DNA, 496 bp, Zea mays
attctctaagcatggtcttgaaaccattagctggtttgattttttttctttgttcaccatgacgggaatttcttacacagcttcatattacagataagtgatcaagagggaggaccaccgtacaataatacagttgctgagtaagagtattcatccccttgccatcatgtaataatttatttacaatatttattgttcttggtaacatggctgctttatttttgacaaaagaaaagacctgtcggtttctgcattgttaaacaaaaattgtagcgttattttctctcatttttttactgttgtctgataactgtcctttccgaaacatcagctatcagaaggtactggaaccactgggtttgaagtctgttctatggaagacaatgagctagccattaaaccacggaggggatgtgagaaaatgggcggtggaagagatgccacaccaatatctctggagagatgcctggttttttctaaacaagaaaaaagagga

SEQ ID NO: 373394 - DNA, 374 bp, Zea mays
cgccctcctcccaccccttgccctccggccggtcgcgcgccccggcgggcggcggcccttccctacctgtaccagcccctcttttccaatttcaccctctcccttcaattccactttcactctctctctcatcgcccacaccactctcgctcggtgtgtgggtgacagaggaggggagggagctagtagctactgctaggctggcatggccggctcgagttgcacgcctacgattcagtaccagtaggacagtaggagtaccccctcggcccctccccaattcgcgcttctgcaagtacgcagctagccaagagagcagggcgcggctactccttgcattcccttccgagggaccgccgcggcgggggtgcacc

SEQ ID NO: 373395 - DNA, 510 bp, Zea mays
cccactcgtccggatcgctacaattcgatcacgcacacgccttcaacgctgcctgagatcaagcgtcagcctcaggggtagttaaaagatacagttggtggacgtctaatgttccatttcatcgtcatggccttgtagggctaatatatatacctatattttacatactccgcggagtcccgatatccatatcatagtgttttatgtgttaccctggtctcacatgctaatcccatgcatccgctgtcgtggattaccaagatcccatttttctacttagtcttcaatggaacttagcactggacactgctggcttgttcaatcattaaccgcctgcgtactgcatttgggaggggtgtgcacaacccagtgttcatgcgtactttgccttaccgctttggatgcagtttttcaatatacctttgtagctagatggtgactggttactgatcgtttattacattcacaaatatgaccgatttttgtctgttttgcccaaacttgattttc

SEQ ID NO: 373396 - DNA, 441 bp, Zea mays
cccacgcgtccgcttgccaagcaagtgggccatcgacagtcagtacacctaaatcaattggagttgccaagaattcaaatcatgtcttaagtcctacagtccctttctctgacattggtgatgttctgcatcatcatgtcaaggaccactatccacgaagcagaaatgcacatgtcgtccaggagaatggtgttgtgcgtttgtccaaactgaagagatttccgcagcctcacagtgaacttgtggaactactgtccaaacgatcacgtgtggagaatgcatattcaaatttatcagaccccataaatagcaactgtcctggtgtctctggtagagaatatgtggaaagctgttgcacagcatgctcgagggccaataattgccccataggggttgcctttctgtctggtcatttcggtgggaaattaaaaaccttgacac

SEQ ID NO: 373397 - DNA, 448 bp, Zea mays
  unsure (1)..(448): unsure at all n locations
ttaattttggaatagctgataaatgtacccctctgtgtgtgacacattcaatatatgattttcaatatatgatcttctttgattgtgggtcctcctcaatattcacattttttcagcagtggctatatatacacacacacacactactattaaggctgtaaggggtaggctgcctcccctggttctgccttcagccaatctgcaccgtccatctatatgcgtcaaatcatcaccgtccgtctcgtcgcctccgcttcaagcctcctccatccatcgatcgcaactgctcctctccgctcccctctttcttaacagctagatcctccatcaggcttcattcgcgccgtcgtcggcaacggctccggccttcccacgcccgcgtccaacctccccccgactcttcttccacaccgncgtcgtttccaccgtcccgaaaaacaccacgcac

SEQ ID NO: 373398 - DNA, 371 bp, Zea mays
tttgtttttcccatttccccatcccgagtccaagaggggtttctcaccatgagcgtgtcacggcggtcaccgcccccgcccacccgtgcgatcggtccgccccctgcgcattgcggcagacctacctaccttggtgagccgtgggcgaaccacccttcccaattctaccacctccccaccggaccggcaattcggcggtgtcctagccgaccctttcgttcaccccgctctgttggatcggtccaccgtctccgagaaaaaaaaaagctgcctttttatctcctttggcccggtggtcgctccgagctgtgattccggcgccgaacacctgggctttggtggttcccgttcttatccggaatgggggggcg

SEQ ID NO: 373399 - DNA, 494 bp, Zea mays
caatcattaccatcctgtgcacattgtctgtttaatggggatacggtttccattgatggcttcatctcttcactgttggatgagttggatttatgttctctgcaatggaacaaccgcacctgctcaaatgaaaatatcacaaggtgcagttcgcatatggtatcaagtggacttgataccagatgtagtgaaacttgtaatatcttcaagcaaggaaaactatctgaggatactcataactacccagcagagattaatttatgctacttcaccgagctaatttctttgctcgagctctttgggatctatatgagctgcgagtggacatacaacaatgtcgttatccgtcttctggagattctggaattgtgcatgtgccgtgactattcagctgctctgttagtacttgtgagccaacttggaaggccatttgttgatgatgttggctacgaggagagaagtgttagtaagctaaggaacaaattatcgttatt

SEQ ID NO: 373400 - DNA, 343 bp, Zea mays
ggaagccgcgggagggagagccgggggtgtcatctacaagggccggggggagaaccttccggagcccctgtctccagccgtggaggccgaggacgaggactaggacggcgacgagttcagcttccccgttcctccggtcgccgcctacgcgtgcatcgtgcccgtgtacccgatcttcggccggcccccgtcccctcagcgggaggaggaggaggagcctgatactgccaccttgcgggtgccgttgggccggctcctgctggaggagcgggagttccgcgcgcgggagccggacgggcgatcggctagtgctcttgcctggcatgactaggacaacgccttt

SEQ ID NO: 373401 - DNA, 426 bp, Zea mays
ctttttcggcgacacaagaagggacacctcgaacaagaattggctaccacatgctaccagtgatgcagcagccacaacccctattgtgtcatcttctactcccaaaatagctgctggaactgccgtcatgccatgcgctagtgtcggtaattcctcaatgtctgatgccatggctccctgtcatccaccacaaccatgtgtgaaaaagaccatcgccaagaaaagaagccgccttgctaccgaaggatcgccttctgctccgactactcaagaacaagacacgtcaaccatggcttgtacacagcttttaaaatcattggggttcgatttcaagcacgcttacctcttggaggccttaatgtgttcacaagattggctacacaacatgtataaaggtggcaatgaagatcctgcaagcttttggag

SEQ ID NO: 373402 - DNA, 267 bp, Zea mays
tttttctcttttttttttttttttttttttttgtgtttttttttttttttttgggggtggaaacaccagtcttattattcggatgtttaataattacaaaaaacaccatcactgagttttgcaacaacggcaaaactgacacaggttggtttagttacaaaaacaccatcactgaattttgcaacagcggaaaaactgacacaagtttgggtgcccaattttctagggtacaacaagggccatgcatagcaatcccatttttacttt

SEQ ID NO: 373403 - DNA, 448 bp, Zea mays
gtttcattccttccaagttgtccaaatgttaggcatggaagaacatggagataggaggtggcaatgatgcaaattattatggcaacaatcatgttactattgttctacaagaggccaatttttttgtagaccgattggcttgctaagttttggtgctactatatctgtggtgatcttttaactggaggaacatatttaaaggcctcaacaaaggagaaccaggccaagctgtcggtcgtgcgttcacaaatatatttaaatcttccgccatgaaattatttaaatcttacagttcaggcaccagctaagcctaagatgctgagtttccatatgtgataatgttggactgtcttgttcatatcggtgtggcatatcattatgcttgaggtggtggtatgtaccttccattaggtaggccttttgacaacttatgtctcaacaggatggc

SEQ ID NO: 373404 - DNA, 420 bp, Zea mays
ttctctcgtccgcccacgcgtccgcccacgcgtgggatccccttccagaggttagggcctctgcgcccgatttcgtcccgcctcgccgatccacccgccgcaggtgagcggcttcgccggttggagtgtagtactgcggtcgcgaccttcgttccgagctggttcattttcgcgtggataggtttggtacggatgggagccggcggcgcggggatcaggaatgtttcggtgcgtgggaggtgagagccgccggtgggcactgagggcttagggttttgttgaacagggagcaacgaaatggggggcttttgcttcaaggggtcggcggtggacaagtcacccagcgacactacgctcggccccggccgggaagttgaccgccatgaccgtctagtggtgaaggaggagaaaaaagctgtg

SEQ ID NO: 373405 - DNA, 202 bp, Zea mays
ttttctcttttttttttttttttttttttttgggggttttttaatttttttttgggtttttttttatgcccagctttcgagggaaaagtccttaacattgacaaatggaacgaactgttttacaacaaccagcctacagggttccaaaggtaccggtaaaaccaagcgggaattggattggcctttttacccgggaggaaaa

SEQ ID NO: 373406 - DNA, 294 bp, Zea mays
gagagaacatcccgtaccatgctcatgcctttaagaacgactcatgcagccctccatgtccaaatcacaggattttgccacacaaacatgttacttctatttaacggtatgactctaccaaatctacagatggttaccggctgcgagattgaagcctgaaatccacaggtcgtaaactaattcttccaaaagctcatctagtgtgcagtcccatattactacagcgacctctccgctttctgatccaagatccatccaactgccaccttcaagatccatgttaaccagctggtc

SEQ ID NO: 373407 - DNA, 451 bp, Zea mays
tctgcctgccccctctcgccttttcgctctgcagtgtgcagtgcaggtggggaaaaaagctaagctagcgtagcgtgcgttttgcttgtgcatggcatgtgctccgatcctcctcctccgacctcccggcccattctttctcccttcttcttgagggggcaccctccgtcctttcctcttcttcttccttcagaaatcgcaagaaaatggggaagagaagccagaagcgccttattcgacgccaccaggacggcagcataggctgcatggcaggcctcatccgcatgttctattcccgccatgacgccaataagctcctgttggacaggaagcagccagggagtagaaggcacagtttcagtgccttttctggacgaaggggccactcaagaaagaattccaaggacttggacgaaatagatgaatacggcgattataacatggaggaatc

SEQ ID NO: 373408 - DNA, 225 bp, Zea mays
ggctccaagtaaggaattattctatataggattattctcactatgtgccagcagtacggttacaaggcaagaaaaaaaaaggtgaagcaacaagctacaagcccgcatgccaaacatacgatcgcagaagcgtgcggtaatgcatgcttttacagaggtaaacctcatggaaagggggagaagttaggacgatttcactaatctaatgtgatccgccggatcttg

SEQ ID NO: 373409 - DNA, 270 bp, Zea mays
ttcacgcgtgcgcatacccctggtatcgaagggttcggtcacaataaagctggggtaggcaaagatccaacacctggctggcttaccgcttttctagcagcatggaaccttccacgacaggcagctagaacacggaccctcactggtttactacaccgtacaggcagggcaaatcctacgcttgttgctcagaataagaggtggcatgcaaatattacccaagaccttgcttcacaaaacattttaggtcaaggcgtctgacttacacac

SEQ ID NO: 373410 - DNA, 246 bp, Zea mays
ccctcgaagcatatctggccttactggtttttctaacttaatcgtatacgtatacaaagcgttttattttacgatcagaaaaccgagggtaaaaatagcgaatgggctcaccacatcacaactaaattgggtagttgcctgaacaacgacggcctttagcttgacgacgagatcgaatagagaatggtgagcgtgaggatttcacagggggggggagcgacattttggattctgggcccgtcattt

SEQ ID NO: 373411 - DNA, 461 bp, Zea mays
ccctgctcggcagcccttccctgtgcttgttcttcatgccgcgtgctcctcaaattcccagctccggctcatcttccaccaacgcgcgctgctccagcctttagctccctggtcgccgcgcagaggagctccctcagctcgctcctcctgtgtcgcgccccagcccctggttcggctctgctcctccctgtgcccatctcccatggcggctctctctgtccggccaccggcgcctttgttttcctctctcctctacgctgtcgctgtttccttgtgcagcgccggttgtcctcgcgctcggctcccagctcgcccagctttggtggtcgtcgtctccaccttgaccagagcatcgccgtggagtccctgcttcttcggctggccgcggcgctctctccctggcgcgctcgtccgcccctgctccactgcgccgagcagttcccagccgagctcctatccag

SEQ ID NO: 373412 - DNA, 367 bp, Zea mays
ttctggtcttctgtttcgcacaaagatcttgcggaaggtggcggacgcataaatgagggtgagagcatctggcggtagctcttgaccagcgacgagtcaaccctactgctatgatcgcggcggcgtcgatagagacacttccgaatcgatccgcactacatgcctatgaatcctcctccgccgccggctgctgggtcggcgtgtatcaccccagagggggccagctacttgcctgttcctttccacctgcgggaccaccagccgtagccgctgatgccgccgtctatggcggcaagcagctaccaccaatatcagcaacagctggatgaggcgcatcatctgttccagcgggacgcgcataccatga

SEQ ID NO: 373413 - DNA, 394 bp, Zea mays
ttttcacgcgtgcgcccacgcgtgcggcacaagacagtatttaagccgccgcgtggacactcctagagaggagaggacagaacagggaccaccaccggaccgggctggaactgaaggcgcgcccgtgccgtatcgtacataaggaggagaatgtgcatgcatggggctgggcatcggcatggttgcagtggtcgtaggtggggacgacaccgtgaccatgcatctgggctccgccgagggcgaggcgaccgtcctaaccgataactgcccgtgccagacaggcctgggctgcaacctacgacgtaccatccatgagcacggcctgccatcacccgtgcctacatgtccacggactgccactggtgcttcgtggtgttctgggtcgtgccccgct

SEQ ID NO: 373414 - DNA, 264 bp, Zea mays
tgtccacgcgtgcgcgtaccccttgtagagaagggttcggacacaataaagctggggcaggaatagatccaacacaaggctggcttaccgctttactaggggcgtggagccttccacgacaggcagcgagtacacgtagccacactggttgactacaccgtgcagggggggggaatcctacgcttggtgctgagaataagagggggcatgcaaatgttacgcaagaccttgactgacaagacattctaggtcaaggctgcgggc

SEQ ID NO: 373415 - DNA, 339 bp, Zea mays
aagaagcattggctcaagttaaactgttaagccaaagccggggggtgatgatctcacatggcctgtacaatcttctgttacaactaaaacgagaccactcactgcaaaagcagcagcagcagcagcagcagcagcagcagtgcaaagggtgtttattgttcagctcaaggaacctatggcgaacagaaccaactgtacactcgaatgtacaacgagccagtgtcaaatgggagggtgagcctaaagggggtgttgtgccatcagtcactctccgcaaggccgccgccgcccgccgccgcagccagtgctactagacctgcggcttgacgatcctcacgc

SEQ ID NO: 373416 - DNA, 283 bp, Zea mays
acccaaaccccccctagttgatttagctaacagaccattttaatctggagtctggagttctgaacaaggcctaattcggagctgctcagggaaaaacagccccctggggcgaaccttatgtccacaggggtgggggggggcaaacttaacagacaacacaaaggtaatttccatgggggcccatttggtgcctcattggggggcataaacaccggcggcggacgacattttgaaaaccgagagcccgacggggggccccaaaactggaggcaaaggggggggc

SEQ ID NO: 373417 - DNA, 466 bp, Zea mays
cgatctcactctcagctggtcgctcactcttgcagctccacccttcactcagtcttaggctcttagctctaggctctagctagccgcgccactccttcgtgtagccatcagccttctcatcgccaccaatggccactgccgaggtccagaccccgaccgtcgtggcggccgaggaagcgcccgtggtggagaccccgccgccggccgtcgtgcccgaggagtctgcccccgccgaggccgaggctgaggctgaggctgaggctgctgctcctgctgctcccgaggagcttccggcggccgagcagcaggcagccgccgagccggaggccgctgctcctgctggtgccgaggagcccgccgcggccgaaccggccgccgaggcggaggctgctgctcctgctggtcccgaggagactcccgcggccgagcaggaggcagccgccgaggaggaggctgcttctcctgc

SEQ ID NO: 373418 - DNA, 76 bp, Zea mays
gggaacacaacataaacatacaatgactagcctgaacattatttcacaacactgaacaattatccggacgcgtggg

SEQ ID NO: 373419 - DNA, 460 bp, Zea mays
gttctagatcgcgacggccgccctttttttttttttttttttttcaaactagttaacttgagcgcgtatgcataaaattgatggagtgccatcccaggaaactctgtttttgcctataacaagttaaacaacgaacagtttacagtgcctcactaacaccaaacaatctttcagcattttctttgcgaggacactcgagtcctcactctaagttaacaacattctctatacctagaagttggttccgtgctgggaatgaatagcagataatagaatactttcagtaggtggtaaaggaaccacaatatttttccttctgttgaggcttacacctgctccgccgttagagcaaagagcagcactcaccaccagatcagattttatcgtgaaggttaacaaccaggtcatgtgcatcatctagcagcctccagacgtcgagctgcccaccatgctgttgcac

SEQ ID NO: 373420 - DNA, 162 bp, Zea mays
ttttctctttttttttttttttttttttatctgggaagagctgaaatacacacggttttattgcccttccggctcgtttgattgtaaacatccatcagagctatgtttaccagactcagttgccagttgtctatcttggttctcaaacttggagctctgaag

SEQ ID NO: 373421 - DNA, 448 bp, Zea mays
ctgacgcgtgggttttcaaggagagagctcttttatcttcaagaaaggtagcatactttggcacaatttgctatggaagtggctagagaatcacaactgaggaatgttgaaggatgaattggagcagaaaattaagtactggtggatgctgtggctataaacaagtggaggtttatggagctaaaggaacacatgcaaggagatttcgttgctaaaaatgaagcatatgagaggtatacacagaatgttgggttactggaggaaacattgtctcccatggaagatgctgacgttgaagcctgaagctgaagcaatttttcttcagaggaaggaaggatggacttgcttgtttcgggggcaaaggtgaggctaaagtccgatacgaaattgctggtgccttaactatcttggagcagaagctgaagaaaccgcttgagagtcaaagcgc

SEQ ID NO: 373422 - DNA, 383 bp, Zea mays
gtgatgttcgaaacttgcagggcagcgaaacggactaggatttttttactctaccttgctgcaagtcagttaatttttttccctacaagtacccccagtaccaaatttttttttgactgaaagtttgagcaaaaatagtgataaaagggtctgtattttaagtccatgattaaattttcgggggaaatacaattttagtgctgttcgtggcttcgaatctccgtcaattcgctccactcctccaaactgatccgcacagatcgagggtctaaggtttggggtgccgacactgggataagcttgtgctgcttgcccgcccggagctgctcttcctccgccacgctcgccgtcggccgtcagatctcgcccgcaccgacggagat

SEQ ID NO: 373423 - DNA, 406 bp, Zea mays
ttggagcagaccggcgccgtcgcggccctcgccgtgcgcttcttcgacccgctcatgcccaccgacgcgccgctgcgccgcgaggaccggtccaggctggagtcgtccgtcggcgccgaggccacggcggcgttcgacccgctgcggggcccgatgctccactgcctcgacgtgttccgccggagcctcctgcgcgccagcgtgcagcccacgccgccgccgccgccgccggtgcggctgtggcccaggaagtggtccgtgccgcggcgcgtggctgacaagcggcggcagcagttcgtgcactgcgtgtcggagctccgggaggcgggcatcaggtgccggcgccacaacacggaccgcttctgggacatcaagttcgacagggcgtgctccacatcccgcggat

SEQ ID NO: 373424 - DNA, 289 bp, Zea mays
ttatccggctctgcgctgttccaaggaactggtgatgattctgatgtgtagtgatctaccaaacccaattgtaagattctctatctggcaggcactctgaagccaagtttaagtgcagtggtggttgaccaacgaccgcatgtccatggaggaggtcctggccaccaacggagcattattcttgctgcccggctctgctgtactacacgtagaataagatgggtgccttgccgggacatgcccatcggacactgtccgccatgagcttggcagccttggctcgtcgagt

SEQ ID NO: 373425 - DNA, 396 bp, Zea mays
ttcttttgagtctgcagctaaattggcggctgtgagtgcataaattcaagaccttaaagctggaggtggctcacgcatggtgggaagtgaaatatattctgatcatgagaaacaagatgttgagatctccaaagggaagcacggccagatcatgaaggatattgagctggaccatatatccatttgtgcaccatatggggctcgagctgccctctattcgcttggaactggtgcaaatgcccaactcgatgacgatatgctttagctgtgggaggctgcacataggagctgcaagaaccaaacggccaagtgctcgacatctgagcacgacatacaagtctgtctggatctgaagagcgagcacccttcgtatgagctagcatggggaagagacct

SEQ ID NO: 373426 - DNA, 367 bp, Zea mays
cccacgcgtccgcccacgcgtccgctcccactcccggctgtcgggagagcgcagcccagctagccggctccgcctccgcttcttggaggtcgatggccgctaaggggttgagggaggtggggagggcgctgtctgcgtgtcgccgtcacacgttcgcgcgttcgcgccgcgcgtatggtactggtatcgccgcgtgctgatctggcgcatcgccttgcgtcctttgctcatggtcacacgtggccgagcacgctttccgtgtgctcctttgctcgcaatgcgcatgctggaacatcgcataccatctcacatggcttaggccggcaccatttgcgtgtttcttatcctggcaggttctaatggtaca

SEQ ID NO: 373427 - DNA, 475 bp, Zea mays
gtcgcaggagattgatgctgactgggtagaaatgctcattggttggaactggagtccattggatgctactgcagcactgaaactgtttgaggaagatcaaactgacaatcttggaacagataggggcaaagaatcggatccgacggataattggagtaacaaagacaaccctgacatgtcagaatcctctgcctcgccacacaacggggagtgtaatggctttggagtggtggtgagggaaggtgacggtacgtggccactatcagatgatgacgaaagggcaaaaattttagaaaggatccattcattgttcaaaattcttgtgaagaaccataatctttcagtgtgcaatctaaacagggtgattcgatttgctgtagaggaacttaagaggttgtcatttggttcactactgtttaacactcattggacaagtcgccgctttgcatttgcttctcggaggcattcgccctgt

SEQ ID NO: 373428 - DNA, 395 bp, Zea mays
tcgctcacgcgtccgcggacgcgtgggctgtgatatagttgattattacaactcagcgatctgagccaagctattcaggtgttttttaattttcataggccaaaatcatattggacgaattactcgctaatcgaccgggattcaaggtatcgtaattgttcacctatgggacctctatttttcgattgagcacttcaatttgttcatgtggactaggaatatgatctaagctttgtcctcacctatggtaatcgttgtgcgagaatatcttgtcgtctatttccgatctgaggactatgcataaaaagttatttaaggatatttttatttggatactgaagcataaatgttgggatcattcttggtgtattatatggactgcgacaagacttaaa

SEQ ID NO: 373429 - DNA, 387 bp, Zea mays
tcttttcctgtccttactcgagtccgatggctcgtccccgtcgcctcctctgacgacggatatgactgacccccggctcacccggagagtggttcctatatcatgtgagatatggcgaaaacctgaaaccactctagcctgatggggctgtagggatcaaaattacatgggcatttataactagtgaccgatctatttatctatggagacagtgatactagcactggattgcgcacgtgtgagtttgccatagacaggatacacacactatatgtcagttcagtgcacaggcgagcagtgaccgattgggagcctttgggctatctactgggatcaaatgatactggtgccaatctgcaaagtggtcaaatggatgaacaaaataca

SEQ ID NO: 373430 - DNA, 311 bp, Zea mays
tcgtcctctcctcactcgtgtccgatggctcgcccccgccgcctcctctgacgacggtctgactgacccccgcctccccggagagcggctccgctgtctcgccggatatggcgccgcctcgtccccattctaacctggtgggggagcaggggccgaaattactcgggcaggtatatattagcctcctatccgcgctacataaactcaaggtaatgatattggatgcgcacgtgtagagtaagctataaacacaactttgttctatatgggatccgattgctcaggacaccagtgactgagtggaagtcttt

SEQ ID NO: 373431 - DNA, 402 bp, Zea mays
attcacgcggtcgcttgtacgcgtgatggttgtggacgtgatctcatggtagcacattggtggtcgacagaatgagcggaaccaggagcagcatggtcgtgcacagggatctgattttattcatggtggccctgttgatgaccggataggaggtgaactaccagctgggggacccgaacttggtggacataggagcactctttacacacggtgagcatatttataacactgcaggaccaacctttgacgccgcttatgatggggcagcacaaagagtgttggttgccgtggttgaacatgtacttacaagtgggccagctggtgtgccattgtcaagcggtcgagggccaacaggtcttggtgtatgtgaaagtgacaaacatcgcatacgggatcgactgt

SEQ ID NO: 373432 - DNA, 338 bp, Zea mays
tcgttttatcggactagagtcttggtgagatcaagcggctgaagtatgttaacaagcatgatcctggtagacactgtgcacataatatatgcgtctgtcctgattgcgttctactatcgggagcattctgtgatagtttgtgaactcctgaaggcaaatctgtacgagtttcagacgattcatcaagagtaatacagaggggtagagaggtgtactattacatgaggcgacaactgctgaacaacagctattcagcgtgtgcaggcgctgcagatctgcaggtctggctatccatgtgaatgaagctgcaacattttgtaaagagctacagcagatgt

SEQ ID NO: 373433 - DNA, 388 bp, Zea mays
cgaccagagccttgattagaacaggggtatgaagtatgttaacaagcatgatcctggtgacaagtaccatctttggcggctgtacgattactcttacgatagagagcatttgatgaagccctgacatcttctcactggatgtctataaccacattgagaatgtggcatactgatcgggcgtgaggtttacgggcccacattttcattgcaaggctgacagagctaaagatgcgtggccgcgaacgccaaaccgagaaaataccgaggagaaccaccataatgatggaggaggagatgctccatggcttgcagaaggttgtctgaaagaaggaggacgtcaacttccattcgtgattcgtgccttactatgatcacaacaacatacacg

SEQ ID NO: 373434 - DNA, 500 bp, Zea mays
gttattgctagagtataattgcaaattagtttacaagttagaacggcatggctaaactttagctcctagctatgcagcaaggatattgatacatggatacagtattttaaaaaagaacctgatacgtggatacattttagtatttttaataaataaataataaagcatactaaaaatctaaaatcagtagcagataaggcttgcattcttgttgttttgctcctgttttctgtatttccatctagccaaagttccaacagccaagcttgccaagcatctccatccaatcctcaaaatccaattaggaatgcataggtatttagtgcagaagtggaactagtcaacttgagggaggattagattattcagttatatcacaatgttgcatataatattaagatctggagagaaattaaacaaaaaggggattagaggaaggggaaagggtataagttcactgaggtagcctaactgctgatcatggccagtaagcaacacac

SEQ ID NO: 373435 - DNA, 182 bp, Zea mays
gggggccactttatttggcccacaaaactttttatgaaccggccaattcccctgtttttttttacccaaagtttttaccaacttttgaatacaaaaaggcgaacccctttaaaagggaacccggggggaatggttcccgggggaaacccccggggttgtttcaaaacaggggctttcccaaa

SEQ ID NO: 373436 - DNA, 174 bp, Zea mays
aatactgatggacaaggaagatggagactcaatgctttgatggcattacagaatattacagcattgcatccatgatagcagccgatagatacccggtgtggactcaggtttgcatgtaagtcgaacaaactagggatgtagggacgatacagacgcaacacacaacagcatggc

SEQ ID NO: 373437 - DNA, 424 bp, Zea mays
gatatcaatatgcatttaattacaatcgcatgtatcagttgttcagtgaacaatatacatcagccagtgctttagcctttatgtaaactatgtagacctcccatggtaatgaaaagtacaaatgcatcttcagctcgtcaaatggtgttgctattctgcatcaacaaaaatctctatgtcgggcaaaggttcatagtacttcttttcctgcacggcgtacattgtaattccggaaatcttttgcactcctagctgggtggtcaccatgctagaacatcagttatgagtccagataacttcctcaccagatcaaatttgatagactcaaaagcctccaccaaaggtaaaatcaactttctgtggcccattaactagaacagctctgtcttcacccgacatgcttggagccagaaatacttcaaaa

SEQ ID NO: 373438 - DNA, 358 bp, Zea mays
tttattttttttttttattttttatttttttttttgtttttatcaatcaatcaaaacgaattcctttgcacaatgactacaatacaggtaggaaaaaatgagaaagaaaaattacgcttcgaattcctttgcacaaccactaggaaagcaaaggcattttccgatctgcagcacactgcagcagccacaggtctttctggctactctactctgaactcagctcacacggatcatacatgacctagggttgctgctgcgtttccttcccaggtcgtcgacgtctgcagagagagcagcacgtacaactcaacaggcaaacaatccccattcacctgcctgctttccttagccccttcct

SEQ ID NO: 373439 - DNA, 187 bp, Zea mays
ggagcgatatcatgaagagaaagcttatattatgaaaggggtgataaaaaggcgagcgaaaaccacgcgcacacatatataggcacaccacatatatactatttcagtagcgagagaaaaaacgcccagtaggaaaatgtccatgcagtgacacacacaccacacatcgatcaccaaacacgcgtac

SEQ ID NO: 373440 - DNA, 471 bp, Zea mays
acatgtttgactacgttggccgtgactgcagagggtgtggtcttggctgtaattgccagtattggaggttgtagtgctggtctcgccccatgaaaattatggattatcggttaaaagtggttttggggatgaaagactctaggagatgaactggagatgtgttagaaaataggttgttggaaggcatgcgagtgatgggtgatgaaatttgctacccagccaaagactacttgagcatccataaattgttttcaacacgtgctgatctgcaccgcacagtctacacccatgcgaaagtaaaggctgttgaactcatgcttgtcgatgcactcattgaggctaatgactacttggggatatcattgcatgcacacgacccagaagatttttggaagttggatgacacaatcatcaaaaccattgagactgcttccaacaatgaactgaaaaaagcaaaagaaatcattcaac

SEQ ID NO: 373441 - DNA, 430 bp, Zea mays
cccacgcgtccgcccacgcgtccgcgggctcaggtactctggatggtttgtgtaccgatacctgctttttcaggtaacaatctgaaaagttaaaaccatgtaggttggctgtgagacttctttctactattcaacacgagtttctcaagttcaagttgtccctttgctttgcacacctaaaaggctgttggtagaaccgtggaagatgcacaacttgatattaatagcttgcacagatcaagttgtcctttgtccatgcctgacatgcctaccagatactcaaacagctgactagtgtgctttgtcaaagttagaagcaatggtccttgcattttgtttaatctgaagaaaattcacatagcttttaaaatgcaaataatttatgtcgaatatgccctggcgtgatgatctgtaaaagcagaataatact

SEQ ID NO: 373442 - DNA, 453 bp, Zea mays
tcgtttataagcgccgtcctttttccgcccgccggctggctttcaattccccaccgcgctcccgtgcctactttcgttttccctttctttttttcttctcgcttttccccttctcctacgcctctgcaaattgccgtatgcatagtctgatttcttctttttctttactatgatagacttgctcaatgtttcttctccttctgaattctaatggcttgctcaatgttttctttaacttcttctaaattctagtttgtttttttcctacatacatatgcaggagtaaggaagccgacaccacttggagttgctgccaactaccgggctcggctgtcaaattctctatctggcagccagcccgtgtccaattccaactccaccggtggtaaaccatctacagcaggagcagggagggcaggctgcacaagaaaagagcatcattcctgctgatcg

SEQ ID NO: 373443 - DNA, 178 bp, Zea mays
gtttctctctcgacagtggccagcaaagcgagggggagggcacacaggacactgaggccagtggttccagccctagcgcatcattcgcggattggtgcgaggaggcggaggccttgctgcagcgccccatggccgcggacatggtcgtctacgcgctgctctgctcggcgcctatctt

SEQ ID NO: 373444 - DNA, 348 bp, Zea mays
attccctgctcgacccacccatccgtttttttgtgggcggacgcttcttctcacccggggggggtactctaaatgggtggcgtggtacatactctgctatatgcgagcagtaagacccctcaattccgtccatgggtctagatagtgctttctctaactaatatcactaaatgactgagcttcgataagtttacaaaatacgagttcctaatctcaccgttaagatggctgttcaggacatgcaatgcctcacttcacagaatagcttaattcgacaccctgcatctttaattttcgctactattccccccaaaacctttactactgctcttttttgacatgcttcca

SEQ ID NO: 373445 - DNA, 108 bp, Zea mays
tttacttgtgggcggactccttttccaatgtgaggggaggaatatcatattcggggggcctcttccaaacccgcattgtgaacaaggaccacatcaagatccatgctt

SEQ ID NO: 373446 - DNA, 484 bp, Zea mays
tcgctttctccgaacccggggggcaaactagaaaataaaaactagaaacgaagtgtagcgccgctcgccttgccggcggagggaagacggaagacgagaggtatggcgggtgccggtgcgatgggcttcccacgggagctgatggttcagcgtatacagagcttagtggaggaggggttctgggacgcgctccgccgccacaagctcgacgttctcggcaccgacgactcccccatcccaatcaccggttattatactccgcgccagcgtctcccgatggcaagcttcttcaacctacggtccggatcattggtgcccccatttcacagttttgttggcgacaggaacaattgcccagttccagggaccctcattacactaataacattgaggggttttgaaaacccttatagagtacacctttttaagcagaaacaagtaaaatttgtagacatttgttggctaagtaaaaagatcctttgtc

SEQ ID NO: 373447 - DNA, 183 bp, Zea mays
tcgggtattaattgagtacctccaggtctgggattgggttgaggaggtcgttctgcaggctaatgttcctgatcatttcagatggaagttgactcatgatggctgttatagcagcaagtctgcgtatgatgccttcttcgtgggctctaccaagcttggcccttggaagagaattttgaaaac

SEQ ID NO: 373448 - DNA, 367 bp, Zea mays
acccacgcggtcgtttacgcgtccgccccacctgcaccaggggggggccacacctcacgtcgcagtcggccgccacctccaacacatcgcaccaagccccagcgcattaactgatccccccgctttaactgatccccgtagcgccccaaccgcaaccggcaaccgccccttgccgactgcacggacggggaagcctcctggagagtggactccctttccttctataaatccggctcctcccaatccaggatcttcccagcctcgccgccccaccaccccagcattgccttaccttgccttggctttcccttcattccaccttcacctcgccgttcgaatcccccccaacccaacaatcccccatggg

SEQ ID NO: 373449 - DNA, 388 bp, Zea mays
cctacgcttccgcccacgcgtccgcggacgcgtgggcagctctgttccctcagagcaagaaaatccaactggacctacaattgagagaattggttatagacaagaaaccctacgtgtgatggatgctaaaggcgctgaaacattgcaaattctcagaaggtatttcgcgtgcattccagactatctacactcatctggtttcaagatacagatacagtgcacttttagattcgacacagagccatttaacaatgcgtgggggttagatttgccacgttcagattctgatggggctgatgagttgcctgccctttatgcagtcgacactcacattttcatcaagtgcacagcttggggaaaattccatcattgtcatcctcctttcatt

SEQ ID NO: 373450 - DNA, 179 bp, Zea mays
ctctcgctttcgcgctcgagacgagagccagctgtcccgtcacacttgcacatggcgggcaccaccctcctcgctgtcttgctgctcgtggctgcgtccgcagcgccggcgcggtcttgctcacctcacgacctgcaggcgctgtggtgcgtcaaggtggcgctccacacccccccaac

SEQ ID NO: 373451 - DNA, 262 bp, Zea mays
cttacgttaccggcttgcgttgacctctccgcggccgggccctgttatacgttcccccgggttatacctctgttatcgtctcctctgacccaaattgacccaagcgaagccgtggccgagatccggtccatgcgcggagcgtggcagccggattctatcgccgtcgccaccccttcgccgctatttaccagacgccgggatcagccgagttggatctcgaggcataaagcgttgcgggcgcccggcgaggataccatgcctg

SEQ ID NO: 373452 - DNA, 460 bp, Zea mays
tttaaattctaaaactatttttattaaattttagggaagattagaaacctagcggagttggtttggtatttttatcatttttctacaattttctagaattgttttagctctggtagaaaaggaaaaagaaaattgtgaatagtattggatcgaatctggcccaggtcggcccaactacgggcgggaacgcgcgcgcccgcgccctcatatagtttttgaaagaaagtccctgttttctggcataacccgaaagtatccaagacactattttaggcagtcactgacattttcataatagcctctgtacttctaattctttacaatccgaagacctcgaaggtggacggcgacgcgcatagctccgacgagctcgtgtaccggccaaatcgctcaaagactggcatccttctttggacgaggccaaattcaagacctaaggaccatttcccctaaatcaatt

SEQ ID NO: 373453 - DNA, 298 bp, Zea mays
tcggttttagtcttttgcttcacttctattgtttcgggcctacctgcacatggctggggagcatgccttattgtccttcgtggttttggggttcgttgcatgggcctgcggggggctcgataaccatggagcacggcgaggattgctgcgtcaaggtggcggtccacgcgcgccccctcatcggcgacgagaagctgcagggctgtaaggactgcgtcgccgtcgtgccgggcaagccgcaggttcagaacggcagccactccttcacctttgaccatgtctacggcagcacaggcac

SEQ ID NO: 373454 - DNA, 491 bp, Zea mays
tcgccttgactccgacgtgcgcctcgtcgtgcccttgggcgagcagggttcaattctaggcgctgaggttactgttggaagaagatcatataatacccaagtaatcgaagtagaagaccacactttggagaaacatgcaaaaattgagagtggtggccttttgcagccacatctgtttttcttgacaatacctcaggttgagggaggagcagatatttgtgctacatttcaatggtctcagaagttactttatgatagcgggcgtttctctgttgacatacctttccgttttccatactttgtgaatccattaccaaaagtgttcatgaagaagaaaaaaattcagttgactgtgcacagtggttttaggaaagagattttgctgcaaggaacaagccaccccgttgaggaaaagagtaggcaaggagataaattggttttccattatgaagccattgttgagaattggtcgatcaaagattcaatttttc

SEQ ID NO: 373455 - DNA, 497 bp, Zea mays
ccctctcgttcgcccacgcgtccgcggacgcgtgggaaaaaataaaaaaaaaaaaaaaaaaataaaaaaaaaaataaaaaaaaaaatatatgtataatattataaaaatattcaatatattattatattaaataaaaggggcggccttttttgaggttccaagttttctaacctttctttccgacgttttaagattttttatattgtctcctgatttcatttacttggctttttttgtccatctttttgactgggaaaccctggtgtgtccccaatttaatcgtttttgtgccttttccctttttccccatttggcattttgaataaatggccgaacggtccgccttttcccaccttttcccccacttgatttgtttattggccccccccttgaccccttctattaacccccaggtgggggtgtttttttcattttcccctttttttttgttaatttttgaggcccttcctttagttttttacttttttttccccct

SEQ ID NO: 373456 - DNA, 262 bp, Zea mays
acaaaagctggaacagatgatcataaaaccccgggattcccctactggctttttttgacggggcgggccgggagaaaaaacaaccgggggtttaaccaggagattagcccgcatggacttaactttggttaaaaacactgggcgacgacgatgtactagctggctaggtactcacttggtacttgcagcccccatgggcgacgtttaaaaagccatggggccaacgcagccggaaaaaccaaacaggggaaaattccccggg

SEQ ID NO: 373457 - DNA, 148 bp, Zea mays
agctcccacttaaactttcatttccggggcaacatctgaaaccaaaagatgtgccatgccaaaccagaccacaaaattcatcactaaccatcaactttccacgctttttatacaatagggggggggatactctttagacagttagatt

SEQ ID NO: 373458 - DNA, 495 bp, Zea mays
gcttcgtctcctatcaaatgaagatgatataacattgtttattgtctaaagcaatcttttttctaatgagttttaattcctcagtggttcttgttgttttggagctctgcaaatataggaatgccagtgtttttcatgttataagatatgttgttcaaattgttgtgctatctgttttggtttaagatcgaatttagtgtctaattgaggctgctgcccttcagtttttagtttttaagattgaacctaatatggtggtgaatggagctagaattgtgtaagtgtgagttgtaatccacaacccttttctcggagtgtataatatttttgggaggacttttttctgcttaatgaaatgacacgcagctctcatgcgttgttaaaaaaatatcatataattttgctgtagattgagtcaagatatgagtgataacttttgaatgttgtctagttattttggattaacaataagtttgtccattgcacaaagtatgc

SEQ ID NO: 373459 - DNA, 270 bp, Zea mays
gttagtttatgagtacttacccaacaaaagcttggattacttcctctttggtattttgaaattccagtttttgatactgttaatgatgtccaacaaataaatgtcctgtgtgcctgctgatatgccctggtttatattattcttattaggttctgcaagaaaatcaatgcttcaatggcccacaagggtcaagattattcaaggggttgcttgaagaattatttattttcatcatgacttaagaattactgtgattcattgagatctaaa

SEQ ID NO: 373460 - DNA, 203 bp, Zea mays
aaaccggaacagaggaaagtaactatttccagcctggaatttcaaccaagaaactttttttaaggttatgaggacatgaatttgggggggcattgagttaatcgtttactacacgcaggggattttttatacgacggacatacgggggaggggtttgccctgaacacaatttaacagggaagaaccatcctttttttatacgg

SEQ ID NO: 373461 - DNA, 519 bp, Zea mays
gggtgaggtattgttgtttcaatgaattcaggtactcaggttagtgatagtttcagaatattgtagttacattgtggcggtgagtaagctcttaagtcttaactcatgatgagaaccttaattcattgggtactacatttactccttttttagaaaaaatatacatttatgtttttctttcttcccttagagtccatagcctgatatgcgtatttccttctctgtagctcttccattgtccaactgaactttggaagttcttctagagaattatctagctctcagtttttttcagatatttgcatttattacttcaaaaatttgaattgttctattaatgacattgcaggtactatttgaacactgaactaaaaattggagtttcttttcttatttgacatcttgatgtgccaaaatcaagctctcgttaaggtcaacaaatggacaaaattgggctctttgatagtttttcagtgttaagggtgatctactgtgtaaagggagagctgatccgtgatc

SEQ ID NO: 373462 - DNA, 488 bp, Zea mays
gcgcccacgcgtgcgcccacgcgtgcgcccacgcgtgcgcaacacctgttaacctcgcacaacaacgcttggacgcgccggcgccggtgaggtggacgagaggcggagtcggcggcggcggcggcggcgatggcgggcggcggcggggagcgagacgcggacgaggagacgcggaaccagatgatgcagaacctattcggagaccagtcggaggacgaggacgatgcggacgacgacgacggccagcagcaacagctgcagtcacccccgcaccaccaccacgagatagaggacgacgccgatgaagacggcgacgacgcccgcagcgacgcgcctgcccgccacggcggataccactcggaagaagtggatggagaggcagagaatggaggagaaggtgaaggcgaaagtgaggggcaggtgaaatggaagaggaaagtgaaggcgaagctcatcgtgctgaccttgatcaagggagaagtgatggg

SEQ ID NO: 373463 - DNA, 280 bp, Zea mays
atccaggcaaattaatacatagctggaaagatgaacacaaagcccatatttttatattaattacacacatatttggataggttccccctttatcggtctggcctttgcctccatccattagctagcttccatgcatgggaggtaattacttatatatatactacttaatcattttctccatcatatatatatgctcacgaccaggagcaagtcctttgaatttataaaagctagcgtacggggggggggcgcatgcatgggccatgcacgcgatcgatcg

SEQ ID NO: 373464 - DNA, 451 bp, Zea mays
tgattccaaatgtagtcattggctaagccaaaatttgaatttcataaagtaactaagatcagtgtttgtccggattgtgacaaggctgtagcttttcccttaatcgatcagaccatatcctaggattaaggatgtgcaacagaacccttttgttgtcgacgatatcaatgagcttcggttttttttcacatccataactatataccaagcctttttgccacatttgcaagccacaccatcgctttgaacagaaaaactattatgctagatccatcttctatccgcatatcttaaccataacgggtccttcaaaatttatatgtgaccttaatgctttgatatttgattggtaagggtctacaggatcttatgaccttatttaccatcgctctgagtttgcaaggcataaatattatggttcttgcgaactcatcctcttacatgtaacatg

SEQ ID NO: 373465 - DNA, 146 bp, Zea mays
agcggagtcgagaggactttaattaacccatcgccccatcggcacggtacatacagcaggagtagtactagtacaagaattagccacgcacggtagcccccacgcgtccgcccacgcgtccgcccacgcgtccgcccacgcgttcg

SEQ ID NO: 373466 - DNA, 311 bp, Zea mays
  unsure (1)..(311): unsure at all n locations
agaaatacgcacacagatcacataaaaccagcaaaaagaattctccccggcctatgctacgtacactttccgctcctccagctacacggtcacaggctcacagcccacttcttgtcggcgaattaacggcgatcgtcagtcagtcgcgctccgatatctcggtgaaggtgatggnaggtgtcgcgtcgtctcctcagacgacagcggggacgaccgcgccatgatcgaggtcagcagcgtggacgacgtggccctgctccgcagcttcaggtctccgaaatccctgatcacgtcgggcttgctgatcgtct

SEQ ID NO: 373467 - DNA, 227 bp, Zea mays
ggggggggggggcccaccaattaattcaaccattaaacccaaaaaaaaatgggcccttttaacgggcactggggaaaaaaaacaaaaaaaccccccccccccggggggaaaaggggaccaaaacccaaaggggaaacaaaaaaatcccccccaaaaaaaaaaaacggggaaaacccccttttttttaaaccccggccctttttttttttccctttgggccccaaaaa

SEQ ID NO: 373468 - DNA, 259 bp, Zea mays
ggcaagcgaaacgatggggtgttatgttatcatggctaaaaaatacatgactgggcctccacacatataactggttttcgaaaaaccacaaggcatgggtttggaaacacacacacgcacgcacgcagaatgttaaaacgctttgactggtgtatgcctgggacccttttcagggctgaagggccaagcttagttaaaatccgggcagtttactttgcattggggaagggcacaagcacccgaaacttggtttgggacg

SEQ ID NO: 373469 - DNA, 474 bp, Zea mays
  unsure (1)..(474): unsure at all n locations
catgttctaaattatttcactagctgatacattgcatttgaatatagggatttgacagctataaatgcgtcttcagaagaagtctcatcttggatagagagcataaataacgagcatgctcaaaataatgccagtggagaggctcgttttgtggaatcacaggaagccccaagctctggcaaaaatagtgcatcttcacaacttcggtgctcaaagaagaacttctcatttatttgcgaatgtttcttcatgacctcaagggtacttaatcttggtttgatgaaagctatatcagacttcaaacatatttctcagcaacttgcaaggtttgaagatgatttggagtcaaacagagcagtcagagatcagggagggggttcaccgcagcttgaacaagatataactcgtttggagaagattgtcgagattttatcacaggacanattatgttatgaagctcagatactaccagat

SEQ ID NO: 373470 - DNA, 144 bp, Zea mays
agtaccaaaacgggtgaaatgaccacaggcaccctgtgttactttgccacatcgacaagctcacggaggacgcagcaggtgacagaacttctgaagcaacccagagctgacagtggacgcaacgagttgcttaaatgtttagta

SEQ ID NO: 373471 - DNA, 349 bp, Zea mays
ggcaaattctaccccgatctacaacaatcactgctcttcagcgatagaagaacggctcggggtgacaatcaccatcatcctacaacttgtctttctcaagtttgactgcaagatgttgcttctaattgattctccatctaggatctaggacatcaacactattagctaccttgtctcgattatatgtttcttgtcacgagcaattgcgagaggtaaagatacttacagcaagagaaatgagtgcttctcaaatgtaacatacaaagaatattgtgtacaaagaagttcacttcttagtctttgtatttgtgatatacacattgtagtataatttgatttgttccaattt

SEQ ID NO: 373472 - DNA, 251 bp, Zea mays
gcggcgttctgtctacgagttgtggcacagcaggcccgggcgcgatgtggagcacggcatgttttcctttgcgcactctccaccactcgcgccgttggcgggggcctcacggctgctgctggacgtggagctggcgacgggcggcggcgtcgcctcggcctcctccgtccagggcacgacctggatctcccccttcccttcttcctcatcgtcgtcatcctcgaccacaacatcgtcgtcatcctcgtaaa

SEQ ID NO: 373473 - DNA, 333 bp, Zea mays
gaagacgaagtatattagtcaggaagacaatcgtttgttcatgttttggatgcctttcccctcggacacgacacaatattaatacccttacagacgcggcccacgttacttggcccactccggcccatggacgcgtacattggcacgccttgcgcgctggctgcggtcgcctggaagctacacgttctgttcatcgccctgcattccagtggtagtgacactcccgatcccttgaaaatctgcttgaccccaagcaggagcacgggggaagcattggcggagcgcctctttgtcctcccaagtagccagatcatgtggaagaccagaccaggc

SEQ ID NO: 373474 - DNA, 540 bp, Zea mays
ctcttctacagctctactctcccctcccgcggaggcgtggacggcatggagttgggggagcccggggcccgtggatgccgtggtcccgtgcgattactgtgcgtggctggctgttcgctctcctccctccccgcgtgttttcaggggcggccttgctcagttcaatgatgggaacagagtgcatcatggccacactcggcggggatcctgaaccctcaattccacctggattcggaccttttgttgccctcgcgctacagggcatccaaaacaatgccaaatcagctgatgctcattctagttctgctcaagcagcacactgcatggagaaagatgttgaagttctggaacacggtttcgcgcatggttggagtgacactcctgctagtacttcagggacccatagttgcaggaggtcacttcgtacaggcctccatagactatagccagttcgacctatctcgaccaagatctgatgttgatcagcagaaaaggaggggatagtgagaccatacaacattaccgaaggagtctttggga

SEQ ID NO: 373475 - DNA, 344 bp, Zea mays
gggagataacttgtttgctgccctttattcctgtctccttgggccgcatatatagccatcggcctgctgtcctggagcctttattttaggcaagcctaaacatggtaacactaatcaatcacttaatcaatctctcctttccttccctcaactttccattcttctaatttccttcctggccactgctttccataggttcctgctgatctcccagatctgcgcgccccccagatcgcgctcctgtgcgcggcgcctgtcacgggcgcgacgctgcctggcgtacgagcgcccgtacatgacaggtagtgcaggtaatcgcaatcgatctcctccattgaaacaaa

SEQ ID NO: 373476 - DNA, 289 bp, Zea mays
cgcatcctctccgcgcgcgcccgctcgctcacaacctcgccggcgccgggcgcgcccttcctgcaccccgcgcggcgccggcaaatttctagggttcgcgtgcaaacagccagtacacccgttccttatcttccgacgttcagctggcgtcctctctctctcttgtggctacaactgggtgacctcccctgcctcgccgctctacgccaggtgcccatgtcttcctggggcctttcgccgtagatgcatgcaacaggcatgcgcacccttctgttcccttcctgctgtg

SEQ ID NO: 373477 - DNA, 210 bp, Zea mays
tttttatattttttttttcaagttctggtaggggggatcaccctttgcttggactagtcaatcaagatttatcccctggttacatggccctctgtcactctcaagcaccgcctaccttttactgccgccaaaagcatctcagggaaaaaaaaaagatcgactgtttatcaaaaataggctgacgagatcctgattgcagaaattcaagag

SEQ ID NO: 373478 - DNA, 476 bp, Zea mays
cgaacgaaggcgacggataggttgcaggtgactccgatgccgcaaagcacgcgacttggacatcctcctcatctatcctgctaccaaaaattgccaacgcttccttccagtccttcacgacatcaatctagccatctggctctgccgaatccgagcgcagacgcaacaacaacatctcctaatctcctatctcttcctccccacatcaacggctccaccccggccggttttttttctttatttgtcccacaacagaagccacgaaaggaaggccagacagacgcagaagcagcatccactctcgttggctttctctgtatgtatcctattgtcccccttattgctgcatcctaatagatccgtacaatcttaagtattatgattccaatcaccaaatattgcgctgatttcgtatagacactgtgtgtgtttatgaacatatatatatatatatatatatatatatatatatatat

SEQ ID NO: 373479 - DNA, 431 bp, Zea mays
gttctgccggtcgtatccgccatctacgcgcggtcgccccgctcaccttccatcgacggggccgccccacccaccgccatccctgctccccgccatcaacgctcgcccggatgttgctcgcctgtatggtgtggcacgcccctacaccatgcccccgccccatctgtcccacgcatgcccgcgcccgcgaatctcgctcgtgcccccctcgcacccagtcctgcgagatcctctctggtgccccgaccgctccgtcctcgccaaggtcgtcacctaccaggtccgcaagatctcctcaggcatgccacagggagtcctcaacctgtcgtacaagctcagcgaggtcacccagacggcgggcgccaacggctacacccccacccagatcgccgtgtacccaccgtcctccgcgccaggctaccaatgatgct

SEQ ID NO: 373480 - DNA, 292 bp, Zea mays
ctcacgtgtccgcccacgtgtctgtggacgcgaggactggcactcaccgcataaacaaggacaaacacgcatgatccgatctgggccgggcaagcagccacccattcatggggactagggttgggctgaccgccctactggtgggacgagttgtcggcgcctcccactggaggggcggagtcgctagagctgaatacgaggaagatgctggtgcagatgacgatgttgaaggggctgaggtaggaattgtgggtgatgatacaggaggaacgcagtgatggacctttaaggg

SEQ ID NO: 373481 - DNA, 343 bp, Zea mays
gcaacaggatttggtgcatcactgtattttctggcaaagaaaaatatgaacttaggtaaggcggcattggtcactgtcgggggacttgcagctggtgcgactgtcggatctgcactggagaatttcctgcaggtaggatctgaaaccaagctgtcatcctggcatgtaattaactgaaacggatcgtgttcgatcttcaaagggtcagggaaatgcttgttttccgcacaaggtggaagcagcagctgtgtatagcaaaacaatacgtgggcatctctgtcccttataaagaccacctgtatctagtctagttctctcaagctcaatctcaagtctttcagat

SEQ ID NO: 373482 - DNA, 445 bp, Zea mays
cccacgcgttcgcccacgcgtccgcccacgcgtccggcaacatcctgacggttttacagggaaggaccaaatgctaactgaatctcaatgtagttcacatatggtctcagttcttaccgaacaacaatttgagagagaccctgcctcttctcttagtactacaagtgacgcggagtgcaaaaccatgtgccggctggaaggttcttcatggagttcagctacatatgctggagttcatgaccttcagttaactattgctttaacagagccagagacatgttctccaacaaatcctgttgaagacagatattcgagttctgcttctgcggtgtcttgtcagacaggggctcctgcctgcattccccaacccgatccaacatttacatgtaattcaagtaagattgaggcaaccatggatcagcataaaacatgccagcctgacaca

SEQ ID NO: 373483 - DNA, 193 bp, Zea mays
ggggaaaacagggggcccagtatataatttcccggggaaaaaaggcctcattccggggaaaattttttttacaggaggggcctaaaaaacccggataaagggattccatttttaagggatttttttaccggtttcccccccactaaattaaacagaaatttcccctattacccccctggacgggccccccaaa

SEQ ID NO: 373484 - DNA, 430 bp, Zea mays
tcgcctacgcgtccgcgagcccgaggtgatcaacgtgtgggagctcatggacggcctcgacgacagggacgaggaaggcgacgacgccaacgccggcggagaggagcggcgggagaagccggccccagggtcgcccgcgttcgatccggacgtcgtcgtcgccgcgttccggaaggcgttggacgagaagcctgacggcccgggcgcggggggcggcggcgacgaggtgggcgttaggaagcgcgagatacagaggttcccgggcatcgtgcgcgcgcgggtcagcgcgttccagcagaggatcgacgcgaagctcgccaagctggcgccgccgccgccggccgtgccgtccccgccggacagcgcccggaaggtggcggtgtacctgaccagcctccgcggcgttcgcaagacgtacgaggactgctgg

SEQ ID NO: 373485 - DNA, 427 bp, Zea mays
ttcaaacatccccttaaccttttgccatcaaacttttgaagttctgaccactattatacataaaacacatgtgaaatggtaaaaatgatgttaagagttgccacaaacaatactggatgtagttagaaaaaaaagaattctgtagtggtccatttggcacaagatgaacaccttaatgagagcaagtcagaccaggtgggatattgttggaaggtcagctatgaacttcgatggttaggcctcagtatcactcgcatcgatgaatgcagtgtgcctacctagttatggactgatctcttcagaatgctggacttattgataatgatgacattgacgtgactgcactttgagaatagtaaggagagactgtaagcaaatagggtgtgtgattgaagctacttttttggttatttctgtttggatagtt

SEQ ID NO: 373486 - DNA, 506 bp, Zea mays
  unsure (1)..(506): unsure at all n locations
cccacgcgtccggtttggctctgttttctctcaccgcctgttctcccccgcgcgcgatggcggcggctccggcgagcgtcggctgcggcggcgcgtactcttgcgagacggcggagcgtacccgcgagtggatgcaggccctggccactttcctcggccgccaccgtccgctcctcgaggcccacgtcgtcaactttttcaaggacaggctgtgggagctagtggacgccgagtggatggagtgcctccggcgggagcccgtcgagagcttgctcaagctgccatctggatgcgtccaggagcactggcctgctacactgcgagagtttgtgcttactgctaggtcgcttgtgattccacgggagcagaaggctccgcaatcgcttgtatctgacattcatgtagccccagttggcactgttctcgctcagggcatgaactcacagaagaagcacgaagtagattggaaatctagctgctgtggttcatgcaatngcaaagaggtg

SEQ ID NO: 373487 - DNA, 384 bp, Zea mays
aaccttgctctaacttaacggattcaattcttcaaggacaaattactagcctatatatacataagactaaatccacctccgtcccatttggtatgaattttacaaaggaatacaaaatgcattctcatggaccatcctctgtaacacccaatctctcacaaaaggaaatcaaccgatcagggacgtactgactcagacagcgttacatattcaaccgtttggatcgggcgggctggttgctgctgcattactgacgctagtacgatgctggaccagcgaggtggggcagggcagcaagccaggccgacgtgggcacccgccgctggccgaggccggggctagctctcgatgaagccggtcatccgcaggacggagtcgcgcacg

SEQ ID NO: 373488 - DNA, 464 bp, Zea mays
cccacgcgtccggggcgtcgtcactctatcatatcatcagtgtggttcagtccgtgactcgcgctgcacaccacggccggccagcccgccaccgccggaggcaggtaggctttccgtgccccgttgatttcccctctccattgcggccagccgtctccccctacctcccactgcgtcgacccgctccgctccgctcccgcttttcaatcgaatccgatacgcgccccccttccatcccgttcctatccccccgaccccggtccaccaatcctcaggccactcgcgccgcatcgccaccccattcctcctcacatcacatcgatggaggccaaaaccttaacccctgaggcggacgcggacccggacgccgccgccgtcgcgccccaaaccctagccgccggggagctcgtctgggccaagccctccatgccccgccggcactgctggtggcccgcgcgcatgct

SEQ ID NO: 373489 - DNA, 159 bp, Zea mays
ggcaacgggctatggcattcttttgaacagaattctttagcattttcacgcactgaagcgcttatgtcctcatctggtaccacaacaggctaccgttgtgtcctgaagcaagatattcctagctattattggcatttcacggttaggaacagaaaaccc

SEQ ID NO: 373490 - DNA, 353 bp, Zea mays
aacaaggcaaaaatgaccataagatcacgccggctaagcataaattgcaggcgtcagcttacaccaaacgcacgagcacacgggactacaaaataaaacaaaaggtgctacagctaacactggtccactactactgcacaacaggcttaactctactcactccagtggcaaaaggaggctctcacacgatgtcaacacctagctaggccctagaacaaacacaaccgcgaatatgaaatgagcatggcgaggcccccggcctcgggcaggcataatggcagcaggtggctgctgtcgtgccggcgggtagacaaaaagcacgtatcgagtactgcctgcaagcaaaggggaaa

SEQ ID NO: 373491 - DNA, 417 bp, Zea mays
tcgggtggcggaggacgccgagcagctcggaaaatgtgatctttacctggaggacagaccgcctcgaggagggttcagagagaaggtggtggagaaggaagagttcctcatgctgcgcgcgcacgccgtgttccgggtctgcaagtccgccatggtggattcctcgaagaacccagggagctacatagttggcatacttaaaaacctcaaggagaaggagatggggtacatgtggacgctggtggagatggagctgtccctgatgtacgacatcctgtacaccaaggcgcccgtgatccacactctgcgtggctactgcatccgcgtcgtctcgccgctcgccgtggctgcttccctcctgctgttccagttctacggcagggagggcgccaggaccgcggacgtcgacgttaccta

SEQ ID NO: 373492 - DNA, 455 bp, Zea mays
cagcattctcataaaaaatgtggtgttaggccattctcagtggtagttttataggagtttcattctcattaaatgatgtgtcatgtcaccaatttggatggtgtggcaagcaattaataaagaaagagatgaaatgagtttcatggggatgaaactatgtctacgccgttacctagacatattgtgtattgcatgtcatctacaatactgcatcaaatgaaactttccgctgtgagagactgttttaaccaagatttcatttctttcatgtttacgtggcatcttggaaacacaaatatgaaacctaccactgtgaatgaccttatgacatgaaggtaccagttatcacctgtgaactggtagcacatatcaagagtctctgactgagaattgtattgttacgcacgaagctctttaaaggcaccatacttgttttctaatggttctatttgagt

SEQ ID NO: 373493 - DNA, 216 bp, Zea mays
cttgggggaaacaaagtcaaaagatgcatccgtcttatatccgcattactgaaccgtcggggccatcaacaagaccccccaaaaaaaaacctactactattactactactctaatccagcaatcctatcctatcggtttgacaaccaaccagccatcacgaaaagttgacccaaaccctgccgtttttggcgcacccccacgcggggcacgccctg

SEQ ID NO: 373494 - DNA, 407 bp, Zea mays
acattgcaacgctaatttagggggagatcgatagataggacagtagtaacatatttctatctccaattactactttgctcatttggccttcaattgaaaaattacagaaaccagatgagcagtgaaaccactaagaaaagaatgactagaatgtggcaacgagctttctccaacaaataattgccatctcttgacaaatcaaagccccaacatatatgtggtgatgcttccggcaaatatatcatacatcgcaagaacaaatgcatcataaaatgcctttggatgttcttgaagggggcctgttaatctctgacagcgaagaggaatgcgcttcttcgtatctttgtatctcctgagataatgttaaagtcgaagcagatttacgggattgcagttgatccttcaaa

SEQ ID NO: 373495 - DNA, 214 bp, Zea mays
ttccttttttttttttttttttttttttttttttttttggggttttttaaatttttttggggtttggcaaggcaaaattctttcctcttaaatttccttttggacacacaaggaaaggtttgcttttcatcacacacaacacatgggcgacagaagctgcattggcccctccctcgggtgatttatatcttaatttgcaaagaaaaaacccccc

SEQ ID NO: 373496 - DNA, 173 bp, Zea mays
tctttttttttttttttttttttgttctttggaaaaagggtgtttcatttttcattgggcatgccaagccaggcagaattgcaacactagtgctagctgaaacaaaaacatgagtattcgcactatggatcgattagccaaacaataaattaagagggcctttacattcattt

SEQ ID NO: 373497 - DNA, 368 bp, Zea mays
aaaatgatgggggttttcaaagcatcagcggggccagctaccgcattgtataataacccaaagaggaaattcccctgccatccctgcaggcggcgacagtcatcgacgatacatcgctttcccacacgtttattgccatagtacgcgaaccaccttggatcacttcacatcatatacatacatacatgggcgagcgtcccagagacctttttttttttatgtctacgctgacagacgacaggtgtgcctacccaacaccagaaaaaactcaaaccggagaagaagagaccatccatccatccatggcgctatggatccatactgggtgttaaaacctaagagaaatgccagcacaagggcggtgctgc

SEQ ID NO: 373498 - DNA, 282 bp, Zea mays
  unsure (1)..(282): unsure at all n locations
tttttnttttttttttttttttttttttttttttttgggggcttttattgactggtcggcatcgccatccgacccaaaatggttccaagcaccagttttttttgacactgagaattacagcttccaagtgacacaatacagcagctttctgcattcagcaccacacgcggcactgtactgaaaacccaattcggttcattattatacaggaaggatagaacgaatacatggaggctcttccaggtcccggaagtagcgaccccaaaggccacgaagagaaaa

SEQ ID NO: 373499 - DNA, 491 bp, Zea mays
gggagatatttgcaagcctggcaccaccaatctgcaaacgattgctcctgggaccccaacacatggtcaataaatataccctagccgggagaaaactctaaaccagaaccctcgagaaaacacaggaaaacaaaatgtgattaatattctcctcttccaggtcgcaaagaacgtaatgaactaggtgtgccagtcctctccaaggcaatcggtctgcagtccaacagcgatttcggacagctagccaaatgaaaatcttgcacttaggtggagcccaagtttttgaaatacgcttccaaggatcaaaggagaccaaaccatggaagaaactctataggtcgatatcgccgagaattcaaccgaaccagagaatctccagatatggcgaccatcatcaatggttaaagaaacttcatgtgtggcatcccatagctgaaaaaattgaacagaccaatcatggacagtcctccattaatatctgatacctaact

SEQ ID NO: 373500 - DNA, 157 bp, Zea mays
ggaaacaaatttgccctcagagagtaccacacctccccaggttttggtgggtattacacggaaaaccaaaattggttattaaaagagtaaaacctccccaaatccccgaaagatgggaaatgggttaaaaacattgcactagctaataagttttaaa

SEQ ID NO: 373501 - DNA, 241 bp, Zea mays
ggggcggcccatggttttgggggccaaattacccattggggggacccatttcccccagttttaggaaaaatttccaagggggtaagggaaaaaaaattcccggaacctttcaaaaattttcaaaaaccaaatttggaagggaattgggcgggttttgggactttaaaaaaaattttaccctttggaaccttaaaaccccagcttacctttataaaacagggggttcggggtttttttgggg

SEQ ID NO: 373502 - DNA, 331 bp, Zea mays
aaattaaacctaatgtggccattagtcaccaaacctagttgaaggtttaaagccaacaaatgggaccacttgacacctagggtccactggattttttaaggtttttaaatttaaccgttcccctgattcaggggaccaatcaaaaatcgacatttttttaacatatacattcgggggtcctttaaaactggtaaacccaaatttaattggtcttaagggacaacctaagggtttactttaatgggtaatggttggagggaaggaaaacttttaatggggcaggcacccttgcgctggtttcttaacccttgtaaacggtttctttaagttt

SEQ ID NO: 373503 - DNA, 213 bp, Zea mays
gttggagagcattacaacataagcagcaaaaccagaaacaggccttataagcaccacttattagggcaggccaacacaaacgataagcgcggggcagatcaagaaagaaccacaacatgttgaagccatataaaagcatgattaagcccagcaaaccaccaaaagcttcttactgaaaaaaaggccgccttaggcaaaagggttctccgactt

SEQ ID NO: 373504 - DNA, 253 bp, Zea mays
tcctttttttttttttttttttttttttttcacaaagaagtaatttttgaggtgcctgggtctcaattaatagcacttgagagcaagcacccaacatgcatcaacggtttagcacacaactcctatcacctaatgcatcaaacaagggggtaaaaattttcaaacatcaaggagggggccaatgcaccggggcttgcctgaataacactaggttagtgttcgttaaacgacgtccacttggcgatcaaccttt

SEQ ID NO: 373505 - DNA, 338 bp, Zea mays
ggggcgaaaaaatggggccaaaaaaaaaaaaaaaacccaccttgggccaagggcccccaacccaaaaaaaaaaaagggggggcatggcctaatcccccaaggacctccctttgggggccccgggactaaaaaccaaagggggggcccccccggaaaagcccaccgcaaacctgggggccctttttcccccggggggaaaaaaaaccccccggcgggaagaaaaagggacccgggaagggcccctggggggccagaaccccccccggaaaaccggggggcggggccccaaaacccccaaaacggggggaaaacccccccggggggccggggtccccccc

SEQ ID NO: 373506 - DNA, 361 bp, Zea mays
ggggcggccttttttttttttttttttttttttttttggaaaaaaagtggggaaaatggcaaaattcaatccggttttaaggtcggaatttaccaaggaccaaaggtttggttggtggaaataccgggcattttttattacccccttgggcgaccccccttggaaaataaggtggggggttcctggaccaaaacctgggggaccaactgggggtttgaaggggggtttcccttgaatggacacttttggcaagggttttggttcggggggggtcccttttacctccttttttagggaaaaaggttggtgaacttttggattttggggaatgggttgcccaggagcttttttggggggaaaa

SEQ ID NO: 373507 - DNA, 259 bp, Zea mays
gggccgcccttttttttttttttttttttttttttttttttttttgttttaaccgggaaatttggccaaaatttaacaattttttcttttttccccttggacaattaagggaaaatggtttaatttccggcttaaaaggttaaaaatttctttggggggaggaaaaattttgcccccttaataaaaaaaatggggggttaagggaaacaagggggggattcccaatggtggaagaaccctttggcggggggtaatttcc

SEQ ID NO: 373508 - DNA, 385 bp, Zea mays
cttccaactgtaaccaaagggggtttttaatttcaaacgtggacaggttggtgcatcatcatttgagactacagataagaaatcttaatagcttacttgtggaaagtattaccttaacaatctctcctggtcaaacatttcataaaacggaaaataaaagcgattcataattcattgtaaacgcgaggagcaggagcaggaacatttgccggggcaggtccatgttgggctttcgcgacaatgtcctcagctgataaagaacctgatctgatggcatcggccagtttcctttgcagagccaacagaccaatacgtctcgagacaacgtaaagaaccgccaaggagaaaatggtgaaaccaatagtcaggatgatcctatcaaaaa

SEQ ID NO: 373509 - DNA, 372 bp, Zea mays
tttcattatgttttttttacccaaactgccatgcgggggaatagatagacagaatgaacaggaaccaaccaacacaagacacaacaagctgcagccgcggcaggcatggggcaccgcgccactgacaccgggccccaccaccatcaccaccctaagcacactttatctgaaccatggtgatctcacaccccacatcacaagtgcacacgacagtcactggtagactacgcaccgggctacgtgcgacacacacacacagagagagacgccagtaaccgaagcgtactgaacagcaaaatcctgggtaatactgccatgtacgcgcgcgagcgattacctcgccacgcgcgcacgccgatcccctgggccctg

SEQ ID NO: 373510 - DNA, 315 bp, Zea mays
aggggagggccattcatttcaaccctggaaaaaattgcttaaaaaacccggggaatccctttttattcggggccaaaatggtttggggaagaccggatttttggaagaatttttgaaagggcccgggggggggggccaaagtttttaaccttgactatggctggcggaggggaacaaaagggggggggggacctggtggtgcagcccttttttttttttgggggggggggggtggttccaaacccttggttcccttaaacccacctggaggtttcccaagcggggggccccttgccccgggggaaaccctggaaa

SEQ ID NO: 373511 - DNA, 252 bp, Zea mays
tctttttttttttttttttttttttttggcacaaagggggttattttgatacgccatggatttatcttattattacttcctccgttcagaattacaaagccacatagagcacatccgaggtacatacagactacagagagtttgcagatacatagatattccataatgcaacataacacgtaagattcttaggagcttgtttaggagcgaaaaaactttagcccctccaatatcattgccaccaaacaagac

SEQ ID NO: 373512 - DNA, 392 bp, Zea mays
ggcaacaacatgaaaatcattggtaagtcatatgtatatacaacagatcttggtaacaaaccacatgggagcatgaattcaacttgtgttacttaacttaaaagggttgtaggtgctcagttttggctttgctagacccataaaccaaaaactgtttcttaggatctttgatcttcagatgatcaggaaacaaaacaaaaaagttactgggtggacattaacagaaccttctcaaatgtggcatcaaaacgtgtaataagtcggatagaattctcctcattctccgggggcatagtttttaaatggtaaatcttgccagtcacacaggatccggccattttctaacacatttgttgattagaacatcatcaagaacctcatcaaagagttta

SEQ ID NO: 373513 - DNA, 277 bp, Zea mays
ggggggaaaaggggaacaaaattttttccaggggttgcccaaatttacaggggggggcccaaaacttttttacaagggtttttccaaaatttttgcgggaaagttttttggaggccacttttaagctttggggtgggttttgaaaaacttaaattttgaaaaacttaagttttggaatttttaaacttgggcatccggtttaaaaggggtttgggctttggcccccgccttttttggccccccctttacccaaattgggggcaagaatttttttcca

SEQ ID NO: 373514 - DNA, 285 bp, Zea mays
  unsure (1)..(285): unsure at all n locations
ttttnttttttttttttttttttttttttttttttgggttttttttttttttaggggcaactaaaagacttttttatataatggaggggctataaatggagtctgttaataaatccagaattaaatgcttttgtccaacattagattggtagaacagacgacaaatttctcaatttttccacgttgcttacttgccattgattccatattttcaagctcatcagtcaatttctcaattcttccacggtgctcacttgccattgattccatatttttaagctcatt

SEQ ID NO: 373515 - DNA, 315 bp, Zea mays
gccgcccttttttttttttttttttttttttttttttttcaaaccaggggttctccacgaaaaactggtttggggtccaactttttttaccttttttggccacctttggcaattggtaaccccactaattttttttgggaaattttttggaaaaatgtgggggggcctaaaaccctttcggaaaaccacttattttggggggatttggcccaaaggaaccattttgccctttggtaaatttttggcccattcctgttgggtgggttggcccggggccacctttaaatttttttgtttggccggggggtttttttt

SEQ ID NO: 373516 - DNA, 194 bp, Zea mays
ggcaccccattacagggttccggcccagcattttacggaaataaagttggaaaatttcctgtttttgggacactgccataaccatcctaacggtggttacaaccagaagaattggttaatttttccgggatttaagttttccaatccgttcttccggggccttaaaagcatcgccgaattggtttatgattttt

SEQ ID NO: 373517 - DNA, 429 bp, Zea mays
gacgtcgctcactatactgaattactgatactctggtgtttcgtacacaagcaggataaacattatttatagttacgctttcagaagcaacagaagccgctcaaagtcaaaagctttggagaactcaaacagcttctcaaagcgtggtcctaaactttggtatttgctgtacatcaggcacggagcttcagaatgcttcttgtaaccctgggatctactcaacgtgtttgttattgatcaagaaactcccttgcctttccgcactggaagatcaatactgatctgactgagtaacgatagcctcgacccgatctatcgatgcatgcaaccttccatagttcatactgaaggctggttctcctgtgccaacagccccatgaatctcaggaagcacatactctgctttccatccaatcctcaaatcaaacc

SEQ ID NO: 373518 - DNA, 260 bp, Zea mays
ccccaaaaaaaaaaggacctatttttctttaggaaacctgggaagaataagttccaaaactggccttaataaaatggaaaatagaaaagggaccttcgaaaaaaaaaggcaccttgaattggttctccgggggaactaaggctttggggcccttagttaaagggaggaatggaccggccaaaaaaaaaatggccaaactgtttgtccggccccgcaaaaaggcagtaggtttaagtaacccgggggggtccgttttaaaa

SEQ ID NO: 373519 - DNA, 253 bp, Zea mays
gggccgccttttttttttttttttttttggaacccacccacccccaggaaaaacccggagggggttttattttaaggaacaaccggtccgtagacccccggcccaaacctttttattggacaaaaacggttaccggcccacacataatttttccgccaaaggttgggcttaacccggccccaaatcaagggcgggaaaggagggaaaacccagggggcccggatttggttcgggggggtggttaagtgggttt

SEQ ID NO: 373520 - DNA, 266 bp, Zea mays
gggacaaaaataccggtttttttccaaaaacgaacaaaccaatttttttttttggccagaattacctgggggaacccgtttccggttataccaagggccataaacaaagggctccccaaaccccaaaacaaaaccggtcattaattgcttccaaagatgggggggggaccccggaaaggggggccaaacgggccaaccaaaaaatgggccccaaccgggcctttgggcccccaaagggggcaaaaaccggcaagggccttacgggt

SEQ ID NO: 373521 - DNA, 363 bp, Zea mays
gggccgcctttttttttttttttttttaagaggaaccacattttggtttttggagggagtcccgtggtcaaaacaaaaagaccatggttggttttattcccaattcttggttatcaaacagccggaagattatttgaccaccaaaaggtttttaataagtttggttttttttaacccacatgggcaatgggctttggcccaatttgggcaaaccttgacccacttttatcttccattttacaacgggaaagggccgggtccggttgggggggcccacggcccagggggccaaccttgaaaaaaaaaggccaaagaggctccggggttttcttttgcccgacaattttccggccgaccccaaaa

SEQ ID NO: 373522 - DNA, 295 bp, Zea mays
gggttggcaaaggccccaccggcttgaaaaaatacccttttaatttaaaaacaggttacagccaatcggggtgggttaacatccagaatttccaaactttaatttccggttgggggcggaccaaaccttaccccgcccttatttttgacttggcacctagccacccccccagggttaaggccggtattccaaaattttaaaggccggttaattttttttgggggtacccagcttgggttttttggcccccacggattttttgggccctgtttttccgttttttaattggttgggg

SEQ ID NO: 373523 - DNA, 436 bp, Zea mays
ggggccgcccttttttttttttttttttttttttttttttttttaccggcctaaaacccaaggacccatattggaaaaccccagtaaataatcctttttttctaaaaaacccggaccccccaaaccaaagccctggcttcccccaaacccaaggcacttggttagccttttgcttcttttaacctttgggaaccaggttaagggggacataaaattttcttaaaacggccaaccaaagctttgggtcccccccggcccccatggaaaagggttggggttaccaaaaaattttaccggcctttaaaccccgccactttttaagttggggtttcgggacccggggggggaaaatattttcttttttggcaatttttttttccggtttggccaaaaaaacctttttggttaaaaacgtaggtttaaccccaggggggtt

SEQ ID NO: 373524 - DNA, 398 bp, Zea mays
aaaaaaaaagccccaagcccgggaggttaaaaggggcggcccctttaaaaaaaaaaacccccccctggtttttcgccccctggccccccaacctaaaatattttgggggcggaaaacccgggggccctttaagctggaaaaaggaaagggccccccccccaactttaaaaaaatccctgggccaaaaaaaccattttggggggaccccgggggggaagaagtttttaaatggcccggggccaacccccacccggggggggggttttgggggagttcccggggggaaaaaaaacaacccttggccaaaatggggggggccccctttgaaaggaagggccccttccacccccaaaaagggggcccccgcccccccccttgggcccagccccggggggggg

SEQ ID NO: 373525 - DNA, 285 bp, Zea mays
aaaaaaaaaaagggtttttgggattttttaggggggcttagccaaaagaagtcccaaaaccttttccaaactttttgggccccaatggcgggcctggcactttggagccattccggattagtttccacaaacttgggggggggctccccttccaatttcccattggattggttccggatggaaccccggggggcatccgaagacttttccggcgggggggaaagcaagaaccccggttttgacctttggaagaggacccccaaaaaggggcaaaggggggggggg

SEQ ID NO: 373526 - DNA, 373 bp, Zea mays
aaaaaggaattttgggtttttcaaaccttttttgggggggccctaagcctaaaacattccccttggcctttacctttcaaaaaccaaaaaggttttggaaggtttccccggggggggaaaaaaatttttaggttccctcccttggtttttcccaaaaaaatttggtggccgggggttccttcaattttaaccggtttccaaaggaccagggtgcccgaccccgaaacttcccttgtctttttgggggccattaccggaccgcttatgcctgttaaccagaatgggttccgggaaacccttaattcgcggggattggtccccaaattttttaaaaaaacccaggtggtccccacccccaaatttggattttttt

SEQ ID NO: 373527 - DNA, 302 bp, Zea mays
ggtatgataaatatccatgcttcattttaaaatttaacagaactcaatgatttgaccaagtactatgttggaattatatcctttttcaaaacaggagtattactggacctaatgcctcggcctcacagcaagctccttcccaagcaggttcagcacctccctgatctggaaaggaaaacgtatggctaattctgcatcactaacaaagttaagaatgaactgaagaaaaatgctgagagaatttgtagaagtgtatgcttccccagttttaagatgacacgcggggaacacaaatagttaga

SEQ ID NO: 373528 - DNA, 162 bp, Zea mays
gggggcaaacaacacatccgtgggggtcctttaaatttaacctaaaatccacctgttggccctaatgttaaccctaactttatttgaattaaagcctccgcccttttgcaccccccaaattggaattctattctttgtttccctggccaccaaatggggaaa

SEQ ID NO: 373529 - DNA, 318 bp, Zea mays
ggatataggataaacaagaaagtaaaagcagcaaaattagcagggatggagtccactcaaattataaggtctgtttgggatagctaaaacccatggttgtttaatagaggccaagatgaaatatgacctttaaattccttctcatttttcctatttcacaaaaatccagaaaagactcactccacactagttttttgatcacaatgctgttgcaaaatccacccaaaaaaacgagtcatcacccaagatgcccaagttggcacgcatggcctaatttgcggcagcccatgtttggacggccccatccccgacaatccg

SEQ ID NO: 373530 - DNA, 353 bp, Zea mays
cagacttgatagatctatttttcaatttgagtatgtaattttcgaggaaagatacgtttatctaattctcttaatacaaaggtatcaaatctttagaatacaaaaatgccaaagaataattttgtacacaaaatagtaaataaattttaagtcggactaatgaagagtaactgcttttggttgataatatccgatagacatcattctattttaagtttaatttgcaaccaatgagccaattttcgattcaaaacttgagaataataatgattcgattaaacgtttttacagacttatggtttcttgacttcaattcctattcataatttaatgactggatagattctatctac

SEQ ID NO: 373531 - DNA, 282 bp, Zea mays
aaaccaaaaaccggttttttttgggaccggcggggtttttaacaaggcaaccttaatggttaattaattgggccaacccccccaaatgccccattcccaatattgtttttaaaaggcccaaaacccataacattgtaacttaaagggcggaaacctttagctgaaacttaaagccttccgcttttgcttaaaggttattgggggccttccttaccttaagaacccttttaatttttttggttttaccccaccccttccgggaccccgggggggacccctggg

SEQ ID NO: 373532 - DNA, 290 bp, Zea mays
ggcgggcccaaaacaataaatctcctggttcaagtgggttccacccccaaaatttaaaattttgggcaaccggaaaagggtttccgtttaacccttaaccaaggccccaaaaccggttaatttttttccaaaaaaacccttaaccatttggggggttacccttaaatcgaccgatcccttccgggcagaatttggggcccccttccaggattgggcctttaaaccttaaccttcccccatttggaaaggttggggggggccctttttgaagcaataaaaaatggcttttt

SEQ ID NO: 373533 - DNA, 205 bp, Zea mays
gggggacaaaaaggaaaggggtttccaaaattcccagccgggtcatttggtccggaaccaacctccttttaaaaattttattgaacccggcccagcccaaaaaaacccttcttgtaaaaagggcaccccgggcccttattaccactttttttttggaaccggaattttggggcccggggcttaaccccgggggcctttaggcccc

SEQ ID NO: 373534 - DNA, 317 bp, Zea mays
aaaaaaggggtgtttttgtttttgccccaggcaaattttaggggggtggggtttttttttacctaacccggggggggaaaacccgtcccgataaaaaagaaaagggtttttttaacggggggccttttcttctggaggttaaaatttggttttttttttttggggcccccttggaaccaaaaccacaaaaggttggttctttattacctaaaaaaacctgggacaaaaccttgggtaccaaatggtcttttggaaggtttacccggcaaaaaaaaaaacttttaagggttttctggcctttggggggcaagggtttg

SEQ ID NO: 373535 - DNA, 324 bp, Zea mays
gaatgttggggtttcaataaaataagattatagtagctcttggatagataactaagggggtgtttgattgaagtgagaaagaatagagtagcttcattctattttttttgaatgtttggttttcaataaaataagattatagtagctcatggattttcatatagaaatttactataaatagttggaacgcaagatatttttggttgtatgatatatagagctagtgacacacaagggatgatataattttttatggcataatgaggattggctcaacaagaaatctcttgtatgccatggcatctcaaatgggccacctaaaac

SEQ ID NO: 373536 - DNA, 171 bp, Zea mays
ccagtagaatccaaacaggaactttcggagctgggccatgcacaacagccaaggagcgattcaggttggctattgtcagttgctttacattaggaagaccaaggtagtagaacatgagatcagcgtcatcagggaaggtgatcgggggcccccggattgacggtccccatg

SEQ ID NO: 373537 - DNA, 378 bp, Zea mays
ggcgaacatgtacgtgctgggatcagcaattcacgtccacagcagttacataaccggacataatcgcacagtcctcaaataataccataaagagggaaatagttgattacatcatgatgtctgggacatccacatagtcattaacaattataaaagtgtgaaaacaaaacgtaaataaacatggccttaacaggcagccgactgggggtttgccgttaacccatgcctagaactcatcgtactttgggaactcctaaaagtcctcctccatgacttaatcttttcctgagcagtggttgcaacatggacaaccttcaccaatcagttgttgctaagggttttaacttataactccttcggactccgccaactgaccgt

SEQ ID NO: 373538 - DNA, 336 bp, Zea mays
acaaaacaatttttatagaaaccaacgggaaagcttaatggttaaccagcccaaaccgcttttaatggccaaactggaaaaaggttgaacaaaccccacccttacatagggggtgggttccacttacaaccattggttaccacttaccacaaattgttttccccttattccggccttaagcttcttgaaccggagggttaccacttaagaataaaaaccggggtttcttaaaatccccaaatcactggaaggtttaatgcataaattcgggggcagaatgttttcccgaaaccgggggggttcctggaacaaggcaggatttttttttggggaagg

SEQ ID NO: 373539 - DNA, 421 bp, Zea mays
gggccaggatgttaaaagggtctatctttcatgtcgcacacataaatcaagaccgatgtcataaatataacaaagatggcagatgccatgccataaataatgtcaatatatgggcatcctgacccaataccagaaaccacatttgaaaaaccaaaatcatcagaccactgggtttttgttataaaaaggctttttatgctttttggaagcctatacatagttcctttatatgctttaatgattccggaaagaaattgcttaggtgagatgaaaatgaaagaatccagcccaaaactttagtaactaacttttttatcctttaacatttttttagaacaattattatacatttttagtcccacaatcgagccattcaaaaattttaaggcccaaggttttcctgtttaccccatgaaaggga

SEQ ID NO: 373540 - DNA, 235 bp, Zea mays
aacccaaaagggaaaaggtttggcggggcgggaaaaaccaaaccgggggcccaaactggttaaaacccccccaaagccccattggggggggaaaaaaccccccccaatcccgggggggggaaaaaaaataaagccaaaaccccgggcccacccccaaaattgggcccattaacccgggcccaaaacctatttaccacccaacaaactttctttgggaaaggggggggggcctccc

SEQ ID NO: 373541 - DNA, 377 bp, Zea mays
aaaaggcaaaagagtcatctaatttaaaatggggggagtccatcattatccgctcgtctttccttccttattagcatgccaatcccgtctcattgtttggacaataaattactgacatggggaagggagtacattgtaatatcagctcgtcctttcttagcatgccaatctcatctcattggttggatactgaattactcacatgatgcctcattatgcgtctcatagcatgtgatagtaagactatgaaccaatggcgatactggaggtccggcaccaggaaggaaggaatggtttcttgatatcttggggtacaccgcgagtcctgatctagctaggatgtagcgaaaatttcactcctggatgcaagagtcaac

SEQ ID NO: 373542 - DNA, 212 bp, Zea mays
cccaaacaatcggaccctactttgttcctgcccgagatttaaaaaaggcaggcggcctttttaaacgggttcaaaataagacaggtaaaccgacacaaaagcgggcctaacacacgggccaaaacaagggggggtccggggccctacgatgggccctgaaaaaacacagccgaatgggtttagggggccttatttccaagcgaacccccaaa

SEQ ID NO: 373543 - DNA, 244 bp, Zea mays
aagaaaaacaaccagaaggcccctttgggaatttttttacaccatacatacccgcccgcaagggttttacgggatagcccatcctggagcccggggggggcggggcacccctacattggcttatggggggggtggatagaaaattaaaggggcaggttttccaaagggcatgcagggggtttcctcaggattggggaggggtgggtgtcacaaaaaaaaaccattttttgggggtggggtttgc

SEQ ID NO: 373544 - DNA, 380 bp, Zea mays
ggagaaactgttcacttgggtgggaatccagtttttcggggcatgccgcaccatcccatgtctcaccatgagaagaaaaaacggcaaattgcctgtcagatgaacaatggagcggaccagagcaccatccacctctacgtagttggacttttggtggttgccatcgcgaaggctcaaacaaatttaaccaaattacgccaaggtttacagcttacaaccaagatagggtacgaatgccaatttttttctgcctatatcgtaccatctcttgtaggacttaaactgaagccctttcatccaaggtctggtgactctggtccgatagaatatgccaccttttctaggatcagagtatacccttctgtactctggaattgctt

SEQ ID NO: 373545 - DNA, 174 bp, Zea mays
ggggaggccgaatcgaaacacatttattatttatggtattgctactacagaatcagaggcgtttggccctggagccaaccgaactggcgcctcctgggggggggtcccacacattcgactcgctccgaacaaaaacactgggggttagtgcatgggttagtctggttccttgat

SEQ ID NO: 373546 - DNA, 187 bp, Zea mays
agaccaatctcacttgggtcatgttctctcactagaataataatcgtttaatcatacaaaaacagatagctacacttaatgcagagtgacgaaacaatataacagaagcatagttcagacacactaagcatatatatttgttgtcagaaattgatacaacagtcaacagccactaaacagaccaata

SEQ ID NO: 373547 - DNA, 352 bp, Zea mays
ggcccaaaccaggggggccccgggtttaatttggagcccaaaacttttttcgggtttggcaaaattcggggggggcccccacacaaaaaaaaccgggccttttttaaacccacccttgcccccttttaggacccaaccgggatttctttggccccccccttttgggggggggggccccaaacaccccgggcccttggggggttaaacccccccgggtttttctgcccccccgggacccgggcccaagggggggggggcctcccttttgggggggtgaacccctctggggggggccctccccccattttttgcccggaaaaaaaaaccccttttggccccggggggacccccc

SEQ ID NO: 373548 - DNA, 223 bp, Zea mays
ggccaaactttttaaacaggccggattttacaagggggggcgcggggtggttaaaaggttaaaacccctcaaaaggtttaaaaaaacgggggccccaccgggtggtttttgttccagaaatgcccaattttttttgtccccggttttttgaacccccattttttttaaggtttttccgggggggggggatttttccgcgtttattccaggggggggggggccc

SEQ ID NO: 373549 - DNA, 236 bp, Zea mays
atgggtgacaaaaaataatgaactgagaaccagtaaaaatggggaatatttacaaataaagcagaacaacttaatcaggccaggggaggaacccaccagaccgcgctttgcggccagcgcaagaaagcagaacaacttaattgtatgattacctaacaggtacatccatcagagtttttataaaaaaagtacaaattcttaagaatactaagaaaacttttctaaccaggctttaa

SEQ ID NO: 373550 - DNA, 477 bp, Zea mays
ccaattccgaccactgctctcgcgccgtcgcgcgacagcattgtgcgcccgagccgggcttgtctgatggcgtctggaggcgccgcccgcggtcgccttgctgaggagcgcaaggcgtggcgcaagagccatcccctcgtgggcgccgtcatcctctccgcgtcttctttacttctagtatagcagatccatgctccgttgctgttttaagattcgggcattgatgcgatgcttgcttgctttcttctttttacagggctttgtggccaagccggcgatgctgccggatggttctgtcaacctcatgctctggaactgcgtcgtccccggcaaggaaggcgtaagcccacatctcactgagtagtcctccccccatcttttcttcagttctgtgattctgtcgaatgtgtctggcttttgttccaccctgaaaacataaagtggtgagtctaaaaagggtaactggagaaagatata

SEQ ID NO: 373551 - DNA, 183 bp, Zea mays
aaaaggaagaacgactggctcgctccttcggtattgaggcttggaggatttacatttacactggacctgccacagatgtaacaggagtctcaaggggtaacatagttgagtcgttaacatacagccagccaggcccagggggccaggcaggaactcaactattatttacccagggccaagggg

SEQ ID NO: 373552 - DNA, 211 bp, Zea mays
ggaaaccaggaccaaaggaaatttttgagtggtttccattgggatgaaatccagttgttggttttaaccccacgttttaacatgattttggccttttttggccacgacccaaacgcttaaagggggaggggacccttggcaccaaacccgtgggaggaaaaaaaaaccttccccccggttgggaccgggggtccacaaggtttggggttaa

SEQ ID NO: 373553 - DNA, 308 bp, Zea mays
gggccaaaacaattaaaaaccggcgggggcccctggtggtggaattccaacccggcctttttgattttggggaaaagcttccccccgttcccactaaaagccctttttggcggttttacttaccccggttttaggtttttttggaacaaaatttggaactttactttaaaagcccccaagggcccttggttccttggcctggtttttagggaacgggaaggggttatcccaacccccttttggtggatttccaaaaaggtcccaaaaaaccggagcccttggggactttggtttttaaataaccccaa

SEQ ID NO: 373554 - DNA, 384 bp, Zea mays
atcgaacacgcaggagaactgggcatcattatattaagtagagagaaaaggtataaagaagaccacgtacaaggtgacaaatacccaaagaaagtagggaaaaaaccaaaacaaacgaaacaaaggactatacaaaaaaggaaagaggctttaggagccttgaaaatagagcaaccccacaaacagaaactaccaccactcctagggaaacaactaagacatccccaaatcaaggccacaaccttctcagggccttagcacctgccaattcccaaagcctggcatccttatggatatgctgtagaactgaactcgtgtttggagaaacaccataaaaaacacaagcatttctgtgcttctagatccaccaagccacaagaataa

SEQ ID NO: 373555 - DNA, 178 bp, Zea mays
gccaaggccattgggatcgggaataaattattatggccctgggtggtggtcaaaattgaatagggtggggccggggattattgattttggaaaccccaaaaggcctttatttttatgggggtctccccgggactggtttttaaaaccaccttttttcttcgaaaccgggggggggaaa

SEQ ID NO: 373556 - DNA, 276 bp, Zea mays
aaaaacctgaatgaactatactcaacacacacaagtgacaggttcacatcagaacgagatgcagacctagtaacctactaactcccctcaaatccgttcctttcctactaggcttggtgcattcctgctacaacattcagccctaaaccaagaatcaattgaacaaccgccgggcgcgccacagttttttaactactcgcaagcacaaaacaacaaggaaaataaaagcggggtatatctatctatttacacgggcaggcagacgggctacatgac

SEQ ID NO: 373557 - DNA, 259 bp, Zea mays
accccacgtaataatgtcgttcgctgttttttttcaggagtggagaatcaaaatgtgttccagcgtcgagtggcgtatttatccatatttgcagagcgagaagtcataattggaaactcctcgatccaccaaaaaacgtagggggaaggcgtaaagctttaggggagggggaccccaaagaagggcgatccaccccagagggaccataaagggccccttttttgctagggaaaaggagaaccatttccctttgaagatt

SEQ ID NO: 373558 - DNA, 394 bp, Zea mays
caggctccaatcggttcatatacaatccagatgttgtaactccagttgttggagagaaacaccagcccaaatataaaaaacaagaagagtagatagtttatgagggaactaaattttcaaagaacatttgacagggtaggttagttattgaacaaacacagggaaccctgaatagttcagaattattattgctgacgcagaagcagaatccaaatcaggccccaaatccatccatatgcaatccagttgctgtaatccagttgctggagaagaacacccgcccagaaataagaaacaagaaatttaagagtaccaataaaagagagcatgccatgaagttagttccgtcaaagcttcaatctacgtccaaaacatcacctatgttgcctctaca

SEQ ID NO: 373559 - DNA, 319 bp, Zea mays
ccaaaccagccctggatttttagcccggtcgggggaaattggattaaaaaagggttccatggtcctattccacgggttgggcccgaaaaaggggttcccccttaagccacagccccgggggccagggaggcattttacattttgcttttgttgccaggggcaacccggatttttaaccccttccgggcaacagccgggaccggaaaccccaaagagattggggggggaaatccaaaaggcaaaggggaaaggcaggcaacagaacccttgcattattacaacggttctaacacctttttttcttcctttttgggttggt

SEQ ID NO: 373560 - DNA, 256 bp, Zea mays
gccagctttgttggctcgtccacgacgaccacggccaggggcgatgtacgcggtggcggggggcggtttgaggttgtagatgccgaaggcggacaggtccgtggcgagagcggtggtcacccaggacgtagctcggcgccggcgctcggtcgtgatggcagcggccttcttgtcggcagcggaacacaccgtcccagcgtcgctggctggtgagcaatctggcgaggctgcacatgtggcatacttggcgagggtg

SEQ ID NO: 373561 - DNA, 285 bp, Zea mays
agacatacacatccacaataattttatgtagcatacacggtacaacccttgagtttgtttttactttggaaagtttatttagtccataaaaattcaccagttgtttgggggcataaaataaatgagggtttaaagaaaccaggaaggctacatttctttacacaaaagggggctccatcagtttggattatttcggggggaagaaattaggaaactagaacaggggcaacatgggtggaacattatgcaaaagccgccaacagctcctttttagtttgtttgggg

SEQ ID NO: 373562 - DNA, 277 bp, Zea mays
agggaccaaaacttatttatttttgggaaggtcaacccagggcggagtttttgggacccctttggaagaaccctttttttaaaaacaacctttaaaggttagggccttgaacccttaccaaaccaaaccttgaacccttaccaatttaatcccccttcttgattttgggaccaggaccggttccaccaaaagggggattcttattcatgccaagaagaaggcccatgcccgggcccttgccctgggacatttttccaaagatgggggtggaaaaccc

SEQ ID NO: 373563 - DNA, 256 bp, Zea mays
aaaaaaatgcttaaatttttttttttaaaaccaaagaaaaccggggggattttttttggacccggccttttggtggggcttttcgggccacaagaacctcaaaagggggggccagggggtccaacttaacaacccggttccttccagtccgggtggggcccaaccttgacctggccctcaatttgaagggcccttttattggggaccccccccttgtggttcctaaccgggcccacatttttacccgcccctgggg

SEQ ID NO: 373564 - DNA, 334 bp, Zea mays
gggaaacaaacaaaaaattttcggccccaaaaagggggccccccggggcaaattaattgcctttgggggggggaaaacgggtaaaaggggttatttttaaacccccaattcccccccccttggaaccccgggggggcccaaaccccaaaggtgggtttttgggcaacaaaaaagggggggaccccctggggggggaaagccgccccccaaaatttcccccagcaaagggggggccccccccctggggccccttttttacaattgggggcttggtggcgggggaaaccccggggggggggggggccccaacgggttgcccggggttgcaaacccc

SEQ ID NO: 373565 - DNA, 268 bp, Zea mays
cgccctttttttttttttttttttttttttttaaaggaccccccctttttaaggtttcagtttagcccaaggatttctgtttgggggccaaaactttaccgccgtccacataaatctaattttatgaattggaagccccatttttaagggccccctgaaattcatttggggggaaaaaaaaatttttgggcattaaccttctttccaagattttttttaaacaaaccggggtgggccttccctttggaggctttaatcaccgggccgg

SEQ ID NO: 373566 - DNA, 396 bp, Zea mays
actataaaactgggggtacagttgcatataaaaagggtattacggcacaccctgtataaaaaatcgtccgccactgtggagagacggtgaacgccaggctgtgatggcatatcatatcgtatctatcattaacctagctaaggagcatattacattacgttactttacgttatgttatatgatatctatcattaacccagccaagtagcatgtaaagctgactcttattttccgcgcaccgcgctttatcaactatggttcaaagattttcccatgagatcaaaccaaacacagcatgcatcagcctgcgatcaaatcaccgcccgtcgtcgatgactccaggcatcgccggcgacggggtgagaggcgcagtcgtctccctctgcacgctgaact

SEQ ID NO: 373567 - DNA, 340 bp, Zea mays
acttaaatatattcacgctggattaaataaatatatgttccttggcacagacccatagaagctaaactgacgtaaacatgggtccaattcatctacctgattcctatccgttaaacatttgatccaccacaacattcatacagtcattgccaaagttatgtgtccactttggggaagggcctggcaaatgggcagtacttatttacgtccgggcgccttttgcaggtcgtaggcacccaaagaaccatgcgctgaaccagttccatactgggaaccagaatcaggggcagcacttgcccagagttaaagggtttgcagaataattggccttagggttccc

SEQ ID NO: 373568 - DNA, 180 bp, Zea mays
aaaaaaaaaacatagcagttaaggaattgggggttccattacatgaaagagcaaagcagggcccacttaaaaaatttggagttacatgaaagagcaaagcgggcccaataaacctttccaaaatgtttttttaaaagcaccccaagcccaccaaacgggaacccttaaaaaaatcctttt

SEQ ID NO: 373569 - DNA, 189 bp, Zea mays
aaaaaacggccgtggggtgggaacccacaaaggtttcccacaacaaaggctaggttgttgttaataagcaaaggcaaaatccgggagtgggcagggttttatcaaataatatatatagcagggaacacagggataagcccacataatacgagcaagacgcagcagggttcatgggggggcccaattggg

SEQ ID NO: 373570 - DNA, 274 bp, Zea mays
gggccgcctttttttttttttttggaaaaatttttgggccacaaaacaaaatgaggaagggtggggtttgctttgttgggccaaaccaatttatgaccaagttaaataatatgaccacataaaaatttttttttggtggattctttctaaaaaattagaccgcgcaatgcttgcaaattaaccttgagggttatatgttacgtttttacgcccttttttctttgacgaacttggacgtcttcgggggccgccgaaggggggaattgggtttccc

SEQ ID NO: 373571 - DNA, 332 bp, Zea mays
ggggccaaacgatcccccagttttaattaacagcaaacttttagtttagttgaatccaaaggggagtggccaccaaatttgaccgccattccaaatggccggtaaaacaaatttagccttttatttggaaacaggggaatacatggaatttccgccccaaaaaaaaggtccttccaacccaaaatttaaaacccgggggttgatttgttaagaacagaatttaaaatttttaacctaggccttgtaggaatatttcttaagggggaagtatttttaacgctttttttccttttgggttttaaaaaaaggctggggtttggtaaaacgggggg

SEQ ID NO: 373572 - DNA, 428 bp, Zea mays
gggggccgcctttttttttttttttttaaggatttttcctttggcttggccttaaaatcttggcggaaccggatttatggcccggccccaggattggcccaaattaaccccaattcaaaccccggatttttaataaccttccagggtattggccaacccaacaggaggcctttttttggtaaggtcaaaattttaattggggttttaacaataatttaataaatggaggttttcttttacacagaaacaattggaatgggtggtggcccccgggccccgggggccgggccaaaccttgcccggaaaaaaccatttggggcacataaggcttaacttaaggaaggtgggaggggggaaccctgggcccacgaggcttggaccgccttttttttttcccggggggggaggtttaatgggggcggggggtt

SEQ ID NO: 373573 - DNA, 260 bp, Zea mays
cccacgcgtccgccttcctcctccgtctccatcttggcccaaccgagcccaaacctctccccttttctccgtcctctcctagtccacacggcagacgccgccgccgggggagaggagaggaggggaggggatctgctccatgggaccaggtgagatggcaattctgtccgcgctggtggcgcgcggcacggcggtgctggccgagcacaacgcggcagccacccacgcgggcgctatcgcgcgccatgtcctctagcgct

SEQ ID NO: 373574 - DNA, 253 bp, Zea mays
gaggcgggggcaaactggattcagcatagctggaaatcagttacaaaatccctcagcaatttcgggtgggtttaagcggggggcgggccccaggttacaacacaaattggggccacccagccccccccacttatttttcgcctaaggggcgaccaacaaacccgctttttttatctggggaagaaaaactaccttgacccgactttttttgcctaccaaaaaaaaaagggggaacaccctttttcccaggggg

SEQ ID NO: 373575 - DNA, 377 bp, Zea mays
ctatgaaactgcatggacatattttttgggatctaccaaaacattagaaacgttaccgttctttattctttttttgacagattattgtaggaaattgtagccctcaaaatgaaggggccttaaatctcagtacccaccagtgacttctatatgtatatagatacagaacctgcacggtgtagtgtcagatatattcgatcatgacgaattagtgacataggaggggcacaatagttagagaataaatatctcattaggctaataaagatctgattagccagccaatgacagcatatagatgcagaacaaattctcattgtctcttgaatattcaattcacacgatccactgccactagtaatataatcctagatcat

SEQ ID NO: 373576 - DNA, 509 bp, Zea mays
cttgataatttaggatagactcatttatgatttccatcctatagacaatgtagatatgtatcttgtaaacctgtcgtgcgtccttggattataaaatgaggaacaaatcatcagatcatgttgcatagcaattgacatcgccacaaatcttcgtgtctcctatgtctttatttttagttctcgaataagcgacctagcacataaattcactgtcgaacaattttcgacaaatgtgcatggatcaaaggaactagacacttctggtgtcaagatgcacatttaccctcaattgtttacttccctcatactcacctcccctactcttctttctctatctcatatgaccatgatccaactttgtggatgtttgttgcattttttcttaacctgcgtcattagccatgaagacattgttatttaaccttaattgcacataaatttggtagcagtcaccttgatgtgttcttttaaacttttctggttaggagctgtacttttatcgactccat

SEQ ID NO: 373577 - DNA, 262 bp, Zea mays
ggggccgccctttttttttttttttttttttttttttttttttggggaacaacccggttttaaacggaaaaaggtgttttaattaaagggggcccccaaataattttttttggggggtaaaaaaagaaagggcccattaattgcgggaaaaaaacccgggatgaaaccccttaaaaaaagggaccccccctggcccgatcggtggggccaaaccaagggtgggtggtaaagtaagggcttttaattttttaaaagggggaaa

SEQ ID NO: 373578 - DNA, 468 bp, Zea mays
  unsure (1)..(468): unsure at all n locations
ggataaaggaagctgggctgggccgctgggcaagtgaagtgggccactagaccgaaatttcaatccagccagccaggctgatcgttcctaaactattggacgattagtcgcgattaatcgccgactaataggatgatccttgatcgactctggagttactatcagtcgattagcgactaatcggacgttttgaaaacacatttttaccaagtgcagaaagattgggagttgagaacttgagatagggagtgggttatcttctcccgttcgctagttctctcgctctccaggcgagacttgaccactgccacaatatgtcaggtacccaggtctttgtgagcaaggctaatgatttgtcctgttgatgctctaccatgatctaagaatgctcttcttcacttgccttcctgctgaatttgatcctgggacctgngtcaatgtttgtgggactaatatgcctggtcagtt

SEQ ID NO: 373579 - DNA, 317 bp, Zea mays
gctaaggggaaaacatcaagtttaagaagtacaatcaagttctgtaaggcatgcatgatatgtacattgtatttacattggatggtaacctgtgcacaagcacattacaaaccctacacttcacatatttggtctaaaagcatctacatcctaattccacttcgattctttaccttgcatctcatcacgcctggattcctcccatgactggcagtgaagatctggaattgctatcacagatccatcggaggtgtgtccttgtgcaaaagatcgtgggcaatgtagtcccaaggaagagacacagacattaagcaaca

SEQ ID NO: 373580 - DNA, 290 bp, Zea mays
gggccccaaaaaagaaaaggggcggggcaattttttttccggggaattttttgacaaaaatttattttaggggccggggattacaaaaaattcctttcgggcccagggggggacaaaacctaaccccgcccttatttttaccttggcggttggcccccccaggccccaaaccggtattccaatggaaaccaaccttttcttttttttgggggaaccaagtttgggttttttggcccccgggatttttttggccccggttttcccgttttttaattggttgggggaatttt

SEQ ID NO: 373581 - DNA, 382 bp, Zea mays
gttggaatcttttaagggggccgccttttttttttttttttttttttttttttttaacaaaagggatttttaaaataccaaagggtgggaaacggggaaaattttaaatttaggttgaaaaaatggaactttacccgaagaaaattttggaagtttttattgcttaaccccattaattggacccttatttatgggaccaaccaaggggacctgggaaacgggagccaaaccaaaccgggaccaaggttaccgggaacaaaaattttggaacttttaatttggaatttttatacctaaaggggcaaaaaaaaaaggcttttgttgtggacaaatggaggggggcccaccatttttaaaaaccctttccctttttggcctttaa

SEQ ID NO: 373582 - DNA, 273 bp, Zea mays
ggggaaaaaaaaattttggaaaggaacatttaagggcccgcggaacaaccgaaattttaggggaagaaccccccccggggttggttaaaggggcccaaaccccctttacggggggccccgggggaaaaaaaacacgggggaaggcaaaaaaagggggggaggaaaaaaaggggggggaaatggaaaccaccggtgggaaacttattaaacccccccagggtcctccttaaaagaatttccggagaaccggggacaaaagggcaaacccttttt

SEQ ID NO: 373583 - DNA, 262 bp, Zea mays
ggttggattcttttaggggggccgccttttttttttttttttttttggaaaattggccaaaattattttgggtttacccccaattttggtggaattccattaaattcccggaaaataaaactggtggtggttaaaattttgggcgaacccccttgtaaattaaaagggccggaccggaaaaaaaaagccgggaggaaaaaggttttgggtatttttttcttgaacggttaaaggggaccggtgggaacaaaaaaaggggggg

SEQ ID NO: 373584 - DNA, 243 bp, Zea mays
aagcgggtaaaattgccgttcaaactcccgtaaaattatcggatgaatttaaacggcccccattttttttccgggggtttccccacttcctaaagggatttttccgggttttttccaccccggaaaattttatttcgggcaggtaaaaaaaagggttaacccaccgcccttaagctggtttataaaacatcggaatccttgccctccaaaaaagacttcttactccaaccttatcctctttcc

SEQ ID NO: 373585 - DNA, 150 bp, Zea mays
gggacttaagggaaaaccagttttaataattaaaccatttcccatgaccaggatacaaggttttaatatactaactaagttgtgggcccagtcaaaaaaaatacccggaaaggggggaccaaaaaaaaagggggggggaagggttttact

SEQ ID NO: 373586 - DNA, 352 bp, Zea mays
cccacacgtacggagatataaaagggggtatacaatggggtttcccccgtaagctcgcacggatgctcgtgggccatctaatgggccacagattatggggccactgataggcacgatgctgggcagggggctggacctaggcactgaacgctggacttaccacacaccatactagagactaaacggatgctagatagggtttgggataaggtcttgattcagcgctcatatctgaggccactgctgatgctacgggcgaggccacgggcgaggcccacaatgagaaactaaaataaatcctagagctaatgcatgagcatgtctaggggatggactagcaaatggtgccaca

SEQ ID NO: 373587 - DNA, 328 bp, Zea mays
cttgcctcaaaccgttaaaatttataattagcgccacttgtagcatttcacaacattgagcgtattcagttctgcaaacacttgtgcagataccaaaatcacagtaccttcgggaagcactgaaagccacctctggtgacattaagcaatgccagcgaacatagcctgtgaggtgccatcgcatcgagcttgcaagcaatcatggcacccatggagtggccgaagacgtgagccttcttccaccccaaatgatccatcaaggccaaggcatccgtcgccatgattgtcgtcgagtagtaggatttgttggggagcacggagctgtggc

SEQ ID NO: 373588 - DNA, 246 bp, Zea mays
aaagaatgcataattgttattgcccagacgcaaacatccgagcccaacgtacgttgggcaatgggtgcggggaacacgattggccgcccgtaaccccaaaccaattggaaggccaaagagcctaacgcccgcccacgaatacacagttaattcacaggccacatcccataagagggcctaacactaactcatttggggccctggggggggagtccgaagccgaacggaaagagcgggtcgtagggc

SEQ ID NO: 373589 - DNA, 245 bp, Zea mays
ggggccgcctttttttttttttttttaccaaaagggttatttttttggaaaaattggcctggccttcaaaattggggggacccggccaaaaattattaaaactggttttaggtttaaaccaatttacctttaaccttttaattaaaagggaaaagggagcttgtttttttaagctttttggcggaaaggttttattctggacccaacccgatcggaattcttattgacttttcggaattataaat

SEQ ID NO: 373590 - DNA, 387 bp, Zea mays
ctccacgcgtccgtcccggcctcccccctccccctccgctccccccaaccccagaacatccggcgctttcaccccccttcccctcccctcccctcgtcctccgcgatggcggcgtccatggcgtcgccgcgggggcggtcgatccgggagacggtgctggagaccgtggcggcgtaccaccagcagcagcgggccaaggggaagctgcgcaagagcctcacctacgccggcggcgagctctcgtccgcgggccgggcccgcggggacggccccgcctccacctccgtctcctcgctctgcgggcccgacgacgacgacgagcccttctgggaggaggaggagggcaccgtcgagctcgtccagctcggggccaaccgcgctaagaac

SEQ ID NO: 373591 - DNA, 314 bp, Zea mays
aggtcccaaggaatttttttggggcatttttcgggcctttggttgcccaaaaaaaaaaaaatttggggtacccttttgggatttttacaaaggatggttttaccaattacttctggaaaacaagggtaccactttttattccaaggccccaatcccagattccttttttctttttggcccaaaaaatttggattaaaaccaatttaaacggtggcccgggacttaattttttttttatgggacccggttcagggcaattattttcccaactgggcctccacgggccattggggcccttccaaaaaggggcgggg

SEQ ID NO: 373592 - DNA, 377 bp, Zea mays
aaggtattgttgtagatgcggtagatagacaaattataagcatgcgtgcatggctatggattattatttgacgactgcctcctccttgtccatggatttgtccatctacctgttggctgcatccgctttctccttcagagccagcatgagaccctccaagcacgcgctagcatcatccggcgtgcgcattaggtgctccgcgacgtccgccggagacattttggtcacctctagtagctgctgtaccttgccgaagcgctcgaacagctggtggtcgtcgatctcgagggtagttgttggccagcaccttgaaggcctcgtaggtacagtaggacatctcgatgtgcatgtccatcctgcctcgccggatgagcgcc

SEQ ID NO: 373593 - DNA, 393 bp, Zea mays
gcgtccatcgcgtactcggaggcgtgggttagtgatgccgatcccaatcccatccgtatgaggccatgagcacaaccaaagcgtgcgatgcatagagttatatgcaggcgatcgctagcctcttgtttgccttttttttctccagttaagccaaggggcgcaggctgctagtgctgaagcctctatccgtctacgacgccagaatcctgaacagacttcaccattgatcaagtaaaacattcagttgtgctggccctggacaacaaaagcattattcagttccaaaaggacacgaagacgtgacgtgagcacgccaggatcgctttggcatgagcatgagcggcgggatcgggcagaggtcgtcgcgcccgttgccaggggaccccgcgccca

SEQ ID NO: 373594 - DNA, 231 bp, Zea mays
gggggggcaaactccaacatagggcgatactaaaacatgatacataagcttttacatgacaacaacgagtccatcagagtttacacacctttacgggacaaacaccagaacagatcaaaatttcagcctacagttaaactacccttatgggtccaacagagggatacatagatttttgcttccacaaggcaggagcagggaccagcgacgacaataaacctacgatcctta

SEQ ID NO: 373595 - DNA, 456 bp, Zea mays
ccggtagcagcaagtcgccgcttgtgcccttcctcctcactttccctcgctgacgcccgatccccatgattcgattacgcgacccgccttgcaaaccctagcttctcccgctctctccctttccaatgcgccccaaaccctagcttcccgcccgcccacccgccggtcatgcgcgcctccgcctccgctgtccccatggaggcctccgcctccgcccgcagatccgccgctagccccgaccccggcgcgaagaagccgcgcctcgcgcagccgccggcacgggaccccagatcttacgccgctgccgccgccgcctccaatggcggcgcaagcgccgccgagcaagcgctggttgacgagctgctcggccagtaccggaccgcgcttggggagctcaccttcaattccaagcccatcatcaccaacctcaccatcatcgctggcgagaacctcagg

SEQ ID NO: 373596 - DNA, 332 bp, Zea mays
ctaaagaaggaatcatggggggttacaaataaagggggctcatacagaagttttcaccaaatccacatacgcgggaggacagtccaccaagtccacagttacgggcagcagtttaaccatatcaccggagctgggagagccatacacagccatcgaagcagcagccaccgggggagagaaaacctttacattacctgtaatatccaccgccacccacccgggggcctcaaccgtagcccttttttggcatccgatacggggaaaccgatcggtccctcttggacctaccaccaccataagggggcggggagtagccccggccacccttgttt

SEQ ID NO: 373597 - DNA, 252 bp, Zea mays
ggggaaatccaaatgcatttatttccacattggcataatcagggggggcgctaattaataccggttttttatggtacaacgccaaacaagactttataaagaatgaacgctcaatgtacagttttaacgttgggggggggggggactacgggggtccagcctaaccaagggggggagatgaatcgtaaggcagttaagcgcccttggttggggctgggtttttggcgtaataatcctggaaaccttgtttaa

SEQ ID NO: 373598 - DNA, 395 bp, Zea mays
tcaagtatttgaagcattgttttagccttgttacatttctagtattattttcttagtgctagttgttggggtgaagttgggctcttgtttagctcttgcttaggttttaattaagtgttgatttttagaaaagcccaattcacccccctcttgggcatcgtgatcctttcaccgtccacgcaggatcgacggccaggaactgatctcctatctcccggttaccaaaacggcggcgcgagcatgactaacggcggcgcacaggatcgcagccgcactcctcgccggagttagccatcaggcgattcgaggcttaatcctactgattaactagcgctacgcaagccggaggacccagcgatctgattgaggtacaccataccagtaatggggcagca

SEQ ID NO: 373599 - DNA, 450 bp, Zea mays
gttgtcgttcgtggaggagtcgaagcgcaaggaggactgggtcgtcaggaaccaggagcgcagggcggccaaacgcaatcgcatccgcgacgagcacaaggtcgttgtcaggcagcccaaggactcaccaccacgttccacaacagggagcgtgacatcctgcggatgaggacccacttcaaggttagcaagcagccgcccaatgaggcgctcgactccaggctctttgcaattcgcatccctgggtaggtagtccttgcaccagaagtccagaacaaactccccctgtttttgtttttgcccaatggtgttaatagctagcgttggttgtttcatgtgtgttgtgcttgtagctccatggacttgcattcgcacattaagaaggtcttgaggaagctacgtctgatgatggtcctcaccggcattaacctttttttgcacactaactga

SEQ ID NO: 373600 - DNA, 529 bp, Zea mays
  unsure (1)..(529): unsure at all n locations
cgtacgcgtgggcggacgcgtgggcacaaactgcacacaaactaaaactgaaaatgtcatacaatgtgttctctaaattgaatgcagttcacacaaactgaaattgcacaaaaaatgcttactaattatgttgcttaccaaaaatgtgtcaagttccattccagaacttaagtggcagacaattaatttcttcgaggaaccatatgttcctgcaaactaattatttaggtgagggaagcactgttagaggtcattcttggtttttactaatgatgtggctggtagaggaagcactggtgggggaaccatatgctgctagtagaggtaattctttaggtgggggaagcactggtggggaaaccatatgttgttgcttactaatgttgttgcgtcgtggctggatctgccgctcctagctacaactatccctgtccataattgtttatgtactacgcatttatttaatcatatacttggacctatgtattanngtggttctcatattttctcgatgagctggaggaatcaa

SEQ ID NO: 373601 - DNA, 290 bp, Zea mays
gcaagaaggtaaaccttggattatccgagggttttacaaatgaatgagtctaagctctaccagtatgatctctccaaaattctgtaccttcctgtcaccgtcgtccttcactactgaggaaccaagcgagaagcagcggtcttccagcttttcctatacatttcccttcgcctgcccccaaatgttttgtgaatgtatggatctaaccaagctacagcggtctattgagaattctgaaagcaatgagaaccatcaggcggcactttcaactgttctgaaggaccctatac

SEQ ID NO: 373602 - DNA, 306 bp, Zea mays
gggccgccctttttttttttttttttttaaaaaccaattacccccccggcattttggaggggaaattttattaccaaattttaccaggtaccttaaggtttaaggaggaccttgacgggggggttaccaaaggggtttaaaggaaaaactttggattggtattaaatatttggcggtttggaaattttggttggttaaggggcccttcctaattagaaggttaagaggggttcttaaacttattagaagggcggggccaacgggggttaacccccattcacattaaaatggcctggaacctgggga

SEQ ID NO: 373603 - DNA, 522 bp, Zea mays
  unsure (1)..(522): unsure at all n locations
gcagccgacgtcttctcctttatcttcttccccagcgcactccatctcctcccagcgcgcgctctgcttcttcttcctctccagccgcggcatcggctgctccctggccaccgcgcctctctctggtcttcctctctgcacggtttcaagcttctgcgcgctcctctctccctcccagggccgagcatccagctgattttccccgctgtgagctcggcgcccagccgttcctctcttctccctcaagctcgccgtggagcttcttccccagccgaggcccctgctcgaccgtgttcccttgcgtcctcccctgcatcgcgccctccctgctccacctcccatggccgcgccttggaatttgccgaagcctggatcccctcgacaccggagctctctggcttacccctctgcgcaccgagtttctcctctgcgcggcgcgcctgggatgcttgccggtgctcagctncaccgcgcgccatgaagtncctacacgcaagttgtccgtcggacgagctccatcat

SEQ ID NO: 373604 - DNA, 285 bp, Zea mays
cccaaaaggggcgggggggggattggattggtggcccaaaacgttccgaaacaaaaaaaattcttaggggttagggaggaattggccccattaaacccctcccccttcaggggtttttaacccccgggacgttgggcagggggggccccttaatggtccttttcattacccttctggccagggacccctgtttgcccaccgggaacccaaaccccttgcccttgccggaccccccgggggaagtccccccgaccccccgaaagtacttttttgggttgggggggt

SEQ ID NO: 373605 - DNA, 433 bp, Zea mays
tgattaaacttacgagcacagcaggcagcagccgaaccagcgaggtctggaaaaaaacatgtgcaacgtaccacggtattttaaggtgtttatttgtattacagaatactttgttttcaaaaacgtagtattgtgaatatcatattattttttaagtatttgaaattccattccagcacaaagtttttatcacttgactaactccttatacacctacactaggatactatggttttatatgttgtttccaaacacatgttacaataatataattcaaatgttgtaaaaaataccctagttttgtcatgagatttgaatacaatagtattaaaaaaccatggttttaaaaaactttactttcaaaccctagttgtgtgcgtattggcaagtttacgactctgtctttgtaggacagtctacctaaaaattggat

SEQ ID NO: 373606 - DNA, 237 bp, Zea mays
cttacgtttggtctgactcctggtccgacgcgtggggggacgcactgtctgcctagactggttcgatcacgccaaactagcgtatgtcatgagttctgcctgatagggaagctcctcttgtgcatactgcatatttgatgcccatctgataatatgcctacgctgttatgaggaaggctaaccgattgatgctgaatttgggcacacctgaatagttgtaggtggtcacggatgacg

SEQ ID NO: 373607 - DNA, 181 bp, Zea mays
atcgcgtacgcgtgggcggaccccacccccggggtggggttagatgaaaacgcgggtgcagaccccacgtactacaacactcaaaatagaacactcactaactatcacaccaccaattttggctcccattaccaccttcttgaatatacactcccctccattgagaaagatctactcaaaa

SEQ ID NO: 373608 - DNA, 264 bp, Zea mays
gggccgccctttttttttttttttttttggcccggcaaaatggcggggggccggcccttccgaattcttaccagcggggccggaaaatgggggccaaataacaggaaacctactctttaaccaaaccaataattgccccccccagaagccaatttgggtccaccagggttattattattccaaaaaggaggttctggccggtttttgcccctttccaccaccattaccaccaccgggagggggggggctgaaccccaggggggg

SEQ ID NO: 373609 - DNA, 325 bp, Zea mays
cgaaaagccaggggcttttgcttccgttcccttaaaaaagggggcaaaatttcccttccaattggcccattccccaggtactttggaaaccccaaaaacctttttttaccaaattaaggggggtggccaaaagaattttttctggccaagggtaaaaaggggttatcccgcccccttaggggggccccggtaaaacttccaactttttttggggtttggcccaccccgggggggattgattccctccaccaccttagccctttttaaattttgaaccaaaaccaaaggggcgatttcccttttggttttgccccggtcatttttt

SEQ ID NO: 373610 - DNA, 347 bp, Zea mays
aaccaaaaactgggaggctccccatattaactaacattataccatattaacattgccccataagcaaagtagggccgcagctgcaaaggagcagttgcagcatacacctaaaacaaaaaaaaaacatttatttacaggccccattttgccagcagcagttgaaaactgactgcacaagaaaagacacctgcaattctggccacgagaccaaaacgccggcccattttagggagccctgttgggcaccggacgccactgcctgctccttccttttgggccctgctgccagctgccactcctgggttgctggggctgcccctggcccgggttcctgggctaaaagctcc

SEQ ID NO: 373611 - DNA, 334 bp, Zea mays
ggccccaatgggttttggggttaaacagaaaggggtaattttaccacattaggcgggaaaacaaaattattttttactggtgccatgggagggtcggggggcgaaacccccattgggaaaccctttgacccctaattggggacaattggtttagccaggaattatttggccaattaacataaccaaattatttttggttggttaggaaaccaaaaacatggttggttgaccggcgcccacgcccaaaggggccaaaaattttgggcccaaattggggggaccaaatcggggggcggggtttaaaccgggggggggggtttgggggcccccccaa

SEQ ID NO: 373612 - DNA, 506 bp, Zea mays
cccacgcgtccgcaacccccgactcctccggcagcccggaacgactcgcgccgcctccggtcgcgccgggtccaggtaaagcggcttccatctcctcggtctcagcgcgtcatcccctcctccttcctcttccgtttcccttagggttggagtagacacgtcggctcaaggatccttcgagggtcaggacacttattgattttgaacaaagatctagcatggaaccatcctcacagcctcaaccagtgatgggtggttgggtcacaaccttatcctgctgctgctctctatgtgccactacctggagctcttgctgttcctcctggctcacagccagcagcagcattccccaatccaactcaactcagtgctcagcaccgatggtgtaccagcaggctcagcaatttcatcaacaacttcagcaacagcaggaacaacagctcagggagttctggactacccagatggatgagaatcaagcagcaaatgacttcaagatccacacc

SEQ ID NO: 373613 - DNA, 322 bp, Zea mays
gggaaaaaaaccccataccggtaaaaaaaacgggccccggttttggggaaccaacccaaaattggggaaaaacggcccaggggcggggaaccaggggggctttggggggcggatttttgggaaggccgtttttttaagggggggggaaggcccaccctacgggggaggttaaaatccccaaaattgcccagaccaggggaggtgggttaaaaaagggggggacccggggggcccactagctggctggccggggccctgggttttttcaaaaaagaagggggggctcaacccccggggggggggggggggggccccccagggg

SEQ ID NO: 373614 - DNA, 320 bp, Zea mays
gggccgccctttttttttttttttttttttttttttttttttttaacaaactcccgacctgggaaggttttttcccaccagtttaatatccaaatccgggggacccaacagcaccatggccggggcctaaggaatggtttaataaaaaattgggcccctaacccaacaggcgggggggggggggaacaaggaccaaacccggtccgggaggatctggacccccaccggaccaaagttttgggacaattggttttaaggcagttgaaggagctttggaacccgggcgtgggcaaacgggtcctggggaaaggggcccgggg

SEQ ID NO: 373615 - DNA, 286 bp, Zea mays
ggccgccctttttttttttttttttttttttttttttttttaaagggacccccggggggttcaagggcccggatgcctttttggggcaaaaaacccttttccgaaagaatgggggtggccaaccttcacaaacctggggtaaaccctcccccaaaccccaggggaattggcacccttttacccaccaggttacccaaattttccgtataacccggaaaaaaaccctttggccaatggaaaacccccctaagaattccaaacccccgggccatggttgccccccacc

SEQ ID NO: 373616 - DNA, 188 bp, Zea mays
gggaccggcggggcctccaacaaaagctggattcccccccttccagatgggtaaatttaagcccccccaaattttggggttccagcataaaaaacctcctggggacctgaatcaaggaaaagttttttcccccttaaaaaaaggggcccaaaatgggacccccccccgggttccaggggaaataggga

SEQ ID NO: 373617 - DNA, 331 bp, Zea mays
aaaaaaacaactgacccgggcgggcctggtggaatcccaaaattggttaagccaaaatttcgggccatttttttgggcccccccggaaattttaccttttggaaatcccaaggggaaatcccaaccctgggtttaccaccaccattttgattgggggttcttggcaaacccttgcaaggcctttggggggtcacctttccggttttttttggaagggggcccatcccccttattaaattggtccaggaagggccctttggccttgaaaaccgcttcctttttttttttggcccgcttggccgggttggccccgcccttggttttttttttg

SEQ ID NO: 373618 - DNA, 234 bp, Zea mays
ggcctaaattcatatttttggaattaattccaattccagggacccattttgcccgtagggaattcaatcccattgttttgtgggagagaaaccatggttgctgctgctgatgataatagatcctccaccgttggaaaataaatttagatcccaacctggacctcccgggaccattccgtcccccaaaaaacaaaatttaaacctcaaagctccgaccagggaaaagagtaaccg

SEQ ID NO: 373619 - DNA, 346 bp, Zea mays
aaaaacgacggggccctgattttatttgcatgcatgggcaggtgggccccattttgcccgacccatagggctggggcccttttggttggggggggactaaccacccgggcgggcacatgcccatggattcacggccgtttttaactacccacgggggggggggggattaattattattagccccccgggaggcggaggggacctttcccttggccgggtcggggaggggctggattttccccattttgaacatggaccggccaaagctgctaaaaaagggggcccggctgggggcaaactggtccaccacgggcggggggaccccctgggcctgggggccccactt

SEQ ID NO: 373620 - DNA, 249 bp, Zea mays
gccgccctttttttttttttttttttttttttttttttaaaccaggaatgttttaaagcaccagcccacatagggcaactgggccccgaaattattggccttgggggggtcctgggaccaccaccccccaaagggggttagaaacttaaccttaggggttggaaccccaatttaacccaaaaaaaccttgccaggggggtggggggctttgctttaccccggggggggaaaaaagcccaaaaggttttt

SEQ ID NO: 373621 - DNA, 294 bp, Zea mays
ggattaaaagctctttgcatggggataactagcatttttacatcagcccgatccatttggtcattttggggttgcaagatccgactacccccaaacaagccaatgcttttcgtttgctcaaggctgcatgcatcacccatggttaaaccaaagcgtaatgaaagggcagggaccctttcagccagttaaagaaaccccgggggcgacattgggggcatcgttgctttttcctgggggccaaccatttccaggatctttttaagggtggcctgcaactttccatgactgccttcc

SEQ ID NO: 373622 - DNA, 515 bp, Zea mays
cgtacgcttgggtttttctagtttagattgctaggctgagtgatatgattgatacatagattgcgtgactcctttgcggttgcggtagggatatgaacacacatagttaaaatgacaattgcatgtatatatattttatttatttcatagtttataactatataaaaaattcaagttattagttttaagtatttttttaggttgtctaattcacacacttttaggcgtcatcatccccttcattacctaatgctgtaaatggtaggtctgttttttgttttctgtcgataggttctatcatatatgtagatggtgtatatctgtgtttagacaattatgtatttaaaaatctagatagatggtgcatatgtatgtgtagagaaaacttatgtattcaaaaaatgctaaagggacgtaagagtcatggactacgctgctcttgctatgtgtataatcacccggccaatgctagctttgattggaagaagaacgtacatctgctggagtcgtgttgt

SEQ ID NO: 373623 - DNA, 355 bp, Zea mays
cccacgcttccgggcaaagctgcagctgccacagcggggaccacgcacgctgcaccgcaccgcaccgacgggtgacacctgctgtgtccaccaaccgtgagcccagcaggcgaccgacgacgctagcttagactaggaaccaacaatggccacgcgccacctgctcctcctcctgctcgccgcgctgctcccggcggcggccacggcggacccggacgcggtgcaggactactgcgtgccggacacgggcggcgggcgcgggcgggccgtggatctagcgctgctcccgtcctacccgtgcaggagccccgccaacctgacggcggcggacttcgccttcgcgggggtgcgcgcc

SEQ ID NO: 373624 - DNA, 284 bp, Zea mays
ggggccgccctttttttttttttttttttttttaaaacgggcccgggaccggggttcccccaaacctaacctccttaaataaaattcccctcccttttggggcctgccccattttcaggggccaccccgggtggggatcctttaccacccctgtatggcgggtggccctttccgggccttagccttggggccttttccttgtgggtccataaggcagccttttttccagttggcccacataaccggtgggttggttccctccaaaatggacccctaattccagt

SEQ ID NO: 373625 - DNA, 300 bp, Zea mays
ggggccgcctttttttttttttttggccataacctcattttttttttattgcccttccagccttgcaatggaaaaaaccagggtggccaaaaaaattggggccctggattccacctggcccgtccttaacacctttccattttttaattccaccaccccatttttgaaaatggaaacccttttcaaacccctggaaaattttttttaaggttcttttcaaaggtacccccttaatttcaggttttattaaccctgagggggaaggccaaggttggaaatggaaggggggtggcccttggg

SEQ ID NO: 373626 - DNA, 123 bp, Zea mays
tcggatgaatgtacatatggggcaacattggggtggactgactggcccgtggaccgcacgcctaccaccgcgcgatgcgccggatctgccagggctggcggagcgcccccttggcgccggcct

SEQ ID NO: 373627 - DNA, 456 bp, Zea mays
ggagccagctaaaccagtccatacaacaccacctttcaagtgacaagagtttcgcaagaacacagcaacagtggcgactgcacaagcacaaacgcacgcgcagccgcgctccacaagttaacttgaatcgtcacatacatagaaataggtcactcagcctagacggcagcagcagcagaaggaaaccctcaaaagaggtagcagcagtagtaggcgagcaggggagccgccacggcagccaacagggcggtcgccgtcatcggaggagagctcgccgccgcggcgcgcggtgaaaatgccgccgcgccaccgtttgatgaccccccggcggcggacggtgcaggtgctgcgaatgacaacagcttggtggtcagaaactcagaacccaccacagctttattacagttggatcataacagcaactgtattactgaacgccactaccccccgcccccc

SEQ ID NO: 373628 - DNA, 249 bp, Zea mays
ggcaacaggaccagttgttacctaatttgccttaacaaaaaataaacgggcagttttggaggcaggtccctccttttccagagggcttgatccgaaatggtatttggtaattttttaagatttccttttggttttttaggttttttttggcctggttccccccccggaaacctaatgggggtcccgcctgcattttttggtcctacaaaggcaagggatcctttggccttatttttccgggtggagggg

SEQ ID NO: 373629 - DNA, 198 bp, Zea mays
gggccgcccttttttttttttttttttaaacaaaaatggtggccttaattttaccaaagatgccggtggccttgccttaaataatgcaattttttgggctggctgacccattaccagaatatccattggaaaaaccaaattattaaaaccactgggtttaggctttaaaaattttttttaggctttttggaggggctt

SEQ ID NO: 373630 - DNA, 290 bp, Zea mays
ggggcggccctttttttttttttttttttttttttttttttttttttggggggggccaacaaaaccttggtaaggaggaaaaaattggttccccctttggtttaatccaacacccaaaaatggatttttggttcaccccaaaacagaaaaccgtgggggggtccagggttgattgggaaccaagggaggggccctttatggccccttgaaaaaaattacggggggaaacacccccgaagggggcggtgaaaaacccgtttgggggtttgggctttccctggggttggttt

SEQ ID NO: 373631 - DNA, 147 bp, Zea mays
aaccacggcattccatttggggtatctaacattcattttttctacgaaaatttaacaaacccacctcagttgtttccggtccacaccaaaaaccgggcgcatttccatcctttaattaactatggataaaggctaatattcggtttt

SEQ ID NO: 373632 - DNA, 223 bp, Zea mays
ggggggaaaaaaaagcaacctcaacccatgttttttcatacaagttttggcttacataaaacttgggtaaaacataacccccccattttattgtcctaataaataaagggggttgggagggaaaaggggtccccagcctgaccggacggaccaccccggggccgggaccccccccaggcgggtccctccataatttgccccctcccccctaaaaaaagttagt

SEQ ID NO: 373633 - DNA, 345 bp, Zea mays
ttgccctcgcgtgcggtttaagcgagtgttcagggaggccgggacggaggcgagcacgacggacggcgccggcgtcggaggagaagaaagaagatgtctccagctctcgtatgtgccttctcgccccatgtgcgatctggtcggcgaagcgctcatcgccgccgtagacgcacggcctcctactgctccttctccgattcctcgcctggtacaggcgatctatgcgcatggggctgatcggatggcacacctcctcggcgatgctcaggcacgggacaggggccaagtattccggatgcctgcagatacagacgtgcggtttatgacgaggagactgccggattc

SEQ ID NO: 373634 - DNA, 206 bp, Zea mays
ggccggccattggggtgtttttcccaaattaagggtcccccaaaacccttgttaaccggggggttccttaccaaaaaattcccttccggttgggcttgccaggacctgacccccccgggttttgtattaaaggttttccccttggattaaccaggggcctgggacctttttttgttccgggttttattggtattaggggggggttg

SEQ ID NO: 373635 - DNA, 355 bp, Zea mays
tttaaggggcccccctttttttttttttttttcaccaaaatttttatttggtaaaagggtaaaacttttttaaaccaaattaattatcccatgcccgaagggtttcattaaaccatggccccttataaccagttttgcccccttttaaacgaaaaacctgccaaaaccttttttatgtaaccccccccaattaaccccgaaataaatgttcatgaattccaaggccttggtatgaatggtttaatgaaccttaaatttttattaaaaacccttggtaggaaaaattatttttttttttgccattttgccccaagggtggacccccattggttcccatttttacgggaaaaccacc

SEQ ID NO: 373636 - DNA, 492 bp, Zea mays
aaaaacaccaattatctcttttttactctcttctcaggccaattcaaatggcaaaatctttattgatacataaacaagaaggaagaggtacaaacatataatccagcagcaggcaaaacacagaaactctctcttcagcttgtactctcttctcaggccaattcaaatggcaaaatcttcattgatacacaagcaagaaagaagagatacaaacaatcagcaagggcccccaaaagccccatgcttggacactgttagctctggagatggacaaatatttccctccagagcaccaccacagtagggcatatccatgtgactcccatcacagcaaagcaaagcatgcccctctttctctctctctgacgccctcacctaacctcagcggcatcaacaaaatacaaacaaaccactcagaaacaaacaatttttgccctcatgaatatgaacagaaactttgcaggcagggctgcatcttggcaggagcactga

SEQ ID NO: 373637 - DNA, 319 bp, Zea mays
cgcttcctctgccgcgcgttccacgacccctctctgggagacgaaactcggcgccggcttggtagatacagacctgggattgccttttcctagttcagcatggagggcactctagttcagtctgcggttgttccaaccgtttacagaagcagctcaggtcggttccgtgtgcgtgcaagggccagaaccaatgctacaatggtgcgaaatatgccaacaaggactcttactcttggtggtttccaaggattgcgtcagacaaactttttagacacgaggtccgtgatcaagcgtgactttggatcgatcgtggcaagtc

SEQ ID NO: 373638 - DNA, 434 bp, Zea mays
ctggattataagggtgaacaccacaatgaagctagtcaggcggagtcagctaggaggatcctagactattggggtacctgggattaattctacattgcttgattcaaagtagatgccccccacattccaagataaggattagtaaaaagggtttatgggcttgcccttttggcaaccataaaactctttctatttaatttacaaaagcattaactaaggggatattctataatgccatcatttattgcctaagagagttgtgagacaccacatcttaatctggattttaataaccaaagtgcctttaaatgaaccatacgtggtttacattagtgggctagtgggtaaaggatttaacatgctagcttaagcaaaaatgtatgtttaatagaaagtcactggatgatgtttctaacttgtgtacagcgattttt

SEQ ID NO: 373639 - DNA, 261 bp, Zea mays
gccccccttttttttttttttttttttttaaccaaaatccccccaaaacgggggtttcaattaaaagcaattaaccttgggtccgggccctttcacctgaattgggtcccaaaaatcctcacggcattttccctggccccccaaggcaaccttaagcctttggttaaataaggctggggcttggcccacccccccccttggccggcccccaagggaagggcctgtccaaaggccccccctaatttttgttgagggcacctt

SEQ ID NO: 373640 - DNA, 246 bp, Zea mays
aaaagggctaacggtttatttttttttctcccaaaatttaggaatggaccataaacaaagggcaaacccgggggtcaaattggccagagcccaccgacaaggaatccatatcccttaaagggaccttttatatatttttaaagcccccctatgctaatgcacacaactaaccctacaaagggcagggttgtttaatcccgcatatataaggcccggtttagcttaccaaaaaaagggccgaacctt

SEQ ID NO: 373641 - DNA, 393 bp, Zea mays
ggcccctttaggggggccccccttttttttttttttttttttaaataaaaggccagggcttgggcctttttaaaaaacctttggccaaaacccggggaatttttttcttttccccccccttttttttcccggggccgaaacccccccccgagggtttttttttggggccccctggttggttttaaaaggcccccccctttttgggggcccttgttttttggaaacccatttggggggttttttttttcaaggcccccatgggcctaaccgggggcaactcccctgggggggtttttggggggggggtaaccctgggccgagggtttaaagaaacccaaggccgtttttttgtgggccaaagaaaaaccggggggccctgtttagccggggggt

SEQ ID NO: 373642 - DNA, 152 bp, Zea mays
ggggcccaccaaaaaaaaaaacccctttaaaaaaaaaaaaaaatccctttttacaaaaaaaatttttttttcttttccccccgccattttttaaaaaaagggggcccagaactgccccccttgcccgacccggggggggcccccggggttcc

SEQ ID NO: 373643 - DNA, 211 bp, Zea mays
tcgcccacgcgtccggccatgggcgcatgtcctgggcaactttgtatgatatatgggagggtgaataggaaagtcaatttgtcttgtaacaagggatttcttctgtttgttaacgggatctcttgtgtttgctcgctcaactgatccctaccacgcacgcccactgacctcaaccctgaccctagctctaaacaggcgctgccctatgtga

SEQ ID NO: 373644 - DNA, 298 bp, Zea mays
agtggaattgaatctgatgtgtggcctctcttgctcacaggggacatcagcttatactgctatgtctcagggacgagcagagagactgggacaagtggtcccagctcatgtggtgatcacctgggagacacctatgctgaacattggatggacgctgcctacagagcaactgaagggcggaaatgggaacctttccatatacctccggagatcaagcatgtgcatactacagattctagtggcgaggcagcagatcgagctccattgagatggatgcggttactcagctgatcaacct

SEQ ID NO: 373645 - DNA, 206 bp, Zea mays
atctagtttatgtgcgcttctacaagctagcatagactagggcggctagcatgctatgccacgacgagcagagccatgacaccgaagaagacgacgcgggacgatcgaagggcttcgttagagccaatccattagggagagaggacggctgcagctgccggttcatggctacctctctggtgcggcaatgggaacaacgctcacct

SEQ ID NO: 373646 - DNA, 496 bp, Zea mays
tcgcttacgcgtccggccacgcgtccgtgagtatcctcgatcaccagatcctagcccaccaccgccacggacttcactgccaccccatataatccccccaccgacggcgccaccacccgcaatgccactccatatgttctcacatctaccacctccagctggtacatttgtaccttttcctgctggaccacctggcccaatgtattgcacttatccatcttttactcctgttgtcaactttcccatgaccagcccacctggtttccgtaatctaaccccgcctccatcttttcgtggattagctggtacattctatggccctcagttccccacggcgcccccaccagcagacaggaaataagagtagtaacttacctgcagacttacagtgccagcagctttggcaagtatcataccagtttttttctggttcaacagaggatacaaacttgtggggatgcgtaccatgtgttgtagagctcaagagactgttcta

SEQ ID NO: 373647 - DNA, 316 bp, Zea mays
ggctaagggaacattaaaggaggtggggggctttatccaaccataaaatccaaaccttgccccccttggggtggccaaaaacaaaccaaagggccaaagaagggttttcctaacacggggcaaaatggtgggccacaggaggaaacagggggacccatccaacaaaaaccctaaaaccttaacaaattaatcttttaagggaacaaaggaggcttcctgggagggttgggcccccttaactttgggttttttttggggggcaagcttcggttcaagaacttggcctttttaattaaggcccgggaggcccccaatt

SEQ ID NO: 373648 - DNA, 276 bp, Zea mays
ggtggaaaagggggggggggccaaattggattggttgctacaaaatttttggatggaaaaaagacccttcccgggggaaaaacctttacaaaacttttactggcatggcaccggttaccggaaattaaaccggtttattattcccaccacctttaacatggaccggaaattaaggttaatttaaatccctttggggttttggcctaacccctggcataaaacccggccttcaagaaccttccaggtttaaggtggtggaaaccctttggccctttt

SEQ ID NO: 373649 - DNA, 220 bp, Zea mays
ccccaaaaaggtcctggaaaggaaccggttggccggaggtcccaaaaaaaaaaaatgccccttaactggggggctttttgggaatttaatacccaggttttaaacccttggggggatttaaaatggaggggtttggcctttaaaaaaagggggaaggcccttatatttaaaaaggaaaaggcccccggggaaaggggctttaatcccctttggggggggg

SEQ ID NO: 373650 - DNA, 248 bp, Zea mays
ggggcccgcccaaattgggggggttattggcaaatttccagtcttccccagggtttttttccaaaagccggggaaatccctggggtggggttttccggttggttaaccgggttgtttaaggttttaaggtgaacctccaatcctgatgggccctaactccttaaaagttttttttttatttttgaggttgaaaggggggaaatcccttaacacaagggccccttggcctttaaaacaaaaataggccc

SEQ ID NO: 373651 - DNA, 377 bp, Zea mays
aaaccaaaccatttattttggggggtggttaaaatttcttttggccttggaagagggcaaaaggggaaccccaaaccttcttccggtttaaggtggccaacccaaaaccttatgggggggttatttccttcctaaaaatttttttaacccaggcaaccccgccaaacaaaaaccgctttttttggccctttttttaaaaccaaaaaaaggggctgggaacccgaaaatttccttaaaaaatcttggtggcccaattttaaccatttttcctttgccttggcccggcccaattttttgttggcccaaaaaaaccccttttttttgtttcctgaaaaccccaattttttttccggcttgggggggggttccttcccccc

SEQ ID NO: 373652 - DNA, 231 bp, Zea mays
gccgccctttttttttttttttttttttttttggaacagccggccttgttttttttttggaatttaggggggtaccaaaaggaccctgtttggccgccttttaattaatcgaaaatagagaagggctgggaaaaaaaaaaaaaccggttttggaatttttaccaaaggcaccaggttaatgctgtttagggagggagggttttttggcccctttacttggaatcttaagac

SEQ ID NO: 373653 - DNA, 308 bp, Zea mays
gttactcattcgcatcgtttgttacggagatggggacggacaaattagcccattcctaaacgcacaggatagtgttctggatagggtaatgaccatggaaattgcttctgatcatgatggcgatacctgtggtgagaccgatcaggaccacgatcaggctgatagtaaagctgatgggacagctgcttctggcacagtctagggtgagatcatggatgagacaacacagatggctgctcctatcgctgatcctgaaactgaagaggagatagcagttgaggattcaattggggatgggactacgccat

SEQ ID NO: 373654 - DNA, 278 bp, Zea mays
ggttaaacctggattaaccagtggccgaaccaattttacctggcaaccaaagggggggttaaaacccccctttgggttattgggtttaccaatttttaattttggaggttttaccccaatttttttagttgccaacaaatggttttaaacccaacccctggttggttaattttgggggtttttggactgggggccaacttgaagggaaattttttttcttgggcccattggtacccccattgttttgggggtttttttttccatttggcttaatggaa

SEQ ID NO: 373655 - DNA, 357 bp, Zea mays
ggggccgccttttttttttttttttttaataaggacacatttttccatttcaatttggggggggaaccccccttaaaaaaaagggtttaaggttttaccggggtggtatgggaaaacacacacaggttttcaataaaaattttcttttaaatacaatggttaatgggaggaatttaaccgttcccggggccgggggccttaaaagaaaaatttccggttgttggatttttaaaaccgggggggggggccccaagggggagaaccggggcttaacgttaaaagggcaaatgggggttccaacgtaattggggtttgggaaggggttaaccggttgcaaattttcttccttaaatgcaa

SEQ ID NO: 373656 - DNA, 264 bp, Zea mays
ggggcatccaagctccagagggcgacgttcccacgattaagggcaaatatatttgttggtccaaaacaaaatcacagttaacgctgaacaaaacagttggtcacgagtccactttttactacgggacttcgtatacaaaatggggggacaaaaaaaattttttagaagggtttcccgaatcgcagcatcatttgggaccatcaccaaggcccgaaggcattcttaagttttgggccaagtaagacatcctttttttaatggccg

SEQ ID NO: 373657 - DNA, 489 bp, Zea mays
agggactatagaagtaaagagtaaagaaatacttgtgccctttattttattttttttgttataataggttctattgtactgctactttttccgtgtaaaagaacttttgttttggatacttctcttttcatgtaggcatatatcagtatatcaatctatgtttcatttactcttagttctttcttccttttgaccagcagctcttgtctttgtagtctgagctggaatatctatccttcatgtacgttaaccccactggttttgctggagtaagaaaaagagttgaagacttgtacaaggcccatgaacaagaattgcaagattacgatactataacaccacatctgcttgatgtagtgttgtgctagcatgctctggtgttccctatatatttcttacacagttttctaactcatttcatatgggatcgtacaataaccagtctgctacacattttcattagttccaaaatttgatggtggtatttta

SEQ ID NO: 373658 - DNA, 362 bp, Zea mays
ccgaaaaattttggtttggttttaaacgggaatttgccttaattttccaatcccggggcccaaaaagaaggaatttccctttaattcagccccagggttgaaaaaaacttggccttttgggttgcccccaccattgaaaataagccccggtggaaggtttttttcttgaagttataaagggttttgaagggatgcccaacaaacttattttcgacatttgccatttggtcatagggcatgccttctggaaggggaacaaccttggtccaggttgggccttcccccttttgaaattggtcggttaagggttggggggatccatccaatacaaaagttttaagggattccgggaggcctttttt

SEQ ID NO: 373659 - DNA, 484 bp, Zea mays
cttttactaattttctcaggtcacaatctgcaatgttagattagatgcacctctcgccaggctgaaggacgtaccagttactgaattattttgtgtggatgtcgcgcttgtattcgagaagacgatgcatcaccgggcaccggacgcaccaattccaccgcccgaggcagatgcaagtgaaggcggctcaggactcatcccgtccgccttgctgtatccttcgcttgacatttgctgtacaaagaaaaaaaggcgtttctgacagtgacgttgaaatcttgtcgcgagcttactagttggctggtgctgtcatgtcaggaaacggatgattgcagattaccgaacattacctgttgggaagggaaaaaacaaacggtgctcttgcatccgacgcgattacaagttggcagcatcttatgccttttggcgatcaagtccacaggagagtgctcattgcatctaaaaccgtgaagtgatgggtgct

SEQ ID NO: 373660 - DNA, 287 bp, Zea mays
ggactggggccctaatttttaatgggggtcggaaaataacaggccattcccgaatccgccaggcaataacccggttggagataaataaaaccagcaggggagcaaaaggccaaaaggaggggaggggaaaaaaccattggaggaaggaattaaacagggccctccagggggttaaggcttgacagaaccaaggggttaaattggacgggaaaaagggatgcagggggggaaggccccattaaaaattaacggaaagggatttggaaccccaagcctgggttttcttt

SEQ ID NO: 373661 - DNA, 149 bp, Zea mays
aaaaagggaaaggggcgatttcagtttttaggggggaatttgattaaggttagaattaaccaaccttgattaaccgttttacccaaacataaatttatttccaatcgatgcggggcagggggtaccaccgggctaccatatgatttttt

SEQ ID NO: 373662 - DNA, 411 bp, Zea mays
cgaaaccttaggccatggctagccgcggcgccgcctgccgctccatgatagacggcgatcgagcccgcgccgcatgcccataattccaccgccgcctggcgcctacgctcgacggttacacttcccgccccctcgcgccggtccgtccacgccttcgatttcgcgaccgccaggccgatggcggcgatgtcggggtccccggcggaggacgtggtgaagctcaccgggcactcagcgacgagcgcgcaggcgtgctgtgagctctcccagggtaccctcttctgccgcacttgtcaggagcgctagcaagcactcaacgcgcactggtgtccttaaatgcaagggttggattctttggaggctgcatcccttggaattcgtcgggcttgcattcttttccatgcattttgc

SEQ ID NO: 373663 - DNA, 283 bp, Zea mays
gtattggtattaaaaaacaaaaggggggcaaaaaatttttcccaaccccccatgctaatggggggaaccccagttccccccctaggggggtatccttacttattcaaacgggccccacggggggcaccatgggaggttaaaatgcttccaaacaaaaaattttaaaaacaaaacccgggttgggttgtttaacaaaaaacccaacccccccccccaaaatggcgccctttaaaaaaaaaccccccaaaagcaaatggcccccaaaggcccgttttactaaaaa

SEQ ID NO: 373664 - DNA, 268 bp, Zea mays
ggggcccaataaatcccgggattgatttcccccaaaaacccggaacttccacgggcggaatccccacacacccgtttgatcccgtcacctttgccggggggaaataaaaacctggggcgactttttttgttttgccaaagttggaatagcccgatggctttccgggttaaatccagttccagttttttttttttttccttggaataaaaggttggaggtttaatttggcgccggggcaaatccgggggggggcccttttaattttaaa

SEQ ID NO: 373665 - DNA, 357 bp, Zea mays
agggagccccctgttggaatttttttggttaagggcaaaccctggggaggaaccagaagccagcctatgtaatggaaccaaattggggaccacaccaggggaaacgggaaaacgaagggttggcttttggggccatttttgggggacaccccaaaccagggggccctttttttaagccttttttacaataccaaaacaccaccgttcttcaaaatcggggccttaaaaaatttttaaaacccaacagaaaaacggggggttttttttttttttttggcccaagaacgtccgccaaccaaataaatttctttcctaaggggtaaaggaacaacccgggggaaaagttggggggggggc

SEQ ID NO: 373666 - DNA, 424 bp, Zea mays
  unsure (1)..(424): unsure at all n locations
tttggctccaaaagaccaaagtttgagcaggatggagcaggagatattgttatggagccacacttaaccgaggataaacctgtgcggatagaccaagaatcatcgtcatcatctaatagggatgctgaggcaagcacatctactagcatgaaacctgttaaaactgaagaagcaggagcagatcttcttcccaaagagatgaatattatgacaattagcgacgataaagctgatggccataatgataaggaagggagagggtgttacaattgatgggactggaacagagacagggcagataattgtgacaacatangaggtcacaatgggaagccaaagcagaaggtctcatacatggcagaattggttggttggtactggttcgtcttgtatatggtttccaggcgaaatgcttggaaactga

SEQ ID NO: 373667 - DNA, 285 bp, Zea mays
gggccgcccttttttttttttttttaccagtttacccaagggatttgatggataaaaccggaaattttttaagaggttccagtccaacctcaaaagggggaaggaaaattaggatcccggccgggcccaacttggtggtaaggataaaggcccggccctttattccgggttgttgccaccccaatttttcccattccttaacccggcaaggggccccacctgggttggttggggaattggcctttggcaaaagcttttttaaccattttttttttaattaatttt

SEQ ID NO: 373668 - DNA, 319 bp, Zea mays
ggaatccaacctggtccctttttttttttcaaaaaaaaaggcccatttggggaccaagggtccaatttaatatttttggccagggttcccggtttggtggaaaatcaacaaaaaacctaaggagcaagaatttttttttaccccacaaatgcttggggaaagggtttttttgggggtaaaaaaaagaattaaggaatccccccaagccccccttcaacaaccacaaagttgttcaaaacacccaaccgggccacccaatgcttcttgacccggggcccttacccttaccaaggggacctcaaggcccggggccggttgg

SEQ ID NO: 373669 - DNA, 314 bp, Zea mays
gttggatccttttgggggggccgcctttttttttttttttttttttggttggttcaaaaaaaaccggggggtttattaacacccacccaaccggtccgggggtccttggttttaaaaacaaggggggttaaaggtaaaaagggttcattccattcaaggttgaaccaattgaatggtatggaccccaactggacccttttgattccattttagggcccgtggggggccaaagggggaaacttggcctttaacccaaagggggccggccgggtcccgggccaacaagggggggggtgggatttttggaggttccc

SEQ ID NO: 373670 - DNA, 287 bp, Zea mays
ggccaaggcccggggttccttaaaaaaaaagggcccaatgggcaaccaccaccgccattgggaacagggggtttgccttgccttaaccaaaccttaaggccccctttaaattaaaaacggcacttttggaaattttaaaaggaaaaggttttagggggcccggttttcctggggaggattttttaggtggcgcaaaaaagggaaccttccccctttggatggcccggggggccattaatttccttctttgggggttaagggccggaaaacccttaaacccttccggc

SEQ ID NO: 373671 - DNA, 318 bp, Zea mays
gtgtgatgtaaatttttcatctgactggcttctttaaatcgctgctggacagcggatcgattggctcgtcaaggtttggaccatcccacaaaatgacttttttgtgatcagaaagaagaaaccatgcaacacattttgttacaatgtgtttttgatagggaagtttggtttcataccctgtattttattgggctggagtgccttactccaggaactgcagaatctagtttttaagaactggtggcatagggtatgaacgaaaatttcaaaagcacaaaagaaaggattcaatttagttgtgatcctaatggcctggtg

SEQ ID NO: 373672 - DNA, 296 bp, Zea mays
aaacgctggggccatacacgtttgttaaaaattggccggggggggaagacgtgagcttggttcaaactcgggctattatttgtaaaaacacataacccgaccacactacacactgccatgatggggccggctttggtttttaacagccaacccaaacttgccccccccaccggttaataaacatcatcaagactaaaccggggtttttaactgccgcaccttgatcaggaccaagaccccaaactgccgatccaacagcctgttgcctggggctgggggaaatcctcctttggggg

SEQ ID NO: 373673 - DNA, 391 bp, Zea mays
tgccggaccggatcggccgggtcggcccacgcgaccggttatgatgagatgcacttgtaatctgaggggagagcgagacactgtgatgttacccatcaacctatgccttgcagattgacgcagcatggtcagggtgcagagcacagagacgcacgcctaggtaactaattctggccgtcgtgtcgcgaataaatgtgacgaggaggaaattaagagacccaccggccggatgtgatccactctcagcttggttactgaatggcaaccgttcagagcccctctcaacggtgtatctccacaaccggggacggaccccgagcttgacatatgataccggccaggtccagacgttggcgccattgatcatacgatcttggtgaccaagaacaag

SEQ ID NO: 373674 - DNA, 321 bp, Zea mays
ctgacgcttgggcggacgcgtgggctcgacaccttacagagccccgacccaaaccatagtccgtcgaccgtattattgccaccgacatggccgaatcatatgcgctgcaacaccgcagccgaggtcggggcgccatgttcgatgccaccgttggtcgacgaggaggccgatgccgtgatggaggaggctgcggcggacgctaagaggtggccctgcaggacctgggacagcgtgctacacatggtggagccagtgctcaaggtcagacgcataatcgcacggaagggagagctcattaaacgcctagtttgggagaccaaa

SEQ ID NO: 373675 - DNA, 330 bp, Zea mays
aatccaaaccttgccggggaaaggattcattggagcaacggtggaaacccaaaccatgggttttaaaggataaaaacgtggcctggcccctggacctttaggggaacaaggggccttttatttttggggccatgggccccttgggcacccctttaaaaccatggcccccccccaggggacctttaaaaccttggccccccccaaccccccccggggggaccttagggaaccgtttaaggttcccaaataataagggttaagtctttttgggttaagggcctggttggttttgcccttggaccaaataaggttgggtggtttttggttttt

SEQ ID NO: 373676 - DNA, 355 bp, Zea mays
tcttgtttggtctacgtccatttgcttgtccactaaccggctagtttactctgctttttgggttttccacgtctctacaattgtgactgttagagcaactccagtagttctctaaaaaatagcttgctaaaatcatgtttagcaagttgctaaatagctattggaagtaaaaaataacttagtttccaatagttgctcatatttaggaagtagttcgattttgaatctagctttagcggccctgtccctatgagatctgcctgatataaggttgagagcagaggatatgagggcggaagaaaaaaggtcggtcgatatgaattatgagagtggggggtccggtgacgcaacctat

SEQ ID NO: 373677 - DNA, 172 bp, Zea mays
aaccgggggcccaaatcttccccccttaacaaattggggtaagggccaaaagggccaaataggcttgtccggaaaaaattggggggaaactggggtccagggcttccagggaaatttaaatggtaaaaaaaattggaactttttattgaaataacccgggggttgttggggt

SEQ ID NO: 373678 - DNA, 571 bp, Zea mays
aaagctggtacgcgtgccgtaccggttcgccggttcgggcccgacccacccgtgcgcctcacgcgtccgcggacgcgtgggaaaaaaacatatagctgccttccatgatcctttgatgtgccttcgaaatctgaaaactaatcagataacaaatgttccctaacaatcttctactaatatttaatttttttgcacaaaagaaaaatataaaaataagcaaagcccaataagcatatatgttttaatatattaaacatttcatgtttgcattaaggacttggctcaaatacatatacaagatgcatggcattaggtaatgaattctcttggggtctggcaagggagagatgtttacaggggtaggaggtagcgatggagcatgtccatgacgcaggtaaggagctaaggaggcagaggagtgttgtcgggatgtccttcagccctggccgctggagcagctgaaaggacagtctcggatgttcttcagccctggcagttggatcagccgaaggggacggatgtgcttgcggcgtccaggacagacctgtggaagaaggcgctggcaccacgc

SEQ ID NO: 373679 - DNA, 114 bp, Zea mays
gaaccgtagtatttatcacatcaacagaaggaaacccaagtaaagaaggtccaaagaaaaggtccgaaaagattgaactcgtaccaggcagatcatcattattttggatatgaa

SEQ ID NO: 373680 - DNA, 320 bp, Zea mays
acccgtggaagggagactgggagaaacagacaggaaggagccgatactgcattgcctgcacccctacagctcccacagtccccggtggccaagcccccacatggcaccaccgcccgggggcctggtgctcgcgggtctgctcgcgctggtcctggcgctggcgccggcgccagcacgcggcgacaagcgcggtaggggcggggcgttcagctacatcgacgacggggaggagacggagccgttctccgacgtcttcccattgtacggcgaccactacccgcacgggttgtactacgtggctatgaacatggggaacccac

SEQ ID NO: 373681 - DNA, 336 bp, Zea mays
aaaagccaaaactacgtttgggattccgactttaaaagggacaaagggggccatatgttaacacagttaaacatgggcacttgggcattcctggtataaaagttacaactcctttacttggatagaaaaaccacacgggcagggtttcgtcctcacgaaggtttcctaataaaagctttggtcttcctttggaaattcatggccatggccatgatctgtctgcagtttgcttgaactaggttccctttttgaggatcggctgttgaaagtgcttttatggacattataattttcgggcaggccttcgttaccaatcccgggtgaaggtgttttgta

SEQ ID NO: 373682 - DNA, 238 bp, Zea mays
agtgccaggggaatttttgcatcaaatttggctttcactattcaggaacatgatgggactggtgcagagatttgtgcactctctgtggaattattcagggcactcaactgaccagctaggattggtacaaatctggctggtggtggactcacgaccggtactaaagtgaagggaacattcagtcaatatgcatcatggctttgtacaagggcactaccatgggggactccattatctg

SEQ ID NO: 373683 - DNA, 317 bp, Zea mays
gggcccaaaacttgggttgggattttttttaaccccccggaatttttttggcggaaaggaccgggaagggtttgtttaaacaacccgcttcaacatttttgaaacaaaaaacaaaaaccccctgggggaaccttttaagggaacccccttcccttttttaattatgggggggccaagacccatttaattggggggttggagaacccaaacttcccaaaggttccctttgattacccctgaaccctggaggattcaattggttggttggaaaatccaagcaaaggccgttttggcccaaaccccttaattggaacccc

SEQ ID NO: 373684 - DNA, 407 bp, Zea mays
gctcgctttctcctcccacgattccatcgccagccgccccttttcccttcctttttcccttgctcgcccgcccgcccgcccaggactcgtccttcgcgcttcttcgacagctcgtccttcgcgcttcgtagccagccgtcggcgagagagggtgagaggatcctacgtgccttgtacgctcgctcgggagccggccgggatcgcgccgcgccaccgtaccccgccccggacatgtgcgtggaggggctggacgacgcagcagggaggctcggctttggagaccaggacaccgacaggcgcgccggtgatgcgatggagagagtttgtgagaacacagtggctgttgacttcaagcagactaagctgaacaactttgtcccattcatccggtcaggggagtggtctga

SEQ ID NO: 373685 - DNA, 438 bp, Zea mays
ctggtcccctgccgtccgtctcgatttccggccgcccacgcgttcgtttcaggtgggccccatttagcttgagtcctgtggccttctggagaaggtttgtggcccgcacgtttcacgtgccactaaattagcagcgcccggccgtccggagctgccagtagcggcaacagcaaaacaagaagcagccagccaccaggcactagtaaacagtaagcagcagagagcatggcgagatcagggcgggaagcggatcccggagaggaggaacggaagctggtgctgggcaagtacgagctgggccgcctgctggggcagggcaccttcgccaggtttactacgcgagggacctgagcgccggtgccggcacgggccacagctgcagcgtagccattagggggtcgacaggcgcggctgcggcgcacggaggggatggtggag

SEQ ID NO: 373686 - DNA, 196 bp, Zea mays
aaaaagggagggggggcttaattcccagggattttgggtggttggttggattaaccacccggtttggccaataaaccaagtccctttttaaaaaaaaattggccggtggccttctaagggaggtaaaccgggaaggtcccccttataaaacggggatttaaaaggggtttttttttcggaaaaacccttggagggg

SEQ ID NO: 373687 - DNA, 381 bp, Zea mays
gggccaaaattcacccccctaaaaaaaaaagatttttatccgcccactcccatacttttgcaacaagatattgccaacacagagggtttagccgaataaacatttattcggctggacatattgggtcctcaggagccccatttttgggccccctttggtttttccctggaacaggaaaaacatggttcatgacagttgatcacgtagggggatttttttaaaacagaaaaaccccccccccaaacgggattttggcacggccgaaccgcacggggacatgctttgccaggtttaactggggcccctaaggaatttggggcttatgcgacatgcttttccgggggatgcttatgaacttggcaaccaatttttccaatttaa

SEQ ID NO: 373688 - DNA, 197 bp, Zea mays
gttctccaccaccgtctgaacggaactccccatgaatggtcagaggacgttaaactgcatagtgcgcagcaagacactggtgagacaggcaatggcggtccgaccgttattggtcgtgcgcgccaccagagatcccagactgaggatgctgtcaatgaaacgagctttacgaattggatagaccgtagcatggggct

SEQ ID NO: 373689 - DNA, 467 bp, Zea mays
acgcctacgcgtacgctcgcgtcgaactcccgtttcgctcgtccccctcgctccccagcgcggatgtcgagcgcgctctaggcgggcgatcacgtgttgcccccacgcgctgatcgcttgctacgacggcaggagcgcgagggcgggggactaggacgaacccagcgaagcgcggggggccacgaggtgggggtgggatggggaccattgagcctgacgggcactattagtggcgcgtgattggcctgtgacaaagcatcggtaaagggaacggggatgtactatcagttgccaggaggtacgcggcgttccatgggcgattcagcgcagattctgcaggtttctgggtcttaatggctccctcagataaatgtgttgatattcgagctgacatatactcagttgatcatatttaagcatgcgatcatggcagcagatggaccctggctgacagtatatggaataag

SEQ ID NO: 373690 - DNA, 176 bp, Zea mays
cccacccgtctggtttggcatgcacggggacacaatcattgatcagctactggtgaatttggtgtgcatcaagtgctactctgatggctctggttgtgggacataaaagacaatttatggtatgaaaaatataattgaccttatttttacgggaccactactgtaccatattgagt

SEQ ID NO: 373691 - DNA, 237 bp, Zea mays
tggccgcctccccggcccgtaccggtccggccggcccggcccgacccacccgtccgtgttcgcgtgggcggactcatggcttgcgcccgcaacgaatctgattacgctgaatcaagcttcaccaccaaggcaccggtcctccccaagaatagacttttttgggctgactaatatctggcacgaaagacacttgtgttaccttgccacacggagcaagcgcagctcgtcaaacactcc

SEQ ID NO: 373692 - DNA, 285 bp, Zea mays
tttttcacgcgggtcaagccgcatatcatgggcgcgctttagcccatggccctgttagagatcattgatcccactggcgccggagaaggagaaaatgtgtaggacccggaggtatttcaccaagactgcttaataggcgaaaaggaacacgtacttgacaagtttgtccaccgtcattaccctgttgctaaggagattgtacatgtttgcctggactgtggacagaaactggaacacaactgcactgggctgcacgtataattggggtgcaacgttgtaggtgaa

SEQ ID NO: 373693 - DNA, 207 bp, Zea mays
aaggcaaaaaaaaaaccgtttttttttcccttgggatgggggccaacaaggcaagggttgggaattttattattacgttttcttttacagcccccgtttgacaaatggcaaatttcttttcccataaataaaccaattggggtttaccttttacccccccaacccggcccttttttgcaaaatttcccttttttggttaccggtttc

SEQ ID NO: 373694 - DNA, 226 bp, Zea mays
ttttttttttttttttataaaaacccatttaaaatattcacccttttttggggtgggggggggcattccattgaaatattaaaagcccagggatggtcctaataaccgatccatcgactaaacaatgtccgaggccacacgggtgccccattcaaagttgcaagttatccaggtgatcgaaaaacacgacggaccgtttttgggtaaaagggcaccagggccagac

SEQ ID NO: 373695 - DNA, 167 bp, Zea mays
ttgttgacgggtacggggtcgcgggggacggggggcctaatgcatgtgtggtcgggagcgcaccggtgcatcgatcgacgccaaaagttagatcttgggggcgactctgtttgggaaggccgtaaatttggaggtggaggcctggggcaccagaggctgccagaagg

SEQ ID NO: 373696 - DNA, 338 bp, Zea mays
ccggacctaagggcagggccgggttttttttaaacccaccaaaataacccgtcccaccatttaaaaaaccggaattccaacccggtggcacccaaaaaattttggccaccattaggccaccacccgggggttcttgggttggcaaaatccttttttggttaagttggttattggggccggggggggctggcgggttgatcacccgggacaaaccttccaaggtttttccgggcccagacttcccccggcccttatggtgggggctcccgccaattttggggttccggccatttttccgatgggaccaaaacccgggcagggggggattttttgggggg

SEQ ID NO: 373697 - DNA, 383 bp, Zea mays
gggccgcctttttttttttttttttttttttttttttttttggaacagaattagctttttggattttcccccaaattgggccaaatggggttgcaaccaaaaaagggttgttttgaccattctgggccattggggggttccaaccattttcttccttggtccaaatgggaaccccccccggcagcgttttccatggggggggacccttagggtttttcctaaaaataccccaccctttaccccccagagacttcttttttggccggttcttaaatgggggtttccttggaaaccttaataatgggacccttttgaccggatttcttaatagcctttttaaagagcagccaagtcttaaggggtttttgaaaattaaccttttt

SEQ ID NO: 373698 - DNA, 199 bp, Zea mays
aggggttggaacccaacttccttttaaggggtaaattccaaattccccaaagggttggggtttaacagaaacggtgggagggatttggcaatatacaaatttaccaaggacttaaaaaaaccggcattggtggttccaggcctttaaaggaaaaacaaaatttccacctttgtaaaacgggcttaagggggcccgaaaa

SEQ ID NO: 373699 - DNA, 367 bp, Zea mays
ggggccgccctttttttttttttttttttttttttttttttttttttttttttttgggagcccaaaaaggccccttttttcctttgggataaactaaaaaaaaatccggccgggggaaacagattcattggacccaaatcccttgtgggtggagccaggggtttgtggggcccggggttaaacacagccttaaaactggcccaagggggccttggaattaaaaaccacaggggggcaacaccaacggggccaacggaaaaaaaccctttgggcttggggaaaacataagggggggaaacgggtaacttgggcgggggggccccaacggttaagttcctcaagtccccgcgggatttgccgaaccccc

SEQ ID NO: 373700 - DNA, 369 bp, Zea mays
aaacatcacaaatccatccccatttttggcccacccggatttttttttttggggacttgacaaagcgcctccaagaccgacatgacaaattggttggaaaatatgtttatgaggggactggttttattaaataaaggttttgcccaattggggggtaaaccaaacaaacgggggggttacacagaaccacccctaaaaaataaaaggggggccacgggccaggccagttttgctttggttaaggcttcccaggaaaaatgcaaaaaaaacccgggggtttggcgctggttttaaaccgggcgggacatataaacactggttggtcaactgaatggctccggaaaaaaagggggaaacggatcagttaaa

SEQ ID NO: 373701 - DNA, 93 bp, Zea mays
aaacagccataattattctcaataacccggtagcaatgcaggggaattaacaactcttacaacatcaggtgttgtaaaccacacaatacttca

SEQ ID NO: 373702 - DNA, 295 bp, Zea mays
aaaaaccacccccttaaaatggcaccagattggaacttttccaaacatagcagttttgaaagggttgttaatcccacaggataaatgggcccttccatgacacagagtcagcacagggaactttgggtaagatcacacagttaagccttaatatttggaacaggttaaagaaacctagatattttttttttttggggaaacgttattggcccatcctaactcctaatcctaatggccggaatcgccgccaccgttggcctttttttgatttttttttttaacctttcctgggggg

SEQ ID NO: 373703 - DNA, 295 bp, Zea mays
ggggccgcctttttttttttttttttttttttaaaaaccggagggtccggattaacaaggaacaaacccctgcaaaattttatggtccccaacctttggcagggcttaaccaggggtccttttattttttggcaattaggccaaattccggacccaagaaaaaaggggggcaaggggtcaaaatattgttttaagccggaacccccatttggttttttaaccccttacccggaatttccgggggggggggggttgaattggtcaattaacccgggcttttggggggaagggcttt

SEQ ID NO: 373704 - DNA, 473 bp, Zea mays
aattaattagccgcttcggaattgcgccgatcagccttggaaacaaatctgcaattctttttccattcagccatttatccttccagaatttggtattgattctgttccccacttcagtggtcactacttcagaaaagaaggctctagccttttttgggacttgtatttgaagatcagaccaggggcgagagtgatcagtcttttataaccaaagccaccttagtcgaagtgcccaacataattctggaagactagaaataccaagcccaccaagcttttagggggcggcaaacttttccccaggcaacaagacaatgaccacctttagcttctttgcggcctctccatagaaaacctcttctaattttatcaatagcatccaaacctcactgtgggatatctactgtctcttctgcttaatatataatggggcggcagttctctgcgcgtctcgagaaaaaagatcttatcta

SEQ ID NO: 373705 - DNA, 163 bp, Zea mays
ccaaaaaccagattggacccagggtccgggggccccgttaaaattttttttaagcataaacaagcagaaaagtgggtttgcaacaaagggccatgggaacaaccttggatgggggggaaaaaatttatttttttactaccctacggggtttggaacatggggg

SEQ ID NO: 373706 - DNA, 353 bp, Zea mays
aaagaccaacagaaacttaatatccttggttttttccaaataatgctttacacaaataagggggtcatcagcatattgaagtatagctccccctctgagtataatatgttctatcagccctgaaaccattatgaaacaggactaaggataaggggttttgacacccatgccagaaaaaaaaatgattttgaaaccattatgttgggccttgacacccattttagtcaggccagtcttcaacaaatttaaacaagactggggataatgggcccccctgtttaacatttttacacctttgagaagggggtctggggatcaaagatttgaaaggaatgaacattagtcctttttgc

SEQ ID NO: 373707 - DNA, 485 bp, Zea mays
tcgattttttaagttccctgctcaactccaagtattattgttttggtcataatcttagacctctttcttattgttcttcattcttcttgtgaaccctttgctttagttatagagaatctgttttgttagagtcttagagaagctaataattgaccacatgaacaactgtagctagttatctactgggtggattggtagattgaccagaatggatgtctacctttctgcactactacaatggatgtgttggttattacatgacttcaggaaaatacatggatgcggaaatacactagggccgacgtgtagaagtaaccgactgatagaaaaaggaatctgatgggttttttcttatggggtggcttacaaggatttggtcaagctaaggcttcagtgaacaactaaaacattaattttagtggattccaatactgctattttcaccagtattcagattactatttttgcatggattaacaggttta

SEQ ID NO: 373708 - DNA, 257 bp, Zea mays
aaaaaaaatatttttttggcaaaagggatgatagatccacggggtttaataaacatccaaaccctaagtaatgcatggggccaggattaaatacggataaacatgaccctgacagggggagccacacataacaccgttttaattttttatggaacacatttttggacccatgcaaagaaaacaaagcgggtccaggattccaggaacccccttttttggacgtaaccccacccccaccaccttttttccttaagttt

SEQ ID NO: 373709 - DNA, 451 bp, Zea mays
ttgtccacgcgtccgcccacgcgtccgcagcagcccaattgggagctccaccccacacaacccaacccgccacctctcatggcgactgctgcgaccaccaccaggaggccgagcgggcccgtactctcggccgcgcactaccgctacgcctcgcccacgcgcgtctcgctctccggcgccgggcagtccgtcagcgtcagcgtctcgtcgtcggcgcggggccgacggacctgcatgtgctcgccgaccagccacccgggctcgttccgctgcagcctgcacaaggagcgcgcgacgaagccgccgccgccgcacgggcacggcaagccgacctccccgccgccgtccctgaccaccaccagcgtctgtgcgcggcgggcaggcggatgggcagcgcgctggtgcggatcggcgccgtcgagggcggacagtgcgcgcgccgtgcgctcgc

SEQ ID NO: 373710 - DNA, 354 bp, Zea mays
ggttggatccttttgagggggcggccttttttttttttttttttccttggaaatttgcccaaatttattaggggtttacccccaattttggtggaataccattacattcccggaaaataaaactggtggtggtaaacattttgggcgaacccccttgtaaattaaacgggcgggacgggaaaaaaaagggcggggggaaaaaggtttggggtatttttttcttgatcggttaacgggggcgggtgggagcacaaaaaggggggggttcctaggaggggaggaggggccttttattaatattattaccaatagggggttatttttggcgggtgggttggaaaaaaccctttcatt

SEQ ID NO: 373711 - DNA, 298 bp, Zea mays
ggggccgcccttttttttttttttttggattcccaaagggtttttggcctttatttacccttggcaccaccaccagaaaacagggggttaatggccccacccagggggggccaaccagttggccaaccacagttccgcggggttccatttggggtggtaaaaatacccccccatttcccaacccccagtgggaattttacccgacccggggccacaggaccgggttttccttaagaacttggggaccattaccgggtcccttaaaaaaccaccccccccggaacttcttggggttggt

SEQ ID NO: 373712 - DNA, 368 bp, Zea mays
ccaccacgtttcttatgaggggcctaaagctggccaaggtgctggaggtcgcaaacttcatgaaggccggacgctgggtgcccaccaagcgctaacctcttgtaaccagacgactaccagtaccaccaacgcctgtccctgcctgcgtgtgatcgatgtacgctcgatgctgtattcgataacctaagtgataagaaagaaatggcaagctggatgcgtactactgcctgctatgggaccctgagagggctggcatccatcacagggtgccacaagcactctacgatatcgctaggcttctctcctcttggcttgaatataggatccatatactggaggtgctagaacgatctgtgggcgtgtgctta

SEQ ID NO: 373713 - DNA, 369 bp, Zea mays
ggggccgccctttttttttttttttttttttttttttttttttttttttttttttttttttttgggggggggggcaaacaaaagggttcccattttccaaacccggaaaactttggaggtcagggagccccaattaaccttggggtttaaccaaaggttttcccaagccctaaaaaaagggtgggcaacggacccctaaaaaaaccggtaaaaaatggttttggaaggttttgggtgcccccgcccgtttcgggccccaaaaaagggggggggcttccgggggtaaaaaaagttggaccagttgttcccttggggttggttggggttaaatccgggtgggggggggggttttacaggtttttttttttt

SEQ ID NO: 373714 - DNA, 372 bp, Zea mays
aaggccccaaaaatcacggttttttttccccaaataataaggccttccccggttattcggtttcccacggttttggttttttcacataaccccaaaggccccacattttttttttaaaaaaggcttcaaatttttaatttctttcacacttggatcttttacggagggttaaaaattcccggtttttttttaaaataaacttggaaccaccagatgggaccggggaaggctttgctgaattggcttttaaccgggggaggctggaacagggttccataagtttttttggtttttggtttggttaaacgaagggggggccgggttgtttgaaagggggggggttttaaacgggggggggctggacaaaggggg

SEQ ID NO: 373715 - DNA, 232 bp, Zea mays
aaaacaaggcccaccttgggaaaaggccggctttaacttggtttaccggccaggggggccctggggaaaaacccgtgacctaacccggaatggtttttttgtttttaaaaaccaccaaacttttttgggggatttttcccctttttttggcccgccggttccagggccttaaaccaccattttttcccccaaagaaaatttgccctgaaaaaagcctggggaagccccttgg

SEQ ID NO: 373716 - DNA, 238 bp, Zea mays
ggggccgcccttttttttttttttttttttttttttttttttaaaggggcaaattaaccccattttatttaaaacccttcaaaggaaccgccaaccccgggggggtttcctgggtcccaagttccgaaccacccccccggggccagccctgggattcccacccttcggggaaaaaggggttttgggggttttaaccaaccggaacgggggaccacagggggagggaaacttggggaac

SEQ ID NO: 373717 - DNA, 206 bp, Zea mays
ggaaaaaaacagctttaattaagggtttaattccaaatttttgtttccataaagggagggaaaggacttgtcccccaggattcctttttatcaccagacttggtttaaggttcccatgcttaatccataaggcttagttttccttttaagaaaaatccccatcagcaggggcaggggttacctgcctccttcttggtttttaaggg

SEQ ID NO: 373718 - DNA, 328 bp, Zea mays
gggaaccacccaacgggaacttttttgaacccaccctttaattaatctggtttaaacgggttaaaaaaataaaacgagggcaggaaaccaataaaacatgctgaagggtggggctaaggcacttgcaaagcaaaggggggatataaggggcctataacggaaagggctataaggctatatcgtttggccggaaagacccatgacattgaagtggtttgactgcaaaaccagggcaattttggtttttataactttggcagaatcctgaaacagggtataaggaggggagggcccagggggaatgggttgggatgcccccccataaagc

SEQ ID NO: 373719 - DNA, 450 bp, Zea mays
tcgggaaatggagaatgctcattccattgccgctactgctggtgacacagaggtttataacatgtgcacagtacttagttctttgttcaagatttgtgggtgttattctttttgatgaaatgtatgcagttaattcttataatttttgttgtctgtgcttctcagaatcaaagtggtttccggttaccagtatctgagaactgactgctatcacttgtttactcatctggaaaagaatagtttgctgaccagctagagttacaggttcctagccagattgaaatctatatgctagtagtatatgcccctttactccttccgttgcatttgtgtgcctgaatatctgagattcatgttgaattttgttggtcatgtgtcattgtgaggattggacgtgtcaattcacagtatcagctggtacagtcgatattaaagaactgtatcagctgt

SEQ ID NO: 373720 - DNA, 389 bp, Zea mays
cgcaaatccaaccaaaccatccccgaatcctgcccaaatttcctcaaaacgcgtcaaaccccaccccttccgcccgaattcatttcgaatcagactgacgcgaccacccatctgggctctggccgcctcggcccccatcgcctccctcccatggcgtttcacgtcgcgtgccccatcacttgcaggagggtgtgcgactgcgagctagggttcggcgcgtcggcgtcgaggaagggaggaggtggcgcgtcggcggcggtatgggcgggcacggcggcggctctcgagggtttttcgcggatccgtggttgctgcggccggccggggccgttgacgcggatgcggcgacggtgcggtttaggtgtgccgccccttgagccggcccctga

SEQ ID NO: 373721 - DNA, 356 bp, Zea mays
ggggcggcctttttttttttttttttttttttttttttttttttttttttttttttttttttttccccccccccccggaaaagggacccaaaaaaaaatttttggggtgggataaaacttaagggggggaaaaaaaaaccttttttacaacttagtttcgaaaattggggttaaaaaaaataagcctggggggcccggggggtttatgggggggggaaagaaaaaaccccgtttttgggcccattcccgggcgggcggggggcgaaatttttggaaccgggccggggttggccaatttcaaaaacagatttccgggaaactttaggactaattttttttggccccccctatggggg

SEQ ID NO: 373722 - DNA, 337 bp, Zea mays
aacaacagaacccaagggaggattttggttactttattccaattccgccccccatgtcccaggaagttacattaggactaaatctttaaccagtgcaaacaacagaacccttgatcctgccctctttaattattatggcattgctaacacacccataaatcaccataactaacaggtttattttgccctacttgtccacccacctgagtacaattgggaccaagcaggggccaaaagtaattgtccaacaaaaacagtcccaccaaagatttgtgatgcatcgttgcgaacgacgcatcagcaccgtagggcagagggaactcaaaatactgacggc

SEQ ID NO: 373723 - DNA, 156 bp, Zea mays
gaaagggaaagggggtttccccctttccctatagaaatttggggggtggaatggcccaaaacaaattaatgggcctaactagttggctttaaattttaagtttaacagggcccaaaggttcacaccaacccattaaaaggcccaagaaggggttaa

SEQ ID NO: 373724 - DNA, 329 bp, Zea mays
ggggccgcttttttttttttttttcttggatttttggccaaatttattgggggtttacccccaattttggtggaataccattacaatcccggaaaatacaactggttgtggttaaccttttgggcgaacccctttgtaaattaaacgggcgggacgggaaaaaaaagggcggggggaaaagggttttggttttttttttcttgatcggttaacgggggcgggtgggaacaaaaaaagggggggggccctaataggggaggaggggcctttttttattattatttccattaggaggttatttttggcgggtgggttgggaaaaacccttt

SEQ ID NO: 373725 - DNA, 360 bp, Zea mays
gggcgggccaaaaagcccccttttttccttggggataacctaaaacaaaacccggcggggggaaccggtttccttgtccccaaacccatgctgggtggtgcaagggtttggtggggcccggggtgaaccccggccttacaactggcccaggggggccttggaataaaaaaccccggggggccaccaccaacggggccaacggagaaaaacccttggggctgggggaaaccacacggggggcaacagggtaacttggcccggggggcccccccggttaattcccccaattccccgcggggttgcccaaaccccccccccgggtgccccccccggagccgccccccccccccccggagcccc

SEQ ID NO: 373726 - DNA, 274 bp, Zea mays
acctggaaatttttttttaccggggggcccttaaattcctggtttttacccggaaaaaatggtttccatttttaccgggtttttttaccaattttacccctgcccccactaaatttaccaaacatttatgctttttaccttggcgattttggaccccaattacaactaccggttcctttccacccctgaaaatttaatccagggattttggttggcctggcccttcaaaagaaaaggcacttccccacgttttccaggggggtaggtgaaattt

SEQ ID NO: 373727 - DNA, 378 bp, Zea mays
tcgatgcgttggagctggctcttgccctggggcgatcgaacgctaaccagtcataccgggcaccgagggatcgatatgccattactgctgttttgctatagcgaccagcgcggatgattatgaggatagaaccatgaatcaggaccaatcttggtggctgtcggtgcgcgggcgtccagcgctgaccggcgtgctgggcaatgtattgtctgctgcaccggatgcagcctgtttggcaaacgggtgctgattagaccgccactcattagagggcggcattcaccacctttttaactcagactggctctgggacggacgttccctgtgccagcttcggtgaaagatgacccactgggatcaatgaagggcccactgccg

SEQ ID NO: 373728 - DNA, 273 bp, Zea mays
ggacaggacacagcccacaggccatttttttaagcagggcaggttgttgggaagctgagcctgagagatatgcaggtggctatgacagattgccgccctgtgcaaacaggttacatggcagctggctgacttgaacttacagcagttatatttcctggcaaccagcctatcctaaggtggattcccttcggggatcctttgctgttaacctacagaccctatgaactgaagggctgccctacaaaatcccttttttacaagggccccaggttt

SEQ ID NO: 373729 - DNA, 203 bp, Zea mays
ggggggatatcccttttttcaacaattttaaaatatggtttacattaaacccctacctaacaattaagggccagcactacacattcccaacagtgaactgaacactaaactccagaacattgctgaaaaactgattgtaaaaaaattccactctgggggggaaccaattggccacaaaaaattcctgcccagggggctttcta

SEQ ID NO: 373730 - DNA, 484 bp, Zea mays
ttcttgaggttgacatgccttcttttggtcatgatattggaaatgttggtccgacaatcaaatgagacatgtcagcaagtcacatgggcaactaccctgttaacaacaatcagccaagcagaggatatttgactggaaatggacttttggcgacatgattatcagagtgctcgtgcagaatgctacctgccagtcatggccagttgacgctcacggaggggtgctccaggacgaacggtaattcaattttgacgtgggaccttggccgccagcaatctacaacagttgctggaaccaccgagcttgccttctacagtgggtggtttctcactgcacatcggcttgtgtctgtgtgattagccccctcttgattttggatcaccctctgccactgctgccagtccctgcaacctaaggagcccctgcagctttgaatggtgatgaacaattctagtatggacaccggcattgtctcttgacgttc

SEQ ID NO: 373731 - DNA, 409 bp, Zea mays
ggggcggccttttttttttttttttttttttttgggggggaccattttgttttttccaccggtttaacttaaccggccttgccccggttttaccaaacttacccccctggtaggggttgcttcttttggaaccaggaacttaacttaaggtttaaaagaaaaccaaaggcggaaaggtggggtttttaccctttagggggaaacaagggaaaatggacgggccccggcaagattcaaggccttcccggggattcgacccaacattttacttggcggagcaattttctgggaaaaccggaaaattcccccttttaggggggaaacccattgggggggggttttaaaattttttaaaagaccaattcccaccgggacattaaacctggacttttcttaattgggtgggggg

SEQ ID NO: 373732 - DNA, 179 bp, Zea mays
gggcagcagggtcctgacccacaagaccatgtttcgatggctttgtctcaaaacctcaccccagggtaccatgtcatgtttgggtcagtcttgaggaccaaactcataccctacccacagttttaaggtccagcaccagcaccctaaaaaagggcttgcatataactgaaggttgggtt

SEQ ID NO: 373733 - DNA, 281 bp, Zea mays
tcgggggcgactaaacaaactccagttgggacgcgggatgagtcggaggcttgaaagcatcaaagatagagacctagagcggtgatgatgctccactaagacatagctgctgcagtctctagatcatggaataccaagcaggacagagggagctgctgtatgggccatcaacgcgcataaggacatactcttgcccaggcatggccgtatggcggatacgccttatctttttcgttcagaggggcacatacataatgctagaatgccgcaaaagggaaagc

SEQ ID NO: 373734 - DNA, 444 bp, Zea mays
  unsure (1)..(444): unsure at all n locations
tcttgaatcaacaggtggcatgtgtgctgatgttctatctacagaaggatgattttccagtggatactcatgtacacaaatattttctgttgttgtcaaatagaatctaaacactagttcaatgtgcataatgtatttgtaacagcaaattttgggccaataggtactccgcattacgaaggctatgggctgggttcctgctacagctagcagggagaaggcctacattcatctaaataataagattcctgatgatctgaagtttgatttgaattgtctttttgtaactcatggaaagctttgtcagtcatgtaccaaaaaggtgggaagtgataaaagaaagagttccaattctgcctgtcctctagcaggttactgttgtattggagaaaagcttagcaactgtgaagagcaggcagtagctggnggcgttcaaaggctctg

SEQ ID NO: 373735 - DNA, 444 bp, Zea mays
gtgacgatgactttgctgatttcaagtccaaggtcgactctgagcagcagcgggcagagttgaaccccaagagcccggattctggtacgcgtgatggatgggtgtttgtttttttggtctttttctgaagtgatgttccgattttatcttctataatcagttactgttgtttattgaagatctttggaggtaaagattccgttaagagcagatgagcagtcagttctttacgtgaaaaggaaaccttttggtttgtctattcatgtactgggctcttgatttcaggatttggcaacgaaatcattgcattaatcgcttctggcgaccagttatctttgtaggagcgcggatgatcttgaacggaaaatgcttactgattttgggttcttgcaatggaaaggagtttttaagtgctaagctttgttctttgaaaatcgaacactt

SEQ ID NO: 373736 - DNA, 217 bp, Zea mays
tttttgaccatgccttcgctgatttcaaggccagggtatactctgaccatcggctgtccacactgaaccccaagagcccggatactggttcgcgtgatggatgggtgtttggatcagtggactgtggctgaaacgttgagacgagtctatgcggtatacacaggaaccgccgtttatcgaagattttgggcggtgaggctgatggtgatagcaggtg

SEQ ID NO: 373737 - DNA, 388 bp, Zea mays
tcgcccacgcgtccgcccacgcgtccgcccacgcgtccgcccacgcgtccgcccacgcgtccgggcaggcaagccagccgcgtgaaagacaccgagcgcagacaggttggagttggacataacctctccctctcctcggcgcctcagccgggcatggcgtgcggcggcaagggcggcacggggtggtcctctctgccggcggacctgctgctcagcatattcgccctcctccctgccgacgctcaccgcgtccgtttccgcgccgtctgcgcggactggggcgccgtcgtcgtcgcgtggcgcccgcgcccttggctcgtcggctcccgcaccgaccgctccggccagggcgccagcgaaatttcgtcattctggctcgccctcagcg

SEQ ID NO: 373738 - DNA, 364 bp, Zea mays
cctttaggggggcccccctttttttttttttttttttaatggaaaaaggggtgtcgggaatttttttttaaccccggggggggaatttaaagggcccacccgtgttttttctgggaaggcccaatggggggaaagggccccaaattttttgggaaaccaaccagttccccctcccttgggaaagccccccctgaaaaaaattggctcccaacattggccccaagggggggggattttatcccctttttttcccaggggggatcccccaccccggaaaaattgggtaaaagaccccttacacccccactaattgttaccccggggaaaacaaaaggggccctttttggcccatgaaaaggggttt

SEQ ID NO: 373739 - DNA, 200 bp, Zea mays
aaaccccagccttgtaaaaggctttatttaaggtcccaccaaatttaaggtcctccatcgggaccggttaacttttaacgggaaaacatggggggagacttggaacttcctgccctaaataaaccttggccctgggaaaataaaattaaaccccggttcttccttgcaggcagaaatttgatggattcctcaacacgggg

SEQ ID NO: 373740 - DNA, 203 bp, Zea mays
acgcttaactcgatttgagccctctccttttgcagggagcttttgagcagacgtccccgctttttccaccgcgaaaacccagcagacggcgacgacggcgccgttaggcgcggcggcgtcacatccatgactgccccggggccctgaacgctaaccatggcgggctgcatactgtgcgactggtcctcagacggtctgctacc

SEQ ID NO: 373741 - DNA, 254 bp, Zea mays
aaaaacaaaagaaaacagaagaacaagaaaaaggacaacacaccacaccacaccacaccacagacggacaggacagcgtccaaggttggtttggtcggttgttcgctcataagattacagatccttcgtctttcagcctttttttccacgcaacaaaaaaaaacctaatccacagctggttcagatttaagacgacacgattcgccggcggtgggggtgggcgaaaggctggagcatttggtggtgggtgggtc

SEQ ID NO: 373742 - DNA, 288 bp, Zea mays
atatgaagggtttatgttttcatttaattccagcgtagtcaaggagggacaccacattccatgcatgggaactgacccagggatcaaatttaggactaaatcactgcaacattacacataaggtagggtaacagaggttttttaattaagcatcgcaatgcagaatggaatcctgggtccagaatagtagcataaatctttttagggtaataaaaattttaacaaaagttttttggaactgtttgttggtttccagaaccacaggagacatcgttaaacccaagggaa

SEQ ID NO: 373743 - DNA, 195 bp, Zea mays
ctcacgcgtccggggcgggagccccataacattccgtgcgatgtaataattataccggacgtaatccattattgatgctagatgccatgcacgatgaggcactactgagtctcgagtactttatacaggttcatggcctcgtgcttcaaaatcctatacatggtgttgtccacctacacagaggtagaccacacc

SEQ ID NO: 373744 - DNA, 390 bp, Zea mays
ggctggccgcctcgccggcccggtccggtcctgccttcccgacccgcgccacccgttcggtggactcggtcgacagctcaccatcattcgtgcctacatgcgactaacacatacattacctagagggcccccgtagaagctgcctctgcatcctatctcgctattgctggttggcagtctgcggctgcgtccgggcgcttctccgaactgggaaacctttattgccgatactgccgcactttcctcatttcttgagactttgtccgttggacggtggactctgctggatccacactgtagatgttgtgtcttcctggctgagtgcggccatgggtggcaggcctaccatcattctgatgcacacgtcacagtgcagatctacgaggacat

SEQ ID NO: 373745 - DNA, 274 bp, Zea mays
ttgggtacgcgtcggcggacgcgcgcggcttgggcgtgggcgaagcggagatgagcgtgcgcagtagctaccttatcaggacaaagacggcggaaaatatgcggccgagcggtcatatacgctacggtgtccgtgtgcacacggacaacacgattaagaaaatgggcggacgtatgcattgagcatgctgcaccaaggtgattggtgaacgcggaacagcctgctctgggcctgggagaataaggcctgtggaggctgtatgggcaacactatg

SEQ ID NO: 373746 - DNA, 190 bp, Zea mays
atttccagtacgctcggagctgcccaaggcttggggcacttgtacaataactgcctcaactagcataaatcatcggggatatctggccgaacaacatgctgcttgaccggacaatccactaccggatctgagtctgcgcagacgccaccatcatggacaactgatagtgcccaaattgttccatcagcac

SEQ ID NO: 373747 - DNA, 394 bp, Zea mays
cagacccatcgcggtctcgatctcacgacgtatcagcccagcgcggtgcgctatggcgtagcagttacgaagaaaaaaagacatgcaggggcgttggcttcatacattggtggaagaggaactgactacagactacctgtttggagactggaggtccaggagtgatactttgaacatgcattgttcaaatagagttgctactacccatatggcatctgctggtcctatacataagcgttcaccaggaactgaaagtatgtggttatgctaatggcaggaataacaactgaaaactacctctcagaggctgtggcccgtttctctgacttgagaaaagagaatacagagccttcacctgaagtcagtagagctagcgcatgagttcagcaaaagt

SEQ ID NO: 373748 - DNA, 262 bp, Zea mays
ggaaaccagcccgcggcaggtaaactgggggcctttggatggcacccggccccaaaacttggggggtggttggggaccatggaccaaatttttgggttttaaccagaacttagtggggggggccagcaccggaaaacccggaacccgggagcctaagtacctttggccaatttttttcccccggaccaatttcgaagggttgaggggttattgggggttttttttgggggttgttttcaggcaacatttttcatttttttcc

SEQ ID NO: 373749 - DNA, 471 bp, Zea mays
aagctgggcgcctgccgggcccggaccggaccggccggcccgggtcagcgccacgcgttcgcttaaatttgtgcatcggtttctccggaactgcgtggagcctgagggatgtgacaacggacatatgtgctacatcgtgctgtcatcagaatatggcgcaagcttcgagaagttcatggcgggaatgctaaaattggttcctgcttggaaacatagcagccttcgaaaacatggatgccactcccagagctctatagctacgctgcttgtctgagacaatgagttctggtgtcttggggatagacagtgtcatgaaggtagttacagctagatgcatctgtgtcaggattatgatttgttcttgtattaccgagatccaggaataacctagtctcagtgcttctcttctgaggcaatgtccttttggtgtctggcaattatctctaaacttattagaagtgattctgctta

SEQ ID NO: 373750 - DNA, 147 bp, Zea mays
aaccggtggatttttaatttaatttaccaaccaatccgtagggttagggccccaaaaaaggttggcccgctttttaaatgccaaaatgattagcccgcctggatcacacagggggttgggggtccatgatctgtgccccacaggcaa

SEQ ID NO: 373751 - DNA, 207 bp, Zea mays
aaaataaacttttttaaactaatttaaccctaagttttttagttgggttggtccattaattaatttttccataggctggcaaataaaaaaatttttccgggggaacgggggaaattttttgggaagggggaatatccttttgttaaacggctacgggggttttttcaatgggttggggaaaaaaaatccttgggacccatgggaggg

SEQ ID NO: 373752 - DNA, 187 bp, Zea mays
gttaggtttacgaagagaggaaaccatgtcaaggggcaaggccatagaagatccctcgagtgaggactttattggggctacttcaacctcaggctgtctagctggctatatacgctactttcaagtctgtgtatggctcgatggctccatatcgcatatatgaggttcgccaatgagggccatgtgc

SEQ ID NO: 373753 - DNA, 507 bp, Zea mays
ttttatatatcccccaagcaaggtatacaatgctaagcttccagaagaataagctcgaacgacattggcacctgctcaaggtcagtaacctgctcttgtgccggacagactgcttccttactgaccaggaacagggtacatgaacacaacatcgtctaaagtggattccccaatcagcactatcaggatcactccaaaggaggtggcaactggattcgaaactgatgctttacaagagagctgtagtatgatggttacccactgggtgttcctatgatgaaagctggccagtctaccattcaatctgcgcagaacaagtggaacggatccagcggcccaacggtttcacacctcctaaattgtcactacagaaatgtccaaccaatctacctgcatctgggcatagaggcaatgctcctaagatgtctaaacctcgggaaagtgcccggaggcaatattcgagagagcaccggaccagttcaagatacagtcagttcaccgctgctg

SEQ ID NO: 373754 - DNA, 331 bp, Zea mays
ttgcttatctgccacaacgaaggactccgcagcagtgcacccagtccaccaggcaccgacgcccaaaccggctgctcccgataggactcatcctcctatgcgtgggatgcaactccctccatgccgtggcatgtgcggcaaggagtacagccaagttctaggactccgcctccgggggcaaccatagccactactcacgacgccagaggcggagggccccatgctgcttcaagagggagggcagggaccgcaacccaccttcttgtagatgtgcggcgcgcggcaggtgctccggctacgtctgggaccgcctcactctatcaggtctggg

SEQ ID NO: 373755 - DNA, 249 bp, Zea mays
ttggtttacgggctgtcgtccgtagacgctgtgggcgaacgctagggcacgtagcctatcaatatctgtgcacgcgcgacatggaggatgagactaccgtagtcgtagttccatggccggctttgcagaaccgaggtgagctaaaggatggtgcgtgctacgcgcctgacatcctataggtagcgagcgccggcataagacactctgaacaaggtattccgtgatatcgtcgccttctagagccggggc

SEQ ID NO: 373756 - DNA, 224 bp, Zea mays
ttcggtttacgcccaggcgaccctagccgcagggaggaggagatgtcaccgaccgtatctatatatatacactcccaccatggaggaggaataccaggagggccgaatccgatggtcgtcaagcatgtaccggggtggttcggctgcacctgcttgctgggctccgactaggccaaaggcgggcgcggcggtcgacatatctcgtaacaagaggccgtggcgcc

SEQ ID NO: 373757 - DNA, 358 bp, Zea mays
aaccccattggtttaaggaggaaggattggtttcgtccccaaggattaaaccagggccattttcctggggttggggcagtccaccaaaccaccagtcttttccagggccttcttggtaacattagaccgcacttttttttttttctttggcccaaaaccgaccttaaaatgggggggggggggggacctggttcgggttttttttttaaaaaaaataaaaccggggtgggcccaaattttttgtccaggggcttttgattgctgttccggttccatttttttaacctgtaaccggggccggcccacctttttcctttttttttggggggtttagggcgccccccaaattttggggcaa

SEQ ID NO: 373758 - DNA, 358 bp, Zea mays
cagtcggccaccatgcaggctggcacacctagcatggcccatactgttatcgcaaacgacggtgcagatgaaactgcctctgtgacaggctatattgccggacataatgaggaccttgctgaccatgatcgggtcacccaacacaactcattctagaatagattcgctcatcagaaccaatgtcagatcaccgatgcatttgccaacactgtacgatctgaaggtgctacagagaacagtctggctagcagtccctatggttttcaacatcacaggaatgctgactctaccagtgcatctaccaaccaacggactagccataatgcagctgatactgctactgatcactatgctggac

SEQ ID NO: 373759 - DNA, 296 bp, Zea mays
aagcaaacaggggcctgtttttcgacctgtattcattttgccatatgcaaaaacaggtttggggatcaactttcagggagggtccttttgccttgagatttccaactgagggctttggatacccagcaccaaattttgggagaaaaaaattttttaaacagcctaatgctaaactttggggggtaaatttttacaggaccaggttttttttttggcagttgtttttcctgggccccaacccgaatcaggggtgggggtttttggcaaagcaaaaacctttccatttgggggggaaa

SEQ ID NO: 373760 - DNA, 269 bp, Zea mays
ggacccaacccccagattttaatcaccagtttttccccacagccggtttttcagaaaggctgttcagaaaaaagtcaaaccaaacaggcgcagtttttaaaaaaagctgttaaaaaaggccctatgtcctcgggggtccaaataagagagacgttggcggggttcccaatttccacatgttacacgctccgggggggaaactccggttgtccttttgatccaaacagccaccgaatatccagccaataacggatggcaatcaaaaaaga

SEQ ID NO: 373761 - DNA, 301 bp, Zea mays
  unsure (1)..(301): unsure at all n locations
gcctgcccggcccggaccggaccgaangggtngacccacgcgaccggccacgtttccggtgaagaggccaggcctgctggcccgggaggctatctaaaacgcacgcatgctctattataactaggcatcactatatatgtgattgagtgcgcgcgtcgtcaatcccgagaagctgcagggcgcccagttccattacacccatgttatggacgagagcgagacatgcgccaagactgatgagcgagaccaccgacccactcgctggtacgcgtaggacagaagtatcttttctacatatgca

SEQ ID NO: 373762 - DNA, 142 bp, Zea mays
atttggtttgcggttgtatgagagcattctggggagggctgagcaaagacactacactcttgactgggttgtggtggccattcacactcatgagggatgtgttgtagaggctccatgccttgaggaggaggtgagcattgag

SEQ ID NO: 373763 - DNA, 217 bp, Zea mays
ggggccgcctttttttttttttttttggccatttttattttttttatttttttttatacccccaaaggaccttaattttggttccaaaaaaagggttattttacccggttggttccaaaaaaccacgcccccgacgttgccaaaaccaccaaacgcttttcttttagactttggtttccgggaggggttaacttgccccacaaatttaaaccgttta

SEQ ID NO: 373764 - DNA, 152 bp, Zea mays
ggggccggcattccatataaggtggtttaaaggagccattgcccaccacctaaaaccatggtttttccctagaggtggcataaccccacagggggggccgggtttaaccagggggttaatatatccaaagagccttttttaataaaagggga

SEQ ID NO: 373765 - DNA, 208 bp, Zea mays
ggcggcaaaaaaatggtaaaatcttggccccaaggaaggcttaccggcgggtgggaaccttttaattggaccggggccttggccttaaacccttaaaagccaggttggcccctttgggaagaccccgggcaaacattgccaggtttttggggcggggggttttttaacccaaggtgggaaactaaccctgcccaaaatttaatttggg

SEQ ID NO: 373766 - DNA, 172 bp, Zea mays
gttacgtttacgtcgaggggtgaccattgcatgcggagtgagataataactctcccggagttaatactctatagtcggcgggtgacaggcaacagggagtgcggcagggatagctctccttgaaatatgttcattcctggatgcttgcataatgcaaatgtgcggataggca

SEQ ID NO: 373767 - DNA, 171 bp, Zea mays
ctcatcgttttcgggtacaggacaccatcccgggcagcgagtgcacaccacgcttccccattgggatcgttacggtggccacctgccacgaaaagtggattcttaccctgacacgattccctggcgtctggttatgcctggattacacctcatcgcatagactgggagtac

SEQ ID NO: 373768 - DNA, 148 bp, Zea mays
ttgatttactgcaacgccagcgagagaactgtataagatccgctccaatggcgtttcgtcgaattttattcacagatgagcggcacctgtcagccaatcgcgactacattggacgtgaccctgcacgggctctgccatgttcgagtcc

SEQ ID NO: 373769 - DNA, 304 bp, Zea mays
ttggttgccctaacgcccagaccaaccaaaacctgcgaaggttgcccgcgaggaggtcgactccagcgcccgcaagcacacggcggaggacagctgcgaggtccccgacggcaccacctacgcagagggggctcataagacgacccccggagaggactacaccatggtcaacattcacacagcgccggctctacgggaggtacacaagagaggcaaaggccggactcttaccctaacccgagcctggtgggctgctcaggccccgtgtctgcggagatctccatgggcagtgactactaccgga

SEQ ID NO: 373770 - DNA, 154 bp, Zea mays
aaagggtggatattatatatggttaatggaaaataagagtacctgttcctgaaggtgggattaattaattcatggcctattcatctaagtattcacatatggccgttaaatgacgacgggggaggtcccttttttattaattcgaaggacgggc

SEQ ID NO: 373771 - DNA, 213 bp, Zea mays
gggccaaacaaaaatcgcataatttaattggggaagaaggcctggggctcgcatggggccttttgtttaggaccttaggggacaataatttgggcacccaggacatacctgtagggtccacatgctccaaaaaatataatttactgggggattatatatggccattatgtccagcacgaatgtaattggaaggtccattgggggcataaggga

SEQ ID NO: 373772 - DNA, 130 bp, Zea mays
aaaacagttggcattgatttcctgcaggcatgtccaacgcccacagaaaatttagttgaacacaacccacgcttacatggggaagaagggcacaagggtccgggacccctgggtttcctagttttattta

SEQ ID NO: 373773 - DNA, 205 bp, Zea mays
gtttcgtttacggaccgtggtgctaattgccttgggcgggacataaggcctcgactggccttcctattttatggtcagaagtagacatgcaagaaggtgacttacaaggtttaagcactttgaaatatgatcttgcatccattgctccacatggcaaggctcatgcagaccttgagaggcgagctgctcctatgtctcctgaccg

SEQ ID NO: 373774 - DNA, 369 bp, Zea mays
gtttcgttttcgggcatactatgcgagtccaggcggcattttatcatttgttgacgaaactctctacttgagcgtctccatgggcgatgaaggaggcggtccgacaatgggactataccttgggacgacctactcccgcgtttgggtgtgtcagcatgactgaggctgagacacattgctacaaccagtgcaaccgatcagcgccggcattatgtctcgtgacaccagagtctgggagggtcatgggcaacgcgtgacaaaaaccatgtcatcatgaacccgatcagcaccgtcttggaaacgaagcggctcatgccccggcgcttgtttgacgcgtcggtgccgagtgactaccagatattgcctttc

SEQ ID NO: 373775 - DNA, 291 bp, Zea mays
gttatgtttacgacggaccggcggcccccgttgaggaggcacacattaacgcgcgaggccttggtagacctcttcctgtacggaccacctgcacagctctgggggccatgtgccacgctcaccaatcaactctatatggagggtgtccatacttcatatccaacagtccagtacaggaccacataggtccatgcatggggacaccgatgccattactgaggtcgagggtcgagggacaacgtgcgcatcctgcacctcttaaggtggcgagagtctaaccaccactcaccg

SEQ ID NO: 373776 - DNA, 476 bp, Zea mays
tcgtgtttcatctctgtttggagctcatgatacatgtaatcctaaacttgatggcaaagaacggttgcaattatttgcctctctatttcctatttatgatgcacagatacattgtttccttttgctatccagataaataattacttccttctccacccttttctccagatgtagcgagtgagttttagtcagggctaaacaatagtaggaagaactttgatgtgtttcaatctagagtatttgatggatggggcattgttctatagatggtgtatacagaaatgatcttaactgtcatttaggtcaaaaccacaataggtctacttatgtcagaaaatgaaatgatttaagtgtctgccatggtttaaagttcatgaggagcagatttgacttattttaattgcttatcatattttgagaataattttgctgtctattcaacagataccatggggggagcatatgaccatctagct

SEQ ID NO: 373777 - DNA, 232 bp, Zea mays
tcggtttcgcttacgattcgagctgatccaagggaccggaacctagtgcgatgcagtactaactgatgcgagtggagacacgagggagcgagctaacaaagatggcaagcctatgcgtgaggtccgaatgggctaaatcttcagcaacgtgcggcatggaagaatgactagcaggtcaggtatgtagaggtggctataaggcaatgcatcaactacacgcaagtgcggaaag

SEQ ID NO: 373778 - DNA, 310 bp, Zea mays
caaacaaaaagggcctttggggttttaaaatttttttaggggggtcccatcaacttgatttgcaacaacccccccccattggtaaccggtcactggtacctttggaaaaaatttttttcctttttacctaatatcaggctaacggggtttggcccgttggacaagggaaaacgggatttaattgggggggttaaaacgggggttcatttttttgatttggaccaagcactggcttcggtttgacttttcctgaccattggaggaaccattttttggtggccccggaaaaagaagattaccttttttttaa

SEQ ID NO: 373779 - DNA, 459 bp, Zea mays
tcgttgtcgcgtgggtcctgcgcccccttactgccctggcgctgcctgccgtaggtacgggaagggaaaaaagaggacggcaaatctgcgcatccattctcacgccgcgattcttgtgcgcgatccgccgcgcgatgatgatcccgtggggcggctgtggggagctgccttagcgctggggcgctgtatctcctcgggaggagcagcccaagggatgctgaggtgctgcggtccatggcgagggctgcccgcatgaaagatttagctgctatgttggacactgcacgtgaagcactaccacttgtcgttgccgcatttgggagagttgggtcagacacaccacttatatgccaacatagcagcctgagaagtgtgatcggtgcagagacggcagaacaacactctttgaagcacaacgatgctggatcctggatgcaagagtctgcatatatgctttct

SEQ ID NO: 373780 - DNA, 433 bp, Zea mays
tcggtttccgccagacgggattacagctttgtggagcctcacaataatccaggtagcatatagaacatttttacatgtgcttgtgaatgtcccaaatcagatgaccatgtttttcgcacttccggagactctataaggagggtgttcatacttcatatgctccagtacagtacaggaccacatagttacatacatcccacaacttttttattctgtatttgtgcttggagggacacgtgatagtactgctactcttaatgtgttgatctctcagccaccagacaccagacacgcagccggggttggccagcgccagccaccaggccgccgtggctccgacttcaacgtcgtgccccgcctggcaaccgaccgcatccaccgccttctggctggcctggcagggtagacacaaaggtctcatccagtgctccac

SEQ ID NO: 373781 - DNA, 284 bp, Zea mays
aacggaaaagccttttaataaaatcaaggttttatatggaaacattttttgacagaagatacaaagggtcaaaaatttgggccactcggttagatagataaatcgaaaagggggagaagaggttttttaatttccacgccttggggcccctgaactgattcccggagcgcttggcctgttgttttttttcctgccgggaacgggcggccttggttttagtcgctgccaggggcatcctttttttgggctggttttgttaattgctcaacccaccggtttttttt

SEQ ID NO: 373782 - DNA, 310 bp, Zea mays
gtttcatttggcagccagagtgtgaagtatcagcatggggttactttgacaaagaatggggtttaacattacgtaacaatagatatgcttgacaagatgcactccatggccaatgaagctctttcatggagacaggatacgctgctctgcgaaaagtgactgcatcaggagaagatgaaacacacatactctgcctggcacaggacaagacaaaagagagtcaagtcatttgcacgtgcttgtgtgactttttaagatcatgatgaactccaagcaaaccattcttatgaagatgctctttatgaggatc

SEQ ID NO: 373783 - DNA, 288 bp, Zea mays
ctaacatggacatattttaaacacggttttttaaagcccaccaaacagtttaatatatccacccctggtttgagtcatattttacaataggatacaaaccttatttttaatactcaaagaaacgaccccttatatctttgggttatgtcctaagacgttggtctccgggagggacggaaaaaacagggatttgggataggcagggaaaaacagaataccaaatgagggaattcctaggacccgcatatgtgatatggggcagttagatccaggagtcacgacagataa

SEQ ID NO: 373784 - DNA, 311 bp, Zea mays
tcggtttcccagctccagccaaccacaagaggtggcacttactgccagtgcgtgggagatagaggctgagcgacaatgtggagcttgggctctgaccgcaccaggccctagacacggcgaacgcctcctcagtgaacccttcgtcgcccgcgcgggagccgtgcacgccgtccccgccgactcggagccggggccagcgcgcgcgacaccgcgctcaccgccttcgtgccaggaacacaggcgcaagagcggaggaggaggagggactcgtggaggccgacccggacgcggacgacgactggcgcgggctg

SEQ ID NO: 373785 - DNA, 380 bp, Zea mays
aaatcaactggtaatctgaattaattccaccaacacgaaatttcagggggaaagaatacatagatagtttgaactctcatgtatacttcactcagattacaatacacgggtgtagcagacaaagaaactgtagataagaattccaacgtgtcaaatcagggcgtacggagctacaaacaatcacaaggctcctagcctcctatacatccaccggccggtcaggttgtcaccggaaacagagaaaaagggaggccaatgttgttgggcgtttgccgctgcaggaagcacaaatccaagctccaagtgtcttgcacctcccttttttactcagtcgacgacgtgtcggatccataaccccatgcaaccttatacacctgaac

SEQ ID NO: 373786 - DNA, 131 bp, Zea mays
cctcgccggccggaccggacctgcctggccgacccacgcgacccgtttcatttctgtccacgtgtcggtctatgtgtccatggggaatgcccactctgcgcggcagggcaaaccggtaccaacatgcactc

SEQ ID NO: 373787 - DNA, 262 bp, Zea mays
cccacgcttgggcggacgcgtgggcgacccctgggactgtcgcgtacactgaggcccacacactgacaaaagattacaggccctggccgttgagcctgggtagtatacagatggagggaacgccaaggctaaccaatccattgatgtttagctggttttttaacatgatcacaacctctgtagctgggacacaatcccgactggcttgctgggcagccgcctggaatcttgccacattgcgaggagggggaggcgatggatc

SEQ ID NO: 373788 - DNA, 162 bp, Zea mays
aaaaaaaacctaagggcccagggcgggggttaagcttaaggacccaatatttttggtttaaggtacattttactaaaaaccttaaccacttggggaccccatgccaccaaattgaattttgcaaaaaataatggaagggaaatgttaatggattggtggaat

SEQ ID NO: 373789 - DNA, 350 bp, Zea mays
ctctgtgggtgtcagttctgcattggtccatgtacaattctccaatgcttgctatcatggggacaaaaacagggggggcctgtccagctgtgcctgactatgattcgaggaggacggcgtgtgaatccagttcattgccgacatcctcgaactatgtgcaacttgtggacagtgtgcctaatcacctcgggtaggtggctactcagatacaccagtgcgacattgtgggactgtcatccggagctttgattgagaacacacgggactgaattaggcaaaggaccatggtcggtttggtccacaggatggatgggagaacaacaatgcgccatatgggtatgggggaatat

SEQ ID NO: 373790 - DNA, 151 bp, Zea mays
acaaaaaacttgggttttgatctaaaacttatcccacccaatgggttttttttgccggtgccctgaacttttatgaaaaaaaccttaaaagggccattcaggggcaaaacaattggttcgaaccccactgaaaccatgtttcccaaaaatt

SEQ ID NO: 373791 - DNA, 340 bp, Zea mays
ttttacgcgtccgccctcaagttgaacatcaaaaggtctttttcgataaggatagggtagcctccctcagggcctgagagaaaatacctctcttaatctaagagactgctgtggtggtccaaatcacatactagattcacttactgaccatctatgaagatcaactacaggctttgctgccacctgatatacaagcaccacttgtctgcaccttgagaacacgctgagtactgtctgaaaaaggtaagaacttattacggaatttgtgagctcagggaatgggattgctgcgcttcaggaaactgtacgtatgctggaagagcaagccaccaacatggtt

SEQ ID NO: 373792 - DNA, 342 bp, Zea mays
tattacgcgtccgccccatcaggcaaaatgaatggcattgtaacaaacaccacttcttttaccacattgggcactctgatgccatctaactacgtgtgggggaaactgagcgtactctcaaatcagtatcatgcacatcattgtgtgattattagaaaggcatggtacggttttacgatgcatagtcgtgacctgatcatatttgcgtagctttagtgacaaaagtggatctgataaccatttacagatatgaaagactcactttgcggaacacggtatggtcacatggagctgatggctcatgccttccttgtggtcagcgcacctgactggagtcaatgc

SEQ ID NO: 373793 - DNA, 238 bp, Zea mays
ggggaaattattattttattgtctttcttaatttggtgggaccaacccccaaaaataaaagaaaaggcgattggtctttcccttgggaacccagggcccaattattttttaaaaccttaaccgccaccaccaaccacgggccaacaccaagcccccccccttgatacttaacttaacttggaaggtttttttccaacccaaccaaattttaaaaccgggggcgggatccttttaccaa

SEQ ID NO: 373794 - DNA, 335 bp, Zea mays
tgtcacgcgttcgtccacgcattcagccacgcgtccggccacgcgatcgggcttccgatcgctcgcggagggcgaggaggtggaatttcacggctcggagggagacaacggccgcactaaggccgtcgacgtgaccggccccgacggatccttatccaggggcggcggaggccgaggaggaggcggcggcggctacagctcccgcggcggtggcggatctggcggcggcggccgcagctaccgtggtagctggggcggcagccggagatcccgccgcgggggcggtcccggcgcgtgctacaagtgcggcgagcccggccacatggcaagggact

SEQ ID NO: 373795 - DNA, 516 bp, Zea mays
ctttagatgacaggaaacaaaacaaaaagttaatgggtggacattaacatcattttccgtgggggcatagtttttaaagaccatgttattaactaaaatatggagatcttaaattacgcaatagaaattattgactgtacctaccagtcatgcatttgtgaacggagtatgttcatagttaataccatatgcatgtgcttctcgtgcacactcaaacatccatatgttgacatacgaaatagtgcttctagagcctgcaacctaactgcttctgtatcatcattcatcatgtccatcaacaagtccaaggccttctctgtgtactgagtagaaaactttgccagcgctcctaatgatttgcaggcagttcttctcacctgtaatgtgaaagcaataaaataaaataattgcaattttaggaaaaatgatactacaagataatgacagaacctcgtaaattcatcttcaactccatgggaaaaaatcccagcagcacaggacctacaagacagattg

SEQ ID NO: 373796 - DNA, 252 bp, Zea mays
cttatccggccgcgcagacacccgtacacaagcgcgggaaccttaggggcactgccaactaccccatctgggctgagggctactacaggtacaaccgccacatgctaggataactcgaagaccggaagccgtacacgggccgcaaggctataggtgaggcctagcacgatgctcccgacgacgacccaggggaacggacgatccaagccatggtggccgatgctacagcggtcaccagcgttggacctgtaa

SEQ ID NO: 373797 - DNA, 331 bp, Zea mays
tttacgcctggggccagaccaccatgatcatgggcggtcattaacattattttccgtagggtccttagtgttatagaccctgttattaaataaaatatgggtatcttagattacgcactactaatcattgactgatcctaccgatcatgcatttgagtacttgctctgattatagctgatgccatatgcgtgtgcttcttatgcacactcgaacatccatgtgtagacgactaaaataggattacataggctgctgcctaactggttgtgtgtcatgaggcatacaggtgactccacaagtcccagggcttgactgtggactgagtagaaa

SEQ ID NO: 373798 - DNA, 114 bp, Zea mays
tttacgcgtccggcccgacgtccataaccaagtgcggtaattcgtgctatatcgcttacgatccctagtgccctatgtacctctacgacaggtacactaccttggatagcgctc

SEQ ID NO: 373799 - DNA, 148 bp, Zea mays
tttacacctccgctccaacgttcaaaatcaagggggcttattcgacaagtaaagggtccaatccctatagcccattgtccatgtatgaccgctgaagaaagtcgcatacgtaccccatgacgacagcgagtagatcgatctagttgac

SEQ ID NO: 373800 - DNA, 259 bp, Zea mays
aatggagccccataaacccgacccctgggaaaaaaaagccggcttggcccaaaccacggggggggttaagcagttggccctaatccttagccaaaggggaccttggaaatccaacatcccccccaaaggggggggaggttaagggggcccagccggccaagggcttaggacgggggcccgaatgcccatcccggccgggggggccaccccggaaattcgggccgggacccggggggggacccagttttccttaaggggg

SEQ ID NO: 373801 - DNA, 347 bp, Zea mays
aaaaaaaccatttaaaaacattttttaaaacggtccttcaaaacaaacaaactgggcatcccccattccaatgaatttcaaccccagtttttaaaaacaaacaaaccgggcatccgggtgggtcataacaaacccagtttttaataacaaacccggtttttcgccatagcaaagccttttttccttaccaaaggaccaccttggttttaatttccacttaacctccagcatagccctaattccgggccctcataatctaaggagggttttcactaacgaagcgggcaagcaaacttatttgatttgtcaaggggagaggggggaactgccttgccaatccaggattt

SEQ ID NO: 373802 - DNA, 132 bp, Zea mays
ccgtcgcttccgctgcctcgatctacaacacaagcggtgttttatgcagaaaagctgccgatccccattgaacacctttattaacagcaatagagagatagtggaagagctagctcaccaagaagaggatga

SEQ ID NO: 373803 - DNA, 106 bp, Zea mays
ttgtcacgcgtccggtccctcgctcgggaacgagggcggtgatacaagcagaactgcttatgacccctatggaactggtttagactatggcacaggagcagggaag

SEQ ID NO: 373804 - DNA, 302 bp, Zea mays
ctatcgcttccgctgtctcactctcacacatatgctgtgttggaatcaaaaatgcgtctaacccctatttcacatatttttgtacaagctcttgaacttggctgctgttctaacacggcacctgggtgaaaggctccggcatgtggaccatcactgagcgcgtttatcagttcttccagcagactcttgatcaacagacagcttgattgtctacccgccacattgcacagcttattcttgacgatagctatggcgttgcaaaggttcataaattgacagtgccgtatatggagattgtatac

SEQ ID NO: 373805 - DNA, 119 bp, Zea mays
tttttacgcgtgcggtcacaagaccaaactcatgggcggtgattcaaatagtactgcgtagggtccctgtggcacacgaccatggtctagattcaaatcttggtagctgaactgacgca

SEQ ID NO: 373806 - DNA, 394 bp, Zea mays
tgtcttccctttggcaccagcttccgaaaattcctgaaatgtactgatcgggaagcgtttgcgcctcatggaatacacctgccctaccgtacccgtatccactagccagggagcggtcacggagactacggtgaccaatagtcgcgctacatcaacacagtcattgccctcctcaaaaaccgatcgctacctatctcaacatagatcgagatgctgtaggagaagactgtgaaggaccacgttgatgtatggtcaatggcggcataacgctaattaacctgttgaaagacgatgccagacggaatataaagaagttcatgaaggccatgctgaacaagttacagctggggccggacgagggcattgtgggcctcatgggcgctcaggcacagga

SEQ ID NO: 373807 - DNA, 277 bp, Zea mays
aaaacaattcaagccaagcccttaaggttttagggcttttcaaaacctaggaattttatttgccccacttggaacaagaattttgggtggtgccatgggattaaacccttttggcggcgcccccaaaatttttaaaatctggtttttttaaaagggcccaactttttggccctggcccttaagttgggctttttgaatttccccggggcccttttgggcaggggccccaaaaatacccacttgggcccccaagaccccgggattcttttccgggaaa

SEQ ID NO: 373808 - DNA, 186 bp, Zea mays
ccgtcacgtccggcgatgcgatctaaaacatagcgggttagttaagtagaaagtcgggtgatccctaatgcacacatttaacgaatgggtgttagacccagatgccaatggaagcgcataaagcacacgaggaggagtgaggacgtagaccccgagggaggggaaatgctggacgtccacaagata

SEQ ID NO: 373809 - DNA, 105 bp, Zea mays
ccgtcacgtccggtgccgcgtacgaagctaaatccggtgtttcaatgtgaagagctgctgacaactgcgtcactatttggataaacgccaaaacaataaggatgc

SEQ ID NO: 373810 - DNA, 108 bp, Zea mays
tttttacacgtccgccccatcgacccactactcaggctatttatcaagatgaactgctgacggtccctttgcaactttattgggataaagcacatgaaccaggccgag

SEQ ID NO: 373811 - DNA, 247 bp, Zea mays
ggttaccaaccccaaaacccccttttaaggttttattaccgggaatttggtcgggtgccaaagggaagaaaacctaatggccctcccagtttggccttctggacttaacccggttggaagaatttctggattccacaaaaaactggcaaaagcccccttttttttaccctttggcaaccctgggggaaaatggttttttggaatccttttggtttttgggggggtggcccccttggcgggttttttg

SEQ ID NO: 373812 - DNA, 257 bp, Zea mays
cccctaaccaggccttttttttcaaggataaaacccccttttgatttaaaggcccacccgttttaaaccgggctaaattttttaagcaaaatccttttggaccttagcccattggacccgaagaaaaaaaaggagggccctccaaagggaaggccgggggctttctttggtcccacaaccggggggggggggctttgaaaaaaccaacccccgggctttttcttttcttagcggaaattggggcccagggggagggg

SEQ ID NO: 373813 - DNA, 314 bp, Zea mays
gttggaccccaaaaacccaaaagggggaaccacccggtttttttaagggttttttttaaaacggggaaaaccaacacaccaaaggtttgccgggtcccccaaaattaaaaaattcccaaggcgggggcccccgggggggggaattctccggccgggcaattaggggaaccccaaaccccaaattttggccggggcttaaattttaaatgggcttctggggctgctggaaggcgggggggcaaataggggggtggggctgccctcccccgggaggggggggttcccaaaaaaaaaaaccctgggcctgggggggg

SEQ ID NO: 373814 - DNA, 199 bp, Zea mays
atggtcaagttaagggaacctttggcaaacaaaaccaactgtccccttaaatgtccaacgggccagtgtaaaaggggggggggagcctaaggggggggttgggccataagaaattttccgaagggccgccgccgcccgccgccgaagccagggttactaaacctggggtttgacaatcctaaccttgttttaaaacccc

SEQ ID NO: 373815 - DNA, 131 bp, Zea mays
tctttacacctgcgatgtattgatctaaagctgatgtaatttttcaaaagtaagatattacactccatattcaacatgatgctgaattataagaatgacggggttctctaccatgctctaaattcccagga

SEQ ID NO: 373816 - DNA, 258 bp, Zea mays
caaaccttaaacttttttatggtttggcaaaatttgggggaggccccccccccaaaaaaaccgggccatttttaaaccaaccctggccccacttatggaccgaaccggaaattctttggccaccttcatttggggggggggccccagaccacccaggcccattggggggttaaaccacccatggcttactggcccccccggggaccggacccaagggggggggggcctcccttttggaaggtggaatctggtaggggg

SEQ ID NO: 373817 - DNA, 201 bp, Zea mays
aaaaaagggccccgggaagctgggtttatggggattcacgggcttttacaggggccaaaccgccccaaaatcgggccccgcaggccccgttccataacaaatcccaaacctcactgggagaagcccaacctttggggcaaccttcaggtttaaaaggtcatgggggcaaaaacaaaccccccccttttttttcccccccag

SEQ ID NO: 373818 - DNA, 297 bp, Zea mays
ccaaccgttaacgtcccaggccatgaacgtgggtcacacaaggacggccaggcaggcctaaaatacaatcccgattaaaaaaagggagagcaagggtccttcgtaaaacctaagagggccagcaggctacctttttatttagaaaaatggttcacccgccggtccccaattttttaagttttacacagttgccgtttgggggctgttgcctttttcctgcaggctaacgagtgggctgaaaaagtttttttggagggagtccacactttccagttaaggctgttttccgacctgggc

SEQ ID NO: 373819 - DNA, 237 bp, Zea mays
gggccgccctttttttttttttttttttttttttttttttttaggcccaaattaacccccttttatttaaaaccctttaaaggaaccaccaaacccgggggggtttcttgggacccaatttcccaaaaaacccaaaggggccggccctgggttttccaaccttcgggaaaaaaagggttttgggggttttaacaaaactgaacgggggaccccagggggaggaaaacttggggaacc

SEQ ID NO: 373820 - DNA, 503 bp, Zea mays
  unsure (1)..(503): unsure at all n locations
ctaaaacggcagagcacgagttcagtctcagcctatcgcatatctccttcatccatcaccggccacatccaccggcatcactattctgatttccctacattacaggccaggtgtgtattgtgctgcaatctacttccatgccattttcgtcaatttttgttttcatccataatattactgctgcctagaactccatgacagcgaacaagttcctcccgatgggcagccccaggtaagtgtgacaagttggccgacatagcaaacctatttatttagttatatgcacaaatatctttgatctgaacaattttttgactgtcatctttcactgattaaggcggaagcagttttcttattcacgtgaatactttctctcaagattttcttcacatcacaaacttagatactttntataactgataatattcatatttggatgctctaggaaaggcaagggtatgcagttaccttcagttcaacgatgcaatttaccttcagtcatg

SEQ ID NO: 373821 - DNA, 306 bp, Zea mays
aaagaaaagaaaacctcccgttttgccccctggcctttgggcgggtccccccccaacaaatgctggttgcagctgggttggttggggaaaacaggcggccgggcaagggggcccaaccccccattggacacttgcacgggccaccccggaaaagactcaaaggtccggggtcacagccccacaaattacctggagagggccccccgtttgcccagtcaggggcccctcttagggggccggccggggggggccccggggggggttcccgggcccaggcaaaaggaccctgccgggggggccagcccc

SEQ ID NO: 373822 - DNA, 462 bp, Zea mays
ttgtcgggctgtgcctccggccggcgacttcctagtctcagttcccacaatcgctcctccatccagtcccgcatcgggacctgcacgcacatgagcacacgacggcggacggtcgcacctcccccgctcggccgctccacagcttggcgctccggcgggcgctggcacctccggcagcgtcctgctgcctgcgcacggtagccacctgctgtacccgccctggcctgctccctgagctggtactctgactgtgcaatcggcgtgctctctgcaggtaatttgtgtggctgcgagcctgtaactgtgagtctttgacggtgtggcctgtgcgacgtgtgcaatgtgtggttgtgccactttgctcggcagcatgtatgcaacaagcaagcaagctgcaagcagcatgtgctgtgtgcgtatcagtcaatagtgcagtgtgcaaagctggatgttttcttgtct

SEQ ID NO: 373823 - DNA, 111 bp, Zea mays
gtggttctgccgtggttcaccccgtacgtgtacaacaacccgttctgccgactggcgcacattggggcgcacatgaccctatgctgggccatgtccctgtcgaccaacgct

SEQ ID NO: 373824 - DNA, 294 bp, Zea mays
gccgcccttttttttttttttttttttttttaaaacccccttggccgacaaaacatggggtggcctttatgggaaacccgttttccagttaccccttttttttttttcccgggcaaaaacattgggacctgggggcttcccaattaaccctaaggggaccaatggcctccttaaaaccattaacttttggtttggcctaatccttcccttcaactttttggctggtggatttggaacccaaccttttaatttttaaacccggccaaacttttttttaaggaggaaacctggggg

SEQ ID NO: 373825 - DNA, 506 bp, Zea mays
tttaagggcagcaaccggacgcgctgttctggttcgacgaggccgtgttcgaggacagcgccgccctgctgatgcttggcgacgaaggaaaggatcaccacctgtatgctgccgcttctacacgttgcttgcagcaggtggagagcacctttcccacggaggaatctgtccgcatctcgccgcgcaccgagagccccagcgccagcagcatcgatgcgattgcggagcgtatgcagcgggtgcaggaagaggccaagggcatcgtcgccgtccagcatgccccgacgacgacggtcgtcctggaaccggaacaacggagtgcccctgctgctccggtcgtcgtcgccgtaccaccggagcatgtctccatcgaattaggcaaatctcctagctggatactctctgcttcttggtattctgatcctcattcgtttcatactgatctgacgaattgcatgtcgtgatcgactcatcgtcacctggtttcagggaacaagcaggaaagc

SEQ ID NO: 373826 - DNA, 438 bp, Zea mays
ttctggcggtggcgccggtgacgacaaaaaggggaatgaggaggtgcgagaggagccggaactcgcgctgtcgctggggcggcgagtctggcacctcccgccgcggcaggaggccgctccccgctcacttaactggactccggttctgccggagtggaaccccgacgccgctgggagctcgcagggtgtggaaagggccttgggcggacaatccatctcttctcttgggttccatgacatgtttggtggtatcctagacgatccccaagcgggtggcagtatggaggttgggtggggcaagctgaacgaagaggatgaagacagagacctgcagaataaacggctcagagtacgacactttggcgaagaaaacccactgcatttctggtgccagggctactccctttggctctgaatcgtcatttatgcccatttctg

SEQ ID NO: 373827 - DNA, 363 bp, Zea mays
cccccctttttttttttttttttttttttttttttttttttttgggggggaaaaagtttttttttccctgaacccccctgttaaaaaccttaccccccaagggggggctccctttttaagggaaaaggtcccaatcgggttaagttttaattgcccaagcccatttttcaaaaaccggccctttttcaattaccggcccttttaacctaattaaagttacccttattttgggttaaaacaaaaaaagctttgttaattttagggtcttaaagggggagaagctttttattttcgggttttttccaagccttaagggaggggggggcccccccttgtttaggggaaaaaaggggcccccttttt

SEQ ID NO: 373828 - DNA, 359 bp, Zea mays
tgcgatagactctcttgcccctcatctgtatttgaggatgtatttgaggtgaaaaacaacaacccacaaagccttatatatccacagccaatcacctgacaaatgcaccacaactggagtgtaaaagaaaacattttgcatgtaaacttttcaaattcaaagtcaatcaaggcaatatctttaaaaaggagaacgaggagaaaatcacatattcgcattgcaaggactatatacccggaaaaacctggcaagcccaaggacagatgtcatgccataaaatgatatgccctcgggtaccagaaaaccttaatgggagaggacgggcctttgtgaaaacaaatattcccccaccaccaact

SEQ ID NO: 373829 - DNA, 243 bp, Zea mays
ttcactcgtccgcccacgcgtacactcacgagagcgcctcaatttactagttagatgcaaatatcttgacaatacacgccaagcaggatccacacaccacttttcctatagaacctaagagattggaggctcaaaatacagcactattcacacgagcgtagacccgctctacgagccgccaaggaccagctctgcacccctatcggagggtcccccacttggacccacggataacaccaaaat

SEQ ID NO: 373830 - DNA, 303 bp, Zea mays
tcgttcacgcgtacggcctcgcttacgaggtggcgaattaagtccttgctttggacaaaacaactgagtgtaacttgaagattgaggctgcactctaagctatggccgagagcttccttacgagtgttgaccacaaaactggcatcaacttgatacgcacagcagagtcttactctggatcaaattagggcccgagtggatttccgtggatcgtatatgattatttgagaacgtggcgatgaaataactatctgagcatctgccgcgatacatggaagcaagtcagctgagatgccgatcatt

SEQ ID NO: 373831 - DNA, 236 bp, Zea mays
tcgttcacgcgtgcgcccacgcatgcgcacaggacagctccctactgcgatggtttgctgccactgtcactacaattcggggggagacctatcacaagatcttctcgctccatgacactgaggacagtttcgagtggcatgcagagaggaataacattctgaccacacttctcgtcttcctaggtgaggttggggccgaaacgcaggcggacgatgcgaacctgaggccatactgt

SEQ ID NO: 373832 - DNA, 419 bp, Zea mays
ccgcccttcccagttcggcagttcctcttctcagtcatgctcttcgaccggttgtcgccggtgagccggcggtgcgatcggtctcttatccaccgtcgttccgctagtatctccctgcttgaagccacgcagccctgacgacgccctgccatgtgcagatcgcatcccttttttctctctctcaggggaggggcggcgcgtagaggcacgccgccgagcttcgggcatcccatctgacgcgaccggtcttcgggcacgccgccgatcgagctatggacgcgtcgagctccctgtccctcctagcactggtgaccatactcagcctcctccactccgccacgaccgacgcagccgcgggtctgccggcggcgcggccgagccaccggaggctactgctgctacaccagccggacaccaac

SEQ ID NO: 373833 - DNA, 259 bp, Zea mays
ctcacgcgtccgcccacgcgtgcaatgtgtaccgttcctagccatttgagttctttaccaagggacttgatatgcaggctgcggcttgtcgacccaatgaaaaggatcacaatccgagaaatctgccaacatgtgtgagacaggtaccgactaacgccctattttatttctaccgcctcagacacgtggtcaacttactcaaaaggtgcagtagcaaactcttgatgatgttattaaaatgggactatgacatgaatca

SEQ ID NO: 373834 - DNA, 340 bp, Zea mays
tcgttcacgcgtccgcccacgccgccagcagtgacagacgaggacccgctcactttgctctaactatcactgccggggctggaccagtcgacgtcatgctatcaccacaacagagcccggagccacttccaggagctctcaagctcgtcgtgcccagacgcgtagtctacttcacccggcttacttacgtaggcggttccggctaagtggtcgaacgcgtacatcggccagctggttgccgcgatgcaagagatgatccaggcctaggtgcgcaagtacatgtccagcacggtgctcctcgcccgatgcaggcccaatgccgcgtgctaagtatgcatac

SEQ ID NO: 373835 - DNA, 249 bp, Zea mays
ttcacacgtccgcacacacgtacgctgtgtgctgtaaatcaacctgggtgtaccatacaaccggctagtaaatgttgagcgagttagctagctcaaggattagttacgtctagataaggcgcttgaccatacaactcagactgtggcacccaaccaccacagtaagtttgatctggccagggctcttatgggctgacttctcaacagtagctgacacctgctacagttgtcactttatagacagacctc

SEQ ID NO: 373836 - DNA, 196 bp, Zea mays
cccacgcgtccgcccacacacacactccgtcccgctcatccacattcatgtacactacaaccagctggaccatgctcgccgggacggatcgcaccctccatactcatgccaaacgaaagcatctgcccgaacaacctagacagaaactccacaccctcccggcacctttcttcacccaacgtgacgttatggctaa

SEQ ID NO: 373837 - DNA, 183 bp, Zea mays
ttcacgcgtccgcccacacgtacactctgtaccattcataaacatacgagttccctaccaagagctttaaaacactgtctgcgacttatcgaccacataatagtcatgccactacaaaaaatctgcctgaataacttagacagaaactgaataacatactgataattttcttcttgctacgtc

SEQ ID NO: 373838 - DNA, 187 bp, Zea mays
gggccaggaccacctttaatgaaagaataaccatttgcagctccataaaactatcctgggcaaaactaaaatccatcacgcgcaggtaagcagtttgggtcatataattgggccagactttacaaaggcggcattgaaaccttcaaaggaaaaccaaaaaaggggggaattcctttacggggctccg

SEQ ID NO: 373839 - DNA, 205 bp, Zea mays
ttcattctttgggcgatacagagaaagcctacatgctgacaatgctcctgagtctactaaatcacctagcagtacttttagagtggcatccccaggtccaggtaaaactctagctaaatgaggaacgccaccatcagagtgtgcttggaggacacaaccagcatgctgaagttgatgtcctgaatgctcttaacgacgatgtgga

SEQ ID NO: 373840 - DNA, 210 bp, Zea mays
ttcacacttacggctagccacataaagactacgtgcatacaatgcatctgggtgtaccaaacaacctggcagtacttttgcaggaacatcgccatctcaaggctaaccgcaagcggaatgtggcgctccaccatcagtgcctgagtttagcacgcaaccagcacagctcgagtgatgtcccgatggctcgtaagtacgatgaggaggcag

SEQ ID NO: 373841 - DNA, 264 bp, Zea mays
tctctttagaagagcaatggcctgaccattgccaagctgaatgaatcctacacggtctgtatcaagtctctgatgtaagggcaggccggctatcatggcgatgggcctgaatggcaagggcaagaaccgcgtcatgtccgggaaggaaggtgaatgttacggaatagatgactccctcaacccatgggatgtctctacggccattagaagagtgccgattgtgagcacaacctttctggacaatgaaggtgggccagcccacaa

SEQ ID NO: 373842 - DNA, 182 bp, Zea mays
ttcacgcgtccgcccacacatacacagcggagtgtatataaagataggggtttactacaaagagctagaaaatactggcagagacggaacacataagaaaaagtgacgcaaaacgaaagaatttgacgtaagaacttagacagaaactgcaaaacatacggataattttcttcaacctatgt

SEQ ID NO: 373843 - DNA, 182 bp, Zea mays
ttcacgcgtccgcccacacgtacagagtggagtgcacataaaggcacgggtttcctgcaaagagcttgaaaaaaccggcagggacggaacacctactcaatggtcacgcatcaagaaagcgcccgctggaataacctagacagctactgcacaaccaacgggtaactttcttcatcctttgt

SEQ ID NO: 373844 - DNA, 363 bp, Zea mays
aaacaagaacaagacgacacgcgggaaaaaaacagaagttcctttctccccgactccggcactggccatggcactatggctgtgtgactgtgaccacacactgattgctctgtctgtccatccaatccacgggctggcgcgcatcgccatcacatgacgctgcacccggcattggggtcctcgcagcagtgctgctgcgggtagtacggctgccgggcgccgccgccaccggcgtagtaccacccctggctatcgtacaccggcacgccgtagtacccgccgggcccgggcgcggccggcttgccgcaccggcagtagccgttgtagccgccgcagccgcagccgtagccgcccccggcgcca

SEQ ID NO: 373845 - DNA, 453 bp, Zea mays
ttagaagagcaatgccgtgaccatctccgggccgttcgacgccgacacggtctgcaacaagctctgctgcaaggccggccgggtcatcaaggcgatggacgtcaagggcaaggacaaggacggcggcaaggccgggaaggagggcggcggcgacaagcccaaggacgccggcaaaccggcggcggccgagaaggacgcaggcaaggccgggaaggagggcggcgccaaggcggagaagaaggaggagaaggccgagaagaagaaggaggagaaggccgataagaaggaggggggcaagggcgacaaggaggcgaagccggcggagaagggcaacaaggacgggaaggcggaggccaagaaggtgaagttcgccgaggtccccgcggcggacgcgaagcccggcaaggccatgccggccggcatgaccaaggccgacctgggcccgctcctgga

SEQ ID NO: 373846 - DNA, 289 bp, Zea mays
gggttcccctttaccttaactgagggcaaccattttcacccttaaaaggccaaattaccgtcccaaactgaattcccccaagttggcccagaagggtttaatgggccccaaataaggccgattaccccaaaacccccgttaaataggcccccagaaaaaccggttggcccaagccccccaatggaccttaaaacaaggccccttaaaacggttggttgaacttttttggaacggcctgacaaaaactaattttaacgggccaaatccaaaattcggaaggccctttttt

SEQ ID NO: 373847 - DNA, 121 bp, Zea mays
ttcacttgtgcggccacgcacacgctcactagagagattaaatacactggttggttccaaatcacctggcaataattgtagaggaagatagacagagcaaggtgacgatcgagcgaaggag

SEQ ID NO: 373848 - DNA, 264 bp, Zea mays
ttcactttttcgtccacagaatggagctcattccctctgtccagctatatggtcaaaacatacgacatggatgatgatgtcaatgatgtgtctcaatccaatagcttgttcgtttatggatctgccattgcctaatggggaactaacatatgctgctggtgagggaatatcatgcagcggctttctttcgttatttggaggtatggtacaagcctcatggaaaatatcctggagacacatgagtgagtttttttttgcaggaat

SEQ ID NO: 373849 - DNA, 485 bp, Zea mays
tttcgtctacgcgtgcgcccacacgcacacgggggccattcaaggcagttgatggtactaattacgcggctggagctcttaaaggcaacttggtccatttgaaagaagcgcgtaccggagacaacccacatccaagggagcagtttttctcgcgacacgatactatgcatgcttcacaaccccgtaaaatgaatgggggagctagcacctccatggattcatctcataagggaaatgagcgccctgaagattccaaggacggagcaaaaaacactgagccggcgatttctctcatctaccaaccagcaggaagcacatcttcaactaagtaccatgataagatgatcgcagatgagggggtgcctattgatttcacaatgagctcctcttgttatatgccaccctgtgtcctggggcctctactaagcagaagcgtatcaacaaattccaaataataaggagatgcttttgctaccactggaaga

SEQ ID NO: 373850 - DNA, 184 bp, Zea mays
ctcacgcgtgcgcccacacgtacgcagtggagtgtatataaaggtaggggtttactaccaagagctttaaaattttggcagagacggaacgccaaagaaatacttacgccaaacgtaagagtctgccggaacagcctagacagatactgcacaacacacgggtaacttttttcttcctatgtga

SEQ ID NO: 373851 - DNA, 187 bp, Zea mays
tcgttcacgcgtccgcccacacgtacagagtggcgcgcatataaaggcaggagtttcctgccaagagcttgaaaaaaccggcagagacggatcacccacttaatagtgacgcctaaagaaagagtctgcttgaataggctacacagatactgaacaacatacgggttatttttttcttcctatgtga

SEQ ID NO: 373852 - DNA, 250 bp, Zea mays
accggttgcatttggggaagttgaatttaaactatctggtttaacataatgggttaaaactgtttaaaatcgaccaaaattttggatgcccaagggatccaacgccggaccaccgagtaagcctcgagcttgctaaattttgaaataaatagagcttttccgggagaaatccaaacttcattgaaacagttttgcacaaaggggacttttgcactcggggggaacaaaatgcaccaggaaaaacaaaggc

SEQ ID NO: 373853 - DNA, 343 bp, Zea mays
tggtggtgttttttttggccgaggacgtggacggcaccgacgacagcaggtcgaacgactcccagccctgcgtgggcggcgctggcgccggggagggctgttggaagttccgcctctgcgacacgggcggcggacgcggcgggagttgcggcgcgcgggccttggcgtgcccattcatgtcgccgttggccttggccttggccttgggcgccgccgcgttcttggcgcggatagcgtccagcgtttccacgtacttttgcacccgtttctcctgcattcgtcgctgcaccttgacttcgccgtcggcggcgatggagtccagcttgaccagctcgttcatgag

SEQ ID NO: 373854 - DNA, 193 bp, Zea mays
ttcattttttcgtccacacactcgagctcattcactctgaccttctctggggtcttcccataagacatgatttacctttccagtcagttgtctcaacccaatagctcgctcgtttatggatctgcaattgcctaatgggccactaacataagcagctcctgaaggaatatcacgcagctgctttctttcgtta

SEQ ID NO: 373855 - DNA, 201 bp, Zea mays
tttcacgcgtgcggccacacgcacgcagtggcgcgttttcacacagacgggtatgatatcacgcgctacaaaatactcgctggggtgcatggcactggctgtgctgaggtacaacttaagaattttccagaatagctgatgctacctctgatgaacatacagggagcatttggtgacccatcaaaagaggtttcgtacacg

SEQ ID NO: 373856 - DNA, 244 bp, Zea mays
ttcacgcgtgcggccacaggcacgcaccggcgccacgcagagccaccctagttttacaataacgagcatcacaatactcgctgtgtaggttctcatagctgatgctgaagcaccagctaagacttggtcacctcagcacatgcaggcactgatgaacctacagcaagctctaggtaacccgtcaaaggtggtgacgtacaccccagctaagactgactgatgctgaggggaccacctgcattgt

SEQ ID NO: 373857 - DNA, 184 bp, Zea mays
ttcacgcgtccgcccacacgtacgcagcggagaatacataaaggcatgggtttactaccaagagcttgaaaattgtttcatagacagatggcatagtcaatggttacgttgaacttaagagtgtacaggaatagcctagacagctactgaacaacatccagataattttttcattcatatgtga

SEQ ID NO: 373858 - DNA, 271 bp, Zea mays
aaggaaaaaaaccggaaaacgggaaaaaaaaaaaaggggcaacccgccaggggggggaaacaaaaccaaaccggggaacccaagatggaaccccgcccccgggggccctggctggctggccaccacaggggggaaccctagtaaaaaaaagggggggggattaaaataatcccccaaagggaacaaggggcgagcaggaacccccgcagggggtggggggccctttaggggggggggtttttccaaacccacttgggggaaaccggggggg

SEQ ID NO: 373859 - DNA, 348 bp, Zea mays
ggccaccggaacttatgctagcgaattactgaagttggaacttgaagttcagtcagcgatccaatggattcggtgaagaaatgcagggcaggaattagaaagggaattagaattattgaaggaccaaattttggggaaactttttcagtcaagatgtgagagtatcatggggactttgttacagaccaccaatagtctgcatcagattgacatcagatcgtgttgccaggatttttagaaagtcaattgggggggtttgtatctgaatctgacactacaggcctcgaatcttcctggttgtttgcgattgtatctggagttgaagttggctgagctgactgatagcct

SEQ ID NO: 373860 - DNA, 415 bp, Zea mays
  unsure (1)..(415): unsure at all n locations
caggagtccgggtccgcttttctcgtcccgcccgcaaagatcgatcggaacaactagcctagccctaggccctagcccagagccctgccctgcgcaccaaagcggaggggagagacgggagactagagagagcaaatacggtacggtgcttgcgttgcggcggatggcgacctcgtcgtcgtcctctggccccggcgggccgtaccaccaccaccggtcgcggttcggcgacacgacgctgaccaaggtgttcgtgggcgggctggcgtgggagacgccgtccgaggggctgcgccaccacttcgaggcctacggcgacatactcgaggccgcgtcataccgatcgcgagaccggncgctcaaagggctacggcttcgtgattttccgggccccggtgcggcggcctggcggtgc

SEQ ID NO: 373861 - DNA, 481 bp, Zea mays
caaatgagaaatatggaaatggaagataaaaatatggtttcgggtgaaggaagttgttaatattaacaaattgttataaacatttgggtttgtacttgccactcaaacttttatctctactactatgaagaaggtaagtggtagactgcctaccatggttctgcctaccccttgttctgcctcctgcgcctccacgctaggcaaccaagaatgttcttaaatgagcaactttttcatgcaatcaagaatcagaagtctatgttggtttacatcttttctgaaagtgatttactgttttatacttgagtaactttgtactatgatatgagaaatccaaattcatctaataattagttaatttgagatgagttgctcctacaagggtccgtactccaatttagtccacccctattgacccatagttgaaatgagtatatgggtgtgattcatgagtcatatctgtgtcaggctcattttgaat

SEQ ID NO: 373862 - DNA, 130 bp, Zea mays
ttcacgcgtacgaccacgcatcctactcgggggtcgagaagaagcttgaaagccttacagatatagtgaatggagcttattgggaagactaaactggagaaaggcaggcccaccgacaagggcgacagga

SEQ ID NO: 373863 - DNA, 158 bp, Zea mays
tcgtttcacgcgtgcgctcatacgttcgcggcggcgaagatcgatcggaacaactagcctacccctaggtcctagcccagagccctgccctgcgcaccaaatcagattgaggagacaggaaagtagagagagcaactacctaccgagacatgccttga

SEQ ID NO: 373864 - DNA, 407 bp, Zea mays
ttcacgcgtccgcggaaagcgttggcgcggcgcgtagcgctgtggctcctgtcaatgacaagcagattgaatctgcctcattgacatcaggcgcagatgctgatgatgaggcagctaattccaattacgaattgctgaccgtgctactcaggaacccggagcttgtctttgcattaacctctaacaagggggagaacatgcctaacgagcagaccattgcgcttctggatacactgaaccaaaccggtcttagcctatcagagcttgttaaccgcctggggaacggtgctgggctcctaaaagagccagagccggagccagaacctattcccgcttcgcttccgtcagcaactccgccagaccgtacatcaagggtttggttgtccgctggctttccatgtcataca

SEQ ID NO: 373865 - DNA, 180 bp, Zea mays
tcgttcacacgttcgctaaactgatggagggggggggtgatgagatacaagcgtgcgctgtcgggaactatcatgcacttgtccgaggcctgaacatgtactatgggaaggcttacattctcgggctgaatgatgagtttccagaactacgtgaacaaactaagcgaataacccgctctg

SEQ ID NO: 373866 - DNA, 288 bp, Zea mays
gggggggcgcaaaaagcaacgtggtgtgcacatttaaaacatccaatgttttaaatggcactgccctttttttagggccccgttggaccatgaggccgggctacaaagcattttgccggtcccagctgctaaaaaaattggcttgagtggcttaaaaaccgattttttcacccaatttttacacacccctttaaatgtccccaagaataactcaaccggccaccaggaagcagaatttgccacttccgtgtttgaacaaaacgaccttgggtcctgtacacacaaaaa

SEQ ID NO: 373867 - DNA, 323 bp, Zea mays
  unsure (1)..(323): unsure at all n locations
tcgtttactcgtgggaaaccttgctcggtttggagctcaacccaggcgaccactgctgtagctaccgactaacaagtgtcaatgacactcacntgtggggcctgctcagctacctattagaactgtagtgactgagacgacactaccacaattgcaactaccgtggacatctagaatcttctccgcaaggctatatataaacacatgtaccatcatatatagattgggatggcgggtgcattcaaagccaaggatgacatcctgtgcatagcattgcggtgtacaaccaacaggaatggttcagctcggaaaatgtgtcgaga

SEQ ID NO: 373868 - DNA, 523 bp, Zea mays
  unsure (1)..(523): unsure at all n locations
gtccgctcggggtgtcgagtctccttggcgcggctgtgtacaccgcgaggggcgccacggcgatgacgggggaggaggcgttcagcttcactaccgtacgggggtgtccatccgcggcgtactttgtgggaggtttgagcgggttcgtaaaccaagccgtgtgcatgtactctggtctgggttgggtagctctgcacaggtggtcagagtttttggtctccttaggctccaaagtgtccagggccagaaatggaaaatttctgcgtccagtgaagaaatcaagggaagatgctactcaaactgacgatgatgatgaaagctaattctatgctgcttcacctggggctcctaccgaagagggctgctcggagctgtgaagctcctctgatgattgtagatgtagacagctagggagccccngcaggatcttcgggtggcgtgctcacagctggtaaaatgatgctggttcaatcgtatgtatttggcagaacccgatgcgctagcacctggacatggtgcgcgt

SEQ ID NO: 373869 - DNA, 265 bp, Zea mays
aggggcctaatgggccatcatgccatttttaattttaattgggaccaggcccccattgccattttttaaaaaatttaactggacctaaaaattggcaaaaaaaccggaccttattggggaaaagggtggttccaaaacctacttttcggattggattttacttaatttttttcaagggggttaatttttaccttgggcccacttggggaccccaaacccggaaactttaagccttaaattttttcaaggggccaaattttggggg

SEQ ID NO: 373870 - DNA, 424 bp, Zea mays
ccttccatgccacgctacagttgatttgataacatagtgtatagcatagataatcaatccatctccaaattgctgtgcagattgatgacatatatcatgttgaatgcaggatggagccttttatcagtacttgcggactaagagttggtcggtaatcagtgcggcacacgacggagggcaggatgccggattgctcatctcgcatttgctgtagtcaaactgggaagcttgtgcaggtggactggtcacttcgccgccgccggccaacttaagcagcgtcttttccagtccctcgccgctgttccatggatgaacctcagccttgagaagctgcttgttgtcgcagatgagatgccacagggggtagttctcccttgccatgacgtggtccccttcccccagcttgagggacgggcagtaatct

SEQ ID NO: 373871 - DNA, 200 bp, Zea mays
ataaaaggaaagggtccacagggccttttaaggtttaatgggctaaaatgtgggggggtaaaaataaattgttacaggctttttccctttcctggggttgttgggttgttggtttcccggagggcccgggtccccgccttgcttaaggttccaacatggaacggggttccaccaccagggttgatgccattgcctttttt

SEQ ID NO: 373872 - DNA, 259 bp, Zea mays
gaaaaccttgggtggaaatttattggcccccattgaaaagggggaacaagggaaccaagctttcaaggccggtggaccaaaaagggaaaacatttttaggtcggccaggttttttttgccccatggaaaattttactccgggccccttttttattttccattttcgggaaaccgggtccttaggggaggctttaaaatggttttcacccctaagggctggttttacttttaaaagggaagcccaaaattttcttttggg

SEQ ID NO: 373873 - DNA, 353 bp, Zea mays
aaaaaagggggttttgggacccctaaaaacccctttggcccattttaaattaccggggggggaacttaaaaattttggtttacctaagggttccggggcttctaagggaagctagggccctaaataatcccccgggcttgggtgataaccggggaccggggtgcaaatgggctacatttacaggggggcctgggccattccctaggtaaactcccccccaacaaaagggtttggaaaaacccccaacccggggtgggaattccgcccacattttttccccctttgggacctgggtggggggaacccaaaattggggcagaaacccccccctttccgacgggctttttaaattt

SEQ ID NO: 373874 - DNA, 331 bp, Zea mays
aacgggttaaacaggtaacaaacccatgcaaaatttaatgtccacaaacgtttgtaaggcattagcatgggttccttttttttttggcaattcggccaaaatccagacccaaagaaaaaggggggtcacgggttaaaataatgttttaagccaggaacgcccatttgttttattaacaccttacacggaattcccggggggggggggttcgaatcgatcaataaacacgggttttgggggggagggactttatttaatggtttaaggggtcaatgggcactggcctgtttgccaatggaactttttggttttcccagaccccaaggggggg

SEQ ID NO: 373875 - DNA, 307 bp, Zea mays
aaacccaaaaaaaggccatttttttaaaattggggggtggtttaaaaccaaacccaaccggtttttccattttaacggaacccagcaaaattttgggtgggaacctacttgccaacccaaacttttgaaaggacccctataattggttgcctggcaaaagcccccccttttttccggaaccgggtttttttcccggggtttttgcttggggccccaaaaacccccggaccggcctttggataacccggccccagccttaaggtaccggaggggtgggaggttttttcccggaaaaattgggcccccc

SEQ ID NO: 373876 - DNA, 325 bp, Zea mays
ggggccgcccttttttttttttttttttaaaaatcaggatttttttaataaattaagggttttaaggaacccatgctttattcaatgggcaacagtcgaagaacaggacaaaccaccgacgggttcccaggttaataccggggcttacaaaaccggggtttttccagcagcctgttaattcccccgaatcctggccctaaaatccatttttaaggggggcagccccaaccaggatttttaatttgggggcccagggcaggaccataaggttgggggccaaaatcgacaaaaaagtgggggttgacagccagccctcttttttggg

SEQ ID NO: 373877 - DNA, 350 bp, Zea mays
gggccatccgttggttggttttgaaaaaattattcggtggaaccaaaatggttttaacccggttggcccggcttaaggggaccttcaaaaatggtggccttggggtggccgggggtacccaaaaaatttggcccttgtccctgggcaagggaaggaaaccttcggcttcaaaagggtctttgggggggttaaccaaattttggtggccattcccttccccggatcccatttaggtttgtcatttgggggttttaaccttaccggcaaatggtggttccaccaggagggggaaaggcaatcttggattggaatggccctttaccgggtttggttaacccttaattttggcc

SEQ ID NO: 373878 - DNA, 328 bp, Zea mays
accttaaatagcatatatataattggactccatttaaaataatttttagttaacataaaacactgaatatgctggtttatagcagaggaggacacatgaccttgaaaggaaaccccggacccaagggggaccggttgagggaaacagcagccatttaattcgtgggaagggggggaatgaacgaaacataatttcttaaggcctaaggctcctccttggggcttagcgatgaagtcatgcttgttacggaaactggggccgccttccgggacggctttgggggcctcttcgggggcaacggcaacgccggccttaaatttttaatggg

SEQ ID NO: 373879 - DNA, 285 bp, Zea mays
gggccgcctttttttttttttttttttttttttttttttttttttaaaggggggccgggcccttgtccttaattaaaaaattggaaggcttaccccgggccctggcccccttggaaatcccaaggtccaaagccaccacctttgggaagaaccgggccttggaagaactggtttttcaaggatttcattacggggaacccaaattttaagggagatttccaagccggttttcccaggttgggaaaacccttaagatgggtttaaagaaagccttatcctgggggg

SEQ ID NO: 373880 - DNA, 419 bp, Zea mays
agctgggaccctttaggggggcccccctttttttttttttttttttttttttttttttttttttttttttttttggcccaagtcccccaaaatttaaacattaaaagggaaacccaaggaaggcaagggccaaaacacttttacgggggggcagactttttccagcttttatttccccaaattttggccccccctgccctaaaaaaaaacctttcataaaaaagggcctttaaattttccccattttcgggcaaaaaaacaagtttatttgggtttaaaccaaacaaaagggaaaaggggacccccaaaaaaaacccccgcaaaccccagtaatttacccccccaacccaagggggtccttttttttttaaaaagggggaaaaacgtttaaacgggggggcccaggcatttaggggggg

SEQ ID NO: 373881 - DNA, 337 bp, Zea mays
gccgcccttttttttttttttttttttttttttttttttttttttttttttttttttttttttttttttttttttaagccccggaaaaggcgaaaccccaaaaatttattatcccccggcccaaattttgggaagggacccagggcctggaaaaatccttggccagggccggcccccaaaaaaaaacaaaaggccaactaatggttaaaccccaaaatgccgggccggggaagaaaggggggggggccctgccctcaaattggggcccaaggccaaaaaaacccgggggggggtgccgggcaaaaaaggcaaggaagacctgggccccggttccccc

SEQ ID NO: 373882 - DNA, 162 bp, Zea mays
aaaattaattgccggagatctgaacacgttcagttaacaatcgtccataaaagtaaaacacttgctcgtttacaaggccagaaaagccttttgttgccgttgaacccctttgcgcgaccatggttgggcgatggcatgggtccaggaggccttactaagcta

SEQ ID NO: 373883 - DNA, 273 bp, Zea mays
gggccggaattcttaacaaaagcccaaaaaggatggtcaaaatgaataaccgggaatccaaaaacccctcaacctccaggaaggggaacccaaggcgggaaattttattttgggggggggggggcctttccccccttttaaagggaaggggggcaccccccgggataaaaaaccccccaaaaaaaacaatccctggcccaattttagcaccaaaaccaaacccccttgggccccaaaacccggggggaaaaaaaaaacccctttttttttccc

SEQ ID NO: 373884 - DNA, 326 bp, Zea mays
ctttttttttttttttttttgggaaaacctaacccctttttttaaccccaaaaaacttccggttggccaccaacaaaaatgggccaaaccggtttttcaaatgggccaaaagggggtggttattatgggaaaccaccagtttcccttacccaattcgggaacttgttaatggggggggggggggccttgaaaccccccaaaaagaatttaaccctttttttgggttaaaaaccttatgggaaattccattcggccggttttttttgggtggtccaacgggaccttttggcaacaaaaatcttggggaaaatttaaaaccctgtatt

SEQ ID NO: 373885 - DNA, 252 bp, Zea mays
gccgccctttttttttttttttttttttttttttaaaaaacaggggggggaaccaaaaattattgttttggggtaagaatccaaaattccaacccccttgaccaaaaaaaaggctaaatatttgttcggggggttggaacttccaacaaaaaaggctttttttttttggccaactttttttaagatggtttccaagggatccttggaaaacacgggcggaatatttggggggggccaaagcatttcagggtt

SEQ ID NO: 373886 - DNA, 173 bp, Zea mays
ggccccgggagttggaaccggttaatcattttggcaggataataaccccaattcccgggggttgaagcctccaaatgtccttggcaattttttttaagtatttttgtcaaaattggcattgggaccagttaaggtcccattcccttgaaaatttttgggggccccaaaacctt

SEQ ID NO: 373887 - DNA, 334 bp, Zea mays
gggttcctttggggggccgcctttttttttttttttggaaaaaggaaaaccaaggccagggaccggttaaaggtaggtggcccatttccaaaaaccccccccggcccggtcttcaagattccagttggggtaacccacggttttgttccaggtaatttaaattcccagctttaacctaagggggttggcctggcctggggtaaaattattaattggggccaattgggcctggcccggggggtccccccaaggggttgggggttttaaccggccccaaaacccccaggtgggggaaattggcctggtttttaggtcggattccttttcttaaggg

SEQ ID NO: 373888 - DNA, 321 bp, Zea mays
ggggcggccttttttttttttttttggaaggcattggcattcttttttttattaaccggaaggattttaacctttaacattttttaaggtttccctggaaatttcgggaaccaccatttggggaaggaaggaaggaaggaaaaactttgggtattcttaaggggccggttacttggtggaaaacattaaaaaaatggggaaaaatggaaaagggggggaaaccagggttaattttaaaattccggatggcataaaatggctggtttttatgggccatggccgggaaggcttttttttccatttttttccggaggttccttg

SEQ ID NO: 373889 - DNA, 379 bp, Zea mays
cttttggggggccggcctttttttttttttttttttttttttttttttttttttttggtggtttttaaaaacagggttggggatgtccccagaaaaatttaaatattgttgggccaagggccaaaaaaaaaggccaaaattttggtgggcgggttttttatttaaaaaacccggggggggccaaattttttaaagggaattgggaaaaaaggggggggggggggcttaaaaagggggggttggaaatttgggaggggggggggcttaaaaaattttcccctttttaaaaaataaaaacccttccaaccctggtaggggtccccagggggggccttgcatcctgaaaagggggtttggccccggatcccccgggggaaaa

SEQ ID NO: 373890 - DNA, 420 bp, Zea mays
ttggaaccttttgggggggccgcctttttttttttttttttttttttttttttttggacccggggaaattaaacgggcccaatttattcccagaaatttggatggttattatggtgaaaaccaccgttgggaccttaaggtgggggcattggggaccttggtttggatgaacctttcctttgcctttgggccagggatttgggtttttaaaaacttacccctggttgaccttgacccaattatttgggttttttacttttcaaaccccggaacattccaaacccggggtggtttgggggatgccttggatttgaattttctttagggttcattcaagggggcccttaccaattggtttggggggcaataaaggtttggggcttaattttttggccccaatggaccttttttttaaatttt

SEQ ID NO: 373891 - DNA, 268 bp, Zea mays
aaaaaaaatcctttagggcattaaaccagggcctaaacaaactgacggtggcaaagttgtttttgggccataaggctttaattggcacaccatatgcccccttgggggtttgggactcgggaagcgtgggttttggggcaaatatttctttttcccgttttttttttggttttaatcctaaaacaacacattggcctgccacagccaccattttattttggggggggtttccggttttttttttccataagccaacctgccaaaaacg

SEQ ID NO: 373892 - DNA, 199 bp, Zea mays
ttttttttttttttttttcctaaatcccccaaaacttttcttcttccaaaaaatggggatgtaccaccaaaaaagggtgcaaacccatggttttccttattttaggggggaggggttccaaagggaattccagccgttccaccaaattttgggggcccataaaaccgttttactgacctgaccatatttttttggggag

SEQ ID NO: 373893 - DNA, 240 bp, Zea mays
ggccgccctttttttttttttttttttttttttttttttttttttttttttttttttaccaacacgggaccttggaggaaaggcttggaaaataaaaccggggggtttggaccaacattttgggccaaaggggggctccaaccattttttcccaaattccaaaggggaaccccccagcagcggcccccatggggggggccccatccggggtttcctaaaaaaacctaaccctttaggccc

SEQ ID NO: 373894 - DNA, 360 bp, Zea mays
aaaaaaaccagaatccaaaaactttttttttaaccaagggtggaaagggaaaaacaaccctaaacaggatttggccccattttttttttttgacaaaagtcaataccaacgggtaaaaacccttcctaaaaaaccctcatttggtttggggggaaaggtttttttcccttattattataaccattattttttccggactgggggggccaaaaaccaacccgaaaaacaaggggccccttccttggttaaaggaccaacccaaaaccttggttggtttggtattcaagaggcccaagccaaataccggcaaaaggcccccccggggggggtccaattcccgcaccccaaaaaataaccccc

SEQ ID NO: 373895 - DNA, 261 bp, Zea mays
ggggaaaaaaaactattcttatttaaaaatgaatgggaggattttagccccttaaaaccaattaggttttggggcccccaaactagccctaaatggtttataggttaaaaccaaaggggttttccataaaaaaaaccatgccttggattaactaaaccaccttttaaccagatcctaataaccgggaacccccgaataatttatacctggacctattggaaccattccaaaataaaaccgaaaacttgccgaaccccaaaa

SEQ ID NO: 373896 - DNA, 322 bp, Zea mays
ctggccaaacctagaaaaaaaagaatgaaaaaaggggggcggccaaaagggaaagaagaagaaaaaaattgggcgggtccgtcgttgggtcaatcaaatgtgtgggggtgggggtgtagtctttttcacttttaatcataaactaatcaccgggcataactaaggacgatggatgaacggaaacgtacttttttaaccttcggggttcaccatatcatcatcagggcaggtttgtgcatgcatgacaatgctgggttggctgctccaatcgatcgatccttcacggccagaggtagtagccgtcaaactttttgccatgggg

SEQ ID NO: 373897 - DNA, 259 bp, Zea mays
ccggaaaatccaaggggttttataaaaccgtggataggcaatacaacaaagtttttactgttaaccacaaattaggaaattactaaggctggtgaccaaggggggttgcattctcttgccgaccagttagagcaaacccaatacccaaaatgtggacaggacttaattcctgaatgggctgctggggctgttgttaagctggagggccatcaggcgagctgctgttgccctaaacctgcttgcgggggttgccgagatg

SEQ ID NO: 373898 - DNA, 298 bp, Zea mays
ggtaaggattaagggttattccaatattttttttaaggaaaggggccaatccttaatcctttttttttggttggaattttaatatcccaaacctaatttaaacctggttgattttaagggggcctttcccacctggataaaattttttctgggccagaaaggtggttttttaattggggttggcttggtaggtaaaaatttcaatttcctttaaaaaaacctacctaattaatgggaaaaaaaaattggaagaaatccctttaatttttcttcaaaacccaaaaattttttttttttt

SEQ ID NO: 373899 - DNA, 80 bp, Zea mays
gggcccacgcatcattttttatataatatacatggaaacagacagtaggcacgacagccagtccacgtggcatggcaggg

SEQ ID NO: 373900 - DNA, 355 bp, Zea mays
ggcggaaaaaaaaaaggtatatacatgggtggcccatgtccctaccatagaagtaaaccccatttcctaaagctgtaaaaaacacttaagggtttgttggggaaacaggggaattggggggacccgaggggctaaattcctcttttttttaattttaaataacaagggggattttagccccctgcaatctaattgctttaaaacatgccattttcttttggggcccacttaattaacctgccaaagggcaggggaaggcaaccccacactgaataaattccccctccataaggggaaaaatgcacattcaactttggtggaacaaacaaatattcccgcattgggggcttagctg

SEQ ID NO: 373901 - DNA, 159 bp, Zea mays
ggaaggggcatacgtaaacatgggggttccatacacttggggggattaaaataaactggggtcttcctaataatgggggccgttatggcccattactgttgggttccgtttaaatttcggaggcctcgttgatgctgttgggggcctaaaacttgggcc

SEQ ID NO: 373902 - DNA, 230 bp, Zea mays
ttttttttttttttttttttttttaaaaaaccaacggggcctttaggttaattttttttttgggggttttttttttaacccttgggtttaaattggggggaaaagaaatccaagggtgcaaaaaatttttacccaatggggcttaaaaccgaaaaattcccctaatttaatttattaggcccgcccggttggaacccaaatggaaagaacaaaccggggccctccggggt

SEQ ID NO: 373903 - DNA, 303 bp, Zea mays
ccctcccaatttttttaaaacgttgccatgcaagccaaaaagggccatttttttggaagttgggtatttaattaccggctgatcttcctggtgggctccttcccatgtttgaattctgtcccatttccaagcacatgttgaagaccattgatcccggggggttctatgaccaggagaaacccctttcccttaaagatttgaagtcctgggtcttaatttaaaaacaggcattatggcacactttgggggttattccatccctttttactaagaaggggtcacccaacccttaaggccttaaaa

SEQ ID NO: 373904 - DNA, 236 bp, Zea mays
gctggtgaacccagccttgcagtataaacacgaaaaagtacactgttaaacagccaatccagccaccaccaaaaaaaaaaaactccagctgaaactacaagtttttttgttcagatcaggggacatccattcattggaggcagagcacacaatgatcggttcgttccaaaaggaccaaaaaaaaaatcctcatgctgtttttgtccaggaggatctagctactagcaattacagga

SEQ ID NO: 373905 - DNA, 218 bp, Zea mays
aagcccccttaatgggacggccttaaaaaatttatgggagggttccccgggggccaaggggcattaatttaaaggcaaaaactttttggttcttaagggattattacggggccccctcggggggggtgccccggtgttttgaaccaaacttttttcaaaagtttttgaaaaaccccccaaaatcactaaaaaccccgaattttttttaaattggttcc

SEQ ID NO: 373906 - DNA, 216 bp, Zea mays
gggaggaaatttttccatattaaaggtttggcacaaaacctgggcggacgggggacccctttacatccccccttttaacaagtgggccccttgtccccaaggacagaacaataagggtttccttgtcccgtccaacaaaggtttaacttttgtccagggaagcctttggttttccaaccatatggaaggccaaaaccttttaaaattccttttaaa

SEQ ID NO: 373907 - DNA, 196 bp, Zea mays
aaacgggacggggggccttttggtttggcccttaaaaccggggataaacaccggggcggttttactggtcaagcccaggtagaaaaacccggacgggggggccaatttttttccttacgggggggctttaccttaattttccaaaacccatttttcccaacttggttggggggtggggccctacttaagggggccc

SEQ ID NO: 373908 - DNA, 205 bp, Zea mays
aaaactgaaccaaaagtgtttgttgtacattacgatgggattatggaacccctaattgccctgaaaatacagcttttttgtttcggcttgggctttataaatggcttgggcacaaaaaacaagggtttttccatcgcattaagggttgattcatgcccactgttggagcagtaggaatgtccgcctttcccaaactaaaccaaaa

SEQ ID NO: 373909 - DNA, 155 bp, Zea mays
gaccacaaaagaggggttccttaaaggaaaaggggggttttaattactggaaggggctggacaaaaccttggccttaaaaacaacccaaaaggggttgccctaaccccggcaaaaaaaaaggggaaatttttgttcaaacaaaaagggcggggcc

SEQ ID NO: 373910 - DNA, 450 bp, Zea mays
tatcttcgaggccgcttccctgagaccgtcgttgccgggaaacgcgccggcgacctcgccggcgaccttctccgccgcctccgccaccgtgtcgaccacctcgatggccacctctgccgtcttctctatcttgtctgtcgccgcaaaaagttgcaaccaaatcatatacatgcatccatgctagctagaaatacgatttcagacagtgatgagtacgcgatctctgcttagcgtttaccttctaaagttctgaacctcctgtagataggtatcgcaagtatgacggccccggccacccacttggccctgacgagaagcggggagagatttcggatcggagcgcgagatggaaatcaaccagatacgtttcgaaacatttgtaacgctgaacaagcaacgcaggtatgtatctgttctgatcttcactcaccacggaggcatgctgctggg

SEQ ID NO: 373911 - DNA, 442 bp, Zea mays
cgttattcgtggggtgtaatacattttttaccagtgctgttattgtttgagccttgagggcagtaactgtttccgtgctccggtaatggaagctgacttttgtttagggttaaaatttgcatactggtaatttattcagtattcagtgatcatttatgggcacttgaaggacaaatgctggaacagaaatttgttgctagcgtcaccagtgtggaccctttgatccattgtctgtgtgatattgctttcagccccctccatgctttgcattgcaattttgggaagacaaactggtttgacctaggagatcagctaaccagcagctcagacttaactgttgttaccattgaaaagctagttgtttgcctttaaaattgtgcattggcttagatggtctggtatgcaaactagagaaatggtcagtgggcatatctgctacatt

SEQ ID NO: 373912 - DNA, 196 bp, Zea mays
accaccaacaggaactttatttctggaaaacgggcctgtcaaacggcctttggaaattcaaaaatacactgaaaagaaaaatgatgtgctggctatacagataatcatctcctctagggctaagtgctggcttaaaaaatcgatgggacctggcacttatgggaaaacatggaagtagaaatgcagccgtccaggt

SEQ ID NO: 373913 - DNA, 137 bp, Zea mays
agtttttaggataatatgctatcaagcagttctatagagtttactacatcctttgatgttttaatccatgaaatacagacctgtatctatttgttttggactgcgttccagagaaagaaatgtagtttggttatgtg

SEQ ID NO: 373914 - DNA, 482 bp, Zea mays
cttgctttccctttcttcaacctccagctcgcggagcttccctgcgcggcgcggcgctccctcaagctcggtcgcctctccctggcgcgcgctgctctagcctttcgctccctggcgctcgcctagctcgcggagctctctcctcccagcgcgcccatctcctgcgccctgctctcagggcgcttgtgttccggatctcaccgcgtcactctctctcgctggacctcactccctgcttgcctcgacgtcggacgtgtccctctgctccacttcgtctggacgaagtcaaatgcttgagatcgccctgccttcatccccgttgccaatctccatcaccggtgctgagtctccctccctcgacatgcttaacagcgcccgtcgtctcggactccgctgtcgatccgcgccactggttcaactcgccatcaacacaacgccgttaacatggagcaccgcctcgagctccctatgccgcacgctct

SEQ ID NO: 373915 - DNA, 343 bp, Zea mays
  unsure (1)..(343): unsure at all n locations
cggaccttctgtgcgtcctccttgacaccctcgacgctccacggagctcggaggcggtgaccgtcgaggaggtcggtccctcgaggcgacccggggaaccggttgaaaagtacatcatcctgcctcctatcgttggggcgggtggcgacctcgttcgtgccagatcggacctctcgacatggggagggccgaccctgaggtggatggccaccgagggcaacccctacttcgtccttaatgacacggaggagagggagatggnggcggagtattcgggcaatggctcaggtaaggaaggtcgatacttcgcgctagagatccctttttcgcggagggatgatgt

SEQ ID NO: 373916 - DNA, 289 bp, Zea mays
atccttaaatggggattaaaccgtgcaagaccaatagtttgttctggcagtaaaatcccaattttgcagttaatgaagagagggcctgaaaattgaataatgacgcaggttacataccaccgatcaccgatttggcaacatcataaaaccaagcacggatgggcacatccaactaagatgcgcaggtggcaattatcccccagcaacaaataagggttggttggcgaacataagcagaaatggtccacaaatcaacatctttgttatcaatggaggaaaaatgaaccct

SEQ ID NO: 373917 - DNA, 183 bp, Zea mays
aaaaaaccaggaaaaatcatgaattttttttggaccgggcccaattttactggttgaacaaaattggtttccgggaaacttttttattgggacatttgggggggaacctaaaggcccgggggcttaaaaaaagggattggggggggggtttttaaaatgacgggggggcccaaaatggttttt

SEQ ID NO: 373918 - DNA, 465 bp, Zea mays
cccactcgtccgcccacgcgtccgcttccacttccacatcggtagccatcgctggctggctccaagtactggactccctcctgagtcgggaggaagcaatggcggctgagaggaggcagcagcagcagcagcacgagggcgcggtggcagcggcggagccgagcgtggcgcggcggctgtggcgcgtggtgcgcgccgtgctgtacatgctgcggcgggggctgccgtcgggccgcaagctcggcatggacctgcagctcctcctccaccgcggcaaggtcgcgggcggctcggttcctcgcctcggaccagcacggccgccacgccgcggccttctcgtccacgccggcgccggcgccggcgcggggggttcgttctcgtgcggcgcgctggaccggacgtgggcggtgcacgagccctcgcgcaggcggggcgagttccaggttcagctgcagcaacacgccc

SEQ ID NO: 373919 - DNA, 440 bp, Zea mays
gagaaaaataacaagaggtccaacctcttggaaactttcctatggcttctatctctctacacaaattcctgcatagcatccaaaggcaaagtgagaattgtatctgcgttctcaattactataggagtgcaattcatagccaactctaatcctatgtttttcctatttttgttctaccgtgtgtctaaatggggccttaagattagttaaatgtccgacactgtatctgttgaagcaccgtacctttatgtttttcgttcgttttgttctctggaatccttttttatgccacgtgattctgattagaggttcaccttaattctgttctaccgtgggtctaatgcatagagggttatatcctataaatgctgaagatcatcatatttgtgtatactgttattttttctgcgtgggaggatatctcatgtgcatgaaactga

SEQ ID NO: 373920 - DNA, 307 bp, Zea mays
ccttgttccgtctccatcgagtcgagccccatccccacgcgcgcctccttcgacaccatccccgcgaggtccatccccacgcgcgtctcctccatcaccatctacgcgagcacctccgccgacgctccaacatattctccgacgctatcccctttccctcgacaaggtcagatcctatagttcttgatcctgctctggatcccatcttgttgtgccttgttgcgcccccttcctgcctgctcctgttgatctcgacaaggtttgcgcggggtaggcaaaaccgcctagcaccagtcgagccctcccc

SEQ ID NO: 373921 - DNA, 257 bp, Zea mays
ccgtgtcatacccgcccgctccttttctcatagtcatccgggaaacattctctcgacggccatggtgcagcagcagcaacagcaccgaatctacatcttgcagttcaggaagggcgggccggagcaggaggtgtcatgcaaggtgtcgcagcccaagggcggcggccggcggccggtcatgtactactaccaggaccacggcagcggcggcggcaagaacggcaagaaggtgcaacctagggcgctgggcctgcgac

SEQ ID NO: 373922 - DNA, 134 bp, Zea mays
aatccaaaaaagcagggcgatatatgtgatgacatgaatgtgcatgtgagtataactactcgcataagcggtaaataacacgaaaacatgcacgaatccaaagaatagggtgtacccagcggagggaccgatgc

SEQ ID NO: 373923 - DNA, 261 bp, Zea mays
ttcacgcgtccgcggacgcgtgggatctcaggtcacggaactctatccactcgtcagcaccaagctagctagtcctcgtgcccttcggacgagaggcgcatgtgactcggtaaggaggaggagggaggagatcaggagatggaattcaagaactgcgggtcgtcgtcgcagccccggccggcggtggtagtgggcgaggaggcggcgttggcgagacagggatcagtctactcgttgacgttcgacgaattccagagcgcg

SEQ ID NO: 373924 - DNA, 280 bp, Zea mays
aacagtacaaaccatccaagtggtaataatacaaagtctggaatcaggtgcaactcaaaagaccagacaagatctcaattatccctcatgtttgtgttcacgactcttattaccattgaaaacttcagaaagtaaaggtccgtgccatacatgtacatctagtctattatccagctgatagtagagatactactactacgactccagtgacactaacaaaacggttaacccattctcatataggccatagcagcagatcaaaacttccgcgcaacggacc

SEQ ID NO: 373925 - DNA, 298 bp, Zea mays
ccataccctcctccttggaagcgagggaggagagtggagggagagggaggagccaggtactaccgcagctatggaggcgaccttgaagatagcacggcggccctatcagaaggtgagtcacgatgctctactgaaaccagctcgtgatgtttgttatgaggtgcaagcatgagctcagtagggtgcagtaggcactgagattgatgctaggagcattaagggacctgctgatccttgcagagcagaagctttgcagcttctgagatgccaaggcgctcacttcctgcaggaaccaatc

SEQ ID NO: 373926 - DNA, 431 bp, Zea mays
cgaacgatgcctgcatctcttcactgaagtaaacagatacggtatgcatcttattctgacagtcgttggaatacacatgcagcctcaacacgcgttattggacacgcaggccggggagttcacgacatgaaagaaacaagtcctgtaattgcacaacacaacccagcgcgagatggtctgctctataaacaaccagccgagctcttcatggtgccatcatcatcacgactgcaaggctacagtggaagagagtagccgcggaggtacttggagtccaccttcgattcgcggaccagtgctactcgtccagttctggcgacctcacagatgccatatggctccaataacctttgtagtgcaaccatcttgtcaagatctccagtaagctgcaatcatcaatgatccctccattatgcaagagttttgcaaca

SEQ ID NO: 373927 - DNA, 178 bp, Zea mays
gggcaccagggccctgacccccaaaaccttgttcggagggttttgcctaaaaacctaaccccagggtaccttgccttgtttgggccagccttggggaccaacctattaccctacccccagttttaaggtccagaaccagcaccctaaaaaagggctggcttatacctgagggttgggt

SEQ ID NO: 373928 - DNA, 258 bp, Zea mays
aacaaaagcccgggtctgccacccatccaagttcctggttaaatggtcccacagggccaaaccattcctgttttgcacaatttttggcatagatcacagccctcctccgttttttttcaggggtttcccagcactgatcttggaagggggaccaagggcagggggccttaagcttaccatggttttgccaatccaaaaggtggcacctttagctggatggagtggcaaacatcccaccatcacattttttttaatttt

SEQ ID NO: 373929 - DNA, 295 bp, Zea mays
gggccgccctttttttttttttttaacagggattttagcccttagggattggaaatcttgggaggcaggagccccagaggggttggagggagttggaccccctaatttttaaataccgggccctaaaatgggattaactgggatttttaaggaaagaatcacccctcccttgtggtttccatgataccaaataaattaagcttaggacctagggtccagggttccaggggttttttggaatggccttttcttacagacaaggaatatttggtttaaggcaaaacccggccgttgg

SEQ ID NO: 373930 - DNA, 262 bp, Zea mays
caaggcaggcgggaaaggttcctttcctttccacacgtgggcttaaaccgggggctgcggggggtcctactacgacctacggccttccactagctgttggcttaatattttttccacagccaactttaaagcattgggccctggggctggcttttttttttttttaacacatttaatccatggccgcggggccacgttccgttttttgttccagggaaaacaaagttaaaataagacaatggggcaactcctcctcccaagg

SEQ ID NO: 373931 - DNA, 291 bp, Zea mays
ctgggaccctttaggggggccgccctttttttttttttttttttttttttttggcgggcattaagggtccttgtcctttcaacctaaggatggattcccatccagttacccaaaaaggcccaccgcctggccccgggattcaatttggtggccccaaaatttaaaggggacctttttaacggggggcaaaatttcctggtgggaaaaccgccggcccaccttttggtttaaaaccctttcctttaacaatccctttttaccgccgaccctttttttaatttgggcaaggcc

SEQ ID NO: 373932 - DNA, 285 bp, Zea mays
agacaacaaaaaacgagatggcactatcagtttttaaggggatatactagtgggaccattttttataatacaataccacgaattctaattgggttaaatttatagactcctagaccataggagtcccaaaggtttttggaccttgcatataaaaacataatctgttttaaaacaaggaagccctgggtttggcggctttggacaacctggggggcagagccacgaatcccacgccgatcacaactttaaggccccccaccagggggctgaaaaaaagagccccag

SEQ ID NO: 373933 - DNA, 196 bp, Zea mays
accacaaacatttgataggttaattttcccctttcctcacaagcagggttccaaatgacatgggaatgtctagtgggcttagagcacgctgggtaaaatcttagtccaacatctttacactagagattttggccccaactttgctaaaaacccacttttcctagctcgtaaggggcaaagatgaaaaacatggggg

SEQ ID NO: 373934 - DNA, 267 bp, Zea mays
gcaaaaaaaaaccggtttttggggcttccccaaatgggtttgggacccacttgcccacttgggcaattaacccatggggggccctgccttcctttgggttccaaaaacattttttggttaccggggtcaaatttttaatccccaggcaagaaagggttaccctccccattggttacctccggccttaaatttattgcccggccaccagggaggatgggtaaaaaaaacaacccccaaaatttgcccaccccattttttggccccaac

SEQ ID NO: 373935 - DNA, 333 bp, Zea mays
accaaaaaattctttttatttttaaaacggagggtttttccataggaccggttcctttttttccaggccctgatttcctcaaagggcataactttttccaatttcaggagggggggacccctccaaagcttaaacataagcctaactaattttcctccaaaactggaaccaccctccagccttaggaccccctagggtcctcctaataacctacaacaccatgggttcaaaacccctgagtccaaagggtcctttcgcaggttttacccgcctaaaaaaaaggactctaagggatatgctggttaaatgggaaccaaggaaaaggctttagca

SEQ ID NO: 373936 - DNA, 402 bp, Zea mays
aaggccaacgttgcccaggtgcacaaaactcatgtcttgtgacagcagtttccaaatcaaaggtatgacttaaatgctattcaaagccagctaagaaaactcagttaatgctattcaagttacaccgtatacaacaatctttggtcaaacatgcaacatgtgcagcaaagctggcagttcatacgcaggcacgcaagtaaccgtgcccggttgcctgccgttattaggcttgaaagacacaaaacgggggttccccaagaatagcggagtgccctccacacaccatgaatcttcaatggagggaagtctctgctcactatttatagaccgcccaccgattccaaaaaaaaaaagggaagcccaggggccaaccattctcgaagtcttttcagccagactttt

SEQ ID NO: 373937 - DNA, 351 bp, Zea mays
aaaaaaaaagacccgggacgaccagccttaaaaggtaattgttttacaacacaaacgacacaattggaaaaagaaagatgtattttcatcgccgggtttaaatggaaaaccccccacaggcctaagggggggcttttgatgagctaaaccccttttaaaatcacaaaagttggattgatgggccgcccctgctgttgctgttagctactagggcccctaggcccagccaggggccaccgattgttttttcaccgaagccaaggggcaaaactggtggggttacaaaccggccgccgtttaattttaaaagaaaacatcgggcttggataacagtttttgtttccggccgtt

SEQ ID NO: 373938 - DNA, 378 bp, Zea mays
ataaaaaaggggccaatatttatgatatagatccttcattgggtatattttatcctggctatccatattttccatcataaatatggccaaactttaaaggggttagctaaaaatagaatgggaattgctcggagtaggtgggtcccaagttccttaaagctcaaaccaccaatggttccgacggcctaatccatgcccacataaacggatcacaattccaaaattcattcaccatgacagcataggcttggggggggggaagtatgcccaaaaccagcttctttactgtatggcccactttggtggatccattggggggttgggcctacccggggggctcatcaaagggccaaactgtagcccccaaaaccttgctta

SEQ ID NO: 373939 - DNA, 350 bp, Zea mays
ggggcggcccttttttttttttttttttttttttttttttttttttttgaggacaaccggccctcaaatgggttggtaacggggaagccaaatccccgttttaggggggccccctttaatgggggtttcccaaaattgcccacatggaaatttttttaaaactgcccaaatgcaggggggggattttttggggggggcttcaaaagggggccccgggccctggaatgcccaacaacaaggttggggccccaaacatggaaaaaaaagggcgggggggcaagggaacatttccctatgaaggggtcccggggtttacaattttcctgatccccaaccggggggaacccccc

SEQ ID NO: 373940 - DNA, 284 bp, Zea mays
caacaaaggggtgaaccatgaaaattggggggaagggccctacccttttgaccagggcggggaggaaccagggtaaaatcggccgttcgttaggatgccctaagtggatacataaagggccttccacttgacccctttttaaacgggttggttcgcccttcccttatcctttttccaatctttgggcgccccatccccgtttgggggggaaacccccccgtttcttgggtgggcccccgggggcttttgggaaacccgggggaaaggcccccatttgggggggg

SEQ ID NO: 373941 - DNA, 145 bp, Zea mays
gacaggccatacacccatacaaacgggccctgtgtatattatcagcaggggcaaaggaacaacagcttttactaggggaccatctatactagaggcctccaaccggggccggacctgcgggccggcaatggttcccacaggtaga

SEQ ID NO: 373942 - DNA, 271 bp, Zea mays
atagcgattggcctcacaaattattaattgtgtccatgctttacatcacagggtgcttacaataatgattcaggccggggccccagctcgcaaaagggggcactccacccctccccatgtttgactgtacccctgcccattttactgaaccccgaaccaccatgtgccaactggcactgttgcaaacgcacctgggagagggcgggcttagaaccaacatcccttgaaaggcatcattgtgcaaacaggatggtcactgaccgcagggtgg

SEQ ID NO: 373943 - DNA, 348 bp, Zea mays
aaaacccaatcccaggcccataaatcaatttattttaaaatagaaaaccgtgggaattgaaaaagaaacccccattttaaaaggggcccaaagggatttggaatggccccgaattttaagggtggccccggccggcccttgttacctgaccttctttatttgggacaggttccattggccccccccccccaaaaaatgccaaccggggggcctttttccggaaaaccaagcaaggcccttccttccacctttaaaaccccctggtttggttaagcaaaatcccaccttatttttttttcccggaaaccttttttggaacctgaattcctgatcaaaccccctggcccg

SEQ ID NO: 373944 - DNA, 360 bp, Zea mays
ggggcggccctttttttttttttttttttttaggggccaacgggtaagggggttaaaggttggcaaaaaaccccgccggtcagaatttaaaccaaattgggattttaggacaccttggccctccccaaggacccaaaggcggttaccgcctggttgaccccccaatcccggttaaacttaaataggattttttaataattttggccggatttaaggcaaatggaaccagggtgggctttaagtttggggggaccttttgggggggttggtcccaaggggggcccagccaaaccgatttcttcggaactcaaaaattgggttaaaaagaccatttgggggggttggtcgccttccttaggg

SEQ ID NO: 373945 - DNA, 401 bp, Zea mays
gacagggacttgggggaacatacagtacaaaaaacctggttagggtacaacaatttttgcggggtagctcagttcaataggcaatagcacagggaaacgaccagagaatgtccataacaaacaaaaataattcctagtcctacttcagatatttcagcttttccaaccaaataaaaaaaaatttcctttagatatttcagcagcagcgacgcgatggatgccaagccattttttcaaaataaccactgaacaaattgtaccaccatcgaagttgtacagaagaatttagtaaaagaagctagagcagccattcaatttagcacttgaccgagtaggcatccagtaggaacctcgagtaacatattaggcagaacccctcacagcatttaactgtttcaaga

SEQ ID NO: 373946 - DNA, 287 bp, Zea mays
tttttttttttttttttttgggcaaaaactttggtttggtttagcctttatgaaaaaatttttgggttaccttatttgggcttttgggctaaacctggaaaccttaggggaaattctttatagacccttttaccccggtttggaaacataattttccatgaaccgggaaacttgggggggccctgaaaggtaaccccccctggacataaaaccttttttggcctttttaccacaaagggccattattttctaaggggattcccatacaaaaaaggcaggggaattag

SEQ ID NO: 373947 - DNA, 360 bp, Zea mays
caaaggcccagggaacctgccctttaaaattttttaggaggaggaaaagggtttaaaatagcccaggttccaaccattaagttctttacgggggccagtccctcttataggggaaagagtccaataaggccagactcaaaaacctcctaaaatagaaccagcgggattcacccttttgttagggaagctgccaaaaaagagaggccttgggccccagttaatgcccacagttttttttaataataagcctgccaaaggatagaggggagacgggggattttgcccatcaaaaccgcatttgttccgggggttccagatcatccaggcccccaaagagatcagggaattcagacctttttt

SEQ ID NO: 373948 - DNA, 293 bp, Zea mays
gggccgccttttttttttttttttttttttttttttttttaaaaaaaagaaagggggacccttttaaggttgggggttggggtttgaaaaacggttggaacccccagtatttaaaaggaactgggggggattttactagaaaatttttttccgattaagggccatgtccaaccccacgggggaagatgggaccagtgggaagtcaaaaaaacgttggaaacgttttgattttttaattgggaaaaggcccaaaaaaaaaaaaggggcttaaaatggatggggtttttaattaa

SEQ ID NO: 373949 - DNA, 268 bp, Zea mays
ggccaaaaggccgggttttttccggtccaaagggggaaccaccaaacctcgccccatgttgggtttaatggggccagggttccaaaaatttaacctggaattaccttttttttttgggggccaccaaatttgaatagggggggttggttgcacattgggttggttccatacccaattgggtgggccgtttggaaccgtggggggggggcttaaaaacccttggccattaatatgggggttgaagggaagttgttccccaaaagggttg

SEQ ID NO: 373950 - DNA, 89 bp, Zea mays
ggccgaaggtaactgtgttttttaagaaaacacatactaacaaattgcaatcaagaggacataacaggtcagcatacatttgtttgtcc

SEQ ID NO: 373951 - DNA, 229 bp, Zea mays
caataaaagggtttggggacctggaatagttaaaatttttgggttttccctatccattatggagaaaataccttttttaacaataggagttattaatccggggacggttttaaattataaaagtgggttaagaagttaaccgccgggggggcggcccggcccgcccacggccagaacgttgggaatttcccgccccagaagttgttgttcaaccacgtgccgttggggg

SEQ ID NO: 373952 - DNA, 209 bp, Zea mays
ccaaaaaaaaggcaatctatcccttttttcctcagtggcctggaaaccatggaagtaaaaatttacagtcattcttcacatgaatcaggagatgttttttgggggttctccagaaattttgcaccaatgatgtccggccgagatagattaaatgaataaatcgggtgggtatgtaatcaccaaatggaaaatgggggggggctgggggg

SEQ ID NO: 373953 - DNA, 287 bp, Zea mays
ggcctgggttcgggttaatatgctataccacagggccatcccattgttgttgcacccataaaagtccagagcaccaaaagggcaagaggaaatccaattaatccccaaccgggcagtttttttttttccaaaaggggagggggcagctttcatggggggggggccccgatcaacttgaaaccaaacccagaggggcgtggggcctaaaaaattatggtcgatcaggcctacaggaagtttttgatgtccaatttcctgacataaggcatttcctaattttgaaactc

SEQ ID NO: 373954 - DNA, 279 bp, Zea mays
gccaaatcagttaatgggggcggtaaacttggcaattcaccgcaagaaactggcgccaggcggggttaaaggctttaagccttacaaacttcccagcttttgggaacccaaattaaacgttgcgggagggagtttttccaaacttacaacggttgggttaatgcgaccctgcgaagtccaaacgataatttaaccaaagggttgcccagataaaattaaaggcctgtcctttttatatggggattatataaaatccaaaaggccccccaattccaagaa

SEQ ID NO: 373955 - DNA, 330 bp, Zea mays
gggccgcctttttttttttttttttttttaaaaagggggggggggaaggcaaatttaatggtggaacctttggttccaaacatccagaaccaaaggcccgggattttggccgggccttaaaatccatttcaatggtataggaaaaaataattcttcatttcgaactaatatccggtttaccaaaaggatttgaaattcctttttttggaaatcttggctggaatggaaaactttttttccttgaatctggaccaaagggtggaatccaacgcccaagggaaaaatccgttttggtttttggggttagttgggggtaaaaaaatacatttg

SEQ ID NO: 373956 - DNA, 287 bp, Zea mays
aaaaaaaaaaaaggggaggggaactttccaggggaattaggggcccccccctaaataaatccctttttaaaaaattccaattttttacaggtttacaggggcgggggaatccatttggcgggggggtttcaaatttcccatcccgggaattcaagctttcaaaccactgtttttttttttaacaattttcccggctttgaaaaaacatttcccccaaggaacattgtttattttaattttaaaagacctaatggcccttgacttaacttgtttttggggaaacgggg

SEQ ID NO: 373957 - DNA, 293 bp, Zea mays
ccatccggaagggggggttaacaaaaccttaaaggacggggccatttcccaacaaattatcccagaggggaaggccgatttaatcagcccactaggtaatataccagaaaaacggttcgggccctcaaaatttggcttggggttaaaaaaaaaaggtccattccgggactaaaaggctccggtttaattcaaaaccttaactttttggttttttccggggcccaagtagtgggagctggggaggaaccggggggcgttatttttgggggccctggggcaaacctttcttcctt

SEQ ID NO: 373958 - DNA, 414 bp, Zea mays
gggaacagatcaagcggaacattcagaacatatcaatcacagggcatagattcttactgggctacatgcaaaatacatgcaatggcaaggtgctactgttacacgcaatgcaagcagccttccataatccatacagggcccccatcttggacgactgctgcgcatggatgccaagtttcgataacagatgccatagataaaatatcaggagggcacacaacatattatactctgggccactaagatctagctacttcatgggccggtcatgctttggcgcttgctgtcgatgatcatcatgctgacctgaagacaaagacaatccaaccttgttgagaaccctaccgccaaagagctccttcccgatcctcgctttgaaggggaactgtttcttgaagcgattgcggaacaatg

SEQ ID NO: 373959 - DNA, 324 bp, Zea mays
gggccgccttttttttttttttttttttaagtgggaggatttttccgggggaaaattccaaacaaggccaaacttggggtggccaaggacaaataaaatttcaacagatgggttttcccaaccagggggaaaaaaattgaaaacgggaggaaacggggggttccaaaaaaaaaaaaacttggaacctttccaacttaatcttttaaggggacaaagaaacaatgcggggagggttgggaaccctaacccttgggttttttttggggggcaaccttcggttcaaaaacttggcctttttaattaaggtccggggggcccccattt

SEQ ID NO: 373960 - DNA, 297 bp, Zea mays
ggatggagccatgtggaaaagtccccattttaatgggggggggggcctggccctgggtttaaggtttttttaacacaaaagggaaagcattagttgggggaaccaatgttgggcgttgggaccaccaaaaaagcttgcttgaccaagaacacggttttatttgaaaggcctaaggcctaagttaataagttgcccgtaaacccaaaacgcaaattttcccccaaaaatttttagcacatcgggggggacagtgggttcggcccaaaaaaatccacagggggacctcctttccaaagg

SEQ ID NO: 373961 - DNA, 374 bp, Zea mays
aaaaaccccacccctggcttaaaacgggaaaaaagggaaccgggcccccagggcaagaagggatttcggggggccccttgcccaaccaaaaaataaaccgggggccccccgggggggccccaaccaccaaaggctttccccccccaccggccccaagggcggaaggttttcgggggccccaacccggaaaggcccggggttccccacaaccggccggggggtgggaacccccgaccccgggggcaaaaaagcccttccccaggggggggggggaaaaaattcccggggaccaaccccgggatcatacaaaaaaaaggggccccctgaaaaaaaaaccggaaaggtttttacccccaaaaaccctgggggggggg

SEQ ID NO: 373962 - DNA, 209 bp, Zea mays
gggccgccctttttttttttttttttggcccatggaatactggagaagggtagggaaacctttggccctgggaggagttaatcccccccatttttttaatgggggtgggggaaggtggttttggtggttacaagggccttgggggttggggtttcaacagggttccaattaccaaagggggatccattaccgggggcagtggtttaaac

SEQ ID NO: 373963 - DNA, 372 bp, Zea mays
gggccgcctttttttttttttttaattggttcgaaaaaaaaaatgggcggattttcttttaatggattttttcccaaccgaaaggatgggacccaggggttaccaacccaaaatttggtcaagggataaacaaaaagggcaaaaacttttattggcttttgccttttaaggagcggtttctttttggggaagggacccccaattcctttgggaagaattaataaattggaacttaatttgaaaggcattttttgacccgggcccttttgggaaggttttaaaaacccaacaaagggaaggggtttttcttggttaaaaccctatttaaatggaacttttccgggtgaaccttttttaataccgcttggtttt

SEQ ID NO: 373964 - DNA, 182 bp, Zea mays
aaaccaaggaagacggaacatgtttgatatacccggccgtccccaaattgccttacatgagagtggatggacggagaacatgaagcaccacagagacacaggttgaaggggaacaaagggggaaccgggccccattaccaccaccagaccagacgacgcaaattttatttagccaatgccat

SEQ ID NO: 373965 - DNA, 206 bp, Zea mays
agaaatagttttttaaggaaaagggcaaaaaccccaaaaaaatttcccatgaaacaccaaagccgttgtccacgccacatagttaacctacatcctggggacctggcccattcataaccgggcaatatgttaatcggggggtaatagaatgatgaagggaaacctatgtccaggagacgcaaaggacaacaaggaggggggggggg

SEQ ID NO: 373966 - DNA, 290 bp, Zea mays
accaaaaagggtttttttaaaccttttttggtaaaagaggaagcccttggtttttggtggggccttgtaatacaagggttgaccccacgggaacaaggattccccccgggggggggcttttttggtaaatgggggaacccccagggggggttcttgggcttgttggagtacaaccaaaaagattttcttcaccttaaatttttttttttataaaaagcccttcattcaggggtggtttgatttggacccggggggtggttaaaaaccaagaattttggaggggttctttt

SEQ ID NO: 373967 - DNA, 275 bp, Zea mays
gccaacccgcaagttttgtaatatcaaaacccattaaaattgggcgtacataggggtcaaacaggacaggaccggtccggggtacttccattatgggagtacagggtccgtatgccttccttaaccggttcttaaacaacaaggaatggggcaatacaaacgaacaaagtttaaacgttccttaagaacggggaactaacacttgggcatgcatgcaaaatgaccggccgggtcctataccattttatttccgatccatgatccatgggggaagg

SEQ ID NO: 373968 - DNA, 325 bp, Zea mays
ggaccagaaaaggaacgggccctaacataggagataagcagtcgcagcctgttgcaaactttggccgggatgatggggacaacaatatttatcgtccgtttttttgagaaagtctgttgtatgttcttattggacatatataggtattgttttcctagcaaagtttggcagttgggtcagtattcagtccagggcaccgagatatatgcgtgaacctgttttattaaaatcgaagggaacgctcagttaatcagagatgtatggtagtaccgaagtactatggtcctcctataaactacgggggcaaaaaaaaacgggaacattt

SEQ ID NO: 373969 - DNA, 228 bp, Zea mays
acggaaagagttttttggttgtttttttacccgcagaaactaaaaaaattgggaagggcttccagtttacatattcccggaccaacagttccaaggggcggacaaacaaggagaatggggaaccctactgggcaggggggttcccatttaaaatttaacaccccatttcccatccatataagcattcaggggccaaccgttttttttgggctggaaaaaagggccctt

SEQ ID NO: 373970 - DNA, 226 bp, Zea mays
ttctttttttttttttttttttctttttttttttttttgttgggagaaaaaacatcgttgccgaatcaacatgtttccaaggagcaatttcccacccccagaagggttgaccttccaaattacaatgccacccaattaaggagggggggaaaacccatcctgtcaggcctaccagattttaaattgtttggggaaacataaacctatttatttgcgcttttttttt

SEQ ID NO: 373971 - DNA, 363 bp, Zea mays
ggggccgccctttttttttttttttttttttttttttttttttttaaaccccaccaccggtttttgcctttaaaaaccgttgccccccccctgggattgcccgtgggcggggggcggggcgtttccccaaaaaaggaaggggaaaggccaaaaaggccggcaaaaatagggtgggttcattccacccaaaattaaccaccgaaaaccgttggcgggcccggaattgggacatccccgggaccgggttttttttttttttcccggattttcctcccttccttctttttttcttgggggttttttcttggcctttgtggggcaggggttggcccccccattcttgggggccttggggctgggggc

SEQ ID NO: 373972 - DNA, 202 bp, Zea mays
ccagcgggggaaaacaattttccttgtcctaaggcataagtttaagttattttgcttgccctggaaaacagccttcttaaacaacattatggttacagttaatttgcagtccgggatttccagccacatgacaaaccctggtgactttgttttcctttgccccgcccatgaaaccagaagctttccccagtttgggaaaagg

SEQ ID NO: 373973 - DNA, 403 bp, Zea mays
gggataaagggaactgggcccaggcttttttactcccctcaaaagggcaaatatttaaggggggatccagggggtaaagggttttttgcacaggaaatttggggggggtttttttagggaacaccccgaaaaataatttttcccccggggaaacagggttaaaaaaacgggggtaaaactaattttgggggttccaaaggggttccaggagaaatttccggcccttcccgggccccgaaaatttaaggggggggaaacccttaaggcgggggccccccccaaaattttccctttcccggaaaccccgccccccctttgtgggttggaaaaaaaacctgggggggggctttcgcgtgcttctttgggggggccgttcacaaaaaccacccgggtttgggggaaa

SEQ ID NO: 373974 - DNA, 401 bp, Zea mays
aaccggggaaagccgggtaggggggttttttttaaaacagggggggccggggcttgaaaccaatgggacgaatcaactgggtggagcaaaattggtttaagggtgaaaaaaaattcgggcattccttggtttaaacaaaattcttaccaaaagaaaaagggcttccattgccaggaaagcctttgtttttggacttatgaacccccaaaaccggccgggggcttgggagtttcaaaatttcccaaaacatgggttaaaaaaaaattgctttttggccggaacccccattttaaaaaaaaaaccccaccggcctttttaattcttccccaaaattttttgggaaaaccaagccttaccaaaatacccccaacaacttttttttaggtttggttttttttaaa

SEQ ID NO: 373975 - DNA, 300 bp, Zea mays
aaagcaaatgatgtttctccttttatatgggctcttataaattgggtattacagggatgatacactgctgacacttcctacggcagaagccgttgtaataaaactgaaaaccataggtccagactccatttgcaagaaaacatctcatggtcgacaggccgactatgtttcctccatgcactgactagtgctacatcttaggaattcttcatgaatccatgcagggcttctaccttctagaggtgccacgcagcgctggcatgacacggtggaaatgcagaccatgaagaaagggccatc

SEQ ID NO: 373976 - DNA, 214 bp, Zea mays
gggggccgattttttttccaacaataatggcgaagtcggcagaacaaaactcgcatccaagttttttttccccccattaattacacccccagtttaaaccaatcacgtaaacaatttacaccaccgggagttaaatttaacaccccgttccagcaagaggggaaccgggacgaccaccacaaaaaaaaaaacgggggatcacttggccagggcc

SEQ ID NO: 373977 - DNA, 195 bp, Zea mays
agaccaccatgaattttcattccttacacaatccaaaagggatcgaaagggtaaaggggccactataatattttctgccccggatggatttaatagtctgagcgttttttacaaactccgccaccctgtatttgggacccaaacgggactgggccaagttcaaacttaaaaagtttggatcccttaccatttttt

SEQ ID NO: 373978 - DNA, 177 bp, Zea mays
ggggggccccacggcatctgtggatgaaaaaaaattgggcccctccaaggattttctttttgaaaaaccccgccctttaaacggttttaattttttttccccaaccccggtcccagaaaatttcctttggccttggaaattttaatttaagcaaattcccacgggggggaaaatttt

SEQ ID NO: 373979 - DNA, 244 bp, Zea mays
aaaaaaaccccgttttttttaaaaaaaaaaatttcctgggggttcttatttggccaaggggggtccgattcccttttttagagacctttttaaagggaccgggccttaattttggaacttaccggaaaggttttttggggtttgggggggggtcaaacaatccccttttaaaaagggtgggggggaaaacttatggtggtggccattcttaaaaacccaggtgatttttaagaaaaggtggttt

SEQ ID NO: 373980 - DNA, 267 bp, Zea mays
ggggcatgaaaaaccgtagtttcaggggtggaaccatgcccccaattcaacattcagcccgtttaacattggagggtaggttaattaacttgacatggggcacaatgggcttaccccttttttgaccttcacttaaattcccaaagcccccccaaattaaggttttttatggtttgggaatgaaagcccttgcccccttttaaaccgtattaacattttctggcctggggcattgaattttggccgcattttttttggacatttttt

SEQ ID NO: 373981 - DNA, 295 bp, Zea mays
ggttggaaccttttgagggggccgcctttttttttttttttttttttttttcggccaacccaaaggcaattggcattttttccctggtttaaaccccaaattttttttaaaccacggtcaattcattccattaattccggccaaaaccaaaattttggttcggggtgcccaaaaaaccagggttaccggttttaccaggccttcttaattaaaggatggaattattttggtaaaaatgggaggaccaccccctggcattgaaaagggaacttggtttttcaataaaaattttgga

SEQ ID NO: 373982 - DNA, 240 bp, Zea mays
cgcgtcctggtccgtggccagggcgaggcccacgagctctgctacgaccgcgcaccccagcaggcaggcacctgaggaggctccgacatagagcaaagacgtgacgagacccggaatgcgcgggctcgccactgtcggcctgtccaggaggagaaaacccacgagggaggcacgagcggcggagcccaggaagcgaccgatgaggcgaggcggaaggcgggcaccaaggggtgcggcgca

SEQ ID NO: 373983 - DNA, 416 bp, Zea mays
acagtaaaatctacggtattggatcaaacaaaatagcatggggtaaacagactatgctcaattacaatattgtatgcatatcctagtgacagagaataacactaactgaacacatgaagtctgatacagactgcaacctaaagaacaagacaaatgagatattataaaatctgaaactctaaccaacttcacattgaacataggctgcaaaagtttgaaagaaactataaaaaaccaaatacatttgacaattcctgaatccaggaccccctaatatatagcatatttgattcatattattgaagaagttactaagcaacatttttttgacaattgttaaacaaatgtagacttgcatatctggcagtttgtactttagttgttttaaattgggaacctactgaccatgtagactt

SEQ ID NO: 373984 - DNA, 397 bp, Zea mays
cccgggcgggcaccgcccccgaataccgggggcgacccacgcgcgcgctcggacccgcggggagagacggacccacgggggcggctcaggccagccaggccagggccaccgccccggcgggcgaaaccgcccccgccggccaagccgaagcaaggagggaaggccaagccgcagaaggcgcccaagggcgacaagaaggagcacgacgagacggaacaggcagaccggcagaagaagaaagacgaggaaaaagcaccgaaggagcagaaggccaaggcacagaagggcgcgagagggggcccgggacagaagaaaagcggaaagaaaagagacaggacacccgacgccaagacccagaggaggaaaaggcagcggaccacccgagccgcgccccaca

SEQ ID NO: 373985 - DNA, 482 bp, Zea mays
tatgtgcgtgaccgcatcagatcagcggtggttgatgaggaaacagcatcttatcgcgaagatagggggtactgcagcaccgatgaggagagtgagaccacggaggacagctatgaatctgacttgattgatgatcgcgaagatcccatcctccgataggcatgggactggttctatagatgacagtgatgatgagtgcacccaacgatgcctcagacaaaaagctgaaaaaacgactcaaaatgctgaaagacggcggcgcttgaagaagcaccaagtaggcagcactgattacgatgatgatgatactccagtcatgaaacatgttgcgaagcgctgagctcgtaaaatatctgatagtggtgatgatgacactcctgtcacaaaaactgttgtcaaacgtagagcttcaatatttgatagtgacagtgatgaagatgataaagcacctatttctcttgcattgggtaagaaagacaatg

SEQ ID NO: 373986 - DNA, 479 bp, Zea mays
tccatgcgtccgcccacgcgtccgacggattatatctgttttgctaatatgagttcacaacacatttacacggcaaccaaaaatgaaaataaataaataaacaagcacgcgtacaggagtatctctgacagatgaatttgggctgattatttgtagtacaagaataaactctacacccacacgcatggtttttgttccttgaatttgggcttgattatttgtagtcaccatagcccaccacccacgcaaccaaacaggtagcccctgaacttgctccttcccttgggagcgggctgctggatcggctgccggtcgtcgtcgtcgtcgctgcgcaggcggcggtgccggtgactgtgcctgtgcctgtagcggcggcgttcgcggtcgtcgtcgtcgtcgtcgacgctggcagtcaccgacgaccactgccgcttttgctcctcctcgacgacgccgacgccgatgtagggtgccttggt

SEQ ID NO: 373987 - DNA, 397 bp, Zea mays
cgggcaccggccccccacactgggggcgacccacgcgcgcgctcacgcggcggcgagagcgcgagagccgggggaggcgttggacacgacgagccaaggcccaccccgaagaagcacacggcgaaggagaccgccgcgaagaccgacgcggcgacgacgaaccggggcggcggcaaggccgggcaggcggagcggcaagggcaggacaagggcgggcacgccaagcaggcgagcccgcacagccgcaccccggcgcccgacagcaagggcacgcagagccaccacgaggcgggccaccccaagccccaagaagagccggagaagcgcgccagcgcgcacggaagcacccccgacggcgcccagggcaccaaccccaagcaaaaggccggggggcgcg

SEQ ID NO: 373988 - DNA, 438 bp, Zea mays
  unsure (1)..(438): unsure at all n locations
ccccgggcagggttccggccccctatacttgggttgtcccacgcgagccctccaccgcgccgcgggcacgaccaagaccaacgggggcgtttttgaggggagccgcgaacggcgccccagacggaagannggacagagaggcgcacagaacaacagcaagcccgaccggggacaggacaggagcggacacacgaacgaacgacaaaaggaccacggccagacacaaacagancagggcacaccagacaagacgaacaggaaggaagacggacacccagccggagaggagcaacagacaggagccaaacccaacggagagaagagagccaagcgcaccagcacacccaagcccaggccgaaaaacagaccccgcgaccgggcgaaggcggacaaacgcaaagggcacgaagggagagcgggcagcccaaaccaacaaga

SEQ ID NO: 373989 - DNA, 398 bp, Zea mays
  unsure (1)..(398): unsure at all n locations
cccccaatactttggtcttcccacgcgaccgctcggtcccaagcagaaagacgcagagagaggggcccttgttacgcgacacgcccaccaccccacacaaggcngngcgaccacacacagggagagcgaaccaaacggcgccccccccgacgcaaccgcccccgcggagaagaaaaccccgccngacaaacacgccaggagcaccggccacacccccgacgacgccccaagccccgcacagggcaccccacacggcaagaaggccgccaaggaccaggcacccgacacagccagccggacgaacccngccgggcccaacaacgcacggaacccgcgcaccaacgagccagcgacaccaggaacagacaaaagcagcccaaacccccggcggaccgggg

SEQ ID NO: 373990 - DNA, 367 bp, Zea mays
tttttttttttttttttttttttttaccccgaggcaagggtggataaatatgataggggcccaatgtatgccccaaacacatttcccagcctgccagcagggggaaaaggtcattacactggggaggtccctactcactttttggttggcactaaaaatttgaaaaaccttacccattaaggataagagttttaaaaggttgccagaaggcaatgggaattttcagttttggaagagagcaaaaaactattggggactttggggggagcaggggcccgccaatgacctttttccccgcgattttgcaatgaacccttactactttaaaaagggggggttctgccactgatctgaacctttggttttt

SEQ ID NO: 373991 - DNA, 260 bp, Zea mays
  unsure (1)..(260): unsure at all n locations
gcctcnttcgtgtccatggatgccatgtgaatgatcgatgttgatatcatatatatgtggattacctctagtacgtactagacactagacatcccttctcgagccacatcatgttctttattgagctactgcctactggtcatgtagatagatctcaggtcggatctgtatcatatacgtataggagtcgtccaataaaaaaaaaaaaaaaaaaaaaaaaaaaaaaagaaaaccaaaaaaaaaaacagaaccacacactg

SEQ ID NO: 373992 - DNA, 425 bp, Zea mays
cggccccccacacccgggacgacccacgcgaccggtccgccggccaacaacaaggcagccgcggggggagcctacagccagcaccagccagcgccacacagcggagcccaggaaaggcggcgggacggagcgagggaagaggagacgaccagcaagccgaccacggcgatgacgcggaaccagcacgaaggcgaacagacgagcgagagccccaacagcagggagaagcgccgggacaccggcaaagcgaaccaccagctaccacacccaccacccaaggcacccaacaaggctgaagagggcaacgggactacctacaacagagcatgccggggcacgaacagcgaggaacaccaagaaaaggcccacaggacaacaccgacgaagactgcacaaaaagccatgaaaaggacaaggaggagccc

SEQ ID NO: 373993 - DNA, 383 bp, Zea mays
agcgtccatgccaaagccccccggaacggagccgggggcctttttgaccgatgcgccacgcaaccacgccgcaggagacggagacggagacgaagcggcccatccagccgctcgccaggaagctgagcctgccgaccccgaagcggggcggcggcggcatcgtgaaggacgggaagaagaagaagaagcgctcgctgtcgcgcggggaggcgcccacgatcgcgtgctgttcttcctcctgctcctgctcctccgccaccacgacgcccaggcccgtgctggcggcggggccggcgccggcgctggagatcccgccgcacgagctggacgccgcgctgagggccctgggccacgcgaagccggccgacgccgggctcgacggg

SEQ ID NO: 373994 - DNA, 133 bp, Zea mays
atgaatggttaaacaaaacaatgccataatcgaagttgggtaacaggacatttatgtttccatgaaagggccaccaaggttaagttccaggtggcgggtaagaaactaaaaactgttttaggccaacgggacc

SEQ ID NO: 373995 - DNA, 481 bp, Zea mays
  unsure (1)..(481): unsure at all n locations
cccccaataccgggggcgacacacgcgcgcgtggggaagcaaggaaagacagccaggagcagggcaccattcggcgccacaccactgccctccccgagccaaccaaggcggacaaggccccccagggaacccgggcagcccccacccaggcgcaaccggccgcggcctgcgcgcccacccggaggccgcgccgcccgacacggccgccggagcagaaggggaggcgacccgangcgagaagccggccgcggccgcgcgcagccgacggagacccacagagcacggcggcggacacccgcgcgcgccgagcgaagacacgcggcaccggcgccgaccgaggcacaggggctagggcgcgcggctggacgggagcgcgccgcgcgagcaatgggggaaataaggcggctctgaagagacgccgcggggggcctggccccgcgagcgcgtggcctgcgctcgtgaaggaagggatgcctagccg

SEQ ID NO: 373996 - DNA, 264 bp, Zea mays
gcgggagcccccccccccagagggggcgaccacgcgagcgctccgcgcccgaggagaacaagaaccagggggggacttcaagagaggaaccacggcagcaccacccccaagggggacggggcacagaggagcaggcgggcgaggggccccagcacggcccgagcagaggaaaaggcaaagggcagcgcaggccggcaggacacacggcaaggcccagagaaaaaggagaacggaacacaccggcgcacccaagccagcagagca

SEQ ID NO: 373997 - DNA, 482 bp, Zea mays
tcgtccgcccagcaccacaatcgggtccccttcccctccgttcagctcgccgtctgagggaagcagggcgcagcagtcaccagtgaccagtcatggctcgctgcgttgccggcagctgccctcccgtcaccttcgcgtgttgcccccgccggactggacgaagtgctgttgttcagtgtggcactgcatcgagcacaccagcaatatctggaactggaccttcatcatctggatcctcggggctcgctcaagattgtactgcccctctggtctgtgcactgcaattaactgccagacaagatgtttcctgctttcacttcccaggacacaacagaggaaaagctgctccatcttccttggcgaaactcattggctcaggggcatttctgcatgacttgcccgagctacccgagctcgatgatctgttctccccaaatggcgtgattctagatgcccagaggcgagcagctcaactgtttggg

SEQ ID NO: 373998 - DNA, 281 bp, Zea mays
ggcaggggaaataaattttttatggcaaaaggtttccaggttccataaggttttcattttccatcatgggggggtttccaaaggaaatggtttaaaaaggattccatttggaaggtttaaggcattaataggtttaaaaatccatgctggttaaggggccattcctaaataaagaagttaaagaggggatccacctatataagagggtggggcccaccggcctttagcggcatccacaccagaccaaatttttacccggaaaaacaccagggaataaagcc

SEQ ID NO: 373999 - DNA, 465 bp, Zea mays
aacggcttacttctgtcctgcatgcgacggccccgagggaccgttaccctagctagggtgctgcccgccgacgccggcgccgacttggatcctgacgcgggcaggcttgccgcaacaccgccatggacacggggcgcaagcggaccgcaccggagggcgccaacggcgcgggcggccccaagcgcgcgagagaatcggcgacaactggtgtaggaagcaaatccaagccgtgcaccagattttccaggcactaatctagcttagaaggaacagagagccggtcacatctactatcgttagtatgctcttgtcattgtaaatcaaaatgtgttatggtactaaatgctgtgcgtgatgctgacaaatgggttgggctagattctgctacaggatgggtttatctaagcattggttaagaacactcagcggagtggaaattgggaactactgctggctatcactgag

SEQ ID NO: 374000 - DNA, 206 bp, Zea mays
  unsure (1)..(206): unsure at all n locations
ccctgcaggtgctggtccccccttccttggtcgacccacgcgcccgccctcactgcggttnggaaacgctccagctggggggttcttttgacgtcattactcgctgttcgagcttttaaccgccttcttttcttagatcaactgaaatagctactggaatctcgtgatattgataatcaatgatgtaccatgatgctacttcctgg

SEQ ID NO: 374001 - DNA, 338 bp, Zea mays
  unsure (1)..(338): unsure at all n locations
gggggcgngcgcgcacagggggctttttcaagcggagcacccccccacacaagaccggggcaggggggcgaggacgagccagcacccgccggcgagaccagacctgtggtgatggactgacaaggcatgcctgcaggagggagagagctttcggaccagaaaacaagagggggccgcgggctgggctgagagagcggaacgaaggaaggagccggcgatgggcgggaggaactggatcttctggggccgatccaaagccggaggcggcgagcttcggcctcccgagcccttccagctgccggcgcccttgcccgagtggccacacggaggggatagag

SEQ ID NO: 374002 - DNA, 415 bp, Zea mays
  unsure (1)..(415): unsure at all n locations
cgggcaccgcgccccaacaccgggggcgacccacgcgcgcgctcacgcgcgggcaccgaccccggccggaggggacgccacgccagagagccgagggcggacaccgacacagagggcagagagacacgccgcacgcccagacgacccgcaccgcgccagagcgcgcgcacccacccacggcgcacgccgatcaccaccacggccgacggcccaacgcccccgcaggcacgcccaccccgncacgggggcaccagcgcttccgcgccgcgcgcccagagccccgccccggccggagaatgcagatgccaaacgaacaacgcaggtaacgagacgggagccacggcaacgacaaccgacgaggcagcccggggcccagagggacagaacgaacaggacacaaaccgagaggcgacca

SEQ ID NO: 374003 - DNA, 251 bp, Zea mays
aaaccgaactttttttacgggcccggtattaaaacccattttgaatggggggcaaaggggcccccgattggtaagctaggaaccttgggaaggaaatcaccggccgggcccccaatgggaaacctggaaagaccaggccggggttaccggttaaaaccccaattttttggccttaaaaccccaagggtcttaagggctggtccccccttgaggggaaagggcatgacttggggaagccctaaggggggaaa

SEQ ID NO: 374004 - DNA, 475 bp, Zea mays
  unsure (1)..(475): unsure at all n locations
accgtcatcttagattttnggatacgcagggcgcggtaaactctaaccatatttctcctctaaggtctgtgtcttgtcttcggcgtgaaaagtgaatcaccccacctccaaaaaattactttgccccccccccccccatgttacagttaacgttcttcgctccttactctctgcgtgttatttcatatttacacagtacatggatgaatattctttcgaaaaaagatgttaagtaacttagtgactctccttaacactgtaggatttgaggctgtcatagtatgctctctgaccgtgctggcgggaggaaggaggtgtgtatatagttttcttgcattattttcctgtgactattctcatccctcctatatgttctttcagatgatttaagttctctgcgtttataaccagaaagaggaggataatccaatcatggtaactaaatagtaggtagtaatgtttcacggtaaatcac

SEQ ID NO: 374005 - DNA, 447 bp, Zea mays
cgcgctcttttgtattaccaacgggagcgactaacgtacccttacgcgacgcaccctacctttgctagtcctacgacgcttgcgcttgacttgatgcatgctgatgagatggttcacttatagcgcgcataggagagggtgctgggactgcaactatcgtaggatagccagacgagtggggagcatcggtacagatacaagattacgactgctgtggagcaataagtggagaggaggaagatgacggacactccacagatcacggtgagcgacggtcggctgacggggcgcagtcgatccgcgctgaccgattcgccggacaacgtgtgggatgcgcacgcggccggggcggtgctcgtaaacggcgccggcctcgaccccacaccagcgaggacaagagccaccacgtctttactgaagaacgctactggactgacggtgtctgtg

SEQ ID NO: 374006 - DNA, 471 bp, Zea mays
gtccatcatccgggacaacggcggatacggtggaggatatgctgacccaaatgatgtcgagcgtaaggacaagcgtccgcccaagaagcagaatgcggagaatggaacgacgactggagcggctgagacagtggattagcctaaggacgtgtgcttgaagggggacaacagggtatacctgagcgcttgcatggtggatggatacgtgtacgggtagcttgagttggacgacataggggacgaaagagggaggccaagcacgagcaacaacatgatcgacggcaagagggtgagccgggtaaagatgcaccacttgggatagcactggcggcagatccgaaactgcatctggagctacacctagtacaccagcgccgacacccgtgacaacatgcgtgaggccgtgagggtggtcgatgacgtcgacgacgacgacggtctccggaacctggtgaacaccacatctgccac

SEQ ID NO: 374007 - DNA, 299 bp, Zea mays
cggaaggcgcaggaaaactgcccatcatttaattggggaagaaagggtccaaaagggaccaaggtacaaagccctgaccgggcccaacaaaacacccagtaacccactacatcctccccaaacaaattaggccctgggaaagtcccccgggatctcaatggcgaacctttgaagatgtttagccccaggggtaatccaacatcccatttaataaagaaggacccttttgaaagagctcagcgaaggggtccccccatggaaaactgccttgtggggggggatccaaaaaccccaggccc

SEQ ID NO: 374008 - DNA, 309 bp, Zea mays
aactgacgaggtaaagccgtaggggtgggtccaacagtccacagcattccagcaaagggggggtgagccatagcctgaaaacatttgcaagtcggtcggtgggtttggcgcgtttaattgaaaccaaacgacaagcgccgtgggcgcctacgcgaacaacaagacggtaaccccaccgccaccgccgttccgcccgcttgccgggggggtgaagaggtagttaaaagttgttgggccgccttgtttctttgcccccttgtcccgttcccgccgggggaaacggagagccatacccgccaccggtttttg

SEQ ID NO: 374009 - DNA, 443 bp, Zea mays
gcgcgtactctcgtaccaagtcccagcttcccaagcgagcatgcaagcaaaccatcaccacgtacgccggccggtcgcgggcgtcgatcgaggccatggtgggcggacgagccacgcgcctggcgccgcttctgctgctgctgctgctggtggtggcagtggtgtcctgtgacggcgaggctacgacgacgacggccggcgccgccgccggcggtcaggtccagcagccggacggcacgaacgtgctgtgcgtgagcaagtgcgggacgtgcccggcggtgtgctcgccgcccgcgccgtcggacagcacggcgccgcccaagcccggaggcgggtacacgccgacgtcgtcgaagaccggtggcgggtatggctctccgtcttcgacggagggagcgggacaggggggcaagggagcaaggcggtccaggaacttctactac

SEQ ID NO: 374010 - DNA, 222 bp, Zea mays
aaacccgtgcccaaatttttttttggggggccccattccaaatttttccatgaaaggccccctggtttaataccacctggggctgaaattggaagaagcccacccccagcgggtcctgggttgagccaaataaatggcgggaacccttggggcccaaaggtcggtttttggttgtttgaaagaagccctaacccaaaccaagggggattttaagtcccgggg

SEQ ID NO: 374011 - DNA, 295 bp, Zea mays
tttttgaacaagggggggaaaaaaaaaggggagggccggcccctttggggcagggggggggcaataaacgggaaccctgggctggtgcccccccgggttccattccagcctaacataaaaaaaaacccggttttttgggaatcccccccccccaggggggcctgccaagtttgccaccccccccattttctggcctgggccctaacccacggggggggggccagggccattccagcccccacccggggtgcacaaaatatgggggggtttgggcccagccctaaaaagaaaaagg

SEQ ID NO: 374012 - DNA, 164 bp, Zea mays
gggggccaaagaaaggcccggaaaccgggggattaataacccagggaggtcccaaaaaccaggcccactttttttaaaaaagaagccccggaacaaccccattaataccaaaaccggcccccttattttctggaaccacaaaagcctctttctttggggaaaac

SEQ ID NO: 374013 - DNA, 339 bp, Zea mays
ctttgactctctggctaccctggtagcatgggagatgatttgatcatcaatatgtctaattcaaagggccggtcctatggtcgcgttggtgcccaagttgctataatggctgggactctattagattttacaaaccattttgctatttgattgtcaaagttgagtgggatatgtgattattatacaattgggtgatcttccatatattttggcacaacaaggaagctctcatgctaaatattttgtatcacgccttaaggcctgaacccagcatatgagcaagtattttgttcatgtgaaccttacaatatgattcggctgaatctattgcaactatgt

SEQ ID NO: 374014 - DNA, 190 bp, Zea mays
ggggaaacccccgtttaagttatacaacagacagacaggggtcaacattttgcaacttatttccatccccattaccagcaaatgccaccgacaccaacttgaaaacactccagtttctggttaaaaaaaggggacccaattcccacttaggtcttggttgggtaatattggaatgggggggattgggggg

SEQ ID NO: 374015 - DNA, 223 bp, Zea mays
gggggccgcctttttttttttttttttggaccttggaaccaaaaggcagctggaccaattccaaaaggcagctggaaatggttttccggggaaccacaggttttggggcccttggaaattttaaagggccaaatggacctgccagaaaaaaaatggccaaccaatttgtccggtcccgcaaaaaggcagcaggttttaggaaacctggggcggtccgttttaa

SEQ ID NO: 374016 - DNA, 459 bp, Zea mays
cacgagcgcgctcgtggtgcgcgaggcggcggctatggcagaggcggtggcgacgtagcatcggcaattgtttgaccagctgcatgagatccacgaagctgattggcaggtgcagcaggagattcggcggtggcatcgacaccggctagcctacgtccacgaggggaacgacgggatcgatgctatccctttggtggatgcttcttgctggtcatgtgtgacttgctagttgtggctgctggagagtctcctcaattggtgacattttattttggagcccaagttatacaattcagttcaattgttcatttgttttttgaatcagtttagttcatttgtttttatgtttaattatttcaatcaattcagctcatttgttttttaaaaagatatacaattcagttcatgtcgtcaggtaaattcaattgttcataaagatatctaaatccttgggtttta

SEQ ID NO: 374017 - DNA, 418 bp, Zea mays
  unsure (1)..(418): unsure at all n locations
gacagatagcaagatgaagaggataactgagcgaaatgatggtgttgacctatgacataatacactagttggagagggcaagagtggtaagactaacaaagagaaaaaaatgtgtgaggatgagaatggtggcggtgccagagagagagaaaacatgggagagcacaacgatatgtgtagacgagtgagcttcactgatcatgtggaggagtgtaatataggtgcaagtgatgattacagggntgttcgtcggccgaggatccacctgcgactggtttcctgtacgcaagcatctgtgggcagtaccgccttgcaagcactttcacttgctcaatgaaaggcctatatctgtgggcacccatcaggcgaatcatttggttgcatctttgacggcaaagcttcccagacctgtgctcga

SEQ ID NO: 374018 - DNA, 265 bp, Zea mays
gccgcccttctttttttttttttttttttcttaggcgggcccgggaagggggggggggttttaaacggccaacattttcccctcaagggtggaattccataaaccccaaggtttccatttaccggccattaatgcccgggaaccggaaaggatttccccctttggggcccgggggagggccccccatattcaggggggacccggggcttaaaaatgggttcggggttaaaaggaggaggaggaggaccccccaaaacaagggaaa

SEQ ID NO: 374019 - DNA, 173 bp, Zea mays
ggcaaattggcccacattaattggggttttcgcccccaatatggtggaaataccataacatcccggaaaaaaacaccggttgttgttaaccatatgggacgacccccttggtaaattaaccggccggaccggaaaaaaacaggccgggggcaaagggctttgggttatttttt

SEQ ID NO: 374020 - DNA, 220 bp, Zea mays
aaaacaccatatcaaacctttggtcctaaaaaaatcccgccaggccagtcccatgtccatccaaaattgcaccaattcctcataggtttaagtggggggggtcgcctgatgcaccacagccggggcagcatagggtccttataagctgtaccaaaataggccttgaaaccatctaaaagcactgatcatttttaggcagagggggcagcagaagccttgg

SEQ ID NO: 374021 - DNA, 175 bp, Zea mays
cagggacccccatccttaattatttatcaggttttatttaccatccaaggcccccggggtttgcaaatccagccataccaaaggcttcttttttccatcccaattttccaacacccccacaatccatttatttttggggcccatagaaaaggacattgtcgcccggttaaaaagg

SEQ ID NO: 374022 - DNA, 205 bp, Zea mays
ccggtacaccagggctctcgattcttctatcctgactcgtataacggagacggctggcaccacagagacaggggcgtacatgccgggcaaggagcgcactctgatcatggtgctcgccatcaagccgtaaaatttgcccaatgagtacaagacaacgcttccattgttcaagacgagctaaatgctcacgagactgacatacact

SEQ ID NO: 374023 - DNA, 239 bp, Zea mays
aaaaccggaccgcaggtcccgggcataacgtttttccaactaaaaaggtcccttagacttcagcccggattggatacacgggaccgagacgctttaaacgtatcacaaaaaggggcggggggaacaggttaaacagccctgggtcgtggttggatccaaaacttccaatggaaccggcggagggggaataacacccaacggggccgggtttttaatccaaaatgaaagggggagggccc

SEQ ID NO: 374024 - DNA, 331 bp, Zea mays
tcccgatccagcatggacgaactccttgtgacctcgcctccccgagtgctctcggggagctactttgtaccgatataccaggagatacgttcgctatatgttgcgcaggctcatatctgatcgctggagtcggcaaacccgcgttggatcctgcatcgatctggagaaatcgcgacgacactgactatcgcatcggagcggatctgaggctacaatggatggaggcggcgggatctctctgactgaggagctgctccacctcgatggatgcatgatatgcgctgataatataggatcaacatcgataattattagtggatctatgacatat

SEQ ID NO: 374025 - DNA, 290 bp, Zea mays
gggggaatccatcatcctgcagttttccccaggtccgccaatggttatggttaaaccatgttaccagattaccaggaaccaggtttccttatggccaaaccatgataattccaaaggaaaaaggtttagccgtagatccatagggatttttccaccattggtcccaaggcatttggtccagattgaatggaaaaaaaggtaaccatttttttaccattaggtttgaaggcatttaaccgggcttgatttttccaaaattttattttggattttggatggaattaaaaagg

SEQ ID NO: 374026 - DNA, 185 bp, Zea mays
ggggccgcccttttttttttttttttttttttttaaaaaaaaattttttttagataccgcataaaattggggccaccggccttgggttggcccatgggccgtttagcattgggatccaggcttgccaaaattaaggggcttccggggtccagcttttgggttccccaaaccgctggttttttttt

SEQ ID NO: 374027 - DNA, 288 bp, Zea mays
agaatccacaaaggcaaaatttttccggcccccacaaattttggttggggcgggggttggcttgggaaccggtttaccggggtaccaaaagcccaggccttaagtttttttggccaacccaggaggaggaggaggaaaaaaaaatggctttgccttgtaccgtttgggccataacaattcccctcccccgagggaaaccccgagccaatcccaaattaaccttttttaaaagggggggaccccccctaggggatagggggttcttttctttttttccgcgggttttgg

SEQ ID NO: 374028 - DNA, 432 bp, Zea mays
ttgtgtccctgtgttcaagaactttggggtgctggtaacaggtagtgtgatgcttgatgactctctactgagccgtgactttgaaaagtaccaatacgatgatgatgaatatcctcaaacaagtgatgatgatgatgacaacaacagtacatttgcccctgctaaatatgttcctgattctgatgacagtgatgaaatcctcagtgatgattctgaattcttagatgatttttatgatgagcattttgatgatatcaaggacaattatgattatggaagtgatatcaatagtgatagtgaaacctatgagtacagtgagattgcaaatgactatggagataaccagtttggaacccgtgataatgaacttgatcacactaggggcagtaaagatcatggttgcagtgcagaacatatcattaatgattataa

SEQ ID NO: 374029 - DNA, 313 bp, Zea mays
tttttttttttttttttaggacattttagcaaccccgggccacaaccattatttaaggggggggggtccagaacacatgggaaacaaaccaaccctggctggtaattcttttttttttttggataaaaaagccccaaacctggctggctggcccccggggaacccttccttagccttaggtgggttgaattctccatcccgcaaggattcttggggtggccctggggtggattaaaaggcaggattggcatttttagatcccggaaaaggacaaaacccggttgaaaaaaaaaacgggacgaaaccaggaggg

SEQ ID NO: 374030 - DNA, 307 bp, Zea mays
gtgcgaacctagacgagctcatcccgaccacgccggcgcgccgcggcggttcggagtgtcccgacgccaagtgcatgcggcggaatgcgaacgactattaggcctcgttccgggagttcgacgaggacttccacgaggaggaggaggactacgagggggtggtggagagcatgtccgctttcgtcgtcctcgcctcgttcgcggagacgcagtccacggcgcgccaggagcaggggagccggcgcccggcgcccgaccagcagtacaggggcgtccggtgccgaccgtggggcaagtgggacgccta

SEQ ID NO: 374031 - DNA, 215 bp, Zea mays
acaatatactctctccgttttttttatttatggtcgtttagttataaaataaactagccgggaataattattcgagagcgagggtggagaggaagtataacgcaacgatgcaatgccgttcattcacggcgtttccggggctccggggcagggttcggtcagccctcagccgtagcagcggatgggaccgttgcagcccttattggcggcctgcc

SEQ ID NO: 374032 - DNA, 437 bp, Zea mays
ccggctcttccccttcctcctcgccggcgtgaccgaagcctcaacattcgtggattcgttgtaaatttttttttcccgtctcttttctccctcgccccgaatttttcctcgggattagttaacctctagctttctctctttctagtttcctttgtcgtcttgtttctcccagttcggtgagcggatagtgttatgatgaagacgacggcgtcccagcgattaacccgtgctgtaatatgtgatagaagaagccgtagcccacagtggttttgctgtctcctctcctcccttcctccggctcaggattcttttgtagctcggtttgatctcacctgcttcgattcgctctccgatgaatgcagcttgaaatgttggttcagatcacgtcatcgtgtatgatgcatacttgcatgtgcttattgctcaacatcctgtag

SEQ ID NO: 374033 - DNA, 270 bp, Zea mays
gggtagctaaactgcatcgattgtgactgtatgttgattgcagaacaaaacttacatatgctatatataaatgattaaggatttacacatcgttactgacatagtgacgaactctcaactagagtgtgggatacttagcatgattatttttactcattagtgacggacgctattggataatgtgcgatgcggtgcattcaatctggatactatcgggtcatctattgaggctgagtatgtctatgagatgcatctatatgttaaatgctg

SEQ ID NO: 374034 - DNA, 280 bp, Zea mays
gggggcggccttttttttttttttttttgaaccttgaccaaacctggggggataccggaaaccaggaccaactggaaaaccggggacccttttggttttccaccaacttattggctgggcgggagggaaaccggtaacggggggaaaaccttaaaccggtggcaaggtttagcttaataaatggaaatgggggaaaaccaccggggacccgaggttaggcggccctccccaatttggttttggcgggggtaatcttcaggggggggaatttaagtttggg

SEQ ID NO: 374035 - DNA, 210 bp, Zea mays
ccccgccattttggttccgaaaatcccattccagaatccagaggccagcaggttccagggggcaaacaactcctaattcccccatccgtcaccaggtcaccagggagacaaaggatcaagggggttcctacaatcctgcctggacatttattggtttacacaccccaaaacccagatttaaagggcagggtcctgaacagggttgccaaa

SEQ ID NO: 374036 - DNA, 442 bp, Zea mays
ggggccgccctttttttttttttttttttttttttttttttttttttttttttttttggttaagggcccaaaacccaaggtttttttaacccggttggtttaaggggcacccgggccccagaaaaaaaaacttgaaaaggggggaaaaggccggggggttttcccctggtggtggattaagggcaaaggggttagggaaacccccccggggggggtttcggatcttttaggggggaggggttcaattccctttcttttaaggggcaggggggaaaaaaaaggggccttgccggcgggggacaaccgggggggcccgggggcctttaggacctaagcaccccgggggggaagaaggaccccaaaaaaaaaggggggggcccataattaaaaaaagggggccccctttttcccccccccttttaaaaaaagggcaattcttaat

SEQ ID NO: 374037 - DNA, 252 bp, Zea mays
gacacaataaccataacgagaggcaccctaccttggatagtcctcctacgtgtggtatgcactatattgtggagacacgaactgtcactacatgcgcgcatggcgtggggtgctcggactcgcatctacattatgatagccagtcgccaggacacgatgggcatccaaaccgaccaactactgctcatttataatcagcagcagatgaggaagatgacggcgacgccacatatcaccgtgcgcgacgggagg

SEQ ID NO: 374038 - DNA, 319 bp, Zea mays
ggggcggcctttttttttttttttttttttgggcggtttttcaccccttttttgggggcttggatttttgggaaaaaaacaatcttcattaatacctttcaccaattttaccttggtttggggcccaagaaattggttttaaagaaatggtggatttaaaaaaaatgggcctggatatgccggatggggcccagggttaaattttatttttggccggggtcccatggtggcccccaccgggttaaataaatggtttcaattaaattttggaattggatacccctgggcccaggaggaaaccgcccaggttaaaacccgg

SEQ ID NO: 374039 - DNA, 261 bp, Zea mays
accttccgcagcccctgtctccagccgtggaggccgaggacgaggacgaggacggcgacgagttcagcttccccgttcctccggtcgccgccgacgcgtgcatcgtgcccgtgtacccgatcttcggacggcccccgtctcctgcagcgcgaggaggaggaggagccggagactgccaccttgcgggtgccgctgggccggctccagctggaggagcgggagttacgtgcgcggtagccggacgggcgatcggcgagtgcg

SEQ ID NO: 374040 - DNA, 251 bp, Zea mays
caccaaaaggagggtctaagccagctttctcttggattccagattctactgattgtttcaatagtcactcctacagaggggaagctgctcaatctgccgcactccaagtgcctccagctggccaagatagcagtctgcagttgtatggcgtagatccatatgttcatagctgactcgccgactcgtcatatactctgactatttcattcctggctgaagtaaatgaaagcctgacagaccgaaagggaact

SEQ ID NO: 374041 - DNA, 290 bp, Zea mays
tttctttttttttttttttttttttaaaacaataaaaaaaacacttttaattaagtccacgggccatccggtagaccggtccttcaggattacatgctggttttttttttttttttcgtttttcaaaagttctgaacagaattacataaggttgcgacgacagtctcgttgatcccatacataatttacatccaggttccttagtaggggtagaaaaaaaaaattacggtggcggcctaagatgagacggggggctaaagacaccacatttagtagtagcggggggtaag

SEQ ID NO: 374042 - DNA, 404 bp, Zea mays
tccagtggaagctctctcgcgggaagtggagaccgaggctgatggatttcgtcaagggcttggacgacgccgtggtggagtcggcgtcgcgcaaggcgttcgcggctatgcccgacctcagaagggccatcaccgagcttaccgtgctgaagggagtcggacccgacactgcgtccgccgtgctcgctgcgtatgcacctgatgtcgcaccgatcatgtctgacgaggaactgagcataggagaagaaagtttcacaccctcagatgtcgagagagcactgtggagctcgggaattgcgtacaagtcaccaccaagcggtaacccaaagagggaatcaaagatgcatggcaagaggaaaagatgatttacaccgcgcttctttattgaggctaaaagggtttta

SEQ ID NO: 374043 - DNA, 487 bp, Zea mays
atcacaataaattacaaacttatacaaatcttcagaaaatatcacaaagtcttacaactcaaacggatactcattgatggtcttacaactcaaagggtccgtagcgaagaagcggcaatatgttggccagtcatccattcgatgtaataactccagctccaacaatttgtaggtgttgggcgtcttgaatactgcatagttgaaaccatggtgagaatcacatctttgttctggttcagactccccatttctgatttgcatccaatatcttcatctgaagtgcataaggtccccttttccctaggttcaagctcagtctgagatttaatttctcctttgactgcattcactatcttcttttctctagctttgcgttcaatcagatagtccatttttacttttactgattcacttgttctacattcatgcattataggcatggaaccaccagatcttgcttcacaatccatatttatgtcatcaatac

SEQ ID NO: 374044 - DNA, 390 bp, Zea mays
aaacgaacaaaagaaccggaaggccttgtataacggttaaaaccaccccggtacattaaaggcccacaaattttcgggttggttttaatacaggcccgagaattggcttttttcaggatttttccttcggggcggcgcccttggtttaaaagggggggctggcaacgtcggttccggggggcggggggcggttcaagccacgggggggggttttttgacggccttggggggggggaaccaaaccttttggttcaaccccgggccttctggtggagccctatttgggggggaagggttaggggggacccccaagtgggtgggggccaccggcggcgggccgaacaccccggttttggggggggggcctcaatacttgggggggttccccgg

SEQ ID NO: 374045 - DNA, 356 bp, Zea mays
cccccccacttttttcctttttcggtggggggggaaaaaccgcagggtgggaaattgtccttgcagagccacaccccccacacttggttcaccaaacacgcgtccaaggtcccttgcccacacttattcggtacctccccttgatttccttagccgggcattaaacccccggggatttggttggccttccttgcttgctctttttggccctggggagcagcttacgtccgcaggtagatcgttcgagcagcagcccgatcagccgaagagggggggtttttttttcccttggccgggggggcgggattcttcttcttcttcccgggggtcttccgccgggtttttggcctcttttt

SEQ ID NO: 374046 - DNA, 342 bp, Zea mays
ggaaatctaaaattcagtttggcccgaacagcaaaaaaacccgttcaggggatttacttaaaacccaactttggatcaggctttttggaacctagggggaccgggtgaggcacaagggccatcccatgggccattacccggggcaaaaaaaggtttccccaacggcccgtttacggggtcccccatttaaattttggcccccctaacttgttttcaatcgaaatgttggcgaagggccctttgggtttcgtttttccaggacccatgccacaatgggcccctaacccttttggacttccccttggctttgacaggggaacccttttttttttggggcttttt

SEQ ID NO: 374047 - DNA, 347 bp, Zea mays
aaggcaaaaaaatcgggggggaacataatataatagttaaaagttcataataggggaagggcctccaaaatggtccaggggcaaagacagagcaaagagcaggggacgccagcacactcaccaccatggttaaaataacaacggccgaaatcccagcccgggcccggggctgggatgcagtagcagtgggggtccttaactttttccggggaagaagaaaaaggaccaccggaccttttatgggaaacattttgcacaaacacacacaacccctttttttttcccgaaacctaatttaaaaggccagggatgatcttattttgggaccctttttaccaccacgggtt

SEQ ID NO: 374048 - DNA, 273 bp, Zea mays
gggggccgccctttttttttttttttttttttttttttttttttaaaccggcacccctatttttttccacctccaatggttattccttaatggattaaaaaaacctcggggggccagggggaagaaaaggctccgggtttttaaaaacctggccctgaaaggctccagctctttttggaattttttttcctcccaaccaaaatttttaggctttagggccggttcggaagggaggctttcctcctggggtttttttaaaaaccccctaatttt

SEQ ID NO: 374049 - DNA, 237 bp, Zea mays
gggggccacccccccaaattttaaccctccgaaacggggccattgcccctcctttttgggccccaaacagaaacaagggccttacggggttttttaagcccccggggaaaaacaatttttttccccgggccacccccctttttgggagggggcaaccaccgttcattaacttacggggccacttactggccccccccccgtgggggaacccgaagggggttccctctttccccccgg

SEQ ID NO: 374050 - DNA, 292 bp, Zea mays
aggggggccgcccttttttttttttttttttattggcccaaaaaccacgggcccttccttggttccaaccgggggaaaccaaaattggttgggggggggggggaaacctccttttgttttaaccggcatccagaacacggcagaggggccattatttccaggttcccttgaaccaccagttttaaaaccccctgggggggaaaaccaaggcgggacctccttggcttttttaagcacttccacttggcaaatggttcaattggaggcggtgggaaaaaaaggtggcttttgg

SEQ ID NO: 374051 - DNA, 317 bp, Zea mays
tttttttttttttttttttttttttttttttttttttttttttttttttttttttggggcccaacccaaaaccgttttagtggaaacatacggcccataacatttgcaaaaaacatcctggccattgtttgcaccccggacataacatccttggaaggggggggactttttacaaaaaagggcggaggaccccgggttttttgccgggtaaacttccggttccggaccattttcctggttctggatcctaaaaagggcgggccccctatggctaaagggggggaaggcatttccctttcctgttccttccgggggtt

SEQ ID NO: 374052 - DNA, 295 bp, Zea mays
gggggaccgaaaggggtccagatttccccggtccattacaggccattaaggaacaacattaaacacatgtttggtagttgccctggagaatgcaatgatcgacgcgcaggggagggggcgtcgatcaagcgctggacgatgggaagatttgcagcagggacgtgtccgtcccgattccggggggggcggggccgttcacgaccggcaggacttgggccagcattcggggccattccatttgggggccgaatcccttgggggggaacggggccggcagcacgaccccgggggggac

SEQ ID NO: 374053 - DNA, 328 bp, Zea mays
ggggccgccttttttttttttttttaaaacagaacggccaaaccccggacttaaaggaaacaattcccccggtaaaacttaccgtaggttcggcggcggcttaccggaaccttttaaacccccggtggaggggcaccattattaccccacccccccatggggcccacccccccatggggcggggggacaaggaggccacctaatttccttcttggacctcttcttctttttcggcggcggggtccgggaccggtgggacctgggcccccgggcggtcatggtggttttgggcctgggggacctcaatttggccatggccttcccgggg

SEQ ID NO: 374054 - DNA, 175 bp, Zea mays
aagcccaccataaaaaaaccggcagggccctcttaattttgccagggaaccaccaggtatgggggcaaaaaccaccgggcaaaaaaaaaaaaacttggaggtggagaccctaaattaggtgccttatttttttaagccaccgggggggggaaaccacccggccccaccccttcgg

SEQ ID NO: 374055 - DNA, 195 bp, Zea mays
gggggacaaagaaatttgatcttgttgggttaaagcatcacaatttctagacatatttgtatgttgattgagcgttcagtcgctctatctttgctccaaaatcctgaaatgcctttcaggcaactaatatcagccccactttgaatggggggtatgtcacttttcaatcacctaattcggcccttgaaaagaaat

SEQ ID NO: 374056 - DNA, 305 bp, Zea mays
cagccgacattgggggctatatatccacctccggggcgcaccaaccttttaaaatagtcacagttcaaaaggtttcgcatccaagctttgttccgggttttgctcggcataggcagatgatcagacaagggtctggaattttctgccagcagaacgtctcacattttttaaagttacacccttaaatgggccctacagttccccagcaaattcacatttcaattccaaggggcataaacacgagcaacatgatcgggctttacttttgccattttttaaaccccctggttgaagaacctcctgtt

SEQ ID NO: 374057 - DNA, 371 bp, Zea mays
ggggccccccttttttttttttttttttgagaaagggggattttgggttttttttcaaaaaccccacaaagggccggccccttatagggtttttagacccatttttatggcctgggggggggccttacactttacactttttcaaagggaaccccttgctctacaccccattttgaaatttaagaaaggctgttatctttggggccctttaagggctaagggataacaaaaaaggtttggggggccctttaaacccaaagggaatttttgttttgaaacatgcttcccttaaaaagcccatgccttgttttttagttaaaagcccaaccccccctgtaattcccgttgtttaaaaaaaacccttctgcccc

SEQ ID NO: 374058 - DNA, 226 bp, Zea mays
ggggtaaaatttcaaaaagggaccccccaaacgggggaaggcctaaaaggcaccggttggttattggacaaaatggagggtggcccgcccaaacaaagtgcaggggcacaaaccactggatggtccccaaggccgggggggtccccccttaccgggagtaattcaagggggactttttttttggctggccttggaagaaccccttggtgaaaaccctggggggaac

SEQ ID NO: 374059 - DNA, 364 bp, Zea mays
tctagcaccaccaccttttttcgcggcggccagcttcaacgcccccacgggcacctcgtcgtcttcccacgccgctgtcttccggtccttgtccttcttcttcttcttcttattccaccgacgcgttaaggcgcacgccacgcacgctgccaagaacaccagcgtcaccgctgcgccgactgagaccagcgctatggtgaccgcacgtctgctcttgtgtccgccgccactagacgccggcgccggcgccggcgcgaggtcctcgaccacccgcaacgcgtcgccggcttggacgaaggaggaactgccgaacttacggatggtgtcggcgtcaaccgcgccggagaagtcgttgtgcgagatg

SEQ ID NO: 374060 - DNA, 258 bp, Zea mays
actcgacttactactgtatcaggggtttggttcgcagtgacaaatcacagtttacccaacaactaataaagacacgaaactgacgattaaataaaggaaatggtttaaaagagtgacgcagtactttgaaatcagtttttggtagtactgaccaatcctaaagtaagtagatcatcatgcatatttaagccctgaagaatctacaatttattctattgtgcaatgacatgaatgatgtggtggcaagctttgaatttg

SEQ ID NO: 374061 - DNA, 261 bp, Zea mays
acggaatagcctatacgttgtttgataaagaaaacaacccctcttttctgtcttcacaccgagtgcctgccatttccaggcccagctggtcattctcgaggctccttctcttgagtttgtaatccttgcacagcacatccagaggctgaggggagaggggtccatggagctgggaaagcccctttcggcgcacagatgtagctacaccgctacctacacccactgttccataggcttcttccctcgggtcgtccgtaccag

SEQ ID NO: 374062 - DNA, 220 bp, Zea mays
  unsure (1)..(220): unsure at all n locations
cgcaaaagcacctcatgggagaggatggtgtttctatggagannaacggcggtttttcacctagacgccacccagnntggagagttcactgaaacatattagaacaaggaagagccagcttatgggtcatgttaattttcaggcgctccaaacggaaggtaaaatgttgagcttgctaaagttggctgttcgaactttctcttttaagaattgtatgatt

SEQ ID NO: 374063 - DNA, 324 bp, Zea mays
ggcgctggttggggtgcccataaggaggggcgcggccgtatattctctcacgcagcacgtatacggtgtgaagtgggctccggtttgagggcacgatgagggtgaaggtgatgtcgcgtttcaccgacgactacacgcgcgagcgcagacaggacctgcggaaagtgttaacgtgctgtgagccagcgctgtagagacaagagaaagcttgcgtgcatactggggcgctcaatggtgccaaggtagagaagatatttgctaaggcattgattggagctatggatgggcaatatgacgcggtattgtgcatggccaaaaacccca

SEQ ID NO: 374064 - DNA, 244 bp, Zea mays
cagaggaattaacatttaatttaattttatactccggggcccggaaaataacatgataatacttccaatggacaacggaatggaccttataaacacacccgtttaagccttaagttacatatactacggaatatttacgacactttggagggtaataaacacccttacgggtttttttaaccatttggtttccccgcccggaccatttccgtaaaatggggcacttacacaaggcccacgaccc

SEQ ID NO: 374065 - DNA, 185 bp, Zea mays
ataaaaaaagaatgggtttttttacgggcccctaaaaaccgaggctggggaccacaaacataaagttttttccttattacaatactccccctttgggtatggccaaggggtcccaattcacaaaatctggaggtaataaaaaaggcctaacttttgggggaaaaattcgcaaaagcaaaaaacta

SEQ ID NO: 374066 - DNA, 152 bp, Zea mays
gggaggtgccaacagctttttataagtaatttggcctccaacaggggggatcgaccggagaaaaacgggggcgagcaatattctcaaaccactttaagggttacaactttggacaacctggaagggtggaacccaaaccatttttggggaac

SEQ ID NO: 374067 - DNA, 224 bp, Zea mays
gcgcgtgccgccacgtcaggcaagtccgattgacgtcgcgcagcctcacggacaccgtggactgggacgagctctgcaacctgagcggtctagtcaccgtggacgtcttcgggagctcgctccaccgacgtgtcggcaggtcgttctggtgggcgccgtacctccagtatcgtggacgtctgctgggaccgatgtggaagtgcccttcggttcggagggcaccg

SEQ ID NO: 374068 - DNA, 211 bp, Zea mays
ggactcccaatccggccacgaaataatgacatatccaatttcatttaatacagccttttcagaaataggggttaaataaaaaatttaagagggttctttttgcaaagagtttttttacactacacattgtttattaactatttttattatgggataaatattgaagacatctaattatataatacagttttttagcttttaaaaaaccaat

SEQ ID NO: 374069 - DNA, 199 bp, Zea mays
  unsure (1)..(199): unsure at all n locations
caaaaccgggaaggancaagtatcacccacgccaacagatgctgacagggggcacggcccccgcaaagatcgagccaccatgcaggccaatctgaagccggcactccgaaaaggtccaggcggcaactgacgaatgggaaactaccaccaaaaggcaccccgcaggggcgaaaccgccggaccacgggaagagagacct

SEQ ID NO: 374070 - DNA, 129 bp, Zea mays
ggaacaagagcaaagggtcggtgtttttataggggggcccggggggaacttggttataccttttacattggcaggttggggcaaacaatttggtggccaagacatttttgagcaagggttgttgggttt

SEQ ID NO: 374071 - DNA, 207 bp, Zea mays
gggggggccaaccctattttggcaattgaagaacccaaaacaattcgtttgaacatccaaattcgaaaataaaaggggggctttttatggccctcccggggggggttaaaaaaatgggggctaggaaacatttccgggattcccgggggattttttggggatttttccccctaaaaagaaatgaacccaatttttttgggggggggg

SEQ ID NO: 374072 - DNA, 391 bp, Zea mays
ccaatccagggaatcatagaatttaaaactttttttttaaacatagcgtccaagggttttagctgattatggggtatttaagaagaggggggatggggggaatacttccctagcccttttggctacatataggtcttcaggaggaaccttgtttttgacaccaggaatgttgaaggcattacagtatgcaatcagttccttctttattaccatatatatgaacttagaaccatgatacagtctttaatcgcaccaggcgatagttctacctgatgaccacggtcattttattacaaaatttgcaagaccatgacagggatgtatcaacagatttcaaatgattaatcaaatgaagaacatccattggtttaataggtattcctttttgcca

SEQ ID NO: 374073 - DNA, 175 bp, Zea mays
gacataccaaatcatggtcgaacgacgtttaactcccaagcaaagggggcggcccgaaaaagggcccacagggcaaaagaggaaaacggcccagttcaccataacacacacacacacacgggcgaggtgcgggaaaacgacaatttcaagtctaacattcgccgccgccgccgcc

SEQ ID NO: 374074 - DNA, 418 bp, Zea mays
cgcggcaacgtgctcttgctggcgcggttagctcaactggagtcgtctttctgtgccccccaccagcgtgtcgtctagggacgattcttcactgttgcttctccacggccgtcaccttccatggccggcgttcccctctcttccattgccgcgatgctccctcgctcctgctgctcgccgtggccagcagcttcaaatccttgtagcatgtctccgcactctgcgtcatcaccgtcgtggtttttggagttcgtcgtgacgcgctgccgatgatctgtgtatagcgggagatcttcgcaagttcacgcagcttcgtggtacgtttattgactacgtgatacgggggatcagaactgagtcgaccacaagatgtcgccgcgcgtgagtttctacacaagatgatgctgacggacgaaac

SEQ ID NO: 374075 - DNA, 421 bp, Zea mays
taaattagctgagggccctttcctgtttctgctacactcacccaccaggtattcatacccctcctctggtcctgctgtgtgaaaccatagcatgtgccatttgtctccatagcctgtagtaatgttattctattccttatacaaggcatgcttaggtgtttatgccattaccctatattgagtgctctatgccttttttatcttttgatgttgatagatgttcatattattatggttcaacaactcctagcaccaagtcattatgtatgatctgtaaacttgatagaagttaacatcatttgattttaagaaatgtaatcatatttcctgattgctcggaattgacttgttcatcatttttcaatgtccctaattggtattagatttttgcgatcttgtgtcatattctgtgatcaacaat

SEQ ID NO: 374076 - DNA, 402 bp, Zea mays
  unsure (1)..(402): unsure at all n locations
tttgcaggctaatgaggctggggggtttagtagaaggggatccgcctgtttatcccagcagacaaaggnggngctggacttgtaactagttgatgtccttggacactaagtgttctaccactaactctaggatatataggtgcatttggctctgggaaagggcgatccgaggttgttgggaatacaattgcattttcactaggactagcaacaaccttagccatacttggtggcgctgcttcttttgctggaaaggcttatggtcaggtaggacaagggctcccagtggctgcttccggtttagccattatcatgggattgaaccttctggaggtacttgaattgcaacttccttgatttttcagcgattttgaccctcgagctgctgcagctaacctccct

SEQ ID NO: 374077 - DNA, 418 bp, Zea mays
  unsure (1)..(418): unsure at all n locations
gaccatttcccctcacttaattgcgtgatnttagttctaaatcacactgcgctctgtgacagcgcgattactggacagcatggagcgttcccgacgatctaccccggtctagtacaattggttgggccgatgagcttcaaggacatatcagagaactgaaacaaagaaaaagagagtgggaatggacctgtaactcgctggccttggtgagagtctttcacggtggcggagaactgatttgggggaagtgagcaattcggaggctctggtgaacaattggaggcaaatgctggtgctttggctgggtaactaccctatggagctcatggcgtactcaatttatagagtcagtgagcggtggtgtccaattcgaaaggattgcgttagccgccgagaagaagagatgagtcaccggtgc

SEQ ID NO: 374078 - DNA, 172 bp, Zea mays
gagcaggttgttctacccgccggagcccgcggaataaacagggtcttgaccctaatgatataaactgctacaacatttggtcctgtactgaagtgccatagattgtattacgacgaactgtttattagaacataaatgtttgtagaccacatggtgaaacaaacaaagttta

SEQ ID NO: 374079 - DNA, 145 bp, Zea mays
  unsure (1)..(145): unsure at all n locations
ttcacactgctgcatctgctgttaagcgctttgtataatgagntgatgccttgggttccccggangccccagntcatgtgcttaactatgtttggcccaacatatacgagacatctccccacgttaaagaaaaaccagacacaaa

SEQ ID NO: 374080 - DNA, 427 bp, Zea mays
ggggccgccttttttttttttttttttttttttttttaaaaaaacggtcaagtttttattaaatttttaccggattaaggcccacccgggttttatttggaccattgggaaaggggaagaacccccttaattggattccggaaaaaaaccaaggttattttaccaaaaaaaaaagggcaataaagggggcttaaaattccaattggttcaaaaacctccaaaaggggacctttttgggggggggggaaattgatttaagcgggtttaagaacagggggggggggggaccaaataggggacctttccaatctttttaagaagcttggggttggggaactcgggattaaacgctttttttttttaagggggtttttttggggttttgggattccaataaggacggggaaagggcttgggtttgggggtt

SEQ ID NO: 374081 - DNA, 313 bp, Zea mays
ggggccgcctttttttttttttttttttttttttttaaaaattaaaaaaatggcggttttggtttcccaaaaaggaaaccgggaaaccgggtttggaaggggggcccgattctgtttttagggggtgggttttggttggcaaattaaaaatttaaaatatgggccagaaggggttaaccaccaaatggtttcccggccttttggtgggcccggtttttactttccaaggaaaaaccggccgggcccaataagcaaggttttaaaacccgcttgggggacaatggcttcttggggatttgggggccggtttttt

SEQ ID NO: 374082 - DNA, 308 bp, Zea mays
caacccagaagctgccatagacaccctcccattccaggagccaatccggacggtgcacgagcttctaatccactctccgtgtggcggcagcctacagctcccgctgggaccatgggcggtgagggaagacgctactctgcatttacgatccgccctctccttgcagaagtcagcggagcggattcaggtcaacaagcatctagattgttttgacccccctatatttgatgcacccaccgggtggacttggactttaaatcctatggatgtggatagactgacgaggcaaaaccgaaggcgagaacggt

SEQ ID NO: 374083 - DNA, 288 bp, Zea mays
gaacaatcttgaaggcttcgggatgggttattccaaacccaagcccgttccttaaattggaattgggtgaaaaacccccggacccaagggaggaaaccccccccccaaaaggccccccaattccaaattccattttttcttgccacatttcaaaacgggagggggtcttaaaaattggtgggacttgttccaaaattttaaaagcaacattgggcgaccttagtccaacttaaggcaactttaccttgatgggtttgggctttttgggcttgggggggggcaattttt

SEQ ID NO: 374084 - DNA, 187 bp, Zea mays
gggcccaataatggagttggtttgcccaagatccatacaacagatttccgggccttcacaaattttaaagctttttccagggcaaaggaaaatgggcgggcgcacacacacacaggatcacataaaacagaccctaatgcttttttaacgggcgggcatataagtccagcattttattcgggggggg

SEQ ID NO: 374085 - DNA, 378 bp, Zea mays
cctcgcgtacgcgctgctctccgggggggctagccataggggggcccctcttgtctcccacgacaccgcggacgagctacgcggccgcctcaggtttccgaccgctctgttcgccggggactcgccggcagacaacgatctgatgcgtcacatgatgtgccgcgacgtctcgcgaaggttgtgcttccagcaagtgctcaggcacccttggatccagagtgcacgccgacgccgcgagctggagcggtcaacctgagcagacgtatattgaacgagacctgaaccgatcgagtatgatcgaagcattgcggtgggtgtgtactctcgctacaagggtggcgcagacctttctgtttattcagccagcaggcggcggcg

SEQ ID NO: 374086 - DNA, 182 bp, Zea mays
ggaaggaggggccgcaacctgtggaccaaaacttttaatccaaatccccggggggtttggttggttcaaaatttccgaattccagtcatttaacccacagcaggggggaagtaaaagtttattccacgactaatttagcaaaacacgggggcaggcctatccccaaaggtccatgtgcgggg

SEQ ID NO: 374087 - DNA, 347 bp, Zea mays
  unsure (1)..(347): unsure at all n locations
cgctcgagtccgcgatgcagatgggggttttngtcagtactcgagtccactcttacatccactcgctccaggcgaacatggactggatgcgcgccgagatcgccaagatggatgctcagtggtcccacggagcgcgcgtcggcggcgccaccatgccaggtgtccttggttcccccggtttccttgctgcgtcgcccagcatcctcggaactccgggcgcgttcgcctgcactggatcgggtccggggcacccacctgctgccgtcgactacactgatggccctagattcggacacggcttcgacagctaccttcgggatagtggacttcggcattcaactgccgat

SEQ ID NO: 374088 - DNA, 347 bp, Zea mays
  unsure (1)..(347): unsure at all n locations
cctnttaaacacaagggggggacccaggcattccttccacagggaacagcattcatgtgattagagactgttcacgttaccagcctaactgcatgcaaatttaaattgaaataaacaaataattaaatattgccgggggggcaacataacatacttatgggggagcggggccaacaccccttttaaactaagaatgctttccgtcggccaccttggaagcaggcagtttaactccatccatccgacagcactttatcatttcctgttgcgtaactacaactccttgacatcgatcattaaagcatcaccagcagttcggaaatataatccctcatgctcataaaact

SEQ ID NO: 374089 - DNA, 423 bp, Zea mays
tttgcgagactccgttctcgcgtttttcatagagaggaaacccctgttttttcaccgccccccacggggtccaaaaccttacccctcctgtcaccgggggcggcatgaaccggtgatcgtttaccaggcctacgatgtctgtgcacacccgaaggtagcgagtgagcatggaggcggaccgatcgaccgcgggggccatagggtgtgcggggggcaacgggcggtgggtcaagcgcggggcccggtgggtagaagacttactttaagacccaacaggggcgacacaagctgcaatacgagaagactcatttacctgtcgacgtgcactaaaaccacaacggccggaccgttccagagatgactgttgcatatttcaaggataaacgaggataccaagagatcgcgccttcaacaccaagtgct

SEQ ID NO: 374090 - DNA, 262 bp, Zea mays
accggaaaaccggtccctttttggaaaccgaaattttttaaaccggtgcccggcttggcaaagggttgataaccaaaaagggggccttccccccaccagggttctggaaataaaaaaaaccctatggtggtggccttgggcaaattttgaataaacccaaaccaaggggttttgggaggtggcatttttaaccctaagggggggccctttattacgggggggctttttggcccttaagaggcactttctttggggggttttt

SEQ ID NO: 374091 - DNA, 374 bp, Zea mays
gggggcggcctttttttttttttttttttttttttttttttttttttttttttgggggcggatagggagggcttaaaacccttggaaaaattttaatttacctctttcttaggttagcaactaaaaagggttttttttaatgggggggtttgggggggtacaacaagggagggggtggcagaacccgggaaaagccgcttggtttgggtttggttggaaaaagaccttaaatttttggcagaacttttggaaaaagggttttaattttatccagggaaaaggttttttcacccgggttgttgccattgggttgccaaaagggccccccaagggggaactgggtaaaggtttcacaatgggggggtggaaaaggg

SEQ ID NO: 374092 - DNA, 201 bp, Zea mays
ggtttttccccaacgcccacatgtacctgtgcgtgtcattcatcccgatgctcaaggcgctggtgcccgtggggggatactcagtggcgtgctgttcaagaaggagaccttcaggtgctgctccatgctcaacatgctctacatctgattcgggggggccatggacgtctacggtgaggctggcttagacctgcgcggggt

SEQ ID NO: 374093 - DNA, 362 bp, Zea mays
aaacaaccggcaaggttttaataagcatcctcatttaacacagggaaccgttccagcccggggcttttgtaaccaaacaccccccccccggttccctttccttggccaggggtaagaatatttttggcttttccggactccccgcttccggaagttgatattcccccccccgaacggggaacctaccttcctaataacattatggtttgggcggattccccaaaaaatggttaggcaaaaagggtttggccttccaatgggttgggtttttttttggaggggaccacataaccttttaaaatttcccccagtatgggggggttgcccccataaaacccgattttctttggccgggggggttt

SEQ ID NO: 374094 - DNA, 366 bp, Zea mays
tctcgccgtcggcgccgctggtttgactgcacctaggacatcgccgagcccctagcacgagctgcgcgatgcgatgagctctgtgatgcacaatccgatgctgatccaggtgccggagttaggaacaacgaacacattctggcgattatctgaggaagccactaagatcagcacaaaactttcattgatactgcgcaaccaccactcaggctgcaagtacctcgaagctcctgtgcaggtgtccaatggctggattgggagcactgggagtgtcaagctaacgggggacagttccactggcatcggttgctatagaattgagcgtgtgagagatgactacaagcaccttggcagggtcctggaact

SEQ ID NO: 374095 - DNA, 100 bp, Zea mays
  unsure (1)..(100): unsure at all n locations
gttatgcacgncagacaatcagaagatgtagggttcaaattgatacatggtgacaaacaaatattttgcagaacaattgccaaattatggggtgctacat

SEQ ID NO: 374096 - DNA, 166 bp, Zea mays
gccaacacatgcgaccctgtatgctcagtttataggcggtgccgccctgctcgtgaggaactgcccacaatcggcgttgagtgacggagtacgccgtggatctaggcaccgaactgccctagatcacgcagaaaaaagggtcatgctgccccccccccttagccct

SEQ ID NO: 374097 - DNA, 462 bp, Zea mays
gtgcttatgtgcaggttactcagtcaaggggaaacttagttgcctctcgtcctgggtgagctgatatctcgatccataaattggatcatcaacaagttgtcaatgatgaatatggaggaaagcctacaaagggctcttctgcgagcacaggtcatcattgaggaggccatgggacggcacatcacaaatcaagtcattctactgcagctgggcagtgctgagggacgccatgcaccgaggctattacgcacttgatgcattcaggtaccagcctcactatggagaagatggcaatccagctgttaggcgctttgtgcgcctatccaaggtaccctgtgcaaaggatctctatttctccgggccaactgtgcagtttcaggaacaactacaagaggcacttgacaaattgagctccatgattggtgatatgaatgaggtggtcatgttcttgatgagctaccc

SEQ ID NO: 374098 - DNA, 303 bp, Zea mays
ccaaaaacggaaagcaataatggtggggggacaaccattcaaaacggccgttttaaaaacccagggggaaaggggggggggcataaccagaaaggtttacaaacattagggggtggaaaccaaaagggggacaagagccggacaaaagcctggccatgacccgattagggaacttttaggacctattaccattattacctttcttacccttattaaacttaagaccaaccttcttggaggtctttttggggggttgcaaatccttaagggccttaaaaaaattggccttcttcatacccttaa

SEQ ID NO: 374099 - DNA, 461 bp, Zea mays
ctcgcactctgtgttgcagacctccgccaccggaggttcctgcgggtgcgtttgccctgacagaacactggaggcccctgcgggtgcgctacccctgaccaagcaaccacggactagtctaccgccgtccgcagcatccgttcaccttcaccccgcctgcgcgctctctctctgcgacgactgggtgggctactgcagccgccgccgccctacgccgggtgccgaggccttcgccggtctcttcgctggtgacgagcactcaccaggctgcttcatcgtgaaaaattgttgcatgcagccacgcacatggtttgcactatccacctacacagtgatctatgcttctgaccccacatgccttaggtctatctgcaccagaaagaagtgaatcgtttcaaggtgtctatatactttttggatgctttaagaaagggcctggaagcattgcacgggtaacatat

SEQ ID NO: 374100 - DNA, 328 bp, Zea mays
cccacttttccgaagaatttgcactgaaaagtgaacttatggcatgaacatccttagattttgttttcttaacttattgaggactcctatctgagtgaatgtcatccaacttacatgcataatactccctacatcccataaaataagccattaattttttttggcaaggtcttttgttgctagagaaccaatttccctttctaaaaacatgcacaccatattttatgggatggagagaatatacatcagcacatggagatgcattattgtaatttccatgctgtccaatatcctattcattgcgcctattacatttttgttaatatat

SEQ ID NO: 374101 - DNA, 322 bp, Zea mays
cccaaaaacctttttggcattttggtttaaaaatgggggaaaaacttaaggcaaatggtattccgggaagggacccgtttgaaaaaaaacaaaaaatttccttttttccaagggttttttttttttccctaaaaaaaggggaaaaaaaataaaatcattcatggtttttgggggggaaaaaccaatttccgaaaaaccctgggaatttatggctacccacaagggggggggggggaagggcccaaatggtccaaccgggtggccttgaaaaatggcccctttcatggcagacccatgggggtggcaaaaaagggcttgccct

SEQ ID NO: 374102 - DNA, 301 bp, Zea mays
gggccgcctttttttttttttttttacccaggaccatttaaaacccgtttaattttttggaagttccaagtaaaaagggccaatacaaaccaatccgcaggcttctttttaattaccccaattctactactatatatatattaaaggtcgatccaggatccggcaatgctagagcatggttttaatttaacaaaaaaaattaaaaggaaatccggaatagggggcagggaaaataaaaaaattggacgggttggccccagaaaaaaaagggaattaagggttaactaactcctttaatccc

SEQ ID NO: 374103 - DNA, 475 bp, Zea mays
gtccagtgtgtttgttacaaactaacaatgtttttgggcagaacatgatgtgaagcactgacagaatgaaattgagatcaatgacaaattgcaattcttctagatctcacttgagataatttgtggggcagctaattttttgtatgagtttttagtatttcatcctgaaagatatatttgaaatgaacatgaatccaaatattgctattattcccacaccagttgatttaaagtttgcttgtggaagagggaagcctggaatgccccaagatcttgatgaaaatttgtttcgttagagatatccaggttatagagatgatagctgtctaaattactctaatgttatttataatttatatacaggtggaattagctcatggtggacgagaaccatcttcttttgatccatctaccagctataacagtgctggacagtgcagtgcccctaaacgttctaattagattaactatcaca

SEQ ID NO: 374104 - DNA, 458 bp, Zea mays
gcccagttgattcgttcatggccaccgcccctccctgcgcctgcggcgctccgtccccatcgctgcgatgccctctagccctgccgctccccttcgctacctctcatcccgccgtccggctcgccgccccgccgcttctcgcgcgccgcctcgccgtgtctcctcgaagggcagcgtcagcgctggaagccctcgtgctggaatctgacgacgaggaagaggagtccgggataggcctgttccagggtgaggagtgggcagcgaccgccgacgagagggacgcggtaaggtcccccgaactggaggttttcgagctcgaagagctgccggagcagtggcgtcggtcgaggatcgcctggctctgcaaggagctccccgcttacaagcactccaccttcacccgcatccttaatgcccagcgaaagtggattaaccaggacgacgccacctacatcacc

SEQ ID NO: 374105 - DNA, 266 bp, Zea mays
ggcaaggcgattttgcaggatttaaataaatttaaaggtgggccaaatcacgggcaaaaaaggaggctgggcgaacccagaaccacccctgccttgggacgggcagaagttttgagggagaatttatgaagggggtgggggtttttttttttattaaaaacatggggggggcaatggctctttggagggggaagaatttactcggggcttgagtaagcaggcgttttttcctccgcaagttttggggcgggggcatccattttttt

SEQ ID NO: 374106 - DNA, 391 bp, Zea mays
ggctacttctccgccgaggaggaggacggccccgccgccggcgccggcgccgagctaagcgagtccgctgattcgtcagccgaggaagccggatcggacggcgacgaggggtccgctcctccgaagtcggccttcaagccccggcgccgaccaaaccgtaagaagggagatgcctgcggcggcgaccgggactcctgtctgccctccgctctggaggccttcttcgatatctcgggaccaccggagttcttgaggcacagggttgcggagcctgaggaagggacggaggccctcggcgtactcgatcgccgtgggaaagaggggagcaagctgccgccttcaggtggtctgattctgaagcttctgcaatgcttgacaaatatgttgatga

SEQ ID NO: 374107 - DNA, 288 bp, Zea mays
gggttctaagggacccagcaaatcattggaattccaaaaaaaaaaaccggattaaaggccccttgaaggtaaggtcaacgtaaacacgggagggcttcgggtattatccaaaaagaagaagcaaagggttttccgcccagcattgggagcctgccaggcaaataacattgttatggctttaaacgccgtggttaaacattgggggggggccagattttcccaaggggctcctaaacgcggggggctgggttaacgtccccttttagccttgaagcaggcagttttttt

SEQ ID NO: 374108 - DNA, 295 bp, Zea mays
gggccgcctttttttttttttttttaaacgggggcctattttcaattggattcctttttggacctttaaaatttaaatccagaactttaggggcccaaatggggctttaaaataacatatggggctaaaaccagttaagggcaggattaaggggggccctggggcccaacggtaaaacagaaaagggcctaaggttaatttttggccccttttaattttggtttagggcaaggttttgaacaaggttgggagggcacaagggtcgggggaccaacgctttttctttcgggttttg

SEQ ID NO: 374109 - DNA, 525 bp, Zea mays
  unsure (1)..(525): unsure at all n locations
gcctagtctctgctcactgtggctggcgtgtctctcttcttggtgcagctcgccgtgccgtgcgctcgcccagctctatagctatagccgcgccctgctcggaacccctccctctgctcggatctcgattttctgcccagctcgctccagctctgttgtcgcgcaggtcaccggcgttgccctccgtttgccgcgcgcagcctgcgtttctccttgacgcgcgttccgccttgccgtctccctgcgcgccgtggtatcccggcttttcctagctcagaccgcgttcagtccccagctcgccgtgcccggtcgagctctctgcgcacacgccgcgcgcagatgtgtccctatgcttgctgtggccggtttcctgcgtcgtgcgtagagcaatgaaacaaaaaatctgtgcgcgtcgggctcgcgcgccaaatctttntctagctcgccagcgtgccttctcggctcgttcggctttaaaattcctattttatcgtcaatctcgccgcgacttagttcgtcgtcgcg

SEQ ID NO: 374110 - DNA, 219 bp, Zea mays
cagttgttctccctaccagaaataaataaaaaagaggctttaccataagggggaaaggctttgacttttccaggaccacagagacctacggggggattccctattttgaactaaaaagggtccaaaccaggacctgcaaaatctaattccatggaaaaaagggatggttttaacattaaacccctccatttggaaatagctaaatttccaaaaaaagac

SEQ ID NO: 374111 - DNA, 329 bp, Zea mays
gccgccttttttttttttttttttttttttttttttaaaaccgttcgaaccaaatccagaattcgaaggggcattgggttccaaaacaggggcttagggccataaggttcctgttgggatccaaaatttaccagttggtggctttgattttggttttaagttaactggggctttaagtggttccttgggttgtttggggcagggcaataaaacagtttgtttgtttaaaattgggcccttgttttaaacagacctttcggggaaccctggattaagctttcctggggcttcttttaaaaacgggggggaggctccttccgaggttgggg

SEQ ID NO: 374112 - DNA, 421 bp, Zea mays
ctcgcattgacaagccagccggtggtttggttcgctttgctttgcttacgtgctgcgctgcgcgctccgaccaggcccgccccgaccggcgatgcagcggtggctcccggcgctcctccgccgcgcggcgcccggcggcggcgcggcgcggctcctcgccacgtcctccctcctcttcgacgacacgcaggagcaggtgcgtcatgcgctcgctctctccacttcccactcggcgggcccgccgccattgcgcctcgccccatgcctgatcgacccatttcctcgcccgcccggccccttgcaccgcggcgccagttcaaggagagcgtgcgcaagcacacgcaggaggccatagcgccgtgcgccgcgggcatcgacgccttcaaccactttccgcgggacgtggacctgcggaggctca

SEQ ID NO: 374113 - DNA, 227 bp, Zea mays
ggggccgccttttttttttttttttcaaaaggggctccaccttaccttttaggctgaggaaaggccccactttttttggactttaaaaaaccgcctttgggatggccatggattttttgggggcaaaaaaattgcccaacgggtaaaaggaggaaccattttaccggcccggcggggtttacctggggggaggagaaaaaatggccgggaggttttggggttttaac

SEQ ID NO: 374114 - DNA, 179 bp, Zea mays
ggccccccctataatatgcatgttttttggaaataaaccaaacccgaatttaaatggtttgccacacctaacaactgaggggcgataaaggacaatttttgaaaagggggcccggccgggggttgtttttgaaaaaggcagtcctggttcaaaagatagagagcaattttttttttaaa

SEQ ID NO: 374115 - DNA, 206 bp, Zea mays
accgggaataggttaatttttaggggcaaccccaaagggggtacccaaaactggccaaaaaacccggggccccccggctaaaaaataacggcccccgaaaaaaaaaaccccagggccggacccatggttttaatttcaaaacctaaaaaaaaaaccggccccggggggaaaccccggaatggagggaccacccgggaaaaggaaaa

SEQ ID NO: 374116 - DNA, 103 bp, Zea mays
gcgattggtccgcgatctatatctcgaggaggcatggctgtagattaagtcaaggtccggtggttcgcctattatgatgctcatgtacacctgggaggacgaa

SEQ ID NO: 374117 - DNA, 252 bp, Zea mays
ggggccgccttttttttttttttttttttttttcggggggccccaccactttattgttttggcccccatttttttattaaatcaataattaagcttaccaaaatttgaatggggttaccattctaactttggccggctttttaacaacccgggaagggttcccggttggcccttggggcgaggacttggggaacaatagggtggttacctcggttttacccgacttttgggattttttggtggcccccggga

SEQ ID NO: 374118 - DNA, 210 bp, Zea mays
cccggaaaaaaggcggaaccatggggtggtggaactggggcttggttaattttaaccttcccaggtggtccggggccaatcccaactggaaaaccaaccttaaaggggggcccagcaaaacccttggaaccaaccttaaattgccccttggttagcattatgcttttaggggggggtgccagggccatttgggtaggacccatttaccaa

SEQ ID NO: 374119 - DNA, 247 bp, Zea mays
ttttttttttttttttttttttttttttttacaaaggaccctttacattccaaaacttaagttttaccagggaaaaaggggtgttttttttccaaggcctggttggccccaaagggccaaacttattaaaaaaggtgggagggggaagcctttcccttagaattttccctaaaccttcttaggtttaagggccccccctggagtgtcttacccaaaaaataaggggataaaacttttcctttggtgg

SEQ ID NO: 374120 - DNA, 214 bp, Zea mays
cacgcaggttttaataataaggatcggcatcggcagcagggccacaccaaaggccagcaaaattttgcatccaaaaaccccttttagttcttcttcctgcccaccctttatagcgccggatttaaggaaacaggaccgacgggaaataaacctgatgagcattttgtccaagagagaagaggttcctaattatcattaactcaatccccatgga

SEQ ID NO: 374121 - DNA, 267 bp, Zea mays
gccgccttttttttttttttttttttttggaggaaccaattggtaaatttaggggcccgtttaacccgttggttttttaacaggtcaacccttattccaactttgggaatttcctagggcccggggttatgggaaaaagccgctgggaaaaatggttttaccccccaaaacccaagggggggtaaagattaaaacccttcaagggaaaaggccccaccggttttgggggccaaacaaaaaaacccgggggggcaaggtttttggggg

SEQ ID NO: 374122 - DNA, 349 bp, Zea mays
ggggggggaataagaacaagggcccccaataaaaaaaatccagaagtttttgttagcatgaccttttttgtttggcaaaacgccaggatacatttgcatgacttcagatcagcaagacataagcccgggggcccacactccacagtttaacaccgggttaagctcaccaaaaaacctaccataacaggttgggggggcatttaatcacaacttttaaaatccagtttgataacgagaatttggttaaatgcgggaaacacttatttttattttcctgggaggggtcccgggctttggcatgttctcagctccggcttttttttttttttcaaaaggcttgagtttttgg

SEQ ID NO: 374123 - DNA, 270 bp, Zea mays
aaaggaacttattctcgctttaccttttttttaaaaaaggtacaagaatgtttgcttaaacaggaaaagggttcccggccaagatcccccccctttggggtggaagagaactcctttttttgaacttttgggtaaactttgctccgggactggggctacatgtttaaggtggtgcctgaaaacaccattccaacggggggggggaaacttttcctgacttcggtggtaaagcagaaaaggtttttggctccaagggaaaaaaaaacaggg

SEQ ID NO: 374124 - DNA, 453 bp, Zea mays
cggacgcgtgggggaatggagctccaagttaatacctgatgctagactctttatgtatatggccctagaagttattctaagactggacatggcacaagaaaataggggactgtccgacatggaagtgaacctccgaaatagattgaagatgcgcatccttggctatgcggtaattgaaagggcacgaaacaggcaaaactcacgcatgctttggcttaaattcggagatgccaacactaaatttttccaccggaaagctggctccaggaggcgaaaaaatttcattcaacggttgcggagcggtaatgggtgggtcttctcgcacaatgaaaaagcgcaagagctacaaaatttcttccataatgctttaaagcggccaacccctagatctatcgaccttaactgggacattatctctgaccagcagtttgatctatcaagcctcgacgcgcc

SEQ ID NO: 374125 - DNA, 182 bp, Zea mays
gggatgtgttgtggctaggggttcaccggcgtccttagcgaaccttataccgcccatgttccaattcttctttcgccctttcttctgggactttcgcatccgcagttcccgccgaagaagctccatcgttgatgccggctgctctcttacttaacaatatgaccacgctgggagggaggggc

SEQ ID NO: 374126 - DNA, 468 bp, Zea mays
cccccccaggggggaaaatttccaaaaggggaaaacccttttttaagaaaaacgggggccgggaacccccattgggagaaaccaagcccgggggggaatgggaaaaaaaaacccccccttttgaaaaccccgtttgagagccctgaaccggccaacccccccccaaattaaaaggggacgcctccccctgctgggggtcccccccggggagggggggatttgagggtccccccccccgaaaagccccacaaaccccaaccccatttttttccccccacaaataagggccccctgtttgggggtgtcccccccagccccaaacggaaaaaaaccctggcccccccaccccgggttggaacctttgccgtcccccccaaggggttccgttccttttttggtcgggggttagcccatttccccggagggggcccctttttgggggccccccccctccgggggggggggggg

SEQ ID NO: 374127 - DNA, 374 bp, Zea mays
tttgccctcttccaccgcacgccaccggccaccgggtccgcttcaacggccaccccgccccctcgctccggcccctccaccggccaccgggcggcccgccccctcgccccggcccctccaccggccgccgcgcgcccgcgcagttccggcggcgcgcgcccccctcggcccggcagcgctaccaccgcgcctcggccccgccgcctccaccgcgcctcggccccgccaccgccctcggactgtcgtttgagataagctagcaatttttttaggccagtacgcatcacttctctgttttttttttctgctgaagtaatttgagataaatttgtgttttacctgaagcttctgagctctagactggtgcttccatt

SEQ ID NO: 374128 - DNA, 277 bp, Zea mays
gtctcacaggcatgctgtcatttggcccaaagcctacgcacacggcatttacattgggtggtactccacctttggctaaagcgagaagcgtgcacaagggagggggacacaccatggatcggtatacctttatggccggcgtactgtactgctatgaaatgggtgcgcagcccattactgactacgcattacgaccagggtatcctaaccgggccctaggtcaggggctataccggctgcaagcgccggaggaaaaatgcagccaacatccagggaa

SEQ ID NO: 374129 - DNA, 407 bp, Zea mays
tccactcgtccgcccacgcgtccgcagaagcttccgatcgtctgccacacccgaccgcctgccaaacccgacacactagtcgcggcgcggcgcttctcttctcttctcttcatgcgccatcatcgccgcctccacctctgctacgaccacaaataggcaggaggaggagggggcgatgacttctatcttctgccacaatattctcgacctcgtcgcggccgacgacgtgcccctgctgtcgtccacgacgctgctgctcccgcgcgtatgatgcgcgcgtccccgggctcgtccacctcgtcgcccgcgcccgccccgccgcgccgcgtgatagtgtcccaccgcctgtcgctctcgcgtggtcggacccggcggggccctttggggtcgccttctccgtggacgcc

SEQ ID NO: 374130 - DNA, 425 bp, Zea mays
gtatcgtgcgaggacgagcgcccgcaacaccgatgcgccgccgccccctggccctagcgcctcgcgccgtcgctccatggccggtggccctagcgccccgcgccgccgctctgtggccgatggccctagccctaggcgccgccgctccgtgggccgtggccctatcgatcatgccggagcaccgcccaccggctagctggcagcccgcagccgccacggcaccacgcgtccgactcccacgtggccatgcctcgtcctccgtgctcgcctagccgctagcagcctagcgcgacagtcggcagtcatgaaaaactgttgatttcgccaggagacaaacatgctacataccctcaatattcacattttttcagcagtggctatatatacacacacacacactactattaaggctgtaaggggtaggc

SEQ ID NO: 374131 - DNA, 406 bp, Zea mays
tttgagagtgagagagagagagagagtcccgaagcgtgcacatgaggccaccgcacagcggccaggcggcgagcgagacacctccacacgtctctccccgttcccctccccttccgtttcctctgtagctgcgcccacgagaagccggaggaggaggaggaggaccgcatctcggatctcccggacgtcctgcgcctgcacattctgagcctgctgccgctcaaatcggccatccgcaccggcgcgctctcctcgcggtggcgccgcctctgggcgtaccgctggccggagccctcctcggtgaccatccgcctcccgcccggcgcggtgggggcggcggcgcgcgccgaggcgctggccgggatcgaccgccgcgggcggcgccgcgtcgacggcttctcgctcg

SEQ ID NO: 374132 - DNA, 373 bp, Zea mays
ttttagacgtccggtaacgcgagcgcaaccctggcagtgttagctgaaaatctgacagactagtcaaaagggatttggttgtgcatcggctaagaaagcagtctgtgggactggaaacaaagtgggaaagtaatagaccgatgtctctcttgggctgtgtgttgataaaacaggggcaaaaaagatggttcccgaaccaattgccggaatgttctcgggacatgtggagctcgctcctcttgtcagtggaaaatgagacacgctaaaggattgaaccgttattgtttgcaagagttgttgcctgactaagatttttgcataatctggtttatatatggttcagaacttgttagctagaggaccaggtcttaca

SEQ ID NO: 374133 - DNA, 418 bp, Zea mays
cgactagagcataccgccaccgctcttggttgggaccacgacctcccagccagggcctttcagcgggatcagtggagcggcatcggcagcaccaggtggtccggacaggtcgctccggtccatcagcttcaagaggtcttcgtcgctgatgtcggtctggatcatccgatcttcctcgtcctgctcgtccctaagcagcgccagcagctccccctcctgcatcccatgggttaaaggtactaacgacaattttccagtgtgcatttgctttgcgtctacgcagtggcaaccacttgtatatacttaggagtttggaccaaatggttacctctaaaacgttaggctttgctctttcttgttcaaactgccccttgcctatcaccacatgctctagctttaactttccaaaagctttctt

SEQ ID NO: 374134 - DNA, 290 bp, Zea mays
ttcgtttgctttatgccaggagattctggcctacggggcttgtgggaagaccatgacagctgactcactgttacagggaggttggacttctgccgtgaccgtatggtccatgttacggctgcatcgagtactacattatgacacaccttctgctcggtgatgcggatggtctcccgtacgagcgcgcggtctgagacgagggccgctataaggaccttgcccgtcttgaggcacagctggcggctcgccacaagctagggtgggcgacacacaagatggagcattgacac

SEQ ID NO: 374135 - DNA, 416 bp, Zea mays
  unsure (1)..(416): unsure at all n locations
cccactcgtccgcgcgaagcacagctcgccttgcctctgttcagctcacggcggaagacgagggcgacagcacacgagagggtggcaggagcggaagcgcgcaaggaggtcagtgaagcacgcgcccacggcccacatccagagcagcacagcaccgcgcgatggcgtgcatcaacatgtacaaccctgacggcgcgcccgggttcggtggcgggccgcagccgccggccgcgctgggcccgcgcgtctccttctccagcgacttcgccgtggagccgtcgtcggtgcagaaccgagcgatgagcctgcggtgccaggaggaggacgtcaacttcgagttctccgtgggcagccaccccatgatggcggccgaccagctcttctncagggcaggatccttcccctcagggacaacg

SEQ ID NO: 374136 - DNA, 423 bp, Zea mays
tttctagccaaagtagctgcttgtgcgttgtagttcctgtctccacgacagttttagctcccctcctcagccactagatcgatctgcccttgttcatcacaaccaactcctgtgtctggtgaccacaacagcaatccttcaacctcatcatggccagggttcgtggagattgtctcggccgtgttgtgcccattccttgttcctcacaggagaagttttattcccttatcttttggttagttacttcatgtggaggccttgaagcttagaatgtttatgtgtatctcttatggaaaggcttcacccttccaattattgtaataagttatgcactttgggtactatcaggacttgtaataaatacatctctttctaccttgtaaaacttgagttctggaatgtaaagtgtactttataaaagtc

SEQ ID NO: 374137 - DNA, 418 bp, Zea mays
atcgccttgaataaatgttcatcgttattttagtcagttggaagcaaatatcatcgttgttccacttcagcaaaagttatgaaaatttcatagtgagcattgcacgttagtaagtctgtagattttaaattgtgatgtttgctccggctacctaagaaaagtgtgattcttatacttagtaatttatagatacctagtatatgcttgcttttaaatgtttacatttgtcttgccataagtattgcaatctatcgaggttacgtcttagctgaatatttgtgttgagttattgtgtttgatggttgagctgagaataagtaacttcaagtctgtgattgttgtagagtcaaagttaactagtgtttgctcataggaattgtagcgctctgctagaagtgttttgccctcttaagtgtag

SEQ ID NO: 374138 - DNA, 413 bp, Zea mays
ttgacgcgtgggggaaaagaagtgtgtgcattgctaatgatccaattacctctgaatcaagttaataacttaaaataattgcagtttaaatgttatgtcgtatgctctctactaatattaatcgttatttcaaaactttgtatttaatactaatcgttatttcaaaactttgtattgctaaattcaaacgcgcgcgatggagcgcgccagtccactagtttatatgatggtactacgcatcaacggcgcaccaaaaacccagccacaccacacatcacggcgcctatcacgatccaacgaaggtgagagttacaaagccaggtataagggcaacgaaagaagaactcagaacccagcgggctcacatgaggcggatgctggggtggctcactacaactgagccgagatcatca

SEQ ID NO: 374139 - DNA, 431 bp, Zea mays
gtgaagtttctttcagagtttctgttggaggccccaaatgctcaaataatgaagcgttacattttggaagttcattacttaaacattatgatgggcctgctaaaggtattagagtattagttataaaattccttgcttatatttaaacaaatcagcaatgatattgatcacccttctcatttcttgtgtttcttgattttccattttagtagtagttatgacattatagtgccattatctagtgaaaataatgatgaagggcaggtctagggcagtggtgagagctgtgtcattgactcaccaggttacggctttacgggttcaaagcagtctctccgtatttgccagggaaaggcttgtcttggtttatcccttctctagatcctgctcatgtgggagtgggagcctctggcactgtgtctgcccttttt

SEQ ID NO: 374140 - DNA, 388 bp, Zea mays
ccctcgcgtccggccacatgcatccgagcccctggcttcccatggcgctcgccccttcctgctcgttctcctgctgggcgcccagccgagtcccttccctagccgctcccttctctctctctccctcctctccaacactctgcgctccctgctcctccatgtccacaccgagctcccttgcacgctgcgttttcccccaaagcttccagccatggcgcgcccattcccctgctcgccctctgccgcgcgctcctcccatgtcgcgagatccctgctggccgagctccccatggcgcgcatctccctggccaaagctctctcttccctctcccatggcgcgtgcgcctgctcccctgttggccgcgccctgctccctgctgcgcgcgtt

SEQ ID NO: 374141 - DNA, 186 bp, Zea mays
gccgccgcagcggtgtttgtcgcgcccgcgccgcccccgaggcggacctacagcgccaacacggggcgcacccggagcatcaactccgacgacatgtcgtattcctactcggtgttctcgcacaacccgagctgcttcctcacgcacaactccaccgacatctacgccgtcggggagggcacgaac

SEQ ID NO: 374142 - DNA, 167 bp, Zea mays
  unsure (1)..(167): unsure at all n locations
agagataaagnatctcaaaccattgtatttagtgtacatgtgcaaaataagtcatagataaaaactttaggttggagttgagtttcaaatgttcaaaaataccatggtatctgtaaaccttggtattcaaaacagagttttttacaatgtaaccaaacaccttttag

SEQ ID NO: 374143 - DNA, 194 bp, Zea mays
aaaaccaccctcgatggctattttataaaaaaaaacagcaatgggcaggtcaatttttccctgcacaaggcacgctacagggtacatcaaaactacaagctcaagttatttgagctatgtcctcaacgacaacaaacttttccattcggattgggcgcaggtaacagactagttaggtcttactaccagccaaa

SEQ ID NO: 374144 - DNA, 268 bp, Zea mays
gtcaaaaggggtaaaatttttttaattaaatgggtaaatttgcaattttttcactaacaaaccctaaatataccccaccctgggggaaagcaagcccattttatcctgcaccaaaacgttaaacctttttcccaaaaaagggggggtccgggccaaaaaatggatttggggcttggggaaagccccccccacaaaaaagggggcaaaaagaaaagggccccccttttttttcttttgggaaaacggaaaccctaacttggggggaaaa

SEQ ID NO: 374145 - DNA, 325 bp, Zea mays
gggggccgccctttttttttttttttttttttggaggaagaaattccccttggaaggacccttaaaaggttaattgaccaaccaaacccggggtaaaaaatgaacggggcccattgattttccataccggttaaaatccggggccacggatattaaccccggttcattaaaattaatggagggtttttggttggccccgggggtgggccaaggacctttggggtcttggtttggttggcagccggtttggccaggcttaattggccgggcttaagagctgggggttttaagcccccttaagtggtggtggtggaaaaaagggggg

SEQ ID NO: 374146 - DNA, 354 bp, Zea mays
cttttatattgtgggaagcatgaccttgcccggagattggaacagcttgaggtgtccctgaagggaaattagatagggtttggttctggagttagttaggatggaacaactcttcaggagcagcttcgttcgaggattttgggaagcataattttctatttttagaaccactcgattttatatgaaatcatccaaacaaaaataaatttaggagcactccaagtcctaatacaccggctaccaagcctctcaagcacaaaacgactccgtcaacgtacacccatttgacaaagtcttctataccgaagccgacccttgatacatacacccttttttctaagcctccgaagccca

SEQ ID NO: 374147 - DNA, 272 bp, Zea mays
ggggcccgaaatcaaaatgtcgccgggataaaaaaattaagagtccccggccgggcgtccgaaggttgttgcaggggcccacccggtttccaccaccaccaccacccaaacccaaaccccagtttacacattcgaccactgttacagaaaagggggggtaaattcccatccgaggatggcctaaaactaaaaggaagggggaaattttttattttttttttccagagcctcccgtccgtggttggggtccggcccttttcgccaaaggggaa

SEQ ID NO: 374148 - DNA, 377 bp, Zea mays
ccctcgcgtccgcccacgcgtccgccccacgcaccccggcgcccgcgccgcgccaccttctctcccccctcctcctcctcctctctctctctctctctgccacactgccacacagcacaccagaagggcagcaggggaggtagagagaggtagcttcgcattctcggtttccctccgcgtccttcccagcctcgacagagagaagggccaccatcgtccctgcctgattgcgcgccaggcaggcaggcattatggcgccgggcggccggcgcagcaacggcgagacgccgacaggacagcagcagcagcagcagcaggctgacggcaggcgcgggtgcgcatgcggcgggttccccgtgtgcgcgtgcgccggcgcg

SEQ ID NO: 374149 - DNA, 359 bp, Zea mays
  unsure (1)..(359): unsure at all n locations
gcgctcccattcgtcgacgttcctgtcccctatcttgttcctggccgcgtcctctgctccggcgcaccccagcgctggccgagtccctccatcgaggcgcccctctctctggtcgagctcctctccctccctcgtctccctgcgcacgcttctcttccatggtcgccgtggacgcgccagtgccctccctgctccatctccctccgcgccgcgctcctctgccggcgcccacctccatggctgcggttccctggcgtccgctcgctgtgaagctccctggcgcgcctcctgctttcccaagccgcgcccttctttctctctctggtctgagtgccgcacgtcctggagctnccatgcgc

SEQ ID NO: 374150 - DNA, 339 bp, Zea mays
aaagtaaaacggggggggcgacggggttattgtttaatacagcaccagcagagtaaactgaccgttgtttttatattttaacattactactactgtatgagaaacgaagggacccacgcggccttctttgttttgccttaccataaccagccccgaaccgaaccttaaccaagcagttaattagaacatagcaccagttttaaacaccaaaagatctaacaggttgttcgacagccatgacggtgggcaccatgggaccgggaagttgaagaacaggccctcctgttggggaagttgccgggcggggtcggccacaaggatgtaaaaaaggcccatgac

SEQ ID NO: 374151 - DNA, 308 bp, Zea mays
ccaaagaaaattttttattttattggtcaatggccgaggaaaaaggcccaaattttggttggccggttttataattaataaaccccggccggtcccaatcttttccaccgaattagagaaattggtgggatgccggacctaaaaccaggaggttggtatttatggaaggggcgggggtttaaaaatttaccgcctttttaaccattaccacccttcccacccttgtcagggttaaccaggggggccctggcatcctgaaatggggattggcccccgtttccccggggggaaacaggatggcccctgcc

SEQ ID NO: 374152 - DNA, 245 bp, Zea mays
tttttttttttttttttaaggccccaccaggaaggaattttggttcctttggaaaaaaatggacgggttttttggcactggaccaagaaacccccacgcgaccttatttggggggtttccagactgtccaagttccttgtaaaattaattccccagttatgttctaggggggcacgatcatcctattccatgccttaacaggaccgggcgcgggggtttcccggggggagggggaccggggcccc

SEQ ID NO: 374153 - DNA, 260 bp, Zea mays
aaaaaataaccgggttccaacccagaccgggcatggtccccatttccggggggaaaccttaaaaggtggaccccttccgggttacggttgaaacattcaattaaaggttgggcccttttttcccccccccccccttaaggcttggggcttccatttaataacggttattttttccttaacggttaatggccattttaaggcttgggattcttggggaaccaaaccagggttttattcccaccttgccaattccttttttt

SEQ ID NO: 374154 - DNA, 271 bp, Zea mays
ttggatcctttagggggggccgccttttttttttttttttttttttttttttttggggggaaaaaaaaggggggttctttatggaaaaacccccccggacccccttccaaatttttggacatggaaaaacccggcccaccgggccaaaaaagggggggtaggggttttaaaagggcccttttaaagggaggggttaacaaccggggggatggtgcaaaattaagggggcctctttttttttttcgggggcctcctaaatggtttttcaggg

SEQ ID NO: 374155 - DNA, 243 bp, Zea mays
aaaaaaaaaccaaacggggaaaaaccccgcatttggggggccccccttcaaaaggggaaaggatttcccttaaaggcctcccaatttaagggaaaaccttccccggttccccgggccggaaatttcccccgctttgggttggaaggccccccttatttttccccccccaaaaccctccccaaaaaccccgggaggcctggggaaaaaacccccggggggcttacctagggccccagggggggg

SEQ ID NO: 374156 - DNA, 339 bp, Zea mays
gccgcctttttttttttttttttttacaggaaatggcagggggattatagggggtcctaaaaacagagacaacagacaggtaagggactgaaggcaggggttcccccgtaacgaatggccatgctgcctgaatgtatgaataataacaaaagcaggtttaattttaagggccggaatccacacataatacagcattaaaaaggcttaattttgatgcgacgcgtgggtaattggggttttccggatccagaattgttgttttccccaaatccagacttatttagaggggaaaagggaaagcaatcggaaccgttccgttaccggacatgccaaatttcc

SEQ ID NO: 374157 - DNA, 394 bp, Zea mays
tgtgcacggccaaaaaggcgctcgcccagcgcttgaccagatagagcaacacagctcagctcagcctcggctcgacctcgacctacctctacctcccgcttcgcgcctggggtgcggtgtcgtgccgtgcgtgcgccagaacaggatgctgcccgccgggtgcggcctcctctcgtgcctccggctccacaagcagggcgacgagggccgaaccgacccccgcgtcgcggacgagcccgccgcgtcgtcgtcggcgtcgctcggcaagggcagcgggtcgtcggccaggcggttcgcgtgggccgagatcgagtccgtcacggcgggcttctcctcccgcgtcatcggccagggcggcttcagcaccgtctacctggcctgcctctcctcctcc

SEQ ID NO: 374158 - DNA, 338 bp, Zea mays
ggttggatccttttgagggggccgcctttttttttttttttttttttttcttaaaaaaggccggcccttattaacaaacatttggaccttaattatttcccatttttggaaaggacacccccaaattgaaaacaaagaaaaccccacccttcaaatggaccccgggtttattggggccaccacgggtcaaaaaataacaaattaatggccatgcctgccaaggggttggctggttttacttggaaacctttaaattcgggggggttcccttaaggtttacgggaacttaatttaatttacccaccacaagcaagcaagggagccggggggggggcctt

SEQ ID NO: 374159 - DNA, 380 bp, Zea mays
tccagagtccagaccaccaaacccctacccgcgaagaaaacccgctacccgcctccgcgagaggcggcatccgaggcagcgacgatgtgcagcgggcgactgggcgaggagtgcagcatgcctgcttgcgccgcgtggcatccgaggcaccgcacgcgcaggctccgccgcggggagctggccagctagccagctagggctgtgtgcctcctgcctgcgtctctgccgagcagagagctgagcacagcatgttcggtcgtcagcaccgaactaacttgatctgtatgtgtcgcgtactcgcatttagtctattacacagaggaatagctgatctagacatgcaatttgttgttggtttagtcagtcagtcaagccagtca

SEQ ID NO: 374160 - DNA, 237 bp, Zea mays
ggggaaccgttttaaatcatgggggggtttaaaaaaaaatttttggggctcaaccagtaacgggttgataatagggggacgacataaaattttttccaaaattaaaaccgggacaacaaattgggctactaatttggggacaaagggatgactaattactggggactgaaaaaacacaagggtggcattttgttgagggcaacacggggggccacaatttgttttaaaccttgaatc

SEQ ID NO: 374161 - DNA, 304 bp, Zea mays
cttctaattgggttaattttttggtttccccataaatgctccatttgcttcttttgagctcgctcctacagttgcagggaaatcgtaatatacatacatacatgcatgcagcaatgcacttgcttttgtttgagccttggggtacacccatgccatgccaacccaacctaaccccttaacgccattttgagacttaaacattggtatcgccaaggagactgcaagacctgagcataatgcctactgctctaattctggaaccttaggttggtaacatcggacttgggcgcgaacccctgccctg

SEQ ID NO: 374162 - DNA, 383 bp, Zea mays
gcatatcctgctggctgttgcttctcagcagggccaaaatccgttcctttggcctagcagtagctaccactaccaggagatcttcttcttcccccccccccccccccctccccttctgtgagaggtgcccaacagcttcgtcagaggaatcagcacttcagcggagacacacagtccaggccatcgaactgatacttgtgtggtggcgcgggcagagatcaagatggagaaggaacacatcaagatggccatgctgaggcaagaacagacattcagacagcaggttcacgagctgcaccgcgtgtaccaggttcagaagcagctgatgatgcagatgccgattgccaagacaaacagctacggaaacgaagcttgtgaaaggc

SEQ ID NO: 374163 - DNA, 327 bp, Zea mays
  unsure (1)..(327): unsure at all n locations
tccgcctgcctgcccctcgcctcgggggcgaaccacgagaaggggattccggctagggtttcgcggatcgagagagtcagggaagaagcgggaggggagagaagagggcggcacctagggtttccgcgggcggcccccccgcatggcctcgccagcggcagcggcggtggncggcggcnccaccgccggccgccaaggagaaggagaaggacgcggaggaggcaccggtcacgggggacatggtcagcgccggcttcgctgagctcgagcgccagcagcagctgctggccacctgcacgcgcctctaccagcagctgtccgaccact

SEQ ID NO: 374164 - DNA, 405 bp, Zea mays
cgttcttttgccataacgttccactctcatcccctcccgagccgcacctctcccttccttcatccccatcggtgagcaagagatctggagtcgttgtggtggctccaacggtcggcgtcgagtcaatggagtggtggctccgcctactcagatggattgctctatgggtcatcctcatgcgtgagtgcgtttggttgcaatgatgggacaggacgaaataggatgatcctcagataaggttgtttggttcagggtcaggagttaggacaagactgtctcagtattgtccccaattgtccctcgaaattagagggacgagaggggacgccggggaacgtccatgtcctgactatccctaggtgtcccgcaaccaaacgcactgtaattctacaggtggggatgact

SEQ ID NO: 374165 - DNA, 341 bp, Zea mays
gagcttaaataattctgtttgcctgaatttcaataattccaaagcatgcaacttttattgatgagctgcatccacttacaagatctggttataccttatccaggttcctattattattatccccacccgaaaaccaagaagcaatttcatcattagagtcaaccagctccatgcttcttggaagacggcagtggctagaaggccgattgctttcttgcgattccgtagtttgaaggcctttatctctcctggacattacatcctaccacttctcccttgcaagaagatcttgggaattagcagtcctgccaccgacaatgggaaaactttcaagaaatctg

SEQ ID NO: 374166 - DNA, 227 bp, Zea mays
ggggccgccttttttttttttttttttttcaaaggaaatggaaacaaccaattgggccccgggacccttttttgaacttggaccctccttaaccgttaaacccccaaactgggggaaaacaaggtgaccgaaagggagaccggttaccccccattgaaatctctcaatttccggcattttttgcccattaagggtttggaccgggctcccttttggggccgggggaa

SEQ ID NO: 374167 - DNA, 396 bp, Zea mays
tccttttttttttttttttttcagacaaaaaacaaacttaaattattgggtcattagcgctgggcatacaactaggggaacttataagcaacaccggttacgcatatacaatagaaacatccaacaacttccaagggcaataggaaggatatgatcatgtcatcaagaacaacattaatttatgccggggattatttcaatgggagcaatcccggctgactaaagagcaaaaacacccaggttatctacaggggaggcgacgaacagcaggcttgaacttgttgacttgcgcttaatatatcatcggcgtcgtttccacccaagtgaggatcttggggaatccagtattggcttccgtcagggcccgacaccttgaacctttccagaataaacttt

SEQ ID NO: 374168 - DNA, 295 bp, Zea mays
aaacaaacaaaggttttttgccgtttggttaacgcccatgtggggctttgtatttaccctttcgctggactggacactcgacgttttgaccaatttgccgtttggttgcagacttgcagcccaaattacagacagaaaatggccctacatgacacttgcaaaaccaaaaaaaaagggggaaaccaaatccgggggggtttttggtccatgcaaaatttccattttttttggggggcaaaaacccctgccggatgaagttgcaaaaaccccatttttgccagtttttccgctaaaa

SEQ ID NO: 374169 - DNA, 346 bp, Zea mays
catgcaatgtaagggtctctttcgttgcgggacaggacagggacgtccctgtcgttctctcttgtccctccaattttgagggacaacagagaacaacactggatagtcctgtcccaacccttaacccagaaccaaacaacataatttgagggatcgtctcatttcatcccgttctatcattgcaaccaaacgtaccctaagagcatttccaacaatgtctcaaactagtgcctcaaattgaaatatggggctttacacaggaaaaactactccaacagggccctatttcataaatttttgtttaaaaactatagggcaccttctcaagtgactcaaatatactaca

SEQ ID NO: 374170 - DNA, 337 bp, Zea mays
gaaaagagcatcattgtttaaggcattcgataaatatgcatgcagttggctccattagacgccatcacatttaacatgcaaacataaactaaaaaactaccatctccagttactctaagggagttcagactgaagtctgcaaaaccaaccaggtttaagctacaaaagatattattatttagattttagaaacaaccgccataccatgggcctacaaatgagagttaaccagattggtaggacggagggttcaacctcccatctaagggctgctgtacttgaaggtgggatgacatgctatatggggcctatcaacatatgccttaacaggtttttc

SEQ ID NO: 374171 - DNA, 374 bp, Zea mays
atccttcccaaacctcaccgccgatcccaccgcccggcgccgcgttctatggcctacacctcctccctcaacctcccaaagcacctcctcctccccagcccccgccggacaaggcacaggccttcctccttcgtccccaccgccgcggccaaggtcaacggtgacgcgcccgagaggccggcgcccaacggcaaggcacgcatcaacggccagggcaagaagggagtgaacgggcatgcggaccggatccacctctcggtgagcacgggcggcgggggccaggacggctccggcctgcgcgtggcgttccagggcgcgccgggcgcctacagcgagttcgcggccaagacggcgctgcccggctgcgacacggt

SEQ ID NO: 374172 - DNA, 382 bp, Zea mays
tcgttggagaaggccgatgaccgactggacgtgggggttgggtcgaacatgttggacggagacacattcctgaatggctctctgccgtgcctgatcgataaccgtggggctgtgatcaggccagaggagtactaccagcagcggaccatggagtcaggatcgcacagggctcaaggacataatacagtctgttgcaggaggggagacattgccccagaaaggggatgatcgctgacttgcatcatgcagatatgctgcagctcgattatgtaagaatatatcgtttcacggaagcactggattggtatgcatctcattgtagggaattcaacattggtttcatggtagagtgggatatgaatgccactacttgttatctgac

SEQ ID NO: 374173 - DNA, 371 bp, Zea mays
ttgccgtgccgagccggaggccgagctcggcagctgcccgcctcggtgtgtcgccgccgcaccccacccacgtagcaaaagccgtcatcccgtaccgtaggcagcggcaaacagcgccccctcgtcactcggtctcggtccctcctctccaacttcactcgcgtcgcgtccctccactgcaccagtgtcatggcggtggcctcgacctcgccgctgcccgccacggccccctcgccgcccgctcccggatccgggctcctcgctctcggcgtccgccgcgcccccgccactgccgcgtggaggaggctccgcgtggaggcgatcaggacgcagcgggagaagcagcggacggaggtgcccgtcgaggagtc

SEQ ID NO: 374174 - DNA, 125 bp, Zea mays
atgatcgctgactttgatcattttgatatgctgcaggtcgcttctgctagaatatacgtttcacggaagcactgcatttgtatgcattttattctaggtgattcaacatttgttttatggtagag

SEQ ID NO: 374175 - DNA, 424 bp, Zea mays
agctggcacgcctgcacgcggcccggccggactggccggacccacccacgcggtcagacgggggccagcgagaggaggccactgcatcatctgctactggggatgcgcgccgctcattgctgcccagcgctgccgcttgcgcccgcttgaactcatcctcatccccacgccactcccccactctcgccgctcctcgccgccgtttcggccagaaaaccctagcaaatccttgctcgcagcagccagcttctccaagtgggagcaacccgcgccgccgacctagcgcgagccgtagcagctcccgccgccgccacccttcgcgtgccgcgccagcgccctcggccccgggtgccgccgtccggactccgtgatgccggttcttgacccgggaaagcggcttcgtcggccacctagtgcaggcaac

SEQ ID NO: 374176 - DNA, 378 bp, Zea mays
tcgattcaaaatcccttctgcacatgctcctgcagggttacccccaccactcagcccattagtatgccctagatctgctgctgaagagggctaagggaggtccccgaggcgcggtggtcccatcttagtgggtcccgcgacaactttctatactgggatcatggaatgcatcttagcagctgctgcaggtatgcacttcctcgggcgctgacaatgttcatgtggagttgtggactcgtgcatatcttagttaagtaattatcaatttactagcgatatgtttcacaatcacactattattacaaggcttatattagactagtgctatgcgatcagttttaagttataattttaacgcctttttgcctctttggtaat

SEQ ID NO: 374177 - DNA, 377 bp, Zea mays
  unsure (1)..(377): unsure at all n locations
ttcacccaccaatggcaccactcaatccttgtggtccccatggcagtttccctgctcccccagcaccttaccatggaaacagctataatgggcctccatccacatgcatgcctaacgagggatatcatcagtaaccaccaccccctccaccgtcttcaaatcaattccctgctgtgccaccagaacaccaacataggtcacatcactggggtaataactgtccaccgtatcccgagagatattngatacaatggacatgatcgaggtaatcacagacatgatcgacggcatcatggacatgacagacagcaccatgatgatgatagaggataccactacgatgatcgaggagatcactatgatgatagaggccatta

SEQ ID NO: 374178 - DNA, 397 bp, Zea mays
gccgcccttttttttttttttttttaatttgcaaaggattttattttccaaagggaaggggccaaaagggggcttaggggtggaaaccacacccccgaatttggttttattttagacttagaccagggcaaaggtatttaaaaccaaaacaggtaaattaagggaagccggttgcagttaagttaatccccaagagtaagttgttaaccaggtaaaaaaaaaccgaaacttaagggttaatgttaatttagggggtcccagcaggacatgccattcgcccttggctttccaaaaaatttttttcgcggtttttttttggccatgccgttgggaaagaaaggaaatccgaaaatttcccataatccataataaaaaaaccccccgaaatggcaaattt

SEQ ID NO: 374179 - DNA, 160 bp, Zea mays
caagaaatccatataaaatcgggtcttagattccccattagaggttattgaatggaaatatttgggaaaaaggagggccaggcaaccggcattaaaaaggaccatatcactccctttggctaacataaggggggcaacccagggaaacccatttaatttt

SEQ ID NO: 374180 - DNA, 447 bp, Zea mays
gtgtgaaagcactctctaccaaggacaagtacaggagtgcgtttgcccccagtggcaggagcccaggtggatatggtggtggttatgataatgaccgctatgaaggcagctatggcagtagatatgacaacagaaatggaaatgggaggggagactatggatacagggacgatgacagatatggaggacctggaggtacacccaatcgggaaggagatcgttattccagagattctaatgaacgctatggcagagattatacagaagatgaatacaaaggaagtcatagcaaccatgaatatgctgaaggagcaggtcgcaggagctctggtcaggaaagagattcatatggggatggtgaagcttattcatgccgtggtcgtggcagtattgctgatgatcctactcaggatgataggcctatagagcgaaagctctgtaaccagc

SEQ ID NO: 374181 - DNA, 355 bp, Zea mays
aggggaaaagactgctttaaccttgttaaactgacaggggggccctcgggaaaaagccctggccaaacccggaaaggttttcttcgtttttaaaaccaccaaagctttttgggggcatattcccccttttatggcccccccgttccagggccatgaaccaccaatttttcccccaaaagaaaatttgcctcaaaaaaagcaggggaaaccccctggggcccccaaaaaaaaaaggcctcgcccaaaaaaaccctggggtctgttgggttttaaggctaactaggccctaatgggtgggggaaaaatccttgggttagggcccaaaaaccatattttttgccaaattggggggggg

SEQ ID NO: 374182 - DNA, 394 bp, Zea mays
  unsure (1)..(394): unsure at all n locations
gggncttactctagctcttctttttggtgttattattacacgaattaatctcaccggtttgaggaaaaaatatacactttccccacaaaatagcagcaatctgaggacaaatagaagtcctcggaacattgaacttcactgatccaccaatctaataaagacgccacctatattacagtctctggtcgctgccatgtgtgtacactcgattgtaactgacattggctaccgaatgaatatcatgcccctctagcctgtgtaagagcacagtgtagaatgccacggacaatcgtccttggaattgttatatttgcaaatcatcaagcgacagttcctcggttgataacatcttcagtttagtgatgaactgcggtgggtcatcaagactagagga

SEQ ID NO: 374183 - DNA, 334 bp, Zea mays
aaggttggaaccttttaggggggccgcctttttttttttttttttttttttttttttttaaaaccccgggccaaaaaaaaaaatggccggattaacagaacctggaccccccaaaacgggttttttgacacctgggccaacaccaaattagaaggcttttatttaataaaccctgcttctaaattcccaaaaggaaaaaatttgggggggccaaccggttctttcccaacaaaattttttggttaacagttccttaaaaaaaaacttcaagggggggggggggcaaggggaaaaaacaaaatcgaattaaatggggggaaaacatttttggtgg

SEQ ID NO: 374184 - DNA, 187 bp, Zea mays
gccgccctttttttttttttttttggccaggaaagggatgtataaaaattggggaaggttcaaaaccgtttctttaatttaatagacccaaaattttaccaaaccaaaaggattccgaaggtttttaaaaaggcatggggaagaaggattaagccatccaaatccaaccggtggggggggggggggg

SEQ ID NO: 374185 - DNA, 407 bp, Zea mays
tcgctggtgccgccgcggcatatttggggggacccacgcgtccggcttttatatgtacgttggcatgcaacaggagtgactgtgagccagtttgtctgctgagaggaaaccacggcaaaaatgtggggggttcactgcttattttagctgacagcacgatctggtggagctgattttaggagagaaaaaaacggctaccgctctttgtacatactaggtttcaggtgtgatcaagcagatcactagtgtgcctagttcgctactcttttgttcaaactttcggtgtacatatgcgtgcctgcctgatagaagtgccagtgctatctttcattgttcgttggagttagccttcttaagcgtcgttgtgtgacttatggcgaaatatgtgcaaattatttgtggatttc

SEQ ID NO: 374186 - DNA, 229 bp, Zea mays
  unsure (1)..(229): unsure at all n locations
tttttttttttttttttttttgccgncgggccgatcggtaattccgccaaagccaccaaaaaacattttttggtttaacaccaggtaaacaccacacggggggcacgaagggacaaccccaacgcgacgacggacgcacacaacaggcgcggccacccacgcacaggcatggccacggatgccaaccacacaaacgaccgccgccggaaggcttacagcagcgacgatt

SEQ ID NO: 374187 - DNA, 361 bp, Zea mays
catcaattgatggcacagttaggatttggacatatgattcgtcaactgcatcatccagaaatgctactatatactgtgggtctgaagtcagtgcactttcatgggaatgcagatctgacagattgctgctcataggcacagctaatggaggaattaaagcttggaatgctgatgcaaagagagttgtttgcgacctgagtacatctagaaactttccaagcatcttagatttgaaatgcagccctgttgaacctgtgtttgtctctgcagctgcatcaagacggcatggatcaactacatttgagagaacaggatttgccaacttgaccgtgtggcatatgaaaacatggaagccattgac

SEQ ID NO: 374188 - DNA, 126 bp, Zea mays
ggaaaaactcgtttttccattgatacaacacttggatctatgtacagttacagcttgttgcaaggaaggaggaagggaacctccgatggccatggcgagaaacggttttgatcccggacgcgtggg

SEQ ID NO: 374189 - DNA, 126 bp, Zea mays
cccactcgtccgggatcagagccgtttctcgccatggccatcggaggttcccttcctccttccttgcaacaagctgtaactgtacatagatccaagtgttgtatcaatggaagagcgagtttttcc

SEQ ID NO: 374190 - DNA, 286 bp, Zea mays
ggcaaccaaggaaaaattttccattaacattaacgttaataacaagggagggaccatgggggatctacatcctgggttcctttggatggacccacaaaatgggcctttcttaccccttagttgcccacatttttagcataaacgggggaaaagggaccctagttcctccttgtttggaggggtttaaagattggggcagctttcctaaaggtttaggcataaaagcccttttggttgtaaaaaggttttttcctttggggttgcaaaaggttccagttgaagtttt

SEQ ID NO: 374191 - DNA, 392 bp, Zea mays
ggggccgccttttttttttttttttttggttaccggaatttctggggggcttaataataattacccccaggttttgggggtccaatttattaattttgggaacaaaaggtttcaaatttattggaggttatggcccggttttacatttttttcgggtggatttgggcaaaggttacatttacctaccactgggaacggcccaaaaaacccccttgcccaaaggtggccattggttccatggccctggtaaggtctaaaccgtgaagttcagtttggcccaaaaccggttttaacctaaatggccttccacaaattaaattggtggaccttcaaaacccctgggaaagggcctttttggtggtttaacacaatggctttggctttcccttttt

SEQ ID NO: 374192 - DNA, 301 bp, Zea mays
gggccgccctttttttttttttttttaaaaaaatgggcaagggcccgcccctttaggatacctttataaaaaggatggcaattgggttaggttccaaaccagccccagtggtaaaacttccaagggcggggttggttaccccattggccggcttgggcccagccccaaccatattggccttaataatccaccttggggggcggggggtaacaaacccatggccaattggcaaccctccttttaatcctttggtaggggggaaatggctcttggggtttcttcctccaaggcaaggttgggg

SEQ ID NO: 374193 - DNA, 207 bp, Zea mays
aaaaaccaaatcaggttttattaatatattattcacgtccaagcgttggccattttaaaaaaaaaatatcatccctttttggtatgttataaaaggaggttactttttataaaaaaaaaattccaattcctgggggcccatacattacatgattggcaccagttacaacaccgggctttcttgagggatctccatcagaaatttttt

SEQ ID NO: 374194 - DNA, 451 bp, Zea mays
ttttcacgagccctcagcccctcactccgtcacccaccagccgccgctacgtgacgaggtctcccgtgtgacacagactgccgtccttcgcctggcgagtggtgacctgcgacctccgtctccggctgccgtcctctgccatggtccgtggaccgtagtccggcagcagcagggctccagcctctgcccgtccggttgcccgccaccggcgtctgctacctccgcatccggtctatgggcaccggtctcccgtctctgcccacggcgttcatcggccggtctccgacaccaggccctcagctacagcagctcagcaccagttcccgcaacagcgaggtcatcgacgccgccatctaggacggctcttaaggggaatacatgtcgccggatcctggacgcacggagagtgtcttacgatgtgtcgaccctttcagggccttggaattgacag

SEQ ID NO: 374195 - DNA, 329 bp, Zea mays
ggcaaaggaaaatcaccgtttttcctaaagagaaccgtttggttcatttcgttggcccatgaggagaacttggggaccaacatttgggaaccctaaatggggacccttggcccagcatataattttaaaccccttaaaggttggggggttggggttaatgccacgtaatttaccccgggccatttaacgcttacccttaatggcaatcggctaatgttcctgctgtcgaaggctcgcagcctttaatttttttaacgaacttttggcccagcctacacccaatcaattttttcaattttcgggggttaaaaggatttttggggatggaa

SEQ ID NO: 374196 - DNA, 376 bp, Zea mays
gcgctcgttaaactgcgtggagggcgaaggaggcgagcggggggcatcgaatccgtcgttggagaaggtaaccctcgatccgccgtctccagcgattagtttgttttgcgacagttggacgaatcgttatttacacgcgtcctgattcaggtgctcaggttttcgccggttcatttcaccgttctaagccgccactgagtaccaagcaggaacaaaagaagctgaacaattcaagaaggcgggtctgtgggtcatcgcggtgtgcctgtcggaggaggagaatcgtgggctcaaggagatgttcaagagcatggacttacacagttagctgaccataaccgtggactagctgcgagagggctggccaacaagggca

SEQ ID NO: 374197 - DNA, 321 bp, Zea mays
ggggccgcctttttttttttttttatataattgggaagccaaaaaccccgtttaagggggcccccaataaaaggggttaccccacaatacccacatggaaaatattttaaaactggcccagagccaagggaggaaattttggggggggctaccaaaggggggcccggggaattgaatggccaaaaaccaggatggagcaacaaaccttgaaaaaaaagggccggggggcaagggaagaatttccgatggacaggtacccggggttacaaattttctggaacccaaccggaggggaccccccctaaaatttggcggggttgg

SEQ ID NO: 374198 - DNA, 357 bp, Zea mays
ggttgggatcttttaggggggccgccttttttttttttttttttttttttttttttttttttttggcccaaacggatttaattaattccccagtttaggtggccccccttaacaaaccagtaaaccccacccttccggggccgggggggtggcccgggaaattcgggccgggacctggagggggaccaagttttccttatggggggtggatttagggttgggggaaataagggaaaaggtggtttctggggggaaatggtattccgttaaaaattccaaaaaaaatacgagcgggaggaataaggggaaaggctgggggggcttaaggggggggttacctaaaataaatggggtggg

SEQ ID NO: 374199 - DNA, 202 bp, Zea mays
agaaggcataagggctggacagcagaaaccgagggattaatgaaatatagcaggcttccatgttggtcgggaccagagacagtaggggcattgtttaaaaatccaaaacagggcctttaaatcctattttgataggaaatacgagccgagggttttaaaacgttccaaaggggcataacacaacccacattgttccaaaatc

SEQ ID NO: 374200 - DNA, 313 bp, Zea mays
gggccgcccttttttttttttttttttttttttttttttttaatccccggaccggcttttttttttttttaacgggaaaaaggacccaggccccccttcccagtggattttccatgaaacccttgaaaaatttaagggggggggagggtaaaaaaaaaaccaggggatttttttggccaaggcagaaggccttgtttggttaatagggtttaatgggagggggttaggggcctccttcctccggacccttttttggacctctttttcaagttcctaagttcctccaacttctttaagttcttgggccccaaga

SEQ ID NO: 374201 - DNA, 287 bp, Zea mays
ggttggaaccttttaggggggccttctttttttttttttttttttcaacagaaggaatattaaagggttaaagggtttaccaagggaaatccaggtttttggttaaaaaccaagccagttggttggggcccccaaaaaaccattaattaccaggggggccgttttaaacagggggccaagggacccgggttttgggaagggcaaatttaaaaaagaaaaaaccccgggccttaagggaatccaaccccacaaaaggctaatttggttgtttaagggggttggaaagg

SEQ ID NO: 374202 - DNA, 273 bp, Zea mays
ccccccccgaaggttggaaccttttaggggggccgccttttttttttttttttttttttttttttttttttaaacaaaaacccggttggtctttatggaaaatgggccttggggggaataccccaaaatattggcctttaaaccaaaccattgggttccggttaaccatattggcgggaaccaaacaaccggaaaaaaaaggggaaatggaaaaaaaaaccaaacccgggccatcccggccgggggggtaaaagggtccaatttaataccccc

SEQ ID NO: 374203 - DNA, 293 bp, Zea mays
agggcaggaggaataatggaatatcccacaggcatttaacggttatatggcaccgactggatccaccacagtcagaaaggccaaaaccgtgggattagacgatccagccataacttcgccttgggggacaggcttgagatcatcgggaaaaaattttcctaaattacatgtaattgcaggggacgttgtttggaaatttgacgaagccttgcttccgggttttccaacgggatcgggatcatagaatcggcatcgttgcagtggaaataaagccgggaatccaggttttgggg

SEQ ID NO: 374204 - DNA, 297 bp, Zea mays
cggcgaatggcgtttcgaatagactgaacaggattaagggacagtcacagagttaattagttggtcctttatttattttaaaatccctgaggttatttttgcatttgggaggcctggcctaaacgtaacatgagacggcgttgcgtaaagcggaaccagaggtcgccgttgtccagttgtaagaggagcaaatgtctgagggtttaactttaacgtttgggagaacctgttgttggttaacttcaagaaatatacattttaaagattttacatgttcaaccaccggtttgttaagtt

SEQ ID NO: 374205 - DNA, 349 bp, Zea mays
aaagaaggttttcttaaggctttccactggaaaaaaacagtttatccatagtatggcacagctccggggggattttgggccataaaagggtccacaagagtccggggggccagggtacacaaactgaaggagagaaatattggtcttccaacccgaaaaaaaacaggggaaagacgttttgatcttccccccagttgggaatccgccgacattggccccaaaccccaaagggggggggcccggccctcttattgggggattacaagggaacacagccttacagacattgggggaaacatggtaaaggttcccttttggctgaaacaaaaaaacccgccgtttttggggg

SEQ ID NO: 374206 - DNA, 206 bp, Zea mays
agttaaataaacctaataaatttgaataattcagaccggattaaatggttcattcataatacaatggcaggggttggaaaatatttcagcacaaagggtatgccccctgcccaaggggggcaggcaggaccggaaaagggggcaggacctatgtgggaaataaaggaatattgttgaaacctactccaaacggtttttggtttttt

SEQ ID NO: 374207 - DNA, 346 bp, Zea mays
acccccaaaccaaattaattttttaaggttgggcaagaacaaaaaatttggaggttaaggtttgggaaaccaaggccccccggacccgcctaagggggaaaacggaaaaatggtaattggaaaggcaattggtggcggtacaatttttaataaaaaaatcccggcttggtggttgggggttacccaaaacttttgaaaggatccgacttcttaaaaggtaccggcttaacgggcggggaacccccttttgggccgccttgggaaggaagccaagggtttcttgggcttggtttttggcccgggggaggttttgggccccgggggggggccccaggcctttttggtt

SEQ ID NO: 374208 - DNA, 233 bp, Zea mays
gccgccctttttttttttttttttttaaaaaaaaactttttatggccaggctaggggttcttatccggaataaaaccctaagaacctcgcccaggatttttgttcatggtgggagggattttttaagggcaccaaaggcacttaaaaatttcggcaaaccaggaaagatgatgtccggaacaatctgttcgattccaacctccggtttttttaagctggggtggaaatttttt

SEQ ID NO: 374209 - DNA, 233 bp, Zea mays
ggccccggccgggtgacaatacggtttatatttttcacccaacgggggggggggggcaattaggttattttttggcatggacttcttcaaaaaaaaacaatggcccccaagggcccagattaccccaggtggaccggccccaacttattagggttaggcagcaacattaggggggcttactggattatggggaacttaccccccggaaccccgggggtcacccaattttttgg

SEQ ID NO: 374210 - DNA, 452 bp, Zea mays
ttgattcttacatgcctacacctctgcctacacaacctcgtttttctactcttattgaggaacacgggtgtgatccaaactctttcctacccctgtgttcatatacaagcgcttgtgatatctgaccccgtcaagagctgtccacactctctttttatatccatacacgctttctccatatagaagagccactgggcgcgcccatatacacgtgcacgtgctgtgataccagagcacacattatagcctcttcgtgcccctcggatcaggagctctcgaaagcgctctagccttttatatcgagagcgctctctccctaccatagctactcgcggggcccagagacttacatgtgtacacatcttcttacacaacatcgcgtctttccacacccacatcttctcgtttctctgagatttcgccactctacacgtggccttacacgggtttta

SEQ ID NO: 374211 - DNA, 263 bp, Zea mays
cctccaagggattagggtttaatttaaaggtttagtttgaatttacagaagaccatcttggggtccatacaatatgtccagttggttccatagccataacccagcataaattatttggaaggcgtcctggaattaagttgggcataatttttatttacaccatccaaacatgcaacgttgtaaggcccagtttttccgtttagacctaagccgaataagttggtccttccatgaggcagaatcctggaattttttttttacgg

SEQ ID NO: 374212 - DNA, 277 bp, Zea mays
aacccaaaacaggccaaaatttttcataaggttttccaatctaatccaatccataattccatatgggacccaatccatatgggacaggaataacaccaggggctaagttggatggtttcgggtcaacaaaccagccgaaccagatttcggggactgctcgtcgtcccgttcaggttggatgttcaggccaatgtggttcttgacgggagaggatgccaccttgggatcgacggccatgttttcgggcgcatcagcatttccatctgctttctggggg

SEQ ID NO: 374213 - DNA, 284 bp, Zea mays
gggggccgcctttttttttttttttttttcaaaaacccttggggaaattactttttaattttaccaaagggaaaacctggttttttaaaaggaattccttaccggggtttcatcccggcccggaatggggggcataaaccaaagttgggttggcacccccagcaaattttaccaaaagaaaaatttcccttccctggttgggttaaggccagggaggccttttttacccgcttttctttggggggagttttggttttggttttggttttaccggaaaatggggg

SEQ ID NO: 374214 - DNA, 356 bp, Zea mays
ggggccgccttttttttttttttttttttttttttttcttggggggcccggaaaaaggcacgggaccccccaattaaaaattaaaaaggaaaaaggaccggattaaggtttccttccaaattaaaaagccccggtttttagttttttaaggttaagtggtgggtaaattaaacggtggcttaatccacttgggatttaccaggcccggaagggggtttagggggctttcgaaagggggggggggggcctaacccggccaatgggtggttgggtgggttcaagtttaaaagggttccgaagttggggtggtgaaaattctttaatggccggggggttttccggctttttttttttaa

SEQ ID NO: 374215 - DNA, 455 bp, Zea mays
tgcgacactttgtgaggacaagaagtttatagatgccgcggagttttctttgttcagcttgcggaagcgccatgaactgggtgtggcagttcacagccaggttctggatggcctttgctcggatcgtagaacttcagaggcattccagcttttctatgagctaaatgagaacaaaagaacttctgcggttgctgcaccccgcagcctagtctttctgcatcatgctcttgaggaagctggaatggtgcaagaagctggttttgttgctaaacagatgagacgtgcaactgccacaactaggcgaaggagctaaggatttactccatgttttttagcatctttgcggggagggaagggattcccacctggatagcctgtattgcttacatggatagcctgactctaagctattttcttacataatggtgcaagaccaaagatgctgggactggatg

SEQ ID NO: 374216 - DNA, 266 bp, Zea mays
cccaaaacccggggaaaaaacccggcccccccggtttaggggccggttgggggaaccaaaaggaatggggaactaatttgaacccttcccgccttcttatttaaaaaaaaaggggggggaccgggaatcagcttccataattgcccgggacaattttaggtttgaccggattaggcttttaaaaccatgggcttgaacaaaatggccttttccaagaatactggcccttactggccggaaccaggcttacctttggggggtttttt

SEQ ID NO: 374217 - DNA, 318 bp, Zea mays
attaatatatttttatgggggggggacacattatcttaccggggcattgcatcttcgttacagctataaagcggttgctactaacaacttaacacacgcatatgatatatattgcagtacaactgacggttacgttgttcacgggtgatcggccggcaggctggcggcggcgtggaccacgtaaccgcggagcgagggcgtccgggcgggcagcggctgctggcgcctacggctccgaacccgccggcgcgcgacgtggcggcgcacccgggggggtgacgtcctcggcggccttgatcatggccaagaagagcaggc

SEQ ID NO: 374218 - DNA, 276 bp, Zea mays
ttgcgcactgatagagtctaagccgagtgaggttaataaacctaccacgagttttctttactggttagcagattcggacgcagtcgatgttgagaaacgagcagccatagtgtattctttgtataatgcacaggatttgacagtgacggactgaaactacagcctctgttaaggtgactctactgaagatgagatgccgatgctgctcaaacaatgtatcagcacgatctattatgctggaatgggacacccttagctgaataattagaggaactg

SEQ ID NO: 374219 - DNA, 166 bp, Zea mays
accccaacatatttcaccaccaatataccatgcaaggtaatagggaaacactttttttgacaggtttacagacacagaaaacgctgatgcatttttgggaagggggctcgcaaggtacaagggctacagggcacttgcaaaattcgcaagattggatttggggacc

SEQ ID NO: 374220 - DNA, 282 bp, Zea mays
cgggaccacaggctagatttcattaaatgcttggtactaggagtattattgacaacacaagagtccataccggtgatttaaataaactttagttgctccactaaaaactggataccatggcccatggggattaggcccaggggaggagacccttttccgggggtccctacaaaccaggaccagcccgtacgaccacaagtgccagcggggggtggcacctgggcatgccacgtgggcagggggcatcaccatagccccgattaaccaatgggaagagacccc

SEQ ID NO: 374221 - DNA, 219 bp, Zea mays
aaaaaacccgaaacccaaggagggtcaccattgcattagagtttcaaacacccttttgggaacggggaatacatgcaaaaccagaattatttttgggccacgttaaaacagacgggggttgtttaaggtttgggaaggcataattaaacatggggtagcatatttacacacatgggcggccgaataaacacaaaaattacccgtttgcctttggacggg

SEQ ID NO: 374222 - DNA, 347 bp, Zea mays
acacagaaatggccacgccgatcaacttccttcaatgtttgtacaaagaaattgtttacatgtaacaagtacaacatcgttaaataaaagctcgtgctgataccacggctgcacaatcttagcaacggcttactattggcgtcgtctctttatcctctcgagggcgcccagctgctcatttccttgggcacctgagctttcctcgttcttctcggcagctctcttgccgagctcaccaaataccgcagcaggaacactcttctccgcaatttggacatcgggttcctcgtcgtcactctcatcgggcagctcaatgtcttcgttgttaccagcctgttgcctgctgc

SEQ ID NO: 374223 - DNA, 364 bp, Zea mays
gcttccaaccatgcgctttctggccacgtgaaagaaagaacccatactcagatctacatacacaagactcaaaaaaaaaaaggaagggggggtaccaggaaatcaacataccgaattgtcaacctactcagccactagcacagagcggcgcctgcctgccttgttgtggcatccacgggatataactcagccctattcccaaatccattcaaacgctgcacatatatatcttcgactaaaccattggcgcaacgcaacaaacaataataacttgcatcaaacatgctgctcggactcaacaacggcccccacagttccgtcaaacatatctggtatcatagcctctccgaactggctgacaccc

SEQ ID NO: 374224 - DNA, 322 bp, Zea mays
cgacatccagatctctggcctactcattactatcagaatgacagtcacagcctccacgaggcataaaattatgcaccttccactttgttatacaactgatgaatcacataattgcgcacagcacagcccaaaataaaggtggacgtcaaaaggcacatcaatgcagtttcacaggttcttgcaccggcttcttgggttacaatgcgatattgtcagttctgggagaggatttataacatcatgccgcatcgcctacctgaaggccggaggcacgacaaagctagagatcaaactatacagctacaagtgaattttttcagtc

SEQ ID NO: 374225 - DNA, 230 bp, Zea mays
gggctcaaaaaaattatccatacaacaaacgtggggggctaaagggaagccaatagcgcagacaccagattagctggaggcaaaatcatttttatgacaacaaatacataaccccacacagggggggggggggaccccatagggaagagggaccactcaagcattgagtcaagcgagttcaagcaaccatttgaatataacagggcgataggattttttattccatgcct

SEQ ID NO: 374226 - DNA, 301 bp, Zea mays
aaaagaaaacacattttccaaacctagcaggggaaagaatccatagtagcaacgtagcatacacaaaccatggtttttaaagcataagacccctggcctgtcccctggacgtttaggggagcaaggggcctatgatttttgggcgcatggacccctaggggacaccttaaaaacaaggacccacaccgggggaacataagggaacgatttaaggtaccaaaataataagggtcagccctttctggtttaaggacatgtttgttttgggccttgaaccaatcaagctagggtgattcttgat

SEQ ID NO: 374227 - DNA, 132 bp, Zea mays
gggggaaaattgaaccaatgaatttgaatggctcaaccccattttcagggttttattacaaacaaccagccttttggtttggttccatttaccttttaattcaccccaaaccatttttggggggtttttgtt

SEQ ID NO: 374228 - DNA, 289 bp, Zea mays
gtcggcggtgttctaccacctgctgcagctgctcaagtgcggctaccttggccgccgccgcagcggcagggctctggcctggacgtgcctcctgctcgacaaggcgtgcgcgtacgcgacgttcgcgacgacggtggcggcggcgcaggcgtgcgtggtggcgctggacggcgcgcacgcgctgcagtggaccaagctctgcaacatctacacccgcttctgcgagcaggtcgccggcagcctcgtgctcgggatgctggccgccgtcggcaccgccgtcctctccgcc

SEQ ID NO: 374229 - DNA, 128 bp, Zea mays
tgatattgcaaaatcgatcttttcctgccagcactcctagtttgcttggtcgattttcgacacaaaaggatcataattggttacaacttagtgtggctattgatctaataatgaccacccaataacta

SEQ ID NO: 374230 - DNA, 467 bp, Zea mays
ctgctacagtgcaagcgtggtgcacagtgacccgccagaagcaggtaccggcagccgctcctcttgcgtggttttgcatacaatcgagtatttattagatagagaaaaatgataatagatgaaaaataggaatagacaatgatattttatgattgtagtcgctagtcggatatggggatgtatttaaagggaaccactgcgagagataaaaaaaagtaaggtatggaatcttggtgaggtggttgctagtgtggtatagggggaaaatttagggggagagcgttgcagatagctctaaagagcaactccaagagaagaggtaaaacaacaccaaaaaaaattttaaggaaaaaaagaccgatataccatctccaacagaaccccagtctttccccatctttgtcgcccctcccccatgaggaagcctttcttccggatatttgcgtgaccctaggattgccccaatc

SEQ ID NO: 374231 - DNA, 439 bp, Zea mays
ctagcagcaggtcaaatagaatcaagattgataaggagcctgcattcaatagaaacaagcagaacaatagggttgcaattttcagagatcgtgagtcagagcgcaaggatcctgattatgacagaagctatgacaggccagtttcttttgtcgtaacacatctctttgatgctaaactcttagcacaccatagacaggaaagcttttatggctatttttaccatgcttctgctctgtagtttcttatgcattgtatgaagttcttcatttgactatcgtccaaaacttttcaagtcaactgcaaaatatcagtttgattactaatgatgggatcctagtgaagcatgtcaataagaggattctttattttggatcgtatcagagatgcagtgtttaagaaaggtttccaggccagttatacatggtcatataccacccc

SEQ ID NO: 374232 - DNA, 473 bp, Zea mays
cctacgcgttcgcccacgcgtccgcccacgcgtccgaagaaaaaaaaaaaaaaaaaaaaaaaaaaaaaaaaaaaaaaaaaaaaaaaaaaaaaaaaaaaaaaaaaaaaaaaaaaaaaaaaaaaaaaaaaaaaaaaaaaaaaaaaaaaaaaaaaaaaaaaaaaaaaaaaaaaaaaagggggggggcgtttttaggggaccaagttttaggtccgggggttgggaagcataaattttttttttgggggaacaaaaataaaataaagggggggggttttaaaaaggtggggaggggaaaaaccggggggtaccaaaattaaatggtttgggaaaaaatccctttttggcaggggggggaaaaaaaaaaagggcccgaacgaatggcttttcaaaaaattggccaatcttaaagggaaaagggaacccccttttaaggggttattaaaggggggggggggggggggttcccccaaggg

SEQ ID NO: 374233 - DNA, 437 bp, Zea mays
atcgtctacgcgtccgcccacgcgtccgaccaggcgggggttcatgcttgttggccggagtccttaggccatggcgaccttgtttgtggcggcggacatggagctggaccgggccaacctggaggactaccttcggcccgattgcttccataggaggggctccggaaatctcatctggcgcatctgcttgacattttgccggtgcttaccgaggcagtggctgccattgccgatgactccttcacacgttgctttaagtgaaattctccagagccatggaattggaacatatatctgttccccttatggtgctttggtgtagtaataagatatggaatactcttcccactgaggtccttaacgcttgcaataggatggttagcattttttgctggctttttttctgtccatttcctattgaaagggcaagacaagtt

SEQ ID NO: 374234 - DNA, 478 bp, Zea mays
tcgggttactggaactcgtgagcaggggtgtaacctttctcgcaaatttcgctgaaatttcatgaacttgagtaattttatggaattttgtaccacagtaacgcatgtgctttattactaatactttgtttagggtttttgtttttataaaaccatatctctataaataattcgactgactgggctgaaaattgtcaagccccgaaattgaaaaattgtacgttagtgttgtacacgaacatgaggtagacctggaggtggctccgatgatgtgtatgtgtaggttcaaatgcttgaaccaactccgttttgaaaactgtcgtacgttagtgtaggagagcttgtcatcctggacttgaacttcttctgcattcctacccaacaagcagggcccttcttttggtggggaagtaatgaactcttactggattgagaacaggcaagtccttggctttttgaaaatagtagcctgcagagc

SEQ ID NO: 374235 - DNA, 482 bp, Zea mays
tcgtttaaaggtagagttaaaccgtagaccactgacttcagctagcacatattgttttctcacagttaatatgataattagcttcaaaagttggaaggacccagtacagtttttcttgttgcaaatatattggcttcatttttgtgcagttatagatctcatttgggcctgtattggatttttatcaggttgtggtggaagcaactttctaaaaagcatcatggtgatgcttttctgcaggtttttagaatttgttttttcttattagcctactagccttgtagaaaagcactattttggttgccgtattgcctactgggctagtaggctgtagttaccttacctcatttcttaccttctgcaaaaaatttcctgcaagtggttagtacccgtggtggtgaagtataatttgattgatatgttttttaccttgcatgatcggcctttacttagtttctggtatttacagtgtaaattaaaat

SEQ ID NO: 374236 - DNA, 475 bp, Zea mays
  unsure (1)..(475): unsure at all n locations
ctcatcgacgtcttcccaattcaaaactcctaaaccctagcccttcttcccgacaccaccatccatccaaaatcactgggtgatgcggaagaggtagcctccgccgatggcctgctgcttcgtccgcgtcgctgcggcgccccgcctcctcatctaccgcgccgccgctccgcggcagctcccgtcgccgctcaacgtattcaggaagggtttttccgagcagtcagttctgccagtcacagattcgattgagtgtttccaaggaccatcagtgccgaatactccacggattccactgtatgatgacagcgtatcctcaagcatattggatacattgtcgaatccgactgggggtgtccctcatgctgatccttcaaagagcagaataatgctagttgatggaacgtcgatgatgtatagatcctactacangatattagctgcagcacggccagttggagcatgctgatggaaa

SEQ ID NO: 374237 - DNA, 171 bp, Zea mays
gggggaaaaaaaggggaggccaaaacaaaaaatcggttttagggaacccgccctcacattagttttggaccataaatttgtttacaaaacagagtttaaaacccccttggtatatttgggacaagcccaagttgaatcccctccaaaaaaaaatttggaatgccatggggg

SEQ ID NO: 374238 - DNA, 432 bp, Zea mays
cccacgcgtccggagggtaatgccaactggttggcttctgcttttgcgtttttgggtatgttctaataccttgcttttttttggatttgatgcctcattaacatgaagacaatttctgagggtgatgtattgctaataagatggaacctgttagatttgtagtgagtttgtgacaattcagactcagatggttgcccagtgttctgttcctcttaagccgatatttttttcaggaaaacttgtgaagagctgttcattaaataacttcactactcttgtgactgactttatgctgatcccttcgaaataaaatgacaaagccttcaagttccaagcaagttaaggtaggctaaagtaatcctatggatcaagaaaagatacaacttttgaaggggcaaatattaattattgaggcctaagtttgaactgaag

SEQ ID NO: 374239 - DNA, 221 bp, Zea mays
cgccgtttagtccggcgctacgtataagcataaagggtggcagctgttgtcaccaaaacttggaggctgggggatccactgaagaatcaaatgacaaaccagggggacatcaccatgcaaccggaggagcaggactccatgaaagatgttctagcacccagccatgaccgagttcacagaaatcaactctgccatcaagcaagggctacagaggccggacc

SEQ ID NO: 374240 - DNA, 99 bp, Zea mays
ggggatcaacgaaaccaaacccatgttttatcaacaacaataataataatgttgttaaaccagcagcgacagttgttagggtctgatcggacccgtggg

SEQ ID NO: 374241 - DNA, 188 bp, Zea mays
gggcaccaaaccaggggaacaagcccctgggctcccttttttttattgggccctggaatttttccatccacaaaaccccggcaaagccccaacttataaacagggggagaccataattaattggggggctaacaaatttttgggggggggctttgattgaaacctttgaagccccccctagggggaaa

SEQ ID NO: 374242 - DNA, 262 bp, Zea mays
ggggggggaacaagggcggaaataccatgaaagggggatggatcacacaataaaaagattacatcgcccattaggcaactaaataagcttagctaccggggaaaagaattcgaaagggggaaaaaaaactttacatattgggagataagctattttatttttagggccttagccaatctagggcccaaagttttgctgttcgtccggcaaggcaggggcatgcttaacgggcaaccttatttgggtaacaaatacaaaccca

SEQ ID NO: 374243 - DNA, 351 bp, Zea mays
aaaaaagagtcatcatcaatgaaattagagaaagaaattgctattcaatatcaactaaacacacacttgacagcagagaagttgtacttctagggaagtaatgtttagaccattttcaatctacattacatcgacagttatacatatatgccgcagggcagttgtacttctaggaaaattcttcagcatcttagtaataccacaggacaaccgctcaacatctcagaataggccagccgctcgacaacgcatccaaaatcttcatatgccatgggaatgtacccgacaagaccttccaatgcacgctaggttttgctgggattcaagagttcgccgagattcaagtgcaag

SEQ ID NO: 374244 - DNA, 259 bp, Zea mays
aggtcaagattttccattatttacggggagaagcctaaagacaaagttgtagaggatggggtacaaagaaagcttttgtttttttttaccagaaatagcataaacgtaaaacagcaagaagattttcagtcttaggggacctttttaggggcacccaattttgtacattcattaatggcagatctcccgagaaatccccaattatgacaaccgtcataggaaaaaaatattcccactggttctggaacaaatgccaggg

SEQ ID NO: 374245 - DNA, 393 bp, Zea mays
cgcgttttcttatgcgccacacacgtccgaccaatgggggggcttccagcctacaccacgtccaacgagtaccaacgagcgacagaacccagaccgcccgaggcggtgctggaaagcatggagggcctgctgctccacacggtcatctcaagagccggtgcgcgccccgcaacggcgctcgtctgcgccagcacgcgcctccgcaccgccgatgccgacgactccttctggcgcagattctgcggggaggacctggggcttgactctcccgactgatcagagggccagcctgttccctccttccaagttgcatataaagactggccggagtctattggcatgtgccctctacctatggtcaagtgagtgagacaatcctggactacaatgaaa

SEQ ID NO: 374246 - DNA, 270 bp, Zea mays
catgttcacagcggggcccttaaatactgggatttaacacgtataaaatgaattccatttttacaggattgctttgccactatcacccctgcccccactaaatgaacataacatctgatgctatatacctagtcgatcctgtgccccagttacaactacagctacattttcacgcctgaaaattcagaccaggcatattgatcgtcctgggactacaaacgacaagtcacttccccacgttttccagggcgtcagctgaaattcaggcca

SEQ ID NO: 374247 - DNA, 431 bp, Zea mays
gtttaacagtcagaaaatacagattctgtgcaccgtaatctgagtcaatcaaatgaattactggaaaggaaaacacctggtgtgtttgcacaatatgggtactatttggggagggtagcaaagcaaaggttgcgtgaagctacacagcaggccgttgattacctaatattgtgtattgctggtatatgcattggtacaattgctagagttcgagatgattcattcggagtagcttcttatggatataccataatggcagtttcactgctatgccagcttgcgtcattgcggtcattttcacctgaaaaattgcaatattgtagggagagagattctggcatgagctctctagcttactttgttgcaagagatactgttgaccatttcaatactgccgttaagccaatcatatttctgtgaacattgtattt

SEQ ID NO: 374248 - DNA, 232 bp, Zea mays
accaaagcagaaaaaaaaatctcttgtttcatgaaatatgggtaaagccaaaagtgccacatatgtacaacagacactattatataatctgtccacttcagaattgttcatgttgggcttcacagtttacacggctatcccatattaaggaaaaaaattggatgcagtcattattgcaaattctaactatcatttactaaccatgctatccaaactcttcatgatcatgggg

SEQ ID NO: 374249 - DNA, 423 bp, Zea mays
tttacgccgtccccctggcgaccgcgctttgccctacgcgcgcgccgtgccacctgctttccgtaacatcagcgacacgttgagctgcattgaggccatcaggtttgcctgtagcaacgtcgagttgtgctctgctcttgttgttttgtgtccttcaagtgttcgattcaatgtcgtaaatgagtctgcttgctattgtataccggggaaaaagtctccaattgtacaaatacatgctccattattctataagtattcacaggtatttttccataccgtccacaatgggcacaatgatataccttagtttatagcacatcgataatttactcatgtgtacagtacaacaatggactatgcgagtcccagttctaggccacaccgccacatacctgacattttatttggatatcgctggtatgc

SEQ ID NO: 374250 - DNA, 234 bp, Zea mays
  unsure (1)..(234): unsure at all n locations
cagnttcctaagaaacacgggtatttgttctggttttacaactcacaaaaatgtaacggtgcaacggagcatacagtacaaaagctggcactgacatgatagactcgattgcctgtctggtagcggcagaactgaagcgtgtcaagttgtagactccctggtccgtacggtctggtacccgtccccatcggcgagatgctccttctttcggaaaaaaatttggtgttaagaaat

SEQ ID NO: 374251 - DNA, 204 bp, Zea mays
ataataacgcttctcacatagttcagttacctgaattttagcttttaagatggttttaaactaaccataaactaattagtaagctgcgaacaacagccgcggccaactggtattcccaccaaaaaatgtccacaatggacgtagcaaagacaaacaggtgagattaaggctagcctaaagcgagaccaagccagcaaaaggctt

SEQ ID NO: 374252 - DNA, 341 bp, Zea mays
tttttttttttttttttttttttttttttttttttttttggtttttttttttttttttttgtttttttttttttttttttttttttttttttttttttttttttttttttgggggaaaaaattggcagggggcccccctcccggaagggaggggcagggtgcccacatttaaacccccaaggctttggaccggggtttaaacccgggggggaatcccaacgggcgggacccccttttccaaaccgggccccccccaaggaagggggggaaaaaccaaaatctcccccaaaaggggggggggtccgcccacccccaaacccccaggggggcgggttggcccc

SEQ ID NO: 374253 - DNA, 166 bp, Zea mays
aaaggcccctacaaccacccacatgggtcatattatcaccatagattacattgaaccatttaaaatatcctccattggcaagggcccaggcggaataagttacccctcccaggtcccctttggacatagggttttttgcatacaaattattagaaattgggggggg

SEQ ID NO: 374254 - DNA, 463 bp, Zea mays
cacaatgctcatgtgtaatcccaatgctccagaaatcaataccgaacaacaacatgaagtagggtgttatgcaattcaaagcgtcctgatcctgtataaatttacgagcaataccgacgtgcctctgcacataccatcgaatcgcaatctacaacgtcgtcctacccaaaagcatcacgcgggtaaccccgtggtcaaggaattccatcctgatgtttgcaaggacccagaaattgcagatttaagaatgagcgagtgatggaggtctatcagggagtgttcttcgttgctgtccattatgaaacatgtcctaccagactacagtgttgtgttggttcactgtaccacaaacaatattgaagaggactgatgaagagcgcaaagtttataacatagtcgaagattttgaattgcaattcaaggagaaagaggattgctaaagctttcttttcaatttaggatg

SEQ ID NO: 374255 - DNA, 308 bp, Zea mays
ccaaaagacagggcattgagcatacagccgtctaaagggacaactttgcttaacatgattcatccaactgtatatttcaatcataatgcatccaacacataagagaacatgattcataatacttggttatgcagaattgacattttgtttaatatgacttgatcgttgtcttcctgaattctttatatttttgtcgcaatctgttggctattgccaaatttccttagccaaaacaaatcagtcagccttgggtgagaatttgatctttatgccctgttgattaacatctgcagaagactccttgatgc

SEQ ID NO: 374256 - DNA, 347 bp, Zea mays
gtgacgcgtacgccgataataagaccgggcaggtgaagggttcggagaacgctaagcaatacaaggctgttgtcatggattacgaccctgtgtacgacgctatcgcaggggcccaggaagcctgtcatggcgccactcatgttgcttctggggcgattacaggtccaaacaccgagacgctgggccaggtggtgacccctgctgtaaccgcactcatggatgcgcttgcggcaactgctggtgcagaggctggcggtgcgtccatggatgcacccaagatcgaccctgaggactgccccaaagactggatcaaagacgagaactgctgtgacaactgagagtcctgt

SEQ ID NO: 374257 - DNA, 303 bp, Zea mays
ggacagaaaacgggcaagggagttcctttattttcctacaccaaatataacatatgatccagggtagtaatacaagtacatcgttggggatgcaaaaacaaagggtcctttcggatgaacgaggttgtagcagtagcgattccaaagggctaaaccgttgcaaaacactgcactgaaggggcaccaaataacaacggccaaacacaacaggacggtaaaaaggggccatcacgaacgacggcatcaggcatgagcagcagagacctgaaagcacacaactacacccaggttgcaggcagcagc

SEQ ID NO: 374258 - DNA, 349 bp, Zea mays
ggccaaaaaaagcagcggtcttgcagagattcatttgccggcacattcgcctctgtaacaaaatcagcacttatgactcaacagtctaccggtaaatcaccaaactactttaaaatgggcaagaacataaaggctcgataccaacatggcatcagtacctacgaagcagagcaaactataaccagattccagaacaatgaaaaacatttggacccaactacccgatgccacctcattcacaagcttcttcccagtcgtcgacctctacatccggctgcagcttggtcaccgatggcccagcattcccagtgtttgatactgtgctgtgcacatctgtgcccggagcagg

SEQ ID NO: 374259 - DNA, 411 bp, Zea mays
gaaaacgaaagatcagaccataataacaaatcattgcagatacagaaaattaatttatgttgggccacattacatatacagaagcaactgcatctagccccatataaattgatgtaaagttgttgtccaaatatactccatcaccgttaaccctgtcaagcgtctgccaaactacacgagtttctaaataattagaatcagtgactagagaatttaatactccattgatcataactatagtatggtaatgcttgttccagaacagaatgcacggaacattctcaacaaagtcttcttgcagcgaaaccaagcatgtggaaaaccaggttcattagaagccaacataagactttcaaatgatactttgggtccggtcaacatatccttagcaggcagcagcaatccaaccat

SEQ ID NO: 374260 - DNA, 456 bp, Zea mays
ggaagaagagattgcacaattaagaaaacatcttgctgattactctgtgaaggaagctcaaatactcgatgataaatacaagttagaaaaacggattgcttatatgcgtatggcatttgaccagcagcagcatgatttaattgatgcagcttcaaaagctttgtcatacaggcaagatattattgaggaaaacattcgtctcacgtatgcgttgcaggaattctttgtgttgtctgtcctcagtactgaaggtagacttaattccaaatgatctctattcaacaaccgtggtttactatttctagccaccaggcagcccaacagaaagatcaattttcttatcttctttgcttcctcttctgtccgaatatgatgatctccagctttagttcttgatgctcagtcaaatgttagtaaattaaaggttttggttaaaacatttgcaggaacgactta

SEQ ID NO: 374261 - DNA, 392 bp, Zea mays
  unsure (1)..(392): unsure at all n locations
cccacgcgtccgtgtgctataaaatatggagtgatgttcagaagtattgaataaaaaattcaacatatctaactgacctacatgatgtaatatgacagatatcttgtgactatttctgctagactgatgtgtatctctttatgttttggagctgtcaatgttccactaactatatttttgtatgcccacaagtaaagctagagttaaccttgcaataattgtataatgaccatgtnatatgtatttttgttcccaacaattccaggtaatatagaagtatgaaatagagttaaggaaagacatgagatatcctataagagagaaatcgtcaatccttttatttttggacatattttgtcaggttgtcaccatactaagtgatctaaagcata

SEQ ID NO: 374262 - DNA, 193 bp, Zea mays
ggggagaatttttatcctttttattattacggggaaaaaacgcaaaccccagtaccaaaaacacttttaccgttccccatttgggacaggatttgtatatttggccccccacatttatttaaggggccggtaaaaactgggaaacccctattatactagggaatttaggagggcctggctgctgatggggggg

SEQ ID NO: 374263 - DNA, 77 bp, Zea mays
gggcagaaactatttttatggaaaccaggattccggttgggaaaacaaacccaaaaagaaaccggccgcgcgggaaa

SEQ ID NO: 374264 - DNA, 130 bp, Zea mays
gcaaaggaatgctattgccatcgatcatatattgtatatcaagggtctcgctcacaaaggaccaattggagggagggggaaacagcctcgaaacaatgaaccagaatcatcgcactccaattttgctaat

SEQ ID NO: 374265 - DNA, 456 bp, Zea mays
cctcacgcgtccggggcgtgcaaacgcatgggtgtagatgctctggaactgtgagcccattatacgccacatatgggaaaggggggcttccatcacgtaccgctcgtcaagagcatctgcacttatgctgggatcaatctgtatctgtctgagccagatgatgggctatgtctgagatgagtatattgatggaggggctagatacaaattgataccagctctagatgcacactactgcaagacttctaccattgattcatagcatgagtttactctaccgctgcctatgaacctgtacctgagaccacaagaattcctgttgttcgtgctgcagcaattgatcacaatcctggagggggccactggctacattcaggtctttccgcgcaggagtgggcccatacaacatgaggaggaacttgccaatgccgccacatgattatgtatctcaacatg

SEQ ID NO: 374266 - DNA, 282 bp, Zea mays
gggggcagatagttttttcattagcagggtagacatacattgatataaaatatctttacacatacaaatgtacatggatgtccaagtaaactgcatggctctacccagaacggttattggtctaactagctgaaaacagataccccctttaactgttgagtataaatgtcaagtcaatgacgtctagcttttaagcaaacagcatagttgttcagttgttcgatagtactcaatcctcaccatttcaacgaggacgccaagtccaggagagattccacctga

SEQ ID NO: 374267 - DNA, 243 bp, Zea mays
cccacgcgtccgaaaaaaaaaaaaaaaaaaaaaaaaaaaaaaaaaaaaaaaaaaaaaaaaaaaaaagggcggccgttctggggggtccatgtttaggttccaaggtttccgacgcgtgagtgctactatagagctacctaattgggatacattggtcgaattactgaccgtcgtttttgggcaaaaccctgtgggaacccactttagtcgcctagcttaacatccttgtttcacatgctggtt

SEQ ID NO: 374268 - DNA, 447 bp, Zea mays
tgttcttctagctaggttgcccccctggtctccgcctcagccctccagcctctttggcacaacccgccgccgccgcaggcgcaggcgcaggtggacatggatctaccaagcctcgccgtcgtgctgcgcgccgcgctcagccacgttcctgaggagcgcaaggcggcagaagagagcctcaaccagattgcgatggcagtggactactgtggaggctgtgtggatgcggccatggagtgagctttgagccgtagtgagttccagtacacaccacagcatttggtgaggattgttacagatcattgttagtggaaagttgtgatatggctgtaagacaggttgcaagcattcatttaagaattttattgcgaaaactggtcgctaatgatccaaatgagtccgaaagttttagaaagcgacaggccatgtttcgtgaaaacatacttg

SEQ ID NO: 374269 - DNA, 288 bp, Zea mays
ccgcgagggaaggtttgggggggttttatttttattcctgggggcaaacagggtccaaacggggggggctctgggggacaataaggaaccaatggggggttggcccatgggggaggaatcccttaaacaataaattggacaaaaccggggggggttccttagggttgcagggcaggcgtgcagccggcacccattacatagaagcggccgccccatgggcagatgagccgattgggctgcagtctggccaaaaagaagcttccggatctttggcaatttttgggggaa

SEQ ID NO: 374270 - DNA, 367 bp, Zea mays
atggcaaaaccaatctctattataaagcatcggtttgcaaatgctttgttggaactctaaagtttgttgcacaatcagaatagcataacctaaagtccaattcttatggtagctgatagtacaaagctacaaaagagaatcaaatgcaggtacaatctcaaaaataaagcaatctttgaagatgacatctagtctatctgtgcaatagctcagaagataattgtggcatgatcctgagctgccctttggcatttgaagcagtacatgcggaagatggggcacacgccttcataggtctaaaaaacaatgcagttttaccagttctctgaaccgtttgtgcccagcatgatggcactggtggccatga

SEQ ID NO: 374271 - DNA, 72 bp, Zea mays
cgcaggcgaatagcttttgtattgggttctgggatagctgttcccgacgccagcgttttcttttaacctccc

SEQ ID NO: 374272 - DNA, 315 bp, Zea mays
cgaagggagctcgtttgggggggttttacttttttttttcaaccccaaaacagatgcggcatttagagtaacactacagaaagccggcacctggcactagcggttccactaccagcccaacagggagggctgttactaatgctccaaagggacagaaacccattacacacacacgtaaaacgcacacgcacgggagacactggacagtccgggacgatccaaaccttgaccaaaaagcactcacgggcccacagttttgcggagcagtttcggaagacactaacgattttttaaaaaaaaaaaagtttgaaacga

SEQ ID NO: 374273 - DNA, 228 bp, Zea mays
cacacgggatgacccacacaaacagcttttaacctcgagcagttggactgacacaaagtttgcagtttcaaatccattttttagttaagaaaagatggccataaaactgttaaaagccaaaagagactattgttaacggtttaaatggggcctttaaatgcaagtaaaaggggttttttaaatggtttggggggtttgaacaaggggtttgcaaacaaaaatttttga

SEQ ID NO: 374274 - DNA, 338 bp, Zea mays
ggtgacttggtccctgtggctccctggtattaaggattcatggtcaatcgcatggattaagcgacaatacagcatcgtctctgcagcaccggccggctctgcctgacgatttgtggtatggttcctactagctagtactgttctgggcgtgcccggacgacaacgaacacgaagaaacgagtgctaccggagtggcagttaccgggaaccgacgcgctagctagatggaactatatatggaaagaacgcagagctcgatcaaaaggtgaccacagtttatggtcagtcaagcgacgacggcaatgtgatgcatgcgtctagtcacgagcgttctcatg

SEQ ID NO: 374275 - DNA, 316 bp, Zea mays
  unsure (1)..(316): unsure at all n locations
aatagatatgtaagcatgtacatatgtagataatgtcatgaattccaatatacaatgaaaggataaataaattcacatccaataaaatcagttccaacaacataagcaaaaaaaactgactatattgtgacatactgaccaccaaataacaacacgggcgatgtctaggtgggtgagtgactttgggggctcccataggaatgctagaggcacgaggtgaccaggagtgnngaggcctcctagaggccgatgtcgatgagggatcaggcgtcgtcaagagccaacaccatgggttgtgacccgattgtcgtaggtt

SEQ ID NO: 374276 - DNA, 167 bp, Zea mays
ggccggcccaaacaaacttttttccataaaaaccccatccgacattaactaaatttccccagggggaaaccttaaacggaatgttcagggcaacaaaggcttttccaacgtttattcacttttccgaaggaaagttggggggggttttatttttattcctgggggca

SEQ ID NO: 374277 - DNA, 263 bp, Zea mays
caccaacttgttttgcattggaaatccggaataaggttagagtatttaatatacgagtctatttcctatacagtcagggatatgcataacccccaggtttttttttttttaagataaactgtttttatagccggtctttggttagaaactactctgggtttttttttaattttaagggccactactacattcaggagcgagaagcaaaaaagccccttttctttaatataacaaccgtttagcctaggcccaacgggacagga

SEQ ID NO: 374278 - DNA, 305 bp, Zea mays
ctccttctccgccagcggcaccagcccgtccgtcgcccgcagcatctcccacatgacgtgcacgtcgcggtactcgcacgggcgcacctccttccgcaggttccccaggcctgcattcatgcgtatatacgtcggtgagctagggacgaccaacaaaggcgtgctagtacagactacagacgccgccaactggcgacgacggaagacggccgacagggatagggaacggaggagatcgctcagagcgatcgaggcagctaatataggagacgtacgtacgtacgtaccggactttcggcggaggc

SEQ ID NO: 374279 - DNA, 372 bp, Zea mays
aaaaaacagttttgaattaaagacaagcgcacataatcctaggtactactgtccaacccctttttgtccattgcgaagatacaagaacatgacaagatcacagtagatggccctgcagcagaaacaagtaacacgtagatttgcagtaaaaaacctaaaaacttaatatgttaataagcatctgctttagatatctaattcttagggctagttaagaaacctcattcttccgaggattttcaatgcccaagaaaaattagttgattttcactgggaaaatggaaatccattaaaaaaagggagtttcacactagcccttagaactaaaggtctagcatgtgtagaatgcgccttgattggatgtctgccatt

SEQ ID NO: 374280 - DNA, 258 bp, Zea mays
gaaaccccatcccaggggcacaaagttttttccatgaccaatttgttttaacttcggggggccgccccccctcttgggttggaataggccatcgaacaccacaggggttcgcattcttccttaaaaaacaccgccccgggccctgggacagggaacgcgggggtaatggcccgcgggggggacccagggcccggcaacagggggtggacttggcgggggaacctgacgggggggacacagacgggatccccccccggg

SEQ ID NO: 374281 - DNA, 548 bp, Zea mays
gcttcctgtccacagcaagccgcgccccagcccgtggccatcggcctcttcttcgccgcatgctctccttgctcgagctcgcccacttcctggtgcatcttcctcctcgcctcccatctcagggccaggctgctcggccacgcccagcagctccttgaacgcgcgcccctccgagcatcttgtccctttgttggtcgccatctttcccagctccccagcgcagccctagccgagctcgctctccccgcccagcagcaagcagctcctttcccctcgccatgaacgctgtcgatcccctactgcagttcctcctctggtcgtcgaccgcgcgggtcacctgctcgtggttatgggaaaccagcgagcctctcctacggcgtagtttccttgcatcatcgttcagcccggtaaatcctgtgagatttagatgagaagaaagctttagcgaggcgcttgccaagtgcttggtgaatcacctcaaccggatgtggttgtcgatctcgcggagtcgagtcgagtttagtcgtggtacgctagatgattatgcg

SEQ ID NO: 374282 - DNA, 446 bp, Zea mays
ctcagtactgcacactgccatcgctctcgtcccttcgctgccgctctatctcggccggagccatgggcggcggtggcgcggcgctgctgctggtgatgtgggcgggcgtggcgtcggcggccgtgtacgaggtgggcggcaccattgggtggaccgtcatgggcaaccccgactacgccgcctgggccagctccaagcagatcgtcgtcggcgacactgttgtgttcacgtataacaagcagctccgtggccgcggctgtcgccacgtccctgctctccctggccgcggccgtgctggcatgatcacatgatcaggatcgtgtagtgctggccaggggacggcgcctttgtgaattgtgagagctcgtactgtgtctgtgtgactgtgtctgtggccgtatgagcatttagccctggatctgtgtttggtactctggcttcttcgg

SEQ ID NO: 374283 - DNA, 168 bp, Zea mays
  unsure (1)..(168): unsure at all n locations
tttttnttttttttttttttttttttttgcatgtggggggcatcgtgacagcgaagaataaaacacatcattcttgagcgataaaacccacctaagcctacatgcagtacaagagttctaacaacttcaccttaactctctaatttttcatcaccactataacagcac

SEQ ID NO: 374284 - DNA, 190 bp, Zea mays
  unsure (1)..(190): unsure at all n locations
ttttntttttttttttttttttttttttttttttctgtgaaaccttgaattttattccttttcgcggggtacaactaccgtttgcaatgactattttttacactaacaaatacagtgaatgcgcgtgttcgtggccaacagttactccatccgggatccttgcaagttgcaaatgcaacgacggggccca

SEQ ID NO: 374285 - DNA, 510 bp, Zea mays
gctcgctcctcgcccagcagccgtcgcactctcgccacgctcgctaagccccatctgttccgcctcttccgcatcgtacacatgaccctctgtagctcaaccgcctcaaagttgtcgcccgccccaccccaaaaccctagctccgttccgccgctccccttctccctgttgccgttgtcgcggcagttgagaacagtggcggcaagatctcatggagagaagctatgcggactcccagaaaaggcgaaatcatcgtgcgattgtggagattgccgatgggaggctccaccagtgctagggtgcggccaacaagacactgctcgccactgcttgagtcggtagtgagatcttagggggcagaagccctgcagcccccatgctcccactccctcctgcaccccacgcttaccggcgagccgctcgacctcattggagcttgccaagccgtcatgcgccccagtgcggtggtcgacatcatccacggcgtcgaccgcgtgctggtcctgcgct

SEQ ID NO: 374286 - DNA, 210 bp, Zea mays
tcgccctcgcgtccgcccacgcgtccggcaacatacaaattctttgatgaaaactccggtgtctgataacatgccaaatgatgtacctgctaggcagaacagtcttgggttatggaaatacttggatgatgatattagtttagatgattatcctagttcggtcctactccttactgatcaggtaattgtcgaaacatcttttcacatctc

SEQ ID NO: 374287 - DNA, 330 bp, Zea mays
cctacgcgttcgggacgcggcgtccaggagagggctggcgctggacttcttcgacatccttcccgcgatgcaggtggaggtgacacagatgcctttcgctgcaatgcttccggtcctgcattttgccgcaactgattttgcaaccaaggctaaacccaacgcgggcagtagtaactgttgcactcaggatccacgtacacaaaaatgagttgaggctaataacgtccctactcggctcgcgctatatgttaagagccaatcatgtttaagctagctctctcacctgtaacgttcattgccaacgttaacgttaatttaaactgtctgaac

SEQ ID NO: 374288 - DNA, 444 bp, Zea mays
cttcgcgacactttcctcgcgttgcctcccttctggcggcggccatcgcctcccccgcatcggtcgtcgctcctcaccggacatgaaccaatcagagagctcaagtgttgctcggggaagagggaaaaacaaaaggatctggacttattatgaggatgaggagttaattaaagcactatatgagatatctttagatccaaagtggaaaagcgagggaggttttaagaatggggtattgttctgttctagaaaatgaactcaaagcaaggctactaggggtgtggtctcagtgctattccacatattgagtctagagtgaggcattttaggaccaagtatggtgctattgaggtcatgcttgctaagagtggttctaattgggatgacaacagaaaaatggtgcaatgtgagaaacaacaatattaagcccaattgtaggataat

SEQ ID NO: 374289 - DNA, 374 bp, Zea mays
tcgcgctgtccctcgaccgctcgtcccggcagagcaggtaggtcgtttcatcctcgcatcccggtgcgcgaccctgccctcacctgtttcacctgtcgtcttttgtgccgcgcctcgagatgatattattgtctacgggggaattgccgaattggctggccccgtggtctttcgcgtgcccgccggagtcatcttctctgggtgaaacgagtcaagtattcacggcctcacggggggacggggagcgactccattgttgggtgggacggggagcgactccattgttgggtgggacggggagcgattgatggcagtgtcgtttccccgtgcgcagcgcctccttccaccgccgcgttcttggagccatgctcgca

SEQ ID NO: 374290 - DNA, 494 bp, Zea mays
tcggttccttaaacaaatggcacattctagatatgtcattgaatctcttcaatgcatagttgcagggaatgtgtacttttcaaacatgatgatggatgatagccttccagggaaatttacactttcagttcgatttgcttgagtgagcactttcggtttgtaaccttcagttcagtgcaatttgacatcgtcagttcgatttcctagagtgagcattttcagtttgtaagcttcagttcagtgcaatttgacatcgtcagtttgatttcctagtgtaagcacttctagtttgttatatactttcagtgcactttaagcgctacaatattatgaactttatgcctgaattcagattaaacctgcatgtacacttttagtttcagttcgattacatgtcatcttgactattgtgttcatgtacactttcagtttgtgttgctgcctgctcatggatacatgtttccagtttgtaaacacttcaattttcagatata

SEQ ID NO: 374291 - DNA, 483 bp, Zea mays
cagtgatttcggtttttacccaaagacgaagccgacgacaaggagaacagagactccggcgagccccagccacggtgaagccgcgcgaattgcaggagcgaagcaaaggagatgcttctcgaggagctgctccggtgccaaatccacgagtggtacccggccttccgtcgccactccatccccaccgtcatcatcccgctccccgccgccttcctccgctacctcgccggccagcgggcctaccccaacgccgacgccgacgctgaagatggcgctgatgaggagccactaccgttcctccttccggcgataacttccggccgccagcccttcgcgcccatgcacgcgcaccaccccgaccccgactctctcctcaactccgacttgttcttcggctccagcagcgaagacatcttcgaccccgacgcagaccacccgctccgaggtgcaaccgaaaattgaggctttcttcacgaagtgatt

SEQ ID NO: 374292 - DNA, 396 bp, Zea mays
cctacgcgtccgcggacgcgtggggtcgcgcgtgggcgtggcgctctctccccccacctcctcttttaagacgacgccatcgccagccggccctccctcgccgtccggcgccgtcctccttcgtccttccctctcatcacagtttccacctcgcgaggggctcgcgcgcgcgcccatcccggccgatcgactcacgaattcgcgcgcgatcatattcgtgcaagggcatccccgcacggccggaagcacggaatcacttccccgccccccaattcccgggctcctcggcgccgatccctcgccggtgttcgctttccggcggtttccgcggcgtgtcgcgggcaggcgcaggcggctcggctcgggttgctccctccccgggcgcgcgcgccatgg

SEQ ID NO: 374293 - DNA, 254 bp, Zea mays
aaacaaatggcccggggcgatgaatgaaatcacattgcatggggccctcactttgacagcatctgtttctacactttattcgtttgggttttttccctccctcagagaaaggaaacccaaaaaaaaactcaaatgggagatggctcaaggggactaaacccaaaccctgcctccgaaaaaaaaaacatttctttacagtataaaggggcccttctctctctttttcttctacatttctggggaagggattttta

SEQ ID NO: 374294 - DNA, 286 bp, Zea mays
catcttcataccatttaatgctgaaactccaagaaatgattcatggaatgaacagcaagctatgacgagtactgctgattatcttgctcaatttgacaactccacttctggaaagtatgtttctacctgtgctttcctaatgctttattgttgaggctgtgtgcaatatttcttgtttagaattctgcaaccatgtgaatacttttatgtactgtgcagaaaatgtccgtcagttggcctagaatgttatatctattgattatatcgttctctttttttttcttcc

SEQ ID NO: 374295 - DNA, 423 bp, Zea mays
  unsure (1)..(423): unsure at all n locations
tttntttttttttttttttttttttttttttttaccagaagccacacataaaaataaatagatgttccacacataaacaataaatagatgttccacacatgaaagtaaatagatggtcctaacacacgaaaataaatagatgttcctaacataagccatccttagcgcagtgccttttcaaccatagaagtcttccttcatttgttttgaatgacttaaatacatccctatgctccgccttaacaaaaagctgagtagccatgaaatgctcaagtgatccttcagttgctccacactcaacagctcattccatgcattgcttgattgattcatacctatactcaccaagcattactttgtttgaaatattgcaattgatctccaaagtattatgaatcttattcatgaccttaaccatgggat

SEQ ID NO: 374296 - DNA, 251 bp, Zea mays
ttgcgttgtgtcctaaccctatccctttcaacggttccactttcacgccaccccaaccccatccgtcgttgcccgccgccggcgcgacagacgtcaatcctgccgtcacacccaacccagcccgacgtagatccactcttctccgcaggcccctccctcctccgtccgccggcgcgctactgcctaggaacgaagggcatgctgcgggtcagctagtgctgcacgctccgcgggggcggaggaaggttttt

SEQ ID NO: 374297 - DNA, 441 bp, Zea mays
gaggtaagttaaccagtctactaactgtcagtgtcctcaaacaaatggaattgccccatcattctgagcactccattcctgcaagcactgcctagagctaggatcgtagtcccacagcccagataccatttgccggtggaccttttttctcctcttgtttatccagttgttgtgaatgatgaaacagccaagctctttgcaggttgctcgtacatcacgcttctcccatagacccttgtaggcaccattggggaacaagtcccgatccaagaacacaacggtcaggttcgtgttgggctccaagcatctgtcttcaccgatccggtttgttccgttctccccacacaagacatcgtagaaactcggctgctcagataggcctgaactggctgcgtgttttactatcatctccattgcaatgatggtggcgttgtctgagcg

SEQ ID NO: 374298 - DNA, 257 bp, Zea mays
ctcggtttactccccactcaggacctcatctcgatgacgggtgggccccaccaaccagcaaaacaaaactactccaatgcttcctcagcccgcccgccgtggcgcgccaccacatgctgctccctcagcaccaccaccgggtgcccccgcgccgcggagggcgtcgtcgccactccatcctcaccgatatcatttccgctttcctttgcttctttcccatactcctaccgccctagattttattcaacgccgacgcc

SEQ ID NO: 374299 - DNA, 195 bp, Zea mays
gttgattctgctgttttactagacgaaaaggatttgagaacgtccacagtgaataatgaggagccattcaaggaaggcactaaatctgctttaggagatcaagaaaacgatggtatttctcctggctctgaacaaggaggggaaatgccagctgtgcccatggattcaaacatttgtcgttttagtgatactgtt

SEQ ID NO: 374300 - DNA, 221 bp, Zea mays
ggggggtcccacagagctttatcaaaacagggaagcttttgactggggcccaccccttgcccccatgggggggattaaaagccgctggaggggggcttccacccctttcctagttttttaccccattggggggggaggggtgaccttggccggtccaagtccatttataacacattcgacacggggaaaaaaaacgccccccaggcggggggggagccccc

SEQ ID NO: 374301 - DNA, 360 bp, Zea mays
agccctcatcttcctttgccctaagatatcgctattctccccgccctcgcacttatggttccgctggctcgtcggtgcgcctcgcgttctccctcccttcaccgtcgctgctgtcttacgtcccattcacggcgaccatgacgccattgatcttcccagggaagcagacgaaatccgggggttgctgccacgcggtttcgacatcataggggtgctgctcgtggggggagagggttctgatgcggacgtcactcgcgcacctggagcaggctcgggcgcttggggagctgctgtttggtgtggcagcgagccatggcttggtaggaggccacatggatgcagccactggggagattcgat

SEQ ID NO: 374302 - DNA, 276 bp, Zea mays
aagcacaattaatggtgtgcaaacaagatacgagctatgcagaaattgtacattcgagattagcgagcccaattcagctgacatgaaaaacaaaggaactttaggaagaagtgatagacgccaaaaaagcacctctcgaactttagagatatgtacatagattgctctgataaagaagacgggggagacgtacatataataggtttcactctcaaacaactggttggaaaatatcctcctaatcgccggatcggaactcaattctttctttccctt

SEQ ID NO: 374303 - DNA, 324 bp, Zea mays
tcgccctacgcgtccgcgaaaacccacgtctaaaacaggtggcccaccaacgattcacttccccgatcccagggggcggcgatcggaattcgcaacttctcccacgcggcgaacacggcagagatgatgagctcccgggccggatccatccttctccgccacgccgtcatcggtgtgctagacgaaggggtgatctctctggcggctgtcttcaggcctaaaaaggcttttcacggatcatccagcttgcaaactgaagtcgtaatgcacgtcttctttctccgtcttttttcttggacggcgacaagtctaagcatgcttttt

SEQ ID NO: 374304 - DNA, 235 bp, Zea mays
catccaaatatatttttatggatatggcatgacccggttctagtcccgtggagaattaacagttaacactagtgtatatacaaacctacttaaaaaatattccggccaaaatgcttatccctaacaatagggagcgctaatccaccttcctacctggaacttgtacaatagcacgatctaacaccagagagatctagaggagatgccgatcatctccacacggtttaatttgcgt

SEQ ID NO: 374305 - DNA, 269 bp, Zea mays
tctcctcgcgtccgagcagataaccacgcaggaacgttttattacgtatccacaagcgctttcaatatgaagttggttaagtacaagaataagatgaacaactaaacgtgaacgaataacattattataatatttctgaaatctttcctgtaaactatcatatcatttaatatatattttttcttaaacatgaaagcctcaatttatgtagagtttttactttcatgggccttcctttgctacataaaagacaatgaaattgtaatttt

SEQ ID NO: 374306 - DNA, 477 bp, Zea mays
  unsure (1)..(477): unsure at all n locations
tccacgcgtccgcccacgcgtccgccccgtgtccctagccaggagcaccgtccccctcaccaccccgcctaactttcctatcctcatcccgacgcctggagatccatcctcaaacgccgctgctagggcaccgtcccgcgctaggaccccccgcgcctcgcaatcatgtcaccggcaactctgacgacctagggctcacagaggctagcaccacgatggccgacccgggcgcctccgtcaacatcgctgcgcgccaccacctcgcgtcgcagctcgcgaggcagccgccagtgacgcacacgggctggtggggaggggcgcgttcgtaccaccatgggaggggcgtggggcgtggcatcaagggtgagggaggggcgtcgaggaggcggacggcaacaagcccacacatncaacaccctaccaggtctttgatgctgctgcttcaccaaacaatgaaatgctcttgatgcatgattc

SEQ ID NO: 374307 - DNA, 496 bp, Zea mays
  unsure (1)..(496): unsure at all n locations
tcggttctagatcgcgagcggccgcccttttttttttttttttagcaaactgaagtttgtttcgtcgtgttgcaagttttaatcaaatacggcgcggctggaaattacaacagcaccagctaacctgtcctggtcatctcacttttctcaagtgctatcagtattacttagaataggacaataacatttgagaaatttatatcatccactcagctgctcaactttgttggaatgtaaacaaaacacaactaatgtgaataaaacataacttcatcgccacagatgacttcagtttccgctgatttccttctccttagccttgcacatatcatctgacgactttatgaactttttggtcaattcttcaatctccttctcaatcctctttacgtcatccttgggcatactagatgcagacttctttattgtatncaagtgcctttggcgtgctcttctaatactttgtttaaaatcctccgctgatttagtaacaacc

SEQ ID NO: 374308 - DNA, 495 bp, Zea mays
gtgccgcgtccacctccatctttgccggctggagctccctggtgcttgctcctctgcagtacggagctcctccctgaagcttctatcccctgccatggcgcttcgcttcccctgcggcattctcctttctctaatctccctgctcgccggcagcaacatccagccgcgcagctcttgactcgccggccgagctctctgctcctccctctgttcgctcgcgtgaagccgcgcctctgcgctcgcccagtcttcgcgcggcagctttcccctgccggtgcctagccctgcggccctcctctatcctcccgagcttctgcacagccagcgcgctcgagcccctctcagccatggtcgttcctctgtgcttgggttcaagcttctgcgcgccctcctccctcagggcgacgctccggctcctgctcgctctgctcgcttggctgactcgcgcgcatccctggctcgcctggttcatcgcgcgcacgcccagcgccctgg

SEQ ID NO: 374309 - DNA, 503 bp, Zea mays
gccataactaagaaccccattctacgtgaggaccagcttcctcagaaggttcttcatcctaaattgaagaagtccagcaaggttagtgctctagcatttctttctttttttcgtgtactgaaaagtcatttcagaataaggtaatgaggatacatgcacaacaaactgtggactacttaatgaacacagcaacaaaaaaaaagggttatgttatcctgttatatattacctctatattatatgtggtctatattgtcaagtacgcatttcctcgattgtcattgtttacaacaagttatttggtagctgttttggtgaggttggtttaggaattaggaacaaaggtttgactatcagcttcactataggcggatgatttcttgggcgttgaggacatattctcgcacagtggtgataagaaggcgtcactgaaacctccagttggcaaggcactggcaatgttcagcgggaaaaggaatccgaacgacaaccacttctctcgc

SEQ ID NO: 374310 - DNA, 405 bp, Zea mays
tcggcccaacactcacgtttctccagacacagagggcagagcgccgccgccgccgagtcaaggatgatgggcagtgggatgggcgcgtacggcggcgcgctgcgaccggtggtgagcgcggtcggggagactatgctgctgtggggcctggggcagcccgagtcgcaccgtatcaacgcgctggtccgccaggcggtgcacgccttcgagcttcttcgcctgtggtcgtctcctgtccttgttgttgttactttcattatgtttatcttgacttttatatcattcctctcatctattttattctttttatctttgttcttcttatctgactatttcttctctttttcttctgctattctttttttttttttttttacttaatttatctcctttttttttcttttt

SEQ ID NO: 374311 - DNA, 503 bp, Zea mays
tcgtgcgaggcggctcggctctacacccacgcgtgcgcggcctcgcctcttccctcgcacgactcgccgcgaggagtttccccttcctccgcgtgcatccccgcgagagctcgaaaacctagccgccaaatccatggctcgccgcgaccacgacgacgacgacgacgaggaagaggtcgaggaggaggcatacgacttggacgaggaggaggatgacgaggatgaggaagacgactacgaggaggaggcgaggcgcgggaaggcctcccgcggcggtggcaagggtggcggcgggcggaagcggtcacgcgaagacaacttcatcgacgactcggccatcgaggacgaggacgaggacgacgacgacgacggcgggggccggccgaggaagaagggcggcggcggggtgcgagggttcttcgacgaggaggcccaggtcgacgaggatgaggaagaagaggacgaaggcgagggagaggacgattttattaatgatgctgggg

SEQ ID NO: 374312 - DNA, 426 bp, Zea mays
tccactcgtccgtccaggtgttcggatgtacgcgagcccctccagtgctgaaacttacggcattgtacatatccatgttggtctgcctacttcagaccttgcctgcctgagtgctgtcgctgagctacttagcagcgacatatgcatgaagtccttgttgcttaaggttgggctgagtcatatatgacgggtgagatctgaagctcttgatggtgatgctgatacaactgctcttgtcggaaaggggtttgccgttgtgtattgtggtcttggcatcctggggcttgttggtgcctccgcagctggagaggagtgaaggtcgtcgtacgtctgttcggcaaggatctgatgggactgttggtggaagccatgctatctatctggctgtatgccatgaccatcaagagtgatgaaagctctgccctg

SEQ ID NO: 374313 - DNA, 426 bp, Zea mays
tcgataattatcgtgttgtagctcgtgtgtcatgattgtgtttattgtacgatgaaatgtcttagtaagcgtagtgttatagttgccgacacaattgaaaagtagactattaaatagtgtgaggttttaattagttggcaggttatgcaaagtaacccggtcgggtggtttagaaagttagttaatatgcttcttttcttattttagatttagacgtctagaactaatggatctaggtctgttaatctgctgatgttaggctttaaccaaagaaggtaaagcgtatgtataggttgttaatttctaatgtttaattcaggtttagttaaggtaagaaaaaaacattaatgttgtacttaatggattaattatatccagcgttgtttgaagtgtttttatgtctccccctaaatattaatcctcttt

SEQ ID NO: 374314 - DNA, 233 bp, Zea mays
ttttatgtcacactagacttatcagttgagagtgcccctgcatgcattgacacgtgaagaacactacccaggaaacaattggccaccaccggcaacaaaaaaattgccctattttatgctttttctcctgctgcagtatctacgaaaattcaggtcagtgccctgtacacgcatgtttcatatttcaggtgggtcggcactacatcgttgatgccaccttagaggaagaattc

SEQ ID NO: 374315 - DNA, 294 bp, Zea mays
cttagctgcttgagcctgaaggcactacgaacggtaggggcaacagtcaatgacagtccccgcttcccggcgggcaccggtgcatccttcccttttcacgctccactcttctagcgcgcccgccttaatgggccccgctcgactcgccctgctactttccgtggccgccgcctctttagtcgcgtggcgcggtcattccccttttccccagcttgttgttattgctaataggccctctaccaaatcgcctttcccaacagttgtataacccgattggcgattggaacaccccct

SEQ ID NO: 374316 - DNA, 142 bp, Zea mays
tcctcgcgtccgcttgggcgagccgaggccacgtgatatcaatcaaagctctccaatcctcggtgttgcgcggtgcgggtcgcgtccttctcggcgatgatcccgttccagtgacctaggttctcgcggtgttagggttttt

SEQ ID NO: 374317 - DNA, 399 bp, Zea mays
tcttaattcaccatccaacggactgcacccaacatgcttgcgaacgtctgccggcggcggctcaccatccccctctccccaatcctcgccgccgccgccgccgccagcggcaagaatcccatccactccaaccacgcgcgcgccctcctctctcaaagctactactcgtccgccgttcaggcggcgcccgaccgcgagccctgccccactacggtctcctacctggtttcctgcggtgtctcccccgccgtcgccgccgctcgcaaggtccgcatccgggacacggaccgggccgacgcagttcgggccctcttgcgcaagtacggcttctccgaggcggatattacccgcacggtgcgtctagacccgctgctgctcaccttgatacagaccgcacca

SEQ ID NO: 374318 - DNA, 509 bp, Zea mays
gttaattttgacatctgaacatataaatggaggtcctcggtttgctggagtcgaaagcttcagagacttgatgctgagtttaacaagacattcagacattcaggttcaacagattgctcggagcttccgtgctagatggatcccccctaataatgcaaggagtgaaccaacagaatatccacatacatcaacatttgtgcatgatatccagggaaccaatacagtctggagttctgctaggaggaaacgcaagagccgctgggactatcaacctgacgagcattataagatgccgggactaaaaatccaaaaagtttgttctggacatggtgaatttgatgttcagtttggctttatgaaaaataagttaaagaggaatcagggcgcaaacaactatcataatgatgttcttggcatggggagttcaacagagggtgaagatgatgaagcccctcctcctgggtttgagtcccagctggaccgtcggcctgcacaactttcaataggca

SEQ ID NO: 374319 - DNA, 177 bp, Zea mays
  unsure (1)..(177): unsure at all n locations
ctcacgcgtccgcccacgcgtccgntnacaatgatgtaaatgtttttagtggagggggaaaatgttggggagatggggggagcttgatgtgtatgtaagaacaaggtgccagaagggaatgcgattgtccaagattaggttaacggtcaggaccaacgatttatccatgagagtagc

SEQ ID NO: 374320 - DNA, 485 bp, Zea mays
ctaagattttctctgaatcggtatatcatcaaacttaacggcacatattaatctgaggccattcttctgcagggggatttcacaccaatagatgtgtttgccgtaaaatggatccaagctggagtgactcattttggtttgacagcttcctactatggtttcgtagctgatgttctgcaactgtcagaaaagttccgcgtgcagctcggtcccttccgttacgttgttgctggccttctgaagtttctttcattaccccagtacagatttgaggtggactatctcccttcatcgctgcaggggagaagttctgaatcaagaccactggctgaaaaacgtcaccaacagctttctgatgacggcaaggttaggagaggcacacagaccaacggtaggatcaaagacgactgggttaccaggaacggggagtttcttggcatttttgtttgcaatcacttctgcaagcctgcccaggggttactttc

SEQ ID NO: 374321 - DNA, 246 bp, Zea mays
ggattaagaaagaattggaataatcactgcccgagttctccacaagaattcacaggtcatttgatgcggtacatgtacatacactgccatcatcgtcgtccttttggagctgttccaacaacgattccatcgtacgtatatagctaggcatgtaatgttctttaatcatgttgggcgcgagccgaatctttccgtacaaacccctcggggtcttgtatatgccaacgatctcaccggtggtcgtgc

SEQ ID NO: 374322 - DNA, 315 bp, Zea mays
tagggaaatgctgggacggctggtggcgcccgcacgggccggcccggaatgaccggcgcgacccattcgtccgcttcaggccagggaatggccgcacgtccttcttgtagctcgtttgattctccatgggggaggaaacgcaccatacctaccacctgttataccacaagagggaccaggagcacgccgagcagctcgccctctgcgggtacggagagcccaccgagtacacagtggacacggtgacggaggtcttgtacacgggcgagaactagtacgagagagtcacgatggaggagaagcagtacaagcaca

SEQ ID NO: 374323 - DNA, 478 bp, Zea mays
gttgtaacagttcgccacggctaggctcctctcccctctcagctctcagctgcccctcctgcatgccgatcgcctccaagctcgtctacttccagcgccgcccggcgccggcgccgccgccgccgcagcggctccctctcctcctctcaccagaagccggagcatgatgttccagggcaccaaagggatcacgctgctgcagccaagcctccggggccagtcggaaaggcagcagggcttcttcacacggcctccagcgcagggctttttcaccaccgcagcacgtcggagtcggaccacggccggcttcccgacgccgtgcagcaggccagggaacggctccttcagaggctcggcagcgtggacctggtcctggcgggacgaaggcacaagacatggccgacgcagacactctgggctggagctggaggactcgctcgccccgtcgttgatgcctcttcgggcggcggtcaaacca

SEQ ID NO: 374324 - DNA, 564 bp, Zea mays
gttaggtgcgcgtggtggacgtggctactgcacgcctccgccgtcgcttgtcgcgtggaggcgaaggcggaggcggctgtcgtattcttcaggcccccgccggtaggagtactgccccctgctccggcgcctgcagtggaaggcaaggagaaggtcaacggtagctggatctggcgagcacgtgaccgcaccccgcctgcggccaggcggtgcccagatccgtttcggtttgcaaccccgcgagtaagatctggttattaagcacgaattgtacatcagcttgcaagtgtcaggttcattcggatgttaaagtggcccctacatcggacttcaagggcagtagcaaatctgaaacttggaggatcaagacgctctacgttcgttgatgcctgtgtgatgaccatgtgtttaactgttcttagtctgctgctttgatgactgcaaggttctaatttacctccgtcaggccctactggatctctaatgtgcggataatatttgtcttagctgataaacacatgccttttattaacatagtatttcttcctaaattactgattttct

SEQ ID NO: 374325 - DNA, 506 bp, Zea mays
gtttatttttaccacattatgtgaagtgctccacctcaactgcagatgtgtagcttttaccagtgaagattgggaaattgcagagtcaaccctgcaattttggtgtagtttggcacatttcattcttggtattgatgtgaagtcagccaaaagaaatgtggtacaagagttgtttgtgcctgtgttttcttcgctgctggatgctcttttatttcgtgctcagatggacactgatgagcatggttctgatggagcaccttgtatacctgagagactaacacagttcaggatgaatttggaggagctcctcgttgatatttgtttgcttctgggtgcccctgcatatataaacaggctcttttctggtggatgggacttttcaagccaaacaattccttggaaggaggtagaagttagaatgtatgcactcagcatggttgctgacacgattttacaagatgaaggctcctttgatttttcaatcataaatgcatttgtgaacattt

SEQ ID NO: 374326 - DNA, 524 bp, Zea mays
gtcgccgccttcgccagcgccgccgtgcagatcgcggccggatctacggcgctggggcacgggggtccccggatcgacgacgcctccgccgagggttcggatggctatgcgaaaagaaaaccctgtgcttaatgcttgtcaagcatccaatggccggatcacgcgagctcaagctgctgcaaatcgtcgaagctttggagctttcccttctgttccattgcctgcaaaaaccgaacgaaaacagactgcacaagggaaggcaaaacgaggttcttcatatgacaacaccagtgcaagcgttgcactttcaggcccccagcctaaaaggcgcacagtactcagggatgtgaccaatttgagcaatgctaactctaacaaaagttttgctgctgcaccgaagcttcagacaaagccctctctaaggactggaagaaccgtgagcaaaagcaagccgtgcgcaaaaaagattcctaaaaaaccaccaccagctggtaatggaagtgcattgactaatgttttgaaca

SEQ ID NO: 374327 - DNA, 487 bp, Zea mays
ccgctccatgcatatccacttggcattacaaaactaatcggtcggtttcatctgctgcaggttaatcggttcctcatatcataccagtgtgattcatggatatatgtaagagcggcaaaatagcaaatttctctaccacacgggagccgccgcggaggggaaccatggaccagaaggaccggctgagctgcctccccgacgacgtcctccaatccatcctccgcaaactctcgctcaagcaggccgtccgcaccggcgcgctctcccggtggtgggagtcccagtggattcgcgctctcgccggctcccctgttgtcaacctcaccgacgacccggactttgcccgcggccagccgccggcgctgtctgcggccacggtggatcgctgcctccggctccacgccgagctcggtacgcccctcgaggtgttccgcgtggcgctggtttgcccatcagatctggacgggcaagacgtcatcgggtggat

SEQ ID NO: 374328 - DNA, 292 bp, Zea mays
gtcttacaatctgatgtggctaccatttcgcatcggaaaacaaggtgaggaatttgcttatagtgtctcgagcgtcttgagtcttgccagatctgatttggaaattcgatatggtgttgagcattgtgatagtcagagtcaggatcttttaatgtagccatttcagtatttgctcggagtgatgcttgtcttatttttattcttcctttattctttttttcattatgttctgtgtctagcactgttatttctcatcctaccttaatgtaaatttcgtcttctcatttcgcct

SEQ ID NO: 374329 - DNA, 252 bp, Zea mays
tttttccgtttacgcgtccgcccacgcgtccgttatgtcgtagtaaaataacgtgagtggtcggactactgcaaaagatttttcagtattgcatgcacgtaagaaatgaccgaaaaatatatcaagaatgcatcgtgtagtttactgctgctgatacaatgtgtctagggtgcactcctgtaatctgacgcatatgatgagtaagggcacacagctaaatgttacaactagctcttctactgctcttggtgc

SEQ ID NO: 374330 - DNA, 378 bp, Zea mays
  unsure (1)..(378): unsure at all n locations
ctcacgcgtccgctcctcggataaatgtttctactgtttgtctgaagaggggtcagggcannaacaacgcctcacgcagcagcccgcccgcggtcgcgcgtgcaaaaggagcgcccttgcgaagtgagctagaagatggcgatttagtggaggcgaaaagctgcgatgggactgggtcgtcgatggagaagtgctggcagcgtgccctagctctgggatttatcttacaacaagttgagcgggatcaatacctgatttccctgccaactttgccttccctacgagtctttgtaagctcatatttgttggaaaatttttaccaagccaaggagttaccaatcacatttcactttttgtctacaattgtttccttgccac

SEQ ID NO: 374331 - DNA, 440 bp, Zea mays
  unsure (1)..(440): unsure at all n locations
agcagtccgcgtcagtagnnntctctgnnnnnngnntctnnncttcccgacggggattttttctaaagtaaccgccggttctacctcttgtagcctgcgaggttgcgcaacttgggaatgctgcaaatgcaataagagattatggatggcgtgaaaatatgcattccttgcttcaaaaactgggatgtttatttctgcgatctgatctgcacatagaacatccccagttagcgaattttgttcaggaatccactgctgctggtgtttcgaatgctgtgcagcctgtagcttctaatctccaggatatcaaggaatctgctcataagcacttcattggcagaagcacacgaactccgaaagttcattttccagccaagtggttttttggaaatcagatcaccttcctccatatgaataccatcaggaaccttcaaaatttg

SEQ ID NO: 374332 - DNA, 528 bp, Zea mays
  unsure (1)..(528): unsure at all n locations
tttcttacgcgtccgcccacgcgtccgcgcacaggaaactgaagaagaggggtcagggcacagacaacgactcacgcagcagcccgcccgcggtcgcgcgtgcaaaaggagcgcccttgcgaagtgagctagaagatggcgatttagtggaggcgaaaagctgcgatgggactgggtcgtcgatggagaagtgctggcagcgtgccctagctctgggatttatcttacaacaagttgagcggatcaatacctgattccctgccaactttgccttccctacgagttctgtaagttcatatttgttgcaaatttttaccaagccaaggagttaccaatcacatttcactttgtacagaaatgtatctggcaaccagctgagtgacgaatccctatgtaaaaattatactggaccacttattntcaggttttgatttgttctctcaaaatccattccattaatatgcttctgaattttatattatatttctggctgggacccttanacaagtgaatatttaagacattttt

SEQ ID NO: 374333 - DNA, 540 bp, Zea mays
  unsure (1)..(540): unsure at all n locations
ttctggaattttttgaggcattcctgtgacgacatttcagtttttgcaaagtggcctatactacctcttgtagatggcaaggttgtgcaacttgggaatgctgcaaatgtaataagagattatggatggagtgaaaatatgcattccttgcttcaaaaactgggatgtttatttctgcgatctgatctgcagatagaacatccccagttagcgaattttgttcaggaatccactgctgctggtgttttgaatgctgtgcagtctgtagcttctaatctccaggatatcaaggaattgtttatgagcacttcattggcagaagcacacgaactccgaagtttcattttccagtcaaagtggttttctggaaatcagatcacctcctcccatatgaatacaatcaggaacctcccaatatttgaatcttataaatctagggaacttgntagcttgacgaatnctagaaaatggcttaaaccagaaggggtgcatgaggatttatgggatgcaagctttataagaactgaatctgtgaaggaa

SEQ ID NO: 374334 - DNA, 440 bp, Zea mays
tcgttacgcgtgggctggcatcgtcgaaaatttcaaccttcaggcctatttgcagcaagggttgacctccaaggaagtacactggatttgcatgctctttttactggagaggatgatacttgggaagcttggcttgtctttgatacgggtcctaagcttggtagtaacacaatcaaattaaggcgcggattttctccttctgaatctgcaagtacaaagccttcacaggatgagttgcgtcagacaaaagaagaggaaatggatgattactgctctcaggttccagttggtcatctggtattcatggttcatggcattggacagaggctggagaaagctaatcttgttgatgatgttgcctgatttccgccgagtaactgctaacctagctgaaagatacttaacttcttatcaaagaagtaccagagggttctatttat

SEQ ID NO: 374335 - DNA, 502 bp, Zea mays
tttcacgcgtccgcccacgcgtccgcccacgcgtccgcccacgcgtccgccgttgcgcgctcttagggttccgcagggtcgggatcgccggagatggactggagcgcggtgacggcggaggacctggtggacgcgctgcgggaggtggactggtccacgccgccgcggactgtctcggagttcttctcccggttcaccgtcccacgctcctattccaagtggaccagccgcctcaagtgcaacctctactactacaggacaaactatttcatcttgatcatgttcatccttgagatgggcttcctttggaagccagttgctatccttgctgcttttatgactggacttagcatggcatttctcaatgatagttttgcagtcactttcaatgagaaagtcacaaggaccataagacagttttcaccacatttagctgcaaagatgaggccaccaataacgggggtatcttagcttctgatgtttcttttttttttaaatttat

SEQ ID NO: 374336 - DNA, 516 bp, Zea mays
tgttacgcgtccgcccacgcgtccgatcgaagtttcataaaaaaaaatacaccttcacaaccgccgcgagagtcgccgcctcacctcagctcctcggacttggccgcgacgcgcgaaacctgaccgcaccaaacgcgggtcgcaatcgcaacgcaccgcgcggcgctgccgcatcgagagtttttttttgccgttctgcttttagggttagcggcccgccccggtgatcgcgggagaagggagcatctgtcgccggagtttggtgagtgcctggtctgccctggtgccctggcaccctgcatcggctgtcgttgtatttgtcttcccacgaccgactcagagctccctgatctcaagatctcgatagctgcgcgctgactttgggttggagccgtgcgtatcgatccaactccatccgccgggcaaatttgagtcagaggaaggatatccatcggcgcttctgaattgggaggacgcagcgcatacgagattcgatgagattttggtgggacacag

SEQ ID NO: 374337 - DNA, 524 bp, Zea mays
ttcttgtatcctcgacggtcgacgccggcgcgagcagcaaatggccaccgcggcggcgacgatgaccatggcgacgcaccacccccgcgcccgcgcacccctccgcgtctgcgccgcctgggacatgaacccgggagccgccaccgtggccacgcccaagccctccaaggccaaggccaagccgccgcccgcgaccacaaccccggcccgcccgcctcctctgacccacgccgatctcttcgcgcgctccagcgaggcgcaaggaggggtgaagaagagcacatatatgggctttgagaaatggtggttgccacctgcgccagtggtgaagaaaccccgatcgctctacagtgcggtgtcactggcttacttgggagactgcatatatgaactttatgctcggaggcacttcttctttccacctctgagcatcaatgagtacacaaacgtgtgatggatggtgtgaagctgtgagtcacaggacctcttgttgaacaagcttcttggagaagattttctaactg

SEQ ID NO: 374338 - DNA, 520 bp, Zea mays
  unsure (1)..(520): unsure at all n locations
cttgaacacaataacaatatatggagaaataattaattaattcatgcactactgagtacaaaaataactttatgtgtcgccgccagacgggattacagctttgtggagcctcacaataatccaggtagcatatagaacatttttacatgtgcttgtgaatgtcccaaatcagatgaccatgtttttcgcacttccggagactctataaggagggtgttcatacttcatatgctccagtaagttctatgattccttttatggagtttacatgtctacaatagttgcttttatggagtttacaaatgctgacaacaatatatgctttcaaccatgcttacatatatgcaatttacttgctatcaacaatagtatttaacatgtttacaggtacagtacaggaccacatagttacatacatcccacaactttnttattctggatttgggcttggagggacacgtgatagtactgctactcttaatgtgttgatctctcagccaccagacaccagacacgcagc

SEQ ID NO: 374339 - DNA, 400 bp, Zea mays
cttattatcaatgtgcaaagaatacaaacatagaccacaaagtctcataatatatttatttaatgttataattttttgtaattatttttataatttttattaaatttaagatattttgttttaaaattttaaaataacttatactttaggagggtataggacagatatgatgcaagaatgctagaaattttcctataaacggatcggagcctttgatggttcgtgcccaagcccaactattatatataactaataatgtgcccctgcgtcgctacagaatcaatatggtattgatataataagatatattaagatgcagaagcactaattattttgaaattagcggaacatagattaatcaagacagaaaatatttagaaatatcaataccctaaggcgc

SEQ ID NO: 374340 - DNA, 492 bp, Zea mays
tcttacgcgtgggcggacgcgtgggtgcccgcggagccctgattattgcgcggcgctggcggtgccgccgaccctggcgctggcctgtttccctgcagggcgagctcgagctcacctgagaactggccgtggtggctgctcgagccggagtgcacctcgccgagggggacgtcgtcaggtggcagctgaggcacgctccgcccgccttcgtggccccaggagtcggtctcggtccaggggctcggcgcgatgtagctactcgccgccatgagggagggcgccacagggctgccgccgtcgaaacccgctgttggcgcagcgtggctgtggctgtggctgtgggcagcatcccatggctgagttgacagaagagagagagcacagctggagtccgcggggactcctgcaaggcatccacctgggggcagctccgggccagggaacaccggcggtctcgccgacgacgagctaccaccctcgctcccatagtgg

SEQ ID NO: 374341 - DNA, 515 bp, Zea mays
tcttttcgcgtgggttggcatacaacaagcatctgcttcttcgtagtccatgggaggggaattgccttcacaaacaccggccactgacggtacatgccatcggtgatatagtgtccttggttgtacttgtgacctctcactgtgaagttcacccttgagcacatcagtgaagaacgacgaatggttgagcatgttcatgtcactgcccgaccctgccaccctaaaataagcatgttgttgagttctgacaagcgggacccgaacaaagggaacaacggggcacaacaacaagacaaatatgaaattgtggttctcaaatgtcttgtcaactatctcctcaccttgtctggacacaatatttatagggtaaccaaggggtagcctaccaaagtacaggtttgtccttggttattacctgctacatcctaaggatatgttgtcaacagtgtaaatgggaaccattacaaccctagtaatacatgcaaccatttatgtacccacaccagaataatgac

SEQ ID NO: 374342 - DNA, 457 bp, Zea mays
gcacggaacgcccgggcagaaccacgcgaaacggttcggtacgacaggagaaacaacggggcacagacggggaccacacaaaagcacaaacaggcaacaaagcaaacgagaccaaaggcacaaaaaaactggaaagaacaaccaccaggggccagccgggcggccaacgggggacaagaagccagggcctacagcaactagaacagcggccggggccgacaagagagcaggcaggaggaagaccaatgtggccgggggccaggacaggaagaacgggcggacacaggcacactggggccaccaaccccaggcaaagctgggcacagaaagccctcaccagaaacacgagggggcaggcacagaagccagaaaggtaggatgcgcccggacagaggaacaaagcgcgcgaagagagggcgcaagaacgtgacagagcatcacgcgcgcagaccgggca

SEQ ID NO: 374343 - DNA, 311 bp, Zea mays
tcggtcacgcgtggggcatggcgggcaaacaaacgtgtatgctacctgattacggagagcatggacagaacctgcttcatttgtgctaacattgtgtagtcactataactcgagagagccatattggtccaaccatatcagggaagctatcaatgcaccagacgatgcacagtgatgaatcatcaggagcgttaaaacaggaggaggatgaggttctgatggtgcacaaacaaaagcaggggatcacggtggaggacatgcaggcctacatgcagcgccttctgaagctgtacctgttggatacccggacc

SEQ ID NO: 374344 - DNA, 397 bp, Zea mays
cttacgcttgggcggacgcgtggggttatgcctaacctgcttttcttatgttttgggtccccgaagcacagtttggtgagcacttcacatgccctgtgactcatattcgtgtcctagcagtcttgggcagtactagatctctgaaagcacctgtaacctttgctttaagaaaaactcctctagatgtcttttcggtggctacaggcagacagtctggctaaatgcccccattgcggctgtgtgagccatggtgcgctgttaaaaaaaaggacatccaaaaactcttgtagggctagcgtggcaactgcattttctatcgagaaatgagcttattttccttgacaaaacgacaatgatctaacgtagccatggctaagacttggactcttagagagga

SEQ ID NO: 374345 - DNA, 353 bp, Zea mays
gcgtctaaccaaacaagctagctagagctggccaagccgcggtgtgcctacagtccgggcggcccgaccctgacagagccctgaccgacggtgccacctgcggcagacgtgaccccaggcgttggagcggagccctatccatcccagcccggttgaatacagacagacccgaattggggatggggcccattcgatccatctctaggcgggggatgggctgttaactgcagaccgaggggacggggcggggggacccgatgcttaattacaggcggaagtcgctacacccccgtggagcatgaactgccggagggtgaagaggacatggattgggggagaaacaacgaggaact

SEQ ID NO: 374346 - DNA, 470 bp, Zea mays
tttaatttgtaaccttggagtaggcttgcagggcggcactttattgtttatctatttagaaaaggcttagccggccatttccagaccactcaacatgtaatgagtgtacccgtgttagagtttaaataatcacttacaaaaacaaataattttaaaaataataactgcttttgcagcggacacgtggtgctcgacacgcgtattgtatttgtgagctacgaattcgagttggatgactcagaatttacacagcaatctggacatagtagtgacgttaatgttattaaagccattaataatactgcttcgcagaatgttgaatttttggaccatgctggatttaataaagcagatccttcaggtgaattaaatgacacatttaaacttcaagatagtgacgatttaccactgaatgagttttttaaagacctaatcaaattgctggttttggaggggtgtaggaactccat

SEQ ID NO: 374347 - DNA, 532 bp, Zea mays
  unsure (1)..(532): unsure at all n locations
tttacgcgtgggttacagtttcagtcattccattataatttcagtcattccattacagtttcatccattcactcattcatccactccgttacagtttcagttattccgttacagttcagttgttccattatagtcttatccattcaatcatttcattctgttacagctgcagccgttccattagtctcatctatctactcattcaaccattccgttacagtttcagtcatttcgttatagtttctcttacagtttcagtgattctgttaccgttacaatttcattcattttattactgtctcagtcattcactcattcagcctgtcagccattacattaccgttttagtcattctgttagtttcagttattccgttacagtttcagtcatttcgttacattttcagtcattctgttaccgttacagttgtactcgtccgatcggagcatggnggtgggggcgtgggcgcggtgggtgctngcagcgtgtgggctgatcgggttgcggcagttagccggtcgggtgggcatgc

SEQ ID NO: 374348 - DNA, 447 bp, Zea mays
cccaggccacccgtttcttttgcacccttcggtaccctgacccatgctggctctgcattactgcatcgcctcctcctgctgcatgcatggactttttctgatgcttctcgatctttggctgctgtgttgaattggtgggccggatcaacagaggttgagatagatggccagtctgtggaagaccaaggttctgcctggcctcaacaagatcttaaacaaggatggcaagaaggctgcagctgcaggcttcttcaagtccttcaacaaggaggagattggcaaggagattgaggagaagaaggcagaactggagcccaaggttgcggaggcttatgaagcatatccttctgaggtcaaggctctgttcaaggatgagaagccagtcacgatcagcaggaagaactcggctgcagataccaagctccttgatgagctggctaagattga

SEQ ID NO: 374349 - DNA, 431 bp, Zea mays
gctagggttcagagcataagcggaggacagaccctggcacatatgaaccactcttgacaaagtgcacaagagattttactggaactatggattgcatattatacacagagctactcattgacagtgggtacattattgacacttttgcatgaagaatgctgaggaaaagacacatttctgccatcccctgaatggcaatcatatcacataggacttttactgagttccggtgcaggccaagaataagacgttgccacattaggtctggtataaaaggcaatggaaatcatccttgggggaggaacaccgctccttgtgggaacttgaggaaggggggggacacgtgctctggaggaagcaaacaaccaagcagcctaaggaaggggaagaggctagtaacattggataattaccctacaacatttgagcta

SEQ ID NO: 374350 - DNA, 388 bp, Zea mays
gttgctttctgtctaaccgaataacacacacaggcggggcactgatgcaagggcaccaaggcgcggctccctatgtaaagcccctggccattactcgctcataagggaagaacagagcaagcggttaccgaggaagaatctgcgccgtcgggcaagacgagagaggtgccgaagcgaccgtatgatatgcaactcccgttcgccctctgacaaacgcgcagcgcggacaccacactaggaccgtcgacctcctagaaagtgaacacagcctgcagacgatacaacaggaaatgcctgaggattgcattacctgttcctatgaaaacgcaccctggatctactgcacgtcgatcagccttacgacatccgggacttacaaaccatacac

SEQ ID NO: 374351 - DNA, 566 bp, Zea mays
  unsure (1)..(566): unsure at all n locations
ccgcattcggtcggcgctacgtgaggccttactacttcgagttcatctcccatgtgaagaacagatgggctggaaagaccatcgttgacctcttcactgatgagttcaaagggcgttcccgcgattactatgtatgatgccattatttcctttgaatttcatgtaccatactgtttcttttcattacacgccattgtggttatatcattgtctgccaggaggtcctagttgtagagagatgtccataacaggcttgctactgaatgaagtctctgttgtttattgaaccccatcgtcttgaaccgtgcatcttcctttttatttaaaccttgtgcttcagattttgagctcattcatagtaacatatgcattgctgcatgtaagtgaaaggtgaaattgctaggttcatgcagtgaagtgtgggaggcttcaggttgatgggcaaatggttcacacagactatattgtgaaatcatcacaaaagataagccacttcttgcataggtcagttgctttgatcaattttgaaattattacncccactaaacaagtgttcgataatttca

SEQ ID NO: 374352 - DNA, 486 bp, Zea mays
cccacgcgtccgggaatggtcataagtcaaactagacttccctagcgacagcgattcaacgaataagaaccaggccaacagttatgtagtgcagagatctactcccagtcccgggaaccagcttccagtgcctcttgtaccgatcatcagcaagggagtgctagaggaggaggttatggtgagttttgtcgcgactaatggtgagcccacgactacggccacatcaaagctggtctggtggaacctcgtggagcagatgacgatgacgccgacatcctgcacctctgctgcgacgctgccgaccaggacgcgggcccctccgtcgcgcgcgctctacaagtctggatccatcatcgtgctcggcaagactgacttccttaggccagacatggatcccataaccagatggacagccacaaagaaaagtggcctgattagctacaagaagctcttgttccatggactcgatctctggaccgcactatc

SEQ ID NO: 374353 - DNA, 291 bp, Zea mays
gacttggtgtacatcctaacggcaacagccaagcccaggattgccaggggaaccaagtcggagtctgcttagctttgttgcccacttgcccttgcccccctcgcgattgtacgagtcgaacttgtcgaataagctagcaagagttttgtgaggttttattacatgtgtaacttgtcacgaaattcatcgaatgttctgagctgctgtgggttctgtggtttaaagtgtgatcggaatgcatcttactggactaattgtcatctcagttgagcaaggaagtctgattgtttg

SEQ ID NO: 374354 - DNA, 288 bp, Zea mays
actacgcgttcgactacagaattacgtatatacgggtccagatatgggacctgactagttaccagagtcgggggaggcaggtcgacaggcgggtcggaggagcaggttgacaggcagaggggcgtagaaagagggtcggggaggcagggcgggtggcagagaaggcggtcgagggcgaggtcaaggtcgaggtgctgatgccagagtggacggctgaagcggtggctggacggggttggtgtaagggcgaccatgaccatggcagtggggggaggagaagaaggaggt

SEQ ID NO: 374355 - DNA, 198 bp, Zea mays
gccgttgactcgcttgctgcctcggctgatcatggggcgctacctgtaggatcatggggcgcgggcgcggccacctcctgctgcgcgcgtcccctcaccgcgctggcgccggcgccggcggtctgctgagggccgggctcagcaggcgcggcggtggtctcgaccagcgcgcgctggctgcgtccaaggtcccgaggc

SEQ ID NO: 374356 - DNA, 525 bp, Zea mays
cccactcgttcgcccacgcgtccgcccaccgtccgcgcacacgcggtcacgcggaccgcggacgactgccgccgccgtcgtcgtcgattggctcttctgctctccatcccgacacatcgcgccgcttcaagctaaagtgccactgcgccaccatccatcccggcatctcgcgccgcttcagtctcaagagcagatacgcaggtatggagccacgcactgagggagatacttccaggaacttgcgccaaggtcgattgctagagccgccaccggtacctgctgtgaggacttctccagaaggagtgcagaggcacacagatggaaatgcaacggctgaaactattggcagcagcacccaccctgtgcacattggtgtgcaaaaccaagacattgaacaagagcaagttcatgagactggaaagagatacaagaggttgacatctgatgtatggaattactttaccaagaaaaaagagataatagaggagaatggcgagaagtgtgagctaaattgggggttattgc

SEQ ID NO: 374357 - DNA, 252 bp, Zea mays
aaagatttttctcccctagccgccgccgccgctcgtctccctgagaggtgccgggaccgaggaactggtcgagttctaggtagagaatcggttttgcttgcctcagcacggggtctgctgcgtctggtggtggtgaaggggagaaatgtctgagatctgtcacgacttagcttagctaggcaccacacattggacacacatataaatcttaccctctttggacttcaacaactacttgtaggtcaaggtgtc

SEQ ID NO: 374358 - DNA, 526 bp, Zea mays
cccacgcgtctgcggacgcgtgggccgctatggtgggcaatgatttaatgagttttgtaagtacctggccactaagttcatggaaggaaactcttgctctgctttgcacggtaagtgcaaactacaattaatattttcttgttcagtctagaattaccttgatggtggtttgactggttttgactttcaagctttgatagatggctcctaaagtggcattgcatttttttctttgttatcttgtgtatattcactatagactgaactgatttggacgctgtccagtgatccagtctgatgtgtttttagcaccatcttgaccctagttatgaaaatttggctggactagtagagcagtagttcaatggaaatataggttgttctttgaaacctgttgttcaggcctggcctggtcataatttgggtgcccatgtagtggatgacctcaaaggctcaaaccggagtggccataacaggtaatctgatattgcacacatgaggactgaaacaccatgtttttttgtgg

SEQ ID NO: 374359 - DNA, 258 bp, Zea mays
cccattcgttcgcccacgcgtgcgggcctcatgacacgagctgtacaggttcgttccgatccgggtccgaccttgccactggaacaccggacaccggaaccggcaccatcacagggagaaacaaatacctcaatgtgagctctagctcgctcgccatcccctgcccggctgctgcccccaacggaacgacggccagaggaagctaccagagtcgatcgatcgatcgagatcgagagagagagagagagagagcatggc

SEQ ID NO: 374360 - DNA, 252 bp, Zea mays
cgcaattatatgggctctatgtcaatagaaattgataaaaaaagggctgccaaatcaaagttgacaagggatataacttctgacgaggaaagtaatgaaggacaacacaagagacgtcgtaacaaatcttcaaaaaggagaaggaagaagaggagatattcttatccggaatccagatcgcttctttgagttagagacctgaatcatctgattatgagatgaatatctgacccttactcttgtgacctattc

SEQ ID NO: 374361 - DNA, 335 bp, Zea mays
ctccactcgtccggttacttccaaggatagtgagcaggagggatggcgacgaatacagcactgctgcgtcatgcccagcaagggccagcttaggatgtcatcgtctccctcgccagcggctgcccgcctagatctggatggcaacccatcgcacccctcatcttgcagcgctgacgacttcataccgccgcgtggctctcctcctcgctcctagccccgcatctccgtgctgccgcctcctttgctccgtcgtggggcacggtagtcgagagcggtggagcatcgaggagcatgcccgctttgtcgagtttcagctctgaacgtggcacaattgt

SEQ ID NO: 374362 - DNA, 288 bp, Zea mays
tggactcgtgggcaatcacactccaccaggagtaggagcttgcgggcgtggcggcggccgtgaccggcgctggagatcttggacgcgcgcgacatcctggtctccgctctgtgcctctggtctccgaaggcgccgccaccctattttttttttaaaaaaaatcctaagatagtttcttcagtccgacaccgcttttagcttcccctcggcgatctgtgaagctatgaagccacctttcgagaggaacccgactaagaagcgccactcgtggtggtgggacagtctcat

SEQ ID NO: 374363 - DNA, 210 bp, Zea mays
aggccaagcaaggtgcgaacctttcaccacaagctcacaaaccagtcacaacttataagaacgaaccatgaagaatttttactggactcccacattcacataactaccggatatacacaggcaaccagaaagctgggggctcacaagcaataaacaacaagactcccggtacaaacctgaggccactacttaccaatgcaatagggaaag

SEQ ID NO: 374364 - DNA, 305 bp, Zea mays
atgcacgcgtggtgtttgtggtgcgaaagacgtgcaatccagcatttgctggtggacaatcgaaatgtgaagagctgagtacaaatgtcacagacatcaggtgctagcagatcgacacatctggatggtgcctagcacgacaagggtttacgctcctagatctcatgaagacacgctccttaaagcaagatggcacaagcatgccaaatagatcgggtgggcatgatactgaaatgattattgctgcatcaaaatgtggcactgtgatatcaatggtcatgcacactggactcaccagatagctc

SEQ ID NO: 374365 - DNA, 184 bp, Zea mays
gggggcaaatatacttatacaaccttatagtatgtatcaagtgtacacaatacacgtttcgcaatgcgcctgggcgcgtaggccagggacgtgcgaaatgctcacgggcattttgccagcgagtgcagctgttgcaagaagagaaaaagaagaagaaaaaaataagaagtgcgctcaactttga

SEQ ID NO: 374366 - DNA, 422 bp, Zea mays
tcgtccacgcgtccggggacccgtgggcccacgccgtccgcggacgcgtggggtgggattcccgattgaggacggtggctatggatttggaattcagcctaatgacgatgtggacggtgcaaacgaccctgccggaggggaatgggaaccgcctactgatggcaatgatgccgaggacgtcacagatatgggtggaatattgtgtgacgaaagagtggagaggatggagatgaattcggtagaacgagtggccttgaatggttccaccgttacttctgaggaaggagtggacaggatggggacgagcttggacgactctgaggcttccgatggctcaaccacacaagattctgatacaaacgttgagaccgagtcaagtgtttctagtatagaggagcaagaagcaggatacggagcccaca

SEQ ID NO: 374367 - DNA, 390 bp, Zea mays
gatcatgaaaacaaacatttaaacgagtagcaatggattaagtggtggttttcagtgactagaaagatctccttgtgagtagccatgagggaatatatataagaaaaatgacaggtgatctctactggtaactaacccaactgcgcctagtactagaatatcatgagcaagttctttgctgttccaatgcaaatgctcaaggtgggggaaacctgcctagtactgcctgaatgtgagattcagacgcccaggtcgaagacttgtctcgtccgtaagccactttggtgccgttttaggtttggtgttgttaaccccgtggaatataagccttgactcgccaccaaatattaggacgtcgccggattcaagatcaacctttgaaatcttctc

SEQ ID NO: 374368 - DNA, 218 bp, Zea mays
tttctttttttttttttttttttttttttttttttttttttttttttttttttggacagcacaaaaggacagaaaacccgcccagtcaatcatagggatgaccataatttacaagcagcagttgtcataacgggctgaagggctccggcaggggctcgaaccgggggtcgaacagggggctttggtcgggcttgtaataaagcccgtgcagccagttt

SEQ ID NO: 374369 - DNA, 251 bp, Zea mays
tcctttcgaacaaagacgcgtgggttatgttgtgagcagtaaacacacgaatgcagaatgcgtcaacagtccctagctgccgaacaggaggagctaactccagttggggtggtggaaaatgtgagagtgttcgcaacgggatagcttatgtaagctggattttgcgtttgaaatgattgcgcttatgcgagaagcaagggttgaaggtaggcgactgatctccggcctcttattaggcatgggtagccgat

SEQ ID NO: 374370 - DNA, 513 bp, Zea mays
tcgtccacgcgtccgcccacgcgtccgcccacgcgtccgcccacgcgtccgcccacgcgtccggttgcaatgctcgaagcaaacccatgagctattccctgacgagaccaattgaacacttggatacgaatgctcaccttttggcagaagaacctagtgactctgtgctcaatagggttccaaatcatgacagttatttggcaatcaaagaggaatactgtgatggatttaagaggaaaaatgatcctatcttcagtcacattgatgatagctcaaggatgaggggctccagcatcgaagaagtgaccaagccgtatattactgctccaaacagtgatccgtggtctaaaggagatggcagcttttacaggcatccgagctcagaagatttaaacgctaatgctgatgtgcttatgccaggatacagtgcaagatatggacaaattggtggtgacagtaacccacagctagtatggtcccactagcaacagattcaagactgcatggtggaac

SEQ ID NO: 374371 - DNA, 465 bp, Zea mays
gcagtgactacaaccgttttctctccccatctaaactcccagccgcctccttccctaaccggccgtcgctccaccctgttgccgccgccgccagggactctccctcccctcccgtttctctctctcacccagctttctctctcccctcgcgtccctctccctcccagtcgcgcacgccgcacgccctgcccagctctcgacctggccgcgcgagccccagcgcctcgacgccctgcctgcagcgaccgagccgacccgacgcagccgcgacaccgaccctgcccctccctgcacccgacgcgccctgtaccctgcgcgcagccgccaggtgacctgcgacccgcgccaagaactgaccgaagcccgcgcgaccgcgtccgtttctccctgcgttatggtgcttgaatgcccgccgttttcttcttttcctctccctggattctctctgttaacgtcgctattaat

SEQ ID NO: 374372 - DNA, 353 bp, Zea mays
ataccaacgcacatgggtccggccagctgaacaggtcgagcatcaaccagctaccagctcgagcatgagcggcaagggaaccaggagagttgcccgtctcggcggctgtttgatggggacatcatcaactacgctggtccggtgccttgtgttgctgctgctaccgtgggcggtggagccctcctcctatgcggagggcagcttggaccacgaggagtacactacgatgggcaacgggcagcccaaggcacattacaacgggggcgtggtgttcctgcggatacagcgcacctacggttgactggatgagctcccgctcgagctcctgttcaggaagaccctgatgcagctgc

SEQ ID NO: 374373 - DNA, 221 bp, Zea mays
aaccccgaaaacttttgggactccattaattaggaaggaggggggacaaaccattttggcatcctaggcccagagaaactaactcactcgtttttggggttggttccacaaaaaccgaaaagactcacaaagaaccccaatttttcacgggggccggaaaattaataattgaaccacggggggggcccagcccaatcaaatttacccaagggttctccggg

SEQ ID NO: 374374 - DNA, 278 bp, Zea mays
gcagtcaatgacagttatgaggaaaaaaaaggaggaaacagattatcgctcgggcacacatctggttttggtcaggatagcccctcacttcaggcagcatccgagagatgggaggctggaagcactggtccaagtaagttgctcacagttctttgaatccttatctgtgtccctctttcttttggccttgttgccgacctatcaggcaatgccgctgccgtagcttgctcaggctgttcgcccacttttggcaccgtatttgccagcttcctataatg

SEQ ID NO: 374375 - DNA, 333 bp, Zea mays
aaccaaacaacgcctattgaaaacaatactgggctacagaattggcagtacaagcagctttcagcgtgtcccactcccaggctcccagctccaaagttaccaacacaactctatactgtacgtcttttgcacgctggtcgggaatagtctagacgctggctcactccacctgcctactgccttgctggctgccagtgattgccgcgctaaccgggctgtgccacgatgaggtcgtgcggagagagggtgccggagttgtcggcgtcgagctcgtcgaactcctccaagaactccgggatctcttcctggctaatcttccccagctccttgagc

SEQ ID NO: 374376 - DNA, 516 bp, Zea mays
tttgattttatctttagctcagtcagtgcttctttcacaaaagtgttgttggagtttctcatttcatctgattcaacatcaattgtatgcaatactatattgaattatatggtcaatttgttatgcttaacaaagtgatgaaaggagcttatagtcttcttcaacatgtctcctttcatatatattaagggtgctgatgaatctccgttctcgcctaaactggatggttctaacctctctgtctgctatatacaaccatagttgtggtgttatgacaatattgttaccaatgattttaagggcctgtttgcccattagccatttgaccttgctaatgggtctaatagatcgtataaagagaaaaagacatctattagccaagtctccaaacataccctggttaatttttgctagctaattattagccactggcaaacaataagccagcaggatacaaacagggcataagttttctctgtttatcacaggtttatttgagtgtagctccctactatg

SEQ ID NO: 374377 - DNA, 455 bp, Zea mays
ttataagctcaatcctctccgccctttccacactaaactcccagcagactcccccactccccatgtcttctggagtaagaagtggcggcggaggagatcaccatggcgttcaccaccagcatggctcacggccacctcgccggagccgacgacggcgccgagtacgcgttctacagcaacgacatggagagcttcttcttcaatcagccggcgtcggcggacgtcaataatggaggcagcagaactggcgccgacgagctcaccatgccgccgtactccagcgttacggactacctacaggggttcatggacatggacccctatgggctagctcggcacctcgacgcgccgtgcctgctggcggaggacgccccggtcaagcatgagctgtccggcgatgtgagctacgacagccaaggcaccagcggccctcccggagatggggcggatgccat

SEQ ID NO: 374378 - DNA, 474 bp, Zea mays
tcggggccaggaaaggctggggtcaggacgccgcgcagacgcggcggatccgccgccgcagcagtacgatcgccggcgttggcaggtgggacaccttcccttatcccctccggcgggccccgcacgctccgccccttgcggactccgaggcctgcggctccactcccatcgctctcccggttgcattcgccccaatccaaacgacaaacgccaacggttccctccattaaaagaccttcccctccatcaccaccccccgattccactcccacgtgctgctccacttgcgccgccacgttatacctctaggctgtagccatggggacgtcggggtccaagggcatcgacggcgtcggcgcagtttctggcgtcggcgctggcgcggcgggccttggccggcgtcggcgccggcggggacgggggcgaaggcgccgccgcggaggcgtggcatggcggggcgcaactgtacgtgtc

SEQ ID NO: 374379 - DNA, 143 bp, Zea mays
tttattcgtgcggtcggggatggcatcctcgggggcggctacttggttacggctagaaggctcacgcccacctggggcagcctgtgttagctccaccgttgactggttaaacatccctactacatgtacgcatccgggtgcta

SEQ ID NO: 374380 - DNA, 392 bp, Zea mays
agcacaatagtggatctgaaatagccacaaagtagtttctaaaggaacaatagcaagtcacaaaatttaaaacagcacaataccaaatctgaaatagccacatagatagtttgtaatggcataattaatagtaactagctgcagttagtaatgcagcaaatatgctaatgcaatctagcaatagctactctcccgtcgctcaaaaatcatcatcaaactcttctgggatattgggtgtctccccttcttcaccatcattgccaccattagattcatcttaacaatctgtgatttctgcatcatcatgtggaacatcttcttcatcttcctctttagcctctgacattttttgtgcagcaacagaatttcttcttgaatacacattatgggct

SEQ ID NO: 374381 - DNA, 361 bp, Zea mays
tggtgcgtgggcggacgcgtgggcttttgtttttttttttttattttttacttttttttttaccaggaagtacaagagaccaggaaggagaacaccgggattattttttgctcttttagactaattaaaggaagactaggaggtcttgaacggtgtcaaactgttaaaagacgaaaaccaaccctgagactggaaacaccaggttatgtaaacttccccttagatacaaggacctttcttttctgtgtctctgtgtgtattttaaagcggacttgttggcctataatcacgggatcacgccgccatggaacccaatggactggaggagcacggacttgatctcctccggaagaagcccagg

SEQ ID NO: 374382 - DNA, 289 bp, Zea mays
gccggttcttatgggcagctgctcctggcaccgccgggcccagcgcccgacgccgggtcgcagatgttctcgctcttcaacgtcggcggcgccgcgacgttcgacgtacatgggttcgacctcggcctcggcggcggaggcggtggcgacctggtcccgttcgccggcgcggggaatgcgtcgaatttcgctttcttttccctggtaccggcagggaacgccggcggcttcctcggctcgttcggcggcttcggcacagcgccggcgcaaatgccggactttggcgggc

SEQ ID NO: 374383 - DNA, 409 bp, Zea mays
aaaaaagatcatgcatgcaattttcagaaattctctgaacccacaaaaggagggagaagagagggtttcaaaaagatcaaaagataacaacagatagttgaatctcctatgtaagcaaagaaatcattccacgcaccaatggcacattttgtgattcaatatctgtgttcacgccattgaaattccttgccaatggaataacatgctcacccactttgcacccttgttcgatccaagatctctctttttgtacaataatcattccagagggatctaaaccatctatattctcttcttcctgttgtaacttgaaccttttccagcttcccaaaaagtcaatcacacggtcaaagaaattactagcaaccaatagcgtataaacaaccataatcagtgggtagatcttgtt

SEQ ID NO: 374384 - DNA, 521 bp, Zea mays
tgctttgtcgggggctggcttcttccccagccgctccttctcatctttccctctacggtcgagctcccagcctgcacttcggttctctacttatctgcgtgtggcttcacccctggagcaaaaatcccgccgcccctacgcagatttttctagcgtctatatctctgtgcgcaggtccgagccactgttcggctcgagaagaaaatcctgccgcgcttgattactccctgcgcgtgcgttcacccagtgattcctcccctctcccagctcgtcttcttctctgctggtcgccggagctccagctcggctcctcaccggcgggatcctggtaccgcgagctcgctggacgctgctccttggacgggctccactgcgtcgctgccactgggtgtcgcggtcggagccgaccgatccgcacgctggggagacgtactacgccgatcatggtgctcctctgttcgccacggaacgccgacttcaccagaagcgccctgcccagctcccttagctgatcgctccct

SEQ ID NO: 374385 - DNA, 556 bp, Zea mays
ttccacgcgtccgcccgccttcgctgctctccaccgatccgacgaaggcagcgctcgggcactgctgctggttccccttcgcccaattcggtctgacgcaggatctcagtttctgcggcggcggagtagtagggggcagacggtgattttctgattctctcaccttggctctgtggactaaatgtgacctgcaagagctaaaagtggcagcgattgacttccagatgagtccatttgtgctggccgtggtgagcgttgcattcctcaacttgctgttcctgcaagctcatggaagcggtttgcttctgagctgtggctcgaacagcactgtcgatgctgatgggcggagatggaccggcgacataacccctgaggggaattttaccttgagcagccctgggcttgcggcgtcactggtcgggaagagcagttctgatgagatattcggaccgctttacagctctgcccgtttcttcaacgcggcaacttggtataccattagtgtgctgccaggaagtactgtgcaggttgcatttcttccttcgaccttcggaat

SEQ ID NO: 374386 - DNA, 521 bp, Zea mays
  unsure (1)..(521): unsure at all n locations
gaacgatcctgtttggtccatcgtcaccttcctcttccttcttcggttcttcgccagccgtgcgcgcttctccactgccctggagacaaaggagcaccccgcgatctcccggcgggacccggccccacctccccgcccgcgtgcctctgaaacggagaagctgccggttcccagccggccaggctactccgactcttcctttccctccagccggcgaggcgtccaagcggattagcggagagcgtcggggcggcgacatgtgggtgttctacctgatatcgctgcctctgacgctgggcatggtcgtcgtcacgctccgctacttcgccggccctgccgtgccgcgctacgttgtcgccaccgtaggatacgcatggttctgctccctctccatcatcatcctcgtccccgccgacatctggcagacattaactgccagtgcgaaagggggcattggattcttttggagctggtcctattggagcacatntatcctaacatgggctgtagttcctactatc

SEQ ID NO: 374387 - DNA, 213 bp, Zea mays
ttgttagagggtgagccttctttaggaccaggacatcacctcaccctcacccctacgtattgcccccttacacacacacactctctatttacccattgtgctagctgtaactagaaatagaccttttaaaatcttggttgaggggcagcagcaagggacacctactactagctacaaacaagatgatcagatgatgcccggtgtctacaggat

SEQ ID NO: 374388 - DNA, 533 bp, Zea mays
  unsure (1)..(533): unsure at all n locations
tccacgcgtccggtcccgcgtcgcgccccgcgccccgcgccggcgaatgctccggctctcctcgccgcagaggtcgcgtttatgatcagaagaaggcaatgatcaacttatttgacctcagcgcagggatgtctagcacaaatatgctcacagatcgagctcgtatagatggttctccagcgtgtagaagcaggcaagatgccaagagaacagttgatcctgctaaagtttataccaacgataaagtaggagctagtaactggagctcatcaagaaataaatcaaatgcgtctccattgaatgtggcgttagaaaaggagatgtccagggaattggaatcaaagaagaagtaccaagtgtggttgccagattgatgggacttgaagaagatctacctggtcaagagccagcattaccttccactaaaagaaatttgaagaaaagacacttaaatggcaacttggtcaaaacaaacaatctncatcgacatcaagagcagtaccattccggtatgacaacatgcgacaaacaca

SEQ ID NO: 374389 - DNA, 409 bp, Zea mays
tgttcgcgtgggcggacgcgtgggcggacgcgtgggttagaatggcccgacctacttcaacggctccacactacctcttcccaaggagaaacacgaggaaacagtagcggcaagtgctgccgagcggcctgacaaagactgcgagtcagataccggtcttgactcactggattttcctgaagtcccaaaagcagcaatacgtccaccttctaacacaccattgaccccagatattggtccccatgctccgggctctcagccgcttcctcgtgagttctcagaccgtactaacttggaggagaatccaacagctggcggcgcttttaatgttattcagatgaaaagcctggaacatcttatttctgcaccatctgcttaggccaacacaccagatttgccagatgaaaag

SEQ ID NO: 374390 - DNA, 205 bp, Zea mays
atgcttcaattcgaaatctttctaagagataaaaatgtaccacatctgcagctcaacaacttacatataaaatttcgtaaaatgatctgcactcagccagcatatcaagtgcagcagcctgaatactaccaggcacccactgatagcgatacccagccatctccgcagaagcagttttacaggatcttctacgaacggtggaaca

SEQ ID NO: 374391 - DNA, 262 bp, Zea mays
ctgtggcgcccaccgagtagaggacggatcgccagatctcgtcatccgcgccggacggcgcgctgtggtccaagccgacggtgctgttcgccgagaatcttaacgaggtcggactggccgagctgcggtcagttagtggacgtggagtgcgcctactgcatgtccgccgcggagctccttgctaaggcggcgcagatacgacccgctcatcgtgcgcaggggcactaaggtgacgcgggaggtgctggaggccgggcagggc

SEQ ID NO: 374392 - DNA, 377 bp, Zea mays
tttcctcctcttctttacagttcaaaagggctatatgaaggtatttgaggctatcggcgagttaatactcacatcaactgcttttgatcttactccacctaatgcctccatctatgagtgtgtctgcacaaagtccaaatccctcgactcctaatttcacttgatttggatggacaagaaaccacaagtgtgctcaatctgtctactaatgctcactctgtcccagtcagttctaatgaacctaccgtagctaatttatgtcccttctaataaagaatcaaaccaaagagaatgcgccagtgggagaaagccgaagcaaagccatgtcggattagccttgaaagctatgtggagtctcaaaagatcaatttttttat

SEQ ID NO: 374393 - DNA, 244 bp, Zea mays
aaacagtaaactgaagcatagtgaactgaatgcaaactgaagtagtaaactggttggccgtcatcacatcacgctttatccatcatcacaatagtttgtcaagcaaactgaagtatgggcagcaaactgaagcaacaacaaactaaaactgtaatacatccatccatcacaaaaagataaacaatataacataaaactgttatacaagtctctttattatgaactttgagatttaactcttttt

SEQ ID NO: 374394 - DNA, 286 bp, Zea mays
tccacgcgtacgaggacgcgggggcggaccttggttccactgcattatgagacctcacctcaccttgccaccagccatggctgccgagaccgccgaggacatctatgtggcctactcctgcgcctgctaccctggggctggtgccaaggccaaggcggcgtacccttctgcgtcaccatgcatgcacctccagttcctgtcggcagcgagcccgcggcgaccgtggcgggccggcgcccgaccggtacgtgcgcaagtgtccaccacccaaacgcgggaggggggc

SEQ ID NO: 374395 - DNA, 268 bp, Zea mays
gattacgtgaaagtttagggacctctatcaagtttagggatccataaatattacttttaaagtccagagacctccttgactcgagccaacttttgtaaacagatagtgcagatcgcgtcgatcatcatgacgatggatggacatggactggttcaggttcacaacacccacacattttgatcgtgtcgtgtgggcctgcggcagatggggtcacctgacgacaaagcagagatgatggccggccggggttggctcttgggcttggctg

SEQ ID NO: 374396 - DNA, 449 bp, Zea mays
tttgactggggattgggtttgggaaattggcaagaaacagcttgcacttccttggggccccgaaggctgggggttcatcgatgttacaaaaccttgaagctgataaatcggacactgaccaaatggttagggccctatgggaggctttaaaaatcactgaagagaattcaagcccccactcaatggaaactgtggaaaatgctgttaatttaatagacaaacttgttgcttaatcaacataaatcacttaaaatactgggcactttgcgtcgggggctggacacatgcttgaacaggagatttatgctcactcgcctactagatgttcttggctaccgtgacactgcagagatgaacatgacatacatggaacaggcgatctccatacattacaatgtcgacattaatccgcttgtgcagattggactaaccaagttccggagctactg

SEQ ID NO: 374397 - DNA, 301 bp, Zea mays
ggcattccaaataaaccttgcaatgtaataatagaaagagacgttaaatgatttggtccgcccacctagtacattcaccatattttggttaaaataatttaacaccgcaacgacaaatgagtagggttacaacgagattgttcaacattacgtttgtttgggttgaaccaatcaatgtatgtttctcgctactgctagactgagatgagcatgtgcattaccaccttgaagcaagaagacttggcgccacctagtgcctcgttacaccattcctaagcaagcttgtttttttttccagaac

SEQ ID NO: 374398 - DNA, 451 bp, Zea mays
ttctcacgcgtccggttggccgtcttcctggacttgattttgcatataccgatacaacatctgtgtatcatacgaagaatgacaagatggcgcttctgaaaccagggtctcttcagcatattggagataacatgcttgctttcctactccattctgcagcatctccaaaatttttgaaagatgcacaacaaaggaagcaaggaaagacagagcaggatagagctgtttacttcgatatcctgggaaagtacatggtggtctatccgctgcgacttgctaccatgtttcacaactcaatcatattgcagtcacttctaatatggggaacatcattgcttatgggtggacaccctgcactggtgtcctttgcaatatcatgtttgagcatcattctaatgtggatattttctatctgcttaccagttgtgggagcatttgctctgccctatat

SEQ ID NO: 374399 - DNA, 385 bp, Zea mays
tcgtccacgcgtccgcccacgcgtccgctacgtagttgattcgttggatcgggagagaattggaaaagccaaagctgaatttcaggcaataatcaaagatcctttgatgcttaacagtgtaatactggtacttgccaataagcaagatatggtgagccaaccacacttgactccttttaacacgaagattcctgaaaatgaatagttactcaaggatgcaaacactgttttgatgtatttatatctagctgcttgtgaaaaaaattcttttacttatcttcagatggttataaaattcagaacatttatttttgtgctaaaattagtgccaaaccttttgacataaattcattttggaagaggcatttgtatttcacttttaatg

SEQ ID NO: 374400 - DNA, 221 bp, Zea mays
tcgtgtacgcgtggggtggagcatgtaagatggttgtgaaggacctgaaagaagaattcggtagtgaatatatgtaccgctgcctgcaagcatgtgcaatcgatgaaagaaagtttcggcttatgacttagatggctaggcctgtcattgctaaggccttggctgaagttgccaaggaagttgctgcggatgcttttgtccatggatgaactggaaaaggt

SEQ ID NO: 374401 - DNA, 278 bp, Zea mays
gtacacaaaagcatttgctgggcaaaagtgacgatgatcggcataggtacagaaagcagagctgaggatcgcataaacaaatactaagctagagaagtttcataggtttggatatatgtacataaaagcgtttgcgcttcaaaagtagtgatggtcgttgtagatacgcaaagcaattatctctatatcatgtagtgcattagaatatgcaaggctgtgacatgccacatttttatggtcaccaaaagtggatagctttgcaaacgatgttgttggag

SEQ ID NO: 374402 - DNA, 189 bp, Zea mays
actgaacaagcccggcggtaaaactcctcatttttatagtaccattgtgaaaaaaaaatgcccatttctactcatatgatagctatttggcggctggagcagcttacatagtacactggacacatttcatcattatgtgctaccttacgttcccagaaactgctggagcgatgggagcttaagcacaca

SEQ ID NO: 374403 - DNA, 236 bp, Zea mays
gttggagctctcccagaactactggggagatgaccagaatgtacttatttcctggtgtgcaagagttcagtgtttggactttctggagtaaccataaacgttacagcgccatcaggcaagaatttacaatgcggctacattgttcaaaataatagattgttagctttgcctggctttcataaccagttctttcgtggtcgcgccgattatctcattggcacgctttagagggacac

SEQ ID NO: 374404 - DNA, 333 bp, Zea mays
aacaaagagggccttgttgtcatgtgatgccaataccaaccaacgtacagattacagaggggttgtgaattatttgcgagaaggataacacgagctgatataaggcccaaggtccatagtggaagaaagcccacccgattttttgagaccctttatttatccactcattgagatttgcacccaaacatatagcaaagtggagattgtatttgccaatttggcaaccaaaaaaaaaaacccggatgaactttttcttggacagtaaatatagtgctaagcgagatggaacttggtaaggatacggacgagcttcttcttgaacagaggcttggg

SEQ ID NO: 374405 - DNA, 207 bp, Zea mays
aaaaaaaatccccttgctttctggctgtttcgactttcggggatgtaacatgtacacgggcccaaaaaaaattggctgacagaaatgcgaacccgggtagttacaattgcaggactttggagcacactcccccaggtacattcccaagggccaacccctgggccaggaacaagccattggggttttgggttcttttgccgttttttt

SEQ ID NO: 374406 - DNA, 204 bp, Zea mays
gattcaaaaacaggcccttaaattgggatcacttggattttttaagacagcatcacccctaccctggtgtttacatgaaaacaaattaatttaggctaggaactagagtacaaggttacagaggctttttggaaatgcccttttctacagacaacgcattttttggtttagggcaaaacccgccgctaggatttggcggctaac

SEQ ID NO: 374407 - DNA, 305 bp, Zea mays
cacacacaatcgcatgacaatatttaaatccatagtctcatcaattacatcacaaaagtctcatctatagccataagacacatctcatccagtcataataggatacaatatctcatacatagtcgttggaagttctagcatagcttcaagaagttctcgcacaacttcgtcttgtagttgctgctcgttccccccggaccactgcctcggcctcctcctgctggcaccacagtagaagatggatttttcgctggcatgcttgcgctgatggttgcgatgagatcacacaccaagtcgctgacttg

SEQ ID NO: 374408 - DNA, 216 bp, Zea mays
tttttccacgatgccctcaccaacccaacccattgcatcagcaagccctttaacatcgtagagcgacagagcctggatggctctccgaacaaggctgggcagctaacagaccaggacaaggccagccaggcacaactgatagagaggcgaggacttggcaacgactgctagccgaagggccacaacgacggacctggggctggagacagactgaac

SEQ ID NO: 374409 - DNA, 367 bp, Zea mays
gtctcgcgactgggagctctgcgtggacgagacttttgaaaaggctctcaatagccgtacacgatccattggaactggtgacaccatgggggagcgcgttttgagccacattggccaggctgttatccatgtaagggacccataccaggcggttgacagggaccatcatgatacacaggctgacagtcataagcccaacaccaagaccattgctggaggggaggaatctatcaacagcttattcaaagaaactggctcttgaaagcacgcaccaaatgcagctcctgctgacgcaggagccactgcattaacagagggagggactgctacatagcgtgcgggatctcacactgtgttaccatatata

SEQ ID NO: 374410 - DNA, 531 bp, Zea mays
  unsure (1)..(531): unsure at all n locations
cccacgcgtccgcccacgcgtccgctttaatttgagatctaaatgtttttattctcttgtttattccttgttcattaaaaatagagagtagagttatctctttgaagtactgaacatatcacttgcctttttgctttttctggaatccggtgctatttgggcaataccagaccattttgattttaatccatttctgcaccaataatatttttccctaacagtgatgcctttttaccttgtaatctgaagtctcattttgaagagaatctaagggacacaggtaacatttacatgtttttgtgtagaatatctgtgtttgtaggcaacctgtctaatcaatacttgtctcacancatgtggactgcatatcacttaccttttcgcttcttctggaattcgatgcaatttgagcaatatcatatcattttgattttaatccatttctacaccaataatattttttctaacagcgatgccttttttacgttgtttgattgaagtctcattttggttcaatggaggaaccctgac

SEQ ID NO: 374411 - DNA, 479 bp, Zea mays
acccccaccaccatggcgtgctaggttacggctccgcctgccttctcctggaccaccgccacccaaccaccaccacctcctcggcctctccctcgcacgcggctccgtcgaccgtcgtcccggcccccaccctccaccaccacttccatggccatgcagcaggagcgccgcacgtttccctttcccctcccacgagggcgtcgcctcctcctcctcatccatggtcgacggcggcggcctgcgaagaagagccggagccgcatcacgatcatcgccaacaagcaggccaaggcggcagaccgccgagggggaagggagcggcggtgagcgaggggtcggcggcggcgctggggtgggcgccgtgcggatgaagaaggcgggcggcggcggaggaggcaaggcgcggcggaaggtgcgggagccgcggttctgcttcaagacgatgagcgacgtcgacgtgctcgacgacggctacaagt

SEQ ID NO: 374412 - DNA, 530 bp, Zea mays
tctatcccttctaggggaggggaattcaggacaggaggaggccaggttctcgccccgcaataggacgccgatcgattccggatcttagctcgagagcccggtgcccccttctcggtgctcgttgcaggattttcggccaggtatttaggaggaagacctgatttgtccttcagctaacagtcaacactgaaggttcacttgggcaagcaatataatttttccttctattctagggtagtccaaagaaataagaaacatgccagagacttatgttgatgagcaaccaaagggtgtgtctcggaatcgtccacctgcacatatgaatggtgatgaagaaaaggtttatcctggccaactcccagtgttgacctgggaacataagctaacccatgttagacatgatttgccgccattcagacttacatggagagagataatgcagctggctggtattggtttacgtcttagtcgacatattcttgaggaaacttcaaaagggcgaattgctgttattgatcctatgaaaaagc

SEQ ID NO: 374413 - DNA, 480 bp, Zea mays
  unsure (1)..(480): unsure at all n locations
tttccacgcgtccggacgccagccgcgggaaccgccacacggacggccatattaaccgccacactagctacaagcgagctttccaaataccgcggacgggacaccaatggggctgtgcatgacgcgcggcgagaccacgccgacgcgggcggccccggcgaccagcaaggacacggcgctggtgctgatgccgagcggcgagatgcgggagtacccgacggacacgggcacggtcgcgcgggtgctgcaggacgcctccgcctccgcctacggcttcgtcgactggttcctgtgcgacgcggacagggtggggttcgagggccccgtcccggcgctgggcggtgcggaggcgctgcgcgcgttgcagatctactttgtgctcccggccgccgngcgccgtcgcgagctgcggcgcgaggacgtcgcggcgctcgccgtccgggtctccgacgagctctccggccgacactcctgggcgcg

SEQ ID NO: 374414 - DNA, 399 bp, Zea mays
tctatgcgtccggcctccaccacagagagcagcagcagactcgcaagggggtagggttgtgtactctgcgcctgtgcggaccgatgccgtctaccagtgaaagagatggatcgattgaccgagtcgacccggagcatgaggaagtacgcgtcggaggccggcggcctgcgctcggcgcgtcagggcccccacgggcagtcgctgacggccgacacggtgaagagcaggtcccacagccggctgagcaccaagtccaagtcggccgcgtcgatgatgagcagggagccctacgcgccggtcctgcccgtcctggccaacctgcatgaggtgttgctggacaccaagctcgccgtgctattccccgccgtgccgttcgccatcgacgcccagtgcgcgcac

SEQ ID NO: 374415 - DNA, 477 bp, Zea mays
tccacgcgtccggacatggtgtttgctgagggttgcaagacccactgttgcataggctgatctatgcgtcacaccatgaggagtagactgatccagcacgcacaaggtctggtatctctagattagcaaagccacagaacattgaacggcacggcaggtcctgcggtgacttctccatcaaattcggatcaaatagagtgatgaacttggatgcttcaaatcgtggcttatccatcagcttcgaatcggatagagtactactgaacatggacaatataaatcacagtttctccatcatcttcatatcaaacaggatactactgaacttggatactataaatcgaaaaccatctagggtatacatccttaatactcagatcagaccttgagcgattgtaatctaacctatttgattgtgaggggcaggcaacaggttcgattgtgctgctcggtttcgcagaacgcgaagaaaaggta

SEQ ID NO: 374416 - DNA, 410 bp, Zea mays
gttttccaatgcagggagaccccggttacgggtacggtggctacggcgccggcgccgggggctacggctacgactacgactacgacgtcagcgccaactgagtaagatgatgatactactcagcgccgaacgaccggtaccctgccgcgcctccgcctgctgcagcctatgaggatccgctcggtggtcggaggcagcacgacttcccggcgccgctcacggggctggagttccagccgtcggacacctgtcccaagaactacgtaatatttgaccagacgtacgaccggagccgggtgatgttccacccctccctggccaacaacttgggcttcttcgtcggtggatacgactacgggaaccactgctacggctacgaccagacctaccccggcgagagcgcctaccac

SEQ ID NO: 374417 - DNA, 211 bp, Zea mays
gtcctttttttttttttttttttttcagggcacccaaaaaattaggttctttgaatgacatcagattccgatcccaaacagggcaaaccaatgcgaacagggatggccgactactccacgctcaaattagaaaaactgcactttgctaacaagacatttcacagttgaataagacccctatgcgcccacaggtgcgaccggctacctaacc

SEQ ID NO: 374418 - DNA, 149 bp, Zea mays
aatcccaaaacttttatatatgaacttgacagggaataagaccattagcttacctattttcaaactgcccactttaaataatacgatctacaatttaaaaaagtccagtggttcacccatttttgatcactacaaatacaatgtaaaaa

SEQ ID NO: 374419 - DNA, 369 bp, Zea mays
tttcttttttttttttttttttttttttttttttttttggaacacatcaagtatccacgtgttgttaaagtgtaacattagatgagacctactaataaaccctccaagtaaaatacatgagcctaccattcctatagcgacctaagagtacaaacccttttttagcacttccacaagtaaaacagaaggaagtgtagcactatgcaaaatatcccttttaagagaggatatataacgccacctactacatagatgattaggaacccagtaaactttacagcaaaatgcaagctacatggtcagccaaccacaagagtcagcgaatcttttttttttcttcttagattgagcaaatctataacttgataa

SEQ ID NO: 374420 - DNA, 331 bp, Zea mays
taactgttgcttcagtggccaacggcgccgagtcttacacggtgaacacatgcgtggttgaatcttgacggtggccggcccatccaatgcttcttcagtggccaacgctgtggagtcttgcaaggtataaacgcgtcgttggcattgaccctgcaagttcctgcattaagagcttctatgagatgcattctaatgcatgctagaaactgaagcatcttgaatcattgcactgaagctctgaagcccatggtgatttgtaggaggagcagggacaatcaataatgacccgttgttggcgtttgttgcattgccttcattgtcttcatttgca

SEQ ID NO: 374421 - DNA, 259 bp, Zea mays
gggagagcggaagaaagaattttcgctctaattacctttgaaataaaccgtcctttggaattaacagttgttttaacagattaggggaggtttaacattccacactaagaggacctggatttgacaaaatgctcggttacaacttacaccattctttgaactaaaagaagggggaaaactttggagccacgaccaatgtaggggaaaaactacaaactgccaaagattattaacaccaaatggtcgatcttttttttaa

SEQ ID NO: 374422 - DNA, 190 bp, Zea mays
cggccttcctttttttttttttttggaaagaaagcgccttcagataagcatacaccagattcagggctgtaattacagggcttattaccagggcaccactcgacaaactcactcaacatcgagggccacggccatgcaaaaaacctgacatggccccacatcttattcagcgcatatcaacacaagagac

SEQ ID NO: 374423 - DNA, 126 bp, Zea mays
aaaaaaaaacaccatatataaagcacatacaatattcacggctatcgattagtagtatataggatgttcacgatacgaagaacacactcgtcatcgccagcaacagaagggggtaaccgttcaaag

SEQ ID NO: 374424 - DNA, 204 bp, Zea mays
ggggggacccaggacctttatttacattatattaagggaaacttatcatttttcataagcataccactggataaaccatgttttgtaaccggtccaaaaaatttttaaaggaaaaaaggggggagaagcaattggaactgcaagtttgttgggtaaaaccacagttttacccctggtcacgatcacacaccaaaacttttgaaa

SEQ ID NO: 374425 - DNA, 354 bp, Zea mays
gcataactccactgaaatggagggcagtttctctgagtatagtctaactcacatacagactgatcaaaagcgccatcctattcttctctcgctgttcctttctcctctacagaagaaacctcccttttggtgtcgctttctgaagccaactcctgagtttcctccttacagggaggtgcgctcggatcacatttatcaggttcttctttgctccgagctggtccagcggcaggagcatcttgtgagtcgctgtattcttgatctgcatcatagctggcaaatggacccccactgtccatcaagctagcagctatagcagcattcagatcagcctcttcttgctgcgctacaatc

SEQ ID NO: 374426 - DNA, 109 bp, Zea mays
cgggccacaaacatttatttcacacagtcattctaaagcaaaaatcggcttccagagaaccatttttgacgcgagaggggaaaacctccctgaaacctaaacaccggtt

SEQ ID NO: 374427 - DNA, 247 bp, Zea mays
gcggtcgtcctttttttttttttttttttttttttttttttttttgttggatagaatattacacatcagacccaaaatatcatatgaaggggttcaacacaaatttttcatttagaagagaataatataactttaaaacatatatctgcaaatcctttaacttaaaagccaaaacaaatccagtaacttcaacttaaagtattaaacattaagcataagggaaaatgatcctataacttcaaattta

SEQ ID NO: 374428 - DNA, 296 bp, Zea mays
  unsure (1)..(296): unsure at all n locations
catcaatgccatcgccacctgtgaatctgtactctacagactccatggctcaatttaaggaaaaacaaaagcaacatgtccattgtttgttggttcaaacatcagtggggtattataattataaagagatcacaacagacacgaggcagccgtccgagttcaccaaacgcacgctagggtgataccaacactgacatacaagaacgaacacgggntttttttgctagtgtacaggcgcttctactttctctcctacttcgaaccagaagaaaacagagctgcgggaatagatggcc

SEQ ID NO: 374429 - DNA, 105 bp, Zea mays
gaccaaaatgcacgaggttacgttacttctcaaagcagccggggagcatgactcttccttcatcgattcaaaagcattacataagcagcgaaaccagaaataatc

SEQ ID NO: 374430 - DNA, 285 bp, Zea mays
  unsure (1)..(285): unsure at all n locations
tttntttttttttttttttttttttttttttttttttttttttttggcagataattcatttgttagattggcaccacatttgcacgaaaaaactacataaactaaactagaggggcacaatatataattgggatgcgggcgagcagcccttgggcttgggggcttcagcacgaagccaaggatcatgtccccatttttgtcatcgcagacacattacaagcgatcgcattaacaacccctgttttttggcagctaagcagacccattacaaggcgatcgcaaacc

SEQ ID NO: 374431 - DNA, 379 bp, Zea mays
gaatatatatcatatattctttgacctgtcacggagagagctgactctcatcaaatcaaacgctaaaccataccagagtgccaaaaataaaccaacgcggacgggtacataagactataagagactccaccggtactgcaccagcttagaaagaaaaaaaaaagctgaaagaaccattactacaacagaaaggtgatgttgaaacatccatccccgtaccacagctgatgcttccaaatagaaaaaaaaaaaaaactttaacagtgtatagcaaagaccagggcacatggatgtgcgatgtagcacacggttagcttctttctgaaaagcttaaccatttaaacagtacattcctagcaacagacccagacaataccca

SEQ ID NO: 374432 - DNA, 226 bp, Zea mays
caaagcacaatgcttgcgtaaattaaacaaaatacacctttttcacaacccacaagctattgcagattttacacagcccacaacgttacaatagctggtccttgaacgacagcttgccctaaaacacacactcacttaaccaaacttacactaccaaatgggtggtcagaacttggccataacttccaaaacccggatttacaagaggggcagtccaaactttaaa

SEQ ID NO: 374433 - DNA, 186 bp, Zea mays
gctgccttatgatactaaggtatcatcagtaacaaatttataaaagtgtgttggtttatctacaagatataaaagactacaagtcaaattgttagaagtttgcagcattttccagatcagatggggacgtcagtgtaggtgacgcctctcagtggggtgtacggtggaggaccccatgtgctacct

SEQ ID NO: 374434 - DNA, 156 bp, Zea mays
acccagttcatcgattattcgagaattaagcggatcgttcccatgcccatcacaaatgttccacacattcttgccatgcaagaaccttaaagtacactccacgtacaacgtatagcacaggccagtgcatgcggccatgcttattaattcggaatt

SEQ ID NO: 374435 - DNA, 352 bp, Zea mays
gaggacggcggtgggatttgcgggagcagcgcgggagtaaagcggagctggcgcggcggcagccgttcgcggggagggaggcagaacactggaattgtgcacgcctacactcagatgaatgtttctgcccgttgcttggttttgtgttgcttttttgtggaggccctggcgtgggagctgaacatgaagctgttggacatgaagcagcggtaggagcagtgcaccaccttcctagagcatgtcggttgtttgatgaatgctgtcaattataattatataaaaggttctttgtggatatcgggctctgacaacaatttaattttacaagaatagggagcttatgatttatgac

SEQ ID NO: 374436 - DNA, 295 bp, Zea mays
cgaaaaagggctaaattgcaaaaaaaaaatcagcaattacaaacatacacgcctttggtcagttaccatacatgcaaatgcaagatctcaatgaatggttcagcaatacaaaattgtagaattgcgtctctgtccataacacaggattatccacagtgactctcttggacagtgactagtctaacaaaagaataaacaaacaaattcagaggcatgtacatgcccccatcgataatttacatcattcacataggtggtgattggatgcctgtccgtgtagccgggctcatgtgag

SEQ ID NO: 374437 - DNA, 98 bp, Zea mays
ggagcggaaataaattctttattggaacatggaatcattttggaataaagaatttatttccgctgcaaaaaaattctttattacaaaatgattacctt

SEQ ID NO: 374438 - DNA, 322 bp, Zea mays
cagcgcatgcatcacatcaattcaggccgcgaagctcttacaacacatgcaaaattctttcatttcagcaaagctcctacaacacaatgagcctacaagcctactgtcgttcactgaaaccccgtcgcgaggggaggaggccgctgaagttgctaatgtccccgcttgacggagacggatagtgccgcggacggggcatggacagctctgttgttcgatggagcaggagcgcgacgcgaggagctcgacaaggccggagtcccgacgaagccgaaggaagcagcagatcgacgcgtacaggaacgcgcggatcgagtctcgc

SEQ ID NO: 374439 - DNA, 277 bp, Zea mays
aaaacagcatacacctttttcacaacccacaatttattggagtttttacacaggccacaacttacaatagtttttcctggaacgacgggtggaccaaaaacacccacccccttaaccaaacttacgacaccaaagggggggacagaactggggcataacttccaagacctggatttacaagggggggaggccaaacttaaaatttcccactttttgggctccataccatcggggggggttgtttccaccgtttttgatccaacatttttccaatggg

SEQ ID NO: 374440 - DNA, 206 bp, Zea mays
ggagcttaaatctgtggatgcttaagccatgaggcaagaggctacatgattctagggcgagtcattcatgaagaaattgtccttcccatcaaaacatattaggcagcactaaactacagtgattggagcactaggatagaactgctcaaactaaggaaagcttctgattttcagttgtcctccagggaagctcttgaatattaaaa

SEQ ID NO: 374441 - DNA, 269 bp, Zea mays
ggggctggcaagggactgcattttccattgatatctcttggtttatatagactattacatggaaaggaactaccttaataaggaaactaaataacggctctcaatcagccttattccaatcatacacctaatttaagctaatcaagataaactgctaaacatggcacccaaggattactttctacattctcctcctaaaccttgaggggccagctgctgtacattaatcaggccgatctttgatcttagctccaggaacttgatttttc

SEQ ID NO: 374442 - DNA, 223 bp, Zea mays
ggggtataaaaaaactaggggggccaaagataatataggaatccgggccataaaaaccccggggggacctgtttttggggacaaaacagcttttattataaactaaaaagggcccggggcaaaaactttttacaaaaatgcccgtcgtcaacgttttttgtcgggggagagcggttttcaacttaggaggcccgaattttccttgggaaaaaggggaagaaag

SEQ ID NO: 374443 - DNA, 381 bp, Zea mays
caggttaaaaatatatatcagttcataggtaacctgctttaatagaggaactgtctttgaaagaactgtacatgttctcactcccagttttcaggttagacagaacaactgctgcttttctagctgcagcatttgccaagtgcacagttgctggaagtggtgaaaaaagaccaaaaaattgtctcagaatctgaagtgaagacactaattgtcctcttagaaaattcccattgaacccttctaggcctggagctttatcagcaagcatactccgaacaatgttgtcaatctcattagtggtgaatggtgagacaagggagccaaggccttcagtatgcttgaaaacatctggaaaggtagttttcccctggcacacaaact

SEQ ID NO: 374444 - DNA, 340 bp, Zea mays
aaacttcgtgaacaccagtagaaatttgtttgaaccacattctcagtcttacagactcagactcccatactcacagattcaagcagacattctcgcacattgtcggataattaattcaagaagacaaaaccagaacacattataacataaagtgccacaaaccccacgatcactaagtatgttcgccacacgtgaaatgttcgttcaccgtctgcactctgcaaacctattcgtttatcggcagcacaatatgttgctagggttggggatgggttaaaaagcgttccggcatgcatcaggccgtccctagaaagaatacgggcagttcaaagaagaaaaa

SEQ ID NO: 374445 - DNA, 458 bp, Zea mays
aacagatgaagtctggaattcattgactgatcgtaagaggctaccagcaattgcaaacacttagaatgtaaggcacaggcgtggcaggagctaaagttctgcagataggaggtggctctcagcttctctctccgttgccttcaagtgaagcctaggcaaaaaccgggcatgaaacacgcatcgcctgcctgcccattccttgtggagtccaaaaggaccagaaccatttcacatttacagtgacagcaagtaatttgaagacacaacagtggcgacgctttttatggtagcaggtagtgatggcagtgctctatcttctttgcagatttttctcatgaatatcactgctaaatccagttttcaactcaataaaaccgaaagcgaaggggcatatcatcagttcctccaaactttctacccagcttcagtattttgcgtgatcagatcagagctaacca

SEQ ID NO: 374446 - DNA, 399 bp, Zea mays
ggaaacaaaatcgggattctttttcccaacattatacacaccttatatataccctacattttgcatttacaacagccatagctttagcagaacaaggggcagccatcttctgatcttttgcacaaccacaacttaaaaccggcatactaaataaacaaacacgtcgagctaccaatattcaacatgtacaaacaaaagtcaccacaacaaaaacatatgaatgcaccaagaactcaatcatccagctggtcattggtttgcgcgatcgaccacaagcccttgaaataacccgcagactggagggagaattccgacacagcacggaacagctccggcaggtttgaccgcagaagattgagggatttatccctgactaccttgcattgggtcctataatta

SEQ ID NO: 374447 - DNA, 417 bp, Zea mays
tcgcctcaatcttcattcccctgaaaccctagccgctccgtccggtcgcgccactcccttcgcctctctaaggttccggcggaagccgtcctctgcgtcggctgcggttgagatggcttcctcgtcggcgtcttcgaggcaccaggtcaccatcaccctcggccgcagcggtcaggcgacagttagaaagtaatagctcacatggagatgatggttcaggtgatgataaaccttaacttgtcaattctctagggcttgaactgaagatatctggcactacttactctgttgaattggcgtgcaaaatatttgaagaccgcctggttgggaatgggaaggatgatctgagactgaaactcatgaagaaaggctcgttgccgaggagcaatggtggtgcagaacagaatgacatagatc

SEQ ID NO: 374448 - DNA, 413 bp, Zea mays
gcgtctacgttttcgtccacgcgtccggacgggagggcccgctgctcttgggccggcggacgggcgcgtctgcggcgggtggacggcgcttgcgaagctgctgctcttctgctgaggcgcctcggtctcgggcgcggtcgtgccgggccacttgggcccggtctgccgcttatgcaagacgaccgggcggagatttctgtcgtgccgctgcgcgggggacctgctgtacgtgtcggacccctgcgagcactccgtggcgggcgcctacaacgtttgcgtgtaacgcggagtgttccacggcttaatgcggtcccggacgcgggcgtagctagtggaccaccgagccgcgctagagccctgcgcgcgatgctcctactgtggttcgcgcgtctggagcatggtcgccgcggggc

SEQ ID NO: 374449 - DNA, 296 bp, Zea mays
gtttgttcatgaggagaaggcgatggaggcggcgcccccggccgacaaagttaaggaggcggcggagaataagggcgcggggggaggaggggaggataatcaataaagaggtcccgtttgtttcactgtcgtcttctgaggaggtggccatgctggtcttcatgcactgcgagggttgtgcgcgcaatgccaagaagattctgaagggatttgatcgccttgaatatgttattgcagatacgaaagcacacaaggtgttatgttaaagggaaataggctgttgctaacccaattaa

SEQ ID NO: 374450 - DNA, 331 bp, Zea mays
gcgtgttctccaaatcgcccccccaaaccctgttcttgcaccttcccgtgctggacccaactggcgggctgagcccgtcgggcatggcactggagtgggtggtgctgggctacgcggcgggcgcggaggcgatcatgctgctgctgctgacgctggcgaggctcgacggcctgcaccgagccattacctgcgggccgcggagcgcgctgaagcccatgatgtcggtggtgcccttctgtctctcactgcgtatggacatctactgagaagatcaagacgcgccccagtgaaactaacagcagtcctggtccccctacgagcaccttctgca

SEQ ID NO: 374451 - DNA, 479 bp, Zea mays
aaacctgtgtttgatccattatattttgtttttctcttttcttccaaagaatcgagcatttgattaacatgtggccactatcatcacttctatcagtgtcatccttgtttgaatttgatgtgatttaacctaggttaaccacaacacttagtttactgcttgtctccgttgctaaaaaacaaatatagcttccacttccaaacattagatgcttgaggctttgttggcaccgcagtttgcaattgcaaccctaaatcttcaataaactcttcttgaaccaacatcctttgatctgcaatttaggccacctccaacagtgcactatccacctgattggttatccgcaccattccatcatgaatcattacgtgcgttgactttggctgagcgtctgtttggttgcctggccggtcaggctcgcgtgagactaggtgtgcggacgcagtaaaccaacaccttctcccactccacacatgcct

SEQ ID NO: 374452 - DNA, 375 bp, Zea mays
atgcgtgctttttttcttacgatgattggtttccaccaccggaagccactctgcagcgttcggtggtcctcaagctaattgatgagctggaaactggatcttttcagattcatgccaagctagcttgtaacggtgagcaccttgacgaaagacatcacaagatgctcaaatcctggtgaacctgaaacaggctgcacaaacaatgatggaacgcatgaaatacagccatccaagaccatctgtatatatgattccaaagaaaagggtctacctacttctggatgcatgttggacactggaagtgtcccaattgttgatgtccagaatctaccaggagtagatgtttgtgccccatccaaggatacatgctgttgc

SEQ ID NO: 374453 - DNA, 241 bp, Zea mays
aaaccagataaactggataccatttaatttttgggaaaccaggatacctggtcttttattgacaaattgaaattttaaaatggaaaaacttgagggaaccctttcggatcaatatgggtttgtcttcccaacagggccacagaactgctccaaaattgccaaatgggatgaaatgaaaaaaaactggcctaaattagagcgggaagagagctaaacctgtctagctgaaaaccatttacaa

SEQ ID NO: 374454 - DNA, 199 bp, Zea mays
ggggggaagcaaaacctttactgttaccatggggcgcacttgtacaattttaatccctcaccggggatttttacaacaaaaagggggtttaatacagggttaagcaacaggggaacagatgacacccgtcaaggcagtttacaggtacacacactggcgttaaaacagagcagtttttaacaggggcctaccggaatgg

SEQ ID NO: 374455 - DNA, 423 bp, Zea mays
tcggttgtccgacggactagctaagctaccaggggatttaggcgacgcttgcatagcccagggctctgacacgacgcgacgcctattaagcgacacgaggccaggtccccggccgcggcagctcgaacgaggagctaagcagaggcgccgttctgctggttggcttctgtgatggggtcagacacggaccacggcggcggcggtgggcggggcaagaagcaggggtcacagctgcggaagaaggcgctgctgcatttctccctctgcttagtcatgggcttcttcaccggcttcgcgccgtcgtccgtgtccgactggacgaccgtggcagaggcagcaggccggctgggaagcacccacccggtacgggcgctgacagcaggggacgagggcggggccttgaaccagagcctgctggcacac

SEQ ID NO: 374456 - DNA, 509 bp, Zea mays
cgcaccgtcccgcccccgcccccgcccccgcctcccttccgccgcaggggacggggtcggcacggggcgatgaggagcagcgaggccatggagctcctgggctttcatccctactgcaggccctccccttccgaggtgaaggctgcgtatagaagaatggtgatggagtcccatcctgatcgtgtcccaacgcatctgaaatcgcaggctgagtcaaaattcaaggaggtaagttcatgttatgcgttctggtgttccaactagccacggaagatcaaatagaacgttggttaaagccccgtttctactcataatgtttgcagcagcttcttttggcgccttcagcgcatcaagagcgtatcaacggcaaaaggaactgtgttcctctcagaacccatttttaccatagaggaagacagcgggctctgtccatgttcataggcgagacgagcttcttgctccgttgtatacagatgtaaaacaatcacaccattctgaataaacgtgtc

SEQ ID NO: 374457 - DNA, 297 bp, Zea mays
atccgatctctctctcgcgtctatctcctcccttagtgccggccgccatcatcgcccccgccggacccgcccacgccgcgcccgttgccggactaggccccgtcccgccgtggaggccccgggcgcgcccgcccccgggactagccccgtccgtcatggaagcccccgccgtacccacccctgggcccgtgcgccatggacgcacgtgcgggcccagagcctcgtgcgccatggacgcccccgcactggccgcattcgccatggaagacgtcggcgagcccgaccttggccccgacc

SEQ ID NO: 374458 - DNA, 193 bp, Zea mays
agctctcgatattattgattgattgcattcctctgagggacacatgcaaatggattcaaatttgatacatttcaatgaacacagatgaaaaaaaaagaatgcacgtaaaactgtgaaaatattcgtttgtacacattaaaaacaccttcggcgttgggtttaggaggatacgttgttgtacccacgcgttcgt

SEQ ID NO: 374459 - DNA, 407 bp, Zea mays
tcggtgtgttggaccttcatatgcgaaccgtgagggtatagatgtggagacgccggccatgaggcgaaaaacaaggaggcggcgcccgcatcaagccagcctcctcgacccggcgttcaagcccaccaaactactccaggaccggctcgacaagttcaaggaattacacaagaaacggttacagataactgaaaagcctgagtataaaagaaaactgaaaggatccgctgggagaagtaccaaagttaccagtgattacaaattcactaatacggatgcatctgttgatagttctccaagagaagtacatcatacggcaccaattacaggaatccaaggtgatcctgcatcaggcctgtcctcgaggaacaaaagaaagctacattgggggcttgatatttaaggac

SEQ ID NO: 374460 - DNA, 363 bp, Zea mays
ttgcctcagtcagagatctgaacatcaagaagctcgatcagggagcaatggcacatgatgccttgctacctcagtcagagatctgaacatcaagaagctcgatcagggagcaaggcatcatgagccatggcatgaacacacagcagctcacgcctgaatatcgccatcttgatgttcagatctcttactgaggtaaattaggctactcaagaacacgtcggcgaattggtttactcaagaacaaggctcttgatggacacagacctactgacatggttaggagtatcttccacctatttgattaagcccaatcatgcaatggttggtaaatggaaaccgaatgcttatccgcttgatactgtg

SEQ ID NO: 374461 - DNA, 445 bp, Zea mays
gaacaatgaactttcatgattactattatacatgtataaagcaataacatacagcttgtacgacagtaaaaaaaacatacagcttgtacaacacaacaaatcagtaaaaaatgggaaaaaaacaatacacgccacatacagtattccggtttctttccgaaatttacccctcttccggccagctcacaggaaagcaaggaactagccgcttggtgtgggtatcaacgccaacatttgattctttataatgcccatgcacatctcaatctccctgaagatcgggatgttctgggagctgcacggttgtaggcgtgacagggccgaatcaaggatgtgtgcaacttcggcaggatgatactgctttttcgtgcagttctgaatcataagtatcgtggctacgcaggacgaaatcaaatcagtaggaacctgagcttcagaatcatac

SEQ ID NO: 374462 - DNA, 403 bp, Zea mays
ggaccaaggagactgtaaacgcggagcagctgttgcctgttattgagaagctcgtaagcgaaaagaacaaaagcatttacgctacggggacccaaatttaaacttaatggcctagatatgttacaaaatcgcctgttaagcacccagaacaccagagggcacgataaaactgaccaaaaatattcacacctgacgggtactcagtgaggaccgaggacattagccgtaacaatgaaagaatgaaccaaaattttccacggtaagaattatcaccctaaagtatggtcaaaatgctacaaatctacagtcgttgtatcgttcgagacaactgtatcatcaggtggtggctttatatacttccccaaagtcttttgccgagctctactctagattctctggatct

SEQ ID NO: 374463 - DNA, 381 bp, Zea mays
cagcaataagaccctataaattacattattgtgcagcgacaagcttatgtataactcatattaacaagagtattatcccatagaagaaaatgaataagataggaaatatagtctagagaacgtgccggctctggaggggggtgtgggaagctactgcaatgtgcgaacgcggatgcctctttgatgggccgtgaaagacgatgatggtttactgggccgggctttgcatttcttctgttgccttaagtagcaatccttatgaggtctgagtagcaacctttgctcccaccgcatcttgctcagtgccacctccatcgctatgttccgtcgtcggatggtccactgttatcattggctcacctttaacaagaataggccctt

SEQ ID NO: 374464 - DNA, 492 bp, Zea mays
tcggatacagatactgaaatttaatcaccctcgcttatcgcgattttaatatcgcatctgttccgcttttcgcgagtgcgacatcatttttacttctatttattcgggctcttccgaagttttcgtattgttcggaagatggtcgttccgaaaatcggtgcgtccggtgattatttaaaattcatcactcgcgcgaatccgaattcggaagcctgactcactcggataattttcatcctggacagattaatttgaactcgacgactaaaatactcagtgcaaaataattcgaattgtgcgtcgtctgagtgaactcgtgcgcaaagatatgattatattcattcttcagcacgctgtttaacggcgaaatcgtgtatactttagcagatatggtttcggctaattttagtcgaatcacgcaaagtaaattaacaaagccgatatatgcttaattcggtgcgttgctcttcgccttaattacaaaggtgaatt

SEQ ID NO: 374465 - DNA, 411 bp, Zea mays
tcggccgcacagaaggatgcaaatccccctgcttttcttttctcttctttcgcaggacgaggaggagaaggtggagcctagagcgcaaaaagatggatccaatcagatcacaggacagcagcttatgcctgtccaaatggagattttgatctcagtgctccaaatgaatgatcctactgctgcttagcgtccaaaaagcccaatcttttactcgagctcttttctttctttctttggaaaacactccatcatgttttgtttgttgatcattctgctgactttgcagaatgatcagattctcagctgctgacgctttttctttctcttttctttacgtgcagtcccggtgcggtgtgtgctcgcgtggcgtcaagaacggctagcagctgggcggtgttcaccgccgagtgc

SEQ ID NO: 374466 - DNA, 405 bp, Zea mays
tttattctttgcaagtgtggtaaaaaacccccgcgcgcccaccacggtggtgaagatgcaacctagaggagccgggaggcggggaggtgttgcctctcgaggtactggtcgcagatcggcgcgggagaatgtgtggagaagggtggaagaaggctcatcaagcgctcacagacaggaagctgacccgacagatgaagagaagatgaagggagaagaaccccatcagcagaacccttgggaacagcagagaaaaagccccgaaggaaaaagcggaatagattggaggcatgttgctgaggatgaggattctaaagaagagaatatcaaaaatgaggtacccttggaaccccgttgtgataggccttcatgtgatttctgtcatctaaaaaatcacttgacgagaga

SEQ ID NO: 374467 - DNA, 446 bp, Zea mays
cggacgcgtgggcgcgcaggagcttcgcgtctctccctccctccctcactcccgctccggtccgctccgctccaaaaccctagacggcgcccgcagcccggagccccggatccgcgtcccgctgccccggcgtctccgcccgccggcgccggctccccgatggaccccgcggggccgcgcggtgccacggatcccgccggatcgagggccgcgccggcgcacgaggaattggacgggagaggaggaggggcgcgcagcggcgcggctgcagtggaggggagcgcgtggcggctggcagacgctggactgggagatccaagggccggaggtctggaatcttagggtcaccgtgaggcacattagcacacatgtaccacggatgcacctcagtcgactgctgaaggtgccacacaactcggagatagagtgtctggattacaccagac

SEQ ID NO: 374468 - DNA, 361 bp, Zea mays
tggcgtgcgtgcgcctgaacgaagctacccgcgacctcgtcgagcgcgcccgtcgtcacaacctagccggtgacacgcgcgccgagcctgcacgcgggactgctccgggaaatttctatggttagtgtccaaacaggcaggtgaccggttgctgatctaccgacggtcatgtggcgtgctctggtctctcttgagaggatgactgggggacatccacatggcccccgggtctacgtcaggagccgacgtcttggttggggacttttcgggacagcagccaacaggatatagaaggctgaactgattggatacaagaactatgctgaggaaagcatggattagaagaatgggactgttgaat

SEQ ID NO: 374469 - DNA, 466 bp, Zea mays
gcttcctactccacagacgcgcgctcgtgtgtgtgtcactgtctcccctgtcccctctcccgcgagctcgtctaccttcgggtcccccatgggatgagagcgccttcctgacatgggcgctacacctgagccacgagccaccctcgccaagaagcgcccaaccctcctgcacccgttcggtgccaaaccactgcagctgccggcgcggggagcgagctcctgggcgtggacgcgtcacgcgctgcggtaacccccgacgggctcctgagctccctgctgcacctggacgcgtgcaatccattggcaagcgtggcgggcggtgcgctgtctcgcctggacgcgctcacctcagggctgtcggatgcgcatcggtgggcgctgttcgggctattggccatgacgtggctgcacctgaccgaccggccacgcctgcttagcggatccgaggacatgtacgtgctggcgc

SEQ ID NO: 374470 - DNA, 251 bp, Zea mays
ttggtcgcctacgtcgggttctgacatcgtcgtggcgtcacgcactgggacctgaagctacgagaacctggggcttgactaggaggggcagttgaagggaaccgactgcggcctggacgagctgccagagcagttgcaccagcgacggcctacgtcacacgcagtgccgtaccgccgcgtgcgacgcgccgcaggtgctcatgaagcatgaagattaccgcgcacgcgcttacctctggtcctgtggacta

SEQ ID NO: 374471 - DNA, 465 bp, Zea mays
gcgcgctcttctccctctccctggttccacgcgggcgcgcgccctgctccctaacgaggccccatggcgcggtcgcctctccctggtgcctcgcccagcctctgctcctcttctccccggcgcctggtcggatgtggatcctctgctcgaagctcccagcgccggattccctgcaagcttcagcttccctgcgcgccgacttcactgctcgcgccgtcgcccagcctgttggcgcgcgcatgctccctgccgcgttcctgctcggcgcccggatcccctgcttctctccctgcaggcgcgctcaatttccagtgctcgctggacgctccagccatggagtccctacgcgccctcccctctgttcgcttgtcgccatgactcgccgcggtgcccgtccctctgcgcgcagacgcgtgctccctgctcgccactaccctgctgtacgccattgtatacagtggagaa

SEQ ID NO: 374472 - DNA, 491 bp, Zea mays
gctgatcagcggcaacgatttctatgcatttcctcgcattgatcaaaataaaaagcggatagcatggattgaatggagccatccaaacatgccctgggataaatcagaactctgggttggatacttagccgaaagcgggtaattgtaattatcttgtgaataacatattagaacaggttgttttcttgcattcagttttattgtgaataaaagtactatcttgtgtgcatcaaatgaaactgcaccgttgatatatgacaggatggtgttcatgcatatctacaacactatcttgatgaatatgcacagtgatttaaataacatcttgtaatacccctaaagatcatttcgtgtataaaatatctaaaagataataaatcacattgtagttgatgcaacacattttaaaagtagctgaataaaaccaggcacttccttatattttccctgtcagatagacatagatctatgattattctataatcaattga

SEQ ID NO: 374473 - DNA, 314 bp, Zea mays
ctcgcccgcctgtacgtgcccggacttacttgctggaccgacccatgcgttttgcttgactgaagggcgcgcggggtcgtatgtatcggtgtcaatggggcagaatgactgcccaacttggcacctgacccaggctatatctgctgtgatacttaatgggtctgcattgctcatttttttatgttcgtgacggctgttgcaattgtctgtcagcgagaggattaaggatatagtgtacaccgcttctactggactcatgggacgcggtcggtggtgcccccatgcccgagcgcattatgagggcgttctctttg

SEQ ID NO: 374474 - DNA, 163 bp, Zea mays
atacggtttgttatcaccgtccatccggcctgtgtgtgtactggaccacagtgaggagggcttttattcagggttggtccagatgttgctgtgctcgttctattgtccatagcgtgggcttcactggacatggagccagaggagaataggtgatgtcggatga

SEQ ID NO: 374475 - DNA, 396 bp, Zea mays
aagcggacgccagcactctgtgggtcgctgtgcgcaccgtggcgcgggcatttatacaggctaggtccattccttcctttgctcgttgtcttctccatcgccgaagctccacccgagatgacgccaggcgagaatcggtgccctaaggtggggtcgcagaattatggtctacaagattcagcacaacgagtgagaaccctattgtccaggctgagctctgtcgcggcctgcctcaattaccatcaccgtgcgctccctgggcccgggcagggtgcagttcccacgggacatggaatgaatgaccgagtggtgcgagaccagtactggcgctacgggccggggatgcaacctaccaccggtggggcacgggcccgcttcgttcccgtaccacatgct

SEQ ID NO: 374476 - DNA, 482 bp, Zea mays
taggatggtgaggagatgatggcagatggtgatggaaaaaaagatggtgtgaagttgaccgagagctgcagcaaacaggtggacattgatcaggttatgggaactgatggttgcaaaaagcacattgaccagattatggcaactggtgattgctctgacaatatgcattctgatatgcattgcaaggaaggtgggtgtgttaatccttttatggctgaccctgaacaaaaatgtgatggcaattttccagatatagaaagtacttctatgcagagaactgatgtagtattcactatgaatgagactgaacaatcaagcagtcagaccagccacaaggaacagtgtatggatttgaaaagcttagaaccagagtcctcatttttgaataaccaacagcatgattcatctgtgcaatataatgattgttataacgtggatataactcattaaggagcaagtgcaccactgagttgcagatattc

SEQ ID NO: 374477 - DNA, 408 bp, Zea mays
ccgacccggaactacaggctcgacccacgccacgcgggcagcactggaagcagcaggaccaaaagaggctgtgttgggaaacttggctgaaaagctggttgcactcactatcctgattgatggatcgacacctataaaccaagtcctgacaccagggagtcgatgctcaggagccaatggtagatgagctgcaggagaagtgcaactctataaattctctgagagaagaagctgctgatacgctggctattcatgacagaaagttagagcatatgacagaagcacacttaagagggtgggaactccgatctgtatgtgacactacgattgaacagacagagagcaaaccgcgggaagcacttgacaagggagcctacatggtatctgaggacacacggtggacggata

SEQ ID NO: 374478 - DNA, 204 bp, Zea mays
cccacgcgtccgcccacgcgtccgtccacgcgtccttttacccttggtcggacgcgttgtcgcgagctctgtctgaaggacagaataacctggaatgacaacctctggatagcaaccactggttgtgcagctattgataactcctcaactactgtttaaaaggattgatctaggtttgtaagggagaaagagtcaatgataggg

SEQ ID NO: 374479 - DNA, 354 bp, Zea mays
gccatggcggacaagcggcgccgcgcgctggttgtctacgccggcgggcacgccttggcgcttattccccagccgggctccgcaggcgctgggagccatcttgacccgtccgcctcccgtgcctgctgtggactaatgaccatacgttctctggagactttccattctacgaccggcaccgaggataagggcagcactatcatggtactggagcagatgttagacgttgaccatcatgtctgccttggtaagaatgctgacagtggggatgatggtgcgcactaggatccacacgagctggtggttgccaagctggatgagaggatcatgggcatgagagctgacttggtgacc

SEQ ID NO: 374480 - DNA, 492 bp, Zea mays
atgcgcggacgcgtgggtctcgctcatcattggtcgtaggcagcagcttgagagggcggagaggatatcatggcacggcagcgccagcggtcgcagcaacgcagacacacagatgtgctgtgtgagagacaagagagagaaaggagtgtagagagaagggcaggaaagcttagaagaagagagatccacctcgtagtaacccctacctggctccatccctactcgcttgctcctgctggagtggagtcgagcctgctgatgccgatacctgctgccctgcgccaggagagggagaggctaggagaaaccaccgacatgagggaggaggacgaggacagctggttcgcgcgcggggaggagcagcagcttctgcggccggacgagctgatgcctctcacgcagacgctcatcacgccctatctggtcgtcgccttcgacatcacgacgcacggcgccggctggacgggctcggctgggggcgcaggtgcggcg

SEQ ID NO: 374481 - DNA, 413 bp, Zea mays
cactatctgtaaggctggctcgcccgcatgtaccggcccggactgactggctggacccacccatgcgtctgcccacgcctaagtggcgagggctgacgagtgactggtctgtacagtactcgcagggtccgttactggctcacatccactgtgcaggatcatgtgcatagactcatgcatggcgtataggtgctggcgcttactgcggagacggcagaatatggatcaatgcagaaccacagtgtatcaatcgcgtgacctacgaggatatatcagtcacttgaaaaagacaaaggaactggcatggccaagggaggatacgctgtcaatgatgcgcccatactactgcatagtagtattatagggcgacctaaatacactggagtgctggttggaatacaaccagaaagact

SEQ ID NO: 374482 - DNA, 475 bp, Zea mays
cgcacgcgttcgcccacgcgtccgcggacgcgtgggcttttagccttttgagccgtggttcaccggacccagagtgctacggcgttaattctttctatcctagttgtgcccagcttgtcttgcctatatttcgcttactggtgaaccctagccgacgactgcatgccggatcccggaccctagcctgtcctcgccggcacctgcgcttctggtgagcattggttttcagctttatgtcaagttttatggtgactgggagcattggttatggccagtttcagttttaaaggaccttcgcattttgtcagtgtgcattccattgcctcaacattcaggtgatagatttccaggtgaacgatattcaactgcaactgaaacgggatggaaagttttcagtgaccatgttgaggctagcaacattgcacgtgactgaaaatggaatgaccatgcatgtggcatacaatggccatattca

SEQ ID NO: 374483 - DNA, 198 bp, Zea mays
cccctagccgtcgacgtcgctcgtctgcatgtgaggtgatccgcccgaggaactggctcggttcaagtagagaatcggatctgctgggctgaccacggaggctgctacatctgatattgaggaaggggagaaatgcgtgagatctattatggataaggtgtacgacctagggattaaggtgagtcacacatagtttct

SEQ ID NO: 374484 - DNA, 264 bp, Zea mays
cgtgctctcgtccgtggatctgtacttcatctagctgaagatggtccacaacgccacgtacctctaccaattatcaacttactattctacatgccaaaacttgtactgcgtgcgaaaggatgtatatcgatattaggattcacattttgaccatttaccctgcgggacttgttctgacatgctctttgttgaccttggcggatttttctcaggcatggaacgagatgaaatatatgaccttgggggcccatcaccctcggctac

SEQ ID NO: 374485 - DNA, 554 bp, Zea mays
cccacgcgtccgattttatgttgatgtagccaatggatctgaaattcatgtagctgaaaatggttcaaaaagcagcgtagcagcaccaattatcaccttactattctacattagaaaatttgtactgagtgtgaaaggaagcatatagatatttgcattcacattttgaccatttaccctgttggacttgttttcacaagttctttgttgaccttggtggatttttctcagtttgtgaacgagatgaaaataatgaccttggggccccgtcaaccatggtctacaatccccttgtaaattgtataatagctaaagcctacatgaaagtatttataccctttacatttgcgtctggagaatttactctcttctgttttccattaatccattgttcacttattccatgagttttctgagatattgaatggaaggtaaacaatttttgtggagccttgatggctgtggattaccagtttactgatggtttgtgattaacaaattcctgctgttactcttgtctgcagatattctgtatgactcatggtcaccagcga

SEQ ID NO: 374486 - DNA, 384 bp, Zea mays
gggtggacccacgcatgcgtcctttttttcggccacgcgtccgggccagtgtcgcttgaattcggaacaccattaatttaattaaagtctgaatataaaattgcggcgaatacgagttatttaaatcttttgtagtttaaactataataaattcacgtaataatgctgagcatgaatcttgaggtaattattgtgctaaaaatgtgagtcaagaggagactgataacacaaaaaaaagttgctagagcctttcacgttcttacgctagttgataatgcgaatcagaataatcgaagatcatgagaaatagactaatatgaggttgagccctataatatctacggcgatgttagcgttcatatgaaatcagattgttagacataa

SEQ ID NO: 374487 - DNA, 417 bp, Zea mays
gctggtcaccccctgtaccgccgcggacataattggcgggacccacgagtccgcctactcgtccgtaggcttctacaccagggcctggtacgactcaaagggacctacagtcttctaaaaatcctgaaacgccagcagctaaagcaggtccagccaagaccactagcggtgctcccaatgggcgcgcttgctaggtggagttacttctggtggatacctggacaccacatatgggcatgacagcacgggggcacacttcgcatggtatgatgggtctggttatgcacctggacaacatagaacaactgcaacgaaccatgtgccatcctaaacatttggcaaggggttcacagccagatatcagaacatgagcaccaccacaccgcagatgggtatgcacaatagaccacctacaac

SEQ ID NO: 374488 - DNA, 148 bp, Zea mays
gtcttgttcataggccggataaagcgcttgtatgttgccgagcgtctttcctttaccatgattccaaagtgtgttggtttccccttagtattaagaagaaaaatagggaggttgagcaccacacggtgacaaggatacgctttctcgg

SEQ ID NO: 374489 - DNA, 450 bp, Zea mays
  unsure (1)..(450): unsure at all n locations
ttctcatatgtagttgcacaagcgactaattattagttggacatcaaatcactaggtcgcgggttcgaaaccgtctttccgtatttgagaaagatttgtctcggtttatccctttcctagccttcgggcactgggtctgccctttttacttttgacataacttgctatccatatatgagctagtagcatctttgcgtattatatttttagataataaaaccaaacataggcttctgtttgggcatattctctgctcttttctacttctgtgaatatgcactgaccattgtcaaaatattacactgagtgattgaagaatatgcttcaatgattattgagcttgttcattacttgatatatactataacatttttccttatgaaatgtgtagcttcttataactttgactaanatataactcgtaggtaccttcatgaaatatgttctcca

SEQ ID NO: 374490 - DNA, 287 bp, Zea mays
tctttttcgcgtgggccaaagcctccggcactccaggcgcgatacgcggcgacgttgagtcgttgtgctaagcctgcgacgcgaatgcctaacggggctacatatacttcaagtgacaagcatccaacagaacatacgcccaggtcgacacgaccgacgacacatgctacaggaagtcatgctcgacaagggctaccgctcctgaatagacgccttccgcatagtctcgcgctcctaaggggatctgacagacttgcacttggacaaatgaatcgtcgaggatgaag

SEQ ID NO: 374491 - DNA, 338 bp, Zea mays
cctacgcgtccgcccacgcgtccggtgtctggctcttactcggcggccgtggctctccgatcctcccgggctcttctataaaattgggggctgctctcctccgccttccatggcgtccgccggttgagccacctgacgcgcggcgccctgatcgaaaccaatctgagccgtatatccacttcttgctcagttcctctacttgccaaaaataacgcatgctccgcgccgttgcagctccaccaaccgggcggctcttgatatttgtctggactggaatcatcgatggtctcatcgcatggagccaaaggaagctgagccgtgccctgacagcgacagat

SEQ ID NO: 374492 - DNA, 413 bp, Zea mays
attgttatgctggtcgcctcctgaccgcccggattctggtggacacgcgtccgtttttttctttagaggagagagaagagggggagaggcagtcagtcaggcagaccaagatcagcgtacgtacgttgtcaagtccgggcaccgccgcagcagattcggtccttccgtccaggccacggtcgagctcggtggcggtgagcgagcaatgcaggccggcggcgccagcggcggagaccaaggggacgggcagctgcacggccttaagttcggcaagaagatctacttcgaggacgctggcggctctagtagcagatggtggcagtggaagtcccagtgcgaccgttcctacagcgacacagaaaccttggcctgcggccgttttgtctagggctctgctcggtggcggtaggagg

SEQ ID NO: 374493 - DNA, 366 bp, Zea mays
  unsure (1)..(366): unsure at all n locations
tgcacatcctagggatggaacaagtcaaactttcatttaaggtagactaagaatgatagaaaataacattaccatttatagtgtttaaataggtgtagtatgaaaacatatttaagatcctatgatatgtatttaccatcgcaaatattagtacttaatgcatggatcctcgtaaaacgagcattatttgactggccacgaagttagcattgcattctttgaaggatggagtgagtgacggttttcagtgcatgctatcatattgggtataagcgctctattagagctattacttgctgacaattngattagccaaattgtcaagatccgattgacaaagctgacgcatttgagcttgctgacatg

SEQ ID NO: 374494 - DNA, 416 bp, Zea mays
tcggttttgtttctcattgttgcaggctgacgaatttcatggcagtggctagagttggggttgctgatgaccatagtggaatcatctgcagtggtcgtgagtgcacacttcctgacatggtgagcctattgctgatcagatcaggcttgagaaggaaaatcggcacttaataagggacatcgtgtggttaggtctacgacagatacagataccgcttcgtttaggaacatagatgcttcatcggtgtatgaggtatcagtattatctacattgacatagttatgccacggactggtgatcgtatagcttgaccattgattgatgattatacgttgcttgtatggaatggcacattgtatgcgccctttggtgttggtggtagtttgctgacttctctatttatggtataaaatata

SEQ ID NO: 374495 - DNA, 317 bp, Zea mays
gggacggaatggctggaccgacgcagtgcgtcctggtgtcgtctacgtcgtcaaccagacaccatagaagggcaagagcgacctatcatggaaggtatgaactgaagcagaagcggataggaccgtgacgcaagcggctatttggaggagcaatagaatcgatggctggtaggaggcagctcagcaggtcaggtgatcagttgccctacagactgtactggactctgggggacgccagaatctttgagaaccctatgagactttgtttacacgtgcagatttgactccagcatcgaagagatgtcgtaaaacgaaca

SEQ ID NO: 374496 - DNA, 235 bp, Zea mays
gcccggactgactgggtggacccacgcgtgcgtccacgcttacgaccacgcgtgcggcagacctgatatagctcgggtaccacgtcatgctgccatccaccagcagcagtgcaggcatatggcgcgccgtaccagcctgatcatgggcgcggagctgctcgtcgccgcaagctgaccggcggtgccaccgacgtgcgagcgcatcgagtgcccggcgtacgaggtggtggacaga

SEQ ID NO: 374497 - DNA, 153 bp, Zea mays
atgcgttcatttgttctgcggtcctgatgacactagagggatatagttcgcacatcagggcttggatcttgctagcggccgagctactactccagcagcaatgcttggaaccgacatatctgcactttacggtcgtcgacctagacctgctgt

SEQ ID NO: 374498 - DNA, 328 bp, Zea mays
ccatgactgacgacggagagccccggtctcctttcacggcttcaccgacaccaccccgcataaaagttgggaagagagcttggctgcgagaaccgtatcgacctattcttgtccgaagcaactcgcccctgtcgtgagcagaatgctacagctcgtattcgcctgatctcgcagcagcagcagaagaacaaggctctggccaaggatgggggtcccgactggaacggtcaggtcaagtggagcctcgaccactgcgacaggaccaacccgccgtgtgctctaagggaggaagacagaaaacggttcatggatgctatgcaagccaaca

SEQ ID NO: 374499 - DNA, 267 bp, Zea mays
ctggtgcgcctcctggtaccgctgcggacattaccggtgcgacccacccctccggcatagtgtgcttaatttgtagagcaaagcgagtacataaaatatgatttgcggtagggggcttgtatacaggataatagccggtcctgctcgctgccccttgctgttgagggaactaatggcagacatagtacagtgggtaccatacagaatggctggttagcacgatgctcacaaatgaaacagtatactacatcattgcaggatcatctg

SEQ ID NO: 374500 - DNA, 322 bp, Zea mays
ttcatttgggacgaggagccggtgatggatagggtcgagtccgggagagccctccgcgagaaggtgttcgagcggctcagcacagaagccgccgttcccagggacactcgcgtatccggcaacgttgagggagcgggccccgtcccggatgttggatgggttctcgacctcattaactgagggaactcgtggaactaccagctcagaagttcaggggggaataacaaaaaataaatgatgggatgtcggtgaaggagacaaggtgcccagcacaccatggtggaaaatggatcaagaagacatgtgcatgcgaccatgtata

SEQ ID NO: 374501 - DNA, 383 bp, Zea mays
tcgttgtctgcaaaaggcaaccggaccatacattgctgatgtgaaccagtgctggttgtggttgcagaagcttgtgccacaaaccaatcatgttcatatggtggccgattcggccatatgttgggccatcttgaaatcaagcaatagaatgtgctttgagaatattctaattaaattgcctaatgaaatcatctgccatgcgagcgctctgatgatttcatgggcaggtttgagctaaagggagttgcagcctgcacggcttgattcaagaaggtgcaaagctgctggtctgggcagcgagcgtaacgatggatgcttgtgttgaacatcaagtggaagaagataatgatgatacagagaattaaaagtttggtttagtgatc

SEQ ID NO: 374502 - DNA, 339 bp, Zea mays
tcatgttctccctgatgctttggaatgtgcgtcccggagccgctatttatcggcagtccatcggcagtgtaatcttgagtccatgtgacctcagcggaagccgtgtgccaggtcgtgctcatgtgttgtgatccatcgtcagacgttggtggtggcctcaatctacatcttatgtacactcggatggctgtattgagggtgctcgtgccaatatcacgggagaggtctctgaagctataactaaatttaaaggcacacgggtatttatgagagaaccaggggactggagacgataaagaaactctggtgcacatgactcatgcatgtgaccatataaat

SEQ ID NO: 374503 - DNA, 258 bp, Zea mays
cctttagcttgctctcgctcccacctccccctccctgccgtgttgaccctccctcaccagctgcaaaaccgcgggccgcatcccgcccgcgccgtccaccggcggccacagccgtctacataaaccactaatcgaccactcgccgaaccaaaccacccacctacccaaacccaatggcgtccaacctactctccgtcccgtcccgaaccctagcttcgtcgtcggcgccggccctcgcgggcctccgtgggcgtgtgc

SEQ ID NO: 374504 - DNA, 420 bp, Zea mays
gccaccgcgggcaccggcggcggcggcggcaggaagggtctcgacgagttcgccgccaacgccttcgacgggcctctcagggaggccgtggccgcgctcagcaagcgtcgcacctacctgcttcgagatgaacggcttctagtctccttggccaatggccatctctctctcctgcgcacgcgcgtcgtctgctgcagcagcaagaccccccagcgccgccgcctccgttggttttagcctcagctcggtcctgatcgggggaacactgaggtgttccgtccttctcgaatgtcgcagcaaccaacgctgatgtctcctcggaccattgtgaaaatagtagtgtagcgaatggagtgggcggcgccagcagcaaagcttttgctacgtttgaacaggatgaaaacagtcactgttttaatc

SEQ ID NO: 374505 - DNA, 510 bp, Zea mays
tcttaagctcatccttgtcagtgaacccctgagggacaagctgagggtgagcctgagctgccggcttgtatgccaccccccaagccagcggcaccttgatgcctccaaagagaagagtgtgtctcatatatttgccagtaacttcaaatgctcgcctgtagttctccttttcgaaaaaaggaaggtacgatcatcaggttatctcgtgaacgattccctgaccgtggaatgcacggtcaccatgctacgcgacttggacgccacggataaggagcagcacctgccggtgctaccgccctcggacctgcaccagcacctcggcgagctcctgcagaccagcgatggagcggacgtcacgtttcgtgtctccggggagtccttcgccgcccacaagatctttctcgccgcaggttctcggtcttcaaggccgagttcttcggaggcatgcatgaaggaagctccgcttctgggagatcagagacatggaggctgttgtgtttaaggccatgc

SEQ ID NO: 374506 - DNA, 255 bp, Zea mays
ttggatttttccttcagaaaccattgaaccagtcacgagccaccgtcgctggcctcgcgcaacatgctgccgcctcacgtcgagatgccgaccaccagcagggcggcgggcatcaaagctgaacgggaaggtcatcgtcctcgcattatcagcagcagtagcagccgtagcccgtgcgccacgcgggcgccgcgccggcgccggcgtcggggcgcggtagcggtggcggtcccggccccgatttgctggaggagg

SEQ ID NO: 374507 - DNA, 282 bp, Zea mays
tcgctctttctctcgccgacgcatggaggctccggggctccacggtcgactacccgctggagtgtggagcgatggcaggggaaacactactcaccaggagccctactgtgccggcacgactggctcacgcccgttttttttccgcgtcgatcacctcagggctctccgacttcttcgccatcagctgacggccattaggaggctgttgaacgatagcagactgcgatcactaacggtgaaccaggtgacggacctttcattgctggcaatcggtctacggct

SEQ ID NO: 374508 - DNA, 360 bp, Zea mays
ttccacgcgtccgcccacgcgtccgcccacgcgtacgcccacgcgtccgcccacgcgtccgagattctattgtccttttgtttcttgggtcacttcagtttatatgtatttaacatgaacaccagaagcatctatataatggactccatgattctaccatcatggtttaagggcaacgatccaagcatgcattatattcacaaaatacataatattgcaaataatatgaatgttgccatggaattggctaatcctacatggaaggacgatatttatttgtggcgtcgtatagtaccatcatgggtttcaaaaacatttaactgggatttatcaggctttcttgttatcaactttatgcac

SEQ ID NO: 374509 - DNA, 510 bp, Zea mays
ggttatcatctgccatggcgaaccgatatgcccctggagcacgctgcgtgggctgatggagctgtggcatcgtagacagccgacggagcccgtggaggcgttggtgggtgcgccagccgaggagtttcgtcatggttgctgggctaccgccgccacccttattcggcgcccggcaccaccgtcgtcgtgcctccagagctgccctcctgatcaggttggcaaggttgactgcaccgccgtggagcctcaactgcactgcactgtactgctccgctcgctgtcgtccaatccccagtcagtctagccgtttaggatggaacagaggaaagaaattactcctacagtttgtttttacacattttttagactttcttttggaacggactcgttttttaaacttttgtaaagatagatagagagggaggagaagagtttgttgtccacaagtcttgggcaaacgatttagcacctttaacccatcgtgtttactctaaaaaaaaaaaacaaaaa

SEQ ID NO: 374510 - DNA, 349 bp, Zea mays
tgcgttccgttggaggccatgcgcgccgtctgggcggggcactggtactggaggaggttcgttagggacgccaagcatgaggttcaggtgaactgcatatagggaaaagtgaagtgtggttaaaactcaagtgtttgctggtaaattatgatgtttcagtgtgccgttagcctcgggctccctcagtccctcgacacaaattatcctgtctgcctagagcgcgtgcccgggaggtctcgcttcacctaactgggccacaacggactgtcgtgagagcccaactaatgttttcggccagcataacgattgcaggattctcttggcttgttttttaaaaaaaaaaaataaa

SEQ ID NO: 374511 - DNA, 363 bp, Zea mays
aggagtccctctcctgggttgatcctcttcacgtggggaacattgtggcgtcggcgagcgcggcatctacaatggctctgcggaatgcttcggcaacggtggagcgggtgcagccttgggaatggcggcgtcgcctctgggcgtgctttcacgccgcagcctgaacgcagctccggtgtcctcgccgcgagcaagcgttgctccggcgaccaaacgcaaccccgacgagcaaacacaactcccttttgatgatccattgatgtcgcagcagggactatttaccataggaggctagctccattgatgctgctcactatatggtttatgtgtgcaccacataatcgatgaaatgcttataaagac

SEQ ID NO: 374512 - DNA, 392 bp, Zea mays
aaaccaagaacttccgacatgctgcattgggggcacaggttcagtacacggcatccattccagacgacaataagcaaccacctcacaatcacaacgcacgattgacacctacagcaacagcaagagctacacagtcttgacaccacctacaagctaccggtgcttctcagttctcaccgagtgccagttctaccacggtcagacggtgtccaggggtctcgtcatttccagaacagaccggagaagccacctggctgctgctgctgcccatggccgccaccgccgccgttggctcctgcgtgcggcgggctcggcggggcgccactggacgactcgcttaggctcaatgtgcctttggacggggggctgctcggccctgccgccacgcccgt

SEQ ID NO: 374513 - DNA, 486 bp, Zea mays
gcagcagttgcttgtgctggagaagctggccaacgaatgcaaggaggaggaagccgcggcgacgaagccgtgagggagtgaagccagctgcagcggcggcggcggcagcaggcagcagccgaggtcgaggtaccacacgatgatgtcgttcctgagcaagcacgtcaggcggtaccagtccctcgacgacaagatcgacgacctctgcgctagaatggaggagagcaagaggagcgcggggcggggcgcgggagaggagagccagagccagagccagagcgcggcgctgggccagttcctggaggaaacgttccagctgcagcggttcatggtggccacggggcagaagctgctggagacgcagtccaggatcgcggcgggcctcgcgcgcgatcgctgctgctgtggcgacggagaagacggcgtggatatgaagaggctgatggaggtggcttgggccctgctgagggacgtgcaacgagggct

SEQ ID NO: 374514 - DNA, 465 bp, Zea mays
cccacgcgtccgatttagatggctactatcctttgcaattgatcaagaatggtgagctattctaaggaagcttctgaacaatatacctgctgtcctagagtgtcacagatgtaagaaccatgaccaaccatcgcttactatgctttattaatgtacaatacattagtaattctaaaaatatgaggcaaattgaccacaaaagggttgagatgattccataatacttatacgaagattttcctagcaaggtaaacacattattatctttacatgttggatcgtcaactcgtgcctttgatgcagggcaaagatttgcgcttagagaaggaggaagaacggtcggtgctagagtcatctccaaagttcttagctgatcagtttccactttcttctctgtagtctggttgcaactgttgatggttagcacattctttatcttcaattattggaagaaacatttttgcg

SEQ ID NO: 374515 - DNA, 471 bp, Zea mays
cccacgcgtccgccgacatcgtccctggccctgcctccccgccgctgccgcctgccgcgagcatccttcgtcggcgtcgtccccggctctccggccgccctgctgcgatcggccgctgcgttggtatgtgtttaaaaggtgagacgaggcgttcaggggactactggatccacctagatgcctaggcgatcgagaaggcgctactgttttccatggtaataaacacaagccgaagaatgcacagtatgcagaagtttgcggatgtcaggtggcactttgtaagaaacaagaatccattatgcattgcagggctatggaatgagttgaaaacaggaaccccacacagcatcaaccagaagagacgcatttgaggcattaaaatagccccagagaacaggtcattggaaggtcagaaatggtaccaatccgtttttttttgtctgccgatatttctggcagagtcgggctttg

SEQ ID NO: 374516 - DNA, 406 bp, Zea mays
gatcgcgagcgtccgcccttttttttttttttttttttttttttttttttttttttttttttttttttttttttttttttttttttttttttttttttttttttttttttgtttaaacccccaaaacccggacaaaggggggcatatataaaaatcccccgggtaaccccaaaaggggggggggggggaaaccaagcattattccccacccctaaaatttcccggggggggaaaaaattgggggatccaagggaatttgaaacccttccccgagaaagcccgcagggaactatttttgggggggacccccccccctgggggggacaaaagtccccccattggtttttggagtaggcttgggggggcttggcctttacaccgccatttttttggggccacccttttt

SEQ ID NO: 374517 - DNA, 510 bp, Zea mays
tccacgcgtccgaaaagttatctccttttgaaggtagatattgcaaattcaagcaaactatagtaaaaatagaaaatatgaatggatcttgcttgggtacggttgcctcttgcaaactgatactctttgagtgaaaaggggcaaagccttgcctttctgaaaatttttgttcccaggtgcagtttcagcaaatttatgagcgcaaactaggtgctgagttccacaatgttagcttattgttgcatatttgattttttttctcctgcatttcttatcaagatttgcaatcctgaagtttccttttgaatgaagtagacacaaaaaaaatcaaaagaagttcacatgagtactgtttttggcgagaactgttcctttttccatttgacactagcagaagtctcttactctctagagccccagatgaagacatcatcgactacgtgtgtatttcctaccagccagcctttaaactttaatcattctctcctcaagaaccacacaatacagatg

SEQ ID NO: 374518 - DNA, 486 bp, Zea mays
gccagtcgtacaatcctgctgtcaggtcccgcagagctctaccaacagatgctagccagagcgcttgcccactattttcaagcaaagttgctcttgctagatcctactgatttccttataaagatccataacaaatatggcacaggtggaggcacagagaagacatttaaaagatcaatctccgagacgacgcttgaacgtgtgtcgggattgtttggatctctttcaattcttccacaaaaggaacagcccaaaggaactatacgtagacaaagcagcatgacggatgtcaaattaaggagctctgaaagtacaagcaacttgccaaagcttagaagaaatgcatctagttcctctgatatgagtagcatggctttacaaggtccttcaactaatacaggtcataagatgttcttttgaaacacttgtagtggcactggcacatgattaagaattcatgtccctggattctcaatttcctgttcg

SEQ ID NO: 374519 - DNA, 477 bp, Zea mays
cggacgcgtgggctcctcgctcctcgccatttctctctcttcccctccgcttcgcccaccgcccgctccgaaatctgcgcgccgacgccgccggctgcccgtggagagcctcgaattagagcgcgttccgtcgagaggttttcaagcaactatgtttgagtttggttgatatgatactcattcacgttggggatgcagaccccccctctgtgggggttgattgaagaagttaactgtacacttaggagaacttgtgtcctactgaaagtttcttggtttcgaggcaagtatgtcagattcaaatgtgaatgtcttactaagagtagggctttggtggcatagatggatgaactgattgtcaacttcaacaagttgttgattacaggctcttgagctaccaagcatgtcagattcaaatgtgaagtggattgatgggcttcagttcacatcattgtactggccttcacccctcgatgc

SEQ ID NO: 374520 - DNA, 217 bp, Zea mays
gcatgcatgtgtatgtggggggtttaaactttgaacaccaggatttacaggtgctatatctaaatagagagagacagcgcgcatcagccgtccggttcttaatccggcggctccgcgtcgtcggagaatatggagaaacgaatcatcttcctcggaagtttgaacgaaaaaaaaaaaggtgcatcataacaatcagcaccgaacgaaccgagaccga

SEQ ID NO: 374521 - DNA, 467 bp, Zea mays
gtcacgcctcacacccaccactctcctacttgtccgcctctccgtcgtctccctctccgcgcccccgctccagggcaactctgccatccacgggagatcggtcgaccgaccggcctatcatccatggcgctcgacgcggacctcgacgtgtgcagcaagacgccgtcgccgtcgccgccgacggtcgactagtcggcgcgcggcgggaggcggaccaagcgccgcgccgggagccccgacagcgaccgcgggggcagagtcgacggcaacgaacagcccgagcaggaggagtacctcgcgcagtgcctcctgatgctctagcacgggctccccggcgacggggccgcgccgcctttcggcggcggcgaaagcgaaggcgatccagcagcagcatcagcacggccggtacgagtgctccgtgggcggcaaggtgtacaacggctaccaagccctgggagggcacaaga

SEQ ID NO: 374522 - DNA, 400 bp, Zea mays
gatattcttatccatcttatttcaagaaagcatgggatacgatgagagcagataagaatgctaatgtacaacgagaaaagagatcacagaaaattaagagaaaaggatcacgacttaaggaaccatatcatgtacaagccatgcctaggcataggggcactgaatttcagcgatcacttactgatggccaacttgttaacaggcagtttgcatctcccagcaacgatggtcagggtatcttatagcataagactacacctgatgcatgaactaatcctgacaatatgagcagatcttcttcttttagctcgaagacacaactgagttcagtagaacaagctatcgatacaaaaccttgtggagtttatcatgagaatggccatgggaagtcataggatac

SEQ ID NO: 374523 - DNA, 343 bp, Zea mays
agactctatgtaacttgaataataaggtaaaatgataaaatattctttgaacgaaatgttgctgatgcatacaaatatccagaaataaggtagatccaaacaaattaatggcactaaagactgaggcacgagaaaaatgacgtccatatttgtggcccaccaattcacccatgagaaggcaaaaacataattccaatattacatctttcacactaaaagaacaagaaaactgggcacaaggtagaactacttgcagctatcacttgagcctctctgaatgaaatatccagctatataccattaatgctttcattctgagactgcatcatgatgctgggcaatt

SEQ ID NO: 374524 - DNA, 462 bp, Zea mays
cccacgcgtccgcggacgcgtgggttcacatcttctctcctccctggcaactgcttccgtcatctccaccaccatccccacgttctcctccctccgcctctcgctctgcgcacatccccatgcccatgccgagtgcttgcgcctcaccgcccccgtcgcagccgcggccgtggtggcgtcgacgacctcccctgactttcccgccgtgggcgccgtcctggggaagcccacagtgctcgtgggtagtggccgagaagatcggagccgcggggttcatgctgaaggaggtggtgcgatgtccagctcccaggtcgtcgtcctcacgctcctggagttctggtcagtgagatgttcgtcttcgtgctcagcctcgtcctagagtcgtcgtgcaagcagcgagagcagcgtgggtctcatcatcagaatcacaccaacaggataagcctgtcattggtcacgact

SEQ ID NO: 374525 - DNA, 281 bp, Zea mays
aaggcaaacttaagttttgaaaaatcattattcatgggcgacaacatttttgtaaagagttttacaacaattttgtacattttttgggggccttggaaccaaatgaggggccagggttcggttaaattaacaggcacgttactggtttatcaccagctttaaccacacgaatgttccgaaaaagaatgaaaaaggggaataattgggaagggatcacaggtttaacgaacaaaactgcatggggttgtttattttttttgaaactgaccaaaaaccatggc

SEQ ID NO: 374526 - DNA, 321 bp, Zea mays
gatagggggaaaagttggccaattcactcatacttcaacaacgtctagcaaaattttattcaccagtgattctaccacatacgctaaactggatctaaattatacacaatcatataccagcacatatttgtttcagaatttacatagagtattatcgatttgtagctacctaaagataaggtaactagatgatctatggtgcactcagaatactatgatgcaagcagcaagcgtattcgcagtcagattggtgtcttgaaaagttgatgtgccaaagattgactggaactttgccaatgaattccgtagccattgcaatac

SEQ ID NO: 374527 - DNA, 438 bp, Zea mays
cgggcacgacgcgggcggggcggggagccaaaatggcgctcccgggcccggcggcgacccgcgcggcggtgaggctctgccggatcgcggcgagcgcttcctcgtatttgccgtctgcggcggccgacggaaggagggagctggagctgccgttcgcgctggtggcggagcggcggatggtggtgggcggtcaccgcgggatggggatgaacgcagtgggggcaccgcccggggcgcgctttggggccgccagcgagggggagaacacgctggtctacttccgtcgagccggcgcacatgctgccgtacgcttagtcgagttcgacgtacaggtcacaaaagatggctgcccaatcatgttacatgacgattttatgctaacacaagggaccggcgctgtacatgaaaagcgtgttactgatcttctcttgggagatt

SEQ ID NO: 374528 - DNA, 329 bp, Zea mays
gcctaccgtactgcctgccatatctcttgcgttgcctcttcgtttgcctctaggggatcgtctaagaggaatcgcaaaagggatcgtataatgcgacttaaggtacccattgagcacaccgtggctgacagccaggctccctacgaacccatcctgtgactcaatctctgcagctatttctgcagctcgttgaccatgaacatgtccttcaacatccactaggagatcatcacggagcaggatccggccaagctgcatgcctactttattgacagcattatgaacagcatcgacaacggcatggaccccgttgttgatgccagtgacac

SEQ ID NO: 374529 - DNA, 89 bp, Zea mays
aagcaaaaatcgggagcgatatcatatcacagctggtcatattatgggaagcgcctccaaaatgggacaggggcaaagacagaacacag

SEQ ID NO: 374530 - DNA, 246 bp, Zea mays
tctcttcttttttttttttttttagaccggaacgggtgactcgactactggatgggccccaaaaacaatcatatcatcatggaacagcacaccgacacaacaaacggatctagccataatcactaagcgcgcatatgttaaataaaaaggatcggcgcaacctacctatctatcaattcatttattaaaacaataattaagctatcagaaatatgaatcggcttgcccgtgactaaatttgacgcg

SEQ ID NO: 374531 - DNA, 245 bp, Zea mays
agcttaacaaggtcttgcaaagtaaccataatgccaaaaacattagagttgaaggctagaaattttgatcacacattacatgtatgctatgtagtggaaaagatacatggcacatactgaccaatgcacatgtatgctttatacaaaaaatacaaaaccctatagctgaagcaagtgttgtgctgaccaatgcgaacaggtgttgcacatatcaccattgtttctttatatcatgaaggctcaac

SEQ ID NO: 374532 - DNA, 121 bp, Zea mays
agaaaccaaatgtttcgagaacagctcagtctttaaagcttgaaaaacaccggcaagtcaaggtgagccccatcattgtcaacaggagagctatgacatgcccacttacaaaaaccgtggt

SEQ ID NO: 374533 - DNA, 344 bp, Zea mays
  unsure (1)..(344): unsure at all n locations
tntttctttttttttttgaaatactaaatctatgtttgtcacattattaacatgatcatttttcacgaacgacgaaccaatttatgcatacttaacttattcgttctctaaaacatttttcgtaaatcctgcattttagacctaaggtgtaccatattacgcaattatttcacatgattacattatcggaggtgctaaggtatttttagcaaacatctaacacaaacacgacgcgcctgctaaacacgagaattattacgactaataagtctagctaatccaatcatcaaataaacttacaaaaattataaatcagcttaccagcatcaaacgtgactcaatac

SEQ ID NO: 374534 - DNA, 268 bp, Zea mays
tttctttcttttttttttttttttttttttgttaagggctaattggacaaaaggaggaccttatccagctggtaattatgtttttgacaataacgttcaagcgacctaaatggttgctgtagcttctttcagggaaaaaaatggttcctacagattacagaacatgctccaagtatacatagataagcaagctagcactacacaatcatactatggtaaatcacctttgtatcccagccatcaacaacaaatacattcaaacaaaagc

SEQ ID NO: 374535 - DNA, 143 bp, Zea mays
aataaatagggatccctgcttgccattcatttggtggtctggattaatcgccgctgctttgcaattgcaaccagccagcgcaaaaaaaaaaaaaaaaacctccggttttactaattttaggacggatggcaacgcctttttct

SEQ ID NO: 374536 - DNA, 295 bp, Zea mays
ttttctctttttttttttttttgaatcagagagaatgtcatcttctcctagcaacacgccacacaaaattagcaggagatcgcgatataacttactcttttccatatactactatgagcagttataagaattatgagccgctaccaactaggaaggattttaccagatcaatgacaaactcatcactcctcacccaaccaaggtaaaaaagagaacgaggaaagcaatagcgcgaattatgtaactgacgatttagtgacggcaataatggcgcgccgggtcggtgcgccgcccg

SEQ ID NO: 374537 - DNA, 234 bp, Zea mays
gtaccccatcagaaacccaaaatattggattagtttggagcccccttgacacctaaagttcaccttgggcaacaatttacagtttgtaaagagcaggggtgagggaggcccggtggcaacagcttttgacaatgaataaaccccattgaatggggggaaatcagaccaagtcattcacacatttttacaatggtaactatggcaacttttggacaaaaatcacgatttcccccc

SEQ ID NO: 374538 - DNA, 347 bp, Zea mays
gattccagaatttgaccagtagaaaaaaatgaaggctaaccttacaatacaaaataaacttacatcttgtgaggaacggtagattgattctatgaaacaaatgcaagtactgtgagagtcttgcgaggaacggtagattgcttctatgaaacaaatgcaagtactgtgagagtatggcggcaaggtggccgggtcggggtcgacgcagtttgtgggcctcatacgaagaaaaaggtatctgagaagaacaatgaagatttttgggaacctaccattctacagggtggaaagagatggaccagattaaattctgagaagaacaatgaagatttttaggaaccaaccat

SEQ ID NO: 374539 - DNA, 217 bp, Zea mays
agggaacaacatgtatttttgatggggaaggacgagctgaaacatcctctttacataacgaacacgaacagttggcggggtgatgatgagaccaccggtcattgaccaacaactaggtggaaggaatggatgctactattagccggacagccaccgatttgagtaaaacctttgcccaagacttgagatggatgaccgcgtgctgcaaagaggaacc

SEQ ID NO: 374540 - DNA, 500 bp, Zea mays
gttccgctcgtctcttctggaacaaccgtccgtcgctcgtcatctttccgccttcgctacgcaattcctgtccacgctgcgggccagttgtgacgaccgcgaagctcgtcagagaaagaagagaggccggcgggcgggcggcgatcggagatggcgccagagaagccccggaaggagcaggagcaggaccaggagaaggaggaggaggaggagttgatgctggaggatggaggcatcgaggagagcccgcgccgcagcttcgaggactgcggtgattccgacgaggaggacgatgacggtgacaacgatgaggagcgggacggcgacggcgtcggttcgtcgcgctccttccagtcccataagtggccggagagctacagggaaacaactgatacttacacaatcgctgcatcaccgagctttggttacttgggcccttctacaagcaaatactcactcctcgatcttggtcgtagcgggctggggtctgacctgaagtg

SEQ ID NO: 374541 - DNA, 531 bp, Zea mays
  unsure (1)..(531): unsure at all n locations
cttgcacaagcaagggaagggagggcacctctaggctccagccatggcgcagcagctgctgctcctcctccccgccccttccagaactttcttgaaggccctcccctctccctttctctcctacctcccccggcgccaccttgtccccgttaccgccgttcccgtagcacccggcatccggcggggcctgctccggtacgcgacgaagcgttcaagcttggtcgaagaactggagattgccaaggagaagcagccgcatagcaggcgcgccaatggcatcttctggatcttgctgctcaatttcggcatctacatggccgaccacttgttccagattcggcaaataaaatcactatacctgtatcatgcattcccttcatggttccagtttgtgacatcaacattttgccatgccaactggaatcatctttcaagcaatttattctttgtgtatatctttcggtgagagctgattgctaaaaaatgaatgctctgctctggtntgcacttaaaattcagtaaaggatgcct

SEQ ID NO: 374542 - DNA, 541 bp, Zea mays
ctcacgcgtccgcgcaggcgagtgatggaattcagccctgccactggcgccgcccctgccacaaacatgctgcagccccctcagccagtgcaattgtctgcatcggtgcctgtcaagatggatgactctctcccagcacagccccagactccaatgccagtgatggtggccatggatggctcagagcctctcaggttgccagtggtgtcgcctcaatcaggagtttctgatgctgagaagacttgcctgactcctctgtttaaggagatgctacgggcagcgataaatgtcggagcaaacccatttggtgcaaagcttcctgagccgccgcttgggttggccatggaaggggagaagtggcggaaacagcggattttggagctggaggtgtacttgaagaggatcgagctgctgcaggatcaggcgaaagcaacccttgaggagctcaagtcatcaacccctgggtcttaattcatgataagatgagatccgcttggtttaggagtcttgctctgattctaagggagatgtttaggcattt

SEQ ID NO: 374543 - DNA, 490 bp, Zea mays
tttacgcgtccgccagtttgcatagtgattacttgttttattggggtctgaaaccctgaacctattgtaaaagtgacttgaatgaactttggtttgtctgtggtggaaaaaaagtgacttgaaagcctgtttgtctgggacatgtattggttgctatatgtttgactctagatgttggagataatttggcactttcatctgcccatctatactagtattcctatggtttatgataaaactctaacctgacattgcaaacattcttattcagatttttcttcttggtgctgttgcgaaacttggtgcaaccgtcgttacgtattcccttctagttgttaaggtgattaattattggattggtgataaccacagttgttcacttgcatatttgagtgcataccataaatcaagccttttcttcgtgcaggcaagacttcaggcaaagcacatgattaacgatgacaagaggcatcgcttcaaaggtacactt

SEQ ID NO: 374544 - DNA, 513 bp, Zea mays
gttctagggttcggtgcccagtcgctgctcgcgtctccgccctccggccaggtcactggcgctaggaggcgctaaatcgagttggcgacgcctccctcacccgtccccgatcgacgtcgggaggcattcctggcggcggcggcgtcggcgtccccgcacgcgcgcactactgactcatctgtgcagatcgagccgtcagtgagcatgacagatcttcctttataagaagagttgacaatgtcaatggacattcctagggggcgtttggcttgaagataatcactctcaaccagccaaacgttcaaaattccaactgattcaggaatccaatggaatcctcaatcaaagaatcaaggagtagagctgaagaatcaggaagtggagctctcccaaagtgggtcctatgttgtcaacctaatccaagcaatagctgcaaacagctcccttgaacatatgtattcatgttgctgcatgtactaattctacttctatcttttggttggtccctgaaaa

SEQ ID NO: 374545 - DNA, 99 bp, Zea mays
tttacgcgtgggttaattttcttagcgcaaatgtgcgaaactgagttgtaaatgaggttatttattcctacgattaagtatgatacaagacgaataatt

SEQ ID NO: 374546 - DNA, 489 bp, Zea mays
tgctctcttgggcatacaccggacgtctgacgtggggggcgtaaacgacagaaccacgtttcaacaccgtcgatcaccggtacgagatggaccacgtgtctcacaactcgaactatggatgtcgactgtgatgtgctgtacttaccacgggacaagtggtgatacatgacccttgtaatctgaccagacacttgaccctctacctgcacgaagacaccaccatcctctgatcccaggacgaaagagagtggccaatcgaggatccgctgccttcttacagactagggagggacaaggaccgatggaggtacgatagcttaatttgctaatagaacctgactgcttggttagcactggcatcaacgctaccatcaatggtgaaggcaccatgtggtggctcgagaagcacaagaaccatgctaagtacactcgccgctacctcatgtggctgatgcactagtacaccatgtacatctagaacgtgactct

SEQ ID NO: 374547 - DNA, 554 bp, Zea mays
  unsure (1)..(554): unsure at all n locations
gtttggcacgaaaaacataaagttggcggccggtgtggactttgaacatgacaaaagtgccatgacaaaactgtttttctgatttttgtctcatctttcacataaaatacaaaagctactcagctgcgatctaaatgaaatatctttcccaggttggagctgtcattggtggacttgatcagtacttcaattattataaaatgcagctattgctctaaccttgctgtctatagccttacctttggtgttgctctccatgctgatcaatcattgcttcacttttgccatacatgtattttcttccgccacaatgcaagtctcgctatatctttcggcgtgatattgtagatttaacctggcgctcctttgataggatctaagtttaaaagtttcatctcgcttctggaaaattgaacgagataaaactacattaacgtccatttgagtgatcttcttttcaccatatatttccggcatgtctgatgctncaccctttgcccttgcctaggcagttgagcttcctttgccacatgttctagaacatggtctattac

SEQ ID NO: 374548 - DNA, 239 bp, Zea mays
gcgtacaggcatgacttcaacaaggggcgggctggtctagggcggcgcggggacccttggtggactacactcaagcggaggcgatcagcgcttgggagtcaggcatgccaccttgcggctgtgctcaggcggtgccttgcgtgaagcgctagggagtcgggtgtgcgacaggcggagctcgatcctcaagcatgagcggacgatgctcatactacgctcacacaggttcagggacaggt

SEQ ID NO: 374549 - DNA, 477 bp, Zea mays
cccacgcgtccgcccacgcgtccgcccacgggtgggcgcggtctggcaagctcgaacttccactggaagatgatcctacctgtgggccagcgccgcctacaacaagtgcgatgactaccgggacgggtgcacccgctggtgctccagctagacgacgacgtctccgacctgcggccgctggtggtccgcctagcgtcatcggcctacgagaatgccatggcacggctgagccgcatgctcatgtcgctctccggcctgttgcaccaaccacaggcccaggacccgctgcgccgactgggcccgtccccgatcgcggagcggacgacttcctccgcctagttgacgcgcacggcagcttccgcgacgctatggacgcgctcgccgagctccaggttgaggcccgagtcgcgctgcgcaaggaggagccagcccgtctcgcgtaggacgcgcgcgctgcgctggtccgcgcgggacctc

SEQ ID NO: 374550 - DNA, 480 bp, Zea mays
cggacgcgtgggtcgcctcgctcctctctgtccggaccgagcagcaacggctgagccctggccgagccgccctcccccgatgtgcctgcaccgaccctagtgccactgccacgcccggaagtggctcgatgcccagaggtttttacgcggcgcgcggcgggtcatctcacagtcccatatgcaagagagtccggagcggaggccgggcgggaccgcgggagggggcggccggggtccggtccggggaggcggggaccagggcaatgcacaacgcgccggcagtgaccagtagcccactatggcaccagctcctcgcatcgcatctcccctgctaggcctcctagtcccgacaggcaattgaaaaagagaattgatcttttttataggcgaagtgttgaagatggcttcggtgacggaaatgtcttgttagcatcaagcaagtggcgacatcacaacccctacaagcttgtgccttaaaac

SEQ ID NO: 374551 - DNA, 499 bp, Zea mays
gtatttagcctcgcggcctcgcctattgttggcacatgtcttcccgcggccgttgtttacgcagaatcctcctgttccactcctcgccaaatgtcttttgttagagttcatatgaaatttctggtcgttcaattttagatcgatttctttacggcgtattttgattgcatcgcgaccggctccggagccatccggtcataagaccgtaccaacgcatttctttggtttgaggtgcgggacggcgggcgccgaacggtcgtgtgccgtagatccaaagtcgcgggaaatctctggtcgaggagtcgatttggatccgtttatcgctagtttggtcgtcgttgatctgaaaggtggagctttggtcgattttctcttccagaagcatttgtgtttctgaggtgctaaggtgctatatctgaagcagccgacgaggagctgagtctttgattttttttttaccaatttctgtcgtcgtttggtgatctgatccgatggaggc

SEQ ID NO: 374552 - DNA, 256 bp, Zea mays
  unsure (1)..(256): unsure at all n locations
gcgttctcgcgtgggcacctagctcgggcgggcccatgcatcgcgttatggtgtaaggagaatcagcaccacttgtttaacctccactcgaaggacgagtagctgnccgccgatgtgtactggtactcaaggaccgaggtggtcaccgccaccgacgagggcgtgtacgccaggtacactaaggaggtgaaggtgcacaggctcaagcacctgctcagttagaccgttaccatcctcgccggcgccttggcactct

SEQ ID NO: 374553 - DNA, 552 bp, Zea mays
  unsure (1)..(552): unsure at all n locations
caccaaccatccccgccgacgccatcaccatctcctctttatccgaacaaccagttagcaacaccctcgtcatcctgtcctcctctggatccgatcaacctgttagcaacaccctcgtcgacctgtcctcggcgaccttctctcgctccgtcgccatcctcccagacccatgcgccagccgtggcggcggcgaccaggacagggacgcgccgtggaaccggcgcccacactcgacggcgccatccgtcgtgcccgtcctttcgtcgactgtcgtcaccgctgcttcattcgccgacggcagcagagccgaggccacgagccggcggaggccgacggcggctgcgcggcagcagtgctcgtcgccgcgctctgttttgtccgtccgcgcaccaggcggcgttgccccagccccagcccctccctccagcggcggcggcgatgacgaggccacgagccggcccaagaggaaggcgcggtaccgaaagtggngcatcgacgacgagcgcaaggttctcgctaccctggccgagcttcgcagggacaacatgggcg

SEQ ID NO: 374554 - DNA, 450 bp, Zea mays
cttcctatatatctatgtgtatatctcatatatgggtaaactatccatgatcaatccttatctgccacacgctaaatttagatacatttttttgttcccgctgatcggcaacatttgccaaggtattaataaagaaaaaacacatgggtatcaactatttttattcaaccaattttcttttaaaagagtatttgtatcatattattgctattaatactacaatgattatatgcgcgcgctggcgctagctcggtgactagtatactaagacggtaggtcttcaagcttgcactgctgaagctttaaaccatgaactttctctaatacttactttgcctttgcttctgtagagtaaacaagaagactatcaaagcgatgaaatgagaaaaggctgaagcttaggtgaaccattaggccggatggactttcctattttggaatgaacactta

SEQ ID NO: 374555 - DNA, 354 bp, Zea mays
tgagtctttatcaattcaatcctgcaagatcaggtgcaaatgctcaaggattgggaatccaaaatgagggaggaaccagttcttttaacttatccaaccttggagggagtaaaagcgttcctgtaaaagatgtgaaatctggtgtagcaagtgatgcattaaagccaaatggaagtgctgtttcagctgttgctgatgctgatgtatatgatcctgatcaacctctttggaacaatgagcacccagaagcatcatctactggctttataaataaagatgttggaccgaggaatgctgaatcatacggctatgaaatggggcatgagcattcaaaccaagttttggcttatgatg

SEQ ID NO: 374556 - DNA, 316 bp, Zea mays
atgcgttttctttcccgctcatatctactgactgaccgtggggggctattagcacatgccggggggtatactgggcaccggtgtggagattatacgaattgcgatcgggtgttcatgaggtgcaagaagcacccattccacagttgtggctgtggcggttttagttacttggctccgcaaccctactgtcttgctggatgcctggcactatgtcgacgcatggttgtctccaaccacgaatagcgagataccatgttctccgaggtcgatgtccccataatgagcccggaggaagatatactcctcgggcgagtgt

SEQ ID NO: 374557 - DNA, 171 bp, Zea mays
ctctcatcttggcccaaccgagcccaaacctctgcgggtggttctccgtcctctcctagtgcacacggcagacgccgccgcctggggagaggagaggaggggaggggatctgatccaatggaacaggtgaaagtgccaattctgtacgcgcttggggcgctcgacacggtg

SEQ ID NO: 374558 - DNA, 351 bp, Zea mays
cccacgcgtccgcatccatctactgcgccgaaggagacgccccgccgctccggcggcgtacgcggggagaggagaggagatgagacgaagtgcgacggggtgggcatgaggtgcaagaagcacccgtaccaggtcggcggcggtggcgtctgtgccacgtgcctccgcgaccgcctgatcgcgctggaggccgcgcagaacggcgacgcgtcgtcgtcgccgccgccgcccgccgcggcgcccgcgttcccgaggtcggtgtccccgtacgtgtcccgcaggaagtcggacacgtcgggcgggggcggcgcgctcaggcaccacccgagcctgctcttcttccggacgccg

SEQ ID NO: 374559 - DNA, 506 bp, Zea mays
tcccacgcgtccgcccacgcgttcggtcgtgcggggggcgcagcaggatagatcacctgagcatgttcgtcgcaacctcaagatgctgctaggaagaaggggccgcgagtcccacggaggcatgcaggttccaattactagcgctcgcaattctccacacatctgacacttccaatcaggctagcaccagcaaagcggctccaggcacctaagcacgaaggcacattgaagatttgacgttcaataaaatacagaacctactcctacagactatgagaagtagagagcaattacaatcatgaacaacaatcaaatgaggcaacgactagggctttctcaattacgatcaatgatggctagtattctgagtggaaggatgaacgatgctcctcctcaggaatctggatcgctgtatgatggcgatgatattgagggctctgacgatgagatggtcagtaaggaatccctagctgataaggtgtacgtagccacaccccccgacaatg

SEQ ID NO: 374560 - DNA, 374 bp, Zea mays
cccacgcgtgcgggcgggtactacggcggcgggggcggtcctgacccaaccgggcactggccagacggtggcagatacagctacagccgggacccggacgggcagaactactacgaggactaagagcccagcactgagggcaacccaaagagacggcaccagctggtgtccgatacgcgacatggacgcgtacgtgctctcggagccaacagcacggaccacctggtgagaactgatccataacgaacatggagatagggatattaaagagcaccaccattgctagcgggcacaactagactatcgtgctatagacctggcgctagatcatgtgcagctacaacaacttggttgtgtacgcctaccggtgcaag

SEQ ID NO: 374561 - DNA, 124 bp, Zea mays
agagaccaagcggacgaaatttcgagttaacactcaataatacaaggtgcacatccatttacaaaagaagttccatcagtgttagcttcaagccttccttctgcgcttctttcctgtagaagca
